United States Patent Application Publication US 2018/0305689 A1 - sequence listing, part 53

SEQ ID NO: 734213 - RNA, 19 nt, Artificial Sequence
  Description of Artificial Sequence: Synthetic oligonucleotide
  Antisense strand to SEQ ID NO: 734212
uugcaucuacaccacaacc

SEQ ID NO: 734214 - RNA, 19 nt, Artificial Sequence
  Description of Artificial Sequence: Synthetic oligonucleotide
  Sense strand starting at position 875 of SEQ ID NO: 586653
aguugaguuccacaaguga

SEQ ID NO: 734215 - RNA, 19 nt, Artificial Sequence
  Description of Artificial Sequence: Synthetic oligonucleotide
  Antisense strand to SEQ ID NO: 734214
ucacuuguggaacucaacu

SEQ ID NO: 734216 - RNA, 19 nt, Artificial Sequence
  Description of Artificial Sequence: Synthetic oligonucleotide
  Sense strand starting at position 989 of SEQ ID NO: 586653
gccugaucucagggaagug

SEQ ID NO: 734217 - RNA, 19 nt, Artificial Sequence
  Description of Artificial Sequence: Synthetic oligonucleotide
  Antisense strand to SEQ ID NO: 734216
cacuucccugagaucaggc

SEQ ID NO: 734218 - RNA, 19 nt, Artificial Sequence
  Description of Artificial Sequence: Synthetic oligonucleotide
  Sense strand starting at position 1001 of SEQ ID NO: 586653
ggaagugguucccugacau

SEQ ID NO: 734219 - RNA, 19 nt, Artificial Sequence
  Description of Artificial Sequence: Synthetic oligonucleotide
  Antisense strand to SEQ ID NO: 734218
augucagggaaccacuucc

SEQ ID NO: 734220 - RNA, 19 nt, Artificial Sequence
  Description of Artificial Sequence: Synthetic oligonucleotide
  Sense strand starting at position 1049 of SEQ ID NO: 586653
ugagauugggcaugucuuu

SEQ ID NO: 734221 - RNA, 19 nt, Artificial Sequence
  Description of Artificial Sequence: Synthetic oligonucleotide
  Antisense strand to SEQ ID NO: 734220
aaagacaugcccaaucuca

SEQ ID NO: 734222 - RNA, 19 nt, Artificial Sequence
  Description of Artificial Sequence: Synthetic oligonucleotide
  Sense strand starting at position 1055 of SEQ ID NO: 586653
ugggcaugucuuuaauguu

SEQ ID NO: 734223 - RNA, 19 nt, Artificial Sequence
  Description of Artificial Sequence: Synthetic oligonucleotide
  Antisense strand to SEQ ID NO: 734222
aacauuaaagacaugccca

SEQ ID NO: 734224 - RNA, 19 nt, Artificial Sequence
  Description of Artificial Sequence: Synthetic oligonucleotide
  Sense strand starting at position 1128 of SEQ ID NO: 586653
agagauauacuccagcuuc

SEQ ID NO: 734225 - RNA, 19 nt, Artificial Sequence
  Description of Artificial Sequence: Synthetic oligonucleotide
  Antisense strand to SEQ ID NO: 734224
gaagcuggaguauaucucu

SEQ ID NO: 734226 - RNA, 19 nt, Artificial Sequence
  Description of Artificial Sequence: Synthetic oligonucleotide
  Sense strand starting at position 1277 of SEQ ID NO: 586653
ggaugacugucagccaguu

SEQ ID NO: 734227 - RNA, 19 nt, Artificial Sequence
  Description of Artificial Sequence: Synthetic oligonucleotide
  Antisense strand to SEQ ID NO: 734226
aacuggcugacagucaucc

SEQ ID NO: 734228 - RNA, 19 nt, Artificial Sequence
  Description of Artificial Sequence: Synthetic oligonucleotide
  Sense strand starting at position 1421 of SEQ ID NO: 586653
ggaucaucuggauguuguu

SEQ ID NO: 734229 - RNA, 19 nt, Artificial Sequence
  Description of Artificial Sequence: Synthetic oligonucleotide
  Antisense strand to SEQ ID NO: 734228
aacaacauccagaugaucc

SEQ ID NO: 734230 - RNA, 19 nt, Artificial Sequence
  Description of Artificial Sequence: Synthetic oligonucleotide
  Sense strand starting at position 1430 of SEQ ID NO: 586653
ggauguuguucuccaugag

SEQ ID NO: 734231 - RNA, 19 nt, Artificial Sequence
  Description of Artificial Sequence: Synthetic oligonucleotide
  Antisense strand to SEQ ID NO: 734230
cucauggagaacaacaucc

SEQ ID NO: 734232 - RNA, 19 nt, Artificial Sequence
  Description of Artificial Sequence: Synthetic oligonucleotide
  Sense strand starting at position 1439 of SEQ ID NO: 586653
ucuccaugagguugaggua

SEQ ID NO: 734233 - RNA, 19 nt, Artificial Sequence
  Description of Artificial Sequence: Synthetic oligonucleotide
  Antisense strand to SEQ ID NO: 734232
uaccucaaccucauggaga

SEQ ID NO: 734234 - RNA, 19 nt, Artificial Sequence
  Description of Artificial Sequence: Synthetic oligonucleotide
  Sense strand starting at position 1458 of SEQ ID NO: 586653
ccggguguucgagggaaua

SEQ ID NO: 734235 - RNA, 19 nt, Artificial Sequence
  Description of Artificial Sequence: Synthetic oligonucleotide
  Antisense strand to SEQ ID NO: 734234
uauucccucgaacacccgg

SEQ ID NO: 734236 - RNA, 19 nt, Artificial Sequence
  Description of Artificial Sequence: Synthetic oligonucleotide
  Sense strand starting at position 1459 of SEQ ID NO: 586653
cggguguucgagggaauac

SEQ ID NO: 734237 - RNA, 19 nt, Artificial Sequence
  Description of Artificial Sequence: Synthetic oligonucleotide
  Antisense strand to SEQ ID NO: 734236
guauucccucgaacacccg

SEQ ID NO: 734238 - RNA, 19 nt, Artificial Sequence
  Description of Artificial Sequence: Synthetic oligonucleotide
  Sense strand starting at position 1711 of SEQ ID NO: 586653
ucaccaucgccugggauuu

SEQ ID NO: 734239 - RNA, 19 nt, Artificial Sequence
  Description of Artificial Sequence: Synthetic oligonucleotide
  Antisense strand to SEQ ID NO: 734238
aaaucccaggcgaugguga

SEQ ID NO: 734240 - RNA, 19 nt, Artificial Sequence
  Description of Artificial Sequence: Synthetic oligonucleotide
  Sense strand starting at position 1944 of SEQ ID NO: 586653
cccaguucgccgucaccua

SEQ ID NO: 734241 - RNA, 19 nt, Artificial Sequence
  Description of Artificial Sequence: Synthetic oligonucleotide
  Antisense strand to SEQ ID NO: 734240
uaggugacggcgaacuggg

SEQ ID NO: 734242 - RNA, 19 nt, Artificial Sequence
  Description of Artificial Sequence: Synthetic oligonucleotide
  Sense strand starting at position 2001 of SEQ ID NO: 586653
uuaagcuuucuccacggga

SEQ ID NO: 734243 - RNA, 19 nt, Artificial Sequence
  Description of Artificial Sequence: Synthetic oligonucleotide
  Antisense strand to SEQ ID NO: 734242
ucccguggagaaagcuuaa

SEQ ID NO: 734244 - RNA, 19 nt, Artificial Sequence
  Description of Artificial Sequence: Synthetic oligonucleotide
  Sense strand starting at position 3140 of SEQ ID NO: 586653
ucagucagaacgugaaugu

SEQ ID NO: 734245 - RNA, 19 nt, Artificial Sequence
  Description of Artificial Sequence: Synthetic oligonucleotide
  Antisense strand to SEQ ID NO: 734244
acauucacguucugacuga

SEQ ID NO: 734246 - RNA, 19 nt, Artificial Sequence
  Description of Artificial Sequence: Synthetic oligonucleotide
  Sense strand starting at position 3141 of SEQ ID NO: 586653
cagucagaacgugaaugua

SEQ ID NO: 734247 - RNA, 19 nt, Artificial Sequence
  Description of Artificial Sequence: Synthetic oligonucleotide
  Antisense strand to SEQ ID NO: 734246
uacauucacguucugacug

SEQ ID NO: 734248 - RNA, 19 nt, Artificial Sequence
  Description of Artificial Sequence: Synthetic oligonucleotide
  Sense strand starting at position 3165 of SEQ ID NO: 586653
gacgcauacuguucuggga

SEQ ID NO: 734249 - RNA, 19 nt, Artificial Sequence
  Description of Artificial Sequence: Synthetic oligonucleotide
  Antisense strand to SEQ ID NO: 734248
ucccagaacaguaugcguc

SEQ ID NO: 734250 - RNA, 19 nt, Artificial Sequence
  Description of Artificial Sequence: Synthetic oligonucleotide
  Sense strand starting at position 3169 of SEQ ID NO: 586653
cauacuguucugggagaag

SEQ ID NO: 734251 - RNA, 19 nt, Artificial Sequence
  Description of Artificial Sequence: Synthetic oligonucleotide
  Antisense strand to SEQ ID NO: 734250
cuucucccagaacaguaug

SEQ ID NO: 734252 - RNA, 19 nt, Artificial Sequence
  Description of Artificial Sequence: Synthetic oligonucleotide
  Sense strand starting at position 3180 of SEQ ID NO: 586653
gggagaagauuagcgugau

SEQ ID NO: 734253 - RNA, 19 nt, Artificial Sequence
  Description of Artificial Sequence: Synthetic oligonucleotide
  Antisense strand to SEQ ID NO: 734252
aucacgcuaaucuucuccc

SEQ ID NO: 734254 - RNA, 19 nt, Artificial Sequence
  Description of Artificial Sequence: Synthetic oligonucleotide
  Sense strand starting at position 3183 of SEQ ID NO: 586653
agaagauuagcgugaugca

SEQ ID NO: 734255 - RNA, 19 nt, Artificial Sequence
  Description of Artificial Sequence: Synthetic oligonucleotide
  Antisense strand to SEQ ID NO: 734254
ugcaucacgcuaaucuucu

SEQ ID NO: 734256 - RNA, 19 nt, Artificial Sequence
  Description of Artificial Sequence: Synthetic oligonucleotide
  Sense strand starting at position 3184 of SEQ ID NO: 586653
gaagauuagcgugaugcag

SEQ ID NO: 734257 - RNA, 19 nt, Artificial Sequence
  Description of Artificial Sequence: Synthetic oligonucleotide
  Antisense strand to SEQ ID NO: 734256
cugcaucacgcuaaucuuc

SEQ ID NO: 734258 - RNA, 19 nt, Artificial Sequence
  Description of Artificial Sequence: Synthetic oligonucleotide
  Sense strand starting at position 3192 of SEQ ID NO: 586653
gcgugaugcagugcucuua

SEQ ID NO: 734259 - RNA, 19 nt, Artificial Sequence
  Description of Artificial Sequence: Synthetic oligonucleotide
  Antisense strand to SEQ ID NO: 734258
uaagagcacugcaucacgc

SEQ ID NO: 734260 - RNA, 19 nt, Artificial Sequence
  Description of Artificial Sequence: Synthetic oligonucleotide
  Sense strand starting at position 3193 of SEQ ID NO: 586653
cgugaugcagugcucuuau

SEQ ID NO: 734261 - RNA, 19 nt, Artificial Sequence
  Description of Artificial Sequence: Synthetic oligonucleotide
  Antisense strand to SEQ ID NO: 734260
auaagagcacugcaucacg

SEQ ID NO: 734262 - RNA, 19 nt, Artificial Sequence
  Description of Artificial Sequence: Synthetic oligonucleotide
  Sense strand starting at position 3889 of SEQ ID NO: 586653
aaaugaggguuuccuuaau

SEQ ID NO: 734263 - RNA, 19 nt, Artificial Sequence
  Description of Artificial Sequence: Synthetic oligonucleotide
  Antisense strand to SEQ ID NO: 734262
auuaaggaaacccucauuu

SEQ ID NO: 734264 - RNA, 19 nt, Artificial Sequence
  Description of Artificial Sequence: Synthetic oligonucleotide
  Sense strand starting at position 75 of SEQ ID NO: 586654
gugagccucuuuccucaua

SEQ ID NO: 734265 - RNA, 19 nt, Artificial Sequence
  Description of Artificial Sequence: Synthetic oligonucleotide
  Antisense strand to SEQ ID NO: 734264
uaugaggaaagaggcucac

SEQ ID NO: 734266 - RNA, 19 nt, Artificial Sequence
  Description of Artificial Sequence: Synthetic oligonucleotide
  Sense strand starting at position 126 of SEQ ID NO: 586654
ucaggcaaguuucuagaga

SEQ ID NO: 734267 - RNA, 19 nt, Artificial Sequence
  Description of Artificial Sequence: Synthetic oligonucleotide
  Antisense strand to SEQ ID NO: 734266
ucucuagaaacuugccuga

SEQ ID NO: 734268 - RNA, 19 nt, Artificial Sequence
  Description of Artificial Sequence: Synthetic oligonucleotide
  Sense strand starting at position 174 of SEQ ID NO: 586654
ccagguaaugcugacaaua

SEQ ID NO: 734269 - RNA, 19 nt, Artificial Sequence
  Description of Artificial Sequence: Synthetic oligonucleotide
  Antisense strand to SEQ ID NO: 734268
uauugucagcauuaccugg

SEQ ID NO: 734270 - RNA, 19 nt, Artificial Sequence
  Description of Artificial Sequence: Synthetic oligonucleotide
  Sense strand starting at position 212 of SEQ ID NO: 586654
gcagaucucaaaggugacu

SEQ ID NO: 734271 - RNA, 19 nt, Artificial Sequence
  Description of Artificial Sequence: Synthetic oligonucleotide
  Antisense strand to SEQ ID NO: 734270
agucaccuuugagaucugc

SEQ ID NO: 734272 - RNA, 19 nt, Artificial Sequence
  Description of Artificial Sequence: Synthetic oligonucleotide
  Sense strand starting at position 411 of SEQ ID NO: 586654
uuggcucugucccuaaaca

SEQ ID NO: 734273 - RNA, 19 nt, Artificial Sequence
  Description of Artificial Sequence: Synthetic oligonucleotide
  Antisense strand to SEQ ID NO: 734272
uguuuagggacagagccaa

SEQ ID NO: 734274 - RNA, 19 nt, Artificial Sequence
  Description of Artificial Sequence: Synthetic oligonucleotide
  Sense strand starting at position 600 of SEQ ID NO: 586654
ccuggagugcugugcagaa

SEQ ID NO: 734275 - RNA, 19 nt, Artificial Sequence
  Description of Artificial Sequence: Synthetic oligonucleotide
  Antisense strand to SEQ ID NO: 734274
uucugcacagcacuccagg

SEQ ID NO: 734276 - RNA, 19 nt, Artificial Sequence
  Description of Artificial Sequence: Synthetic oligonucleotide
  Sense strand starting at position 703 of SEQ ID NO: 586654
ggcugagugaucuggcuua

SEQ ID NO: 734277 - RNA, 19 nt, Artificial Sequence
  Description of Artificial Sequence: Synthetic oligonucleotide
  Antisense strand to SEQ ID NO: 734276
uaagccagaucacucagcc

SEQ ID NO: 734278 - RNA, 19 nt, Artificial Sequence
  Description of Artificial Sequence: Synthetic oligonucleotide
  Sense strand starting at position 743 of SEQ ID NO: 586654
cgcacacuggcucaagaaa

SEQ ID NO: 734279 - RNA, 19 nt, Artificial Sequence
  Description of Artificial Sequence: Synthetic oligonucleotide
  Antisense strand to SEQ ID NO: 734278
uuucuugagccagugugcg

SEQ ID NO: 734280 - RNA, 19 nt, Artificial Sequence
  Description of Artificial Sequence: Synthetic oligonucleotide
  Sense strand starting at position 875 of SEQ ID NO: 586654
cugggcauuccaugauuau

SEQ ID NO: 734281 - RNA, 19 nt, Artificial Sequence
  Description of Artificial Sequence: Synthetic oligonucleotide
  Antisense strand to SEQ ID NO: 734280
auaaucauggaaugcccag

SEQ ID NO: 734282 - RNA, 19 nt, Artificial Sequence
  Description of Artificial Sequence: Synthetic oligonucleotide
  Sense strand starting at position 876 of SEQ ID NO: 586654
ugggcauuccaugauuaug

SEQ ID NO: 734283 - RNA, 19 nt, Artificial Sequence
  Description of Artificial Sequence: Synthetic oligonucleotide
  Antisense strand to SEQ ID NO: 734282
cauaaucauggaaugccca

SEQ ID NO: 734284 - RNA, 19 nt, Artificial Sequence
  Description of Artificial Sequence: Synthetic oligonucleotide
  Sense strand starting at position 886 of SEQ ID NO: 586654
augauuaugccaggccuuu

SEQ ID NO: 734285 - RNA, 19 nt, Artificial Sequence
  Description of Artificial Sequence: Synthetic oligonucleotide
  Antisense strand to SEQ ID NO: 734284
aaaggccuggcauaaucau

SEQ ID NO: 734286 - RNA, 19 nt, Artificial Sequence
  Description of Artificial Sequence: Synthetic oligonucleotide
  Sense strand starting at position 1035 of SEQ ID NO: 586654
uccacaacaucugugagaa

SEQ ID NO: 734287 - RNA, 19 nt, Artificial Sequence
  Description of Artificial Sequence: Synthetic oligonucleotide
  Antisense strand to SEQ ID NO: 734286
uucucacagauguugugga

SEQ ID NO: 734288 - RNA, 19 nt, Artificial Sequence
  Description of Artificial Sequence: Synthetic oligonucleotide
  Sense strand starting at position 1036 of SEQ ID NO: 586654
ccacaacaucugugagaag

SEQ ID NO: 734289 - RNA, 19 nt, Artificial Sequence
  Description of Artificial Sequence: Synthetic oligonucleotide
  Antisense strand to SEQ ID NO: 734288
cuucucacagauguugugg

SEQ ID NO: 734290 - RNA, 19 nt, Artificial Sequence
  Description of Artificial Sequence: Synthetic oligonucleotide
  Sense strand starting at position 1037 of SEQ ID NO: 586654
cacaacaucugugagaaga

SEQ ID NO: 734291 - RNA, 19 nt, Artificial Sequence
  Description of Artificial Sequence: Synthetic oligonucleotide
  Antisense strand to SEQ ID NO: 734290
ucuucucacagauguugug

SEQ ID NO: 734292 - RNA, 19 nt, Artificial Sequence
  Description of Artificial Sequence: Synthetic oligonucleotide
  Sense strand starting at position 1039 of SEQ ID NO: 586654
caacaucugugagaagauu

SEQ ID NO: 734293 - RNA, 19 nt, Artificial Sequence
  Description of Artificial Sequence: Synthetic oligonucleotide
  Antisense strand to SEQ ID NO: 734292
aaucuucucacagauguug

SEQ ID NO: 734294 - RNA, 19 nt, Artificial Sequence
  Description of Artificial Sequence: Synthetic oligonucleotide
  Sense strand starting at position 1084 of SEQ ID NO: 586654
aggagaugaacgugugaaa

SEQ ID NO: 734295 - RNA, 19 nt, Artificial Sequence
  Description of Artificial Sequence: Synthetic oligonucleotide
  Antisense strand to SEQ ID NO: 734294
uuucacacguucaucuccu

SEQ ID NO: 734296 - RNA, 19 nt, Artificial Sequence
  Description of Artificial Sequence: Synthetic oligonucleotide
  Sense strand starting at position 1278 of SEQ ID NO: 586654
ugcuacuuucuggaagcuu

SEQ ID NO: 734297 - RNA, 19 nt, Artificial Sequence
  Description of Artificial Sequence: Synthetic oligonucleotide
  Antisense strand to SEQ ID NO: 734296
aagcuuccagaaaguagca

SEQ ID NO: 734298 - RNA, 19 nt, Artificial Sequence
  Description of Artificial Sequence: Synthetic oligonucleotide
  Sense strand starting at position 1290 of SEQ ID NO: 586654
gaagcuuagggcuaacaau

SEQ ID NO: 734299 - RNA, 19 nt, Artificial Sequence
  Description of Artificial Sequence: Synthetic oligonucleotide
  Antisense strand to SEQ ID NO: 734298
auuguuagcccuaagcuuc

SEQ ID NO: 734300 - RNA, 19 nt, Artificial Sequence
  Description of Artificial Sequence: Synthetic oligonucleotide
  Sense strand starting at position 1376 of SEQ ID NO: 586654
cgguuuccucgucuacauu

SEQ ID NO: 734301 - RNA, 19 nt, Artificial Sequence
  Description of Artificial Sequence: Synthetic oligonucleotide
  Antisense strand to SEQ ID NO: 734300
aauguagacgaggaaaccg

SEQ ID NO: 734302 - RNA, 19 nt, Artificial Sequence
  Description of Artificial Sequence: Synthetic oligonucleotide
  Sense strand starting at position 1377 of SEQ ID NO: 586654
gguuuccucgucuacauua

SEQ ID NO: 734303 - RNA, 19 nt, Artificial Sequence
  Description of Artificial Sequence: Synthetic oligonucleotide
  Antisense strand to SEQ ID NO: 734302
uaauguagacgaggaaacc

SEQ ID NO: 734304 - RNA, 19 nt, Artificial Sequence
  Description of Artificial Sequence: Synthetic oligonucleotide
  Sense strand starting at position 1387 of SEQ ID NO: 586654
ucuacauuacgggaauagu

SEQ ID NO: 734305 - RNA, 19 nt, Artificial Sequence
  Description of Artificial Sequence: Synthetic oligonucleotide
  Antisense strand to SEQ ID NO: 734304
acuauucccguaauguaga

SEQ ID NO: 734306 - RNA, 19 nt, Artificial Sequence
  Description of Artificial Sequence: Synthetic oligonucleotide
  Sense strand starting at position 1416 of SEQ ID NO: 586654
gccucaugagauuguuagu

SEQ ID NO: 734307 - RNA, 19 nt, Artificial Sequence
  Description of Artificial Sequence: Synthetic oligonucleotide
  Antisense strand to SEQ ID NO: 734306
acuaacaaucucaugaggc

SEQ ID NO: 734308 - RNA, 19 nt, Artificial Sequence
  Description of Artificial Sequence: Synthetic oligonucleotide
  Sense strand starting at position 1421 of SEQ ID NO: 586654
augagauuguuaguguuaa

SEQ ID NO: 734309 - RNA, 19 nt, Artificial Sequence
  Description of Artificial Sequence: Synthetic oligonucleotide
  Antisense strand to SEQ ID NO: 734308
uuaacacuaacaaucucau

SEQ ID NO: 734310 - RNA, 19 nt, Artificial Sequence
  Description of Artificial Sequence: Synthetic oligonucleotide
  Sense strand starting at position 1429 of SEQ ID NO: 586654
guuaguguuaaacgaguua

SEQ ID NO: 734311 - RNA, 19 nt, Artificial Sequence
  Description of Artificial Sequence: Synthetic oligonucleotide
  Antisense strand to SEQ ID NO: 734310
uaacucguuuaacacuaac

SEQ ID NO: 734312 - RNA, 19 nt, Artificial Sequence
  Description of Artificial Sequence: Synthetic oligonucleotide
  Sense strand starting at position 1469 of SEQ ID NO: 586654
ggcaguucucggcacagag

SEQ ID NO: 734313 - RNA, 19 nt, Artificial Sequence
  Description of Artificial Sequence: Synthetic oligonucleotide
  Antisense strand to SEQ ID NO: 734312
cucugugccgagaacugcc

SEQ ID NO: 734314 - RNA, 19 nt, Artificial Sequence
  Description of Artificial Sequence: Synthetic oligonucleotide
  Sense strand starting at position 1505 of SEQ ID NO: 586654
cuggcuguuccggaagauu

SEQ ID NO: 734315 - RNA, 19 nt, Artificial Sequence
  Description of Artificial Sequence: Synthetic oligonucleotide
  Antisense strand to SEQ ID NO: 734314
aaucuuccggaacagccag

SEQ ID NO: 734316 - RNA, 19 nt, Artificial Sequence
  Description of Artificial Sequence: Synthetic oligonucleotide
  Sense strand starting at position 2059 of SEQ ID NO: 586654
gaggucaacagucgguaau

SEQ ID NO: 734317 - RNA, 19 nt, Artificial Sequence
  Description of Artificial Sequence: Synthetic oligonucleotide
  Antisense strand to SEQ ID NO: 734316
auuaccgacuguugaccuc

SEQ ID NO: 734318 - RNA, 19 nt, Artificial Sequence
  Description of Artificial Sequence: Synthetic oligonucleotide
  Sense strand starting at position 2085 of SEQ ID NO: 586654
cggugcggccuuagagaaa

SEQ ID NO: 734319 - RNA, 19 nt, Artificial Sequence
  Description of Artificial Sequence: Synthetic oligonucleotide
  Antisense strand to SEQ ID NO: 734318
uuucucuaaggccgcaccg

SEQ ID NO: 734320 - RNA, 19 nt, Artificial Sequence
  Description of Artificial Sequence: Synthetic oligonucleotide
  Sense strand starting at position 2681 of SEQ ID NO: 586654
uggugucauggcgucugua

SEQ ID NO: 734321 - RNA, 19 nt, Artificial Sequence
  Description of Artificial Sequence: Synthetic oligonucleotide
  Antisense strand to SEQ ID NO: 734320
uacagacgccaugacacca

SEQ ID NO: 734322 - RNA, 19 nt, Artificial Sequence
  Description of Artificial Sequence: Synthetic oligonucleotide
  Sense strand starting at position 2682 of SEQ ID NO: 586654
ggugucauggcgucuguaa

SEQ ID NO: 734323 - RNA, 19 nt, Artificial Sequence
  Description of Artificial Sequence: Synthetic oligonucleotide
  Antisense strand to SEQ ID NO: 734322
uuacagacgccaugacacc

SEQ ID NO: 734324 - RNA, 19 nt, Artificial Sequence
  Description of Artificial Sequence: Synthetic oligonucleotide
  Sense strand starting at position 2683 of SEQ ID NO: 586654
gugucauggcgucuguaaa

SEQ ID NO: 734325 - RNA, 19 nt, Artificial Sequence
  Description of Artificial Sequence: Synthetic oligonucleotide
  Antisense strand to SEQ ID NO: 734324
uuuacagacgccaugacac

SEQ ID NO: 734326 - RNA, 19 nt, Artificial Sequence
  Description of Artificial Sequence: Synthetic oligonucleotide
  Sense strand starting at position 2818 of SEQ ID NO: 586654
gcguuuagccagcuucuuu

SEQ ID NO: 734327 - RNA, 19 nt, Artificial Sequence
  Description of Artificial Sequence: Synthetic oligonucleotide
  Antisense strand to SEQ ID NO: 734326
aaagaagcuggcuaaacgc

SEQ ID NO: 734328 - RNA, 19 nt, Artificial Sequence
  Description of Artificial Sequence: Synthetic oligonucleotide
  Sense strand starting at position 2968 of SEQ ID NO: 586654
gaguaauucuggcuuaaac

SEQ ID NO: 734329 - RNA, 19 nt, Artificial Sequence
  Description of Artificial Sequence: Synthetic oligonucleotide
  Antisense strand to SEQ ID NO: 734328
guuuaagccagaauuacuc

SEQ ID NO: 734330 - RNA, 19 nt, Artificial Sequence
  Description of Artificial Sequence: Synthetic oligonucleotide
  Sense strand starting at position 2970 of SEQ ID NO: 586654
guaauucuggcuuaaacac

SEQ ID NO: 734331 - RNA, 19 nt, Artificial Sequence
  Description of Artificial Sequence: Synthetic oligonucleotide
  Antisense strand to SEQ ID NO: 734330
guguuuaagccagaauuac

SEQ ID NO: 734332 - RNA, 19 nt, Artificial Sequence
  Description of Artificial Sequence: Synthetic oligonucleotide
  Sense strand starting at position 3125 of SEQ ID NO: 586654
agucauguucccuggacga

SEQ ID NO: 734333 - RNA, 19 nt, Artificial Sequence
  Description of Artificial Sequence: Synthetic oligonucleotide
  Antisense strand to SEQ ID NO: 734332
ucguccagggaacaugacu

SEQ ID NO: 734334 - RNA, 19 nt, Artificial Sequence
  Description of Artificial Sequence: Synthetic oligonucleotide
  Sense strand starting at position 3161 of SEQ ID NO: 586654
gucccauguugguuccaca

SEQ ID NO: 734335 - RNA, 19 nt, Artificial Sequence
  Description of Artificial Sequence: Synthetic oligonucleotide
  Antisense strand to SEQ ID NO: 734334
uguggaaccaacaugggac

SEQ ID NO: 734336 - RNA, 19 nt, Artificial Sequence
  Description of Artificial Sequence: Synthetic oligonucleotide
  Sense strand starting at position 3791 of SEQ ID NO: 586654
cggagauggaaguauuagu

SEQ ID NO: 734337 - RNA, 19 nt, Artificial Sequence
  Description of Artificial Sequence: Synthetic oligonucleotide
  Antisense strand to SEQ ID NO: 734336
acuaauacuuccaucuccg

SEQ ID NO: 734338 - RNA, 19 nt, Artificial Sequence
  Description of Artificial Sequence: Synthetic oligonucleotide
  Sense strand starting at position 3801 of SEQ ID NO: 586654
aguauuaguuucuccauua

SEQ ID NO: 734339 - RNA, 19 nt, Artificial Sequence
  Description of Artificial Sequence: Synthetic oligonucleotide
  Antisense strand to SEQ ID NO: 734338
uaauggagaaacuaauacu

SEQ ID NO: 734340 - RNA, 19 nt, Artificial Sequence
  Description of Artificial Sequence: Synthetic oligonucleotide
  Sense strand starting at position 3802 of SEQ ID NO: 586654
guauuaguuucuccauuau

SEQ ID NO: 734341 - RNA, 19 nt, Artificial Sequence
  Description of Artificial Sequence: Synthetic oligonucleotide
  Antisense strand to SEQ ID NO: 734340
auaauggagaaacuaauac

SEQ ID NO: 734342 - RNA, 19 nt, Artificial Sequence
  Description of Artificial Sequence: Synthetic oligonucleotide
  Sense strand starting at position 3928 of SEQ ID NO: 586654
ugcaauagggauuaugcaa

SEQ ID NO: 734343 - RNA, 19 nt, Artificial Sequence
  Description of Artificial Sequence: Synthetic oligonucleotide
  Antisense strand to SEQ ID NO: 734342
uugcauaaucccuauugca

SEQ ID NO: 734344 - RNA, 19 nt, Artificial Sequence
  Description of Artificial Sequence: Synthetic oligonucleotide
  Sense strand starting at position 100 of SEQ ID NO: 586655
ggaagauauuacuggauuu

SEQ ID NO: 734345 - RNA, 19 nt, Artificial Sequence
  Description of Artificial Sequence: Synthetic oligonucleotide
  Antisense strand to SEQ ID NO: 734344
aaauccaguaauaucuucc

SEQ ID NO: 734346 - RNA, 19 nt, Artificial Sequence
  Description of Artificial Sequence: Synthetic oligonucleotide
  Sense strand starting at position 291 of SEQ ID NO: 586655
gugagcagugaacagauau

SEQ ID NO: 734347 - RNA, 19 nt, Artificial Sequence
  Description of Artificial Sequence: Synthetic oligonucleotide
  Antisense strand to SEQ ID NO: 734346
auaucuguucacugcucac

SEQ ID NO: 734348 - RNA, 19 nt, Artificial Sequence
  Description of Artificial Sequence: Synthetic oligonucleotide
  Sense strand starting at position 366 of SEQ ID NO: 586655
gaauuagcacgagggaagu

SEQ ID NO: 734349 - RNA, 19 nt, Artificial Sequence
  Description of Artificial Sequence: Synthetic oligonucleotide
  Antisense strand to SEQ ID NO: 734348
acuucccucgugcuaauuc

SEQ ID NO: 734350 - RNA, 19 nt, Artificial Sequence
  Description of Artificial Sequence: Synthetic oligonucleotide
  Sense strand starting at position 377 of SEQ ID NO: 586655
agggaagucacaggugaug

SEQ ID NO: 734351 - RNA, 19 nt, Artificial Sequence
  Description of Artificial Sequence: Synthetic oligonucleotide
  Antisense strand to SEQ ID NO: 734350
caucaccugugacuucccu

SEQ ID NO: 734352 - RNA, 19 nt, Artificial Sequence
  Description of Artificial Sequence: Synthetic oligonucleotide
  Sense strand starting at position 379 of SEQ ID NO: 586655
ggaagucacaggugaugau

SEQ ID NO: 734353 - RNA, 19 nt, Artificial Sequence
  Description of Artificial Sequence: Synthetic oligonucleotide
  Antisense strand to SEQ ID NO: 734352
aucaucaccugugacuucc

SEQ ID NO: 734354 - RNA, 19 nt, Artificial Sequence
  Description of Artificial Sequence: Synthetic oligonucleotide
  Sense strand starting at position 577 of SEQ ID NO: 586655
caguuaaccagaggagagu

SEQ ID NO: 734355 - RNA, 19 nt, Artificial Sequence
  Description of Artificial Sequence: Synthetic oligonucleotide
  Antisense strand to SEQ ID NO: 734354
acucuccucugguuaacug

SEQ ID NO: 734356 - RNA, 19 nt, Artificial Sequence
  Description of Artificial Sequence: Synthetic oligonucleotide
  Sense strand starting at position 619 of SEQ ID NO: 586655
aagugucuacauggagaga

SEQ ID NO: 734357 - RNA, 19 nt, Artificial Sequence
  Description of Artificial Sequence: Synthetic oligonucleotide
  Antisense strand to SEQ ID NO: 734356
ucucuccauguagacacuu

SEQ ID NO: 734358 - RNA, 19 nt, Artificial Sequence
  Description of Artificial Sequence: Synthetic oligonucleotide
  Sense strand starting at position 671 of SEQ ID NO: 586655
ggaggaugauugucaagug

SEQ ID NO: 734359 - RNA, 19 nt, Artificial Sequence
  Description of Artificial Sequence: Synthetic oligonucleotide
  Antisense strand to SEQ ID NO: 734358
cacuugacaaucauccucc

SEQ ID NO: 734360 - RNA, 19 nt, Artificial Sequence
  Description of Artificial Sequence: Synthetic oligonucleotide
  Sense strand starting at position 676 of SEQ ID NO: 586655
augauugucaagugaggua

SEQ ID NO: 734361 - RNA, 19 nt, Artificial Sequence
  Description of Artificial Sequence: Synthetic oligonucleotide
  Antisense strand to SEQ ID NO: 734360
uaccucacuugacaaucau

SEQ ID NO: 734362 - RNA, 19 nt, Artificial Sequence
  Description of Artificial Sequence: Synthetic oligonucleotide
  Sense strand starting at position 1061 of SEQ ID NO: 586655
gcccucucugaugauaaau

SEQ ID NO: 734363 - RNA, 19 nt, Artificial Sequence
  Description of Artificial Sequence: Synthetic oligonucleotide
  Antisense strand to SEQ ID NO: 734362
auuuaucaucagagagggc

SEQ ID NO: 734364 - RNA, 19 nt, Artificial Sequence
  Description of Artificial Sequence: Synthetic oligonucleotide
  Sense strand starting at position 1314 of SEQ ID NO: 586655
gcuuguagggcucaucaaa

SEQ ID NO: 734365 - RNA, 19 nt, Artificial Sequence
  Description of Artificial Sequence: Synthetic oligonucleotide
  Antisense strand to SEQ ID NO: 734364
uuugaugagcccuacaagc

SEQ ID NO: 734366 - RNA, 19 nt, Artificial Sequence
  Description of Artificial Sequence: Synthetic oligonucleotide
  Sense strand starting at position 1321 of SEQ ID NO: 586655
gggcucaucaaauaacguu

SEQ ID NO: 734367 - RNA, 19 nt, Artificial Sequence
  Description of Artificial Sequence: Synthetic oligonucleotide
  Antisense strand to SEQ ID NO: 734366
aacguuauuugaugagccc

SEQ ID NO: 734368 - RNA, 19 nt, Artificial Sequence
  Description of Artificial Sequence: Synthetic oligonucleotide
  Sense strand starting at position 1434 of SEQ ID NO: 586655
gagaaucaagacugcgaaa

SEQ ID NO: 734369 - RNA, 19 nt, Artificial Sequence
  Description of Artificial Sequence: Synthetic oligonucleotide
  Antisense strand to SEQ ID NO: 734368
uuucgcagucuugauucuc

SEQ ID NO: 734370 - RNA, 19 nt, Artificial Sequence
  Description of Artificial Sequence: Synthetic oligonucleotide
  Sense strand starting at position 1436 of SEQ ID NO: 586655
gaaucaagacugcgaaauu

SEQ ID NO: 734371 - RNA, 19 nt, Artificial Sequence
  Description of Artificial Sequence: Synthetic oligonucleotide
  Antisense strand to SEQ ID NO: 734370
aauuucgcagucuugauuc

SEQ ID NO: 734372 - RNA, 19 nt, Artificial Sequence
  Description of Artificial Sequence: Synthetic oligonucleotide
  Sense strand starting at position 2061 of SEQ ID NO: 586655
gccaguccacacugggaaa

SEQ ID NO: 734373 - RNA, 19 nt, Artificial Sequence
  Description of Artificial Sequence: Synthetic oligonucleotide
  Antisense strand to SEQ ID NO: 734372
uuucccaguguggacuggc

SEQ ID NO: 734374 - RNA, 19 nt, Artificial Sequence
  Description of Artificial Sequence: Synthetic oligonucleotide
  Sense strand starting at position 2254 of SEQ ID NO: 586655
gcagucacccaguaaucau

SEQ ID NO: 734375 - RNA, 19 nt, Artificial Sequence
  Description of Artificial Sequence: Synthetic oligonucleotide
  Antisense strand to SEQ ID NO: 734374
augauuacugggugacugc

SEQ ID NO: 734376 - RNA, 19 nt, Artificial Sequence
  Description of Artificial Sequence: Synthetic oligonucleotide
  Sense strand starting at position 2269 of SEQ ID NO: 586655
ucaucacuuugauucgaga

SEQ ID NO: 734377 - RNA, 19 nt, Artificial Sequence
  Description of Artificial Sequence: Synthetic oligonucleotide
  Antisense strand to SEQ ID NO: 734376
ucucgaaucaaagugauga

SEQ ID NO: 734378 - RNA, 19 nt, Artificial Sequence
  Description of Artificial Sequence: Synthetic oligonucleotide
  Sense strand starting at position 2278 of SEQ ID NO: 586655
ugauucgagauaugaauau

SEQ ID NO: 734379 - RNA, 19 nt, Artificial Sequence
  Description of Artificial Sequence: Synthetic oligonucleotide
  Antisense strand to SEQ ID NO: 734378
auauucauaucucgaauca

SEQ ID NO: 734380 - RNA, 19 nt, Artificial Sequence
  Description of Artificial Sequence: Synthetic oligonucleotide
  Sense strand starting at position 2285 of SEQ ID NO: 586655
agauaugaauaucaggaaa

SEQ ID NO: 734381 - RNA, 19 nt, Artificial Sequence
  Description of Artificial Sequence: Synthetic oligonucleotide
  Antisense strand to SEQ ID NO: 734380
uuuccugauauucauaucu

SEQ ID NO: 734382 - RNA, 19 nt, Artificial Sequence
  Description of Artificial Sequence: Synthetic oligonucleotide
  Sense strand starting at position 2464 of SEQ ID NO: 586655
uuaugcauguuauuugcau

SEQ ID NO: 734383 - RNA, 19 nt, Artificial Sequence
  Description of Artificial Sequence: Synthetic oligonucleotide
  Antisense strand to SEQ ID NO: 734382
augcaaauaacaugcauaa

SEQ ID NO: 734384 - RNA, 19 nt, Artificial Sequence
  Description of Artificial Sequence: Synthetic oligonucleotide
  Sense strand starting at position 2866 of SEQ ID NO: 586655
uucuuacaucuggguccaa

SEQ ID NO: 734385 - RNA, 19 nt, Artificial Sequence
  Description of Artificial Sequence: Synthetic oligonucleotide
  Antisense strand to SEQ ID NO: 734384
uuggacccagauguaagaa

SEQ ID NO: 734386 - RNA, 19 nt, Artificial Sequence
  Description of Artificial Sequence: Synthetic oligonucleotide
  Sense strand starting at position 3043 of SEQ ID NO: 586655
agaaauccuuucucuggca

SEQ ID NO: 734387 - RNA, 19 nt, Artificial Sequence
  Description of Artificial Sequence: Synthetic oligonucleotide
  Antisense strand to SEQ ID NO: 734386
ugccagagaaaggauuucu

SEQ ID NO: 734388 - RNA, 19 nt, Artificial Sequence
  Description of Artificial Sequence: Synthetic oligonucleotide
  Sense strand starting at position 3127 of SEQ ID NO: 586655
ugaaauuucugucuccugu

SEQ ID NO: 734389 - RNA, 19 nt, Artificial Sequence
  Description of Artificial Sequence: Synthetic oligonucleotide
  Antisense strand to SEQ ID NO: 734388
acaggagacagaaauuuca

SEQ ID NO: 734390 - RNA, 19 nt, Artificial Sequence
  Description of Artificial Sequence: Synthetic oligonucleotide
  Sense strand starting at position 3164 of SEQ ID NO: 586655
aguauagauuaucuuguga

SEQ ID NO: 734391 - RNA, 19 nt, Artificial Sequence
  Description of Artificial Sequence: Synthetic oligonucleotide
  Antisense strand to SEQ ID NO: 734390
ucacaagauaaucuauacu

SEQ ID NO: 734392 - RNA, 19 nt, Artificial Sequence
  Description of Artificial Sequence: Synthetic oligonucleotide
  Sense strand starting at position 3230 of SEQ ID NO: 586655
gcaggauccuguuuaagac

SEQ ID NO: 734393 - RNA, 19 nt, Artificial Sequence
  Description of Artificial Sequence: Synthetic oligonucleotide
  Antisense strand to SEQ ID NO: 734392
gucuuaaacaggauccugc

SEQ ID NO: 734394 - RNA, 19 nt, Artificial Sequence
  Description of Artificial Sequence: Synthetic oligonucleotide
  Sense strand starting at position 3286 of SEQ ID NO: 586655
aauuaauguugacuggauu

SEQ ID NO: 734395 - RNA, 19 nt, Artificial Sequence
  Description of Artificial Sequence: Synthetic oligonucleotide
  Antisense strand to SEQ ID NO: 734394
aauccagucaacauuaauu

SEQ ID NO: 734396 - RNA, 19 nt, Artificial Sequence
  Description of Artificial Sequence: Synthetic oligonucleotide
  Sense strand starting at position 3287 of SEQ ID NO: 586655
auuaauguugacuggauua

SEQ ID NO: 734397 - RNA, 19 nt, Artificial Sequence
  Description of Artificial Sequence: Synthetic oligonucleotide
  Antisense strand to SEQ ID NO: 734396
uaauccagucaacauuaau

SEQ ID NO: 734398 - RNA, 19 nt, Artificial Sequence
  Description of Artificial Sequence: Synthetic oligonucleotide
  Sense strand starting at position 3360 of SEQ ID NO: 586655
agcuuucugaaauggguca

SEQ ID NO: 734399 - RNA, 19 nt, Artificial Sequence
  Description of Artificial Sequence: Synthetic oligonucleotide
  Antisense strand to SEQ ID NO: 734398
ugacccauuucagaaagcu

SEQ ID NO: 734400 - RNA, 19 nt, Artificial Sequence
  Description of Artificial Sequence: Synthetic oligonucleotide
  Sense strand starting at position 3361 of SEQ ID NO: 586655
gcuuucugaaaugggucaa

SEQ ID NO: 734401 - RNA, 19 nt, Artificial Sequence
  Description of Artificial Sequence: Synthetic oligonucleotide
  Antisense strand to SEQ ID NO: 734400
uugacccauuucagaaagc

SEQ ID NO: 734402 - RNA, 19 nt, Artificial Sequence
  Description of Artificial Sequence: Synthetic oligonucleotide
  Sense strand starting at position 3365 of SEQ ID NO: 586655
ucugaaaugggucaagcua

SEQ ID NO: 734403 - RNA, 19 nt, Artificial Sequence
  Description of Artificial Sequence: Synthetic oligonucleotide
  Antisense strand to SEQ ID NO: 734402
uagcuugacccauuucaga

SEQ ID NO: 734404 - RNA, 19 nt, Artificial Sequence
  Description of Artificial Sequence: Synthetic oligonucleotide
  Sense strand starting at position 3405 of SEQ ID NO: 586655
ugguguugaaaugaagcau

SEQ ID NO: 734405 - RNA, 19 nt, Artificial Sequence
  Description of Artificial Sequence: Synthetic oligonucleotide
  Antisense strand to SEQ ID NO: 734404
augcuucauuucaacacca

SEQ ID NO: 734406 - RNA, 19 nt, Artificial Sequence
  Description of Artificial Sequence: Synthetic oligonucleotide
  Sense strand starting at position 3514 of SEQ ID NO: 586655
aguuauuguggagggauua

SEQ ID NO: 734407 - RNA, 19 nt, Artificial Sequence
  Description of Artificial Sequence: Synthetic oligonucleotide
  Antisense strand to SEQ ID NO: 734406
uaaucccuccacaauaacu

SEQ ID NO: 734408 - RNA, 19 nt, Artificial Sequence
  Description of Artificial Sequence: Synthetic oligonucleotide
  Sense strand starting at position 3515 of SEQ ID NO: 586655
guuauuguggagggauuaa

SEQ ID NO: 734409 - RNA, 19 nt, Artificial Sequence
  Description of Artificial Sequence: Synthetic oligonucleotide
  Antisense strand to SEQ ID NO: 734408
uuaaucccuccacaauaac

SEQ ID NO: 734410 - RNA, 19 nt, Artificial Sequence
  Description of Artificial Sequence: Synthetic oligonucleotide
  Sense strand starting at position 3555 of SEQ ID NO: 586655
aguaguuucuauccuggaa

SEQ ID NO: 734411 - RNA, 19 nt, Artificial Sequence
  Description of Artificial Sequence: Synthetic oligonucleotide
  Antisense strand to SEQ ID NO: 734410
uuccaggauagaaacuacu

SEQ ID NO: 734412 - RNA, 19 nt, Artificial Sequence
  Description of Artificial Sequence: Synthetic oligonucleotide
  Sense strand starting at position 3558 of SEQ ID NO: 586655
aguuucuauccuggaaaua

SEQ ID NO: 734413 - RNA, 19 nt, Artificial Sequence
  Description of Artificial Sequence: Synthetic oligonucleotide
  Antisense strand to SEQ ID NO: 734412
uauuuccaggauagaaacu

SEQ ID NO: 734414 - RNA, 19 nt, Artificial Sequence
  Description of Artificial Sequence: Synthetic oligonucleotide
  Sense strand starting at position 3742 of SEQ ID NO: 586655
gugacuuuauaaccauaug

SEQ ID NO: 734415 - RNA, 19 nt, Artificial Sequence
  Description of Artificial Sequence: Synthetic oligonucleotide
  Antisense strand to SEQ ID NO: 734414
cauaugguuauaaagucac

SEQ ID NO: 734416 - RNA, 19 nt, Artificial Sequence
  Description of Artificial Sequence: Synthetic oligonucleotide
  Sense strand starting at position 3776 of SEQ ID NO: 586655
gagcaucuugcagauguaa

SEQ ID NO: 734417 - RNA, 19 nt, Artificial Sequence
  Description of Artificial Sequence: Synthetic oligonucleotide
  Antisense strand to SEQ ID NO: 734416
uuacaucugcaagaugcuc

SEQ ID NO: 734418 - RNA, 19 nt, Artificial Sequence
  Description of Artificial Sequence: Synthetic oligonucleotide
  Sense strand starting at position 3788 of SEQ ID NO: 586655
gauguaaacuagucaccag

SEQ ID NO: 734419 - RNA, 19 nt, Artificial Sequence
  Description of Artificial Sequence: Synthetic oligonucleotide
  Antisense strand to SEQ ID NO: 734418
cuggugacuaguuuacauc

SEQ ID NO: 734420 - RNA, 19 nt, Artificial Sequence
  Description of Artificial Sequence: Synthetic oligonucleotide
  Sense strand starting at position 3791 of SEQ ID NO: 586655
guaaacuagucaccaguua

SEQ ID NO: 734421 - RNA, 19 nt, Artificial Sequence
  Description of Artificial Sequence: Synthetic oligonucleotide
  Antisense strand to SEQ ID NO: 734420
uaacuggugacuaguuuac

SEQ ID NO: 734422 - RNA, 19 nt, Artificial Sequence
  Description of Artificial Sequence: Synthetic oligonucleotide
  Sense strand starting at position 3969 of SEQ ID NO: 586655
acugaucacgaaggcuaaa

SEQ ID NO: 734423 - RNA, 19 nt, Artificial Sequence
  Description of Artificial Sequence: Synthetic oligonucleotide
  Antisense strand to SEQ ID NO: 734422
uuuagccuucgugaucagu

SEQ ID NO: 734424 - RNA, 19 nt, Artificial Sequence
  Description of Artificial Sequence: Synthetic oligonucleotide
  Sense strand starting at position 38 of SEQ ID NO: 586656
agcuguuccagugauugaa

SEQ ID NO: 734425 - RNA, 19 nt, Artificial Sequence
  Description of Artificial Sequence: Synthetic oligonucleotide
  Antisense strand to SEQ ID NO: 734424
uucaaucacuggaacagcu

SEQ ID NO: 734426 - RNA, 19 nt, Artificial Sequence
  Description of Artificial Sequence: Synthetic oligonucleotide
  Sense strand starting at position 42 of SEQ ID NO: 586656
guuccagugauugaaguug

SEQ ID NO: 734427 - RNA, 19 nt, Artificial Sequence
  Description of Artificial Sequence: Synthetic oligonucleotide
  Antisense strand to SEQ ID NO: 734426
caacuucaaucacuggaac

SEQ ID NO: 734428 - RNA, 19 nt, Artificial Sequence
  Description of Artificial Sequence: Synthetic oligonucleotide
  Sense strand starting at position 83 of SEQ ID NO: 586656
auaaauugauugcuugaga

SEQ ID NO: 734429 - RNA, 19 nt, Artificial Sequence
  Description of Artificial Sequence: Synthetic oligonucleotide
  Antisense strand to SEQ ID NO: 734428
ucucaagcaaucaauuuau

SEQ ID NO: 734430 - RNA, 19 nt, Artificial Sequence
  Description of Artificial Sequence: Synthetic oligonucleotide
  Sense strand starting at position 197 of SEQ ID NO: 586656
guacacaauucucuaggga

SEQ ID NO: 734431 - RNA, 19 nt, Artificial Sequence
  Description of Artificial Sequence: Synthetic oligonucleotide
  Antisense strand to SEQ ID NO: 734430
ucccuagagaauuguguac

SEQ ID NO: 734432 - RNA, 19 nt, Artificial Sequence
  Description of Artificial Sequence: Synthetic oligonucleotide
  Sense strand starting at position 312 of SEQ ID NO: 586656
ccagguauuuaagauuaau

SEQ ID NO: 734433 - RNA, 19 nt, Artificial Sequence
  Description of Artificial Sequence: Synthetic oligonucleotide
  Antisense strand to SEQ ID NO: 734432
auuaaucuuaaauaccugg

SEQ ID NO: 734434 - RNA, 19 nt, Artificial Sequence
  Description of Artificial Sequence: Synthetic oligonucleotide
  Sense strand starting at position 554 of SEQ ID NO: 586656
augggaacaucugugauua

SEQ ID NO: 734435 - RNA, 19 nt, Artificial Sequence
  Description of Artificial Sequence: Synthetic oligonucleotide
  Antisense strand to SEQ ID NO: 734434
uaaucacagauguucccau

SEQ ID NO: 734436 - RNA, 19 nt, Artificial Sequence
  Description of Artificial Sequence: Synthetic oligonucleotide
  Sense strand starting at position 555 of SEQ ID NO: 586656
ugggaacaucugugauuau

SEQ ID NO: 734437 - RNA, 19 nt, Artificial Sequence
  Description of Artificial Sequence: Synthetic oligonucleotide
  Antisense strand to SEQ ID NO: 734436
auaaucacagauguuccca

SEQ ID NO: 734438 - RNA, 19 nt, Artificial Sequence
  Description of Artificial Sequence: Synthetic oligonucleotide
  Sense strand starting at position 599 of SEQ ID NO: 586656
auguuauuaagaugugaga

SEQ ID NO: 734439 - RNA, 19 nt, Artificial Sequence
  Description of Artificial Sequence: Synthetic oligonucleotide
  Antisense strand to SEQ ID NO: 734438
ucucacaucuuaauaacau

SEQ ID NO: 734440 - RNA, 19 nt, Artificial Sequence
  Description of Artificial Sequence: Synthetic oligonucleotide
  Sense strand starting at position 601 of SEQ ID NO: 586656
guuauuaagaugugagaua

SEQ ID NO: 734441 - RNA, 19 nt, Artificial Sequence
  Description of Artificial Sequence: Synthetic oligonucleotide
  Antisense strand to SEQ ID NO: 734440
uaucucacaucuuaauaac

SEQ ID NO: 734442 - RNA, 19 nt, Artificial Sequence
  Description of Artificial Sequence: Synthetic oligonucleotide
  Sense strand starting at position 612 of SEQ ID NO: 586656
gugagauacagucaguuau

SEQ ID NO: 734443 - RNA, 19 nt, Artificial Sequence
  Description of Artificial Sequence: Synthetic oligonucleotide
  Antisense strand to SEQ ID NO: 734442
auaacugacuguaucucac

SEQ ID NO: 734444 - RNA, 19 nt, Artificial Sequence
  Description of Artificial Sequence: Synthetic oligonucleotide
  Sense strand starting at position 669 of SEQ ID NO: 586656
aauuguuaagcuuauggau

SEQ ID NO: 734445 - RNA, 19 nt, Artificial Sequence
  Description of Artificial Sequence: Synthetic oligonucleotide
  Antisense strand to SEQ ID NO: 734444
auccauaagcuuaacaauu

SEQ ID NO: 734446 - RNA, 19 nt, Artificial Sequence
  Description of Artificial Sequence: Synthetic oligonucleotide
  Sense strand starting at position 844 of SEQ ID NO: 586656
caauuuauugucggccagu

SEQ ID NO: 734447 - RNA, 19 nt, Artificial Sequence
  Description of Artificial Sequence: Synthetic oligonucleotide
  Antisense strand to SEQ ID NO: 734446
acuggccgacaauaaauug

SEQ ID NO: 734448 - RNA, 19 nt, Artificial Sequence
  Description of Artificial Sequence: Synthetic oligonucleotide
  Sense strand starting at position 845 of SEQ ID NO: 586656
aauuuauugucggccaguu

SEQ ID NO: 734449 - RNA, 19 nt, Artificial Sequence
  Description of Artificial Sequence: Synthetic oligonucleotide
  Antisense strand to SEQ ID NO: 734448
aacuggccgacaauaaauu

SEQ ID NO: 734450 - RNA, 19 nt, Artificial Sequence
  Description of Artificial Sequence: Synthetic oligonucleotide
  Sense strand starting at position 903 of SEQ ID NO: 586656
ccagaaagguaagcuuauu

SEQ ID NO: 734451 - RNA, 19 nt, Artificial Sequence
  Description of Artificial Sequence: Synthetic oligonucleotide
  Antisense strand to SEQ ID NO: 734450
aauaagcuuaccuuucugg

SEQ ID NO: 734452 - RNA, 19 nt, Artificial Sequence
  Description of Artificial Sequence: Synthetic oligonucleotide
  Sense strand starting at position 984 of SEQ ID NO: 586656
uuagguuuccaguaagguc

SEQ ID NO: 734453 - RNA, 19 nt, Artificial Sequence
  Description of Artificial Sequence: Synthetic oligonucleotide
  Antisense strand to SEQ ID NO: 734452
gaccuuacuggaaaccuaa

SEQ ID NO: 734454 - RNA, 19 nt, Artificial Sequence
  Description of Artificial Sequence: Synthetic oligonucleotide
  Sense strand starting at position 991 of SEQ ID NO: 586656
uccaguaaggucuagugaa

SEQ ID NO: 734455 - RNA, 19 nt, Artificial Sequence
  Description of Artificial Sequence: Synthetic oligonucleotide
  Antisense strand to SEQ ID NO: 734454
uucacuagaccuuacugga

SEQ ID NO: 734456 - RNA, 19 nt, Artificial Sequence
  Description of Artificial Sequence: Synthetic oligonucleotide
  Sense strand starting at position 1003 of SEQ ID NO: 586656
uagugaaauuaacuuugga

SEQ ID NO: 734457 - RNA, 19 nt, Artificial Sequence
  Description of Artificial Sequence: Synthetic oligonucleotide
  Antisense strand to SEQ ID NO: 734456
uccaaaguuaauuucacua

SEQ ID NO: 734458 - RNA, 19 nt, Artificial Sequence
  Description of Artificial Sequence: Synthetic oligonucleotide
  Sense strand starting at position 1038 of SEQ ID NO: 586656
uaggaaauguuguuaacug

SEQ ID NO: 734459 - RNA, 19 nt, Artificial Sequence
  Description of Artificial Sequence: Synthetic oligonucleotide
  Antisense strand to SEQ ID NO: 734458
caguuaacaacauuuccua

SEQ ID NO: 734460 - RNA, 19 nt, Artificial Sequence
  Description of Artificial Sequence: Synthetic oligonucleotide
  Sense strand starting at position 1239 of SEQ ID NO: 586656
uuucuuuagguauauguga

SEQ ID NO: 734461 - RNA, 19 nt, Artificial Sequence
  Description of Artificial Sequence: Synthetic oligonucleotide
  Antisense strand to SEQ ID NO: 734460
ucacauauaccuaaagaaa

SEQ ID NO: 734462 - RNA, 19 nt, Artificial Sequence
  Description of Artificial Sequence: Synthetic oligonucleotide
  Sense strand starting at position 1254 of SEQ ID NO: 586656
gugauaugugguuaugacu

SEQ ID NO: 734463 - RNA, 19 nt, Artificial Sequence
  Description of Artificial Sequence: Synthetic oligonucleotide
  Antisense strand to SEQ ID NO: 734462
agucauaaccacauaucac

SEQ ID NO: 734464 - RNA, 19 nt, Artificial Sequence
  Description of Artificial Sequence: Synthetic oligonucleotide
  Sense strand starting at position 1263 of SEQ ID NO: 586656
gguuaugacugacauuuaa

SEQ ID NO: 734465 - RNA, 19 nt, Artificial Sequence
  Description of Artificial Sequence: Synthetic oligonucleotide
  Antisense strand to SEQ ID NO: 734464
uuaaaugucagucauaacc

SEQ ID NO: 734466 - RNA, 19 nt, Artificial Sequence
  Description of Artificial Sequence: Synthetic oligonucleotide
  Sense strand starting at position 1479 of SEQ ID NO: 586656
ccucaagguuaacuguaaa

SEQ ID NO: 734467 - RNA, 19 nt, Artificial Sequence
  Description of Artificial Sequence: Synthetic oligonucleotide
  Antisense strand to SEQ ID NO: 734466
uuuacaguuaaccuugagg

SEQ ID NO: 734468 - RNA, 19 nt, Artificial Sequence
  Description of Artificial Sequence: Synthetic oligonucleotide
  Sense strand starting at position 1482 of SEQ ID NO: 586656
caagguuaacuguaaaguu

SEQ ID NO: 734469 - RNA, 19 nt, Artificial Sequence
  Description of Artificial Sequence: Synthetic oligonucleotide
  Antisense strand to SEQ ID NO: 734468
aacuuuacaguuaaccuug

SEQ ID NO: 734470 - RNA, 19 nt, Artificial Sequence
  Description of Artificial Sequence: Synthetic oligonucleotide
  Sense strand starting at position 1623 of SEQ ID NO: 586656
augauaaacucugugaagu

SEQ ID NO: 734471 - RNA, 19 nt, Artificial Sequence
  Description of Artificial Sequence: Synthetic oligonucleotide
  Antisense strand to SEQ ID NO: 734470
acuucacagaguuuaucau

SEQ ID NO: 734472 - RNA, 19 nt, Artificial Sequence
  Description of Artificial Sequence: Synthetic oligonucleotide
  Sense strand starting at position 1624 of SEQ ID NO: 586656
ugauaaacucugugaaguu

SEQ ID NO: 734473 - RNA, 19 nt, Artificial Sequence
  Description of Artificial Sequence: Synthetic oligonucleotide
  Antisense strand to SEQ ID NO: 734472
aacuucacagaguuuauca

SEQ ID NO: 734474 - RNA, 19 nt, Artificial Sequence
  Description of Artificial Sequence: Synthetic oligonucleotide
  Sense strand starting at position 1795 of SEQ ID NO: 586656
agaagcuucguuuaucaaa

SEQ ID NO: 734475 - RNA, 19 nt, Artificial Sequence
  Description of Artificial Sequence: Synthetic oligonucleotide
  Antisense strand to SEQ ID NO: 734474
uuugauaaacgaagcuucu

SEQ ID NO: 734476 - RNA, 19 nt, Artificial Sequence
  Description of Artificial Sequence: Synthetic oligonucleotide
  Sense strand starting at position 1846 of SEQ ID NO: 586656
cauugacugugaucuagau

SEQ ID NO: 734477 - RNA, 19 nt, Artificial Sequence
  Description of Artificial Sequence: Synthetic oligonucleotide
  Antisense strand to SEQ ID NO: 734476
aucuagaucacagucaaug

SEQ ID NO: 734478 - RNA, 19 nt, Artificial Sequence
  Description of Artificial Sequence: Synthetic oligonucleotide
  Sense strand starting at position 1850 of SEQ ID NO: 586656
gacugugaucuagauucuu

SEQ ID NO: 734479 - RNA, 19 nt, Artificial Sequence
  Description of Artificial Sequence: Synthetic oligonucleotide
  Antisense strand to SEQ ID NO: 734478
aagaaucuagaucacaguc

SEQ ID NO: 734480 - RNA, 19 nt, Artificial Sequence
  Description of Artificial Sequence: Synthetic oligonucleotide
  Sense strand starting at position 2144 of SEQ ID NO: 586656
ccugauuaaggaugguuua

SEQ ID NO: 734481 - RNA, 19 nt, Artificial Sequence
  Description of Artificial Sequence: Synthetic oligonucleotide
  Antisense strand to SEQ ID NO: 734480
uaaaccauccuuaaucagg

SEQ ID NO: 734482 - RNA, 19 nt, Artificial Sequence
  Description of Artificial Sequence: Synthetic oligonucleotide
  Sense strand starting at position 2145 of SEQ ID NO: 586656
cugauuaaggaugguuuau

SEQ ID NO: 734483 - RNA, 19 nt, Artificial Sequence
  Description of Artificial Sequence: Synthetic oligonucleotide
  Antisense strand to SEQ ID NO: 734482
auaaaccauccuuaaucag

SEQ ID NO: 734484 - RNA, 19 nt, Artificial Sequence
  Description of Artificial Sequence: Synthetic oligonucleotide
  Sense strand starting at position 2670 of SEQ ID NO: 586656
gaacauggauguuuacaua

SEQ ID NO: 734485 - RNA, 19 nt, Artificial Sequence
  Description of Artificial Sequence: Synthetic oligonucleotide
  Antisense strand to SEQ ID NO: 734484
uauguaaacauccauguuc

SEQ ID NO: 734486 - RNA, 19 nt, Artificial Sequence
  Description of Artificial Sequence: Synthetic oligonucleotide
  Sense strand starting at position 2744 of SEQ ID NO: 586656
guagaagugaaaugucuua

SEQ ID NO: 734487 - RNA, 19 nt, Artificial Sequence
  Description of Artificial Sequence: Synthetic oligonucleotide
  Antisense strand to SEQ ID NO: 734486
uaagacauuucacuucuac

SEQ ID NO: 734488 - RNA, 19 nt, Artificial Sequence
  Description of Artificial Sequence: Synthetic oligonucleotide
  Sense strand starting at position 2820 of SEQ ID NO: 586656
ugcaaccuuccugagacuu

SEQ ID NO: 734489 - RNA, 19 nt, Artificial Sequence
  Description of Artificial Sequence: Synthetic oligonucleotide
  Antisense strand to SEQ ID NO: 734488
aagucucaggaagguugca

SEQ ID NO: 734490 - RNA, 19 nt, Artificial Sequence
  Description of Artificial Sequence: Synthetic oligonucleotide
  Sense strand starting at position 2831 of SEQ ID NO: 586656
ugagacuucugagugacuc

SEQ ID NO: 734491 - RNA, 19 nt, Artificial Sequence
  Description of Artificial Sequence: Synthetic oligonucleotide
  Antisense strand to SEQ ID NO: 734490
gagucacucagaagucuca

SEQ ID NO: 734492 - RNA, 19 nt, Artificial Sequence
  Description of Artificial Sequence: Synthetic oligonucleotide
  Sense strand starting at position 3326 of SEQ ID NO: 586656
gcauuugucccaggaaugc

SEQ ID NO: 734493 - RNA, 19 nt, Artificial Sequence
  Description of Artificial Sequence: Synthetic oligonucleotide
  Antisense strand to SEQ ID NO: 734492
gcauuccugggacaaaugc

SEQ ID NO: 734494 - RNA, 19 nt, Artificial Sequence
  Description of Artificial Sequence: Synthetic oligonucleotide
  Sense strand starting at position 3421 of SEQ ID NO: 586656
uugcaauagauguagaagu

SEQ ID NO: 734495 - RNA, 19 nt, Artificial Sequence
  Description of Artificial Sequence: Synthetic oligonucleotide
  Antisense strand to SEQ ID NO: 734494
acuucuacaucuauugcaa

SEQ ID NO: 734496 - RNA, 19 nt, Artificial Sequence
  Description of Artificial Sequence: Synthetic oligonucleotide
  Sense strand starting at position 3431 of SEQ ID NO: 586656
uguagaaguacuugauaag

SEQ ID NO: 734497 - RNA, 19 nt, Artificial Sequence
  Description of Artificial Sequence: Synthetic oligonucleotide
  Antisense strand to SEQ ID NO: 734496
cuuaucaaguacuucuaca

SEQ ID NO: 734498 - RNA, 19 nt, Artificial Sequence
  Description of Artificial Sequence: Synthetic oligonucleotide
  Sense strand starting at position 3432 of SEQ ID NO: 586656
guagaaguacuugauaagu

SEQ ID NO: 734499 - RNA, 19 nt, Artificial Sequence
  Description of Artificial Sequence: Synthetic oligonucleotide
  Antisense strand to SEQ ID NO: 734498
acuuaucaaguacuucuac

SEQ ID NO: 734500 - RNA, 19 nt, Artificial Sequence
  Description of Artificial Sequence: Synthetic oligonucleotide
  Sense strand starting at position 3505 of SEQ ID NO: 586656
gcuaaaggguacccauaaa

SEQ ID NO: 734501 - RNA, 19 nt, Artificial Sequence
  Description of Artificial Sequence: Synthetic oligonucleotide
  Antisense strand to SEQ ID NO: 734500
uuuauggguacccuuuagc

SEQ ID NO: 734502 - RNA, 19 nt, Artificial Sequence
  Description of Artificial Sequence: Synthetic oligonucleotide
  Sense strand starting at position 3625 of SEQ ID NO: 586656
cugagauaguaauuagcca

SEQ ID NO: 734503 - RNA, 19 nt, Artificial Sequence
  Description of Artificial Sequence: Synthetic oligonucleotide
  Antisense strand to SEQ ID NO: 734502
uggcuaauuacuaucucag

SEQ ID NO: 734504 - RNA, 19 nt, Artificial Sequence
  Description of Artificial Sequence: Synthetic oligonucleotide
  Sense strand starting at position 54 of SEQ ID NO: 586657
ugaaaucacaguuguggaa

SEQ ID NO: 734505 - RNA, 19 nt, Artificial Sequence
  Description of Artificial Sequence: Synthetic oligonucleotide
  Antisense strand to SEQ ID NO: 734504
uuccacaacugugauuuca

SEQ ID NO: 734506 - RNA, 19 nt, Artificial Sequence
  Description of Artificial Sequence: Synthetic oligonucleotide
  Sense strand starting at position 95 of SEQ ID NO: 586657
gaagcugacucuguuaacu

SEQ ID NO: 734507 - RNA, 19 nt, Artificial Sequence
  Description of Artificial Sequence: Synthetic oligonucleotide
  Antisense strand to SEQ ID NO: 734506
aguuaacagagucagcuuc

SEQ ID NO: 734508 - RNA, 19 nt, Artificial Sequence
  Description of Artificial Sequence: Synthetic oligonucleotide
  Sense strand starting at position 257 of SEQ ID NO: 586657
uugaaagcauauucuaagu

SEQ ID NO: 734509 - RNA, 19 nt, Artificial Sequence
  Description of Artificial Sequence: Synthetic oligonucleotide
  Antisense strand to SEQ ID NO: 734508
acuuagaauaugcuuucaa

SEQ ID NO: 734510 - RNA, 19 nt, Artificial Sequence
  Description of Artificial Sequence: Synthetic oligonucleotide
  Sense strand starting at position 286 of SEQ ID NO: 586657
ccuuuacaagauuggaagu

SEQ ID NO: 734511 - RNA, 19 nt, Artificial Sequence
  Description of Artificial Sequence: Synthetic oligonucleotide
  Antisense strand to SEQ ID NO: 734510
acuuccaaucuuguaaagg

SEQ ID NO: 734512 - RNA, 19 nt, Artificial Sequence
  Description of Artificial Sequence: Synthetic oligonucleotide
  Sense strand starting at position 340 of SEQ ID NO: 586657
auacauggaugcucauaga

SEQ ID NO: 734513 - RNA, 19 nt, Artificial Sequence
  Description of Artificial Sequence: Synthetic oligonucleotide
  Antisense strand to SEQ ID NO: 734512
ucuaugagcauccauguau

SEQ ID NO: 734514 - RNA, 19 nt, Artificial Sequence
  Description of Artificial Sequence: Synthetic oligonucleotide
  Sense strand starting at position 359 of SEQ ID NO: 586657
guuuacugagaguaauucu

SEQ ID NO: 734515 - RNA, 19 nt, Artificial Sequence
  Description of Artificial Sequence: Synthetic oligonucleotide
  Antisense strand to SEQ ID NO: 734514
agaauuacucucaguaaac

SEQ ID NO: 734516 - RNA, 19 nt, Artificial Sequence
  Description of Artificial Sequence: Synthetic oligonucleotide
  Sense strand starting at position 368 of SEQ ID NO: 586657
gaguaauucugucucaaag

SEQ ID NO: 734517 - RNA, 19 nt, Artificial Sequence
  Description of Artificial Sequence: Synthetic oligonucleotide
  Antisense strand to SEQ ID NO: 734516
cuuugagacagaauuacuc

SEQ ID NO: 734518 - RNA, 19 nt, Artificial Sequence
  Description of Artificial Sequence: Synthetic oligonucleotide
  Sense strand starting at position 513 of SEQ ID NO: 586657
cuaaauuaggacgguucua

SEQ ID NO: 734519 - RNA, 19 nt, Artificial Sequence
  Description of Artificial Sequence: Synthetic oligonucleotide
  Antisense strand to SEQ ID NO: 734518
uagaaccguccuaauuuag

SEQ ID NO: 734520 - RNA, 19 nt, Artificial Sequence
  Description of Artificial Sequence: Synthetic oligonucleotide
  Sense strand starting at position 649 of SEQ ID NO: 586657
auagcaguugguuagaaca

SEQ ID NO: 734521 - RNA, 19 nt, Artificial Sequence
  Description of Artificial Sequence: Synthetic oligonucleotide
  Antisense strand to SEQ ID NO: 734520
uguucuaaccaacugcuau

SEQ ID NO: 734522 - RNA, 19 nt, Artificial Sequence
  Description of Artificial Sequence: Synthetic oligonucleotide
  Sense strand starting at position 893 of SEQ ID NO: 586657
ucaauaacuguuugugaua

SEQ ID NO: 734523 - RNA, 19 nt, Artificial Sequence
  Description of Artificial Sequence: Synthetic oligonucleotide
  Antisense strand to SEQ ID NO: 734522
uaucacaaacaguuauuga

SEQ ID NO: 734524 - RNA, 19 nt, Artificial Sequence
  Description of Artificial Sequence: Synthetic oligonucleotide
  Sense strand starting at position 904 of SEQ ID NO: 586657
uugugauaugcucauucug

SEQ ID NO: 734525 - RNA, 19 nt, Artificial Sequence
  Description of Artificial Sequence: Synthetic oligonucleotide
  Antisense strand to SEQ ID NO: 734524
cagaaugagcauaucacaa

SEQ ID NO: 734526 - RNA, 19 nt, Artificial Sequence
  Description of Artificial Sequence: Synthetic oligonucleotide
  Sense strand starting at position 1033 of SEQ ID NO: 586657
agagaauaaugugugaucu

SEQ ID NO: 734527 - RNA, 19 nt, Artificial Sequence
  Description of Artificial Sequence: Synthetic oligonucleotide
  Antisense strand to SEQ ID NO: 734526
agaucacacauuauucucu

SEQ ID NO: 734528 - RNA, 19 nt, Artificial Sequence
  Description of Artificial Sequence: Synthetic oligonucleotide
  Sense strand starting at position 1034 of SEQ ID NO: 586657
gagaauaaugugugaucug

SEQ ID NO: 734529 - RNA, 19 nt, Artificial Sequence
  Description of Artificial Sequence: Synthetic oligonucleotide
  Antisense strand to SEQ ID NO: 734528
cagaucacacauuauucuc

SEQ ID NO: 734530 - RNA, 19 nt, Artificial Sequence
  Description of Artificial Sequence: Synthetic oligonucleotide
  Sense strand starting at position 1346 of SEQ ID NO: 586657
gcaugugaauuucuucuca

SEQ ID NO: 734531 - RNA, 19 nt, Artificial Sequence
  Description of Artificial Sequence: Synthetic oligonucleotide
  Antisense strand to SEQ ID NO: 734530
ugagaagaaauucacaugc

SEQ ID NO: 734532 - RNA, 19 nt, Artificial Sequence
  Description of Artificial Sequence: Synthetic oligonucleotide
  Sense strand starting at position 2019 of SEQ ID NO: 586657
gacacugcugcuuaggaua

SEQ ID NO: 734533 - RNA, 19 nt, Artificial Sequence
  Description of Artificial Sequence: Synthetic oligonucleotide
  Antisense strand to SEQ ID NO: 734532
uauccuaagcagcaguguc

SEQ ID NO: 734534 - RNA, 19 nt, Artificial Sequence
  Description of Artificial Sequence: Synthetic oligonucleotide
  Sense strand starting at position 2024 of SEQ ID NO: 586657
ugcugcuuaggauacaaau

SEQ ID NO: 734535 - RNA, 19 nt, Artificial Sequence
  Description of Artificial Sequence: Synthetic oligonucleotide
  Antisense strand to SEQ ID NO: 734534
auuuguauccuaagcagca

SEQ ID NO: 734536 - RNA, 19 nt, Artificial Sequence
  Description of Artificial Sequence: Synthetic oligonucleotide
  Sense strand starting at position 2093 of SEQ ID NO: 586657
uuccuuucugagggaaugu

SEQ ID NO: 734537 - RNA, 19 nt, Artificial Sequence
  Description of Artificial Sequence: Synthetic oligonucleotide
  Antisense strand to SEQ ID NO: 734536
acauucccucagaaaggaa

SEQ ID NO: 734538 - RNA, 19 nt, Artificial Sequence
  Description of Artificial Sequence: Synthetic oligonucleotide
  Sense strand starting at position 2094 of SEQ ID NO: 586657
uccuuucugagggaauguu

SEQ ID NO: 734539 - RNA, 19 nt, Artificial Sequence
  Description of Artificial Sequence: Synthetic oligonucleotide
  Antisense strand to SEQ ID NO: 734538
aacauucccucagaaagga

SEQ ID NO: 734540 - RNA, 19 nt, Artificial Sequence
  Description of Artificial Sequence: Synthetic oligonucleotide
  Sense strand starting at position 2102 of SEQ ID NO: 586657
gagggaauguugggaauuu

SEQ ID NO: 734541 - RNA, 19 nt, Artificial Sequence
  Description of Artificial Sequence: Synthetic oligonucleotide
  Antisense strand to SEQ ID NO: 734540
aaauucccaacauucccuc

SEQ ID NO: 734542 - RNA, 19 nt, Artificial Sequence
  Description of Artificial Sequence: Synthetic oligonucleotide
  Sense strand starting at position 2291 of SEQ ID NO: 586657
agaagagaagcuugcaacu

SEQ ID NO: 734543 - RNA, 19 nt, Artificial Sequence
  Description of Artificial Sequence: Synthetic oligonucleotide
  Antisense strand to SEQ ID NO: 734542
aguugcaagcuucucuucu

SEQ ID NO: 734544 - RNA, 19 nt, Artificial Sequence
  Description of Artificial Sequence: Synthetic oligonucleotide
  Sense strand starting at position 2545 of SEQ ID NO: 586657
guaauaaaucuaggagcua

SEQ ID NO: 734545 - RNA, 19 nt, Artificial Sequence
  Description of Artificial Sequence: Synthetic oligonucleotide
  Antisense strand to SEQ ID NO: 734544
uagcuccuagauuuauuac

SEQ ID NO: 734546 - RNA, 19 nt, Artificial Sequence
  Description of Artificial Sequence: Synthetic oligonucleotide
  Sense strand starting at position 2588 of SEQ ID NO: 586657
uguguuuguguaucuguga

SEQ ID NO: 734547 - RNA, 19 nt, Artificial Sequence
  Description of Artificial Sequence: Synthetic oligonucleotide
  Antisense strand to SEQ ID NO: 734546
ucacagauacacaaacaca

SEQ ID NO: 734548 - RNA, 19 nt, Artificial Sequence
  Description of Artificial Sequence: Synthetic oligonucleotide
  Sense strand starting at position 2646 of SEQ ID NO: 586657
gggaaauauuucgauugua

SEQ ID NO: 734549 - RNA, 19 nt, Artificial Sequence
  Description of Artificial Sequence: Synthetic oligonucleotide
  Antisense strand to SEQ ID NO: 734548
uacaaucgaaauauuuccc

SEQ ID NO: 734550 - RNA, 19 nt, Artificial Sequence
  Description of Artificial Sequence: Synthetic oligonucleotide
  Sense strand starting at position 2703 of SEQ ID NO: 586657
gccuauuaacucugaaagg

SEQ ID NO: 734551 - RNA, 19 nt, Artificial Sequence
  Description of Artificial Sequence: Synthetic oligonucleotide
  Antisense strand to SEQ ID NO: 734550
ccuuucagaguuaauaggc

SEQ ID NO: 734552 - RNA, 19 nt, Artificial Sequence
  Description of Artificial Sequence: Synthetic oligonucleotide
  Sense strand starting at position 3073 of SEQ ID NO: 586657
uccuuaagugcuuauugac

SEQ ID NO: 734553 - RNA, 19 nt, Artificial Sequence
  Description of Artificial Sequence: Synthetic oligonucleotide
  Antisense strand to SEQ ID NO: 734552
gucaauaagcacuuaagga

SEQ ID NO: 734554 - RNA, 19 nt, Artificial Sequence
  Description of Artificial Sequence: Synthetic oligonucleotide
  Sense strand starting at position 3099 of SEQ ID NO: 586657
agaacaauaguuugcaguu

SEQ ID NO: 734555 - RNA, 19 nt, Artificial Sequence
  Description of Artificial Sequence: Synthetic oligonucleotide
  Antisense strand to SEQ ID NO: 734554
aacugcaaacuauuguucu

SEQ ID NO: 734556 - RNA, 19 nt, Artificial Sequence
  Description of Artificial Sequence: Synthetic oligonucleotide
  Sense strand starting at position 3100 of SEQ ID NO: 586657
gaacaauaguuugcaguua

SEQ ID NO: 734557 - RNA, 19 nt, Artificial Sequence
  Description of Artificial Sequence: Synthetic oligonucleotide
  Antisense strand to SEQ ID NO: 734556
uaacugcaaacuauuguuc

SEQ ID NO: 734558 - RNA, 19 nt, Artificial Sequence
  Description of Artificial Sequence: Synthetic oligonucleotide
  Sense strand starting at position 3372 of SEQ ID NO: 586657
cuguauguuagggaucaug

SEQ ID NO: 734559 - RNA, 19 nt, Artificial Sequence
  Description of Artificial Sequence: Synthetic oligonucleotide
  Antisense strand to SEQ ID NO: 734558
caugaucccuaacauacag

SEQ ID NO: 734560 - RNA, 19 nt, Artificial Sequence
  Description of Artificial Sequence: Synthetic oligonucleotide
  Sense strand starting at position 3375 of SEQ ID NO: 586657
uauguuagggaucaugguu

SEQ ID NO: 734561 - RNA, 19 nt, Artificial Sequence
  Description of Artificial Sequence: Synthetic oligonucleotide
  Antisense strand to SEQ ID NO: 734560
aaccaugaucccuaacaua

SEQ ID NO: 734562 - RNA, 19 nt, Artificial Sequence
  Description of Artificial Sequence: Synthetic oligonucleotide
  Sense strand starting at position 3382 of SEQ ID NO: 586657
gggaucaugguugaguguu

SEQ ID NO: 734563 - RNA, 19 nt, Artificial Sequence
  Description of Artificial Sequence: Synthetic oligonucleotide
  Antisense strand to SEQ ID NO: 734562
aacacucaaccaugauccc

SEQ ID NO: 734564 - RNA, 19 nt, Artificial Sequence
  Description of Artificial Sequence: Synthetic oligonucleotide
  Sense strand starting at position 3399 of SEQ ID NO: 586657
uugggauguuguguuagag

SEQ ID NO: 734565 - RNA, 19 nt, Artificial Sequence
  Description of Artificial Sequence: Synthetic oligonucleotide
  Antisense strand to SEQ ID NO: 734564
cucuaacacaacaucccaa

SEQ ID NO: 734566 - RNA, 19 nt, Artificial Sequence
  Description of Artificial Sequence: Synthetic oligonucleotide
  Sense strand starting at position 3603 of SEQ ID NO: 586657
uuauuuaugccaugguauc

SEQ ID NO: 734567 - RNA, 19 nt, Artificial Sequence
  Description of Artificial Sequence: Synthetic oligonucleotide
  Antisense strand to SEQ ID NO: 734566
gauaccauggcauaaauaa

SEQ ID NO: 734568 - RNA, 19 nt, Artificial Sequence
  Description of Artificial Sequence: Synthetic oligonucleotide
  Sense strand starting at position 3614 of SEQ ID NO: 586657
augguaucuuaagugauua

SEQ ID NO: 734569 - RNA, 19 nt, Artificial Sequence
  Description of Artificial Sequence: Synthetic oligonucleotide
  Antisense strand to SEQ ID NO: 734568
uaaucacuuaagauaccau

SEQ ID NO: 734570 - RNA, 19 nt, Artificial Sequence
  Description of Artificial Sequence: Synthetic oligonucleotide
  Sense strand starting at position 3643 of SEQ ID NO: 586657
auugguauugacuguauaa

SEQ ID NO: 734571 - RNA, 19 nt, Artificial Sequence
  Description of Artificial Sequence: Synthetic oligonucleotide
  Antisense strand to SEQ ID NO: 734570
uuauacagucaauaccaau

SEQ ID NO: 734572 - RNA, 19 nt, Artificial Sequence
  Description of Artificial Sequence: Synthetic oligonucleotide
  Sense strand starting at position 3645 of SEQ ID NO: 586657
ugguauugacuguauaauu

SEQ ID NO: 734573 - RNA, 19 nt, Artificial Sequence
  Description of Artificial Sequence: Synthetic oligonucleotide
  Antisense strand to SEQ ID NO: 734572
aauuauacagucaauacca

SEQ ID NO: 734574 - RNA, 19 nt, Artificial Sequence
  Description of Artificial Sequence: Synthetic oligonucleotide
  Sense strand starting at position 3650 of SEQ ID NO: 586657
uugacuguauaauugacaa

SEQ ID NO: 734575 - RNA, 19 nt, Artificial Sequence
  Description of Artificial Sequence: Synthetic oligonucleotide
  Antisense strand to SEQ ID NO: 734574
uugucaauuauacagucaa

SEQ ID NO: 734576 - RNA, 19 nt, Artificial Sequence
  Description of Artificial Sequence: Synthetic oligonucleotide
  Sense strand starting at position 3714 of SEQ ID NO: 586657
aguugugauagucagauac

SEQ ID NO: 734577 - RNA, 19 nt, Artificial Sequence
  Description of Artificial Sequence: Synthetic oligonucleotide
  Antisense strand to SEQ ID NO: 734576
guaucugacuaucacaacu

SEQ ID NO: 734578 - RNA, 19 nt, Artificial Sequence
  Description of Artificial Sequence: Synthetic oligonucleotide
  Sense strand starting at position 3839 of SEQ ID NO: 586657
caguuagaauuguuaaagg

SEQ ID NO: 734579 - RNA, 19 nt, Artificial Sequence
  Description of Artificial Sequence: Synthetic oligonucleotide
  Antisense strand to SEQ ID NO: 734578
ccuuuaacaauucuaacug

SEQ ID NO: 734580 - RNA, 19 nt, Artificial Sequence
  Description of Artificial Sequence: Synthetic oligonucleotide
  Sense strand starting at position 3930 of SEQ ID NO: 586657
gggagaucagagugcucuu

SEQ ID NO: 734581 - RNA, 19 nt, Artificial Sequence
  Description of Artificial Sequence: Synthetic oligonucleotide
  Antisense strand to SEQ ID NO: 734580
aagagcacucugaucuccc

SEQ ID NO: 734582 - RNA, 19 nt, Artificial Sequence
  Description of Artificial Sequence: Synthetic oligonucleotide
  Sense strand starting at position 3969 of SEQ ID NO: 586657
guagguacaugauaaauuu

SEQ ID NO: 734583 - RNA, 19 nt, Artificial Sequence
  Description of Artificial Sequence: Synthetic oligonucleotide
  Antisense strand to SEQ ID NO: 734582
aaauuuaucauguaccuac

SEQ ID NO: 734584 - RNA, 19 nt, Artificial Sequence
  Description of Artificial Sequence: Synthetic oligonucleotide
  Sense strand starting at position 381 of SEQ ID NO: 586658
aggugcuuguaauccuagu

SEQ ID NO: 734585 - RNA, 19 nt, Artificial Sequence
  Description of Artificial Sequence: Synthetic oligonucleotide
  Antisense strand to SEQ ID NO: 734584
acuaggauuacaagcaccu

SEQ ID NO: 734586 - RNA, 19 nt, Artificial Sequence
  Description of Artificial Sequence: Synthetic oligonucleotide
  Sense strand starting at position 1214 of SEQ ID NO: 586658
ccugacauuucucguacaa

SEQ ID NO: 734587 - RNA, 19 nt, Artificial Sequence
  Description of Artificial Sequence: Synthetic oligonucleotide
  Antisense strand to SEQ ID NO: 734586
uuguacgagaaaugucagg

SEQ ID NO: 734588 - RNA, 19 nt, Artificial Sequence
  Description of Artificial Sequence: Synthetic oligonucleotide
  Sense strand starting at position 1216 of SEQ ID NO: 586658
ugacauuucucguacaagu

SEQ ID NO: 734589 - RNA, 19 nt, Artificial Sequence
  Description of Artificial Sequence: Synthetic oligonucleotide
  Antisense strand to SEQ ID NO: 734588
acuuguacgagaaauguca

SEQ ID NO: 734590 - RNA, 19 nt, Artificial Sequence
  Description of Artificial Sequence: Synthetic oligonucleotide
  Sense strand starting at position 1292 of SEQ ID NO: 586658
ucgccuaggcgcgaucaua

SEQ ID NO: 734591 - RNA, 19 nt, Artificial Sequence
  Description of Artificial Sequence: Synthetic oligonucleotide
  Antisense strand to SEQ ID NO: 734590
uaugaucgcgccuaggcga

SEQ ID NO: 734592 - RNA, 19 nt, Artificial Sequence
  Description of Artificial Sequence: Synthetic oligonucleotide
  Sense strand starting at position 1495 of SEQ ID NO: 586658
cuaggaugcucuuccugau

SEQ ID NO: 734593 - RNA, 19 nt, Artificial Sequence
  Description of Artificial Sequence: Synthetic oligonucleotide
  Antisense strand to SEQ ID NO: 734592
aucaggaagagcauccuag

SEQ ID NO: 734594 - RNA, 19 nt, Artificial Sequence
  Description of Artificial Sequence: Synthetic oligonucleotide
  Sense strand starting at position 2132 of SEQ ID NO: 586658
cccgaaguccuucgggaau

SEQ ID NO: 734595 - RNA, 19 nt, Artificial Sequence
  Description of Artificial Sequence: Synthetic oligonucleotide
  Antisense strand to SEQ ID NO: 734594
auucccgaaggacuucggg

SEQ ID NO: 734596 - RNA, 19 nt, Artificial Sequence
  Description of Artificial Sequence: Synthetic oligonucleotide
  Sense strand starting at position 2169 of SEQ ID NO: 586658
ggaccugucugaucugcga

SEQ ID NO: 734597 - RNA, 19 nt, Artificial Sequence
  Description of Artificial Sequence: Synthetic oligonucleotide
  Antisense strand to SEQ ID NO: 734596
ucgcagaucagacaggucc

SEQ ID NO: 734598 - RNA, 19 nt, Artificial Sequence
  Description of Artificial Sequence: Synthetic oligonucleotide
  Sense strand starting at position 2317 of SEQ ID NO: 586658
gaucgaagccugugaggga

SEQ ID NO: 734599 - RNA, 19 nt, Artificial Sequence
  Description of Artificial Sequence: Synthetic oligonucleotide
  Antisense strand to SEQ ID NO: 734598
ucccucacaggcuucgauc

SEQ ID NO: 734600 - RNA, 19 nt, Artificial Sequence
  Description of Artificial Sequence: Synthetic oligonucleotide
  Sense strand starting at position 2415 of SEQ ID NO: 586658
guggguggguucgauuaca

SEQ ID NO: 734601 - RNA, 19 nt, Artificial Sequence
  Description of Artificial Sequence: Synthetic oligonucleotide
  Antisense strand to SEQ ID NO: 734600
uguaaucgaacccacccac

SEQ ID NO: 734602 - RNA, 19 nt, Artificial Sequence
  Description of Artificial Sequence: Synthetic oligonucleotide
  Sense strand starting at position 2418 of SEQ ID NO: 586658
gguggguucgauuacaggu

SEQ ID NO: 734603 - RNA, 19 nt, Artificial Sequence
  Description of Artificial Sequence: Synthetic oligonucleotide
  Antisense strand to SEQ ID NO: 734602
accuguaaucgaacccacc

SEQ ID NO: 734604 - RNA, 19 nt, Artificial Sequence
  Description of Artificial Sequence: Synthetic oligonucleotide
  Sense strand starting at position 2455 of SEQ ID NO: 586658
gggaucugccuguaaaccu

SEQ ID NO: 734605 - RNA, 19 nt, Artificial Sequence
  Description of Artificial Sequence: Synthetic oligonucleotide
  Antisense strand to SEQ ID NO: 734604
agguuuacaggcagauccc

SEQ ID NO: 734606 - RNA, 19 nt, Artificial Sequence
  Description of Artificial Sequence: Synthetic oligonucleotide
  Sense strand starting at position 2462 of SEQ ID NO: 586658
gccuguaaaccucgacgua

SEQ ID NO: 734607 - RNA, 19 nt, Artificial Sequence
  Description of Artificial Sequence: Synthetic oligonucleotide
  Antisense strand to SEQ ID NO: 734606
uacgucgagguuuacaggc

SEQ ID NO: 734608 - RNA, 19 nt, Artificial Sequence
  Description of Artificial Sequence: Synthetic oligonucleotide
  Sense strand starting at position 2605 of SEQ ID NO: 586658
gacagugaauuccaguuaa

SEQ ID NO: 734609 - RNA, 19 nt, Artificial Sequence
  Description of Artificial Sequence: Synthetic oligonucleotide
  Antisense strand to SEQ ID NO: 734608
uuaacuggaauucacuguc

SEQ ID NO: 734610 - RNA, 19 nt, Artificial Sequence
  Description of Artificial Sequence: Synthetic oligonucleotide
  Sense strand starting at position 2848 of SEQ ID NO: 586658
guggauuggugaugccuca

SEQ ID NO: 734611 - RNA, 19 nt, Artificial Sequence
  Description of Artificial Sequence: Synthetic oligonucleotide
  Antisense strand to SEQ ID NO: 734610
ugaggcaucaccaauccac

SEQ ID NO: 734612 - RNA, 19 nt, Artificial Sequence
  Description of Artificial Sequence: Synthetic oligonucleotide
  Sense strand starting at position 2855 of SEQ ID NO: 586658
ggugaugccucaggugaga

SEQ ID NO: 734613 - RNA, 19 nt, Artificial Sequence
  Description of Artificial Sequence: Synthetic oligonucleotide
  Antisense strand to SEQ ID NO: 734612
ucucaccugaggcaucacc

SEQ ID NO: 734614 - RNA, 19 nt, Artificial Sequence
  Description of Artificial Sequence: Synthetic oligonucleotide
  Sense strand starting at position 2857 of SEQ ID NO: 586658
ugaugccucaggugagaga

SEQ ID NO: 734615 - RNA, 19 nt, Artificial Sequence
  Description of Artificial Sequence: Synthetic oligonucleotide
  Antisense strand to SEQ ID NO: 734614
ucucucaccugaggcauca

SEQ ID NO: 734616 - RNA, 19 nt, Artificial Sequence
  Description of Artificial Sequence: Synthetic oligonucleotide
  Sense strand starting at position 2969 of SEQ ID NO: 586658
uggagagcucuugaagggu

SEQ ID NO: 734617 - RNA, 19 nt, Artificial Sequence
  Description of Artificial Sequence: Synthetic oligonucleotide
  Antisense strand to SEQ ID NO: 734616
acccuucaagagcucucca

SEQ ID NO: 734618 - RNA, 19 nt, Artificial Sequence
  Description of Artificial Sequence: Synthetic oligonucleotide
  Sense strand starting at position 2995 of SEQ ID NO: 586658
gagugaugaagucaaaugu

SEQ ID NO: 734619 - RNA, 19 nt, Artificial Sequence
  Description of Artificial Sequence: Synthetic oligonucleotide
  Antisense strand to SEQ ID NO: 734618
acauuugacuucaucacuc

SEQ ID NO: 734620 - RNA, 19 nt, Artificial Sequence
  Description of Artificial Sequence: Synthetic oligonucleotide
  Sense strand starting at position 3019 of SEQ ID NO: 586658
uuagaaagauccugggaag

SEQ ID NO: 734621 - RNA, 19 nt, Artificial Sequence
  Description of Artificial Sequence: Synthetic oligonucleotide
  Antisense strand to SEQ ID NO: 734620
cuucccaggaucuuucuaa

SEQ ID NO: 734622 - RNA, 19 nt, Artificial Sequence
  Description of Artificial Sequence: Synthetic oligonucleotide
  Sense strand starting at position 3022 of SEQ ID NO: 586658
gaaagauccugggaaggga

SEQ ID NO: 734623 - RNA, 19 nt, Artificial Sequence
  Description of Artificial Sequence: Synthetic oligonucleotide
  Antisense strand to SEQ ID NO: 734622
ucccuucccaggaucuuuc

SEQ ID NO: 734624 - RNA, 19 nt, Artificial Sequence
  Description of Artificial Sequence: Synthetic oligonucleotide
  Sense strand starting at position 3066 of SEQ ID NO: 586658
cugguaagccagugaagac

SEQ ID NO: 734625 - RNA, 19 nt, Artificial Sequence
  Description of Artificial Sequence: Synthetic oligonucleotide
  Antisense strand to SEQ ID NO: 734624
gucuucacuggcuuaccag

SEQ ID NO: 734626 - RNA, 19 nt, Artificial Sequence
  Description of Artificial Sequence: Synthetic oligonucleotide
  Sense strand starting at position 3067 of SEQ ID NO: 586658
ugguaagccagugaagacu

SEQ ID NO: 734627 - RNA, 19 nt, Artificial Sequence
  Description of Artificial Sequence: Synthetic oligonucleotide
  Antisense strand to SEQ ID NO: 734626
agucuucacuggcuuacca

SEQ ID NO: 734628 - RNA, 19 nt, Artificial Sequence
  Description of Artificial Sequence: Synthetic oligonucleotide
  Sense strand starting at position 3108 of SEQ ID NO: 586658
ugcccaagguccuauggaa

SEQ ID NO: 734629 - RNA, 19 nt, Artificial Sequence
  Description of Artificial Sequence: Synthetic oligonucleotide
  Antisense strand to SEQ ID NO: 734628
uuccauaggaccuugggca

SEQ ID NO: 734630 - RNA, 19 nt, Artificial Sequence
  Description of Artificial Sequence: Synthetic oligonucleotide
  Sense strand starting at position 3646 of SEQ ID NO: 586658
ggugcauacacauaguaga

SEQ ID NO: 734631 - RNA, 19 nt, Artificial Sequence
  Description of Artificial Sequence: Synthetic oligonucleotide
  Antisense strand to SEQ ID NO: 734630
ucuacuauguguaugcacc

SEQ ID NO: 734632 - RNA, 19 nt, Artificial Sequence
  Description of Artificial Sequence: Synthetic oligonucleotide
  Sense strand starting at position 3649 of SEQ ID NO: 586658
gcauacacauaguagaaua

SEQ ID NO: 734633 - RNA, 19 nt, Artificial Sequence
  Description of Artificial Sequence: Synthetic oligonucleotide
  Antisense strand to SEQ ID NO: 734632
uauucuacuauguguaugc

SEQ ID NO: 734634 - RNA, 19 nt, Artificial Sequence
  Description of Artificial Sequence: Synthetic oligonucleotide
  Sense strand starting at position 55 of SEQ ID NO: 586659
ucauuacauugcucagguu

SEQ ID NO: 734635 - RNA, 19 nt, Artificial Sequence
  Description of Artificial Sequence: Synthetic oligonucleotide
  Antisense strand to SEQ ID NO: 734634
aaccugagcaauguaauga

SEQ ID NO: 734636 - RNA, 19 nt, Artificial Sequence
  Description of Artificial Sequence: Synthetic oligonucleotide
  Sense strand starting at position 179 of SEQ ID NO: 586659
ugguccagucuguguauuu

SEQ ID NO: 734637 - RNA, 19 nt, Artificial Sequence
  Description of Artificial Sequence: Synthetic oligonucleotide
  Antisense strand to SEQ ID NO: 734636
aaauacacagacuggacca

SEQ ID NO: 734638 - RNA, 19 nt, Artificial Sequence
  Description of Artificial Sequence: Synthetic oligonucleotide
  Sense strand starting at position 180 of SEQ ID NO: 586659
gguccagucuguguauuua

SEQ ID NO: 734639 - RNA, 19 nt, Artificial Sequence
  Description of Artificial Sequence: Synthetic oligonucleotide
  Antisense strand to SEQ ID NO: 734638
uaaauacacagacuggacc

SEQ ID NO: 734640 - RNA, 19 nt, Artificial Sequence
  Description of Artificial Sequence: Synthetic oligonucleotide
  Sense strand starting at position 380 of SEQ ID NO: 586659
ggguuagggugauucucuu

SEQ ID NO: 734641 - RNA, 19 nt, Artificial Sequence
  Description of Artificial Sequence: Synthetic oligonucleotide
  Antisense strand to SEQ ID NO: 734640
aagagaaucacccuaaccc

SEQ ID NO: 734642 - RNA, 19 nt, Artificial Sequence
  Description of Artificial Sequence: Synthetic oligonucleotide
  Sense strand starting at position 920 of SEQ ID NO: 586659
agccaugccaauuguggaa

SEQ ID NO: 734643 - RNA, 19 nt, Artificial Sequence
  Description of Artificial Sequence: Synthetic oligonucleotide
  Antisense strand to SEQ ID NO: 734642
uuccacaauuggcauggcu

SEQ ID NO: 734644 - RNA, 19 nt, Artificial Sequence
  Description of Artificial Sequence: Synthetic oligonucleotide
  Sense strand starting at position 1138 of SEQ ID NO: 586659
ucugcaguauuagcauuaa

SEQ ID NO: 734645 - RNA, 19 nt, Artificial Sequence
  Description of Artificial Sequence: Synthetic oligonucleotide
  Antisense strand to SEQ ID NO: 734644
uuaaugcuaauacugcaga

SEQ ID NO: 734646 - RNA, 19 nt, Artificial Sequence
  Description of Artificial Sequence: Synthetic oligonucleotide
  Sense strand starting at position 1212 of SEQ ID NO: 586659
cucagcuaugguuagauua

SEQ ID NO: 734647 - RNA, 19 nt, Artificial Sequence
  Description of Artificial Sequence: Synthetic oligonucleotide
  Antisense strand to SEQ ID NO: 734646
uaaucuaaccauagcugag

SEQ ID NO: 734648 - RNA, 19 nt, Artificial Sequence
  Description of Artificial Sequence: Synthetic oligonucleotide
  Sense strand starting at position 1219 of SEQ ID NO: 586659
augguuagauuagaacaga

SEQ ID NO: 734649 - RNA, 19 nt, Artificial Sequence
  Description of Artificial Sequence: Synthetic oligonucleotide
  Antisense strand to SEQ ID NO: 734648
ucuguucuaaucuaaccau

SEQ ID NO: 734650 - RNA, 19 nt, Artificial Sequence
  Description of Artificial Sequence: Synthetic oligonucleotide
  Sense strand starting at position 1282 of SEQ ID NO: 586659
uguaguaaucucgaauucu

SEQ ID NO: 734651 - RNA, 19 nt, Artificial Sequence
  Description of Artificial Sequence: Synthetic oligonucleotide
  Antisense strand to SEQ ID NO: 734650
agaauucgagauuacuaca

SEQ ID NO: 734652 - RNA, 19 nt, Artificial Sequence
  Description of Artificial Sequence: Synthetic oligonucleotide
  Sense strand starting at position 1312 of SEQ ID NO: 586659
acaccuauccuuuagguua

SEQ ID NO: 734653 - RNA, 19 nt, Artificial Sequence
  Description of Artificial Sequence: Synthetic oligonucleotide
  Antisense strand to SEQ ID NO: 734652
uaaccuaaaggauaggugu

SEQ ID NO: 734654 - RNA, 19 nt, Artificial Sequence
  Description of Artificial Sequence: Synthetic oligonucleotide
  Sense strand starting at position 1474 of SEQ ID NO: 586659
uuguauugaccagaguacu

SEQ ID NO: 734655 - RNA, 19 nt, Artificial Sequence
  Description of Artificial Sequence: Synthetic oligonucleotide
  Antisense strand to SEQ ID NO: 734654
aguacucuggucaauacaa

SEQ ID NO: 734656 - RNA, 19 nt, Artificial Sequence
  Description of Artificial Sequence: Synthetic oligonucleotide
  Sense strand starting at position 1576 of SEQ ID NO: 586659
cuuccuuuguugucaagga

SEQ ID NO: 734657 - RNA, 19 nt, Artificial Sequence
  Description of Artificial Sequence: Synthetic oligonucleotide
  Antisense strand to SEQ ID NO: 734656
uccuugacaacaaaggaag

SEQ ID NO: 734658 - RNA, 19 nt, Artificial Sequence
  Description of Artificial Sequence: Synthetic oligonucleotide
  Sense strand starting at position 1580 of SEQ ID NO: 586659
cuuuguugucaaggauauu

SEQ ID NO: 734659 - RNA, 19 nt, Artificial Sequence
  Description of Artificial Sequence: Synthetic oligonucleotide
  Antisense strand to SEQ ID NO: 734658
aauauccuugacaacaaag

SEQ ID NO: 734660 - RNA, 19 nt, Artificial Sequence
  Description of Artificial Sequence: Synthetic oligonucleotide
  Sense strand starting at position 1586 of SEQ ID NO: 586659
ugucaaggauauucuguuu

SEQ ID NO: 734661 - RNA, 19 nt, Artificial Sequence
  Description of Artificial Sequence: Synthetic oligonucleotide
  Antisense strand to SEQ ID NO: 734660
aaacagaauauccuugaca

SEQ ID NO: 734662 - RNA, 19 nt, Artificial Sequence
  Description of Artificial Sequence: Synthetic oligonucleotide
  Sense strand starting at position 1618 of SEQ ID NO: 586659
cgucucagauuccuacaca

SEQ ID NO: 734663 - RNA, 19 nt, Artificial Sequence
  Description of Artificial Sequence: Synthetic oligonucleotide
  Antisense strand to SEQ ID NO: 734662
uguguaggaaucugagacg

SEQ ID NO: 734664 - RNA, 19 nt, Artificial Sequence
  Description of Artificial Sequence: Synthetic oligonucleotide
  Sense strand starting at position 1681 of SEQ ID NO: 586659
agaauucucgaguaagcaa

SEQ ID NO: 734665 - RNA, 19 nt, Artificial Sequence
  Description of Artificial Sequence: Synthetic oligonucleotide
  Antisense strand to SEQ ID NO: 734664
uugcuuacucgagaauucu

SEQ ID NO: 734666 - RNA, 19 nt, Artificial Sequence
  Description of Artificial Sequence: Synthetic oligonucleotide
  Sense strand starting at position 1736 of SEQ ID NO: 586659
accaguaugcuccauguua

SEQ ID NO: 734667 - RNA, 19 nt, Artificial Sequence
  Description of Artificial Sequence: Synthetic oligonucleotide
  Antisense strand to SEQ ID NO: 734666
uaacauggagcauacuggu

SEQ ID NO: 734668 - RNA, 19 nt, Artificial Sequence
  Description of Artificial Sequence: Synthetic oligonucleotide
  Sense strand starting at position 1743 of SEQ ID NO: 586659
ugcuccauguuacuacaua

SEQ ID NO: 734669 - RNA, 19 nt, Artificial Sequence
  Description of Artificial Sequence: Synthetic oligonucleotide
  Antisense strand to SEQ ID NO: 734668
uauguaguaacauggagca

SEQ ID NO: 734670 - RNA, 19 nt, Artificial Sequence
  Description of Artificial Sequence: Synthetic oligonucleotide
  Sense strand starting at position 1915 of SEQ ID NO: 586659
aaggaagugcuuugagauu

SEQ ID NO: 734671 - RNA, 19 nt, Artificial Sequence
  Description of Artificial Sequence: Synthetic oligonucleotide
  Antisense strand to SEQ ID NO: 734670
aaucucaaagcacuuccuu

SEQ ID NO: 734672 - RNA, 19 nt, Artificial Sequence
  Description of Artificial Sequence: Synthetic oligonucleotide
  Sense strand starting at position 2780 of SEQ ID NO: 586659
gguugauacguguagguug

SEQ ID NO: 734673 - RNA, 19 nt, Artificial Sequence
  Description of Artificial Sequence: Synthetic oligonucleotide
  Antisense strand to SEQ ID NO: 734672
caaccuacacguaucaacc

SEQ ID NO: 734674 - RNA, 19 nt, Artificial Sequence
  Description of Artificial Sequence: Synthetic oligonucleotide
  Sense strand starting at position 3026 of SEQ ID NO: 586659
gcuuccuuuguuuaucuga

SEQ ID NO: 734675 - RNA, 19 nt, Artificial Sequence
  Description of Artificial Sequence: Synthetic oligonucleotide
  Antisense strand to SEQ ID NO: 734674
ucagauaaacaaaggaagc

SEQ ID NO: 734676 - RNA, 19 nt, Artificial Sequence
  Description of Artificial Sequence: Synthetic oligonucleotide
  Sense strand starting at position 3043 of SEQ ID NO: 586659
gauggaagccuuggaaucu

SEQ ID NO: 734677 - RNA, 19 nt, Artificial Sequence
  Description of Artificial Sequence: Synthetic oligonucleotide
  Antisense strand to SEQ ID NO: 734676
agauuccaaggcuuccauc

SEQ ID NO: 734678 - RNA, 19 nt, Artificial Sequence
  Description of Artificial Sequence: Synthetic oligonucleotide
  Sense strand starting at position 3052 of SEQ ID NO: 586659
cuuggaaucucuccuguua

SEQ ID NO: 734679 - RNA, 19 nt, Artificial Sequence
  Description of Artificial Sequence: Synthetic oligonucleotide
  Antisense strand to SEQ ID NO: 734678
uaacaggagagauuccaag

SEQ ID NO: 734680 - RNA, 19 nt, Artificial Sequence
  Description of Artificial Sequence: Synthetic oligonucleotide
  Sense strand starting at position 3249 of SEQ ID NO: 586659
ucauuaaugcagcaucuga

SEQ ID NO: 734681 - RNA, 19 nt, Artificial Sequence
  Description of Artificial Sequence: Synthetic oligonucleotide
  Antisense strand to SEQ ID NO: 734680
ucagaugcugcauuaauga

SEQ ID NO: 734682 - RNA, 19 nt, Artificial Sequence
  Description of Artificial Sequence: Synthetic oligonucleotide
  Sense strand starting at position 3269 of SEQ ID NO: 586659
auggaauauuugcaaucua

SEQ ID NO: 734683 - RNA, 19 nt, Artificial Sequence
  Description of Artificial Sequence: Synthetic oligonucleotide
  Antisense strand to SEQ ID NO: 734682
uagauugcaaauauuccau

SEQ ID NO: 734684 - RNA, 19 nt, Artificial Sequence
  Description of Artificial Sequence: Synthetic oligonucleotide
  Sense strand starting at position 3277 of SEQ ID NO: 586659
uuugcaaucuauguauuga

SEQ ID NO: 734685 - RNA, 19 nt, Artificial Sequence
  Description of Artificial Sequence: Synthetic oligonucleotide
  Antisense strand to SEQ ID NO: 734684
ucaauacauagauugcaaa

SEQ ID NO: 734686 - RNA, 19 nt, Artificial Sequence
  Description of Artificial Sequence: Synthetic oligonucleotide
  Sense strand starting at position 3285 of SEQ ID NO: 586659
cuauguauugaaggcaaga

SEQ ID NO: 734687 - RNA, 19 nt, Artificial Sequence
  Description of Artificial Sequence: Synthetic oligonucleotide
  Antisense strand to SEQ ID NO: 734686
ucuugccuucaauacauag

SEQ ID NO: 734688 - RNA, 19 nt, Artificial Sequence
  Description of Artificial Sequence: Synthetic oligonucleotide
  Sense strand starting at position 3319 of SEQ ID NO: 586659
aggauuauuuaaugagcaa

SEQ ID NO: 734689 - RNA, 19 nt, Artificial Sequence
  Description of Artificial Sequence: Synthetic oligonucleotide
  Antisense strand to SEQ ID NO: 734688
uugcucauuaaauaauccu

SEQ ID NO: 734690 - RNA, 19 nt, Artificial Sequence
  Description of Artificial Sequence: Synthetic oligonucleotide
  Sense strand starting at position 3367 of SEQ ID NO: 586659
ugugcuagugaacaguaaa

SEQ ID NO: 734691 - RNA, 19 nt, Artificial Sequence
  Description of Artificial Sequence: Synthetic oligonucleotide
  Antisense strand to SEQ ID NO: 734690
uuuacuguucacuagcaca

SEQ ID NO: 734692 - RNA, 19 nt, Artificial Sequence
  Description of Artificial Sequence: Synthetic oligonucleotide
  Sense strand starting at position 3370 of SEQ ID NO: 586659
gcuagugaacaguaaauug

SEQ ID NO: 734693 - RNA, 19 nt, Artificial Sequence
  Description of Artificial Sequence: Synthetic oligonucleotide
  Antisense strand to SEQ ID NO: 734692
caauuuacuguucacuagc

SEQ ID NO: 734694 - RNA, 19 nt, Artificial Sequence
  Description of Artificial Sequence: Synthetic oligonucleotide
  Sense strand starting at position 3440 of SEQ ID NO: 586659
agcauuuaguuucuugcau

SEQ ID NO: 734695 - RNA, 19 nt, Artificial Sequence
  Description of Artificial Sequence: Synthetic oligonucleotide
  Antisense strand to SEQ ID NO: 734694
augcaagaaacuaaaugcu

SEQ ID NO: 734696 - RNA, 19 nt, Artificial Sequence
  Description of Artificial Sequence: Synthetic oligonucleotide
  Sense strand starting at position 3441 of SEQ ID NO: 586659
gcauuuaguuucuugcauu

SEQ ID NO: 734697 - RNA, 19 nt, Artificial Sequence
  Description of Artificial Sequence: Synthetic oligonucleotide
  Antisense strand to SEQ ID NO: 734696
aaugcaagaaacuaaaugc

SEQ ID NO: 734698 - RNA, 19 nt, Artificial Sequence
  Description of Artificial Sequence: Synthetic oligonucleotide
  Sense strand starting at position 3451 of SEQ ID NO: 586659
ucuugcauuccacaggaaa

SEQ ID NO: 734699 - RNA, 19 nt, Artificial Sequence
  Description of Artificial Sequence: Synthetic oligonucleotide
  Antisense strand to SEQ ID NO: 734698
uuuccuguggaaugcaaga

SEQ ID NO: 734700 - RNA, 19 nt, Artificial Sequence
  Description of Artificial Sequence: Synthetic oligonucleotide
  Sense strand starting at position 3454 of SEQ ID NO: 586659
ugcauuccacaggaaaugu

SEQ ID NO: 734701 - RNA, 19 nt, Artificial Sequence
  Description of Artificial Sequence: Synthetic oligonucleotide
  Antisense strand to SEQ ID NO: 734700
acauuuccuguggaaugca

SEQ ID NO: 734702 - RNA, 19 nt, Artificial Sequence
  Description of Artificial Sequence: Synthetic oligonucleotide
  Sense strand starting at position 3479 of SEQ ID NO: 586659
uuagaagacuuauuggcaa

SEQ ID NO: 734703 - RNA, 19 nt, Artificial Sequence
  Description of Artificial Sequence: Synthetic oligonucleotide
  Antisense strand to SEQ ID NO: 734702
uugccaauaagucuucuaa

SEQ ID NO: 734704 - RNA, 19 nt, Artificial Sequence
  Description of Artificial Sequence: Synthetic oligonucleotide
  Sense strand starting at position 3498 of SEQ ID NO: 586659
aaauuaaguucucuaggga

SEQ ID NO: 734705 - RNA, 19 nt, Artificial Sequence
  Description of Artificial Sequence: Synthetic oligonucleotide
  Antisense strand to SEQ ID NO: 734704
ucccuagagaacuuaauuu

SEQ ID NO: 734706 - RNA, 19 nt, Artificial Sequence
  Description of Artificial Sequence: Synthetic oligonucleotide
  Sense strand starting at position 3501 of SEQ ID NO: 586659
uuaaguucucuagggaaua

SEQ ID NO: 734707 - RNA, 19 nt, Artificial Sequence
  Description of Artificial Sequence: Synthetic oligonucleotide
  Antisense strand to SEQ ID NO: 734706
uauucccuagagaacuuaa

SEQ ID NO: 734708 - RNA, 19 nt, Artificial Sequence
  Description of Artificial Sequence: Synthetic oligonucleotide
  Sense strand starting at position 3599 of SEQ ID NO: 586659
uuuagagacugauaugaaa

SEQ ID NO: 734709 - RNA, 19 nt, Artificial Sequence
  Description of Artificial Sequence: Synthetic oligonucleotide
  Antisense strand to SEQ ID NO: 734708
uuucauaucagucucuaaa

SEQ ID NO: 734710 - RNA, 19 nt, Artificial Sequence
  Description of Artificial Sequence: Synthetic oligonucleotide
  Sense strand starting at position 3692 of SEQ ID NO: 586659
aaauuaguugcaugugaua

SEQ ID NO: 734711 - RNA, 19 nt, Artificial Sequence
  Description of Artificial Sequence: Synthetic oligonucleotide
  Antisense strand to SEQ ID NO: 734710
uaucacaugcaacuaauuu

SEQ ID NO: 734712 - RNA, 19 nt, Artificial Sequence
  Description of Artificial Sequence: Synthetic oligonucleotide
  Sense strand starting at position 3705 of SEQ ID NO: 586659
gugauagcgcacuuguagu

SEQ ID NO: 734713 - RNA, 19 nt, Artificial Sequence
  Description of Artificial Sequence: Synthetic oligonucleotide
  Antisense strand to SEQ ID NO: 734712
acuacaagugcgcuaucac

SEQ ID NO: 734714 - RNA, 19 nt, Artificial Sequence
  Description of Artificial Sequence: Synthetic oligonucleotide
  Sense strand starting at position 4 of SEQ ID NO: 586660
cugugucuccacuaauauu

SEQ ID NO: 734715 - RNA, 19 nt, Artificial Sequence
  Description of Artificial Sequence: Synthetic oligonucleotide
  Antisense strand to SEQ ID NO: 734714
aauauuaguggagacacag

SEQ ID NO: 734716 - RNA, 19 nt, Artificial Sequence
  Description of Artificial Sequence: Synthetic oligonucleotide
  Sense strand starting at position 20 of SEQ ID NO: 586660
auucuaggcguuuacuaau

SEQ ID NO: 734717 - RNA, 19 nt, Artificial Sequence
  Description of Artificial Sequence: Synthetic oligonucleotide
  Antisense strand to SEQ ID NO: 734716
auuaguaaacgccuagaau

SEQ ID NO: 734718 - RNA, 19 nt, Artificial Sequence
  Description of Artificial Sequence: Synthetic oligonucleotide
  Sense strand starting at position 227 of SEQ ID NO: 586660
cuuccaguaccauaucuga

SEQ ID NO: 734719 - RNA, 19 nt, Artificial Sequence
  Description of Artificial Sequence: Synthetic oligonucleotide
  Antisense strand to SEQ ID NO: 734718
ucagauaugguacuggaag

SEQ ID NO: 734720 - RNA, 19 nt, Artificial Sequence
  Description of Artificial Sequence: Synthetic oligonucleotide
  Sense strand starting at position 244 of SEQ ID NO: 586660
gaaauuugguguuaagaaa

SEQ ID NO: 734721 - RNA, 19 nt, Artificial Sequence
  Description of Artificial Sequence: Synthetic oligonucleotide
  Antisense strand to SEQ ID NO: 734720
uuucuuaacaccaaauuuc

SEQ ID NO: 734722 - RNA, 19 nt, Artificial Sequence
  Description of Artificial Sequence: Synthetic oligonucleotide
  Sense strand starting at position 632 of SEQ ID NO: 586660
uguuuaauacaauggcuca

SEQ ID NO: 734723 - RNA, 19 nt, Artificial Sequence
  Description of Artificial Sequence: Synthetic oligonucleotide
  Antisense strand to SEQ ID NO: 734722
ugagccauuguauuaaaca

SEQ ID NO: 734724 - RNA, 19 nt, Artificial Sequence
  Description of Artificial Sequence: Synthetic oligonucleotide
  Sense strand starting at position 659 of SEQ ID NO: 586660
augcuuguuguugauagga

SEQ ID NO: 734725 - RNA, 19 nt, Artificial Sequence
  Description of Artificial Sequence: Synthetic oligonucleotide
  Antisense strand to SEQ ID NO: 734724
uccuaucaacaacaagcau

SEQ ID NO: 734726 - RNA, 19 nt, Artificial Sequence
  Description of Artificial Sequence: Synthetic oligonucleotide
  Sense strand starting at position 715 of SEQ ID NO: 586660
aucauaaguucccugagaa

SEQ ID NO: 734727 - RNA, 19 nt, Artificial Sequence
  Description of Artificial Sequence: Synthetic oligonucleotide
  Antisense strand to SEQ ID NO: 734726
uucucagggaacuuaugau

SEQ ID NO: 734728 - RNA, 19 nt, Artificial Sequence
  Description of Artificial Sequence: Synthetic oligonucleotide
  Sense strand starting at position 716 of SEQ ID NO: 586660
ucauaaguucccugagaau

SEQ ID NO: 734729 - RNA, 19 nt, Artificial Sequence
  Description of Artificial Sequence: Synthetic oligonucleotide
  Antisense strand to SEQ ID NO: 734728
auucucagggaacuuauga

SEQ ID NO: 734730 - RNA, 19 nt, Artificial Sequence
  Description of Artificial Sequence: Synthetic oligonucleotide
  Sense strand starting at position 767 of SEQ ID NO: 586660
acugauugucuauaguucu

SEQ ID NO: 734731 - RNA, 19 nt, Artificial Sequence
  Description of Artificial Sequence: Synthetic oligonucleotide
  Antisense strand to SEQ ID NO: 734730
agaacuauagacaaucagu

SEQ ID NO: 734732 - RNA, 19 nt, Artificial Sequence
  Description of Artificial Sequence: Synthetic oligonucleotide
  Sense strand starting at position 897 of SEQ ID NO: 586660
augugaauucuugauccua

SEQ ID NO: 734733 - RNA, 19 nt, Artificial Sequence
  Description of Artificial Sequence: Synthetic oligonucleotide
  Antisense strand to SEQ ID NO: 734732
uaggaucaagaauucacau

SEQ ID NO: 734734 - RNA, 19 nt, Artificial Sequence
  Description of Artificial Sequence: Synthetic oligonucleotide
  Sense strand starting at position 899 of SEQ ID NO: 586660
gugaauucuugauccuaua

SEQ ID NO: 734735 - RNA, 19 nt, Artificial Sequence
  Description of Artificial Sequence: Synthetic oligonucleotide
  Antisense strand to SEQ ID NO: 734734
uauaggaucaagaauucac

SEQ ID NO: 734736 - RNA, 19 nt, Artificial Sequence
  Description of Artificial Sequence: Synthetic oligonucleotide
  Sense strand starting at position 1118 of SEQ ID NO: 586660
gagucuguggcaugaagga

SEQ ID NO: 734737 - RNA, 19 nt, Artificial Sequence
  Description of Artificial Sequence: Synthetic oligonucleotide
  Antisense strand to SEQ ID NO: 734736
uccuucaugccacagacuc

SEQ ID NO: 734738 - RNA, 19 nt, Artificial Sequence
  Description of Artificial Sequence: Synthetic oligonucleotide
  Sense strand starting at position 1389 of SEQ ID NO: 586660
auggcuaugguuuaucauu

SEQ ID NO: 734739 - RNA, 19 nt, Artificial Sequence
  Description of Artificial Sequence: Synthetic oligonucleotide
  Antisense strand to SEQ ID NO: 734738
aaugauaaaccauagccau

SEQ ID NO: 734740 - RNA, 19 nt, Artificial Sequence
  Description of Artificial Sequence: Synthetic oligonucleotide
  Sense strand starting at position 1391 of SEQ ID NO: 586660
ggcuaugguuuaucauuga

SEQ ID NO: 734741 - RNA, 19 nt, Artificial Sequence
  Description of Artificial Sequence: Synthetic oligonucleotide
  Antisense strand to SEQ ID NO: 734740
ucaaugauaaaccauagcc

SEQ ID NO: 734742 - RNA, 19 nt, Artificial Sequence
  Description of Artificial Sequence: Synthetic oligonucleotide
  Sense strand starting at position 1424 of SEQ ID NO: 586660
cgguaucuaguguauagau

SEQ ID NO: 734743 - RNA, 19 nt, Artificial Sequence
  Description of Artificial Sequence: Synthetic oligonucleotide
  Antisense strand to SEQ ID NO: 734742
aucuauacacuagauaccg

SEQ ID NO: 734744 - RNA, 19 nt, Artificial Sequence
  Description of Artificial Sequence: Synthetic oligonucleotide
  Sense strand starting at position 1426 of SEQ ID NO: 586660
guaucuaguguauagauac

SEQ ID NO: 734745 - RNA, 19 nt, Artificial Sequence
  Description of Artificial Sequence: Synthetic oligonucleotide
  Antisense strand to SEQ ID NO: 734744
guaucuauacacuagauac

SEQ ID NO: 734746 - RNA, 19 nt, Artificial Sequence
  Description of Artificial Sequence: Synthetic oligonucleotide
  Sense strand starting at position 1433 of SEQ ID NO: 586660
guguauagauacucaguua

SEQ ID NO: 734747 - RNA, 19 nt, Artificial Sequence
  Description of Artificial Sequence: Synthetic oligonucleotide
  Antisense strand to SEQ ID NO: 734746
uaacugaguaucuauacac

SEQ ID NO: 734748 - RNA, 19 nt, Artificial Sequence
  Description of Artificial Sequence: Synthetic oligonucleotide
  Sense strand starting at position 1444 of SEQ ID NO: 586660
cucaguuacuacuuauuga

SEQ ID NO: 734749 - RNA, 19 nt, Artificial Sequence
  Description of Artificial Sequence: Synthetic oligonucleotide
  Antisense strand to SEQ ID NO: 734748
ucaauaaguaguaacugag

SEQ ID NO: 734750 - RNA, 19 nt, Artificial Sequence
  Description of Artificial Sequence: Synthetic oligonucleotide
  Sense strand starting at position 1479 of SEQ ID NO: 586660
cagagcugguuuccagauu

SEQ ID NO: 734751 - RNA, 19 nt, Artificial Sequence
  Description of Artificial Sequence: Synthetic oligonucleotide
  Antisense strand to SEQ ID NO: 734750
aaucuggaaaccagcucug

SEQ ID NO: 734752 - RNA, 19 nt, Artificial Sequence
  Description of Artificial Sequence: Synthetic oligonucleotide
  Sense strand starting at position 1688 of SEQ ID NO: 586660
gaaggucugguuugagaag

SEQ ID NO: 734753 - RNA, 19 nt, Artificial Sequence
  Description of Artificial Sequence: Synthetic oligonucleotide
  Antisense strand to SEQ ID NO: 734752
cuucucaaaccagaccuuc

SEQ ID NO: 734754 - RNA, 19 nt, Artificial Sequence
  Description of Artificial Sequence: Synthetic oligonucleotide
  Sense strand starting at position 1789 of SEQ ID NO: 586660
aaccgcauuuggucuuaua

SEQ ID NO: 734755 - RNA, 19 nt, Artificial Sequence
  Description of Artificial Sequence: Synthetic oligonucleotide
  Antisense strand to SEQ ID NO: 734754
uauaagaccaaaugcgguu

SEQ ID NO: 734756 - RNA, 19 nt, Artificial Sequence
  Description of Artificial Sequence: Synthetic oligonucleotide
  Sense strand starting at position 2110 of SEQ ID NO: 586660
gcaagugagauccggugaa

SEQ ID NO: 734757 - RNA, 19 nt, Artificial Sequence
  Description of Artificial Sequence: Synthetic oligonucleotide
  Antisense strand to SEQ ID NO: 734756
uucaccggaucucacuugc

SEQ ID NO: 734758 - RNA, 19 nt, Artificial Sequence
  Description of Artificial Sequence: Synthetic oligonucleotide
  Sense strand starting at position 2114 of SEQ ID NO: 586660
gugagauccggugaaauau

SEQ ID NO: 734759 - RNA, 19 nt, Artificial Sequence
  Description of Artificial Sequence: Synthetic oligonucleotide
  Antisense strand to SEQ ID NO: 734758
auauuucaccggaucucac

SEQ ID NO: 734760 - RNA, 19 nt, Artificial Sequence
  Description of Artificial Sequence: Synthetic oligonucleotide
  Sense strand starting at position 2151 of SEQ ID NO: 586660
uuuaccaucucggcagaua

SEQ ID NO: 734761 - RNA, 19 nt, Artificial Sequence
  Description of Artificial Sequence: Synthetic oligonucleotide
  Antisense strand to SEQ ID NO: 734760
uaucugccgagaugguaaa

SEQ ID NO: 734762 - RNA, 19 nt, Artificial Sequence
  Description of Artificial Sequence: Synthetic oligonucleotide
  Sense strand starting at position 2171 of SEQ ID NO: 586660
ccauaaugcccuugaaguu

SEQ ID NO: 734763 - RNA, 19 nt, Artificial Sequence
  Description of Artificial Sequence: Synthetic oligonucleotide
  Antisense strand to SEQ ID NO: 734762
aacuucaagggcauuaugg

SEQ ID NO: 734764 - RNA, 19 nt, Artificial Sequence
  Description of Artificial Sequence: Synthetic oligonucleotide
  Sense strand starting at position 2212 of SEQ ID NO: 586660
uugccuugugaauaaauug

SEQ ID NO: 734765 - RNA, 19 nt, Artificial Sequence
  Description of Artificial Sequence: Synthetic oligonucleotide
  Antisense strand to SEQ ID NO: 734764
caauuuauucacaaggcaa

SEQ ID NO: 734766 - RNA, 19 nt, Artificial Sequence
  Description of Artificial Sequence: Synthetic oligonucleotide
  Sense strand starting at position 2219 of SEQ ID NO: 586660
gugaauaaauuguuccugu

SEQ ID NO: 734767 - RNA, 19 nt, Artificial Sequence
  Description of Artificial Sequence: Synthetic oligonucleotide
  Antisense strand to SEQ ID NO: 734766
acaggaacaauuuauucac

SEQ ID NO: 734768 - RNA, 19 nt, Artificial Sequence
  Description of Artificial Sequence: Synthetic oligonucleotide
  Sense strand starting at position 2366 of SEQ ID NO: 586660
aggaaucuauuguuucuuu

SEQ ID NO: 734769 - RNA, 19 nt, Artificial Sequence
  Description of Artificial Sequence: Synthetic oligonucleotide
  Antisense strand to SEQ ID NO: 734768
aaagaaacaauagauuccu

SEQ ID NO: 734770 - RNA, 19 nt, Artificial Sequence
  Description of Artificial Sequence: Synthetic oligonucleotide
  Sense strand starting at position 2619 of SEQ ID NO: 586660
uuccacuucuguguugaaa

SEQ ID NO: 734771 - RNA, 19 nt, Artificial Sequence
  Description of Artificial Sequence: Synthetic oligonucleotide
  Antisense strand to SEQ ID NO: 734770
uuucaacacagaaguggaa

SEQ ID NO: 734772 - RNA, 19 nt, Artificial Sequence
  Description of Artificial Sequence: Synthetic oligonucleotide
  Sense strand starting at position 2667 of SEQ ID NO: 586660
auauuuguauccuaggaac

SEQ ID NO: 734773 - RNA, 19 nt, Artificial Sequence
  Description of Artificial Sequence: Synthetic oligonucleotide
  Antisense strand to SEQ ID NO: 734772
guuccuaggauacaaauau

SEQ ID NO: 734774 - RNA, 19 nt, Artificial Sequence
  Description of Artificial Sequence: Synthetic oligonucleotide
  Sense strand starting at position 3090 of SEQ ID NO: 586660
gacugaguuccucaaggcu

SEQ ID NO: 734775 - RNA, 19 nt, Artificial Sequence
  Description of Artificial Sequence: Synthetic oligonucleotide
  Antisense strand to SEQ ID NO: 734774
agccuugaggaacucaguc

SEQ ID NO: 734776 - RNA, 19 nt, Artificial Sequence
  Description of Artificial Sequence: Synthetic oligonucleotide
  Sense strand starting at position 3096 of SEQ ID NO: 586660
guuccucaaggcugagaau

SEQ ID NO: 734777 - RNA, 19 nt, Artificial Sequence
  Description of Artificial Sequence: Synthetic oligonucleotide
  Antisense strand to SEQ ID NO: 734776
auucucagccuugaggaac

SEQ ID NO: 734778 - RNA, 19 nt, Artificial Sequence
  Description of Artificial Sequence: Synthetic oligonucleotide
  Sense strand starting at position 3097 of SEQ ID NO: 586660
uuccucaaggcugagaauu

SEQ ID NO: 734779 - RNA, 19 nt, Artificial Sequence
  Description of Artificial Sequence: Synthetic oligonucleotide
  Antisense strand to SEQ ID NO: 734778
aauucucagccuugaggaa

SEQ ID NO: 734780 - RNA, 19 nt, Artificial Sequence
  Description of Artificial Sequence: Synthetic oligonucleotide
  Sense strand starting at position 3125 of SEQ ID NO: 586660
aguaguuuacgugauuaaa

SEQ ID NO: 734781 - RNA, 19 nt, Artificial Sequence
  Description of Artificial Sequence: Synthetic oligonucleotide
  Antisense strand to SEQ ID NO: 734780
uuuaaucacguaaacuacu

SEQ ID NO: 734782 - RNA, 19 nt, Artificial Sequence
  Description of Artificial Sequence: Synthetic oligonucleotide
  Sense strand starting at position 3383 of SEQ ID NO: 586660
auacaugaugucuggcuca

SEQ ID NO: 734783 - RNA, 19 nt, Artificial Sequence
  Description of Artificial Sequence: Synthetic oligonucleotide
  Antisense strand to SEQ ID NO: 734782
ugagccagacaucauguau

SEQ ID NO: 734784 - RNA, 19 nt, Artificial Sequence
  Description of Artificial Sequence: Synthetic oligonucleotide
  Sense strand starting at position 3386 of SEQ ID NO: 586660
caugaugucuggcucagag

SEQ ID NO: 734785 - RNA, 19 nt, Artificial Sequence
  Description of Artificial Sequence: Synthetic oligonucleotide
  Antisense strand to SEQ ID NO: 734784
cucugagccagacaucaug

SEQ ID NO: 734786 - RNA, 19 nt, Artificial Sequence
  Description of Artificial Sequence: Synthetic oligonucleotide
  Sense strand starting at position 3539 of SEQ ID NO: 586660
gcgccuaaugaauauucuu

SEQ ID NO: 734787 - RNA, 19 nt, Artificial Sequence
  Description of Artificial Sequence: Synthetic oligonucleotide
  Antisense strand to SEQ ID NO: 734786
aagaauauucauuaggcgc

SEQ ID NO: 734788 - RNA, 19 nt, Artificial Sequence
  Description of Artificial Sequence: Synthetic oligonucleotide
  Sense strand starting at position 3633 of SEQ ID NO: 586660
augccagauuuguuuguga

SEQ ID NO: 734789 - RNA, 19 nt, Artificial Sequence
  Description of Artificial Sequence: Synthetic oligonucleotide
  Antisense strand to SEQ ID NO: 734788
ucacaaacaaaucuggcau

SEQ ID NO: 734790 - RNA, 19 nt, Artificial Sequence
  Description of Artificial Sequence: Synthetic oligonucleotide
  Sense strand starting at position 3635 of SEQ ID NO: 586660
gccagauuuguuugugacg

SEQ ID NO: 734791 - RNA, 19 nt, Artificial Sequence
  Description of Artificial Sequence: Synthetic oligonucleotide
  Antisense strand to SEQ ID NO: 734790
cgucacaaacaaaucuggc

SEQ ID NO: 734792 - RNA, 19 nt, Artificial Sequence
  Description of Artificial Sequence: Synthetic oligonucleotide
  Sense strand starting at position 3687 of SEQ ID NO: 586660
guccaauccucauuugguu

SEQ ID NO: 734793 - RNA, 19 nt, Artificial Sequence
  Description of Artificial Sequence: Synthetic oligonucleotide
  Antisense strand to SEQ ID NO: 734792
aaccaaaugaggauuggac

SEQ ID NO: 734794 - RNA, 19 nt, Artificial Sequence
  Description of Artificial Sequence: Synthetic oligonucleotide
  Sense strand starting at position 152 of SEQ ID NO: 586661
gguaacacacaauguuuau

SEQ ID NO: 734795 - RNA, 19 nt, Artificial Sequence
  Description of Artificial Sequence: Synthetic oligonucleotide
  Antisense strand to SEQ ID NO: 734794
auaaacauuguguguuacc

SEQ ID NO: 734796 - RNA, 19 nt, Artificial Sequence
  Description of Artificial Sequence: Synthetic oligonucleotide
  Sense strand starting at position 158 of SEQ ID NO: 586661
acacaauguuuauuaguga

SEQ ID NO: 734797 - RNA, 19 nt, Artificial Sequence
  Description of Artificial Sequence: Synthetic oligonucleotide
  Antisense strand to SEQ ID NO: 734796
ucacuaauaaacauugugu

SEQ ID NO: 734798 - RNA, 19 nt, Artificial Sequence
  Description of Artificial Sequence: Synthetic oligonucleotide
  Sense strand starting at position 161 of SEQ ID NO: 586661
caauguuuauuagugagga

SEQ ID NO: 734799 - RNA, 19 nt, Artificial Sequence
  Description of Artificial Sequence: Synthetic oligonucleotide
  Antisense strand to SEQ ID NO: 734798
uccucacuaauaaacauug

SEQ ID NO: 734800 - RNA, 19 nt, Artificial Sequence
  Description of Artificial Sequence: Synthetic oligonucleotide
  Sense strand starting at position 200 of SEQ ID NO: 586661
gugauaaagagcugaauua

SEQ ID NO: 734801 - RNA, 19 nt, Artificial Sequence
  Description of Artificial Sequence: Synthetic oligonucleotide
  Antisense strand to SEQ ID NO: 734800
uaauucagcucuuuaucac

SEQ ID NO: 734802 - RNA, 19 nt, Artificial Sequence
  Description of Artificial Sequence: Synthetic oligonucleotide
  Sense strand starting at position 248 of SEQ ID NO: 586661
cugucuaggcauuagagau

SEQ ID NO: 734803 - RNA, 19 nt, Artificial Sequence
  Description of Artificial Sequence: Synthetic oligonucleotide
  Antisense strand to SEQ ID NO: 734802
aucucuaaugccuagacag

SEQ ID NO: 734804 - RNA, 19 nt, Artificial Sequence
  Description of Artificial Sequence: Synthetic oligonucleotide
  Sense strand starting at position 370 of SEQ ID NO: 586661
gcaacaguuccugauaacu

SEQ ID NO: 734805 - RNA, 19 nt, Artificial Sequence
  Description of Artificial Sequence: Synthetic oligonucleotide
  Antisense strand to SEQ ID NO: 734804
aguuaucaggaacuguugc

SEQ ID NO: 734806 - RNA, 19 nt, Artificial Sequence
  Description of Artificial Sequence: Synthetic oligonucleotide
  Sense strand starting at position 393 of SEQ ID NO: 586661
caaagaaaguguuucuuag

SEQ ID NO: 734807 - RNA, 19 nt, Artificial Sequence
  Description of Artificial Sequence: Synthetic oligonucleotide
  Antisense strand to SEQ ID NO: 734806
cuaagaaacacuuucuuug

SEQ ID NO: 734808 - RNA, 19 nt, Artificial Sequence
  Description of Artificial Sequence: Synthetic oligonucleotide
  Sense strand starting at position 401 of SEQ ID NO: 586661
guguuucuuagggaaugca

SEQ ID NO: 734809 - RNA, 19 nt, Artificial Sequence
  Description of Artificial Sequence: Synthetic oligonucleotide
  Antisense strand to SEQ ID NO: 734808
ugcauucccuaagaaacac

SEQ ID NO: 734810 - RNA, 19 nt, Artificial Sequence
  Description of Artificial Sequence: Synthetic oligonucleotide
  Sense strand starting at position 404 of SEQ ID NO: 586661
uuucuuagggaaugcaaau

SEQ ID NO: 734811 - RNA, 19 nt, Artificial Sequence
  Description of Artificial Sequence: Synthetic oligonucleotide
  Antisense strand to SEQ ID NO: 734810
auuugcauucccuaagaaa

SEQ ID NO: 734812 - RNA, 19 nt, Artificial Sequence
  Description of Artificial Sequence: Synthetic oligonucleotide
  Sense strand starting at position 739 of SEQ ID NO: 586661
gagugagacccucgacuca

SEQ ID NO: 734813 - RNA, 19 nt, Artificial Sequence
  Description of Artificial Sequence: Synthetic oligonucleotide
  Antisense strand to SEQ ID NO: 734812
ugagucgagggucucacuc

SEQ ID NO: 734814 - RNA, 19 nt, Artificial Sequence
  Description of Artificial Sequence: Synthetic oligonucleotide
  Sense strand starting at position 946 of SEQ ID NO: 586661
gcaggauauuucguuucuu

SEQ ID NO: 734815 - RNA, 19 nt, Artificial Sequence
  Description of Artificial Sequence: Synthetic oligonucleotide
  Antisense strand to SEQ ID NO: 734814
aagaaacgaaauauccugc

SEQ ID NO: 734816 - RNA, 19 nt, Artificial Sequence
  Description of Artificial Sequence: Synthetic oligonucleotide
  Sense strand starting at position 957 of SEQ ID NO: 586661
cguuucuuaggccuguuua

SEQ ID NO: 734817 - RNA, 19 nt, Artificial Sequence
  Description of Artificial Sequence: Synthetic oligonucleotide
  Antisense strand to SEQ ID NO: 734816
uaaacaggccuaagaaacg

SEQ ID NO: 734818 - RNA, 19 nt, Artificial Sequence
  Description of Artificial Sequence: Synthetic oligonucleotide
  Sense strand starting at position 1003 of SEQ ID NO: 586661
uaaauuaaucgauguugga

SEQ ID NO: 734819 - RNA, 19 nt, Artificial Sequence
  Description of Artificial Sequence: Synthetic oligonucleotide
  Antisense strand to SEQ ID NO: 734818
uccaacaucgauuaauuua

SEQ ID NO: 734820 - RNA, 19 nt, Artificial Sequence
  Description of Artificial Sequence: Synthetic oligonucleotide
  Sense strand starting at position 1335 of SEQ ID NO: 586661
acagaaacagucugugaac

SEQ ID NO: 734821 - RNA, 19 nt, Artificial Sequence
  Description of Artificial Sequence: Synthetic oligonucleotide
  Antisense strand to SEQ ID NO: 734820
guucacagacuguuucugu

SEQ ID NO: 734822 - RNA, 19 nt, Artificial Sequence
  Description of Artificial Sequence: Synthetic oligonucleotide
  Sense strand starting at position 1337 of SEQ ID NO: 586661
agaaacagucugugaacca

SEQ ID NO: 734823 - RNA, 19 nt, Artificial Sequence
  Description of Artificial Sequence: Synthetic oligonucleotide
  Antisense strand to SEQ ID NO: 734822
ugguucacagacuguuucu

SEQ ID NO: 734824 - RNA, 19 nt, Artificial Sequence
  Description of Artificial Sequence: Synthetic oligonucleotide
  Sense strand starting at position 1348 of SEQ ID NO: 586661
gugaaccaucguuaaacuu

SEQ ID NO: 734825 - RNA, 19 nt, Artificial Sequence
  Description of Artificial Sequence: Synthetic oligonucleotide
  Antisense strand to SEQ ID NO: 734824
aaguuuaacgaugguucac

SEQ ID NO: 734826 - RNA, 19 nt, Artificial Sequence
  Description of Artificial Sequence: Synthetic oligonucleotide
  Sense strand starting at position 1382 of SEQ ID NO: 586661
cgagcaaauuaugugaaua

SEQ ID NO: 734827 - RNA, 19 nt, Artificial Sequence
  Description of Artificial Sequence: Synthetic oligonucleotide
  Antisense strand to SEQ ID NO: 734826
uauucacauaauuugcucg

SEQ ID NO: 734828 - RNA, 19 nt, Artificial Sequence
  Description of Artificial Sequence: Synthetic oligonucleotide
  Sense strand starting at position 1541 of SEQ ID NO: 586661
gaauaaucacacuggguuu

SEQ ID NO: 734829 - RNA, 19 nt, Artificial Sequence
  Description of Artificial Sequence: Synthetic oligonucleotide
  Antisense strand to SEQ ID NO: 734828
aaacccagugugauuauuc

SEQ ID NO: 734830 - RNA, 19 nt, Artificial Sequence
  Description of Artificial Sequence: Synthetic oligonucleotide
  Sense strand starting at position 2285 of SEQ ID NO: 586661
acgagugcuguugugugaa

SEQ ID NO: 734831 - RNA, 19 nt, Artificial Sequence
  Description of Artificial Sequence: Synthetic oligonucleotide
  Antisense strand to SEQ ID NO: 734830
uucacacaacagcacucgu

SEQ ID NO: 734832 - RNA, 19 nt, Artificial Sequence
  Description of Artificial Sequence: Synthetic oligonucleotide
  Sense strand starting at position 2290 of SEQ ID NO: 586661
ugcuguugugugaaacgua

SEQ ID NO: 734833 - RNA, 19 nt, Artificial Sequence
  Description of Artificial Sequence: Synthetic oligonucleotide
  Antisense strand to SEQ ID NO: 734832
uacguuucacacaacagca

SEQ ID NO: 734834 - RNA, 19 nt, Artificial Sequence
  Description of Artificial Sequence: Synthetic oligonucleotide
  Sense strand starting at position 2387 of SEQ ID NO: 586661
agaguugcgcacguuauaa

SEQ ID NO: 734835 - RNA, 19 nt, Artificial Sequence
  Description of Artificial Sequence: Synthetic oligonucleotide
  Antisense strand to SEQ ID NO: 734834
uuauaacgugcgcaacucu

SEQ ID NO: 734836 - RNA, 19 nt, Artificial Sequence
  Description of Artificial Sequence: Synthetic oligonucleotide
  Sense strand starting at position 2427 of SEQ ID NO: 586661
agaacucagcagugaaaua

SEQ ID NO: 734837 - RNA, 19 nt, Artificial Sequence
  Description of Artificial Sequence: Synthetic oligonucleotide
  Antisense strand to SEQ ID NO: 734836
uauuucacugcugaguucu

SEQ ID NO: 734838 - RNA, 19 nt, Artificial Sequence
  Description of Artificial Sequence: Synthetic oligonucleotide
  Sense strand starting at position 2538 of SEQ ID NO: 586661
gugugaccaucccuuagaa

SEQ ID NO: 734839 - RNA, 19 nt, Artificial Sequence
  Description of Artificial Sequence: Synthetic oligonucleotide
  Antisense strand to SEQ ID NO: 734838
uucuaagggauggucacac

SEQ ID NO: 734840 - RNA, 19 nt, Artificial Sequence
  Description of Artificial Sequence: Synthetic oligonucleotide
  Sense strand starting at position 2761 of SEQ ID NO: 586661
uagauagucccauagguau

SEQ ID NO: 734841 - RNA, 19 nt, Artificial Sequence
  Description of Artificial Sequence: Synthetic oligonucleotide
  Antisense strand to SEQ ID NO: 734840
auaccuaugggacuaucua

SEQ ID NO: 734842 - RNA, 19 nt, Artificial Sequence
  Description of Artificial Sequence: Synthetic oligonucleotide
  Sense strand starting at position 2944 of SEQ ID NO: 586661
uaagauuuguggcuuugua

SEQ ID NO: 734843 - RNA, 19 nt, Artificial Sequence
  Description of Artificial Sequence: Synthetic oligonucleotide
  Antisense strand to SEQ ID NO: 734842
uacaaagccacaaaucuua

SEQ ID NO: 734844 - RNA, 19 nt, Artificial Sequence
  Description of Artificial Sequence: Synthetic oligonucleotide
  Sense strand starting at position 2948 of SEQ ID NO: 586661
auuuguggcuuuguaauaa

SEQ ID NO: 734845 - RNA, 19 nt, Artificial Sequence
  Description of Artificial Sequence: Synthetic oligonucleotide
  Antisense strand to SEQ ID NO: 734844
uuauuacaaagccacaaau

SEQ ID NO: 734846 - RNA, 19 nt, Artificial Sequence
  Description of Artificial Sequence: Synthetic oligonucleotide
  Sense strand starting at position 3108 of SEQ ID NO: 586661
gauugugaaugucucauau

SEQ ID NO: 734847 - RNA, 19 nt, Artificial Sequence
  Description of Artificial Sequence: Synthetic oligonucleotide
  Antisense strand to SEQ ID NO: 734846
auaugagacauucacaauc

SEQ ID NO: 734848 - RNA, 19 nt, Artificial Sequence
  Description of Artificial Sequence: Synthetic oligonucleotide
  Sense strand starting at position 3121 of SEQ ID NO: 586661
ucauauucucaggguaaca

SEQ ID NO: 734849 - RNA, 19 nt, Artificial Sequence
  Description of Artificial Sequence: Synthetic oligonucleotide
  Antisense strand to SEQ ID NO: 734848
uguuacccugagaauauga

SEQ ID NO: 734850 - RNA, 19 nt, Artificial Sequence
  Description of Artificial Sequence: Synthetic oligonucleotide
  Sense strand starting at position 3193 of SEQ ID NO: 586661
auguuagguguugaaccaa

SEQ ID NO: 734851 - RNA, 19 nt, Artificial Sequence
  Description of Artificial Sequence: Synthetic oligonucleotide
  Antisense strand to SEQ ID NO: 734850
uugguucaacaccuaacau

SEQ ID NO: 734852 - RNA, 19 nt, Artificial Sequence
  Description of Artificial Sequence: Synthetic oligonucleotide
  Sense strand starting at position 3228 of SEQ ID NO: 586661
aaugauuaacgagguguua

SEQ ID NO: 734853 - RNA, 19 nt, Artificial Sequence
  Description of Artificial Sequence: Synthetic oligonucleotide
  Antisense strand to SEQ ID NO: 734852
uaacaccucguuaaucauu

SEQ ID NO: 734854 - RNA, 19 nt, Artificial Sequence
  Description of Artificial Sequence: Synthetic oligonucleotide
  Sense strand starting at position 3616 of SEQ ID NO: 586661
ccuguagucccauauacca

SEQ ID NO: 734855 - RNA, 19 nt, Artificial Sequence
  Description of Artificial Sequence: Synthetic oligonucleotide
  Antisense strand to SEQ ID NO: 734854
ugguauaugggacuacagg

SEQ ID NO: 734856 - RNA, 19 nt, Artificial Sequence
  Description of Artificial Sequence: Synthetic oligonucleotide
  Sense strand starting at position 3759 of SEQ ID NO: 586661
augaauacucccuauggcu

SEQ ID NO: 734857 - RNA, 19 nt, Artificial Sequence
  Description of Artificial Sequence: Synthetic oligonucleotide
  Antisense strand to SEQ ID NO: 734856
agccauagggaguauucau

SEQ ID NO: 734858 - RNA, 19 nt, Artificial Sequence
  Description of Artificial Sequence: Synthetic oligonucleotide
  Sense strand starting at position 3806 of SEQ ID NO: 586661
gucuauugcccuguguagu

SEQ ID NO: 734859 - RNA, 19 nt, Artificial Sequence
  Description of Artificial Sequence: Synthetic oligonucleotide
  Antisense strand to SEQ ID NO: 734858
acuacacagggcaauagac

SEQ ID NO: 734860 - RNA, 19 nt, Artificial Sequence
  Description of Artificial Sequence: Synthetic oligonucleotide
  Sense strand starting at position 3854 of SEQ ID NO: 586661
acagaugaacaguguuuau

SEQ ID NO: 734861 - RNA, 19 nt, Artificial Sequence
  Description of Artificial Sequence: Synthetic oligonucleotide
  Antisense strand to SEQ ID NO: 734860
auaaacacuguucaucugu

SEQ ID NO: 734862 - RNA, 19 nt, Artificial Sequence
  Description of Artificial Sequence: Synthetic oligonucleotide
  Sense strand starting at position 3857 of SEQ ID NO: 586661
gaugaacaguguuuaugga

SEQ ID NO: 734863 - RNA, 19 nt, Artificial Sequence
  Description of Artificial Sequence: Synthetic oligonucleotide
  Antisense strand to SEQ ID NO: 734862
uccauaaacacuguucauc

SEQ ID NO: 734864 - RNA, 19 nt, Artificial Sequence
  Description of Artificial Sequence: Synthetic oligonucleotide
  Sense strand starting at position 3865 of SEQ ID NO: 586661
guguuuauggagcaucaca

SEQ ID NO: 734865 - RNA, 19 nt, Artificial Sequence
  Description of Artificial Sequence: Synthetic oligonucleotide
  Antisense strand to SEQ ID NO: 734864
ugugaugcuccauaaacac

SEQ ID NO: 734866 - RNA, 19 nt, Artificial Sequence
  Description of Artificial Sequence: Synthetic oligonucleotide
  Sense strand starting at position 3886 of SEQ ID NO: 586661
aucucuuuggcuggaaacu

SEQ ID NO: 734867 - RNA, 19 nt, Artificial Sequence
  Description of Artificial Sequence: Synthetic oligonucleotide
  Antisense strand to SEQ ID NO: 734866
aguuuccagccaaagagau

SEQ ID NO: 734868 - RNA, 19 nt, Artificial Sequence
  Description of Artificial Sequence: Synthetic oligonucleotide
  Sense strand starting at position 3887 of SEQ ID NO: 586661
ucucuuuggcuggaaacuu

SEQ ID NO: 734869 - RNA, 19 nt, Artificial Sequence
  Description of Artificial Sequence: Synthetic oligonucleotide
  Antisense strand to SEQ ID NO: 734868
aaguuuccagccaaagaga

SEQ ID NO: 734870 - RNA, 19 nt, Artificial Sequence
  Description of Artificial Sequence: Synthetic oligonucleotide
  Sense strand starting at position 3935 of SEQ ID NO: 586661
uucuguagucuguaaggau

SEQ ID NO: 734871 - RNA, 19 nt, Artificial Sequence
  Description of Artificial Sequence: Synthetic oligonucleotide
  Antisense strand to SEQ ID NO: 734870
auccuuacagacuacagaa

SEQ ID NO: 734872 - RNA, 19 nt, Artificial Sequence
  Description of Artificial Sequence: Synthetic oligonucleotide
  Sense strand starting at position 3939 of SEQ ID NO: 586661
guagucuguaaggaucaca

SEQ ID NO: 734873 - RNA, 19 nt, Artificial Sequence
  Description of Artificial Sequence: Synthetic oligonucleotide
  Antisense strand to SEQ ID NO: 734872
ugugauccuuacagacuac

SEQ ID NO: 734874 - RNA, 19 nt, Artificial Sequence
  Description of Artificial Sequence: Synthetic oligonucleotide
  Sense strand starting at position 114 of SEQ ID NO: 586662
ggccuuagaggucagucaa

SEQ ID NO: 734875 - RNA, 19 nt, Artificial Sequence
  Description of Artificial Sequence: Synthetic oligonucleotide
  Antisense strand to SEQ ID NO: 734874
uugacugaccucuaaggcc

SEQ ID NO: 734876 - RNA, 19 nt, Artificial Sequence
  Description of Artificial Sequence: Synthetic oligonucleotide
  Sense strand starting at position 261 of SEQ ID NO: 586662
aguaauaugugaccaggaa

SEQ ID NO: 734877 - RNA, 19 nt, Artificial Sequence
  Description of Artificial Sequence: Synthetic oligonucleotide
  Antisense strand to SEQ ID NO: 734876
uuccuggucacauauuacu

SEQ ID NO: 734878 - RNA, 19 nt, Artificial Sequence
  Description of Artificial Sequence: Synthetic oligonucleotide
  Sense strand starting at position 365 of SEQ ID NO: 586662
uuggaucucugacuuaaua

SEQ ID NO: 734879 - RNA, 19 nt, Artificial Sequence
  Description of Artificial Sequence: Synthetic oligonucleotide
  Antisense strand to SEQ ID NO: 734878
uauuaagucagagauccaa

SEQ ID NO: 734880 - RNA, 19 nt, Artificial Sequence
  Description of Artificial Sequence: Synthetic oligonucleotide
  Sense strand starting at position 443 of SEQ ID NO: 586662
aggcuuaaucaauguuuac

SEQ ID NO: 734881 - RNA, 19 nt, Artificial Sequence
  Description of Artificial Sequence: Synthetic oligonucleotide
  Antisense strand to SEQ ID NO: 734880
guaaacauugauuaagccu

SEQ ID NO: 734882 - RNA, 19 nt, Artificial Sequence
  Description of Artificial Sequence: Synthetic oligonucleotide
  Sense strand starting at position 503 of SEQ ID NO: 586662
acuuuaagaguacagcuaa

SEQ ID NO: 734883 - RNA, 19 nt, Artificial Sequence
  Description of Artificial Sequence: Synthetic oligonucleotide
  Antisense strand to SEQ ID NO: 734882
uuagcuguacucuuaaagu

SEQ ID NO: 734884 - RNA, 19 nt, Artificial Sequence
  Description of Artificial Sequence: Synthetic oligonucleotide
  Sense strand starting at position 619 of SEQ ID NO: 586662
aaaugucuucuuuagagug

SEQ ID NO: 734885 - RNA, 19 nt, Artificial Sequence
  Description of Artificial Sequence: Synthetic oligonucleotide
  Antisense strand to SEQ ID NO: 734884
cacucuaaagaagacauuu

SEQ ID NO: 734886 - RNA, 19 nt, Artificial Sequence
  Description of Artificial Sequence: Synthetic oligonucleotide
  Sense strand starting at position 804 of SEQ ID NO: 586662
acaagaucacauggccuua

SEQ ID NO: 734887 - RNA, 19 nt, Artificial Sequence
  Description of Artificial Sequence: Synthetic oligonucleotide
  Antisense strand to SEQ ID NO: 734886
uaaggccaugugaucuugu

SEQ ID NO: 734888 - RNA, 19 nt, Artificial Sequence
  Description of Artificial Sequence: Synthetic oligonucleotide
  Sense strand starting at position 839 of SEQ ID NO: 586662
cuguuugacacccaguagu

SEQ ID NO: 734889 - RNA, 19 nt, Artificial Sequence
  Description of Artificial Sequence: Synthetic oligonucleotide
  Antisense strand to SEQ ID NO: 734888
acuacugggugucaaacag

SEQ ID NO: 734890 - RNA, 19 nt, Artificial Sequence
  Description of Artificial Sequence: Synthetic oligonucleotide
  Sense strand starting at position 971 of SEQ ID NO: 586662
gugugcaaauuugcuuauu

SEQ ID NO: 734891 - RNA, 19 nt, Artificial Sequence
  Description of Artificial Sequence: Synthetic oligonucleotide
  Antisense strand to SEQ ID NO: 734890
aauaagcaaauuugcacac

SEQ ID NO: 734892 - RNA, 19 nt, Artificial Sequence
  Description of Artificial Sequence: Synthetic oligonucleotide
  Sense strand starting at position 1007 of SEQ ID NO: 586662
gcagcaucccuuuaacaga

SEQ ID NO: 734893 - RNA, 19 nt, Artificial Sequence
  Description of Artificial Sequence: Synthetic oligonucleotide
  Antisense strand to SEQ ID NO: 734892
ucuguuaaagggaugcugc

SEQ ID NO: 734894 - RNA, 19 nt, Artificial Sequence
  Description of Artificial Sequence: Synthetic oligonucleotide
  Sense strand starting at position 1076 of SEQ ID NO: 586662
ugguuuagaucacugcuaa

SEQ ID NO: 734895 - RNA, 19 nt, Artificial Sequence
  Description of Artificial Sequence: Synthetic oligonucleotide
  Antisense strand to SEQ ID NO: 734894
uuagcagugaucuaaacca

SEQ ID NO: 734896 - RNA, 19 nt, Artificial Sequence
  Description of Artificial Sequence: Synthetic oligonucleotide
  Sense strand starting at position 1271 of SEQ ID NO: 586662
guuauaauagggcauaauu

SEQ ID NO: 734897 - RNA, 19 nt, Artificial Sequence
  Description of Artificial Sequence: Synthetic oligonucleotide
  Antisense strand to SEQ ID NO: 734896
aauuaugcccuauuauaac

SEQ ID NO: 734898 - RNA, 19 nt, Artificial Sequence
  Description of Artificial Sequence: Synthetic oligonucleotide
  Sense strand starting at position 1304 of SEQ ID NO: 586662
aguguuauugaaugaguca

SEQ ID NO: 734899 - RNA, 19 nt, Artificial Sequence
  Description of Artificial Sequence: Synthetic oligonucleotide
  Antisense strand to SEQ ID NO: 734898
ugacucauucaauaacacu

SEQ ID NO: 734900 - RNA, 19 nt, Artificial Sequence
  Description of Artificial Sequence: Synthetic oligonucleotide
  Sense strand starting at position 1305 of SEQ ID NO: 586662
guguuauugaaugagucau

SEQ ID NO: 734901 - RNA, 19 nt, Artificial Sequence
  Description of Artificial Sequence: Synthetic oligonucleotide
  Antisense strand to SEQ ID NO: 734900
augacucauucaauaacac

SEQ ID NO: 734902 - RNA, 19 nt, Artificial Sequence
  Description of Artificial Sequence: Synthetic oligonucleotide
  Sense strand starting at position 1471 of SEQ ID NO: 586662
ucagucucaguagaguaau

SEQ ID NO: 734903 - RNA, 19 nt, Artificial Sequence
  Description of Artificial Sequence: Synthetic oligonucleotide
  Antisense strand to SEQ ID NO: 734902
auuacucuacugagacuga

SEQ ID NO: 734904 - RNA, 19 nt, Artificial Sequence
  Description of Artificial Sequence: Synthetic oligonucleotide
  Sense strand starting at position 1482 of SEQ ID NO: 586662
agaguaauagcaugcaaau

SEQ ID NO: 734905 - RNA, 19 nt, Artificial Sequence
  Description of Artificial Sequence: Synthetic oligonucleotide
  Antisense strand to SEQ ID NO: 734904
auuugcaugcuauuacucu

SEQ ID NO: 734906 - RNA, 19 nt, Artificial Sequence
  Description of Artificial Sequence: Synthetic oligonucleotide
  Sense strand starting at position 2079 of SEQ ID NO: 586662
acgccuagugcuuccagua

SEQ ID NO: 734907 - RNA, 19 nt, Artificial Sequence
  Description of Artificial Sequence: Synthetic oligonucleotide
  Antisense strand to SEQ ID NO: 734906
uacuggaagcacuaggcgu

SEQ ID NO: 734908 - RNA, 19 nt, Artificial Sequence
  Description of Artificial Sequence: Synthetic oligonucleotide
  Sense strand starting at position 2110 of SEQ ID NO: 586662
gauugugagugggcgauuu

SEQ ID NO: 734909 - RNA, 19 nt, Artificial Sequence
  Description of Artificial Sequence: Synthetic oligonucleotide
  Antisense strand to SEQ ID NO: 734908
aaaucgcccacucacaauc

SEQ ID NO: 734910 - RNA, 19 nt, Artificial Sequence
  Description of Artificial Sequence: Synthetic oligonucleotide
  Sense strand starting at position 2177 of SEQ ID NO: 586662
ccgccuuuccuuuacaaag

SEQ ID NO: 734911 - RNA, 19 nt, Artificial Sequence
  Description of Artificial Sequence: Synthetic oligonucleotide
  Antisense strand to SEQ ID NO: 734910
cuuuguaaaggaaaggcgg

SEQ ID NO: 734912 - RNA, 19 nt, Artificial Sequence
  Description of Artificial Sequence: Synthetic oligonucleotide
  Sense strand starting at position 2330 of SEQ ID NO: 586662
ccaacuaucucagcaggau

SEQ ID NO: 734913 - RNA, 19 nt, Artificial Sequence
  Description of Artificial Sequence: Synthetic oligonucleotide
  Antisense strand to SEQ ID NO: 734912
auccugcugagauaguugg

SEQ ID NO: 734914 - RNA, 19 nt, Artificial Sequence
  Description of Artificial Sequence: Synthetic oligonucleotide
  Sense strand starting at position 2334 of SEQ ID NO: 586662
cuaucucagcaggauacua

SEQ ID NO: 734915 - RNA, 19 nt, Artificial Sequence
  Description of Artificial Sequence: Synthetic oligonucleotide
  Antisense strand to SEQ ID NO: 734914
uaguauccugcugagauag

SEQ ID NO: 734916 - RNA, 19 nt, Artificial Sequence
  Description of Artificial Sequence: Synthetic oligonucleotide
  Sense strand starting at position 2345 of SEQ ID NO: 586662
ggauacuaacagugagguu

SEQ ID NO: 734917 - RNA, 19 nt, Artificial Sequence
  Description of Artificial Sequence: Synthetic oligonucleotide
  Antisense strand to SEQ ID NO: 734916
aaccucacuguuaguaucc

SEQ ID NO: 734918 - RNA, 19 nt, Artificial Sequence
  Description of Artificial Sequence: Synthetic oligonucleotide
  Sense strand starting at position 2408 of SEQ ID NO: 586662
uagcuugauggacauuauu

SEQ ID NO: 734919 - RNA, 19 nt, Artificial Sequence
  Description of Artificial Sequence: Synthetic oligonucleotide
  Antisense strand to SEQ ID NO: 734918
aauaauguccaucaagcua

SEQ ID NO: 734920 - RNA, 19 nt, Artificial Sequence
  Description of Artificial Sequence: Synthetic oligonucleotide
  Sense strand starting at position 2545 of SEQ ID NO: 586662
agaccuuccugcuuccaga

SEQ ID NO: 734921 - RNA, 19 nt, Artificial Sequence
  Description of Artificial Sequence: Synthetic oligonucleotide
  Antisense strand to SEQ ID NO: 734920
ucuggaagcaggaaggucu

SEQ ID NO: 734922 - RNA, 19 nt, Artificial Sequence
  Description of Artificial Sequence: Synthetic oligonucleotide
  Sense strand starting at position 2617 of SEQ ID NO: 586662
gcuggcuaauuucuuuauu

SEQ ID NO: 734923 - RNA, 19 nt, Artificial Sequence
  Description of Artificial Sequence: Synthetic oligonucleotide
  Antisense strand to SEQ ID NO: 734922
aauaaagaaauuagccagc

SEQ ID NO: 734924 - RNA, 19 nt, Artificial Sequence
  Description of Artificial Sequence: Synthetic oligonucleotide
  Sense strand starting at position 3045 of SEQ ID NO: 586662
agccauguauccuuugaag

SEQ ID NO: 734925 - RNA, 19 nt, Artificial Sequence
  Description of Artificial Sequence: Synthetic oligonucleotide
  Antisense strand to SEQ ID NO: 734924
cuucaaaggauacauggcu

SEQ ID NO: 734926 - RNA, 19 nt, Artificial Sequence
  Description of Artificial Sequence: Synthetic oligonucleotide
  Sense strand starting at position 3047 of SEQ ID NO: 586662
ccauguauccuuugaagau

SEQ ID NO: 734927 - RNA, 19 nt, Artificial Sequence
  Description of Artificial Sequence: Synthetic oligonucleotide
  Antisense strand to SEQ ID NO: 734926
aucuucaaaggauacaugg

SEQ ID NO: 734928 - RNA, 19 nt, Artificial Sequence
  Description of Artificial Sequence: Synthetic oligonucleotide
  Sense strand starting at position 3120 of SEQ ID NO: 586662
acuucuaacuuuguggaau

SEQ ID NO: 734929 - RNA, 19 nt, Artificial Sequence
  Description of Artificial Sequence: Synthetic oligonucleotide
  Antisense strand to SEQ ID NO: 734928
auuccacaaaguuagaagu

SEQ ID NO: 734930 - RNA, 19 nt, Artificial Sequence
  Description of Artificial Sequence: Synthetic oligonucleotide
  Sense strand starting at position 3123 of SEQ ID NO: 586662
ucuaacuuuguggaauauu

SEQ ID NO: 734931 - RNA, 19 nt, Artificial Sequence
  Description of Artificial Sequence: Synthetic oligonucleotide
  Antisense strand to SEQ ID NO: 734930
aauauuccacaaaguuaga

SEQ ID NO: 734932 - RNA, 19 nt, Artificial Sequence
  Description of Artificial Sequence: Synthetic oligonucleotide
  Sense strand starting at position 3165 of SEQ ID NO: 586662
aauggagacuaaggaauuu

SEQ ID NO: 734933 - RNA, 19 nt, Artificial Sequence
  Description of Artificial Sequence: Synthetic oligonucleotide
  Antisense strand to SEQ ID NO: 734932
aaauuccuuagucuccauu

SEQ ID NO: 734934 - RNA, 19 nt, Artificial Sequence
  Description of Artificial Sequence: Synthetic oligonucleotide
  Sense strand starting at position 3178 of SEQ ID NO: 586662
gaauuuaauuguugaggga

SEQ ID NO: 734935 - RNA, 19 nt, Artificial Sequence
  Description of Artificial Sequence: Synthetic oligonucleotide
  Antisense strand to SEQ ID NO: 734934
ucccucaacaauuaaauuc

SEQ ID NO: 734936 - RNA, 19 nt, Artificial Sequence
  Description of Artificial Sequence: Synthetic oligonucleotide
  Sense strand starting at position 3182 of SEQ ID NO: 586662
uuaauuguugagggauaca

SEQ ID NO: 734937 - RNA, 19 nt, Artificial Sequence
  Description of Artificial Sequence: Synthetic oligonucleotide
  Antisense strand to SEQ ID NO: 734936
uguaucccucaacaauuaa

SEQ ID NO: 734938 - RNA, 19 nt, Artificial Sequence
  Description of Artificial Sequence: Synthetic oligonucleotide
  Sense strand starting at position 3200 of SEQ ID NO: 586662
acugauuauaaguggcaga

SEQ ID NO: 734939 - RNA, 19 nt, Artificial Sequence
  Description of Artificial Sequence: Synthetic oligonucleotide
  Antisense strand to SEQ ID NO: 734938
ucugccacuuauaaucagu

SEQ ID NO: 734940 - RNA, 19 nt, Artificial Sequence
  Description of Artificial Sequence: Synthetic oligonucleotide
  Sense strand starting at position 3279 of SEQ ID NO: 586662
ggauaagacugccuuuaga

SEQ ID NO: 734941 - RNA, 19 nt, Artificial Sequence
  Description of Artificial Sequence: Synthetic oligonucleotide
  Antisense strand to SEQ ID NO: 734940
ucuaaaggcagucuuaucc

SEQ ID NO: 734942 - RNA, 19 nt, Artificial Sequence
  Description of Artificial Sequence: Synthetic oligonucleotide
  Sense strand starting at position 3574 of SEQ ID NO: 586662
gaggcugaggcagauuaua

SEQ ID NO: 734943 - RNA, 19 nt, Artificial Sequence
  Description of Artificial Sequence: Synthetic oligonucleotide
  Antisense strand to SEQ ID NO: 734942
uauaaucugccucagccuc

SEQ ID NO: 734944 - RNA, 19 nt, Artificial Sequence
  Description of Artificial Sequence: Synthetic oligonucleotide
  Sense strand starting at position 3585 of SEQ ID NO: 586662
agauuauaccauuggacuc

SEQ ID NO: 734945 - RNA, 19 nt, Artificial Sequence
  Description of Artificial Sequence: Synthetic oligonucleotide
  Antisense strand to SEQ ID NO: 734944
gaguccaaugguauaaucu

SEQ ID NO: 734946 - RNA, 19 nt, Artificial Sequence
  Description of Artificial Sequence: Synthetic oligonucleotide
  Sense strand starting at position 3680 of SEQ ID NO: 586662
acaugaagugucuaaucua

SEQ ID NO: 734947 - RNA, 19 nt, Artificial Sequence
  Description of Artificial Sequence: Synthetic oligonucleotide
  Antisense strand to SEQ ID NO: 734946
uagauuagacacuucaugu

SEQ ID NO: 734948 - RNA, 19 nt, Artificial Sequence
  Description of Artificial Sequence: Synthetic oligonucleotide
  Sense strand starting at position 3687 of SEQ ID NO: 586662
gugucuaaucuagggacau

SEQ ID NO: 734949 - RNA, 19 nt, Artificial Sequence
  Description of Artificial Sequence: Synthetic oligonucleotide
  Antisense strand to SEQ ID NO: 734948
augucccuagauuagacac

SEQ ID NO: 734950 - RNA, 19 nt, Artificial Sequence
  Description of Artificial Sequence: Synthetic oligonucleotide
  Sense strand starting at position 3739 of SEQ ID NO: 586662
aucucaggguaucuaaauu

SEQ ID NO: 734951 - RNA, 19 nt, Artificial Sequence
  Description of Artificial Sequence: Synthetic oligonucleotide
  Antisense strand to SEQ ID NO: 734950
aauuuagauacccugagau

SEQ ID NO: 734952 - RNA, 19 nt, Artificial Sequence
  Description of Artificial Sequence: Synthetic oligonucleotide
  Sense strand starting at position 3977 of SEQ ID NO: 586662
ugaauaaagucaccugcau

SEQ ID NO: 734953 - RNA, 19 nt, Artificial Sequence
  Description of Artificial Sequence: Synthetic oligonucleotide
  Antisense strand to SEQ ID NO: 734952
augcaggugacuuuauuca

SEQ ID NO: 734954 - RNA, 19 nt, Artificial Sequence
  Description of Artificial Sequence: Synthetic oligonucleotide
  Sense strand starting at position 21 of SEQ ID NO: 586663
cuaagaaagugagcucaaa

SEQ ID NO: 734955 - RNA, 19 nt, Artificial Sequence
  Description of Artificial Sequence: Synthetic oligonucleotide
  Antisense strand to SEQ ID NO: 734954
uuugagcucacuuucuuag

SEQ ID NO: 734956 - RNA, 19 nt, Artificial Sequence
  Description of Artificial Sequence: Synthetic oligonucleotide
  Sense strand starting at position 272 of SEQ ID NO: 586663
ggccuuagaggucagucaa

SEQ ID NO: 734957 - RNA, 19 nt, Artificial Sequence
  Description of Artificial Sequence: Synthetic oligonucleotide
  Antisense strand to SEQ ID NO: 734956
uugacugaccucuaaggcc

SEQ ID NO: 734958 - RNA, 19 nt, Artificial Sequence
  Description of Artificial Sequence: Synthetic oligonucleotide
  Sense strand starting at position 419 of SEQ ID NO: 586663
aguaauaugugaccaggaa

SEQ ID NO: 734959 - RNA, 19 nt, Artificial Sequence
  Description of Artificial Sequence: Synthetic oligonucleotide
  Antisense strand to SEQ ID NO: 734958
uuccuggucacauauuacu

SEQ ID NO: 734960 - RNA, 19 nt, Artificial Sequence
  Description of Artificial Sequence: Synthetic oligonucleotide
  Sense strand starting at position 523 of SEQ ID NO: 586663
uuggaucucugacuuaaua

SEQ ID NO: 734961 - RNA, 19 nt, Artificial Sequence
  Description of Artificial Sequence: Synthetic oligonucleotide
  Antisense strand to SEQ ID NO: 734960
uauuaagucagagauccaa

SEQ ID NO: 734962 - RNA, 19 nt, Artificial Sequence
  Description of Artificial Sequence: Synthetic oligonucleotide
  Sense strand starting at position 601 of SEQ ID NO: 586663
aggcuuaaucaauguuuac

SEQ ID NO: 734963 - RNA, 19 nt, Artificial Sequence
  Description of Artificial Sequence: Synthetic oligonucleotide
  Antisense strand to SEQ ID NO: 734962
guaaacauugauuaagccu

SEQ ID NO: 734964 - RNA, 19 nt, Artificial Sequence
  Description of Artificial Sequence: Synthetic oligonucleotide
  Sense strand starting at position 661 of SEQ ID NO: 586663
acuuuaagaguacagcuaa

SEQ ID NO: 734965 - RNA, 19 nt, Artificial Sequence
  Description of Artificial Sequence: Synthetic oligonucleotide
  Antisense strand to SEQ ID NO: 734964
uuagcuguacucuuaaagu

SEQ ID NO: 734966 - RNA, 19 nt, Artificial Sequence
  Description of Artificial Sequence: Synthetic oligonucleotide
  Sense strand starting at position 777 of SEQ ID NO: 586663
aaaugucuucuuuagagug

SEQ ID NO: 734967 - RNA, 19 nt, Artificial Sequence
  Description of Artificial Sequence: Synthetic oligonucleotide
  Antisense strand to SEQ ID NO: 734966
cacucuaaagaagacauuu

SEQ ID NO: 734968 - RNA, 19 nt, Artificial Sequence
  Description of Artificial Sequence: Synthetic oligonucleotide
  Sense strand starting at position 962 of SEQ ID NO: 586663
acaagaucacauggccuua

SEQ ID NO: 734969 - RNA, 19 nt, Artificial Sequence
  Description of Artificial Sequence: Synthetic oligonucleotide
  Antisense strand to SEQ ID NO: 734968
uaaggccaugugaucuugu

SEQ ID NO: 734970 - RNA, 19 nt, Artificial Sequence
  Description of Artificial Sequence: Synthetic oligonucleotide
  Sense strand starting at position 997 of SEQ ID NO: 586663
cuguuugacacccaguagu

SEQ ID NO: 734971 - RNA, 19 nt, Artificial Sequence
  Description of Artificial Sequence: Synthetic oligonucleotide
  Antisense strand to SEQ ID NO: 734970
acuacugggugucaaacag

SEQ ID NO: 734972 - RNA, 19 nt, Artificial Sequence
  Description of Artificial Sequence: Synthetic oligonucleotide
  Sense strand starting at position 1129 of SEQ ID NO: 586663
gugugcaaauuugcuuauu

SEQ ID NO: 734973 - RNA, 19 nt, Artificial Sequence
  Description of Artificial Sequence: Synthetic oligonucleotide
  Antisense strand to SEQ ID NO: 734972
aauaagcaaauuugcacac

SEQ ID NO: 734974 - RNA, 19 nt, Artificial Sequence
  Description of Artificial Sequence: Synthetic oligonucleotide
  Sense strand starting at position 1165 of SEQ ID NO: 586663
gcagcaucccuuuaacaga

SEQ ID NO: 734975 - RNA, 19 nt, Artificial Sequence
  Description of Artificial Sequence: Synthetic oligonucleotide
  Antisense strand to SEQ ID NO: 734974
ucuguuaaagggaugcugc

SEQ ID NO: 734976 - RNA, 19 nt, Artificial Sequence
  Description of Artificial Sequence: Synthetic oligonucleotide
  Sense strand starting at position 1234 of SEQ ID NO: 586663
ugguuuagaucacugcuaa

SEQ ID NO: 734977 - RNA, 19 nt, Artificial Sequence
  Description of Artificial Sequence: Synthetic oligonucleotide
  Antisense strand to SEQ ID NO: 734976
uuagcagugaucuaaacca

SEQ ID NO: 734978 - RNA, 19 nt, Artificial Sequence
  Description of Artificial Sequence: Synthetic oligonucleotide
  Sense strand starting at position 1429 of SEQ ID NO: 586663
guuauaauagggcauaauu

SEQ ID NO: 734979 - RNA, 19 nt, Artificial Sequence
  Description of Artificial Sequence: Synthetic oligonucleotide
  Antisense strand to SEQ ID NO: 734978
aauuaugcccuauuauaac

SEQ ID NO: 734980 - RNA, 19 nt, Artificial Sequence
  Description of Artificial Sequence: Synthetic oligonucleotide
  Sense strand starting at position 1462 of SEQ ID NO: 586663
aguguuauugaaugaguca

SEQ ID NO: 734981 - RNA, 19 nt, Artificial Sequence
  Description of Artificial Sequence: Synthetic oligonucleotide
  Antisense strand to SEQ ID NO: 734980
ugacucauucaauaacacu

SEQ ID NO: 734982 - RNA, 19 nt, Artificial Sequence
  Description of Artificial Sequence: Synthetic oligonucleotide
  Sense strand starting at position 1463 of SEQ ID NO: 586663
guguuauugaaugagucau

SEQ ID NO: 734983 - RNA, 19 nt, Artificial Sequence
  Description of Artificial Sequence: Synthetic oligonucleotide
  Antisense strand to SEQ ID NO: 734982
augacucauucaauaacac

SEQ ID NO: 734984 - RNA, 19 nt, Artificial Sequence
  Description of Artificial Sequence: Synthetic oligonucleotide
  Sense strand starting at position 1629 of SEQ ID NO: 586663
ucagucucaguagaguaau

SEQ ID NO: 734985 - RNA, 19 nt, Artificial Sequence
  Description of Artificial Sequence: Synthetic oligonucleotide
  Antisense strand to SEQ ID NO: 734984
auuacucuacugagacuga

SEQ ID NO: 734986 - RNA, 19 nt, Artificial Sequence
  Description of Artificial Sequence: Synthetic oligonucleotide
  Sense strand starting at position 1640 of SEQ ID NO: 586663
agaguaauagcaugcaaau

SEQ ID NO: 734987 - RNA, 19 nt, Artificial Sequence
  Description of Artificial Sequence: Synthetic oligonucleotide
  Antisense strand to SEQ ID NO: 734986
auuugcaugcuauuacucu

SEQ ID NO: 734988 - RNA, 19 nt, Artificial Sequence
  Description of Artificial Sequence: Synthetic oligonucleotide
  Sense strand starting at position 2237 of SEQ ID NO: 586663
acgccuagugcuuccagua

SEQ ID NO: 734989 - RNA, 19 nt, Artificial Sequence
  Description of Artificial Sequence: Synthetic oligonucleotide
  Antisense strand to SEQ ID NO: 734988
uacuggaagcacuaggcgu

SEQ ID NO: 734990 - RNA, 19 nt, Artificial Sequence
  Description of Artificial Sequence: Synthetic oligonucleotide
  Sense strand starting at position 2268 of SEQ ID NO: 586663
gauugugagugggcgauuu

SEQ ID NO: 734991 - RNA, 19 nt, Artificial Sequence
  Description of Artificial Sequence: Synthetic oligonucleotide
  Antisense strand to SEQ ID NO: 734990
aaaucgcccacucacaauc

SEQ ID NO: 734992 - RNA, 19 nt, Artificial Sequence
  Description of Artificial Sequence: Synthetic oligonucleotide
  Sense strand starting at position 2335 of SEQ ID NO: 586663
ccgccuuuccuuuacaaag

SEQ ID NO: 734993 - RNA, 19 nt, Artificial Sequence
  Description of Artificial Sequence: Synthetic oligonucleotide
  Antisense strand to SEQ ID NO: 734992
cuuuguaaaggaaaggcgg

SEQ ID NO: 734994 - RNA, 19 nt, Artificial Sequence
  Description of Artificial Sequence: Synthetic oligonucleotide
  Sense strand starting at position 2488 of SEQ ID NO: 586663
ccaacuaucucagcaggau

SEQ ID NO: 734995 - RNA, 19 nt, Artificial Sequence
  Description of Artificial Sequence: Synthetic oligonucleotide
  Antisense strand to SEQ ID NO: 734994
auccugcugagauaguugg

SEQ ID NO: 734996 - RNA, 19 nt, Artificial Sequence
  Description of Artificial Sequence: Synthetic oligonucleotide
  Sense strand starting at position 2492 of SEQ ID NO: 586663
cuaucucagcaggauacua

SEQ ID NO: 734997 - RNA, 19 nt, Artificial Sequence
  Description of Artificial Sequence: Synthetic oligonucleotide
  Antisense strand to SEQ ID NO: 734996
uaguauccugcugagauag

SEQ ID NO: 734998 - RNA, 19 nt, Artificial Sequence
  Description of Artificial Sequence: Synthetic oligonucleotide
  Sense strand starting at position 2503 of SEQ ID NO: 586663
ggauacuaacagugagguu

SEQ ID NO: 734999 - RNA, 19 nt, Artificial Sequence
  Description of Artificial Sequence: Synthetic oligonucleotide
  Antisense strand to SEQ ID NO: 734998
aaccucacuguuaguaucc

SEQ ID NO: 735000 - RNA, 19 nt, Artificial Sequence
  Description of Artificial Sequence: Synthetic oligonucleotide
  Sense strand starting at position 2566 of SEQ ID NO: 586663
uagcuugauggacauuauu

SEQ ID NO: 735001 - RNA, 19 nt, Artificial Sequence
  Description of Artificial Sequence: Synthetic oligonucleotide
  Antisense strand to SEQ ID NO: 735000
aauaauguccaucaagcua

SEQ ID NO: 735002 - RNA, 19 nt, Artificial Sequence
  Description of Artificial Sequence: Synthetic oligonucleotide
  Sense strand starting at position 2703 of SEQ ID NO: 586663
agaccuuccugcuuccaga

SEQ ID NO: 735003 - RNA, 19 nt, Artificial Sequence
  Description of Artificial Sequence: Synthetic oligonucleotide
  Antisense strand to SEQ ID NO: 735002
ucuggaagcaggaaggucu

SEQ ID NO: 735004 - RNA, 19 nt, Artificial Sequence
  Description of Artificial Sequence: Synthetic oligonucleotide
  Sense strand starting at position 2775 of SEQ ID NO: 586663
gcuggcuaauuucuuuauu

SEQ ID NO: 735005 - RNA, 19 nt, Artificial Sequence
  Description of Artificial Sequence: Synthetic oligonucleotide
  Antisense strand to SEQ ID NO: 735004
aauaaagaaauuagccagc

SEQ ID NO: 735006 - RNA, 19 nt, Artificial Sequence
  Description of Artificial Sequence: Synthetic oligonucleotide
  Sense strand starting at position 3203 of SEQ ID NO: 586663
agccauguauccuuugaag

SEQ ID NO: 735007 - RNA, 19 nt, Artificial Sequence
  Description of Artificial Sequence: Synthetic oligonucleotide
  Antisense strand to SEQ ID NO: 735006
cuucaaaggauacauggcu

SEQ ID NO: 735008 - RNA, 19 nt, Artificial Sequence
  Description of Artificial Sequence: Synthetic oligonucleotide
  Sense strand starting at position 3205 of SEQ ID NO: 586663
ccauguauccuuugaagau

SEQ ID NO: 735009 - RNA, 19 nt, Artificial Sequence
  Description of Artificial Sequence: Synthetic oligonucleotide
  Antisense strand to SEQ ID NO: 735008
aucuucaaaggauacaugg

SEQ ID NO: 735010 - RNA, 19 nt, Artificial Sequence
  Description of Artificial Sequence: Synthetic oligonucleotide
  Sense strand starting at position 3278 of SEQ ID NO: 586663
acuucuaacuuuguggaau

SEQ ID NO: 735011 - RNA, 19 nt, Artificial Sequence
  Description of Artificial Sequence: Synthetic oligonucleotide
  Antisense strand to SEQ ID NO: 735010
auuccacaaaguuagaagu

SEQ ID NO: 735012 - RNA, 19 nt, Artificial Sequence
  Description of Artificial Sequence: Synthetic oligonucleotide
  Sense strand starting at position 3281 of SEQ ID NO: 586663
ucuaacuuuguggaauauu

SEQ ID NO: 735013 - RNA, 19 nt, Artificial Sequence
  Description of Artificial Sequence: Synthetic oligonucleotide
  Antisense strand to SEQ ID NO: 735012
aauauuccacaaaguuaga

SEQ ID NO: 735014 - RNA, 19 nt, Artificial Sequence
  Description of Artificial Sequence: Synthetic oligonucleotide
  Sense strand starting at position 3323 of SEQ ID NO: 586663
aauggagacuaaggaauuu

SEQ ID NO: 735015 - RNA, 19 nt, Artificial Sequence
  Description of Artificial Sequence: Synthetic oligonucleotide
  Antisense strand to SEQ ID NO: 735014
aaauuccuuagucuccauu

SEQ ID NO: 735016 - RNA, 19 nt, Artificial Sequence
  Description of Artificial Sequence: Synthetic oligonucleotide
  Sense strand starting at position 3336 of SEQ ID NO: 586663
gaauuuaauuguugaggga

SEQ ID NO: 735017 - RNA, 19 nt, Artificial Sequence
  Description of Artificial Sequence: Synthetic oligonucleotide
  Antisense strand to SEQ ID NO: 735016
ucccucaacaauuaaauuc

SEQ ID NO: 735018 - RNA, 19 nt, Artificial Sequence
  Description of Artificial Sequence: Synthetic oligonucleotide
  Sense strand starting at position 3340 of SEQ ID NO: 586663
uuaauuguugagggauaca

SEQ ID NO: 735019 - RNA, 19 nt, Artificial Sequence
  Description of Artificial Sequence: Synthetic oligonucleotide
  Antisense strand to SEQ ID NO: 735018
uguaucccucaacaauuaa

SEQ ID NO: 735020 - RNA, 19 nt, Artificial Sequence
  Description of Artificial Sequence: Synthetic oligonucleotide
  Sense strand starting at position 3358 of SEQ ID NO: 586663
acugauuauaaguggcaga

SEQ ID NO: 735021 - RNA, 19 nt, Artificial Sequence
  Description of Artificial Sequence: Synthetic oligonucleotide
  Antisense strand to SEQ ID NO: 735020
ucugccacuuauaaucagu

SEQ ID NO: 735022 - RNA, 19 nt, Artificial Sequence
  Description of Artificial Sequence: Synthetic oligonucleotide
  Sense strand starting at position 3437 of SEQ ID NO: 586663
ggauaagacugccuuuaga

SEQ ID NO: 735023 - RNA, 19 nt, Artificial Sequence
  Description of Artificial Sequence: Synthetic oligonucleotide
  Antisense strand to SEQ ID NO: 735022
ucuaaaggcagucuuaucc

SEQ ID NO: 735024 - RNA, 19 nt, Artificial Sequence
  Description of Artificial Sequence: Synthetic oligonucleotide
  Sense strand starting at position 3732 of SEQ ID NO: 586663
gaggcugaggcagauuaua

SEQ ID NO: 735025 - RNA, 19 nt, Artificial Sequence
  Description of Artificial Sequence: Synthetic oligonucleotide
  Antisense strand to SEQ ID NO: 735024
uauaaucugccucagccuc

SEQ ID NO: 735026 - RNA, 19 nt, Artificial Sequence
  Description of Artificial Sequence: Synthetic oligonucleotide
  Sense strand starting at position 3743 of SEQ ID NO: 586663
agauuauaccauuggacuc

SEQ ID NO: 735027 - RNA, 19 nt, Artificial Sequence
  Description of Artificial Sequence: Synthetic oligonucleotide
  Antisense strand to SEQ ID NO: 735026
gaguccaaugguauaaucu

SEQ ID NO: 735028 - RNA, 19 nt, Artificial Sequence
  Description of Artificial Sequence: Synthetic oligonucleotide
  Sense strand starting at position 3838 of SEQ ID NO: 586663
acaugaagugucuaaucua

SEQ ID NO: 735029 - RNA, 19 nt, Artificial Sequence
  Description of Artificial Sequence: Synthetic oligonucleotide
  Antisense strand to SEQ ID NO: 735028
uagauuagacacuucaugu

SEQ ID NO: 735030 - RNA, 19 nt, Artificial Sequence
  Description of Artificial Sequence: Synthetic oligonucleotide
  Sense strand starting at position 3845 of SEQ ID NO: 586663
gugucuaaucuagggacau

SEQ ID NO: 735031 - RNA, 19 nt, Artificial Sequence
  Description of Artificial Sequence: Synthetic oligonucleotide
  Antisense strand to SEQ ID NO: 735030
augucccuagauuagacac

SEQ ID NO: 735032 - RNA, 19 nt, Artificial Sequence
  Description of Artificial Sequence: Synthetic oligonucleotide
  Sense strand starting at position 3897 of SEQ ID NO: 586663
aucucaggguaucuaaauu

SEQ ID NO: 735033 - RNA, 19 nt, Artificial Sequence
  Description of Artificial Sequence: Synthetic oligonucleotide
  Antisense strand to SEQ ID NO: 735032
aauuuagauacccugagau

SEQ ID NO: 735034 - RNA, 19 nt, Artificial Sequence
  Description of Artificial Sequence: Synthetic oligonucleotide
  Sense strand starting at position 104 of SEQ ID NO: 586664
gcacuuauuuauccucagu

SEQ ID NO: 735035 - RNA, 19 nt, Artificial Sequence
  Description of Artificial Sequence: Synthetic oligonucleotide
  Antisense strand to SEQ ID NO: 735034
acugaggauaaauaagugc

SEQ ID NO: 735036 - RNA, 19 nt, Artificial Sequence
  Description of Artificial Sequence: Synthetic oligonucleotide
  Sense strand starting at position 182 of SEQ ID NO: 586664
aucugauucuuccuguuua

SEQ ID NO: 735037 - RNA, 19 nt, Artificial Sequence
  Description of Artificial Sequence: Synthetic oligonucleotide
  Antisense strand to SEQ ID NO: 735036
uaaacaggaagaaucagau

SEQ ID NO: 735038 - RNA, 19 nt, Artificial Sequence
  Description of Artificial Sequence: Synthetic oligonucleotide
  Sense strand starting at position 252 of SEQ ID NO: 586664
gaauuugaguucuaagauu

SEQ ID NO: 735039 - RNA, 19 nt, Artificial Sequence
  Description of Artificial Sequence: Synthetic oligonucleotide
  Antisense strand to SEQ ID NO: 735038
aaucuuagaacucaaauuc

SEQ ID NO: 735040 - RNA, 19 nt, Artificial Sequence
  Description of Artificial Sequence: Synthetic oligonucleotide
  Sense strand starting at position 289 of SEQ ID NO: 586664
ggcucagaaauucgacagu

SEQ ID NO: 735041 - RNA, 19 nt, Artificial Sequence
  Description of Artificial Sequence: Synthetic oligonucleotide
  Antisense strand to SEQ ID NO: 735040
acugucgaauuucugagcc

SEQ ID NO: 735042 - RNA, 19 nt, Artificial Sequence
  Description of Artificial Sequence: Synthetic oligonucleotide
  Sense strand starting at position 428 of SEQ ID NO: 586664
gaggaaauuguuggccaga

SEQ ID NO: 735043 - RNA, 19 nt, Artificial Sequence
  Description of Artificial Sequence: Synthetic oligonucleotide
  Antisense strand to SEQ ID NO: 735042
ucuggccaacaauuuccuc

SEQ ID NO: 735044 - RNA, 19 nt, Artificial Sequence
  Description of Artificial Sequence: Synthetic oligonucleotide
  Sense strand starting at position 429 of SEQ ID NO: 586664
aggaaauuguuggccagau

SEQ ID NO: 735045 - RNA, 19 nt, Artificial Sequence
  Description of Artificial Sequence: Synthetic oligonucleotide
  Antisense strand to SEQ ID NO: 735044
aucuggccaacaauuuccu

SEQ ID NO: 735046 - RNA, 19 nt, Artificial Sequence
  Description of Artificial Sequence: Synthetic oligonucleotide
  Sense strand starting at position 430 of SEQ ID NO: 586664
ggaaauuguuggccagaug

SEQ ID NO: 735047 - RNA, 19 nt, Artificial Sequence
  Description of Artificial Sequence: Synthetic oligonucleotide
  Antisense strand to SEQ ID NO: 735046
caucuggccaacaauuucc

SEQ ID NO: 735048 - RNA, 19 nt, Artificial Sequence
  Description of Artificial Sequence: Synthetic oligonucleotide
  Sense strand starting at position 662 of SEQ ID NO: 586664
gaguuuaugccagagcaug

SEQ ID NO: 735049 - RNA, 19 nt, Artificial Sequence
  Description of Artificial Sequence: Synthetic oligonucleotide
  Antisense strand to SEQ ID NO: 735048
caugcucuggcauaaacuc

SEQ ID NO: 735050 - RNA, 19 nt, Artificial Sequence
  Description of Artificial Sequence: Synthetic oligonucleotide
  Sense strand starting at position 693 of SEQ ID NO: 586664
uggguugguuuggucagaa

SEQ ID NO: 735051 - RNA, 19 nt, Artificial Sequence
  Description of Artificial Sequence: Synthetic oligonucleotide
  Antisense strand to SEQ ID NO: 735050
uucugaccaaaccaaccca

SEQ ID NO: 735052 - RNA, 19 nt, Artificial Sequence
  Description of Artificial Sequence: Synthetic oligonucleotide
  Sense strand starting at position 726 of SEQ ID NO: 586664
gaggguuggccucagaaau

SEQ ID NO: 735053 - RNA, 19 nt, Artificial Sequence
  Description of Artificial Sequence: Synthetic oligonucleotide
  Antisense strand to SEQ ID NO: 735052
auuucugaggccaacccuc

SEQ ID NO: 735054 - RNA, 19 nt, Artificial Sequence
  Description of Artificial Sequence: Synthetic oligonucleotide
  Sense strand starting at position 736 of SEQ ID NO: 586664
cucagaaaugcaggaauua

SEQ ID NO: 735055 - RNA, 19 nt, Artificial Sequence
  Description of Artificial Sequence: Synthetic oligonucleotide
  Antisense strand to SEQ ID NO: 735054
uaauuccugcauuucugag

SEQ ID NO: 735056 - RNA, 19 nt, Artificial Sequence
  Description of Artificial Sequence: Synthetic oligonucleotide
  Sense strand starting at position 1526 of SEQ ID NO: 586664
aaaguaaaguuggcauauu

SEQ ID NO: 735057 - RNA, 19 nt, Artificial Sequence
  Description of Artificial Sequence: Synthetic oligonucleotide
  Antisense strand to SEQ ID NO: 735056
aauaugccaacuuuacuuu

SEQ ID NO: 735058 - RNA, 19 nt, Artificial Sequence
  Description of Artificial Sequence: Synthetic oligonucleotide
  Sense strand starting at position 1527 of SEQ ID NO: 586664
aaguaaaguuggcauauuu

SEQ ID NO: 735059 - RNA, 19 nt, Artificial Sequence
  Description of Artificial Sequence: Synthetic oligonucleotide
  Antisense strand to SEQ ID NO: 735058
aaauaugccaacuuuacuu

SEQ ID NO: 735060 - RNA, 19 nt, Artificial Sequence
  Description of Artificial Sequence: Synthetic oligonucleotide
  Sense strand starting at position 1536 of SEQ ID NO: 586664
uggcauauuucgcuuuguu

SEQ ID NO: 735061 - RNA, 19 nt, Artificial Sequence
  Description of Artificial Sequence: Synthetic oligonucleotide
  Antisense strand to SEQ ID NO: 735060
aacaaagcgaaauaugcca

SEQ ID NO: 735062 - RNA, 19 nt, Artificial Sequence
  Description of Artificial Sequence: Synthetic oligonucleotide
  Sense strand starting at position 1539 of SEQ ID NO: 586664
cauauuucgcuuuguuuag

SEQ ID NO: 735063 - RNA, 19 nt, Artificial Sequence
  Description of Artificial Sequence: Synthetic oligonucleotide
  Antisense strand to SEQ ID NO: 735062
cuaaacaaagcgaaauaug

SEQ ID NO: 735064 - RNA, 19 nt, Artificial Sequence
  Description of Artificial Sequence: Synthetic oligonucleotide
  Sense strand starting at position 1540 of SEQ ID NO: 586664
auauuucgcuuuguuuaga

SEQ ID NO: 735065 - RNA, 19 nt, Artificial Sequence
  Description of Artificial Sequence: Synthetic oligonucleotide
  Antisense strand to SEQ ID NO: 735064
ucuaaacaaagcgaaauau

SEQ ID NO: 735066 - RNA, 19 nt, Artificial Sequence
  Description of Artificial Sequence: Synthetic oligonucleotide
  Sense strand starting at position 1541 of SEQ ID NO: 586664
uauuucgcuuuguuuagaa

SEQ ID NO: 735067 - RNA, 19 nt, Artificial Sequence
  Description of Artificial Sequence: Synthetic oligonucleotide
  Antisense strand to SEQ ID NO: 735066
uucuaaacaaagcgaaaua

SEQ ID NO: 735068 - RNA, 19 nt, Artificial Sequence
  Description of Artificial Sequence: Synthetic oligonucleotide
  Sense strand starting at position 1543 of SEQ ID NO: 586664
uuucgcuuuguuuagaaag

SEQ ID NO: 735069 - RNA, 19 nt, Artificial Sequence
  Description of Artificial Sequence: Synthetic oligonucleotide
  Antisense strand to SEQ ID NO: 735068
cuuucuaaacaaagcgaaa

SEQ ID NO: 735070 - RNA, 19 nt, Artificial Sequence
  Description of Artificial Sequence: Synthetic oligonucleotide
  Sense strand starting at position 2382 of SEQ ID NO: 586664
ccuggagucggagguugua

SEQ ID NO: 735071 - RNA, 19 nt, Artificial Sequence
  Description of Artificial Sequence: Synthetic oligonucleotide
  Antisense strand to SEQ ID NO: 735070
uacaaccuccgacuccagg

SEQ ID NO: 735072 - RNA, 19 nt, Artificial Sequence
  Description of Artificial Sequence: Synthetic oligonucleotide
  Sense strand starting at position 2491 of SEQ ID NO: 586664
ugaauuggugcgucagcga

SEQ ID NO: 735073 - RNA, 19 nt, Artificial Sequence
  Description of Artificial Sequence: Synthetic oligonucleotide
  Antisense strand to SEQ ID NO: 735072
ucgcugacgcaccaauuca

SEQ ID NO: 735074 - RNA, 19 nt, Artificial Sequence
  Description of Artificial Sequence: Synthetic oligonucleotide
  Sense strand starting at position 2531 of SEQ ID NO: 586664
guaauaguacauugauuag

SEQ ID NO: 735075 - RNA, 19 nt, Artificial Sequence
  Description of Artificial Sequence: Synthetic oligonucleotide
  Antisense strand to SEQ ID NO: 735074
cuaaucaauguacuauuac

SEQ ID NO: 735076 - RNA, 19 nt, Artificial Sequence
  Description of Artificial Sequence: Synthetic oligonucleotide
  Sense strand starting at position 2585 of SEQ ID NO: 586664
uucuguuccuaauuguaua

SEQ ID NO: 735077 - RNA, 19 nt, Artificial Sequence
  Description of Artificial Sequence: Synthetic oligonucleotide
  Antisense strand to SEQ ID NO: 735076
uauacaauuaggaacagaa

SEQ ID NO: 735078 - RNA, 19 nt, Artificial Sequence
  Description of Artificial Sequence: Synthetic oligonucleotide
  Sense strand starting at position 2590 of SEQ ID NO: 586664
uuccuaauuguauaacgaa

SEQ ID NO: 735079 - RNA, 19 nt, Artificial Sequence
  Description of Artificial Sequence: Synthetic oligonucleotide
  Antisense strand to SEQ ID NO: 735078
uucguuauacaauuaggaa

SEQ ID NO: 735080 - RNA, 19 nt, Artificial Sequence
  Description of Artificial Sequence: Synthetic oligonucleotide
  Sense strand starting at position 2802 of SEQ ID NO: 586664
ugauauucccucugccuga

SEQ ID NO: 735081 - RNA, 19 nt, Artificial Sequence
  Description of Artificial Sequence: Synthetic oligonucleotide
  Antisense strand to SEQ ID NO: 735080
ucaggcagagggaauauca

SEQ ID NO: 735082 - RNA, 19 nt, Artificial Sequence
  Description of Artificial Sequence: Synthetic oligonucleotide
  Sense strand starting at position 2871 of SEQ ID NO: 586664
acuccagaagucuagguua

SEQ ID NO: 735083 - RNA, 19 nt, Artificial Sequence
  Description of Artificial Sequence: Synthetic oligonucleotide
  Antisense strand to SEQ ID NO: 735082
uaaccuagacuucuggagu

SEQ ID NO: 735084 - RNA, 19 nt, Artificial Sequence
  Description of Artificial Sequence: Synthetic oligonucleotide
  Sense strand starting at position 2873 of SEQ ID NO: 586664
uccagaagucuagguuaga

SEQ ID NO: 735085 - RNA, 19 nt, Artificial Sequence
  Description of Artificial Sequence: Synthetic oligonucleotide
  Antisense strand to SEQ ID NO: 735084
ucuaaccuagacuucugga

SEQ ID NO: 735086 - RNA, 19 nt, Artificial Sequence
  Description of Artificial Sequence: Synthetic oligonucleotide
  Sense strand starting at position 2874 of SEQ ID NO: 586664
ccagaagucuagguuagac

SEQ ID NO: 735087 - RNA, 19 nt, Artificial Sequence
  Description of Artificial Sequence: Synthetic oligonucleotide
  Antisense strand to SEQ ID NO: 735086
gucuaaccuagacuucugg

SEQ ID NO: 735088 - RNA, 19 nt, Artificial Sequence
  Description of Artificial Sequence: Synthetic oligonucleotide
  Sense strand starting at position 2991 of SEQ ID NO: 586664
acucuuaauguagguacau

SEQ ID NO: 735089 - RNA, 19 nt, Artificial Sequence
  Description of Artificial Sequence: Synthetic oligonucleotide
  Antisense strand to SEQ ID NO: 735088
auguaccuacauuaagagu

SEQ ID NO: 735090 - RNA, 19 nt, Artificial Sequence
  Description of Artificial Sequence: Synthetic oligonucleotide
  Sense strand starting at position 3011 of SEQ ID NO: 586664
gccacuacuccauacugua

SEQ ID NO: 735091 - RNA, 19 nt, Artificial Sequence
  Description of Artificial Sequence: Synthetic oligonucleotide
  Antisense strand to SEQ ID NO: 735090
uacaguauggaguaguggc

SEQ ID NO: 735092 - RNA, 19 nt, Artificial Sequence
  Description of Artificial Sequence: Synthetic oligonucleotide
  Sense strand starting at position 3031 of SEQ ID NO: 586664
uugucagucucuuccauca

SEQ ID NO: 735093 - RNA, 19 nt, Artificial Sequence
  Description of Artificial Sequence: Synthetic oligonucleotide
  Antisense strand to SEQ ID NO: 735092
ugauggaagagacugacaa

SEQ ID NO: 735094 - RNA, 19 nt, Artificial Sequence
  Description of Artificial Sequence: Synthetic oligonucleotide
  Sense strand starting at position 3055 of SEQ ID NO: 586664
ggaaauuguucagcuccga

SEQ ID NO: 735095 - RNA, 19 nt, Artificial Sequence
  Description of Artificial Sequence: Synthetic oligonucleotide
  Antisense strand to SEQ ID NO: 735094
ucggagcugaacaauuucc

SEQ ID NO: 735096 - RNA, 19 nt, Artificial Sequence
  Description of Artificial Sequence: Synthetic oligonucleotide
  Sense strand starting at position 3109 of SEQ ID NO: 586664
ccaggcuuauuccuuggua

SEQ ID NO: 735097 - RNA, 19 nt, Artificial Sequence
  Description of Artificial Sequence: Synthetic oligonucleotide
  Antisense strand to SEQ ID NO: 735096
uaccaaggaauaagccugg

SEQ ID NO: 735098 - RNA, 19 nt, Artificial Sequence
  Description of Artificial Sequence: Synthetic oligonucleotide
  Sense strand starting at position 3122 of SEQ ID NO: 586664
uugguagcauagucauaac

SEQ ID NO: 735099 - RNA, 19 nt, Artificial Sequence
  Description of Artificial Sequence: Synthetic oligonucleotide
  Antisense strand to SEQ ID NO: 735098
guuaugacuaugcuaccaa

SEQ ID NO: 735100 - RNA, 19 nt, Artificial Sequence
  Description of Artificial Sequence: Synthetic oligonucleotide
  Sense strand starting at position 3483 of SEQ ID NO: 586664
acagacuucuagucuguaa

SEQ ID NO: 735101 - RNA, 19 nt, Artificial Sequence
  Description of Artificial Sequence: Synthetic oligonucleotide
  Antisense strand to SEQ ID NO: 735100
uuacagacuagaagucugu

SEQ ID NO: 735102 - RNA, 19 nt, Artificial Sequence
  Description of Artificial Sequence: Synthetic oligonucleotide
  Sense strand starting at position 3485 of SEQ ID NO: 586664
agacuucuagucuguaaag

SEQ ID NO: 735103 - RNA, 19 nt, Artificial Sequence
  Description of Artificial Sequence: Synthetic oligonucleotide
  Antisense strand to SEQ ID NO: 735102
cuuuacagacuagaagucu

SEQ ID NO: 735104 - RNA, 19 nt, Artificial Sequence
  Description of Artificial Sequence: Synthetic oligonucleotide
  Sense strand starting at position 3486 of SEQ ID NO: 586664
gacuucuagucuguaaaga

SEQ ID NO: 735105 - RNA, 19 nt, Artificial Sequence
  Description of Artificial Sequence: Synthetic oligonucleotide
  Antisense strand to SEQ ID NO: 735104
ucuuuacagacuagaaguc

SEQ ID NO: 735106 - RNA, 19 nt, Artificial Sequence
  Description of Artificial Sequence: Synthetic oligonucleotide
  Sense strand starting at position 3487 of SEQ ID NO: 586664
acuucuagucuguaaagaa

SEQ ID NO: 735107 - RNA, 19 nt, Artificial Sequence
  Description of Artificial Sequence: Synthetic oligonucleotide
  Antisense strand to SEQ ID NO: 735106
uucuuuacagacuagaagu

SEQ ID NO: 735108 - RNA, 19 nt, Artificial Sequence
  Description of Artificial Sequence: Synthetic oligonucleotide
  Sense strand starting at position 3520 of SEQ ID NO: 586664
gcgauaggauuugaaguua

SEQ ID NO: 735109 - RNA, 19 nt, Artificial Sequence
  Description of Artificial Sequence: Synthetic oligonucleotide
  Antisense strand to SEQ ID NO: 735108
uaacuucaaauccuaucgc

SEQ ID NO: 735110 - RNA, 19 nt, Artificial Sequence
  Description of Artificial Sequence: Synthetic oligonucleotide
  Sense strand starting at position 3703 of SEQ ID NO: 586664
ccugccuuaucuuuaggaa

SEQ ID NO: 735111 - RNA, 19 nt, Artificial Sequence
  Description of Artificial Sequence: Synthetic oligonucleotide
  Antisense strand to SEQ ID NO: 735110
uuccuaaagauaaggcagg

SEQ ID NO: 735112 - RNA, 19 nt, Artificial Sequence
  Description of Artificial Sequence: Synthetic oligonucleotide
  Sense strand starting at position 3704 of SEQ ID NO: 586664
cugccuuaucuuuaggaaa

SEQ ID NO: 735113 - RNA, 19 nt, Artificial Sequence
  Description of Artificial Sequence: Synthetic oligonucleotide
  Antisense strand to SEQ ID NO: 735112
uuuccuaaagauaaggcag

SEQ ID NO: 735114 - RNA, 19 nt, Artificial Sequence
  Description of Artificial Sequence: Synthetic oligonucleotide
  Sense strand starting at position 17 of SEQ ID NO: 586665
acagauuaguuauucuguu

SEQ ID NO: 735115 - RNA, 19 nt, Artificial Sequence
  Description of Artificial Sequence: Synthetic oligonucleotide
  Antisense strand to SEQ ID NO: 735114
aacagaauaacuaaucugu

SEQ ID NO: 735116 - RNA, 19 nt, Artificial Sequence
  Description of Artificial Sequence: Synthetic oligonucleotide
  Sense strand starting at position 21 of SEQ ID NO: 586665
auuaguuauucuguuagcu

SEQ ID NO: 735117 - RNA, 19 nt, Artificial Sequence
  Description of Artificial Sequence: Synthetic oligonucleotide
  Antisense strand to SEQ ID NO: 735116
agcuaacagaauaacuaau

SEQ ID NO: 735118 - RNA, 19 nt, Artificial Sequence
  Description of Artificial Sequence: Synthetic oligonucleotide
  Sense strand starting at position 25 of SEQ ID NO: 586665
guuauucuguuagcuagga

SEQ ID NO: 735119 - RNA, 19 nt, Artificial Sequence
  Description of Artificial Sequence: Synthetic oligonucleotide
  Antisense strand to SEQ ID NO: 735118
uccuagcuaacagaauaac

SEQ ID NO: 735120 - RNA, 19 nt, Artificial Sequence
  Description of Artificial Sequence: Synthetic oligonucleotide
  Sense strand starting at position 26 of SEQ ID NO: 586665
uuauucuguuagcuaggau

SEQ ID NO: 735121 - RNA, 19 nt, Artificial Sequence
  Description of Artificial Sequence: Synthetic oligonucleotide
  Antisense strand to SEQ ID NO: 735120
auccuagcuaacagaauaa

SEQ ID NO: 735122 - RNA, 19 nt, Artificial Sequence
  Description of Artificial Sequence: Synthetic oligonucleotide
  Sense strand starting at position 29 of SEQ ID NO: 586665
uucuguuagcuaggaucca

SEQ ID NO: 735123 - RNA, 19 nt, Artificial Sequence
  Description of Artificial Sequence: Synthetic oligonucleotide
  Antisense strand to SEQ ID NO: 735122
uggauccuagcuaacagaa

SEQ ID NO: 735124 - RNA, 19 nt, Artificial Sequence
  Description of Artificial Sequence: Synthetic oligonucleotide
  Sense strand starting at position 111 of SEQ ID NO: 586665
gugauaaaguaaccauucu

SEQ ID NO: 735125 - RNA, 19 nt, Artificial Sequence
  Description of Artificial Sequence: Synthetic oligonucleotide
  Antisense strand to SEQ ID NO: 735124
agaaugguuacuuuaucac

SEQ ID NO: 735126 - RNA, 19 nt, Artificial Sequence
  Description of Artificial Sequence: Synthetic oligonucleotide
  Sense strand starting at position 160 of SEQ ID NO: 586665
aaguuucuccaguggcauu

SEQ ID NO: 735127 - RNA, 19 nt, Artificial Sequence
  Description of Artificial Sequence: Synthetic oligonucleotide
  Antisense strand to SEQ ID NO: 735126
aaugccacuggagaaacuu

SEQ ID NO: 735128 - RNA, 19 nt, Artificial Sequence
  Description of Artificial Sequence: Synthetic oligonucleotide
  Sense strand starting at position 245 of SEQ ID NO: 586665
caaguagguuugccaucua

SEQ ID NO: 735129 - RNA, 19 nt, Artificial Sequence
  Description of Artificial Sequence: Synthetic oligonucleotide
  Antisense strand to SEQ ID NO: 735128
uagauggcaaaccuacuug

SEQ ID NO: 735130 - RNA, 19 nt, Artificial Sequence
  Description of Artificial Sequence: Synthetic oligonucleotide
  Sense strand starting at position 350 of SEQ ID NO: 586665
cuacgcacugcugaaagau

SEQ ID NO: 735131 - RNA, 19 nt, Artificial Sequence
  Description of Artificial Sequence: Synthetic oligonucleotide
  Antisense strand to SEQ ID NO: 735130
aucuuucagcagugcguag

SEQ ID NO: 735132 - RNA, 19 nt, Artificial Sequence
  Description of Artificial Sequence: Synthetic oligonucleotide
  Sense strand starting at position 359 of SEQ ID NO: 586665
gcugaaagauuugaaugca

SEQ ID NO: 735133 - RNA, 19 nt, Artificial Sequence
  Description of Artificial Sequence: Synthetic oligonucleotide
  Antisense strand to SEQ ID NO: 735132
ugcauucaaaucuuucagc

SEQ ID NO: 735134 - RNA, 19 nt, Artificial Sequence
  Description of Artificial Sequence: Synthetic oligonucleotide
  Sense strand starting at position 510 of SEQ ID NO: 586665
agcauuuccuuaguggcua

SEQ ID NO: 735135 - RNA, 19 nt, Artificial Sequence
  Description of Artificial Sequence: Synthetic oligonucleotide
  Antisense strand to SEQ ID NO: 735134
uagccacuaaggaaaugcu

SEQ ID NO: 735136 - RNA, 19 nt, Artificial Sequence
  Description of Artificial Sequence: Synthetic oligonucleotide
  Sense strand starting at position 630 of SEQ ID NO: 586665
uaaguugaauuugagagua

SEQ ID NO: 735137 - RNA, 19 nt, Artificial Sequence
  Description of Artificial Sequence: Synthetic oligonucleotide
  Antisense strand to SEQ ID NO: 735136
uacucucaaauucaacuua

SEQ ID NO: 735138 - RNA, 19 nt, Artificial Sequence
  Description of Artificial Sequence: Synthetic oligonucleotide
  Sense strand starting at position 632 of SEQ ID NO: 586665
aguugaauuugagaguaca

SEQ ID NO: 735139 - RNA, 19 nt, Artificial Sequence
  Description of Artificial Sequence: Synthetic oligonucleotide
  Antisense strand to SEQ ID NO: 735138
uguacucucaaauucaacu

SEQ ID NO: 735140 - RNA, 19 nt, Artificial Sequence
  Description of Artificial Sequence: Synthetic oligonucleotide
  Sense strand starting at position 705 of SEQ ID NO: 586665
uucucuuuaugacaaagga

SEQ ID NO: 735141 - RNA, 19 nt, Artificial Sequence
  Description of Artificial Sequence: Synthetic oligonucleotide
  Antisense strand to SEQ ID NO: 735140
uccuuugucauaaagagaa

SEQ ID NO: 735142 - RNA, 19 nt, Artificial Sequence
  Description of Artificial Sequence: Synthetic oligonucleotide
  Sense strand starting at position 770 of SEQ ID NO: 586665
cugaaaggaucuuuguucu

SEQ ID NO: 735143 - RNA, 19 nt, Artificial Sequence
  Description of Artificial Sequence: Synthetic oligonucleotide
  Antisense strand to SEQ ID NO: 735142
agaacaaagauccuuucag

SEQ ID NO: 735144 - RNA, 19 nt, Artificial Sequence
  Description of Artificial Sequence: Synthetic oligonucleotide
  Sense strand starting at position 829 of SEQ ID NO: 586665
uucuguuagggacaugcaa

SEQ ID NO: 735145 - RNA, 19 nt, Artificial Sequence
  Description of Artificial Sequence: Synthetic oligonucleotide
  Antisense strand to SEQ ID NO: 735144
uugcaugucccuaacagaa

SEQ ID NO: 735146 - RNA, 19 nt, Artificial Sequence
  Description of Artificial Sequence: Synthetic oligonucleotide
  Sense strand starting at position 1030 of SEQ ID NO: 586665
caucucugagacuggguua

SEQ ID NO: 735147 - RNA, 19 nt, Artificial Sequence
  Description of Artificial Sequence: Synthetic oligonucleotide
  Antisense strand to SEQ ID NO: 735146
uaacccagucucagagaug

SEQ ID NO: 735148 - RNA, 19 nt, Artificial Sequence
  Description of Artificial Sequence: Synthetic oligonucleotide
  Sense strand starting at position 1033 of SEQ ID NO: 586665
cucugagacuggguuagua

SEQ ID NO: 735149 - RNA, 19 nt, Artificial Sequence
  Description of Artificial Sequence: Synthetic oligonucleotide
  Antisense strand to SEQ ID NO: 735148
uacuaacccagucucagag

SEQ ID NO: 735150 - RNA, 19 nt, Artificial Sequence
  Description of Artificial Sequence: Synthetic oligonucleotide
  Sense strand starting at position 1035 of SEQ ID NO: 586665
cugagacuggguuaguaau

SEQ ID NO: 735151 - RNA, 19 nt, Artificial Sequence
  Description of Artificial Sequence: Synthetic oligonucleotide
  Antisense strand to SEQ ID NO: 735150
auuacuaacccagucucag

SEQ ID NO: 735152 - RNA, 19 nt, Artificial Sequence
  Description of Artificial Sequence: Synthetic oligonucleotide
  Sense strand starting at position 1037 of SEQ ID NO: 586665
gagacuggguuaguaauaa

SEQ ID NO: 735153 - RNA, 19 nt, Artificial Sequence
  Description of Artificial Sequence: Synthetic oligonucleotide
  Antisense strand to SEQ ID NO: 735152
uuauuacuaacccagucuc

SEQ ID NO: 735154 - RNA, 19 nt, Artificial Sequence
  Description of Artificial Sequence: Synthetic oligonucleotide
  Sense strand starting at position 1086 of SEQ ID NO: 586665
ggaagcuucucucuaggua

SEQ ID NO: 735155 - RNA, 19 nt, Artificial Sequence
  Description of Artificial Sequence: Synthetic oligonucleotide
  Antisense strand to SEQ ID NO: 735154
uaccuagagagaagcuucc

SEQ ID NO: 735156 - RNA, 19 nt, Artificial Sequence
  Description of Artificial Sequence: Synthetic oligonucleotide
  Sense strand starting at position 1130 of SEQ ID NO: 586665
aucccaaagcucuggguua

SEQ ID NO: 735157 - RNA, 19 nt, Artificial Sequence
  Description of Artificial Sequence: Synthetic oligonucleotide
  Antisense strand to SEQ ID NO: 735156
uaacccagagcuuugggau

SEQ ID NO: 735158 - RNA, 19 nt, Artificial Sequence
  Description of Artificial Sequence: Synthetic oligonucleotide
  Sense strand starting at position 1132 of SEQ ID NO: 586665
cccaaagcucuggguuaag

SEQ ID NO: 735159 - RNA, 19 nt, Artificial Sequence
  Description of Artificial Sequence: Synthetic oligonucleotide
  Antisense strand to SEQ ID NO: 735158
cuuaacccagagcuuuggg

SEQ ID NO: 735160 - RNA, 19 nt, Artificial Sequence
  Description of Artificial Sequence: Synthetic oligonucleotide
  Sense strand starting at position 1188 of SEQ ID NO: 586665
guaccuaaccagcgacaaa

SEQ ID NO: 735161 - RNA, 19 nt, Artificial Sequence
  Description of Artificial Sequence: Synthetic oligonucleotide
  Antisense strand to SEQ ID NO: 735160
uuugucgcugguuagguac

SEQ ID NO: 735162 - RNA, 19 nt, Artificial Sequence
  Description of Artificial Sequence: Synthetic oligonucleotide
  Sense strand starting at position 2106 of SEQ ID NO: 586665
cgcgauacucugguuccuu

SEQ ID NO: 735163 - RNA, 19 nt, Artificial Sequence
  Description of Artificial Sequence: Synthetic oligonucleotide
  Antisense strand to SEQ ID NO: 735162
aaggaaccagaguaucgcg

SEQ ID NO: 735164 - RNA, 19 nt, Artificial Sequence
  Description of Artificial Sequence: Synthetic oligonucleotide
  Sense strand starting at position 2107 of SEQ ID NO: 586665
gcgauacucugguuccuua

SEQ ID NO: 735165 - RNA, 19 nt, Artificial Sequence
  Description of Artificial Sequence: Synthetic oligonucleotide
  Antisense strand to SEQ ID NO: 735164
uaaggaaccagaguaucgc

SEQ ID NO: 735166 - RNA, 19 nt, Artificial Sequence
  Description of Artificial Sequence: Synthetic oligonucleotide
  Sense strand starting at position 2155 of SEQ ID NO: 586665
ggcgccaaaccuuacauua

SEQ ID NO: 735167 - RNA, 19 nt, Artificial Sequence
  Description of Artificial Sequence: Synthetic oligonucleotide
  Antisense strand to SEQ ID NO: 735166
uaauguaagguuuggcgcc

SEQ ID NO: 735168 - RNA, 19 nt, Artificial Sequence
  Description of Artificial Sequence: Synthetic oligonucleotide
  Sense strand starting at position 2518 of SEQ ID NO: 586665
agcaguacccuaggaaaca

SEQ ID NO: 735169 - RNA, 19 nt, Artificial Sequence
  Description of Artificial Sequence: Synthetic oligonucleotide
  Antisense strand to SEQ ID NO: 735168
uguuuccuaggguacugcu

SEQ ID NO: 735170 - RNA, 19 nt, Artificial Sequence
  Description of Artificial Sequence: Synthetic oligonucleotide
  Sense strand starting at position 2821 of SEQ ID NO: 586665
uuucccugguguuucuaaa

SEQ ID NO: 735171 - RNA, 19 nt, Artificial Sequence
  Description of Artificial Sequence: Synthetic oligonucleotide
  Antisense strand to SEQ ID NO: 735170
uuuagaaacaccagggaaa

SEQ ID NO: 735172 - RNA, 19 nt, Artificial Sequence
  Description of Artificial Sequence: Synthetic oligonucleotide
  Sense strand starting at position 3171 of SEQ ID NO: 586665
gucagugugcaggaagaaa

SEQ ID NO: 735173 - RNA, 19 nt, Artificial Sequence
  Description of Artificial Sequence: Synthetic oligonucleotide
  Antisense strand to SEQ ID NO: 735172
uuucuuccugcacacugac

SEQ ID NO: 735174 - RNA, 19 nt, Artificial Sequence
  Description of Artificial Sequence: Synthetic oligonucleotide
  Sense strand starting at position 3261 of SEQ ID NO: 586665
aggcacuuucuagauacuu

SEQ ID NO: 735175 - RNA, 19 nt, Artificial Sequence
  Description of Artificial Sequence: Synthetic oligonucleotide
  Antisense strand to SEQ ID NO: 735174
aaguaucuagaaagugccu

SEQ ID NO: 735176 - RNA, 19 nt, Artificial Sequence
  Description of Artificial Sequence: Synthetic oligonucleotide
  Sense strand starting at position 3269 of SEQ ID NO: 586665
ucuagauacuuugaaagga

SEQ ID NO: 735177 - RNA, 19 nt, Artificial Sequence
  Description of Artificial Sequence: Synthetic oligonucleotide
  Antisense strand to SEQ ID NO: 735176
uccuuucaaaguaucuaga

SEQ ID NO: 735178 - RNA, 19 nt, Artificial Sequence
  Description of Artificial Sequence: Synthetic oligonucleotide
  Sense strand starting at position 3291 of SEQ ID NO: 586665
aauagagauuuguguucca

SEQ ID NO: 735179 - RNA, 19 nt, Artificial Sequence
  Description of Artificial Sequence: Synthetic oligonucleotide
  Antisense strand to SEQ ID NO: 735178
uggaacacaaaucucuauu

SEQ ID NO: 735180 - RNA, 19 nt, Artificial Sequence
  Description of Artificial Sequence: Synthetic oligonucleotide
  Sense strand starting at position 3349 of SEQ ID NO: 586665
cuguaagaagaaugaguua

SEQ ID NO: 735181 - RNA, 19 nt, Artificial Sequence
  Description of Artificial Sequence: Synthetic oligonucleotide
  Antisense strand to SEQ ID NO: 735180
uaacucauucuucuuacag

SEQ ID NO: 735182 - RNA, 19 nt, Artificial Sequence
  Description of Artificial Sequence: Synthetic oligonucleotide
  Sense strand starting at position 3374 of SEQ ID NO: 586665
ucaaauguuuaagaagaca

SEQ ID NO: 735183 - RNA, 19 nt, Artificial Sequence
  Description of Artificial Sequence: Synthetic oligonucleotide
  Antisense strand to SEQ ID NO: 735182
ugucuucuuaaacauuuga

SEQ ID NO: 735184 - RNA, 19 nt, Artificial Sequence
  Description of Artificial Sequence: Synthetic oligonucleotide
  Sense strand starting at position 3392 of SEQ ID NO: 586665
aggcacuuccuggauacuu

SEQ ID NO: 735185 - RNA, 19 nt, Artificial Sequence
  Description of Artificial Sequence: Synthetic oligonucleotide
  Antisense strand to SEQ ID NO: 735184
aaguauccaggaagugccu

SEQ ID NO: 735186 - RNA, 19 nt, Artificial Sequence
  Description of Artificial Sequence: Synthetic oligonucleotide
  Sense strand starting at position 3397 of SEQ ID NO: 586665
cuuccuggauacuuugaaa

SEQ ID NO: 735187 - RNA, 19 nt, Artificial Sequence
  Description of Artificial Sequence: Synthetic oligonucleotide
  Antisense strand to SEQ ID NO: 735186
uuucaaaguauccaggaag

SEQ ID NO: 735188 - RNA, 19 nt, Artificial Sequence
  Description of Artificial Sequence: Synthetic oligonucleotide
  Sense strand starting at position 3400 of SEQ ID NO: 586665
ccuggauacuuugaaagga

SEQ ID NO: 735189 - RNA, 19 nt, Artificial Sequence
  Description of Artificial Sequence: Synthetic oligonucleotide
  Antisense strand to SEQ ID NO: 735188
uccuuucaaaguauccagg

SEQ ID NO: 735190 - RNA, 19 nt, Artificial Sequence
  Description of Artificial Sequence: Synthetic oligonucleotide
  Sense strand starting at position 3469 of SEQ ID NO: 586665
cuguuauuagcagaucaau

SEQ ID NO: 735191 - RNA, 19 nt, Artificial Sequence
  Description of Artificial Sequence: Synthetic oligonucleotide
  Antisense strand to SEQ ID NO: 735190
auugaucugcuaauaacag

SEQ ID NO: 735192 - RNA, 19 nt, Artificial Sequence
  Description of Artificial Sequence: Synthetic oligonucleotide
  Sense strand starting at position 3830 of SEQ ID NO: 586665
ugcguauugggccaaugaa

SEQ ID NO: 735193 - RNA, 19 nt, Artificial Sequence
  Description of Artificial Sequence: Synthetic oligonucleotide
  Antisense strand to SEQ ID NO: 735192
uucauuggcccaauacgca

SEQ ID NO: 735194 - RNA, 19 nt, Artificial Sequence
  Description of Artificial Sequence: Synthetic oligonucleotide
  Sense strand starting at position 22 of SEQ ID NO: 586666
aggacuuacuucccaguau

SEQ ID NO: 735195 - RNA, 19 nt, Artificial Sequence
  Description of Artificial Sequence: Synthetic oligonucleotide
  Antisense strand to SEQ ID NO: 735194
auacugggaaguaaguccu

SEQ ID NO: 735196 - RNA, 19 nt, Artificial Sequence
  Description of Artificial Sequence: Synthetic oligonucleotide
  Sense strand starting at position 115 of SEQ ID NO: 586666
guuaguacuuaaucaacuu

SEQ ID NO: 735197 - RNA, 19 nt, Artificial Sequence
  Description of Artificial Sequence: Synthetic oligonucleotide
  Antisense strand to SEQ ID NO: 735196
aaguugauuaaguacuaac

SEQ ID NO: 735198 - RNA, 19 nt, Artificial Sequence
  Description of Artificial Sequence: Synthetic oligonucleotide
  Sense strand starting at position 195 of SEQ ID NO: 586666
uuacuuccagaguauugca

SEQ ID NO: 735199 - RNA, 19 nt, Artificial Sequence
  Description of Artificial Sequence: Synthetic oligonucleotide
  Antisense strand to SEQ ID NO: 735198
ugcaauacucuggaaguaa

SEQ ID NO: 735200 - RNA, 19 nt, Artificial Sequence
  Description of Artificial Sequence: Synthetic oligonucleotide
  Sense strand starting at position 435 of SEQ ID NO: 586666
ugcacaauccuguaaguuu

SEQ ID NO: 735201 - RNA, 19 nt, Artificial Sequence
  Description of Artificial Sequence: Synthetic oligonucleotide
  Antisense strand to SEQ ID NO: 735200
aaacuuacaggauugugca

SEQ ID NO: 735202 - RNA, 19 nt, Artificial Sequence
  Description of Artificial Sequence: Synthetic oligonucleotide
  Sense strand starting at position 513 of SEQ ID NO: 586666
agguccuauucuuugaaga

SEQ ID NO: 735203 - RNA, 19 nt, Artificial Sequence
  Description of Artificial Sequence: Synthetic oligonucleotide
  Antisense strand to SEQ ID NO: 735202
ucuucaaagaauaggaccu

SEQ ID NO: 735204 - RNA, 19 nt, Artificial Sequence
  Description of Artificial Sequence: Synthetic oligonucleotide
  Sense strand starting at position 514 of SEQ ID NO: 586666
gguccuauucuuugaagag

SEQ ID NO: 735205 - RNA, 19 nt, Artificial Sequence
  Description of Artificial Sequence: Synthetic oligonucleotide
  Antisense strand to SEQ ID NO: 735204
cucuucaaagaauaggacc

SEQ ID NO: 735206 - RNA, 19 nt, Artificial Sequence
  Description of Artificial Sequence: Synthetic oligonucleotide
  Sense strand starting at position 652 of SEQ ID NO: 586666
auguuaaguucucucauaa

SEQ ID NO: 735207 - RNA, 19 nt, Artificial Sequence
  Description of Artificial Sequence: Synthetic oligonucleotide
  Antisense strand to SEQ ID NO: 735206
uuaugagagaacuuaacau

SEQ ID NO: 735208 - RNA, 19 nt, Artificial Sequence
  Description of Artificial Sequence: Synthetic oligonucleotide
  Sense strand starting at position 971 of SEQ ID NO: 586666
gcaaauauguauuuguugu

SEQ ID NO: 735209 - RNA, 19 nt, Artificial Sequence
  Description of Artificial Sequence: Synthetic oligonucleotide
  Antisense strand to SEQ ID NO: 735208
acaacaaauacauauuugc

SEQ ID NO: 735210 - RNA, 19 nt, Artificial Sequence
  Description of Artificial Sequence: Synthetic oligonucleotide
  Sense strand starting at position 1226 of SEQ ID NO: 586666
uaaguaacuuugguguaga

SEQ ID NO: 735211 - RNA, 19 nt, Artificial Sequence
  Description of Artificial Sequence: Synthetic oligonucleotide
  Antisense strand to SEQ ID NO: 735210
ucuacaccaaaguuacuua

SEQ ID NO: 735212 - RNA, 19 nt, Artificial Sequence
  Description of Artificial Sequence: Synthetic oligonucleotide
  Sense strand starting at position 1229 of SEQ ID NO: 586666
guaacuuugguguagaaga

SEQ ID NO: 735213 - RNA, 19 nt, Artificial Sequence
  Description of Artificial Sequence: Synthetic oligonucleotide
  Antisense strand to SEQ ID NO: 735212
ucuucuacaccaaaguuac

SEQ ID NO: 735214 - RNA, 19 nt, Artificial Sequence
  Description of Artificial Sequence: Synthetic oligonucleotide
  Sense strand starting at position 1259 of SEQ ID NO: 586666
aaaugaucagugcgcagaa

SEQ ID NO: 735215 - RNA, 19 nt, Artificial Sequence
  Description of Artificial Sequence: Synthetic oligonucleotide
  Antisense strand to SEQ ID NO: 735214
uucugcgcacugaucauuu

SEQ ID NO: 735216 - RNA, 19 nt, Artificial Sequence
  Description of Artificial Sequence: Synthetic oligonucleotide
  Sense strand starting at position 1261 of SEQ ID NO: 586666
augaucagugcgcagaaga

SEQ ID NO: 735217 - RNA, 19 nt, Artificial Sequence
  Description of Artificial Sequence: Synthetic oligonucleotide
  Antisense strand to SEQ ID NO: 735216
ucuucugcgcacugaucau

SEQ ID NO: 735218 - RNA, 19 nt, Artificial Sequence
  Description of Artificial Sequence: Synthetic oligonucleotide
  Sense strand starting at position 2126 of SEQ ID NO: 586666
gagugagaguacuuucgau

SEQ ID NO: 735219 - RNA, 19 nt, Artificial Sequence
  Description of Artificial Sequence: Synthetic oligonucleotide
  Antisense strand to SEQ ID NO: 735218
aucgaaaguacucucacuc

SEQ ID NO: 735220 - RNA, 19 nt, Artificial Sequence
  Description of Artificial Sequence: Synthetic oligonucleotide
  Sense strand starting at position 2132 of SEQ ID NO: 586666
gaguacuuucgaugggauu

SEQ ID NO: 735221 - RNA, 19 nt, Artificial Sequence
  Description of Artificial Sequence: Synthetic oligonucleotide
  Antisense strand to SEQ ID NO: 735220
aaucccaucgaaaguacuc

SEQ ID NO: 735222 - RNA, 19 nt, Artificial Sequence
  Description of Artificial Sequence: Synthetic oligonucleotide
  Sense strand starting at position 2133 of SEQ ID NO: 586666
aguacuuucgaugggauua

SEQ ID NO: 735223 - RNA, 19 nt, Artificial Sequence
  Description of Artificial Sequence: Synthetic oligonucleotide
  Antisense strand to SEQ ID NO: 735222
uaaucccaucgaaaguacu

SEQ ID NO: 735224 - RNA, 19 nt, Artificial Sequence
  Description of Artificial Sequence: Synthetic oligonucleotide
  Sense strand starting at position 2134 of SEQ ID NO: 586666
guacuuucgaugggauuag

SEQ ID NO: 735225 - RNA, 19 nt, Artificial Sequence
  Description of Artificial Sequence: Synthetic oligonucleotide
  Antisense strand to SEQ ID NO: 735224
cuaaucccaucgaaaguac

SEQ ID NO: 735226 - RNA, 19 nt, Artificial Sequence
  Description of Artificial Sequence: Synthetic oligonucleotide
  Sense strand starting at position 2326 of SEQ ID NO: 586666
ccagucugacugggcuaaa

SEQ ID NO: 735227 - RNA, 19 nt, Artificial Sequence
  Description of Artificial Sequence: Synthetic oligonucleotide
  Antisense strand to SEQ ID NO: 735226
uuuagcccagucagacugg

SEQ ID NO: 735228 - RNA, 19 nt, Artificial Sequence
  Description of Artificial Sequence: Synthetic oligonucleotide
  Sense strand starting at position 2362 of SEQ ID NO: 586666
auuccugcccuccaggaaa

SEQ ID NO: 735229 - RNA, 19 nt, Artificial Sequence
  Description of Artificial Sequence: Synthetic oligonucleotide
  Antisense strand to SEQ ID NO: 735228
uuuccuggagggcaggaau

SEQ ID NO: 735230 - RNA, 19 nt, Artificial Sequence
  Description of Artificial Sequence: Synthetic oligonucleotide
  Sense strand starting at position 2400 of SEQ ID NO: 586666
aauguaaauugaguguguu

SEQ ID NO: 735231 - RNA, 19 nt, Artificial Sequence
  Description of Artificial Sequence: Synthetic oligonucleotide
  Antisense strand to SEQ ID NO: 735230
aacacacucaauuuacauu

SEQ ID NO: 735232 - RNA, 19 nt, Artificial Sequence
  Description of Artificial Sequence: Synthetic oligonucleotide
  Sense strand starting at position 2404 of SEQ ID NO: 586666
uaaauugaguguguuaaca

SEQ ID NO: 735233 - RNA, 19 nt, Artificial Sequence
  Description of Artificial Sequence: Synthetic oligonucleotide
  Antisense strand to SEQ ID NO: 735232
uguuaacacacucaauuua

SEQ ID NO: 735234 - RNA, 19 nt, Artificial Sequence
  Description of Artificial Sequence: Synthetic oligonucleotide
  Sense strand starting at position 2412 of SEQ ID NO: 586666
guguguuaacacuauguau

SEQ ID NO: 735235 - RNA, 19 nt, Artificial Sequence
  Description of Artificial Sequence: Synthetic oligonucleotide
  Antisense strand to SEQ ID NO: 735234
auacauaguguuaacacac

SEQ ID NO: 735236 - RNA, 19 nt, Artificial Sequence
  Description of Artificial Sequence: Synthetic oligonucleotide
  Sense strand starting at position 2414 of SEQ ID NO: 586666
guguuaacacuauguauaa

SEQ ID NO: 735237 - RNA, 19 nt, Artificial Sequence
  Description of Artificial Sequence: Synthetic oligonucleotide
  Antisense strand to SEQ ID NO: 735236
uuauacauaguguuaacac

SEQ ID NO: 735238 - RNA, 19 nt, Artificial Sequence
  Description of Artificial Sequence: Synthetic oligonucleotide
  Sense strand starting at position 2426 of SEQ ID NO: 586666
uguauaauguucccuggag

SEQ ID NO: 735239 - RNA, 19 nt, Artificial Sequence
  Description of Artificial Sequence: Synthetic oligonucleotide
  Antisense strand to SEQ ID NO: 735238
cuccagggaacauuauaca

SEQ ID NO: 735240 - RNA, 19 nt, Artificial Sequence
  Description of Artificial Sequence: Synthetic oligonucleotide
  Sense strand starting at position 2428 of SEQ ID NO: 586666
uauaauguucccuggagca

SEQ ID NO: 735241 - RNA, 19 nt, Artificial Sequence
  Description of Artificial Sequence: Synthetic oligonucleotide
  Antisense strand to SEQ ID NO: 735240
ugcuccagggaacauuaua

SEQ ID NO: 735242 - RNA, 19 nt, Artificial Sequence
  Description of Artificial Sequence: Synthetic oligonucleotide
  Sense strand starting at position 2430 of SEQ ID NO: 586666
uaauguucccuggagcaaa

SEQ ID NO: 735243 - RNA, 19 nt, Artificial Sequence
  Description of Artificial Sequence: Synthetic oligonucleotide
  Antisense strand to SEQ ID NO: 735242
uuugcuccagggaacauua

SEQ ID NO: 735244 - RNA, 19 nt, Artificial Sequence
  Description of Artificial Sequence: Synthetic oligonucleotide
  Sense strand starting at position 2613 of SEQ ID NO: 586666
gacuguucuggugaaguca

SEQ ID NO: 735245 - RNA, 19 nt, Artificial Sequence
  Description of Artificial Sequence: Synthetic oligonucleotide
  Antisense strand to SEQ ID NO: 735244
ugacuucaccagaacaguc

SEQ ID NO: 735246 - RNA, 19 nt, Artificial Sequence
  Description of Artificial Sequence: Synthetic oligonucleotide
  Sense strand starting at position 2909 of SEQ ID NO: 586666
ggagccaaauuguuuaguu

SEQ ID NO: 735247 - RNA, 19 nt, Artificial Sequence
  Description of Artificial Sequence: Synthetic oligonucleotide
  Antisense strand to SEQ ID NO: 735246
aacuaaacaauuuggcucc

SEQ ID NO: 735248 - RNA, 19 nt, Artificial Sequence
  Description of Artificial Sequence: Synthetic oligonucleotide
  Sense strand starting at position 2960 of SEQ ID NO: 586666
ugucuucuugggcaaguua

SEQ ID NO: 735249 - RNA, 19 nt, Artificial Sequence
  Description of Artificial Sequence: Synthetic oligonucleotide
  Antisense strand to SEQ ID NO: 735248
uaacuugcccaagaagaca

SEQ ID NO: 735250 - RNA, 19 nt, Artificial Sequence
  Description of Artificial Sequence: Synthetic oligonucleotide
  Sense strand starting at position 3024 of SEQ ID NO: 586666
ugucaauaguguuuggaaa

SEQ ID NO: 735251 - RNA, 19 nt, Artificial Sequence
  Description of Artificial Sequence: Synthetic oligonucleotide
  Antisense strand to SEQ ID NO: 735250
uuuccaaacacuauugaca

SEQ ID NO: 735252 - RNA, 19 nt, Artificial Sequence
  Description of Artificial Sequence: Synthetic oligonucleotide
  Sense strand starting at position 3025 of SEQ ID NO: 586666
gucaauaguguuuggaaau

SEQ ID NO: 735253 - RNA, 19 nt, Artificial Sequence
  Description of Artificial Sequence: Synthetic oligonucleotide
  Antisense strand to SEQ ID NO: 735252
auuuccaaacacuauugac

SEQ ID NO: 735254 - RNA, 19 nt, Artificial Sequence
  Description of Artificial Sequence: Synthetic oligonucleotide
  Sense strand starting at position 3060 of SEQ ID NO: 586666
ugcuaucauuuagaguaga

SEQ ID NO: 735255 - RNA, 19 nt, Artificial Sequence
  Description of Artificial Sequence: Synthetic oligonucleotide
  Antisense strand to SEQ ID NO: 735254
ucuacucuaaaugauagca

SEQ ID NO: 735256 - RNA, 19 nt, Artificial Sequence
  Description of Artificial Sequence: Synthetic oligonucleotide
  Sense strand starting at position 3125 of SEQ ID NO: 586666
aucuaccuagauugucauu

SEQ ID NO: 735257 - RNA, 19 nt, Artificial Sequence
  Description of Artificial Sequence: Synthetic oligonucleotide
  Antisense strand to SEQ ID NO: 735256
aaugacaaucuagguagau

SEQ ID NO: 735258 - RNA, 19 nt, Artificial Sequence
  Description of Artificial Sequence: Synthetic oligonucleotide
  Sense strand starting at position 3195 of SEQ ID NO: 586666
ugauacgauuucuggaaac

SEQ ID NO: 735259 - RNA, 19 nt, Artificial Sequence
  Description of Artificial Sequence: Synthetic oligonucleotide
  Antisense strand to SEQ ID NO: 735258
guuuccagaaaucguauca

SEQ ID NO: 735260 - RNA, 19 nt, Artificial Sequence
  Description of Artificial Sequence: Synthetic oligonucleotide
  Sense strand starting at position 3382 of SEQ ID NO: 586666
gcuggaagaucgcuugaag

SEQ ID NO: 735261 - RNA, 19 nt, Artificial Sequence
  Description of Artificial Sequence: Synthetic oligonucleotide
  Antisense strand to SEQ ID NO: 735260
cuucaagcgaucuuccagc

SEQ ID NO: 735262 - RNA, 19 nt, Artificial Sequence
  Description of Artificial Sequence: Synthetic oligonucleotide
  Sense strand starting at position 3641 of SEQ ID NO: 586666
uuuccuaugugaucuauuc

SEQ ID NO: 735263 - RNA, 19 nt, Artificial Sequence
  Description of Artificial Sequence: Synthetic oligonucleotide
  Antisense strand to SEQ ID NO: 735262
gaauagaucacauaggaaa

SEQ ID NO: 735264 - RNA, 19 nt, Artificial Sequence
  Description of Artificial Sequence: Synthetic oligonucleotide
  Sense strand starting at position 3717 of SEQ ID NO: 586666
ucuggucuccuguagaugu

SEQ ID NO: 735265 - RNA, 19 nt, Artificial Sequence
  Description of Artificial Sequence: Synthetic oligonucleotide
  Antisense strand to SEQ ID NO: 735264
acaucuacaggagaccaga

SEQ ID NO: 735266 - RNA, 19 nt, Artificial Sequence
  Description of Artificial Sequence: Synthetic oligonucleotide
  Sense strand starting at position 3719 of SEQ ID NO: 586666
uggucuccuguagauguua

SEQ ID NO: 735267 - RNA, 19 nt, Artificial Sequence
  Description of Artificial Sequence: Synthetic oligonucleotide
  Antisense strand to SEQ ID NO: 735266
uaacaucuacaggagacca

SEQ ID NO: 735268 - RNA, 19 nt, Artificial Sequence
  Description of Artificial Sequence: Synthetic oligonucleotide
  Sense strand starting at position 3721 of SEQ ID NO: 586666
gucuccuguagauguuaaa

SEQ ID NO: 735269 - RNA, 19 nt, Artificial Sequence
  Description of Artificial Sequence: Synthetic oligonucleotide
  Antisense strand to SEQ ID NO: 735268
uuuaacaucuacaggagac

SEQ ID NO: 735270 - RNA, 19 nt, Artificial Sequence
  Description of Artificial Sequence: Synthetic oligonucleotide
  Sense strand starting at position 3730 of SEQ ID NO: 586666
agauguuaaaccuaguugu

SEQ ID NO: 735271 - RNA, 19 nt, Artificial Sequence
  Description of Artificial Sequence: Synthetic oligonucleotide
  Antisense strand to SEQ ID NO: 735270
acaacuagguuuaacaucu

SEQ ID NO: 735272 - RNA, 19 nt, Artificial Sequence
  Description of Artificial Sequence: Synthetic oligonucleotide
  Sense strand starting at position 3954 of SEQ ID NO: 586666
acugucaucucugucuaca

SEQ ID NO: 735273 - RNA, 19 nt, Artificial Sequence
  Description of Artificial Sequence: Synthetic oligonucleotide
  Antisense strand to SEQ ID NO: 735272
uguagacagagaugacagu

SEQ ID NO: 735274 - RNA, 19 nt, Artificial Sequence
  Description of Artificial Sequence: Synthetic oligonucleotide
  Sense strand starting at position 199 of SEQ ID NO: 586667
ucugcacagucaucugaaa

SEQ ID NO: 735275 - RNA, 19 nt, Artificial Sequence
  Description of Artificial Sequence: Synthetic oligonucleotide
  Antisense strand to SEQ ID NO: 735274
uuucagaugacugugcaga

SEQ ID NO: 735276 - RNA, 19 nt, Artificial Sequence
  Description of Artificial Sequence: Synthetic oligonucleotide
  Sense strand starting at position 257 of SEQ ID NO: 586667
aagggauguuuagucuuaa

SEQ ID NO: 735277 - RNA, 19 nt, Artificial Sequence
  Description of Artificial Sequence: Synthetic oligonucleotide
  Antisense strand to SEQ ID NO: 735276
uuaagacuaaacaucccuu

SEQ ID NO: 735278 - RNA, 19 nt, Artificial Sequence
  Description of Artificial Sequence: Synthetic oligonucleotide
  Sense strand starting at position 258 of SEQ ID NO: 586667
agggauguuuagucuuaau

SEQ ID NO: 735279 - RNA, 19 nt, Artificial Sequence
  Description of Artificial Sequence: Synthetic oligonucleotide
  Antisense strand to SEQ ID NO: 735278
auuaagacuaaacaucccu

SEQ ID NO: 735280 - RNA, 19 nt, Artificial Sequence
  Description of Artificial Sequence: Synthetic oligonucleotide
  Sense strand starting at position 402 of SEQ ID NO: 586667
uuaagauaagaugguguuu

SEQ ID NO: 735281 - RNA, 19 nt, Artificial Sequence
  Description of Artificial Sequence: Synthetic oligonucleotide
  Antisense strand to SEQ ID NO: 735280
aaacaccaucuuaucuuaa

SEQ ID NO: 735282 - RNA, 19 nt, Artificial Sequence
  Description of Artificial Sequence: Synthetic oligonucleotide
  Sense strand starting at position 407 of SEQ ID NO: 586667
auaagaugguguuuaacaa

SEQ ID NO: 735283 - RNA, 19 nt, Artificial Sequence
  Description of Artificial Sequence: Synthetic oligonucleotide
  Antisense strand to SEQ ID NO: 735282
uuguuaaacaccaucuuau

SEQ ID NO: 735284 - RNA, 19 nt, Artificial Sequence
  Description of Artificial Sequence: Synthetic oligonucleotide
  Sense strand starting at position 606 of SEQ ID NO: 586667
uuucuagauucuguacacu

SEQ ID NO: 735285 - RNA, 19 nt, Artificial Sequence
  Description of Artificial Sequence: Synthetic oligonucleotide
  Antisense strand to SEQ ID NO: 735284
aguguacagaaucuagaaa

SEQ ID NO: 735286 - RNA, 19 nt, Artificial Sequence
  Description of Artificial Sequence: Synthetic oligonucleotide
  Sense strand starting at position 698 of SEQ ID NO: 586667
aagaaucaccacugagguu

SEQ ID NO: 735287 - RNA, 19 nt, Artificial Sequence
  Description of Artificial Sequence: Synthetic oligonucleotide
  Antisense strand to SEQ ID NO: 735286
aaccucaguggugauucuu

SEQ ID NO: 735288 - RNA, 19 nt, Artificial Sequence
  Description of Artificial Sequence: Synthetic oligonucleotide
  Sense strand starting at position 990 of SEQ ID NO: 586667
auuuguaaguguuuacacu

SEQ ID NO: 735289 - RNA, 19 nt, Artificial Sequence
  Description of Artificial Sequence: Synthetic oligonucleotide
  Antisense strand to SEQ ID NO: 735288
aguguaaacacuuacaaau

SEQ ID NO: 735290 - RNA, 19 nt, Artificial Sequence
  Description of Artificial Sequence: Synthetic oligonucleotide
  Sense strand starting at position 991 of SEQ ID NO: 586667
uuuguaaguguuuacacuu

SEQ ID NO: 735291 - RNA, 19 nt, Artificial Sequence
  Description of Artificial Sequence: Synthetic oligonucleotide
  Antisense strand to SEQ ID NO: 735290
aaguguaaacacuuacaaa

SEQ ID NO: 735292 - RNA, 19 nt, Artificial Sequence
  Description of Artificial Sequence: Synthetic oligonucleotide
  Sense strand starting at position 1168 of SEQ ID NO: 586667
guuugacuacuccagauac

SEQ ID NO: 735293 - RNA, 19 nt, Artificial Sequence
  Description of Artificial Sequence: Synthetic oligonucleotide
  Antisense strand to SEQ ID NO: 735292
guaucuggaguagucaaac

SEQ ID NO: 735294 - RNA, 19 nt, Artificial Sequence
  Description of Artificial Sequence: Synthetic oligonucleotide
  Sense strand starting at position 1436 of SEQ ID NO: 586667
gagacuuugcgaggugaaa

SEQ ID NO: 735295 - RNA, 19 nt, Artificial Sequence
  Description of Artificial Sequence: Synthetic oligonucleotide
  Antisense strand to SEQ ID NO: 735294
uuucaccucgcaaagucuc

SEQ ID NO: 735296 - RNA, 19 nt, Artificial Sequence
  Description of Artificial Sequence: Synthetic oligonucleotide
  Sense strand starting at position 1438 of SEQ ID NO: 586667
gacuuugcgaggugaaaca

SEQ ID NO: 735297 - RNA, 19 nt, Artificial Sequence
  Description of Artificial Sequence: Synthetic oligonucleotide
  Antisense strand to SEQ ID NO: 735296
uguuucaccucgcaaaguc

SEQ ID NO: 735298 - RNA, 19 nt, Artificial Sequence
  Description of Artificial Sequence: Synthetic oligonucleotide
  Sense strand starting at position 1454 of SEQ ID NO: 586667
acaucuugucaauggucau

SEQ ID NO: 735299 - RNA, 19 nt, Artificial Sequence
  Description of Artificial Sequence: Synthetic oligonucleotide
  Antisense strand to SEQ ID NO: 735298
augaccauugacaagaugu

SEQ ID NO: 735300 - RNA, 19 nt, Artificial Sequence
  Description of Artificial Sequence: Synthetic oligonucleotide
  Sense strand starting at position 1457 of SEQ ID NO: 586667
ucuugucaauggucauaaa

SEQ ID NO: 735301 - RNA, 19 nt, Artificial Sequence
  Description of Artificial Sequence: Synthetic oligonucleotide
  Antisense strand to SEQ ID NO: 735300
uuuaugaccauugacaaga

SEQ ID NO: 735302 - RNA, 19 nt, Artificial Sequence
  Description of Artificial Sequence: Synthetic oligonucleotide
  Sense strand starting at position 1458 of SEQ ID NO: 586667
cuugucaauggucauaaau

SEQ ID NO: 735303 - RNA, 19 nt, Artificial Sequence
  Description of Artificial Sequence: Synthetic oligonucleotide
  Antisense strand to SEQ ID NO: 735302
auuuaugaccauugacaag

SEQ ID NO: 735304 - RNA, 19 nt, Artificial Sequence
  Description of Artificial Sequence: Synthetic oligonucleotide
  Sense strand starting at position 1709 of SEQ ID NO: 586667
auucuauucuaugucauga

SEQ ID NO: 735305 - RNA, 19 nt, Artificial Sequence
  Description of Artificial Sequence: Synthetic oligonucleotide
  Antisense strand to SEQ ID NO: 735304
ucaugacauagaauagaau

SEQ ID NO: 735306 - RNA, 19 nt, Artificial Sequence
  Description of Artificial Sequence: Synthetic oligonucleotide
  Sense strand starting at position 1714 of SEQ ID NO: 586667
auucuaugucaugagguuu

SEQ ID NO: 735307 - RNA, 19 nt, Artificial Sequence
  Description of Artificial Sequence: Synthetic oligonucleotide
  Antisense strand to SEQ ID NO: 735306
aaaccucaugacauagaau

SEQ ID NO: 735308 - RNA, 19 nt, Artificial Sequence
  Description of Artificial Sequence: Synthetic oligonucleotide
  Sense strand starting at position 1720 of SEQ ID NO: 586667
ugucaugagguuuauucua

SEQ ID NO: 735309 - RNA, 19 nt, Artificial Sequence
  Description of Artificial Sequence: Synthetic oligonucleotide
  Antisense strand to SEQ ID NO: 735308
uagaauaaaccucaugaca

SEQ ID NO: 735310 - RNA, 19 nt, Artificial Sequence
  Description of Artificial Sequence: Synthetic oligonucleotide
  Sense strand starting at position 1722 of SEQ ID NO: 586667
ucaugagguuuauucuaac

SEQ ID NO: 735311 - RNA, 19 nt, Artificial Sequence
  Description of Artificial Sequence: Synthetic oligonucleotide
  Antisense strand to SEQ ID NO: 735310
guuagaauaaaccucauga

SEQ ID NO: 735312 - RNA, 19 nt, Artificial Sequence
  Description of Artificial Sequence: Synthetic oligonucleotide
  Sense strand starting at position 1792 of SEQ ID NO: 586667
gggcuugauuuguuaagca

SEQ ID NO: 735313 - RNA, 19 nt, Artificial Sequence
  Description of Artificial Sequence: Synthetic oligonucleotide
  Antisense strand to SEQ ID NO: 735312
ugcuuaacaaaucaagccc

SEQ ID NO: 735314 - RNA, 19 nt, Artificial Sequence
  Description of Artificial Sequence: Synthetic oligonucleotide
  Sense strand starting at position 1852 of SEQ ID NO: 586667
guguguagcacauaucaau

SEQ ID NO: 735315 - RNA, 19 nt, Artificial Sequence
  Description of Artificial Sequence: Synthetic oligonucleotide
  Antisense strand to SEQ ID NO: 735314
auugauaugugcuacacac

SEQ ID NO: 735316 - RNA, 19 nt, Artificial Sequence
  Description of Artificial Sequence: Synthetic oligonucleotide
  Sense strand starting at position 2162 of SEQ ID NO: 586667
gggcguauggcuagaguuu

SEQ ID NO: 735317 - RNA, 19 nt, Artificial Sequence
  Description of Artificial Sequence: Synthetic oligonucleotide
  Antisense strand to SEQ ID NO: 735316
aaacucuagccauacgccc

SEQ ID NO: 735318 - RNA, 19 nt, Artificial Sequence
  Description of Artificial Sequence: Synthetic oligonucleotide
  Sense strand starting at position 2231 of SEQ ID NO: 586667
aggugaguauaucuaagaa

SEQ ID NO: 735319 - RNA, 19 nt, Artificial Sequence
  Description of Artificial Sequence: Synthetic oligonucleotide
  Antisense strand to SEQ ID NO: 735318
uucuuagauauacucaccu

SEQ ID NO: 735320 - RNA, 19 nt, Artificial Sequence
  Description of Artificial Sequence: Synthetic oligonucleotide
  Sense strand starting at position 2298 of SEQ ID NO: 586667
uaauguuugccagggagua

SEQ ID NO: 735321 - RNA, 19 nt, Artificial Sequence
  Description of Artificial Sequence: Synthetic oligonucleotide
  Antisense strand to SEQ ID NO: 735320
uacucccuggcaaacauua

SEQ ID NO: 735322 - RNA, 19 nt, Artificial Sequence
  Description of Artificial Sequence: Synthetic oligonucleotide
  Sense strand starting at position 2299 of SEQ ID NO: 586667
aauguuugccagggaguaa

SEQ ID NO: 735323 - RNA, 19 nt, Artificial Sequence
  Description of Artificial Sequence: Synthetic oligonucleotide
  Antisense strand to SEQ ID NO: 735322
uuacucccuggcaaacauu

SEQ ID NO: 735324 - RNA, 19 nt, Artificial Sequence
  Description of Artificial Sequence: Synthetic oligonucleotide
  Sense strand starting at position 2471 of SEQ ID NO: 586667
gagugacagugucuaacua

SEQ ID NO: 735325 - RNA, 19 nt, Artificial Sequence
  Description of Artificial Sequence: Synthetic oligonucleotide
  Antisense strand to SEQ ID NO: 735324
uaguuagacacugucacuc

SEQ ID NO: 735326 - RNA, 19 nt, Artificial Sequence
  Description of Artificial Sequence: Synthetic oligonucleotide
  Sense strand starting at position 2516 of SEQ ID NO: 586667
cugugauugucacucaaag

SEQ ID NO: 735327 - RNA, 19 nt, Artificial Sequence
  Description of Artificial Sequence: Synthetic oligonucleotide
  Antisense strand to SEQ ID NO: 735326
cuuugagugacaaucacag

SEQ ID NO: 735328 - RNA, 19 nt, Artificial Sequence
  Description of Artificial Sequence: Synthetic oligonucleotide
  Sense strand starting at position 2769 of SEQ ID NO: 586667
agugaaaugaaaugugcaa

SEQ ID NO: 735329 - RNA, 19 nt, Artificial Sequence
  Description of Artificial Sequence: Synthetic oligonucleotide
  Antisense strand to SEQ ID NO: 735328
uugcacauuucauuucacu

SEQ ID NO: 735330 - RNA, 19 nt, Artificial Sequence
  Description of Artificial Sequence: Synthetic oligonucleotide
  Sense strand starting at position 2776 of SEQ ID NO: 586667
ugaaaugugcaauaauugu

SEQ ID NO: 735331 - RNA, 19 nt, Artificial Sequence
  Description of Artificial Sequence: Synthetic oligonucleotide
  Antisense strand to SEQ ID NO: 735330
acaauuauugcacauuuca

SEQ ID NO: 735332 - RNA, 19 nt, Artificial Sequence
  Description of Artificial Sequence: Synthetic oligonucleotide
  Sense strand starting at position 2816 of SEQ ID NO: 586667
agcaacagagaauguuuaa

SEQ ID NO: 735333 - RNA, 19 nt, Artificial Sequence
  Description of Artificial Sequence: Synthetic oligonucleotide
  Antisense strand to SEQ ID NO: 735332
uuaaacauucucuguugcu

SEQ ID NO: 735334 - RNA, 19 nt, Artificial Sequence
  Description of Artificial Sequence: Synthetic oligonucleotide
  Sense strand starting at position 2836 of SEQ ID NO: 586667
acaaauguguuucucuauu

SEQ ID NO: 735335 - RNA, 19 nt, Artificial Sequence
  Description of Artificial Sequence: Synthetic oligonucleotide
  Antisense strand to SEQ ID NO: 735334
aauagagaaacacauuugu

SEQ ID NO: 735336 - RNA, 19 nt, Artificial Sequence
  Description of Artificial Sequence: Synthetic oligonucleotide
  Sense strand starting at position 3106 of SEQ ID NO: 586667
ccagauucccuuugaaguu

SEQ ID NO: 735337 - RNA, 19 nt, Artificial Sequence
  Description of Artificial Sequence: Synthetic oligonucleotide
  Antisense strand to SEQ ID NO: 735336
aacuucaaagggaaucugg

SEQ ID NO: 735338 - RNA, 19 nt, Artificial Sequence
  Description of Artificial Sequence: Synthetic oligonucleotide
  Sense strand starting at position 3274 of SEQ ID NO: 586667
ggcauucugcauggcauuu

SEQ ID NO: 735339 - RNA, 19 nt, Artificial Sequence
  Description of Artificial Sequence: Synthetic oligonucleotide
  Antisense strand to SEQ ID NO: 735338
aaaugccaugcagaaugcc

SEQ ID NO: 735340 - RNA, 19 nt, Artificial Sequence
  Description of Artificial Sequence: Synthetic oligonucleotide
  Sense strand starting at position 3311 of SEQ ID NO: 586667
uuugcucaucuugaaaugu

SEQ ID NO: 735341 - RNA, 19 nt, Artificial Sequence
  Description of Artificial Sequence: Synthetic oligonucleotide
  Antisense strand to SEQ ID NO: 735340
acauuucaagaugagcaaa

SEQ ID NO: 735342 - RNA, 19 nt, Artificial Sequence
  Description of Artificial Sequence: Synthetic oligonucleotide
  Sense strand starting at position 3530 of SEQ ID NO: 586667
aaggcaaggccucauugua

SEQ ID NO: 735343 - RNA, 19 nt, Artificial Sequence
  Description of Artificial Sequence: Synthetic oligonucleotide
  Antisense strand to SEQ ID NO: 735342
uacaaugaggccuugccuu

SEQ ID NO: 735344 - RNA, 19 nt, Artificial Sequence
  Description of Artificial Sequence: Synthetic oligonucleotide
  Sense strand starting at position 3575 of SEQ ID NO: 586667
acaaguagauguuugugau

SEQ ID NO: 735345 - RNA, 19 nt, Artificial Sequence
  Description of Artificial Sequence: Synthetic oligonucleotide
  Antisense strand to SEQ ID NO: 735344
aucacaaacaucuacuugu

SEQ ID NO: 735346 - RNA, 19 nt, Artificial Sequence
  Description of Artificial Sequence: Synthetic oligonucleotide
  Sense strand starting at position 3576 of SEQ ID NO: 586667
caaguagauguuugugaua

SEQ ID NO: 735347 - RNA, 19 nt, Artificial Sequence
  Description of Artificial Sequence: Synthetic oligonucleotide
  Antisense strand to SEQ ID NO: 735346
uaucacaaacaucuacuug

SEQ ID NO: 735348 - RNA, 19 nt, Artificial Sequence
  Description of Artificial Sequence: Synthetic oligonucleotide
  Sense strand starting at position 3616 of SEQ ID NO: 586667
cugagauguuaacucuaag

SEQ ID NO: 735349 - RNA, 19 nt, Artificial Sequence
  Description of Artificial Sequence: Synthetic oligonucleotide
  Antisense strand to SEQ ID NO: 735348
cuuagaguuaacaucucag

SEQ ID NO: 735350 - RNA, 19 nt, Artificial Sequence
  Description of Artificial Sequence: Synthetic oligonucleotide
  Sense strand starting at position 3701 of SEQ ID NO: 586667
accuaaaugccaugcauga

SEQ ID NO: 735351 - RNA, 19 nt, Artificial Sequence
  Description of Artificial Sequence: Synthetic oligonucleotide
  Antisense strand to SEQ ID NO: 735350
ucaugcauggcauuuaggu

SEQ ID NO: 735352 - RNA, 19 nt, Artificial Sequence
  Description of Artificial Sequence: Synthetic oligonucleotide
  Sense strand starting at position 3717 of SEQ ID NO: 586667
ugaguacuguuaucagaau

SEQ ID NO: 735353 - RNA, 19 nt, Artificial Sequence
  Description of Artificial Sequence: Synthetic oligonucleotide
  Antisense strand to SEQ ID NO: 735352
auucugauaacaguacuca

SEQ ID NO: 735354 - RNA, 19 nt, Artificial Sequence
  Description of Artificial Sequence: Synthetic oligonucleotide
  Sense strand starting at position 26 of SEQ ID NO: 586668
gucaguugaugccugaaac

SEQ ID NO: 735355 - RNA, 19 nt, Artificial Sequence
  Description of Artificial Sequence: Synthetic oligonucleotide
  Antisense strand to SEQ ID NO: 735354
guuucaggcaucaacugac

SEQ ID NO: 735356 - RNA, 19 nt, Artificial Sequence
  Description of Artificial Sequence: Synthetic oligonucleotide
  Sense strand starting at position 27 of SEQ ID NO: 586668
ucaguugaugccugaaacu

SEQ ID NO: 735357 - RNA, 19 nt, Artificial Sequence
  Description of Artificial Sequence: Synthetic oligonucleotide
  Antisense strand to SEQ ID NO: 735356
aguuucaggcaucaacuga

SEQ ID NO: 735358 - RNA, 19 nt, Artificial Sequence
  Description of Artificial Sequence: Synthetic oligonucleotide
  Sense strand starting at position 687 of SEQ ID NO: 586668
aaaucuggccucugggaau

SEQ ID NO: 735359 - RNA, 19 nt, Artificial Sequence
  Description of Artificial Sequence: Synthetic oligonucleotide
  Antisense strand to SEQ ID NO: 735358
auucccagaggccagauuu

SEQ ID NO: 735360 - RNA, 19 nt, Artificial Sequence
  Description of Artificial Sequence: Synthetic oligonucleotide
  Sense strand starting at position 853 of SEQ ID NO: 586668
ccgagacuucuugaacuuc

SEQ ID NO: 735361 - RNA, 19 nt, Artificial Sequence
  Description of Artificial Sequence: Synthetic oligonucleotide
  Antisense strand to SEQ ID NO: 735360
gaaguucaagaagucucgg

SEQ ID NO: 735362 - RNA, 19 nt, Artificial Sequence
  Description of Artificial Sequence: Synthetic oligonucleotide
  Sense strand starting at position 930 of SEQ ID NO: 586668
gggccaauaucccucaagu

SEQ ID NO: 735363 - RNA, 19 nt, Artificial Sequence
  Description of Artificial Sequence: Synthetic oligonucleotide
  Antisense strand to SEQ ID NO: 735362
acuugagggauauuggccc

SEQ ID NO: 735364 - RNA, 19 nt, Artificial Sequence
  Description of Artificial Sequence: Synthetic oligonucleotide
  Sense strand starting at position 944 of SEQ ID NO: 586668
caagucuuccaccgcuaga

SEQ ID NO: 735365 - RNA, 19 nt, Artificial Sequence
  Description of Artificial Sequence: Synthetic oligonucleotide
  Antisense strand to SEQ ID NO: 735364
ucuagcgguggaagacuug

SEQ ID NO: 735366 - RNA, 19 nt, Artificial Sequence
  Description of Artificial Sequence: Synthetic oligonucleotide
  Sense strand starting at position 947 of SEQ ID NO: 586668
gucuuccaccgcuagauga

SEQ ID NO: 735367 - RNA, 19 nt, Artificial Sequence
  Description of Artificial Sequence: Synthetic oligonucleotide
  Antisense strand to SEQ ID NO: 735366
ucaucuagcgguggaagac

SEQ ID NO: 735368 - RNA, 19 nt, Artificial Sequence
  Description of Artificial Sequence: Synthetic oligonucleotide
  Sense strand starting at position 955 of SEQ ID NO: 586668
ccgcuagaugaugggaaua

SEQ ID NO: 735369 - RNA, 19 nt, Artificial Sequence
  Description of Artificial Sequence: Synthetic oligonucleotide
  Antisense strand to SEQ ID NO: 735368
uauucccaucaucuagcgg

SEQ ID NO: 735370 - RNA, 19 nt, Artificial Sequence
  Description of Artificial Sequence: Synthetic oligonucleotide
  Sense strand starting at position 980 of SEQ ID NO: 586668
cagguugaccagcacuaua

SEQ ID NO: 735371 - RNA, 19 nt, Artificial Sequence
  Description of Artificial Sequence: Synthetic oligonucleotide
  Antisense strand to SEQ ID NO: 735370
uauagugcuggucaaccug

SEQ ID NO: 735372 - RNA, 19 nt, Artificial Sequence
  Description of Artificial Sequence: Synthetic oligonucleotide
  Sense strand starting at position 994 of SEQ ID NO: 586668
cuauauuuguaagcucagu

SEQ ID NO: 735373 - RNA, 19 nt, Artificial Sequence
  Description of Artificial Sequence: Synthetic oligonucleotide
  Antisense strand to SEQ ID NO: 735372
acugagcuuacaaauauag

SEQ ID NO: 735374 - RNA, 19 nt, Artificial Sequence
  Description of Artificial Sequence: Synthetic oligonucleotide
  Sense strand starting at position 999 of SEQ ID NO: 586668
uuuguaagcucagucucaa

SEQ ID NO: 735375 - RNA, 19 nt, Artificial Sequence
  Description of Artificial Sequence: Synthetic oligonucleotide
  Antisense strand to SEQ ID NO: 735374
uugagacugagcuuacaaa

SEQ ID NO: 735376 - RNA, 19 nt, Artificial Sequence
  Description of Artificial Sequence: Synthetic oligonucleotide
  Sense strand starting at position 1040 of SEQ ID NO: 586668
uuacacagauucuagagau

SEQ ID NO: 735377 - RNA, 19 nt, Artificial Sequence
  Description of Artificial Sequence: Synthetic oligonucleotide
  Antisense strand to SEQ ID NO: 735376
aucucuagaaucuguguaa

SEQ ID NO: 735378 - RNA, 19 nt, Artificial Sequence
  Description of Artificial Sequence: Synthetic oligonucleotide
  Sense strand starting at position 1983 of SEQ ID NO: 586668
cccauuuaucgcgacacuu

SEQ ID NO: 735379 - RNA, 19 nt, Artificial Sequence
  Description of Artificial Sequence: Synthetic oligonucleotide
  Antisense strand to SEQ ID NO: 735378
aagugucgcgauaaauggg

SEQ ID NO: 735380 - RNA, 19 nt, Artificial Sequence
  Description of Artificial Sequence: Synthetic oligonucleotide
  Sense strand starting at position 2030 of SEQ ID NO: 586668
gcaaucgggccguaaagaa

SEQ ID NO: 735381 - RNA, 19 nt, Artificial Sequence
  Description of Artificial Sequence: Synthetic oligonucleotide
  Antisense strand to SEQ ID NO: 735380
uucuuuacggcccgauugc

SEQ ID NO: 735382 - RNA, 19 nt, Artificial Sequence
  Description of Artificial Sequence: Synthetic oligonucleotide
  Sense strand starting at position 2270 of SEQ ID NO: 586668
accguugacucuucccaaa

SEQ ID NO: 735383 - RNA, 19 nt, Artificial Sequence
  Description of Artificial Sequence: Synthetic oligonucleotide
  Antisense strand to SEQ ID NO: 735382
uuugggaagagucaacggu

SEQ ID NO: 735384 - RNA, 19 nt, Artificial Sequence
  Description of Artificial Sequence: Synthetic oligonucleotide
  Sense strand starting at position 2299 of SEQ ID NO: 586668
ucaguaucagcuugaauca

SEQ ID NO: 735385 - RNA, 19 nt, Artificial Sequence
  Description of Artificial Sequence: Synthetic oligonucleotide
  Antisense strand to SEQ ID NO: 735384
ugauucaagcugauacuga

SEQ ID NO: 735386 - RNA, 19 nt, Artificial Sequence
  Description of Artificial Sequence: Synthetic oligonucleotide
  Sense strand starting at position 2467 of SEQ ID NO: 586668
auuggagccuuccugagaa

SEQ ID NO: 735387 - RNA, 19 nt, Artificial Sequence
  Description of Artificial Sequence: Synthetic oligonucleotide
  Antisense strand to SEQ ID NO: 735386
uucucaggaaggcuccaau

SEQ ID NO: 735388 - RNA, 19 nt, Artificial Sequence
  Description of Artificial Sequence: Synthetic oligonucleotide
  Sense strand starting at position 2479 of SEQ ID NO: 586668
cugagaagagugugccuua

SEQ ID NO: 735389 - RNA, 19 nt, Artificial Sequence
  Description of Artificial Sequence: Synthetic oligonucleotide
  Antisense strand to SEQ ID NO: 735388
uaaggcacacucuucucag

SEQ ID NO: 735390 - RNA, 19 nt, Artificial Sequence
  Description of Artificial Sequence: Synthetic oligonucleotide
  Sense strand starting at position 2493 of SEQ ID NO: 586668
ccuuacucguuuccauauu

SEQ ID NO: 735391 - RNA, 19 nt, Artificial Sequence
  Description of Artificial Sequence: Synthetic oligonucleotide
  Antisense strand to SEQ ID NO: 735390
aauauggaaacgaguaagg

SEQ ID NO: 735392 - RNA, 19 nt, Artificial Sequence
  Description of Artificial Sequence: Synthetic oligonucleotide
  Sense strand starting at position 2546 of SEQ ID NO: 586668
cuggcuucccucuaagaag

SEQ ID NO: 735393 - RNA, 19 nt, Artificial Sequence
  Description of Artificial Sequence: Synthetic oligonucleotide
  Antisense strand to SEQ ID NO: 735392
cuucuuagagggaagccag

SEQ ID NO: 735394 - RNA, 19 nt, Artificial Sequence
  Description of Artificial Sequence: Synthetic oligonucleotide
  Sense strand starting at position 2560 of SEQ ID NO: 586668
agaagaugcuguuccuaag

SEQ ID NO: 735395 - RNA, 19 nt, Artificial Sequence
  Description of Artificial Sequence: Synthetic oligonucleotide
  Antisense strand to SEQ ID NO: 735394
cuuaggaacagcaucuucu

SEQ ID NO: 735396 - RNA, 19 nt, Artificial Sequence
  Description of Artificial Sequence: Synthetic oligonucleotide
  Sense strand starting at position 2668 of SEQ ID NO: 586668
gggcaagagucccuggacu

SEQ ID NO: 735397 - RNA, 19 nt, Artificial Sequence
  Description of Artificial Sequence: Synthetic oligonucleotide
  Antisense strand to SEQ ID NO: 735396
aguccagggacucuugccc

SEQ ID NO: 735398 - RNA, 19 nt, Artificial Sequence
  Description of Artificial Sequence: Synthetic oligonucleotide
  Sense strand starting at position 2670 of SEQ ID NO: 586668
gcaagagucccuggacuua

SEQ ID NO: 735399 - RNA, 19 nt, Artificial Sequence
  Description of Artificial Sequence: Synthetic oligonucleotide
  Antisense strand to SEQ ID NO: 735398
uaaguccagggacucuugc

SEQ ID NO: 735400 - RNA, 19 nt, Artificial Sequence
  Description of Artificial Sequence: Synthetic oligonucleotide
  Sense strand starting at position 3009 of SEQ ID NO: 586668
gagugagauucuguuucuc

SEQ ID NO: 735401 - RNA, 19 nt, Artificial Sequence
  Description of Artificial Sequence: Synthetic oligonucleotide
  Antisense strand to SEQ ID NO: 735400
gagaaacagaaucucacuc

SEQ ID NO: 735402 - RNA, 19 nt, Artificial Sequence
  Description of Artificial Sequence: Synthetic oligonucleotide
  Sense strand starting at position 3011 of SEQ ID NO: 586668
gugagauucuguuucucaa

SEQ ID NO: 735403 - RNA, 19 nt, Artificial Sequence
  Description of Artificial Sequence: Synthetic oligonucleotide
  Antisense strand to SEQ ID NO: 735402
uugagaaacagaaucucac

SEQ ID NO: 735404 - RNA, 19 nt, Artificial Sequence
  Description of Artificial Sequence: Synthetic oligonucleotide
  Sense strand starting at position 3013 of SEQ ID NO: 586668
gagauucuguuucucaaag

SEQ ID NO: 735405 - RNA, 19 nt, Artificial Sequence
  Description of Artificial Sequence: Synthetic oligonucleotide
  Antisense strand to SEQ ID NO: 735404
cuuugagaaacagaaucuc

SEQ ID NO: 735406 - RNA, 19 nt, Artificial Sequence
  Description of Artificial Sequence: Synthetic oligonucleotide
  Sense strand starting at position 3014 of SEQ ID NO: 586668
agauucuguuucucaaaga

SEQ ID NO: 735407 - RNA, 19 nt, Artificial Sequence
  Description of Artificial Sequence: Synthetic oligonucleotide
  Antisense strand to SEQ ID NO: 735406
ucuuugagaaacagaaucu

SEQ ID NO: 735408 - RNA, 19 nt, Artificial Sequence
  Description of Artificial Sequence: Synthetic oligonucleotide
  Sense strand starting at position 3102 of SEQ ID NO: 586668
ggagauuccuggguuucca

SEQ ID NO: 735409 - RNA, 19 nt, Artificial Sequence
  Description of Artificial Sequence: Synthetic oligonucleotide
  Antisense strand to SEQ ID NO: 735408
uggaaacccaggaaucucc

SEQ ID NO: 735410 - RNA, 19 nt, Artificial Sequence
  Description of Artificial Sequence: Synthetic oligonucleotide
  Sense strand starting at position 3128 of SEQ ID NO: 586668
cccacugguccuuggaauu

SEQ ID NO: 735411 - RNA, 19 nt, Artificial Sequence
  Description of Artificial Sequence: Synthetic oligonucleotide
  Antisense strand to SEQ ID NO: 735410
aauuccaaggaccaguggg

SEQ ID NO: 735412 - RNA, 19 nt, Artificial Sequence
  Description of Artificial Sequence: Synthetic oligonucleotide
  Sense strand starting at position 3141 of SEQ ID NO: 586668
ggaauuuaaucauagucaa

SEQ ID NO: 735413 - RNA, 19 nt, Artificial Sequence
  Description of Artificial Sequence: Synthetic oligonucleotide
  Antisense strand to SEQ ID NO: 735412
uugacuaugauuaaauucc

SEQ ID NO: 735414 - RNA, 19 nt, Artificial Sequence
  Description of Artificial Sequence: Synthetic oligonucleotide
  Sense strand starting at position 3164 of SEQ ID NO: 586668
cucuucuugagggaugagu

SEQ ID NO: 735415 - RNA, 19 nt, Artificial Sequence
  Description of Artificial Sequence: Synthetic oligonucleotide
  Antisense strand to SEQ ID NO: 735414
acucaucccucaagaagag

SEQ ID NO: 735416 - RNA, 19 nt, Artificial Sequence
  Description of Artificial Sequence: Synthetic oligonucleotide
  Sense strand starting at position 3192 of SEQ ID NO: 586668
ggaaauggcuuugaggaag

SEQ ID NO: 735417 - RNA, 19 nt, Artificial Sequence
  Description of Artificial Sequence: Synthetic oligonucleotide
  Antisense strand to SEQ ID NO: 735416
cuuccucaaagccauuucc

SEQ ID NO: 735418 - RNA, 19 nt, Artificial Sequence
  Description of Artificial Sequence: Synthetic oligonucleotide
  Sense strand starting at position 3373 of SEQ ID NO: 586668
gagcccagacacugauaua

SEQ ID NO: 735419 - RNA, 19 nt, Artificial Sequence
  Description of Artificial Sequence: Synthetic oligonucleotide
  Antisense strand to SEQ ID NO: 735418
uauaucagugucugggcuc

SEQ ID NO: 735420 - RNA, 19 nt, Artificial Sequence
  Description of Artificial Sequence: Synthetic oligonucleotide
  Sense strand starting at position 3416 of SEQ ID NO: 586668
acccacugccuggauaaau

SEQ ID NO: 735421 - RNA, 19 nt, Artificial Sequence
  Description of Artificial Sequence: Synthetic oligonucleotide
  Antisense strand to SEQ ID NO: 735420
auuuauccaggcagugggu

SEQ ID NO: 735422 - RNA, 19 nt, Artificial Sequence
  Description of Artificial Sequence: Synthetic oligonucleotide
  Sense strand starting at position 3442 of SEQ ID NO: 586668
auacgucuucccuaauugu

SEQ ID NO: 735423 - RNA, 19 nt, Artificial Sequence
  Description of Artificial Sequence: Synthetic oligonucleotide
  Antisense strand to SEQ ID NO: 735422
acaauuagggaagacguau

SEQ ID NO: 735424 - RNA, 19 nt, Artificial Sequence
  Description of Artificial Sequence: Synthetic oligonucleotide
  Sense strand starting at position 3453 of SEQ ID NO: 586668
cuaauuguuccgggaacuu

SEQ ID NO: 735425 - RNA, 19 nt, Artificial Sequence
  Description of Artificial Sequence: Synthetic oligonucleotide
  Antisense strand to SEQ ID NO: 735424
aaguucccggaacaauuag

SEQ ID NO: 735426 - RNA, 19 nt, Artificial Sequence
  Description of Artificial Sequence: Synthetic oligonucleotide
  Sense strand starting at position 3478 of SEQ ID NO: 586668
cuugaagaaugcgugaauu

SEQ ID NO: 735427 - RNA, 19 nt, Artificial Sequence
  Description of Artificial Sequence: Synthetic oligonucleotide
  Antisense strand to SEQ ID NO: 735426
aauucacgcauucuucaag

SEQ ID NO: 735428 - RNA, 19 nt, Artificial Sequence
  Description of Artificial Sequence: Synthetic oligonucleotide
  Sense strand starting at position 3489 of SEQ ID NO: 586668
cgugaauugcuauauuguu

SEQ ID NO: 735429 - RNA, 19 nt, Artificial Sequence
  Description of Artificial Sequence: Synthetic oligonucleotide
  Antisense strand to SEQ ID NO: 735428
aacaauauagcaauucacg

SEQ ID NO: 735430 - RNA, 19 nt, Artificial Sequence
  Description of Artificial Sequence: Synthetic oligonucleotide
  Sense strand starting at position 3663 of SEQ ID NO: 586668
uucuaaagcccuggguuua

SEQ ID NO: 735431 - RNA, 19 nt, Artificial Sequence
  Description of Artificial Sequence: Synthetic oligonucleotide
  Antisense strand to SEQ ID NO: 735430
uaaacccagggcuuuagaa

SEQ ID NO: 735432 - RNA, 19 nt, Artificial Sequence
  Description of Artificial Sequence: Synthetic oligonucleotide
  Sense strand starting at position 3873 of SEQ ID NO: 586668
uucugauccuucccacagu

SEQ ID NO: 735433 - RNA, 19 nt, Artificial Sequence
  Description of Artificial Sequence: Synthetic oligonucleotide
  Antisense strand to SEQ ID NO: 735432
acugugggaaggaucagaa

SEQ ID NO: 735434 - RNA, 19 nt, Artificial Sequence
  Description of Artificial Sequence: Synthetic oligonucleotide
  Sense strand starting at position 66 of SEQ ID NO: 586669
ggaagacggucucccuuaa

SEQ ID NO: 735435 - RNA, 19 nt, Artificial Sequence
  Description of Artificial Sequence: Synthetic oligonucleotide
  Antisense strand to SEQ ID NO: 735434
uuaagggagaccgucuucc

SEQ ID NO: 735436 - RNA, 19 nt, Artificial Sequence
  Description of Artificial Sequence: Synthetic oligonucleotide
  Sense strand starting at position 125 of SEQ ID NO: 586669
aacccugacccucgguaaa

SEQ ID NO: 735437 - RNA, 19 nt, Artificial Sequence
  Description of Artificial Sequence: Synthetic oligonucleotide
  Antisense strand to SEQ ID NO: 735436
uuuaccgagggucaggguu

SEQ ID NO: 735438 - RNA, 19 nt, Artificial Sequence
  Description of Artificial Sequence: Synthetic oligonucleotide
  Sense strand starting at position 331 of SEQ ID NO: 586669
agacauuccuacuggguua

SEQ ID NO: 735439 - RNA, 19 nt, Artificial Sequence
  Description of Artificial Sequence: Synthetic oligonucleotide
  Antisense strand to SEQ ID NO: 735438
uaacccaguaggaaugucu

SEQ ID NO: 735440 - RNA, 19 nt, Artificial Sequence
  Description of Artificial Sequence: Synthetic oligonucleotide
  Sense strand starting at position 359 of SEQ ID NO: 586669
gggagauguucucauaaau

SEQ ID NO: 735441 - RNA, 19 nt, Artificial Sequence
  Description of Artificial Sequence: Synthetic oligonucleotide
  Antisense strand to SEQ ID NO: 735440
auuuaugagaacaucuccc

SEQ ID NO: 735442 - RNA, 19 nt, Artificial Sequence
  Description of Artificial Sequence: Synthetic oligonucleotide
  Sense strand starting at position 401 of SEQ ID NO: 586669
guaggugugucccagacac

SEQ ID NO: 735443 - RNA, 19 nt, Artificial Sequence
  Description of Artificial Sequence: Synthetic oligonucleotide
  Antisense strand to SEQ ID NO: 735442
gugucugggacacaccuac

SEQ ID NO: 735444 - RNA, 19 nt, Artificial Sequence
  Description of Artificial Sequence: Synthetic oligonucleotide
  Sense strand starting at position 470 of SEQ ID NO: 586669
cuccaugucccugaagaca

SEQ ID NO: 735445 - RNA, 19 nt, Artificial Sequence
  Description of Artificial Sequence: Synthetic oligonucleotide
  Antisense strand to SEQ ID NO: 735444
ugucuucagggacauggag

SEQ ID NO: 735446 - RNA, 19 nt, Artificial Sequence
  Description of Artificial Sequence: Synthetic oligonucleotide
  Sense strand starting at position 478 of SEQ ID NO: 586669
cccugaagacauuggguuu

SEQ ID NO: 735447 - RNA, 19 nt, Artificial Sequence
  Description of Artificial Sequence: Synthetic oligonucleotide
  Antisense strand to SEQ ID NO: 735446
aaacccaaugucuucaggg

SEQ ID NO: 735448 - RNA, 19 nt, Artificial Sequence
  Description of Artificial Sequence: Synthetic oligonucleotide
  Sense strand starting at position 517 of SEQ ID NO: 586669
cccacucuguguuggagaa

SEQ ID NO: 735449 - RNA, 19 nt, Artificial Sequence
  Description of Artificial Sequence: Synthetic oligonucleotide
  Antisense strand to SEQ ID NO: 735448
uucuccaacacagaguggg

SEQ ID NO: 735450 - RNA, 19 nt, Artificial Sequence
  Description of Artificial Sequence: Synthetic oligonucleotide
  Sense strand starting at position 561 of SEQ ID NO: 586669
gugaaaccucagugccagu

SEQ ID NO: 735451 - RNA, 19 nt, Artificial Sequence
  Description of Artificial Sequence: Synthetic oligonucleotide
  Antisense strand to SEQ ID NO: 735450
acuggcacugagguuucac

SEQ ID NO: 735452 - RNA, 19 nt, Artificial Sequence
  Description of Artificial Sequence: Synthetic oligonucleotide
  Sense strand starting at position 748 of SEQ ID NO: 586669
ugggucaccuggugaauga

SEQ ID NO: 735453 - RNA, 19 nt, Artificial Sequence
  Description of Artificial Sequence: Synthetic oligonucleotide
  Antisense strand to SEQ ID NO: 735452
ucauucaccaggugaccca

SEQ ID NO: 735454 - RNA, 19 nt, Artificial Sequence
  Description of Artificial Sequence: Synthetic oligonucleotide
  Sense strand starting at position 757 of SEQ ID NO: 586669
uggugaaugaauggugagu

SEQ ID NO: 735455 - RNA, 19 nt, Artificial Sequence
  Description of Artificial Sequence: Synthetic oligonucleotide
  Antisense strand to SEQ ID NO: 735454
acucaccauucauucacca

SEQ ID NO: 735456 - RNA, 19 nt, Artificial Sequence
  Description of Artificial Sequence: Synthetic oligonucleotide
  Sense strand starting at position 776 of SEQ ID NO: 586669
ggaucuaauuucugccuca

SEQ ID NO: 735457 - RNA, 19 nt, Artificial Sequence
  Description of Artificial Sequence: Synthetic oligonucleotide
  Antisense strand to SEQ ID NO: 735456
ugaggcagaaauuagaucc

SEQ ID NO: 735458 - RNA, 19 nt, Artificial Sequence
  Description of Artificial Sequence: Synthetic oligonucleotide
  Sense strand starting at position 890 of SEQ ID NO: 586669
acggugugagcgcgagaau

SEQ ID NO: 735459 - RNA, 19 nt, Artificial Sequence
  Description of Artificial Sequence: Synthetic oligonucleotide
  Antisense strand to SEQ ID NO: 735458
auucucgcgcucacaccgu

SEQ ID NO: 735460 - RNA, 19 nt, Artificial Sequence
  Description of Artificial Sequence: Synthetic oligonucleotide
  Sense strand starting at position 2513 of SEQ ID NO: 586669
gguggaggcugccaugauu

SEQ ID NO: 735461 - RNA, 19 nt, Artificial Sequence
  Description of Artificial Sequence: Synthetic oligonucleotide
  Antisense strand to SEQ ID NO: 735460
aaucauggcagccuccacc

SEQ ID NO: 735462 - RNA, 19 nt, Artificial Sequence
  Description of Artificial Sequence: Synthetic oligonucleotide
  Sense strand starting at position 2614 of SEQ ID NO: 586669
gggauaagcggcuagugau

SEQ ID NO: 735463 - RNA, 19 nt, Artificial Sequence
  Description of Artificial Sequence: Synthetic oligonucleotide
  Antisense strand to SEQ ID NO: 735462
aucacuagccgcuuauccc

SEQ ID NO: 735464 - RNA, 19 nt, Artificial Sequence
  Description of Artificial Sequence: Synthetic oligonucleotide
  Sense strand starting at position 2732 of SEQ ID NO: 586669
caaggaguccugugaggga

SEQ ID NO: 735465 - RNA, 19 nt, Artificial Sequence
  Description of Artificial Sequence: Synthetic oligonucleotide
  Antisense strand to SEQ ID NO: 735464
ucccucacaggacuccuug

SEQ ID NO: 735466 - RNA, 19 nt, Artificial Sequence
  Description of Artificial Sequence: Synthetic oligonucleotide
  Sense strand starting at position 2783 of SEQ ID NO: 586669
gccucugcuuccugucaca

SEQ ID NO: 735467 - RNA, 19 nt, Artificial Sequence
  Description of Artificial Sequence: Synthetic oligonucleotide
  Antisense strand to SEQ ID NO: 735466
ugugacaggaagcagaggc

SEQ ID NO: 735468 - RNA, 19 nt, Artificial Sequence
  Description of Artificial Sequence: Synthetic oligonucleotide
  Sense strand starting at position 3317 of SEQ ID NO: 586669
ccaggauguuugcagaaag

SEQ ID NO: 735469 - RNA, 19 nt, Artificial Sequence
  Description of Artificial Sequence: Synthetic oligonucleotide
  Antisense strand to SEQ ID NO: 735468
cuuucugcaaacauccugg

SEQ ID NO: 735470 - RNA, 19 nt, Artificial Sequence
  Description of Artificial Sequence: Synthetic oligonucleotide
  Sense strand starting at position 3703 of SEQ ID NO: 586669
accaccacgucugguuaaa

SEQ ID NO: 735471 - RNA, 19 nt, Artificial Sequence
  Description of Artificial Sequence: Synthetic oligonucleotide
  Antisense strand to SEQ ID NO: 735470
uuuaaccagacgugguggu

SEQ ID NO: 735472 - RNA, 19 nt, Artificial Sequence
  Description of Artificial Sequence: Synthetic oligonucleotide
  Sense strand starting at position 3705 of SEQ ID NO: 586669
caccacgucugguuaaauu

SEQ ID NO: 735473 - RNA, 19 nt, Artificial Sequence
  Description of Artificial Sequence: Synthetic oligonucleotide
  Antisense strand to SEQ ID NO: 735472
aauuuaaccagacguggug

SEQ ID NO: 735474 - RNA, 19 nt, Artificial Sequence
  Description of Artificial Sequence: Synthetic oligonucleotide
  Sense strand starting at position 10 of SEQ ID NO: 586670
uuucuuguauggcaauuua

SEQ ID NO: 735475 - RNA, 19 nt, Artificial Sequence
  Description of Artificial Sequence: Synthetic oligonucleotide
  Antisense strand to SEQ ID NO: 735474
uaaauugccauacaagaaa

SEQ ID NO: 735476 - RNA, 19 nt, Artificial Sequence
  Description of Artificial Sequence: Synthetic oligonucleotide
  Sense strand starting at position 94 of SEQ ID NO: 586670
auaauuuaacagugcggua

SEQ ID NO: 735477 - RNA, 19 nt, Artificial Sequence
  Description of Artificial Sequence: Synthetic oligonucleotide
  Antisense strand to SEQ ID NO: 735476
uaccgcacuguuaaauuau

SEQ ID NO: 735478 - RNA, 19 nt, Artificial Sequence
  Description of Artificial Sequence: Synthetic oligonucleotide
  Sense strand starting at position 125 of SEQ ID NO: 586670
agcauuucuuaguaguuga

SEQ ID NO: 735479 - RNA, 19 nt, Artificial Sequence
  Description of Artificial Sequence: Synthetic oligonucleotide
  Antisense strand to SEQ ID NO: 735478
ucaacuacuaagaaaugcu

SEQ ID NO: 735480 - RNA, 19 nt, Artificial Sequence
  Description of Artificial Sequence: Synthetic oligonucleotide
  Sense strand starting at position 132 of SEQ ID NO: 586670
cuuaguaguugaucaugau

SEQ ID NO: 735481 - RNA, 19 nt, Artificial Sequence
  Description of Artificial Sequence: Synthetic oligonucleotide
  Antisense strand to SEQ ID NO: 735480
aucaugaucaacuacuaag

SEQ ID NO: 735482 - RNA, 19 nt, Artificial Sequence
  Description of Artificial Sequence: Synthetic oligonucleotide
  Sense strand starting at position 133 of SEQ ID NO: 586670
uuaguaguugaucaugauu

SEQ ID NO: 735483 - RNA, 19 nt, Artificial Sequence
  Description of Artificial Sequence: Synthetic oligonucleotide
  Antisense strand to SEQ ID NO: 735482
aaucaugaucaacuacuaa

SEQ ID NO: 735484 - RNA, 19 nt, Artificial Sequence
  Description of Artificial Sequence: Synthetic oligonucleotide
  Sense strand starting at position 246 of SEQ ID NO: 586670
augccugugacgcaaauau

SEQ ID NO: 735485 - RNA, 19 nt, Artificial Sequence
  Description of Artificial Sequence: Synthetic oligonucleotide
  Antisense strand to SEQ ID NO: 735484
auauuugcgucacaggcau

SEQ ID NO: 735486 - RNA, 19 nt, Artificial Sequence
  Description of Artificial Sequence: Synthetic oligonucleotide
  Sense strand starting at position 340 of SEQ ID NO: 586670
acuuaaaguuguccucuau

SEQ ID NO: 735487 - RNA, 19 nt, Artificial Sequence
  Description of Artificial Sequence: Synthetic oligonucleotide
  Antisense strand to SEQ ID NO: 735486
auagaggacaacuuuaagu

SEQ ID NO: 735488 - RNA, 19 nt, Artificial Sequence
  Description of Artificial Sequence: Synthetic oligonucleotide
  Sense strand starting at position 422 of SEQ ID NO: 586670
aguucuggaugauuccaau

SEQ ID NO: 735489 - RNA, 19 nt, Artificial Sequence
  Description of Artificial Sequence: Synthetic oligonucleotide
  Antisense strand to SEQ ID NO: 735488
auuggaaucauccagaacu

SEQ ID NO: 735490 - RNA, 19 nt, Artificial Sequence
  Description of Artificial Sequence: Synthetic oligonucleotide
  Sense strand starting at position 476 of SEQ ID NO: 586670
ucauuuaagucagguugga

SEQ ID NO: 735491 - RNA, 19 nt, Artificial Sequence
  Description of Artificial Sequence: Synthetic oligonucleotide
  Antisense strand to SEQ ID NO: 735490
uccaaccugacuuaaauga

SEQ ID NO: 735492 - RNA, 19 nt, Artificial Sequence
  Description of Artificial Sequence: Synthetic oligonucleotide
  Sense strand starting at position 786 of SEQ ID NO: 586670
gcgcgaugcccacaugaca

SEQ ID NO: 735493 - RNA, 19 nt, Artificial Sequence
  Description of Artificial Sequence: Synthetic oligonucleotide
  Antisense strand to SEQ ID NO: 735492
ugucaugugggcaucgcgc

SEQ ID NO: 735494 - RNA, 19 nt, Artificial Sequence
  Description of Artificial Sequence: Synthetic oligonucleotide
  Sense strand starting at position 1133 of SEQ ID NO: 586670
gggugaugccacugacgca

SEQ ID NO: 735495 - RNA, 19 nt, Artificial Sequence
  Description of Artificial Sequence: Synthetic oligonucleotide
  Antisense strand to SEQ ID NO: 735494
ugcgucaguggcaucaccc

SEQ ID NO: 735496 - RNA, 19 nt, Artificial Sequence
  Description of Artificial Sequence: Synthetic oligonucleotide
  Sense strand starting at position 1214 of SEQ ID NO: 586670
gggucuaacugagcaaaca

SEQ ID NO: 735497 - RNA, 19 nt, Artificial Sequence
  Description of Artificial Sequence: Synthetic oligonucleotide
  Antisense strand to SEQ ID NO: 735496
uguuugcucaguuagaccc

SEQ ID NO: 735498 - RNA, 19 nt, Artificial Sequence
  Description of Artificial Sequence: Synthetic oligonucleotide
  Sense strand starting at position 1901 of SEQ ID NO: 586670
uggaguguggacgaggaau

SEQ ID NO: 735499 - RNA, 19 nt, Artificial Sequence
  Description of Artificial Sequence: Synthetic oligonucleotide
  Antisense strand to SEQ ID NO: 735498
auuccucguccacacucca

SEQ ID NO: 735500 - RNA, 19 nt, Artificial Sequence
  Description of Artificial Sequence: Synthetic oligonucleotide
  Sense strand starting at position 1971 of SEQ ID NO: 586670
ugugcugucccuugaauga

SEQ ID NO: 735501 - RNA, 19 nt, Artificial Sequence
  Description of Artificial Sequence: Synthetic oligonucleotide
  Antisense strand to SEQ ID NO: 735500
ucauucaagggacagcaca

SEQ ID NO: 735502 - RNA, 19 nt, Artificial Sequence
  Description of Artificial Sequence: Synthetic oligonucleotide
  Sense strand starting at position 2660 of SEQ ID NO: 586670
gggauccugccgugagaag

SEQ ID NO: 735503 - RNA, 19 nt, Artificial Sequence
  Description of Artificial Sequence: Synthetic oligonucleotide
  Antisense strand to SEQ ID NO: 735502
cuucucacggcaggauccc

SEQ ID NO: 735504 - RNA, 19 nt, Artificial Sequence
  Description of Artificial Sequence: Synthetic oligonucleotide
  Sense strand starting at position 2750 of SEQ ID NO: 586670
gggaguucacuguguagag

SEQ ID NO: 735505 - RNA, 19 nt, Artificial Sequence
  Description of Artificial Sequence: Synthetic oligonucleotide
  Antisense strand to SEQ ID NO: 735504
cucuacacagugaacuccc

SEQ ID NO: 735506 - RNA, 19 nt, Artificial Sequence
  Description of Artificial Sequence: Synthetic oligonucleotide
  Sense strand starting at position 2751 of SEQ ID NO: 586670
ggaguucacuguguagaga

SEQ ID NO: 735507 - RNA, 19 nt, Artificial Sequence
  Description of Artificial Sequence: Synthetic oligonucleotide
  Antisense strand to SEQ ID NO: 735506
ucucuacacagugaacucc

SEQ ID NO: 735508 - RNA, 19 nt, Artificial Sequence
  Description of Artificial Sequence: Synthetic oligonucleotide
  Sense strand starting at position 2804 of SEQ ID NO: 586670
gucuuaaaguucucgaaau

SEQ ID NO: 735509 - RNA, 19 nt, Artificial Sequence
  Description of Artificial Sequence: Synthetic oligonucleotide
  Antisense strand to SEQ ID NO: 735508
auuucgagaacuuuaagac

SEQ ID NO: 735510 - RNA, 19 nt, Artificial Sequence
  Description of Artificial Sequence: Synthetic oligonucleotide
  Sense strand starting at position 2806 of SEQ ID NO: 586670
cuuaaaguucucgaaauuc

SEQ ID NO: 735511 - RNA, 19 nt, Artificial Sequence
  Description of Artificial Sequence: Synthetic oligonucleotide
  Antisense strand to SEQ ID NO: 735510
gaauuucgagaacuuuaag

SEQ ID NO: 735512 - RNA, 19 nt, Artificial Sequence
  Description of Artificial Sequence: Synthetic oligonucleotide
  Sense strand starting at position 2836 of SEQ ID NO: 586670
aggagaaaguuagagaacu

SEQ ID NO: 735513 - RNA, 19 nt, Artificial Sequence
  Description of Artificial Sequence: Synthetic oligonucleotide
  Antisense strand to SEQ ID NO: 735512
aguucucuaacuuucuccu

SEQ ID NO: 735514 - RNA, 19 nt, Artificial Sequence
  Description of Artificial Sequence: Synthetic oligonucleotide
  Sense strand starting at position 2969 of SEQ ID NO: 586670
gugaaaggcuauccaagga

SEQ ID NO: 735515 - RNA, 19 nt, Artificial Sequence
  Description of Artificial Sequence: Synthetic oligonucleotide
  Antisense strand to SEQ ID NO: 735514
uccuuggauagccuuucac

SEQ ID NO: 735516 - RNA, 19 nt, Artificial Sequence
  Description of Artificial Sequence: Synthetic oligonucleotide
  Sense strand starting at position 3066 of SEQ ID NO: 586670
gcagccuccgcagagaaau

SEQ ID NO: 735517 - RNA, 19 nt, Artificial Sequence
  Description of Artificial Sequence: Synthetic oligonucleotide
  Antisense strand to SEQ ID NO: 735516
auuucucugcggaggcugc

SEQ ID NO: 735518 - RNA, 19 nt, Artificial Sequence
  Description of Artificial Sequence: Synthetic oligonucleotide
  Sense strand starting at position 3419 of SEQ ID NO: 586670
agauuccuguaacugguaa

SEQ ID NO: 735519 - RNA, 19 nt, Artificial Sequence
  Description of Artificial Sequence: Synthetic oligonucleotide
  Antisense strand to SEQ ID NO: 735518
uuaccaguuacaggaaucu

SEQ ID NO: 735520 - RNA, 19 nt, Artificial Sequence
  Description of Artificial Sequence: Synthetic oligonucleotide
  Sense strand starting at position 3537 of SEQ ID NO: 586670
uagguaggauucuuaaugu

SEQ ID NO: 735521 - RNA, 19 nt, Artificial Sequence
  Description of Artificial Sequence: Synthetic oligonucleotide
  Antisense strand to SEQ ID NO: 735520
acauuaagaauccuaccua

SEQ ID NO: 735522 - RNA, 19 nt, Artificial Sequence
  Description of Artificial Sequence: Synthetic oligonucleotide
  Sense strand starting at position 3544 of SEQ ID NO: 586670
gauucuuaaugucugagau

SEQ ID NO: 735523 - RNA, 19 nt, Artificial Sequence
  Description of Artificial Sequence: Synthetic oligonucleotide
  Antisense strand to SEQ ID NO: 735522
aucucagacauuaagaauc

SEQ ID NO: 735524 - RNA, 19 nt, Artificial Sequence
  Description of Artificial Sequence: Synthetic oligonucleotide
  Sense strand starting at position 3545 of SEQ ID NO: 586670
auucuuaaugucugagaug

SEQ ID NO: 735525 - RNA, 19 nt, Artificial Sequence
  Description of Artificial Sequence: Synthetic oligonucleotide
  Antisense strand to SEQ ID NO: 735524
caucucagacauuaagaau

SEQ ID NO: 735526 - RNA, 19 nt, Artificial Sequence
  Description of Artificial Sequence: Synthetic oligonucleotide
  Sense strand starting at position 3548 of SEQ ID NO: 586670
cuuaaugucugagaugaag

SEQ ID NO: 735527 - RNA, 19 nt, Artificial Sequence
  Description of Artificial Sequence: Synthetic oligonucleotide
  Antisense strand to SEQ ID NO: 735526
cuucaucucagacauuaag

SEQ ID NO: 735528 - RNA, 19 nt, Artificial Sequence
  Description of Artificial Sequence: Synthetic oligonucleotide
  Sense strand starting at position 3556 of SEQ ID NO: 586670
cugagaugaaggcgaugua

SEQ ID NO: 735529 - RNA, 19 nt, Artificial Sequence
  Description of Artificial Sequence: Synthetic oligonucleotide
  Antisense strand to SEQ ID NO: 735528
uacaucgccuucaucucag

SEQ ID NO: 735530 - RNA, 19 nt, Artificial Sequence
  Description of Artificial Sequence: Synthetic oligonucleotide
  Sense strand starting at position 3596 of SEQ ID NO: 586670
aaauguugagucgacccaa

SEQ ID NO: 735531 - RNA, 19 nt, Artificial Sequence
  Description of Artificial Sequence: Synthetic oligonucleotide
  Antisense strand to SEQ ID NO: 735530
uugggucgacucaacauuu

SEQ ID NO: 735532 - RNA, 19 nt, Artificial Sequence
  Description of Artificial Sequence: Synthetic oligonucleotide
  Sense strand starting at position 3659 of SEQ ID NO: 586670
auaugaucuugaguaaacu

SEQ ID NO: 735533 - RNA, 19 nt, Artificial Sequence
  Description of Artificial Sequence: Synthetic oligonucleotide
  Antisense strand to SEQ ID NO: 735532
aguuuacucaagaucauau

SEQ ID NO: 735534 - RNA, 19 nt, Artificial Sequence
  Description of Artificial Sequence: Synthetic oligonucleotide
  Sense strand starting at position 3668 of SEQ ID NO: 586670
ugaguaaacugcuugaccu

SEQ ID NO: 735535 - RNA, 19 nt, Artificial Sequence
  Description of Artificial Sequence: Synthetic oligonucleotide
  Antisense strand to SEQ ID NO: 735534
aggucaagcaguuuacuca

SEQ ID NO: 735536 - RNA, 19 nt, Artificial Sequence
  Description of Artificial Sequence: Synthetic oligonucleotide
  Sense strand starting at position 3669 of SEQ ID NO: 586670
gaguaaacugcuugaccuu

SEQ ID NO: 735537 - RNA, 19 nt, Artificial Sequence
  Description of Artificial Sequence: Synthetic oligonucleotide
  Antisense strand to SEQ ID NO: 735536
aaggucaagcaguuuacuc

SEQ ID NO: 735538 - RNA, 19 nt, Artificial Sequence
  Description of Artificial Sequence: Synthetic oligonucleotide
  Sense strand starting at position 3696 of SEQ ID NO: 586670
ucagcuuucuuaguuguua

SEQ ID NO: 735539 - RNA, 19 nt, Artificial Sequence
  Description of Artificial Sequence: Synthetic oligonucleotide
  Antisense strand to SEQ ID NO: 735538
uaacaacuaagaaagcuga

SEQ ID NO: 735540 - RNA, 19 nt, Artificial Sequence
  Description of Artificial Sequence: Synthetic oligonucleotide
  Sense strand starting at position 3700 of SEQ ID NO: 586670
cuuucuuaguuguuaaaug

SEQ ID NO: 735541 - RNA, 19 nt, Artificial Sequence
  Description of Artificial Sequence: Synthetic oligonucleotide
  Antisense strand to SEQ ID NO: 735540
cauuuaacaacuaagaaag

SEQ ID NO: 735542 - RNA, 19 nt, Artificial Sequence
  Description of Artificial Sequence: Synthetic oligonucleotide
  Sense strand starting at position 3802 of SEQ ID NO: 586670
ugaguaggaguucgaaaug

SEQ ID NO: 735543 - RNA, 19 nt, Artificial Sequence
  Description of Artificial Sequence: Synthetic oligonucleotide
  Antisense strand to SEQ ID NO: 735542
cauuucgaacuccuacuca

SEQ ID NO: 735544 - RNA, 19 nt, Artificial Sequence
  Description of Artificial Sequence: Synthetic oligonucleotide
  Sense strand starting at position 3807 of SEQ ID NO: 586670
aggaguucgaaaugauaau

SEQ ID NO: 735545 - RNA, 19 nt, Artificial Sequence
  Description of Artificial Sequence: Synthetic oligonucleotide
  Antisense strand to SEQ ID NO: 735544
auuaucauuucgaacuccu

SEQ ID NO: 735546 - RNA, 19 nt, Artificial Sequence
  Description of Artificial Sequence: Synthetic oligonucleotide
  Sense strand starting at position 3875 of SEQ ID NO: 586670
gaucaaauguagucagaac

SEQ ID NO: 735547 - RNA, 19 nt, Artificial Sequence
  Description of Artificial Sequence: Synthetic oligonucleotide
  Antisense strand to SEQ ID NO: 735546
guucugacuacauuugauc

SEQ ID NO: 735548 - RNA, 19 nt, Artificial Sequence
  Description of Artificial Sequence: Synthetic oligonucleotide
  Sense strand starting at position 3882 of SEQ ID NO: 586670
uguagucagaacuggaaga

SEQ ID NO: 735549 - RNA, 19 nt, Artificial Sequence
  Description of Artificial Sequence: Synthetic oligonucleotide
  Antisense strand to SEQ ID NO: 735548
ucuuccaguucugacuaca

SEQ ID NO: 735550 - RNA, 19 nt, Artificial Sequence
  Description of Artificial Sequence: Synthetic oligonucleotide
  Sense strand starting at position 3954 of SEQ ID NO: 586670
aacagauccuccguaaguu

SEQ ID NO: 735551 - RNA, 19 nt, Artificial Sequence
  Description of Artificial Sequence: Synthetic oligonucleotide
  Antisense strand to SEQ ID NO: 735550
aacuuacggaggaucuguu

SEQ ID NO: 735552 - RNA, 19 nt, Artificial Sequence
  Description of Artificial Sequence: Synthetic oligonucleotide
  Sense strand starting at position 3966 of SEQ ID NO: 586670
guaaguuggcugcacuagu

SEQ ID NO: 735553 - RNA, 19 nt, Artificial Sequence
  Description of Artificial Sequence: Synthetic oligonucleotide
  Antisense strand to SEQ ID NO: 735552
acuagugcagccaacuuac

SEQ ID NO: 735554 - RNA, 19 nt, Artificial Sequence
  Description of Artificial Sequence: Synthetic oligonucleotide
  Sense strand starting at position 107 of SEQ ID NO: 586671
acucaauagggcuggauau

SEQ ID NO: 735555 - RNA, 19 nt, Artificial Sequence
  Description of Artificial Sequence: Synthetic oligonucleotide
  Antisense strand to SEQ ID NO: 735554
auauccagcccuauugagu

SEQ ID NO: 735556 - RNA, 19 nt, Artificial Sequence
  Description of Artificial Sequence: Synthetic oligonucleotide
  Sense strand starting at position 108 of SEQ ID NO: 586671
cucaauagggcuggauauu

SEQ ID NO: 735557 - RNA, 19 nt, Artificial Sequence
  Description of Artificial Sequence: Synthetic oligonucleotide
  Antisense strand to SEQ ID NO: 735556
aauauccagcccuauugag

SEQ ID NO: 735558 - RNA, 19 nt, Artificial Sequence
  Description of Artificial Sequence: Synthetic oligonucleotide
  Sense strand starting at position 117 of SEQ ID NO: 586671
gcuggauauuugcucccau

SEQ ID NO: 735559 - RNA, 19 nt, Artificial Sequence
  Description of Artificial Sequence: Synthetic oligonucleotide
  Antisense strand to SEQ ID NO: 735558
augggagcaaauauccagc

SEQ ID NO: 735560 - RNA, 19 nt, Artificial Sequence
  Description of Artificial Sequence: Synthetic oligonucleotide
  Sense strand starting at position 214 of SEQ ID NO: 586671
ggguuuacccucuaagugu

SEQ ID NO: 735561 - RNA, 19 nt, Artificial Sequence
  Description of Artificial Sequence: Synthetic oligonucleotide
  Antisense strand to SEQ ID NO: 735560
acacuuagaggguaaaccc

SEQ ID NO: 735562 - RNA, 19 nt, Artificial Sequence
  Description of Artificial Sequence: Synthetic oligonucleotide
  Sense strand starting at position 571 of SEQ ID NO: 586671
ccaugaggguguuuagauc

SEQ ID NO: 735563 - RNA, 19 nt, Artificial Sequence
  Description of Artificial Sequence: Synthetic oligonucleotide
  Antisense strand to SEQ ID NO: 735562
gaucuaaacacccucaugg

SEQ ID NO: 735564 - RNA, 19 nt, Artificial Sequence
  Description of Artificial Sequence: Synthetic oligonucleotide
  Sense strand starting at position 578 of SEQ ID NO: 586671
gguguuuagauccaaagug

SEQ ID NO: 735565 - RNA, 19 nt, Artificial Sequence
  Description of Artificial Sequence: Synthetic oligonucleotide
  Antisense strand to SEQ ID NO: 735564
cacuuuggaucuaaacacc

SEQ ID NO: 735566 - RNA, 19 nt, Artificial Sequence
  Description of Artificial Sequence: Synthetic oligonucleotide
  Sense strand starting at position 715 of SEQ ID NO: 586671
cgcuauuaaccauaugcaa

SEQ ID NO: 735567 - RNA, 19 nt, Artificial Sequence
  Description of Artificial Sequence: Synthetic oligonucleotide
  Antisense strand to SEQ ID NO: 735566
uugcauaugguuaauagcg

SEQ ID NO: 735568 - RNA, 19 nt, Artificial Sequence
  Description of Artificial Sequence: Synthetic oligonucleotide
  Sense strand starting at position 749 of SEQ ID NO: 586671
agugacaaaugacuuucua

SEQ ID NO: 735569 - RNA, 19 nt, Artificial Sequence
  Description of Artificial Sequence: Synthetic oligonucleotide
  Antisense strand to SEQ ID NO: 735568
uagaaagucauuugucacu

SEQ ID NO: 735570 - RNA, 19 nt, Artificial Sequence
  Description of Artificial Sequence: Synthetic oligonucleotide
  Sense strand starting at position 800 of SEQ ID NO: 586671
acagaaaugcugugcaaag

SEQ ID NO: 735571 - RNA, 19 nt, Artificial Sequence
  Description of Artificial Sequence: Synthetic oligonucleotide
  Antisense strand to SEQ ID NO: 735570
cuuugcacagcauuucugu

SEQ ID NO: 735572 - RNA, 19 nt, Artificial Sequence
  Description of Artificial Sequence: Synthetic oligonucleotide
  Sense strand starting at position 801 of SEQ ID NO: 586671
cagaaaugcugugcaaaga

SEQ ID NO: 735573 - RNA, 19 nt, Artificial Sequence
  Description of Artificial Sequence: Synthetic oligonucleotide
  Antisense strand to SEQ ID NO: 735572
ucuuugcacagcauuucug

SEQ ID NO: 735574 - RNA, 19 nt, Artificial Sequence
  Description of Artificial Sequence: Synthetic oligonucleotide
  Sense strand starting at position 802 of SEQ ID NO: 586671
agaaaugcugugcaaagaa

SEQ ID NO: 735575 - RNA, 19 nt, Artificial Sequence
  Description of Artificial Sequence: Synthetic oligonucleotide
  Antisense strand to SEQ ID NO: 735574
uucuuugcacagcauuucu

SEQ ID NO: 735576 - RNA, 19 nt, Artificial Sequence
  Description of Artificial Sequence: Synthetic oligonucleotide
  Sense strand starting at position 845 of SEQ ID NO: 586671
aggugauauccuggagcau

SEQ ID NO: 735577 - RNA, 19 nt, Artificial Sequence
  Description of Artificial Sequence: Synthetic oligonucleotide
  Antisense strand to SEQ ID NO: 735576
augcuccaggauaucaccu

SEQ ID NO: 735578 - RNA, 19 nt, Artificial Sequence
  Description of Artificial Sequence: Synthetic oligonucleotide
  Sense strand starting at position 846 of SEQ ID NO: 586671
ggugauauccuggagcaua

SEQ ID NO: 735579 - RNA, 19 nt, Artificial Sequence
  Description of Artificial Sequence: Synthetic oligonucleotide
  Antisense strand to SEQ ID NO: 735578
uaugcuccaggauaucacc

SEQ ID NO: 735580 - RNA, 19 nt, Artificial Sequence
  Description of Artificial Sequence: Synthetic oligonucleotide
  Sense strand starting at position 880 of SEQ ID NO: 586671
gucauaacgggucacagaa

SEQ ID NO: 735581 - RNA, 19 nt, Artificial Sequence
  Description of Artificial Sequence: Synthetic oligonucleotide
  Antisense strand to SEQ ID NO: 735580
uucugugacccguuaugac

SEQ ID NO: 735582 - RNA, 19 nt, Artificial Sequence
  Description of Artificial Sequence: Synthetic oligonucleotide
  Sense strand starting at position 893 of SEQ ID NO: 586671
acagaauugugagcuggaa

SEQ ID NO: 735583 - RNA, 19 nt, Artificial Sequence
  Description of Artificial Sequence: Synthetic oligonucleotide
  Antisense strand to SEQ ID NO: 735582
uuccagcucacaauucugu

SEQ ID NO: 735584 - RNA, 19 nt, Artificial Sequence
  Description of Artificial Sequence: Synthetic oligonucleotide
  Sense strand starting at position 925 of SEQ ID NO: 586671
guaucugguccacaaccuu

SEQ ID NO: 735585 - RNA, 19 nt, Artificial Sequence
  Description of Artificial Sequence: Synthetic oligonucleotide
  Antisense strand to SEQ ID NO: 735584
aagguuguggaccagauac

SEQ ID NO: 735586 - RNA, 19 nt, Artificial Sequence
  Description of Artificial Sequence: Synthetic oligonucleotide
  Sense strand starting at position 973 of SEQ ID NO: 586671
ggagaauuacuguggccua

SEQ ID NO: 735587 - RNA, 19 nt, Artificial Sequence
  Description of Artificial Sequence: Synthetic oligonucleotide
  Antisense strand to SEQ ID NO: 735586
uaggccacaguaauucucc

SEQ ID NO: 735588 - RNA, 19 nt, Artificial Sequence
  Description of Artificial Sequence: Synthetic oligonucleotide
  Sense strand starting at position 976 of SEQ ID NO: 586671
gaauuacuguggccuaaga

SEQ ID NO: 735589 - RNA, 19 nt, Artificial Sequence
  Description of Artificial Sequence: Synthetic oligonucleotide
  Antisense strand to SEQ ID NO: 735588
ucuuaggccacaguaauuc

SEQ ID NO: 735590 - RNA, 19 nt, Artificial Sequence
  Description of Artificial Sequence: Synthetic oligonucleotide
  Sense strand starting at position 978 of SEQ ID NO: 586671
auuacuguggccuaagauc

SEQ ID NO: 735591 - RNA, 19 nt, Artificial Sequence
  Description of Artificial Sequence: Synthetic oligonucleotide
  Antisense strand to SEQ ID NO: 735590
gaucuuaggccacaguaau

SEQ ID NO: 735592 - RNA, 19 nt, Artificial Sequence
  Description of Artificial Sequence: Synthetic oligonucleotide
  Sense strand starting at position 1144 of SEQ ID NO: 586671
aguauuacaggcuguaaau

SEQ ID NO: 735593 - RNA, 19 nt, Artificial Sequence
  Description of Artificial Sequence: Synthetic oligonucleotide
  Antisense strand to SEQ ID NO: 735592
auuuacagccuguaauacu

SEQ ID NO: 735594 - RNA, 19 nt, Artificial Sequence
  Description of Artificial Sequence: Synthetic oligonucleotide
  Sense strand starting at position 1254 of SEQ ID NO: 586671
augugaucuguuuaccauu

SEQ ID NO: 735595 - RNA, 19 nt, Artificial Sequence
  Description of Artificial Sequence: Synthetic oligonucleotide
  Antisense strand to SEQ ID NO: 735594
aaugguaaacagaucacau

SEQ ID NO: 735596 - RNA, 19 nt, Artificial Sequence
  Description of Artificial Sequence: Synthetic oligonucleotide
  Sense strand starting at position 2024 of SEQ ID NO: 586671
gggaaauucuacgucgaug

SEQ ID NO: 735597 - RNA, 19 nt, Artificial Sequence
  Description of Artificial Sequence: Synthetic oligonucleotide
  Antisense strand to SEQ ID NO: 735596
caucgacguagaauuuccc

SEQ ID NO: 735598 - RNA, 19 nt, Artificial Sequence
  Description of Artificial Sequence: Synthetic oligonucleotide
  Sense strand starting at position 2197 of SEQ ID NO: 586671
gcgcauuacguugucacuu

SEQ ID NO: 735599 - RNA, 19 nt, Artificial Sequence
  Description of Artificial Sequence: Synthetic oligonucleotide
  Antisense strand to SEQ ID NO: 735598
aagugacaacguaaugcgc

SEQ ID NO: 735600 - RNA, 19 nt, Artificial Sequence
  Description of Artificial Sequence: Synthetic oligonucleotide
  Sense strand starting at position 2220 of SEQ ID NO: 586671
uuuggacucuguccacuaa

SEQ ID NO: 735601 - RNA, 19 nt, Artificial Sequence
  Description of Artificial Sequence: Synthetic oligonucleotide
  Antisense strand to SEQ ID NO: 735600
uuaguggacagaguccaaa

SEQ ID NO: 735602 - RNA, 19 nt, Artificial Sequence
  Description of Artificial Sequence: Synthetic oligonucleotide
  Sense strand starting at position 2221 of SEQ ID NO: 586671
uuggacucuguccacuaau

SEQ ID NO: 735603 - RNA, 19 nt, Artificial Sequence
  Description of Artificial Sequence: Synthetic oligonucleotide
  Antisense strand to SEQ ID NO: 735602
auuaguggacagaguccaa

SEQ ID NO: 735604 - RNA, 19 nt, Artificial Sequence
  Description of Artificial Sequence: Synthetic oligonucleotide
  Sense strand starting at position 2340 of SEQ ID NO: 586671
aucugauuaggcugggauu

SEQ ID NO: 735605 - RNA, 19 nt, Artificial Sequence
  Description of Artificial Sequence: Synthetic oligonucleotide
  Antisense strand to SEQ ID NO: 735604
aaucccagccuaaucagau

SEQ ID NO: 735606 - RNA, 19 nt, Artificial Sequence
  Description of Artificial Sequence: Synthetic oligonucleotide
  Sense strand starting at position 2341 of SEQ ID NO: 586671
ucugauuaggcugggauua

SEQ ID NO: 735607 - RNA, 19 nt, Artificial Sequence
  Description of Artificial Sequence: Synthetic oligonucleotide
  Antisense strand to SEQ ID NO: 735606
uaaucccagccuaaucaga

SEQ ID NO: 735608 - RNA, 19 nt, Artificial Sequence
  Description of Artificial Sequence: Synthetic oligonucleotide
  Sense strand starting at position 2415 of SEQ ID NO: 586671
auuugaaauugcgcgagga

SEQ ID NO: 735609 - RNA, 19 nt, Artificial Sequence
  Description of Artificial Sequence: Synthetic oligonucleotide
  Antisense strand to SEQ ID NO: 735608
uccucgcgcaauuucaaau

SEQ ID NO: 735610 - RNA, 19 nt, Artificial Sequence
  Description of Artificial Sequence: Synthetic oligonucleotide
  Sense strand starting at position 2417 of SEQ ID NO: 586671
uugaaauugcgcgaggaaa

SEQ ID NO: 735611 - RNA, 19 nt, Artificial Sequence
  Description of Artificial Sequence: Synthetic oligonucleotide
  Antisense strand to SEQ ID NO: 735610
uuuccucgcgcaauuucaa

SEQ ID NO: 735612 - RNA, 19 nt, Artificial Sequence
  Description of Artificial Sequence: Synthetic oligonucleotide
  Sense strand starting at position 2525 of SEQ ID NO: 586671
cccuguauggaggaguuua

SEQ ID NO: 735613 - RNA, 19 nt, Artificial Sequence
  Description of Artificial Sequence: Synthetic oligonucleotide
  Antisense strand to SEQ ID NO: 735612
uaaacuccuccauacaggg

SEQ ID NO: 735614 - RNA, 19 nt, Artificial Sequence
  Description of Artificial Sequence: Synthetic oligonucleotide
  Sense strand starting at position 2564 of SEQ ID NO: 586671
gggaccagcucuguaagaa

SEQ ID NO: 735615 - RNA, 19 nt, Artificial Sequence
  Description of Artificial Sequence: Synthetic oligonucleotide
  Antisense strand to SEQ ID NO: 735614
uucuuacagagcugguccc

SEQ ID NO: 735616 - RNA, 19 nt, Artificial Sequence
  Description of Artificial Sequence: Synthetic oligonucleotide
  Sense strand starting at position 2565 of SEQ ID NO: 586671
ggaccagcucuguaagaau

SEQ ID NO: 735617 - RNA, 19 nt, Artificial Sequence
  Description of Artificial Sequence: Synthetic oligonucleotide
  Antisense strand to SEQ ID NO: 735616
auucuuacagagcuggucc

SEQ ID NO: 735618 - RNA, 19 nt, Artificial Sequence
  Description of Artificial Sequence: Synthetic oligonucleotide
  Sense strand starting at position 2597 of SEQ ID NO: 586671
gugccagcugcgguauuaa

SEQ ID NO: 735619 - RNA, 19 nt, Artificial Sequence
  Description of Artificial Sequence: Synthetic oligonucleotide
  Antisense strand to SEQ ID NO: 735618
uuaauaccgcagcuggcac

SEQ ID NO: 735620 - RNA, 19 nt, Artificial Sequence
  Description of Artificial Sequence: Synthetic oligonucleotide
  Sense strand starting at position 2606 of SEQ ID NO: 586671
gcgguauuaagucacagga

SEQ ID NO: 735621 - RNA, 19 nt, Artificial Sequence
  Description of Artificial Sequence: Synthetic oligonucleotide
  Antisense strand to SEQ ID NO: 735620
uccugugacuuaauaccgc

SEQ ID NO: 735622 - RNA, 19 nt, Artificial Sequence
  Description of Artificial Sequence: Synthetic oligonucleotide
  Sense strand starting at position 2622 of SEQ ID NO: 586671
ggacuugagaacugcgaua

SEQ ID NO: 735623 - RNA, 19 nt, Artificial Sequence
  Description of Artificial Sequence: Synthetic oligonucleotide
  Antisense strand to SEQ ID NO: 735622
uaucgcaguucucaagucc

SEQ ID NO: 735624 - RNA, 19 nt, Artificial Sequence
  Description of Artificial Sequence: Synthetic oligonucleotide
  Sense strand starting at position 2624 of SEQ ID NO: 586671
acuugagaacugcgauaga

SEQ ID NO: 735625 - RNA, 19 nt, Artificial Sequence
  Description of Artificial Sequence: Synthetic oligonucleotide
  Antisense strand to SEQ ID NO: 735624
ucuaucgcaguucucaagu

SEQ ID NO: 735626 - RNA, 19 nt, Artificial Sequence
  Description of Artificial Sequence: Synthetic oligonucleotide
  Sense strand starting at position 2627 of SEQ ID NO: 586671
ugagaacugcgauagauuc

SEQ ID NO: 735627 - RNA, 19 nt, Artificial Sequence
  Description of Artificial Sequence: Synthetic oligonucleotide
  Antisense strand to SEQ ID NO: 735626
gaaucuaucgcaguucuca

SEQ ID NO: 735628 - RNA, 19 nt, Artificial Sequence
  Description of Artificial Sequence: Synthetic oligonucleotide
  Sense strand starting at position 2722 of SEQ ID NO: 586671
uacugacugcgucagaauc

SEQ ID NO: 735629 - RNA, 19 nt, Artificial Sequence
  Description of Artificial Sequence: Synthetic oligonucleotide
  Antisense strand to SEQ ID NO: 735628
gauucugacgcagucagua

SEQ ID NO: 735630 - RNA, 19 nt, Artificial Sequence
  Description of Artificial Sequence: Synthetic oligonucleotide
  Sense strand starting at position 2773 of SEQ ID NO: 586671
cugcuaacugcugaaagga

SEQ ID NO: 735631 - RNA, 19 nt, Artificial Sequence
  Description of Artificial Sequence: Synthetic oligonucleotide
  Antisense strand to SEQ ID NO: 735630
uccuuucagcaguuagcag

SEQ ID NO: 735632 - RNA, 19 nt, Artificial Sequence
  Description of Artificial Sequence: Synthetic oligonucleotide
  Sense strand starting at position 3007 of SEQ ID NO: 586671
aguuuccucuguccaauuu

SEQ ID NO: 735633 - RNA, 19 nt, Artificial Sequence
  Description of Artificial Sequence: Synthetic oligonucleotide
  Antisense strand to SEQ ID NO: 735632
aaauuggacagaggaaacu

SEQ ID NO: 735634 - RNA, 19 nt, Artificial Sequence
  Description of Artificial Sequence: Synthetic oligonucleotide
  Sense strand starting at position 29 of SEQ ID NO: 586672
auacauaagucaggugacu

SEQ ID NO: 735635 - RNA, 19 nt, Artificial Sequence
  Description of Artificial Sequence: Synthetic oligonucleotide
  Antisense strand to SEQ ID NO: 735634
agucaccugacuuauguau

SEQ ID NO: 735636 - RNA, 19 nt, Artificial Sequence
  Description of Artificial Sequence: Synthetic oligonucleotide
  Sense strand starting at position 117 of SEQ ID NO: 586672
aaaguaugccucugcugua

SEQ ID NO: 735637 - RNA, 19 nt, Artificial Sequence
  Description of Artificial Sequence: Synthetic oligonucleotide
  Antisense strand to SEQ ID NO: 735636
uacagcagaggcauacuuu

SEQ ID NO: 735638 - RNA, 19 nt, Artificial Sequence
  Description of Artificial Sequence: Synthetic oligonucleotide
  Sense strand starting at position 126 of SEQ ID NO: 586672
cucugcuguaguuguagau

SEQ ID NO: 735639 - RNA, 19 nt, Artificial Sequence
  Description of Artificial Sequence: Synthetic oligonucleotide
  Antisense strand to SEQ ID NO: 735638
aucuacaacuacagcagag

SEQ ID NO: 735640 - RNA, 19 nt, Artificial Sequence
  Description of Artificial Sequence: Synthetic oligonucleotide
  Sense strand starting at position 136 of SEQ ID NO: 586672
guuguagauuaccauguuu

SEQ ID NO: 735641 - RNA, 19 nt, Artificial Sequence
  Description of Artificial Sequence: Synthetic oligonucleotide
  Antisense strand to SEQ ID NO: 735640
aaacaugguaaucuacaac

SEQ ID NO: 735642 - RNA, 19 nt, Artificial Sequence
  Description of Artificial Sequence: Synthetic oligonucleotide
  Sense strand starting at position 144 of SEQ ID NO: 586672
uuaccauguuugcacgauu

SEQ ID NO: 735643 - RNA, 19 nt, Artificial Sequence
  Description of Artificial Sequence: Synthetic oligonucleotide
  Antisense strand to SEQ ID NO: 735642
aaucgugcaaacaugguaa

SEQ ID NO: 735644 - RNA, 19 nt, Artificial Sequence
  Description of Artificial Sequence: Synthetic oligonucleotide
  Sense strand starting at position 147 of SEQ ID NO: 586672
ccauguuugcacgauuauc

SEQ ID NO: 735645 - RNA, 19 nt, Artificial Sequence
  Description of Artificial Sequence: Synthetic oligonucleotide
  Antisense strand to SEQ ID NO: 735644
gauaaucgugcaaacaugg

SEQ ID NO: 735646 - RNA, 19 nt, Artificial Sequence
  Description of Artificial Sequence: Synthetic oligonucleotide
  Sense strand starting at position 155 of SEQ ID NO: 586672
gcacgauuaucauugucaa

SEQ ID NO: 735647 - RNA, 19 nt, Artificial Sequence
  Description of Artificial Sequence: Synthetic oligonucleotide
  Antisense strand to SEQ ID NO: 735646
uugacaaugauaaucgugc

SEQ ID NO: 735648 - RNA, 19 nt, Artificial Sequence
  Description of Artificial Sequence: Synthetic oligonucleotide
  Sense strand starting at position 1440 of SEQ ID NO: 586672
ucccauuaaguugguauca

SEQ ID NO: 735649 - RNA, 19 nt, Artificial Sequence
  Description of Artificial Sequence: Synthetic oligonucleotide
  Antisense strand to SEQ ID NO: 735648
ugauaccaacuuaauggga

SEQ ID NO: 735650 - RNA, 19 nt, Artificial Sequence
  Description of Artificial Sequence: Synthetic oligonucleotide
  Sense strand starting at position 2076 of SEQ ID NO: 586672
cggucuaguucuguugcca

SEQ ID NO: 735651 - RNA, 19 nt, Artificial Sequence
  Description of Artificial Sequence: Synthetic oligonucleotide
  Antisense strand to SEQ ID NO: 735650
uggcaacagaacuagaccg

SEQ ID NO: 735652 - RNA, 19 nt, Artificial Sequence
  Description of Artificial Sequence: Synthetic oligonucleotide
  Sense strand starting at position 2131 of SEQ ID NO: 586672
cagucuuggucuccugaag

SEQ ID NO: 735653 - RNA, 19 nt, Artificial Sequence
  Description of Artificial Sequence: Synthetic oligonucleotide
  Antisense strand to SEQ ID NO: 735652
cuucaggagaccaagacug

SEQ ID NO: 735654 - RNA, 19 nt, Artificial Sequence
  Description of Artificial Sequence: Synthetic oligonucleotide
  Sense strand starting at position 3089 of SEQ ID NO: 586672
ggagcuugagcuuaacaag

SEQ ID NO: 735655 - RNA, 19 nt, Artificial Sequence
  Description of Artificial Sequence: Synthetic oligonucleotide
  Antisense strand to SEQ ID NO: 735654
cuuguuaagcucaagcucc

SEQ ID NO: 735656 - RNA, 19 nt, Artificial Sequence
  Description of Artificial Sequence: Synthetic oligonucleotide
  Sense strand starting at position 3092 of SEQ ID NO: 586672
gcuugagcuuaacaagaca

SEQ ID NO: 735657 - RNA, 19 nt, Artificial Sequence
  Description of Artificial Sequence: Synthetic oligonucleotide
  Antisense strand to SEQ ID NO: 735656
ugucuuguuaagcucaagc

SEQ ID NO: 735658 - RNA, 19 nt, Artificial Sequence
  Description of Artificial Sequence: Synthetic oligonucleotide
  Sense strand starting at position 3157 of SEQ ID NO: 586672
ccggcuguuguuugaaacu

SEQ ID NO: 735659 - RNA, 19 nt, Artificial Sequence
  Description of Artificial Sequence: Synthetic oligonucleotide
  Antisense strand to SEQ ID NO: 735658
aguuucaaacaacagccgg

SEQ ID NO: 735660 - RNA, 19 nt, Artificial Sequence
  Description of Artificial Sequence: Synthetic oligonucleotide
  Sense strand starting at position 3970 of SEQ ID NO: 586672
caugcuagaucggaugaca

SEQ ID NO: 735661 - RNA, 19 nt, Artificial Sequence
  Description of Artificial Sequence: Synthetic oligonucleotide
  Antisense strand to SEQ ID NO: 735660
ugucauccgaucuagcaug

SEQ ID NO: 735662 - RNA, 19 nt, Artificial Sequence
  Description of Artificial Sequence: Synthetic oligonucleotide
  Sense strand starting at position 17 of SEQ ID NO: 586673
gcuuauggcuccuuaagca

SEQ ID NO: 735663 - RNA, 19 nt, Artificial Sequence
  Description of Artificial Sequence: Synthetic oligonucleotide
  Antisense strand to SEQ ID NO: 735662
ugcuuaaggagccauaagc

SEQ ID NO: 735664 - RNA, 19 nt, Artificial Sequence
  Description of Artificial Sequence: Synthetic oligonucleotide
  Sense strand starting at position 111 of SEQ ID NO: 586673
ucaucauccugguagaacu

SEQ ID NO: 735665 - RNA, 19 nt, Artificial Sequence
  Description of Artificial Sequence: Synthetic oligonucleotide
  Antisense strand to SEQ ID NO: 735664
aguucuaccaggaugauga

SEQ ID NO: 735666 - RNA, 19 nt, Artificial Sequence
  Description of Artificial Sequence: Synthetic oligonucleotide
  Sense strand starting at position 122 of SEQ ID NO: 586673
guagaacucuuguaagaac

SEQ ID NO: 735667 - RNA, 19 nt, Artificial Sequence
  Description of Artificial Sequence: Synthetic oligonucleotide
  Antisense strand to SEQ ID NO: 735666
guucuuacaagaguucuac

SEQ ID NO: 735668 - RNA, 19 nt, Artificial Sequence
  Description of Artificial Sequence: Synthetic oligonucleotide
  Sense strand starting at position 305 of SEQ ID NO: 586673
ucacaagucuguuucuaac

SEQ ID NO: 735669 - RNA, 19 nt, Artificial Sequence
  Description of Artificial Sequence: Synthetic oligonucleotide
  Antisense strand to SEQ ID NO: 735668
guuagaaacagacuuguga

SEQ ID NO: 735670 - RNA, 19 nt, Artificial Sequence
  Description of Artificial Sequence: Synthetic oligonucleotide
  Sense strand starting at position 311 of SEQ ID NO: 586673
gucuguuucuaaccagcga

SEQ ID NO: 735671 - RNA, 19 nt, Artificial Sequence
  Description of Artificial Sequence: Synthetic oligonucleotide
  Antisense strand to SEQ ID NO: 735670
ucgcugguuagaaacagac

SEQ ID NO: 735672 - RNA, 19 nt, Artificial Sequence
  Description of Artificial Sequence: Synthetic oligonucleotide
  Sense strand starting at position 315 of SEQ ID NO: 586673
guuucuaaccagcgaagaa

SEQ ID NO: 735673 - RNA, 19 nt, Artificial Sequence
  Description of Artificial Sequence: Synthetic oligonucleotide
  Antisense strand to SEQ ID NO: 735672
uucuucgcugguuagaaac

SEQ ID NO: 735674 - RNA, 19 nt, Artificial Sequence
  Description of Artificial Sequence: Synthetic oligonucleotide
  Sense strand starting at position 389 of SEQ ID NO: 586673
gucccuacuuuaguuuaaa

SEQ ID NO: 735675 - RNA, 19 nt, Artificial Sequence
  Description of Artificial Sequence: Synthetic oligonucleotide
  Antisense strand to SEQ ID NO: 735674
uuuaaacuaaaguagggac

SEQ ID NO: 735676 - RNA, 19 nt, Artificial Sequence
  Description of Artificial Sequence: Synthetic oligonucleotide
  Sense strand starting at position 445 of SEQ ID NO: 586673
gucucaagguucucagcuu

SEQ ID NO: 735677 - RNA, 19 nt, Artificial Sequence
  Description of Artificial Sequence: Synthetic oligonucleotide
  Antisense strand to SEQ ID NO: 735676
aagcugagaaccuugagac

SEQ ID NO: 735678 - RNA, 19 nt, Artificial Sequence
  Description of Artificial Sequence: Synthetic oligonucleotide
  Sense strand starting at position 572 of SEQ ID NO: 586673
aucgcuuccgcucuuagua

SEQ ID NO: 735679 - RNA, 19 nt, Artificial Sequence
  Description of Artificial Sequence: Synthetic oligonucleotide
  Antisense strand to SEQ ID NO: 735678
uacuaagagcggaagcgau

SEQ ID NO: 735680 - RNA, 19 nt, Artificial Sequence
  Description of Artificial Sequence: Synthetic oligonucleotide
  Sense strand starting at position 573 of SEQ ID NO: 586673
ucgcuuccgcucuuaguaa

SEQ ID NO: 735681 - RNA, 19 nt, Artificial Sequence
  Description of Artificial Sequence: Synthetic oligonucleotide
  Antisense strand to SEQ ID NO: 735680
uuacuaagagcggaagcga

SEQ ID NO: 735682 - RNA, 19 nt, Artificial Sequence
  Description of Artificial Sequence: Synthetic oligonucleotide
  Sense strand starting at position 574 of SEQ ID NO: 586673
cgcuuccgcucuuaguaaa

SEQ ID NO: 735683 - RNA, 19 nt, Artificial Sequence
  Description of Artificial Sequence: Synthetic oligonucleotide
  Antisense strand to SEQ ID NO: 735682
uuuacuaagagcggaagcg

SEQ ID NO: 735684 - RNA, 19 nt, Artificial Sequence
  Description of Artificial Sequence: Synthetic oligonucleotide
  Sense strand starting at position 577 of SEQ ID NO: 586673
uuccgcucuuaguaaacaa

SEQ ID NO: 735685 - RNA, 19 nt, Artificial Sequence
  Description of Artificial Sequence: Synthetic oligonucleotide
  Antisense strand to SEQ ID NO: 735684
uuguuuacuaagagcggaa

SEQ ID NO: 735686 - RNA, 19 nt, Artificial Sequence
  Description of Artificial Sequence: Synthetic oligonucleotide
  Sense strand starting at position 1007 of SEQ ID NO: 586673
uuaagacucuccugagguc

SEQ ID NO: 735687 - RNA, 19 nt, Artificial Sequence
  Description of Artificial Sequence: Synthetic oligonucleotide
  Antisense strand to SEQ ID NO: 735686
gaccucaggagagucuuaa

SEQ ID NO: 735688 - RNA, 19 nt, Artificial Sequence
  Description of Artificial Sequence: Synthetic oligonucleotide
  Sense strand starting at position 1101 of SEQ ID NO: 586673
accuuuaccaggugggauu

SEQ ID NO: 735689 - RNA, 19 nt, Artificial Sequence
  Description of Artificial Sequence: Synthetic oligonucleotide
  Antisense strand to SEQ ID NO: 735688
aaucccaccugguaaaggu

SEQ ID NO: 735690 - RNA, 19 nt, Artificial Sequence
  Description of Artificial Sequence: Synthetic oligonucleotide
  Sense strand starting at position 1448 of SEQ ID NO: 586673
aaccgaaauuggcgcgaaa

SEQ ID NO: 735691 - RNA, 19 nt, Artificial Sequence
  Description of Artificial Sequence: Synthetic oligonucleotide
  Antisense strand to SEQ ID NO: 735690
uuucgcgccaauuucgguu

SEQ ID NO: 735692 - RNA, 19 nt, Artificial Sequence
  Description of Artificial Sequence: Synthetic oligonucleotide
  Sense strand starting at position 1451 of SEQ ID NO: 586673
cgaaauuggcgcgaaacgu

SEQ ID NO: 735693 - RNA, 19 nt, Artificial Sequence
  Description of Artificial Sequence: Synthetic oligonucleotide
  Antisense strand to SEQ ID NO: 735692
acguuucgcgccaauuucg

SEQ ID NO: 735694 - RNA, 19 nt, Artificial Sequence
  Description of Artificial Sequence: Synthetic oligonucleotide
  Sense strand starting at position 2129 of SEQ ID NO: 586673
ggugcauuccgccaaauaa

SEQ ID NO: 735695 - RNA, 19 nt, Artificial Sequence
  Description of Artificial Sequence: Synthetic oligonucleotide
  Antisense strand to SEQ ID NO: 735694
uuauuuggcggaaugcacc

SEQ ID NO: 735696 - RNA, 19 nt, Artificial Sequence
  Description of Artificial Sequence: Synthetic oligonucleotide
  Sense strand starting at position 2525 of SEQ ID NO: 586673
gugacuccauccucagcaa

SEQ ID NO: 735697 - RNA, 19 nt, Artificial Sequence
  Description of Artificial Sequence: Synthetic oligonucleotide
  Antisense strand to SEQ ID NO: 735696
uugcugaggauggagucac

SEQ ID NO: 735698 - RNA, 19 nt, Artificial Sequence
  Description of Artificial Sequence: Synthetic oligonucleotide
  Sense strand starting at position 2594 of SEQ ID NO: 586673
ccaggcauaugucauguau

SEQ ID NO: 735699 - RNA, 19 nt, Artificial Sequence
  Description of Artificial Sequence: Synthetic oligonucleotide
  Antisense strand to SEQ ID NO: 735698
auacaugacauaugccugg

SEQ ID NO: 735700 - RNA, 19 nt, Artificial Sequence
  Description of Artificial Sequence: Synthetic oligonucleotide
  Sense strand starting at position 2596 of SEQ ID NO: 586673
aggcauaugucauguaucu

SEQ ID NO: 735701 - RNA, 19 nt, Artificial Sequence
  Description of Artificial Sequence: Synthetic oligonucleotide
  Antisense strand to SEQ ID NO: 735700
agauacaugacauaugccu

SEQ ID NO: 735702 - RNA, 19 nt, Artificial Sequence
  Description of Artificial Sequence: Synthetic oligonucleotide
  Sense strand starting at position 2603 of SEQ ID NO: 586673
ugucauguaucucccaaag

SEQ ID NO: 735703 - RNA, 19 nt, Artificial Sequence
  Description of Artificial Sequence: Synthetic oligonucleotide
  Antisense strand to SEQ ID NO: 735702
cuuugggagauacaugaca

SEQ ID NO: 735704 - RNA, 19 nt, Artificial Sequence
  Description of Artificial Sequence: Synthetic oligonucleotide
  Sense strand starting at position 2626 of SEQ ID NO: 586673
ugcuguugugacuaguaag

SEQ ID NO: 735705 - RNA, 19 nt, Artificial Sequence
  Description of Artificial Sequence: Synthetic oligonucleotide
  Antisense strand to SEQ ID NO: 735704
cuuacuagucacaacagca

SEQ ID NO: 735706 - RNA, 19 nt, Artificial Sequence
  Description of Artificial Sequence: Synthetic oligonucleotide
  Sense strand starting at position 2908 of SEQ ID NO: 586673
ccaaguguuuccucagguu

SEQ ID NO: 735707 - RNA, 19 nt, Artificial Sequence
  Description of Artificial Sequence: Synthetic oligonucleotide
  Antisense strand to SEQ ID NO: 735706
aaccugaggaaacacuugg

SEQ ID NO: 735708 - RNA, 19 nt, Artificial Sequence
  Description of Artificial Sequence: Synthetic oligonucleotide
  Sense strand starting at position 3008 of SEQ ID NO: 586673
ggaugaagugcuggugaga

SEQ ID NO: 735709 - RNA, 19 nt, Artificial Sequence
  Description of Artificial Sequence: Synthetic oligonucleotide
  Antisense strand to SEQ ID NO: 735708
ucucaccagcacuucaucc

SEQ ID NO: 735710 - RNA, 19 nt, Artificial Sequence
  Description of Artificial Sequence: Synthetic oligonucleotide
  Sense strand starting at position 3011 of SEQ ID NO: 586673
ugaagugcuggugagaauc

SEQ ID NO: 735711 - RNA, 19 nt, Artificial Sequence
  Description of Artificial Sequence: Synthetic oligonucleotide
  Antisense strand to SEQ ID NO: 735710
gauucucaccagcacuuca

SEQ ID NO: 735712 - RNA, 19 nt, Artificial Sequence
  Description of Artificial Sequence: Synthetic oligonucleotide
  Sense strand starting at position 3013 of SEQ ID NO: 586673
aagugcuggugagaaucaa

SEQ ID NO: 735713 - RNA, 19 nt, Artificial Sequence
  Description of Artificial Sequence: Synthetic oligonucleotide
  Antisense strand to SEQ ID NO: 735712
uugauucucaccagcacuu

SEQ ID NO: 735714 - RNA, 19 nt, Artificial Sequence
  Description of Artificial Sequence: Synthetic oligonucleotide
  Sense strand starting at position 3259 of SEQ ID NO: 586673
gugccuagcuaauuguuua

SEQ ID NO: 735715 - RNA, 19 nt, Artificial Sequence
  Description of Artificial Sequence: Synthetic oligonucleotide
  Antisense strand to SEQ ID NO: 735714
uaaacaauuagcuaggcac

SEQ ID NO: 735716 - RNA, 19 nt, Artificial Sequence
  Description of Artificial Sequence: Synthetic oligonucleotide
  Sense strand starting at position 3290 of SEQ ID NO: 586673
acuagagucucacuguguu

SEQ ID NO: 735717 - RNA, 19 nt, Artificial Sequence
  Description of Artificial Sequence: Synthetic oligonucleotide
  Antisense strand to SEQ ID NO: 735716
aacacagugagacucuagu

SEQ ID NO: 735718 - RNA, 19 nt, Artificial Sequence
  Description of Artificial Sequence: Synthetic oligonucleotide
  Sense strand starting at position 3361 of SEQ ID NO: 586673
cuuccaaagcgcugagagu

SEQ ID NO: 735719 - RNA, 19 nt, Artificial Sequence
  Description of Artificial Sequence: Synthetic oligonucleotide
  Antisense strand to SEQ ID NO: 735718
acucucagcgcuuuggaag

SEQ ID NO: 735720 - RNA, 19 nt, Artificial Sequence
  Description of Artificial Sequence: Synthetic oligonucleotide
  Sense strand starting at position 3362 of SEQ ID NO: 586673
uuccaaagcgcugagagua

SEQ ID NO: 735721 - RNA, 19 nt, Artificial Sequence
  Description of Artificial Sequence: Synthetic oligonucleotide
  Antisense strand to SEQ ID NO: 735720
uacucucagcgcuuuggaa

SEQ ID NO: 735722 - RNA, 19 nt, Artificial Sequence
  Description of Artificial Sequence: Synthetic oligonucleotide
  Sense strand starting at position 3465 of SEQ ID NO: 586673
cuaggacuauggcuaugua

SEQ ID NO: 735723 - RNA, 19 nt, Artificial Sequence
  Description of Artificial Sequence: Synthetic oligonucleotide
  Antisense strand to SEQ ID NO: 735722
uacauagccauaguccuag

SEQ ID NO: 735724 - RNA, 19 nt, Artificial Sequence
  Description of Artificial Sequence: Synthetic oligonucleotide
  Sense strand starting at position 3568 of SEQ ID NO: 586673
agcguuggcuuggucagua

SEQ ID NO: 735725 - RNA, 19 nt, Artificial Sequence
  Description of Artificial Sequence: Synthetic oligonucleotide
  Antisense strand to SEQ ID NO: 735724
uacugaccaagccaacgcu

SEQ ID NO: 735726 - RNA, 19 nt, Artificial Sequence
  Description of Artificial Sequence: Synthetic oligonucleotide
  Sense strand starting at position 3630 of SEQ ID NO: 586673
gguugucagaccugaugau

SEQ ID NO: 735727 - RNA, 19 nt, Artificial Sequence
  Description of Artificial Sequence: Synthetic oligonucleotide
  Antisense strand to SEQ ID NO: 735726
aucaucaggucugacaacc

SEQ ID NO: 735728 - RNA, 19 nt, Artificial Sequence
  Description of Artificial Sequence: Synthetic oligonucleotide
  Sense strand starting at position 3631 of SEQ ID NO: 586673
guugucagaccugaugauu

SEQ ID NO: 735729 - RNA, 19 nt, Artificial Sequence
  Description of Artificial Sequence: Synthetic oligonucleotide
  Antisense strand to SEQ ID NO: 735728
aaucaucaggucugacaac

SEQ ID NO: 735730 - RNA, 19 nt, Artificial Sequence
  Description of Artificial Sequence: Synthetic oligonucleotide
  Sense strand starting at position 3640 of SEQ ID NO: 586673
ccugaugauugauugcuuu

SEQ ID NO: 735731 - RNA, 19 nt, Artificial Sequence
  Description of Artificial Sequence: Synthetic oligonucleotide
  Antisense strand to SEQ ID NO: 735730
aaagcaaucaaucaucagg

SEQ ID NO: 735732 - RNA, 19 nt, Artificial Sequence
  Description of Artificial Sequence: Synthetic oligonucleotide
  Sense strand starting at position 3643 of SEQ ID NO: 586673
gaugauugauugcuuugga

SEQ ID NO: 735733 - RNA, 19 nt, Artificial Sequence
  Description of Artificial Sequence: Synthetic oligonucleotide
  Antisense strand to SEQ ID NO: 735732
uccaaagcaaucaaucauc

SEQ ID NO: 735734 - RNA, 19 nt, Artificial Sequence
  Description of Artificial Sequence: Synthetic oligonucleotide
  Sense strand starting at position 3644 of SEQ ID NO: 586673
augauugauugcuuuggau

SEQ ID NO: 735735 - RNA, 19 nt, Artificial Sequence
  Description of Artificial Sequence: Synthetic oligonucleotide
  Antisense strand to SEQ ID NO: 735734
auccaaagcaaucaaucau

SEQ ID NO: 735736 - RNA, 19 nt, Artificial Sequence
  Description of Artificial Sequence: Synthetic oligonucleotide
  Sense strand starting at position 3650 of SEQ ID NO: 586673
gauugcuuuggaugcuuua

SEQ ID NO: 735737 - RNA, 19 nt, Artificial Sequence
  Description of Artificial Sequence: Synthetic oligonucleotide
  Antisense strand to SEQ ID NO: 735736
uaaagcauccaaagcaauc

SEQ ID NO: 735738 - RNA, 19 nt, Artificial Sequence
  Description of Artificial Sequence: Synthetic oligonucleotide
  Sense strand starting at position 3801 of SEQ ID NO: 586673
ccgggaguccaagaucuua

SEQ ID NO: 735739 - RNA, 19 nt, Artificial Sequence
  Description of Artificial Sequence: Synthetic oligonucleotide
  Antisense strand to SEQ ID NO: 735738
uaagaucuuggacucccgg

SEQ ID NO: 735740 - RNA, 19 nt, Artificial Sequence
  Description of Artificial Sequence: Synthetic oligonucleotide
  Sense strand starting at position 24 of SEQ ID NO: 586674
gcagacaucuuguaagugu

SEQ ID NO: 735741 - RNA, 19 nt, Artificial Sequence
  Description of Artificial Sequence: Synthetic oligonucleotide
  Antisense strand to SEQ ID NO: 735740
acacuuacaagaugucugc

SEQ ID NO: 735742 - RNA, 19 nt, Artificial Sequence
  Description of Artificial Sequence: Synthetic oligonucleotide
  Sense strand starting at position 27 of SEQ ID NO: 586674
gacaucuuguaagugucaa

SEQ ID NO: 735743 - RNA, 19 nt, Artificial Sequence
  Description of Artificial Sequence: Synthetic oligonucleotide
  Antisense strand to SEQ ID NO: 735742
uugacacuuacaagauguc

SEQ ID NO: 735744 - RNA, 19 nt, Artificial Sequence
  Description of Artificial Sequence: Synthetic oligonucleotide
  Sense strand starting at position 31 of SEQ ID NO: 586674
ucuuguaagugucaagaac

SEQ ID NO: 735745 - RNA, 19 nt, Artificial Sequence
  Description of Artificial Sequence: Synthetic oligonucleotide
  Antisense strand to SEQ ID NO: 735744
guucuugacacuuacaaga

SEQ ID NO: 735746 - RNA, 19 nt, Artificial Sequence
  Description of Artificial Sequence: Synthetic oligonucleotide
  Sense strand starting at position 55 of SEQ ID NO: 586674
gaacuuacucugggucaac

SEQ ID NO: 735747 - RNA, 19 nt, Artificial Sequence
  Description of Artificial Sequence: Synthetic oligonucleotide
  Antisense strand to SEQ ID NO: 735746
guugacccagaguaaguuc

SEQ ID NO: 735748 - RNA, 19 nt, Artificial Sequence
  Description of Artificial Sequence: Synthetic oligonucleotide
  Sense strand starting at position 266 of SEQ ID NO: 586674
acuggucacaaguguaagu

SEQ ID NO: 735749 - RNA, 19 nt, Artificial Sequence
  Description of Artificial Sequence: Synthetic oligonucleotide
  Antisense strand to SEQ ID NO: 735748
acuuacacuugugaccagu

SEQ ID NO: 735750 - RNA, 19 nt, Artificial Sequence
  Description of Artificial Sequence: Synthetic oligonucleotide
  Sense strand starting at position 470 of SEQ ID NO: 586674
cuacaucuuucccgacaga

SEQ ID NO: 735751 - RNA, 19 nt, Artificial Sequence
  Description of Artificial Sequence: Synthetic oligonucleotide
  Antisense strand to SEQ ID NO: 735750
ucugucgggaaagauguag

SEQ ID NO: 735752 - RNA, 19 nt, Artificial Sequence
  Description of Artificial Sequence: Synthetic oligonucleotide
  Sense strand starting at position 473 of SEQ ID NO: 586674
caucuuucccgacagagac

SEQ ID NO: 735753 - RNA, 19 nt, Artificial Sequence
  Description of Artificial Sequence: Synthetic oligonucleotide
  Antisense strand to SEQ ID NO: 735752
gucucugucgggaaagaug

SEQ ID NO: 735754 - RNA, 19 nt, Artificial Sequence
  Description of Artificial Sequence: Synthetic oligonucleotide
  Sense strand starting at position 495 of SEQ ID NO: 586674
ucacaaucugcgcaugagu

SEQ ID NO: 735755 - RNA, 19 nt, Artificial Sequence
  Description of Artificial Sequence: Synthetic oligonucleotide
  Antisense strand to SEQ ID NO: 735754
acucaugcgcagauuguga

SEQ ID NO: 735756 - RNA, 19 nt, Artificial Sequence
  Description of Artificial Sequence: Synthetic oligonucleotide
  Sense strand starting at position 506 of SEQ ID NO: 586674
gcaugaguucagcagggua

SEQ ID NO: 735757 - RNA, 19 nt, Artificial Sequence
  Description of Artificial Sequence: Synthetic oligonucleotide
  Antisense strand to SEQ ID NO: 735756
uacccugcugaacucaugc

SEQ ID NO: 735758 - RNA, 19 nt, Artificial Sequence
  Description of Artificial Sequence: Synthetic oligonucleotide
  Sense strand starting at position 574 of SEQ ID NO: 586674
aucauuagccgaugcucaa

SEQ ID NO: 735759 - RNA, 19 nt, Artificial Sequence
  Description of Artificial Sequence: Synthetic oligonucleotide
  Antisense strand to SEQ ID NO: 735758
uugagcaucggcuaaugau

SEQ ID NO: 735760 - RNA, 19 nt, Artificial Sequence
  Description of Artificial Sequence: Synthetic oligonucleotide
  Sense strand starting at position 581 of SEQ ID NO: 586674
gccgaugcucaauguaaac

SEQ ID NO: 735761 - RNA, 19 nt, Artificial Sequence
  Description of Artificial Sequence: Synthetic oligonucleotide
  Antisense strand to SEQ ID NO: 735760
guuuacauugagcaucggc

SEQ ID NO: 735762 - RNA, 19 nt, Artificial Sequence
  Description of Artificial Sequence: Synthetic oligonucleotide
  Sense strand starting at position 591 of SEQ ID NO: 586674
aauguaaacguccaggaca

SEQ ID NO: 735763 - RNA, 19 nt, Artificial Sequence
  Description of Artificial Sequence: Synthetic oligonucleotide
  Antisense strand to SEQ ID NO: 735762
uguccuggacguuuacauu

SEQ ID NO: 735764 - RNA, 19 nt, Artificial Sequence
  Description of Artificial Sequence: Synthetic oligonucleotide
  Sense strand starting at position 712 of SEQ ID NO: 586674
cuuucugccugcucagaaa

SEQ ID NO: 735765 - RNA, 19 nt, Artificial Sequence
  Description of Artificial Sequence: Synthetic oligonucleotide
  Antisense strand to SEQ ID NO: 735764
uuucugagcaggcagaaag

SEQ ID NO: 735766 - RNA, 19 nt, Artificial Sequence
  Description of Artificial Sequence: Synthetic oligonucleotide
  Sense strand starting at position 782 of SEQ ID NO: 586674
guuugccauuguucucuaa

SEQ ID NO: 735767 - RNA, 19 nt, Artificial Sequence
  Description of Artificial Sequence: Synthetic oligonucleotide
  Antisense strand to SEQ ID NO: 735766
uuagagaacaauggcaaac

SEQ ID NO: 735768 - RNA, 19 nt, Artificial Sequence
  Description of Artificial Sequence: Synthetic oligonucleotide
  Sense strand starting at position 850 of SEQ ID NO: 586674
cagcaaagagcuucgcgua

SEQ ID NO: 735769 - RNA, 19 nt, Artificial Sequence
  Description of Artificial Sequence: Synthetic oligonucleotide
  Antisense strand to SEQ ID NO: 735768
uacgcgaagcucuuugcug

SEQ ID NO: 735770 - RNA, 19 nt, Artificial Sequence
  Description of Artificial Sequence: Synthetic oligonucleotide
  Sense strand starting at position 873 of SEQ ID NO: 586674
cuggcauucucacaaauug

SEQ ID NO: 735771 - RNA, 19 nt, Artificial Sequence
  Description of Artificial Sequence: Synthetic oligonucleotide
  Antisense strand to SEQ ID NO: 735770
caauuugugagaaugccag

SEQ ID NO: 735772 - RNA, 19 nt, Artificial Sequence
  Description of Artificial Sequence: Synthetic oligonucleotide
  Sense strand starting at position 948 of SEQ ID NO: 586674
accuguucccgaugagcca

SEQ ID NO: 735773 - RNA, 19 nt, Artificial Sequence
  Description of Artificial Sequence: Synthetic oligonucleotide
  Antisense strand to SEQ ID NO: 735772
uggcucaucgggaacaggu

SEQ ID NO: 735774 - RNA, 19 nt, Artificial Sequence
  Description of Artificial Sequence: Synthetic oligonucleotide
  Sense strand starting at position 1044 of SEQ ID NO: 586674
augcaucacugagaacuca

SEQ ID NO: 735775 - RNA, 19 nt, Artificial Sequence
  Description of Artificial Sequence: Synthetic oligonucleotide
  Antisense strand to SEQ ID NO: 735774
ugaguucucagugaugcau

SEQ ID NO: 735776 - RNA, 19 nt, Artificial Sequence
  Description of Artificial Sequence: Synthetic oligonucleotide
  Sense strand starting at position 1137 of SEQ ID NO: 586674
cucuaauuguuaugucuuu

SEQ ID NO: 735777 - RNA, 19 nt, Artificial Sequence
  Description of Artificial Sequence: Synthetic oligonucleotide
  Antisense strand to SEQ ID NO: 735776
aaagacauaacaauuagag

SEQ ID NO: 735778 - RNA, 19 nt, Artificial Sequence
  Description of Artificial Sequence: Synthetic oligonucleotide
  Sense strand starting at position 1177 of SEQ ID NO: 586674
gcuuauggcuccuuaagca

SEQ ID NO: 735779 - RNA, 19 nt, Artificial Sequence
  Description of Artificial Sequence: Synthetic oligonucleotide
  Antisense strand to SEQ ID NO: 735778
ugcuuaaggagccauaagc

SEQ ID NO: 735780 - RNA, 19 nt, Artificial Sequence
  Description of Artificial Sequence: Synthetic oligonucleotide
  Sense strand starting at position 1271 of SEQ ID NO: 586674
ucaucauccugguagaacu

SEQ ID NO: 735781 - RNA, 19 nt, Artificial Sequence
  Description of Artificial Sequence: Synthetic oligonucleotide
  Antisense strand to SEQ ID NO: 735780
aguucuaccaggaugauga

SEQ ID NO: 735782 - RNA, 19 nt, Artificial Sequence
  Description of Artificial Sequence: Synthetic oligonucleotide
  Sense strand starting at position 1282 of SEQ ID NO: 586674
guagaacucuuguaagaac

SEQ ID NO: 735783 - RNA, 19 nt, Artificial Sequence
  Description of Artificial Sequence: Synthetic oligonucleotide
  Antisense strand to SEQ ID NO: 735782
guucuuacaagaguucuac

SEQ ID NO: 735784 - RNA, 19 nt, Artificial Sequence
  Description of Artificial Sequence: Synthetic oligonucleotide
  Sense strand starting at position 1465 of SEQ ID NO: 586674
ucacaagucuguuucuaac

SEQ ID NO: 735785 - RNA, 19 nt, Artificial Sequence
  Description of Artificial Sequence: Synthetic oligonucleotide
  Antisense strand to SEQ ID NO: 735784
guuagaaacagacuuguga

SEQ ID NO: 735786 - RNA, 19 nt, Artificial Sequence
  Description of Artificial Sequence: Synthetic oligonucleotide
  Sense strand starting at position 1471 of SEQ ID NO: 586674
gucuguuucuaaccagcga

SEQ ID NO: 735787 - RNA, 19 nt, Artificial Sequence
  Description of Artificial Sequence: Synthetic oligonucleotide
  Antisense strand to SEQ ID NO: 735786
ucgcugguuagaaacagac

SEQ ID NO: 735788 - RNA, 19 nt, Artificial Sequence
  Description of Artificial Sequence: Synthetic oligonucleotide
  Sense strand starting at position 1475 of SEQ ID NO: 586674
guuucuaaccagcgaagaa

SEQ ID NO: 735789 - RNA, 19 nt, Artificial Sequence
  Description of Artificial Sequence: Synthetic oligonucleotide
  Antisense strand to SEQ ID NO: 735788
uucuucgcugguuagaaac

SEQ ID NO: 735790 - RNA, 19 nt, Artificial Sequence
  Description of Artificial Sequence: Synthetic oligonucleotide
  Sense strand starting at position 1549 of SEQ ID NO: 586674
gucccuacuuuaguuuaaa

SEQ ID NO: 735791 - RNA, 19 nt, Artificial Sequence
  Description of Artificial Sequence: Synthetic oligonucleotide
  Antisense strand to SEQ ID NO: 735790
uuuaaacuaaaguagggac

SEQ ID NO: 735792 - RNA, 19 nt, Artificial Sequence
  Description of Artificial Sequence: Synthetic oligonucleotide
  Sense strand starting at position 1605 of SEQ ID NO: 586674
gucucaagguucucagcuu

SEQ ID NO: 735793 - RNA, 19 nt, Artificial Sequence
  Description of Artificial Sequence: Synthetic oligonucleotide
  Antisense strand to SEQ ID NO: 735792
aagcugagaaccuugagac

SEQ ID NO: 735794 - RNA, 19 nt, Artificial Sequence
  Description of Artificial Sequence: Synthetic oligonucleotide
  Sense strand starting at position 1732 of SEQ ID NO: 586674
aucgcuuccgcucuuagua

SEQ ID NO: 735795 - RNA, 19 nt, Artificial Sequence
  Description of Artificial Sequence: Synthetic oligonucleotide
  Antisense strand to SEQ ID NO: 735794
uacuaagagcggaagcgau

SEQ ID NO: 735796 - RNA, 19 nt, Artificial Sequence
  Description of Artificial Sequence: Synthetic oligonucleotide
  Sense strand starting at position 1733 of SEQ ID NO: 586674
ucgcuuccgcucuuaguaa

SEQ ID NO: 735797 - RNA, 19 nt, Artificial Sequence
  Description of Artificial Sequence: Synthetic oligonucleotide
  Antisense strand to SEQ ID NO: 735796
uuacuaagagcggaagcga

SEQ ID NO: 735798 - RNA, 19 nt, Artificial Sequence
  Description of Artificial Sequence: Synthetic oligonucleotide
  Sense strand starting at position 1737 of SEQ ID NO: 586674
uuccgcucuuaguaaacaa

SEQ ID NO: 735799 - RNA, 19 nt, Artificial Sequence
  Description of Artificial Sequence: Synthetic oligonucleotide
  Antisense strand to SEQ ID NO: 735798
uuguuuacuaagagcggaa

SEQ ID NO: 735800 - RNA, 19 nt, Artificial Sequence
  Description of Artificial Sequence: Synthetic oligonucleotide
  Sense strand starting at position 2167 of SEQ ID NO: 586674
uuaagacucuccugagguc

SEQ ID NO: 735801 - RNA, 19 nt, Artificial Sequence
  Description of Artificial Sequence: Synthetic oligonucleotide
  Antisense strand to SEQ ID NO: 735800
gaccucaggagagucuuaa

SEQ ID NO: 735802 - RNA, 19 nt, Artificial Sequence
  Description of Artificial Sequence: Synthetic oligonucleotide
  Sense strand starting at position 2261 of SEQ ID NO: 586674
accuuuaccaggugggauu

SEQ ID NO: 735803 - RNA, 19 nt, Artificial Sequence
  Description of Artificial Sequence: Synthetic oligonucleotide
  Antisense strand to SEQ ID NO: 735802
aaucccaccugguaaaggu

SEQ ID NO: 735804 - RNA, 19 nt, Artificial Sequence
  Description of Artificial Sequence: Synthetic oligonucleotide
  Sense strand starting at position 2608 of SEQ ID NO: 586674
aaccgaaauuggcgcgaaa

SEQ ID NO: 735805 - RNA, 19 nt, Artificial Sequence
  Description of Artificial Sequence: Synthetic oligonucleotide
  Antisense strand to SEQ ID NO: 735804
uuucgcgccaauuucgguu

SEQ ID NO: 735806 - RNA, 19 nt, Artificial Sequence
  Description of Artificial Sequence: Synthetic oligonucleotide
  Sense strand starting at position 2611 of SEQ ID NO: 586674
cgaaauuggcgcgaaacgu

SEQ ID NO: 735807 - RNA, 19 nt, Artificial Sequence
  Description of Artificial Sequence: Synthetic oligonucleotide
  Antisense strand to SEQ ID NO: 735806
acguuucgcgccaauuucg

SEQ ID NO: 735808 - RNA, 19 nt, Artificial Sequence
  Description of Artificial Sequence: Synthetic oligonucleotide
  Sense strand starting at position 3289 of SEQ ID NO: 586674
ggugcauuccgccaaauaa

SEQ ID NO: 735809 - RNA, 19 nt, Artificial Sequence
  Description of Artificial Sequence: Synthetic oligonucleotide
  Antisense strand to SEQ ID NO: 735808
uuauuuggcggaaugcacc

SEQ ID NO: 735810 - RNA, 19 nt, Artificial Sequence
  Description of Artificial Sequence: Synthetic oligonucleotide
  Sense strand starting at position 3685 of SEQ ID NO: 586674
gugacuccauccucagcaa

SEQ ID NO: 735811 - RNA, 19 nt, Artificial Sequence
  Description of Artificial Sequence: Synthetic oligonucleotide
  Antisense strand to SEQ ID NO: 735810
uugcugaggauggagucac

SEQ ID NO: 735812 - RNA, 19 nt, Artificial Sequence
  Description of Artificial Sequence: Synthetic oligonucleotide
  Sense strand starting at position 3754 of SEQ ID NO: 586674
ccaggcauaugucauguau

SEQ ID NO: 735813 - RNA, 19 nt, Artificial Sequence
  Description of Artificial Sequence: Synthetic oligonucleotide
  Antisense strand to SEQ ID NO: 735812
auacaugacauaugccugg

SEQ ID NO: 735814 - RNA, 19 nt, Artificial Sequence
  Description of Artificial Sequence: Synthetic oligonucleotide
  Sense strand starting at position 3756 of SEQ ID NO: 586674
aggcauaugucauguaucu

SEQ ID NO: 735815 - RNA, 19 nt, Artificial Sequence
  Description of Artificial Sequence: Synthetic oligonucleotide
  Antisense strand to SEQ ID NO: 735814
agauacaugacauaugccu

SEQ ID NO: 735816 - RNA, 19 nt, Artificial Sequence
  Description of Artificial Sequence: Synthetic oligonucleotide
  Sense strand starting at position 3763 of SEQ ID NO: 586674
ugucauguaucucccaaag

SEQ ID NO: 735817 - RNA, 19 nt, Artificial Sequence
  Description of Artificial Sequence: Synthetic oligonucleotide
  Antisense strand to SEQ ID NO: 735816
cuuugggagauacaugaca

SEQ ID NO: 735818 - RNA, 19 nt, Artificial Sequence
  Description of Artificial Sequence: Synthetic oligonucleotide
  Sense strand starting at position 3786 of SEQ ID NO: 586674
ugcuguugugacuaguaag

SEQ ID NO: 735819 - RNA, 19 nt, Artificial Sequence
  Description of Artificial Sequence: Synthetic oligonucleotide
  Antisense strand to SEQ ID NO: 735818
cuuacuagucacaacagca

SEQ ID NO: 735820 - RNA, 19 nt, Artificial Sequence
  Description of Artificial Sequence: Synthetic oligonucleotide
  Sense strand starting at position 166 of SEQ ID NO: 586675
auuaguacaagugggaaau

SEQ ID NO: 735821 - RNA, 19 nt, Artificial Sequence
  Description of Artificial Sequence: Synthetic oligonucleotide
  Antisense strand to SEQ ID NO: 735820
auuucccacuuguacuaau

SEQ ID NO: 735822 - RNA, 19 nt, Artificial Sequence
  Description of Artificial Sequence: Synthetic oligonucleotide
  Sense strand starting at position 167 of SEQ ID NO: 586675
uuaguacaagugggaaaua

SEQ ID NO: 735823 - RNA, 19 nt, Artificial Sequence
  Description of Artificial Sequence: Synthetic oligonucleotide
  Antisense strand to SEQ ID NO: 735822
uauuucccacuuguacuaa

SEQ ID NO: 735824 - RNA, 19 nt, Artificial Sequence
  Description of Artificial Sequence: Synthetic oligonucleotide
  Sense strand starting at position 255 of SEQ ID NO: 586675
ucugauauaucagugacag

SEQ ID NO: 735825 - RNA, 19 nt, Artificial Sequence
  Description of Artificial Sequence: Synthetic oligonucleotide
  Antisense strand to SEQ ID NO: 735824
cugucacugauauaucaga

SEQ ID NO: 735826 - RNA, 19 nt, Artificial Sequence
  Description of Artificial Sequence: Synthetic oligonucleotide
  Sense strand starting at position 256 of SEQ ID NO: 586675
cugauauaucagugacaga

SEQ ID NO: 735827 - RNA, 19 nt, Artificial Sequence
  Description of Artificial Sequence: Synthetic oligonucleotide
  Antisense strand to SEQ ID NO: 735826
ucugucacugauauaucag

SEQ ID NO: 735828 - RNA, 19 nt, Artificial Sequence
  Description of Artificial Sequence: Synthetic oligonucleotide
  Sense strand starting at position 267 of SEQ ID NO: 586675
gugacagaauucuuuagcu

SEQ ID NO: 735829 - RNA, 19 nt, Artificial Sequence
  Description of Artificial Sequence: Synthetic oligonucleotide
  Antisense strand to SEQ ID NO: 735828
agcuaaagaauucugucac

SEQ ID NO: 735830 - RNA, 19 nt, Artificial Sequence
  Description of Artificial Sequence: Synthetic oligonucleotide
  Sense strand starting at position 334 of SEQ ID NO: 586675
cucugucaccaauggaaac

SEQ ID NO: 735831 - RNA, 19 nt, Artificial Sequence
  Description of Artificial Sequence: Synthetic oligonucleotide
  Antisense strand to SEQ ID NO: 735830
guuuccauuggugacagag

SEQ ID NO: 735832 - RNA, 19 nt, Artificial Sequence
  Description of Artificial Sequence: Synthetic oligonucleotide
  Sense strand starting at position 393 of SEQ ID NO: 586675
uuuagaagcuuguuaugga

SEQ ID NO: 735833 - RNA, 19 nt, Artificial Sequence
  Description of Artificial Sequence: Synthetic oligonucleotide
  Antisense strand to SEQ ID NO: 735832
uccauaacaagcuucuaaa

SEQ ID NO: 735834 - RNA, 19 nt, Artificial Sequence
  Description of Artificial Sequence: Synthetic oligonucleotide
  Sense strand starting at position 406 of SEQ ID NO: 586675
uauggaaguuucccagaca

SEQ ID NO: 735835 - RNA, 19 nt, Artificial Sequence
  Description of Artificial Sequence: Synthetic oligonucleotide
  Antisense strand to SEQ ID NO: 735834
ugucugggaaacuuccaua

SEQ ID NO: 735836 - RNA, 19 nt, Artificial Sequence
  Description of Artificial Sequence: Synthetic oligonucleotide
  Sense strand starting at position 448 of SEQ ID NO: 586675
guguuuacacuuuggaaga

SEQ ID NO: 735837 - RNA, 19 nt, Artificial Sequence
  Description of Artificial Sequence: Synthetic oligonucleotide
  Antisense strand to SEQ ID NO: 735836
ucuuccaaaguguaaacac

SEQ ID NO: 735838 - RNA, 19 nt, Artificial Sequence
  Description of Artificial Sequence: Synthetic oligonucleotide
  Sense strand starting at position 488 of SEQ ID NO: 586675
cuuggaaaguguuucuuau

SEQ ID NO: 735839 - RNA, 19 nt, Artificial Sequence
  Description of Artificial Sequence: Synthetic oligonucleotide
  Antisense strand to SEQ ID NO: 735838
auaagaaacacuuuccaag

SEQ ID NO: 735840 - RNA, 19 nt, Artificial Sequence
  Description of Artificial Sequence: Synthetic oligonucleotide
  Sense strand starting at position 729 of SEQ ID NO: 586675
gagucuuaggcccaaacau

SEQ ID NO: 735841 - RNA, 19 nt, Artificial Sequence
  Description of Artificial Sequence: Synthetic oligonucleotide
  Antisense strand to SEQ ID NO: 735840
auguuugggccuaagacuc

SEQ ID NO: 735842 - RNA, 19 nt, Artificial Sequence
  Description of Artificial Sequence: Synthetic oligonucleotide
  Sense strand starting at position 744 of SEQ ID NO: 586675
acaugcauaugcuuaagaa

SEQ ID NO: 735843 - RNA, 19 nt, Artificial Sequence
  Description of Artificial Sequence: Synthetic oligonucleotide
  Antisense strand to SEQ ID NO: 735842
uucuuaagcauaugcaugu

SEQ ID NO: 735844 - RNA, 19 nt, Artificial Sequence
  Description of Artificial Sequence: Synthetic oligonucleotide
  Sense strand starting at position 847 of SEQ ID NO: 586675
guugaucuagggcaaggau

SEQ ID NO: 735845 - RNA, 19 nt, Artificial Sequence
  Description of Artificial Sequence: Synthetic oligonucleotide
  Antisense strand to SEQ ID NO: 735844
auccuugcccuagaucaac

SEQ ID NO: 735846 - RNA, 19 nt, Artificial Sequence
  Description of Artificial Sequence: Synthetic oligonucleotide
  Sense strand starting at position 868 of SEQ ID NO: 586675
ugaagaacuugccugagua

SEQ ID NO: 735847 - RNA, 19 nt, Artificial Sequence
  Description of Artificial Sequence: Synthetic oligonucleotide
  Antisense strand to SEQ ID NO: 735846
uacucaggcaaguucuuca

SEQ ID NO: 735848 - RNA, 19 nt, Artificial Sequence
  Description of Artificial Sequence: Synthetic oligonucleotide
  Sense strand starting at position 869 of SEQ ID NO: 586675
gaagaacuugccugaguaa

SEQ ID NO: 735849 - RNA, 19 nt, Artificial Sequence
  Description of Artificial Sequence: Synthetic oligonucleotide
  Antisense strand to SEQ ID NO: 735848
uuacucaggcaaguucuuc

SEQ ID NO: 735850 - RNA, 19 nt, Artificial Sequence
  Description of Artificial Sequence: Synthetic oligonucleotide
  Sense strand starting at position 2146 of SEQ ID NO: 586675
cgacggaggcuuugggaau

SEQ ID NO: 735851 - RNA, 19 nt, Artificial Sequence
  Description of Artificial Sequence: Synthetic oligonucleotide
  Antisense strand to SEQ ID NO: 735850
auucccaaagccuccgucg

SEQ ID NO: 735852 - RNA, 19 nt, Artificial Sequence
  Description of Artificial Sequence: Synthetic oligonucleotide
  Sense strand starting at position 2220 of SEQ ID NO: 586675
ucgaacuuuccugguggga

SEQ ID NO: 735853 - RNA, 19 nt, Artificial Sequence
  Description of Artificial Sequence: Synthetic oligonucleotide
  Antisense strand to SEQ ID NO: 735852
ucccaccaggaaaguucga

SEQ ID NO: 735854 - RNA, 19 nt, Artificial Sequence
  Description of Artificial Sequence: Synthetic oligonucleotide
  Sense strand starting at position 2320 of SEQ ID NO: 586675
gucaaacaguauuccugau

SEQ ID NO: 735855 - RNA, 19 nt, Artificial Sequence
  Description of Artificial Sequence: Synthetic oligonucleotide
  Antisense strand to SEQ ID NO: 735854
aucaggaauacuguuugac

SEQ ID NO: 735856 - RNA, 19 nt, Artificial Sequence
  Description of Artificial Sequence: Synthetic oligonucleotide
  Sense strand starting at position 2477 of SEQ ID NO: 586675
gggagauaaacuugugguc

SEQ ID NO: 735857 - RNA, 19 nt, Artificial Sequence
  Description of Artificial Sequence: Synthetic oligonucleotide
  Antisense strand to SEQ ID NO: 735856
gaccacaaguuuaucuccc

SEQ ID NO: 735858 - RNA, 19 nt, Artificial Sequence
  Description of Artificial Sequence: Synthetic oligonucleotide
  Sense strand starting at position 2484 of SEQ ID NO: 586675
aaacuuguggucggaagua

SEQ ID NO: 735859 - RNA, 19 nt, Artificial Sequence
  Description of Artificial Sequence: Synthetic oligonucleotide
  Antisense strand to SEQ ID NO: 735858
uacuuccgaccacaaguuu

SEQ ID NO: 735860 - RNA, 19 nt, Artificial Sequence
  Description of Artificial Sequence: Synthetic oligonucleotide
  Sense strand starting at position 2532 of SEQ ID NO: 586675
gagacauucugauuguagc

SEQ ID NO: 735861 - RNA, 19 nt, Artificial Sequence
  Description of Artificial Sequence: Synthetic oligonucleotide
  Antisense strand to SEQ ID NO: 735860
gcuacaaucagaaugucuc

SEQ ID NO: 735862 - RNA, 19 nt, Artificial Sequence
  Description of Artificial Sequence: Synthetic oligonucleotide
  Sense strand starting at position 2533 of SEQ ID NO: 586675
agacauucugauuguagcu

SEQ ID NO: 735863 - RNA, 19 nt, Artificial Sequence
  Description of Artificial Sequence: Synthetic oligonucleotide
  Antisense strand to SEQ ID NO: 735862
agcuacaaucagaaugucu

SEQ ID NO: 735864 - RNA, 19 nt, Artificial Sequence
  Description of Artificial Sequence: Synthetic oligonucleotide
  Sense strand starting at position 2549 of SEQ ID NO: 586675
gcuuaaucugaugagccga

SEQ ID NO: 735865 - RNA, 19 nt, Artificial Sequence
  Description of Artificial Sequence: Synthetic oligonucleotide
  Antisense strand to SEQ ID NO: 735864
ucggcucaucagauuaagc

SEQ ID NO: 735866 - RNA, 19 nt, Artificial Sequence
  Description of Artificial Sequence: Synthetic oligonucleotide
  Sense strand starting at position 2566 of SEQ ID NO: 586675
gaggauagcaaguguaaag

SEQ ID NO: 735867 - RNA, 19 nt, Artificial Sequence
  Description of Artificial Sequence: Synthetic oligonucleotide
  Antisense strand to SEQ ID NO: 735866
cuuuacacuugcuauccuc

SEQ ID NO: 735868 - RNA, 19 nt, Artificial Sequence
  Description of Artificial Sequence: Synthetic oligonucleotide
  Sense strand starting at position 2594 of SEQ ID NO: 586675
gauauauaguacuuuagug

SEQ ID NO: 735869 - RNA, 19 nt, Artificial Sequence
  Description of Artificial Sequence: Synthetic oligonucleotide
  Antisense strand to SEQ ID NO: 735868
cacuaaaguacuauauauc

SEQ ID NO: 735870 - RNA, 19 nt, Artificial Sequence
  Description of Artificial Sequence: Synthetic oligonucleotide
  Sense strand starting at position 2646 of SEQ ID NO: 586675
uugugaaugaaaugcagaa

SEQ ID NO: 735871 - RNA, 19 nt, Artificial Sequence
  Description of Artificial Sequence: Synthetic oligonucleotide
  Antisense strand to SEQ ID NO: 735870
uucugcauuucauucacaa

SEQ ID NO: 735872 - RNA, 19 nt, Artificial Sequence
  Description of Artificial Sequence: Synthetic oligonucleotide
  Sense strand starting at position 2685 of SEQ ID NO: 586675
acgaacucauucuucgauu

SEQ ID NO: 735873 - RNA, 19 nt, Artificial Sequence
  Description of Artificial Sequence: Synthetic oligonucleotide
  Antisense strand to SEQ ID NO: 735872
aaucgaagaaugaguucgu

SEQ ID NO: 735874 - RNA, 19 nt, Artificial Sequence
  Description of Artificial Sequence: Synthetic oligonucleotide
  Sense strand starting at position 2717 of SEQ ID NO: 586675
gaggaaucacaguaacguu

SEQ ID NO: 735875 - RNA, 19 nt, Artificial Sequence
  Description of Artificial Sequence: Synthetic oligonucleotide
  Antisense strand to SEQ ID NO: 735874
aacguuacugugauuccuc

SEQ ID NO: 735876 - RNA, 19 nt, Artificial Sequence
  Description of Artificial Sequence: Synthetic oligonucleotide
  Sense strand starting at position 2829 of SEQ ID NO: 586675
uggaauuuauuccaauuga

SEQ ID NO: 735877 - RNA, 19 nt, Artificial Sequence
  Description of Artificial Sequence: Synthetic oligonucleotide
  Antisense strand to SEQ ID NO: 735876
ucaauuggaauaaauucca

SEQ ID NO: 735878 - RNA, 19 nt, Artificial Sequence
  Description of Artificial Sequence: Synthetic oligonucleotide
  Sense strand starting at position 2854 of SEQ ID NO: 586675
agauuuacuuguuaccuau

SEQ ID NO: 735879 - RNA, 19 nt, Artificial Sequence
  Description of Artificial Sequence: Synthetic oligonucleotide
  Antisense strand to SEQ ID NO: 735878
auagguaacaaguaaaucu

SEQ ID NO: 735880 - RNA, 19 nt, Artificial Sequence
  Description of Artificial Sequence: Synthetic oligonucleotide
  Sense strand starting at position 2860 of SEQ ID NO: 586675
acuuguuaccuaugaagag

SEQ ID NO: 735881 - RNA, 19 nt, Artificial Sequence
  Description of Artificial Sequence: Synthetic oligonucleotide
  Antisense strand to SEQ ID NO: 735880
cucuucauagguaacaagu

SEQ ID NO: 735882 - RNA, 19 nt, Artificial Sequence
  Description of Artificial Sequence: Synthetic oligonucleotide
  Sense strand starting at position 3080 of SEQ ID NO: 586675
gcgccaguaauucuagcua

SEQ ID NO: 735883 - RNA, 19 nt, Artificial Sequence
  Description of Artificial Sequence: Synthetic oligonucleotide
  Antisense strand to SEQ ID NO: 735882
uagcuagaauuacuggcgc

SEQ ID NO: 735884 - RNA, 19 nt, Artificial Sequence
  Description of Artificial Sequence: Synthetic oligonucleotide
  Sense strand starting at position 3150 of SEQ ID NO: 586675
gugagaagaaauugugcca

SEQ ID NO: 735885 - RNA, 19 nt, Artificial Sequence
  Description of Artificial Sequence: Synthetic oligonucleotide
  Antisense strand to SEQ ID NO: 735884
uggcacaauuucuucucac

SEQ ID NO: 735886 - RNA, 19 nt, Artificial Sequence
  Description of Artificial Sequence: Synthetic oligonucleotide
  Sense strand starting at position 3153 of SEQ ID NO: 586675
agaagaaauugugccauug

SEQ ID NO: 735887 - RNA, 19 nt, Artificial Sequence
  Description of Artificial Sequence: Synthetic oligonucleotide
  Antisense strand to SEQ ID NO: 735886
caauggcacaauuucuucu

SEQ ID NO: 735888 - RNA, 19 nt, Artificial Sequence
  Description of Artificial Sequence: Synthetic oligonucleotide
  Sense strand starting at position 3406 of SEQ ID NO: 586675
uggaauuugucugauggaa

SEQ ID NO: 735889 - RNA, 19 nt, Artificial Sequence
  Description of Artificial Sequence: Synthetic oligonucleotide
  Antisense strand to SEQ ID NO: 735888
uuccaucagacaaauucca

SEQ ID NO: 735890 - RNA, 19 nt, Artificial Sequence
  Description of Artificial Sequence: Synthetic oligonucleotide
  Sense strand starting at position 3421 of SEQ ID NO: 586675
ggaagcagaucaguucuga

SEQ ID NO: 735891 - RNA, 19 nt, Artificial Sequence
  Description of Artificial Sequence: Synthetic oligonucleotide
  Antisense strand to SEQ ID NO: 735890
ucagaacugaucugcuucc

SEQ ID NO: 735892 - RNA, 19 nt, Artificial Sequence
  Description of Artificial Sequence: Synthetic oligonucleotide
  Sense strand starting at position 3626 of SEQ ID NO: 586675
agcuuucuucuagaaaguc

SEQ ID NO: 735893 - RNA, 19 nt, Artificial Sequence
  Description of Artificial Sequence: Synthetic oligonucleotide
  Antisense strand to SEQ ID NO: 735892
gacuuucuagaagaaagcu

SEQ ID NO: 735894 - RNA, 19 nt, Artificial Sequence
  Description of Artificial Sequence: Synthetic oligonucleotide
  Sense strand starting at position 3811 of SEQ ID NO: 586675
ucaccaagguugucaaaua

SEQ ID NO: 735895 - RNA, 19 nt, Artificial Sequence
  Description of Artificial Sequence: Synthetic oligonucleotide
  Antisense strand to SEQ ID NO: 735894
uauuugacaaccuugguga

SEQ ID NO: 735896 - RNA, 19 nt, Artificial Sequence
  Description of Artificial Sequence: Synthetic oligonucleotide
  Sense strand starting at position 3821 of SEQ ID NO: 586675
ugucaaauacuguaccuca

SEQ ID NO: 735897 - RNA, 19 nt, Artificial Sequence
  Description of Artificial Sequence: Synthetic oligonucleotide
  Antisense strand to SEQ ID NO: 735896
ugagguacaguauuugaca

SEQ ID NO: 735898 - RNA, 19 nt, Artificial Sequence
  Description of Artificial Sequence: Synthetic oligonucleotide
  Sense strand starting at position 3891 of SEQ ID NO: 586675
cucauaauaugagaaugaa

SEQ ID NO: 735899 - RNA, 19 nt, Artificial Sequence
  Description of Artificial Sequence: Synthetic oligonucleotide
  Antisense strand to SEQ ID NO: 735898
uucauucucauauuaugag

SEQ ID NO: 735900 - RNA, 19 nt, Artificial Sequence
  Description of Artificial Sequence: Synthetic oligonucleotide
  Sense strand starting at position 294 of SEQ ID NO: 586676
uaguaauuuccgugagagc

SEQ ID NO: 735901 - RNA, 19 nt, Artificial Sequence
  Description of Artificial Sequence: Synthetic oligonucleotide
  Antisense strand to SEQ ID NO: 735900
gcucucacggaaauuacua

SEQ ID NO: 735902 - RNA, 19 nt, Artificial Sequence
  Description of Artificial Sequence: Synthetic oligonucleotide
  Sense strand starting at position 356 of SEQ ID NO: 586676
gcucaauaaauaugucgga

SEQ ID NO: 735903 - RNA, 19 nt, Artificial Sequence
  Description of Artificial Sequence: Synthetic oligonucleotide
  Antisense strand to SEQ ID NO: 735902
uccgacauauuuauugagc

SEQ ID NO: 735904 - RNA, 19 nt, Artificial Sequence
  Description of Artificial Sequence: Synthetic oligonucleotide
  Sense strand starting at position 360 of SEQ ID NO: 586676
aauaaauaugucggauauc

SEQ ID NO: 735905 - RNA, 19 nt, Artificial Sequence
  Description of Artificial Sequence: Synthetic oligonucleotide
  Antisense strand to SEQ ID NO: 735904
gauauccgacauauuuauu

SEQ ID NO: 735906 - RNA, 19 nt, Artificial Sequence
  Description of Artificial Sequence: Synthetic oligonucleotide
  Sense strand starting at position 371 of SEQ ID NO: 586676
cggauaucugaagguccua

SEQ ID NO: 735907 - RNA, 19 nt, Artificial Sequence
  Description of Artificial Sequence: Synthetic oligonucleotide
  Antisense strand to SEQ ID NO: 735906
uaggaccuucagauauccg

SEQ ID NO: 735908 - RNA, 19 nt, Artificial Sequence
  Description of Artificial Sequence: Synthetic oligonucleotide
  Sense strand starting at position 376 of SEQ ID NO: 586676
aucugaagguccuaccaaa

SEQ ID NO: 735909 - RNA, 19 nt, Artificial Sequence
  Description of Artificial Sequence: Synthetic oligonucleotide
  Antisense strand to SEQ ID NO: 735908
uuugguaggaccuucagau

SEQ ID NO: 735910 - RNA, 19 nt, Artificial Sequence
  Description of Artificial Sequence: Synthetic oligonucleotide
  Sense strand starting at position 591 of SEQ ID NO: 586676
cuucucacuuaucuuggua

SEQ ID NO: 735911 - RNA, 19 nt, Artificial Sequence
  Description of Artificial Sequence: Synthetic oligonucleotide
  Antisense strand to SEQ ID NO: 735910
uaccaagauaagugagaag

SEQ ID NO: 735912 - RNA, 19 nt, Artificial Sequence
  Description of Artificial Sequence: Synthetic oligonucleotide
  Sense strand starting at position 655 of SEQ ID NO: 586676
auguacuuaucuguauaca

SEQ ID NO: 735913 - RNA, 19 nt, Artificial Sequence
  Description of Artificial Sequence: Synthetic oligonucleotide
  Antisense strand to SEQ ID NO: 735912
uguauacagauaaguacau

SEQ ID NO: 735914 - RNA, 19 nt, Artificial Sequence
  Description of Artificial Sequence: Synthetic oligonucleotide
  Sense strand starting at position 656 of SEQ ID NO: 586676
uguacuuaucuguauacag

SEQ ID NO: 735915 - RNA, 19 nt, Artificial Sequence
  Description of Artificial Sequence: Synthetic oligonucleotide
  Antisense strand to SEQ ID NO: 735914
cuguauacagauaaguaca

SEQ ID NO: 735916 - RNA, 19 nt, Artificial Sequence
  Description of Artificial Sequence: Synthetic oligonucleotide
  Sense strand starting at position 739 of SEQ ID NO: 586676
gugggaacccauugcaagu

SEQ ID NO: 735917 - RNA, 19 nt, Artificial Sequence
  Description of Artificial Sequence: Synthetic oligonucleotide
  Antisense strand to SEQ ID NO: 735916
acuugcaauggguucccac

SEQ ID NO: 735918 - RNA, 19 nt, Artificial Sequence
  Description of Artificial Sequence: Synthetic oligonucleotide
  Sense strand starting at position 821 of SEQ ID NO: 586676
ggaaguagccaucaaucca

SEQ ID NO: 735919 - RNA, 19 nt, Artificial Sequence
  Description of Artificial Sequence: Synthetic oligonucleotide
  Antisense strand to SEQ ID NO: 735918
uggauugauggcuacuucc

SEQ ID NO: 735920 - RNA, 19 nt, Artificial Sequence
  Description of Artificial Sequence: Synthetic oligonucleotide
  Sense strand starting at position 829 of SEQ ID NO: 586676
ccaucaauccaggagcauu

SEQ ID NO: 735921 - RNA, 19 nt, Artificial Sequence
  Description of Artificial Sequence: Synthetic oligonucleotide
  Antisense strand to SEQ ID NO: 735920
aaugcuccuggauugaugg

SEQ ID NO: 735922 - RNA, 19 nt, Artificial Sequence
  Description of Artificial Sequence: Synthetic oligonucleotide
  Sense strand starting at position 884 of SEQ ID NO: 586676
acucgagaacuucgaugau

SEQ ID NO: 735923 - RNA, 19 nt, Artificial Sequence
  Description of Artificial Sequence: Synthetic oligonucleotide
  Antisense strand to SEQ ID NO: 735922
aucaucgaaguucucgagu

SEQ ID NO: 735924 - RNA, 19 nt, Artificial Sequence
  Description of Artificial Sequence: Synthetic oligonucleotide
  Sense strand starting at position 887 of SEQ ID NO: 586676
cgagaacuucgaugauaaa

SEQ ID NO: 735925 - RNA, 19 nt, Artificial Sequence
  Description of Artificial Sequence: Synthetic oligonucleotide
  Antisense strand to SEQ ID NO: 735924
uuuaucaucgaaguucucg

SEQ ID NO: 735926 - RNA, 19 nt, Artificial Sequence
  Description of Artificial Sequence: Synthetic oligonucleotide
  Sense strand starting at position 931 of SEQ ID NO: 586676
cccucuugggcgucguaau

SEQ ID NO: 735927 - RNA, 19 nt, Artificial Sequence
  Description of Artificial Sequence: Synthetic oligonucleotide
  Antisense strand to SEQ ID NO: 735926
auuacgacgcccaagaggg

SEQ ID NO: 735928 - RNA, 19 nt, Artificial Sequence
  Description of Artificial Sequence: Synthetic oligonucleotide
  Sense strand starting at position 1520 of SEQ ID NO: 586676
gcagguccucugggaaauc

SEQ ID NO: 735929 - RNA, 19 nt, Artificial Sequence
  Description of Artificial Sequence: Synthetic oligonucleotide
  Antisense strand to SEQ ID NO: 735928
gauuucccagaggaccugc

SEQ ID NO: 735930 - RNA, 19 nt, Artificial Sequence
  Description of Artificial Sequence: Synthetic oligonucleotide
  Sense strand starting at position 1996 of SEQ ID NO: 586676
ccgggaucucgugagauca

SEQ ID NO: 735931 - RNA, 19 nt, Artificial Sequence
  Description of Artificial Sequence: Synthetic oligonucleotide
  Antisense strand to SEQ ID NO: 735930
ugaucucacgagaucccgg

SEQ ID NO: 735932 - RNA, 19 nt, Artificial Sequence
  Description of Artificial Sequence: Synthetic oligonucleotide
  Sense strand starting at position 2068 of SEQ ID NO: 586676
gguguuuggcuggguucua

SEQ ID NO: 735933 - RNA, 19 nt, Artificial Sequence
  Description of Artificial Sequence: Synthetic oligonucleotide
  Antisense strand to SEQ ID NO: 735932
uagaacccagccaaacacc

SEQ ID NO: 735934 - RNA, 19 nt, Artificial Sequence
  Description of Artificial Sequence: Synthetic oligonucleotide
  Sense strand starting at position 2342 of SEQ ID NO: 586676
cucugagcuccggaaaggu

SEQ ID NO: 735935 - RNA, 19 nt, Artificial Sequence
  Description of Artificial Sequence: Synthetic oligonucleotide
  Antisense strand to SEQ ID NO: 735934
accuuuccggagcucagag

SEQ ID NO: 735936 - RNA, 19 nt, Artificial Sequence
  Description of Artificial Sequence: Synthetic oligonucleotide
  Sense strand starting at position 2508 of SEQ ID NO: 586676
gcuuuagaggaccacuauu

SEQ ID NO: 735937 - RNA, 19 nt, Artificial Sequence
  Description of Artificial Sequence: Synthetic oligonucleotide
  Antisense strand to SEQ ID NO: 735936
aauagugguccucuaaagc

SEQ ID NO: 735938 - RNA, 19 nt, Artificial Sequence
  Description of Artificial Sequence: Synthetic oligonucleotide
  Sense strand starting at position 2518 of SEQ ID NO: 586676
accacuauucuguguucca

SEQ ID NO: 735939 - RNA, 19 nt, Artificial Sequence
  Description of Artificial Sequence: Synthetic oligonucleotide
  Antisense strand to SEQ ID NO: 735938
uggaacacagaauaguggu

SEQ ID NO: 735940 - RNA, 19 nt, Artificial Sequence
  Description of Artificial Sequence: Synthetic oligonucleotide
  Sense strand starting at position 2519 of SEQ ID NO: 586676
ccacuauucuguguuccag

SEQ ID NO: 735941 - RNA, 19 nt, Artificial Sequence
  Description of Artificial Sequence: Synthetic oligonucleotide
  Antisense strand to SEQ ID NO: 735940
cuggaacacagaauagugg

SEQ ID NO: 735942 - RNA, 19 nt, Artificial Sequence
  Description of Artificial Sequence: Synthetic oligonucleotide
  Sense strand starting at position 2521 of SEQ ID NO: 586676
acuauucuguguuccagau

SEQ ID NO: 735943 - RNA, 19 nt, Artificial Sequence
  Description of Artificial Sequence: Synthetic oligonucleotide
  Antisense strand to SEQ ID NO: 735942
aucuggaacacagaauagu

SEQ ID NO: 735944 - RNA, 19 nt, Artificial Sequence
  Description of Artificial Sequence: Synthetic oligonucleotide
  Sense strand starting at position 2527 of SEQ ID NO: 586676
cuguguuccagaugagcaa

SEQ ID NO: 735945 - RNA, 19 nt, Artificial Sequence
  Description of Artificial Sequence: Synthetic oligonucleotide
  Antisense strand to SEQ ID NO: 735944
uugcucaucuggaacacag

SEQ ID NO: 735946 - RNA, 19 nt, Artificial Sequence
  Description of Artificial Sequence: Synthetic oligonucleotide
  Sense strand starting at position 2528 of SEQ ID NO: 586676
uguguuccagaugagcaaa

SEQ ID NO: 735947 - RNA, 19 nt, Artificial Sequence
  Description of Artificial Sequence: Synthetic oligonucleotide
  Antisense strand to SEQ ID NO: 735946
uuugcucaucuggaacaca

SEQ ID NO: 735948 - RNA, 19 nt, Artificial Sequence
  Description of Artificial Sequence: Synthetic oligonucleotide
  Sense strand starting at position 2560 of SEQ ID NO: 586676
caacaacuuccguggucau

SEQ ID NO: 735949 - RNA, 19 nt, Artificial Sequence
  Description of Artificial Sequence: Synthetic oligonucleotide
  Antisense strand to SEQ ID NO: 735948
augaccacggaaguuguug

SEQ ID NO: 735950 - RNA, 19 nt, Artificial Sequence
  Description of Artificial Sequence: Synthetic oligonucleotide
  Sense strand starting at position 2561 of SEQ ID NO: 586676
aacaacuuccguggucaua

SEQ ID NO: 735951 - RNA, 19 nt, Artificial Sequence
  Description of Artificial Sequence: Synthetic oligonucleotide
  Antisense strand to SEQ ID NO: 735950
uaugaccacggaaguuguu

SEQ ID NO: 735952 - RNA, 19 nt, Artificial Sequence
  Description of Artificial Sequence: Synthetic oligonucleotide
  Sense strand starting at position 2563 of SEQ ID NO: 586676
caacuuccguggucauaca

SEQ ID NO: 735953 - RNA, 19 nt, Artificial Sequence
  Description of Artificial Sequence: Synthetic oligonucleotide
  Antisense strand to SEQ ID NO: 735952
uguaugaccacggaaguug

SEQ ID NO: 735954 - RNA, 19 nt, Artificial Sequence
  Description of Artificial Sequence: Synthetic oligonucleotide
  Sense strand starting at position 2625 of SEQ ID NO: 586676
cacuguuucugcuuuacga

SEQ ID NO: 735955 - RNA, 19 nt, Artificial Sequence
  Description of Artificial Sequence: Synthetic oligonucleotide
  Antisense strand to SEQ ID NO: 735954
ucguaaagcagaaacagug

SEQ ID NO: 735956 - RNA, 19 nt, Artificial Sequence
  Description of Artificial Sequence: Synthetic oligonucleotide
  Sense strand starting at position 2627 of SEQ ID NO: 586676
cuguuucugcuuuacgaau

SEQ ID NO: 735957 - RNA, 19 nt, Artificial Sequence
  Description of Artificial Sequence: Synthetic oligonucleotide
  Antisense strand to SEQ ID NO: 735956
auucguaaagcagaaacag

SEQ ID NO: 735958 - RNA, 19 nt, Artificial Sequence
  Description of Artificial Sequence: Synthetic oligonucleotide
  Sense strand starting at position 2633 of SEQ ID NO: 586676
cugcuuuacgaauaaagac

SEQ ID NO: 735959 - RNA, 19 nt, Artificial Sequence
  Description of Artificial Sequence: Synthetic oligonucleotide
  Antisense strand to SEQ ID NO: 735958
gucuuuauucguaaagcag

SEQ ID NO: 735960 - RNA, 19 nt, Artificial Sequence
  Description of Artificial Sequence: Synthetic oligonucleotide
  Sense strand starting at position 2676 of SEQ ID NO: 586676
uguagaguuuacgcagaca

SEQ ID NO: 735961 - RNA, 19 nt, Artificial Sequence
  Description of Artificial Sequence: Synthetic oligonucleotide
  Antisense strand to SEQ ID NO: 735960
ugucugcguaaacucuaca

SEQ ID NO: 735962 - RNA, 19 nt, Artificial Sequence
  Description of Artificial Sequence: Synthetic oligonucleotide
  Sense strand starting at position 2679 of SEQ ID NO: 586676
agaguuuacgcagacagaa

SEQ ID NO: 735963 - RNA, 19 nt, Artificial Sequence
  Description of Artificial Sequence: Synthetic oligonucleotide
  Antisense strand to SEQ ID NO: 735962
uucugucugcguaaacucu

SEQ ID NO: 735964 - RNA, 19 nt, Artificial Sequence
  Description of Artificial Sequence: Synthetic oligonucleotide
  Sense strand starting at position 2703 of SEQ ID NO: 586676
aguagaauuccuugcucac

SEQ ID NO: 735965 - RNA, 19 nt, Artificial Sequence
  Description of Artificial Sequence: Synthetic oligonucleotide
  Antisense strand to SEQ ID NO: 735964
gugagcaaggaauucuacu

SEQ ID NO: 735966 - RNA, 19 nt, Artificial Sequence
  Description of Artificial Sequence: Synthetic oligonucleotide
  Sense strand starting at position 2712 of SEQ ID NO: 586676
ccuugcucacaaugaguuu

SEQ ID NO: 735967 - RNA, 19 nt, Artificial Sequence
  Description of Artificial Sequence: Synthetic oligonucleotide
  Antisense strand to SEQ ID NO: 735966
aaacucauugugagcaagg

SEQ ID NO: 735968 - RNA, 19 nt, Artificial Sequence
  Description of Artificial Sequence: Synthetic oligonucleotide
  Sense strand starting at position 2715 of SEQ ID NO: 586676
ugcucacaaugaguuuauu

SEQ ID NO: 735969 - RNA, 19 nt, Artificial Sequence
  Description of Artificial Sequence: Synthetic oligonucleotide
  Antisense strand to SEQ ID NO: 735968
aauaaacucauugugagca

SEQ ID NO: 735970 - RNA, 19 nt, Artificial Sequence
  Description of Artificial Sequence: Synthetic oligonucleotide
  Sense strand starting at position 3764 of SEQ ID NO: 586676
gcuggaagaguagguguuu

SEQ ID NO: 735971 - RNA, 19 nt, Artificial Sequence
  Description of Artificial Sequence: Synthetic oligonucleotide
  Antisense strand to SEQ ID NO: 735970
aaacaccuacucuuccagc

SEQ ID NO: 735972 - RNA, 19 nt, Artificial Sequence
  Description of Artificial Sequence: Synthetic oligonucleotide
  Sense strand starting at position 3769 of SEQ ID NO: 586676
aagaguagguguuucucaa

SEQ ID NO: 735973 - RNA, 19 nt, Artificial Sequence
  Description of Artificial Sequence: Synthetic oligonucleotide
  Antisense strand to SEQ ID NO: 735972
uugagaaacaccuacucuu

SEQ ID NO: 735974 - RNA, 19 nt, Artificial Sequence
  Description of Artificial Sequence: Synthetic oligonucleotide
  Sense strand starting at position 3776 of SEQ ID NO: 586676
gguguuucucaauggaaca

SEQ ID NO: 735975 - RNA, 19 nt, Artificial Sequence
  Description of Artificial Sequence: Synthetic oligonucleotide
  Antisense strand to SEQ ID NO: 735974
uguuccauugagaaacacc

SEQ ID NO: 735976 - RNA, 19 nt, Artificial Sequence
  Description of Artificial Sequence: Synthetic oligonucleotide
  Sense strand starting at position 3853 of SEQ ID NO: 586676
gcacuagggccugagcauu

SEQ ID NO: 735977 - RNA, 19 nt, Artificial Sequence
  Description of Artificial Sequence: Synthetic oligonucleotide
  Antisense strand to SEQ ID NO: 735976
aaugcucaggcccuagugc

SEQ ID NO: 735978 - RNA, 19 nt, Artificial Sequence
  Description of Artificial Sequence: Synthetic oligonucleotide
  Sense strand starting at position 3879 of SEQ ID NO: 586676
gggaaauguuuagacagga

SEQ ID NO: 735979 - RNA, 19 nt, Artificial Sequence
  Description of Artificial Sequence: Synthetic oligonucleotide
  Antisense strand to SEQ ID NO: 735978
uccugucuaaacauuuccc

SEQ ID NO: 735980 - RNA, 19 nt, Artificial Sequence
  Description of Artificial Sequence: Synthetic oligonucleotide
  Sense strand starting at position 97 of SEQ ID NO: 586677
guauuuaauccagguugca

SEQ ID NO: 735981 - RNA, 19 nt, Artificial Sequence
  Description of Artificial Sequence: Synthetic oligonucleotide
  Antisense strand to SEQ ID NO: 735980
ugcaaccuggauuaaauac

SEQ ID NO: 735982 - RNA, 19 nt, Artificial Sequence
  Description of Artificial Sequence: Synthetic oligonucleotide
  Sense strand starting at position 113 of SEQ ID NO: 586677
gcacuauacccacgaaaga

SEQ ID NO: 735983 - RNA, 19 nt, Artificial Sequence
  Description of Artificial Sequence: Synthetic oligonucleotide
  Antisense strand to SEQ ID NO: 735982
ucuuucguggguauagugc

SEQ ID NO: 735984 - RNA, 19 nt, Artificial Sequence
  Description of Artificial Sequence: Synthetic oligonucleotide
  Sense strand starting at position 242 of SEQ ID NO: 586677
acaauuuauucggcacguu

SEQ ID NO: 735985 - RNA, 19 nt, Artificial Sequence
  Description of Artificial Sequence: Synthetic oligonucleotide
  Antisense strand to SEQ ID NO: 735984
aacgugccgaauaaauugu

SEQ ID NO: 735986 - RNA, 19 nt, Artificial Sequence
  Description of Artificial Sequence: Synthetic oligonucleotide
  Sense strand starting at position 364 of SEQ ID NO: 586677
uuagacacguaucuaacua

SEQ ID NO: 735987 - RNA, 19 nt, Artificial Sequence
  Description of Artificial Sequence: Synthetic oligonucleotide
  Antisense strand to SEQ ID NO: 735986
uaguuagauacgugucuaa

SEQ ID NO: 735988 - RNA, 19 nt, Artificial Sequence
  Description of Artificial Sequence: Synthetic oligonucleotide
  Sense strand starting at position 644 of SEQ ID NO: 586677
uuuaaagaacgcugaaaua

SEQ ID NO: 735989 - RNA, 19 nt, Artificial Sequence
  Description of Artificial Sequence: Synthetic oligonucleotide
  Antisense strand to SEQ ID NO: 735988
uauuucagcguucuuuaaa

SEQ ID NO: 735990 - RNA, 19 nt, Artificial Sequence
  Description of Artificial Sequence: Synthetic oligonucleotide
  Sense strand starting at position 756 of SEQ ID NO: 586677
uccaguuaacgaugggaaa

SEQ ID NO: 735991 - RNA, 19 nt, Artificial Sequence
  Description of Artificial Sequence: Synthetic oligonucleotide
  Antisense strand to SEQ ID NO: 735990
uuucccaucguuaacugga

SEQ ID NO: 735992 - RNA, 19 nt, Artificial Sequence
  Description of Artificial Sequence: Synthetic oligonucleotide
  Sense strand starting at position 953 of SEQ ID NO: 586677
cugguaaacuaguuuagga

SEQ ID NO: 735993 - RNA, 19 nt, Artificial Sequence
  Description of Artificial Sequence: Synthetic oligonucleotide
  Antisense strand to SEQ ID NO: 735992
uccuaaacuaguuuaccag

SEQ ID NO: 735994 - RNA, 19 nt, Artificial Sequence
  Description of Artificial Sequence: Synthetic oligonucleotide
  Sense strand starting at position 1607 of SEQ ID NO: 586677
uaagacauauggucagauc

SEQ ID NO: 735995 - RNA, 19 nt, Artificial Sequence
  Description of Artificial Sequence: Synthetic oligonucleotide
  Antisense strand to SEQ ID NO: 735994
gaucugaccauaugucuua

SEQ ID NO: 735996 - RNA, 19 nt, Artificial Sequence
  Description of Artificial Sequence: Synthetic oligonucleotide
  Sense strand starting at position 1732 of SEQ ID NO: 586677
ucggguuccaggcagaaga

SEQ ID NO: 735997 - RNA, 19 nt, Artificial Sequence
  Description of Artificial Sequence: Synthetic oligonucleotide
  Antisense strand to SEQ ID NO: 735996
ucuucugccuggaacccga

SEQ ID NO: 735998 - RNA, 19 nt, Artificial Sequence
  Description of Artificial Sequence: Synthetic oligonucleotide
  Sense strand starting at position 2055 of SEQ ID NO: 586677
ggcuuaggagcccagaguu

SEQ ID NO: 735999 - RNA, 19 nt, Artificial Sequence
  Description of Artificial Sequence: Synthetic oligonucleotide
  Antisense strand to SEQ ID NO: 735998
aacucugggcuccuaagcc

SEQ ID NO: 736000 - RNA, 19 nt, Artificial Sequence
  Description of Artificial Sequence: Synthetic oligonucleotide
  Sense strand starting at position 2067 of SEQ ID NO: 586677
cagaguugaccacaugcaa

SEQ ID NO: 736001 - RNA, 19 nt, Artificial Sequence
  Description of Artificial Sequence: Synthetic oligonucleotide
  Antisense strand to SEQ ID NO: 736000
uugcauguggucaacucug

SEQ ID NO: 736002 - RNA, 19 nt, Artificial Sequence
  Description of Artificial Sequence: Synthetic oligonucleotide
  Sense strand starting at position 2347 of SEQ ID NO: 586677
uugucagugucauuuggga

SEQ ID NO: 736003 - RNA, 19 nt, Artificial Sequence
  Description of Artificial Sequence: Synthetic oligonucleotide
  Antisense strand to SEQ ID NO: 736002
ucccaaaugacacugacaa

SEQ ID NO: 736004 - RNA, 19 nt, Artificial Sequence
  Description of Artificial Sequence: Synthetic oligonucleotide
  Sense strand starting at position 2363 of SEQ ID NO: 586677
ggaacugucaccugcagaa

SEQ ID NO: 736005 - RNA, 19 nt, Artificial Sequence
  Description of Artificial Sequence: Synthetic oligonucleotide
  Antisense strand to SEQ ID NO: 736004
uucugcaggugacaguucc

SEQ ID NO: 736006 - RNA, 19 nt, Artificial Sequence
  Description of Artificial Sequence: Synthetic oligonucleotide
  Sense strand starting at position 2386 of SEQ ID NO: 586677
uagggauacgccuauccuu

SEQ ID NO: 736007 - RNA, 19 nt, Artificial Sequence
  Description of Artificial Sequence: Synthetic oligonucleotide
  Antisense strand to SEQ ID NO: 736006
aaggauaggcguaucccua

SEQ ID NO: 736008 - RNA, 19 nt, Artificial Sequence
  Description of Artificial Sequence: Synthetic oligonucleotide
  Sense strand starting at position 2615 of SEQ ID NO: 586677
guucucagugcagaaagaa

SEQ ID NO: 736009 - RNA, 19 nt, Artificial Sequence
  Description of Artificial Sequence: Synthetic oligonucleotide
  Antisense strand to SEQ ID NO: 736008
uucuuucugcacugagaac

SEQ ID NO: 736010 - RNA, 19 nt, Artificial Sequence
  Description of Artificial Sequence: Synthetic oligonucleotide
  Sense strand starting at position 2831 of SEQ ID NO: 586677
ggucauaugagauguguag

SEQ ID NO: 736011 - RNA, 19 nt, Artificial Sequence
  Description of Artificial Sequence: Synthetic oligonucleotide
  Antisense strand to SEQ ID NO: 736010
cuacacaucucauaugacc

SEQ ID NO: 736012 - RNA, 19 nt, Artificial Sequence
  Description of Artificial Sequence: Synthetic oligonucleotide
  Sense strand starting at position 2833 of SEQ ID NO: 586677
ucauaugagauguguagau

SEQ ID NO: 736013 - RNA, 19 nt, Artificial Sequence
  Description of Artificial Sequence: Synthetic oligonucleotide
  Antisense strand to SEQ ID NO: 736012
aucuacacaucucauauga

SEQ ID NO: 736014 - RNA, 19 nt, Artificial Sequence
  Description of Artificial Sequence: Synthetic oligonucleotide
  Sense strand starting at position 2837 of SEQ ID NO: 586677
augagauguguagauugca

SEQ ID NO: 736015 - RNA, 19 nt, Artificial Sequence
  Description of Artificial Sequence: Synthetic oligonucleotide
  Antisense strand to SEQ ID NO: 736014
ugcaaucuacacaucucau

SEQ ID NO: 736016 - RNA, 19 nt, Artificial Sequence
  Description of Artificial Sequence: Synthetic oligonucleotide
  Sense strand starting at position 2845 of SEQ ID NO: 586677
uguagauugcacgcgcauu

SEQ ID NO: 736017 - RNA, 19 nt, Artificial Sequence
  Description of Artificial Sequence: Synthetic oligonucleotide
  Antisense strand to SEQ ID NO: 736016
aaugcgcgugcaaucuaca

SEQ ID NO: 736018 - RNA, 19 nt, Artificial Sequence
  Description of Artificial Sequence: Synthetic oligonucleotide
  Sense strand starting at position 2899 of SEQ ID NO: 586677
cucgguuuccuccagaaau

SEQ ID NO: 736019 - RNA, 19 nt, Artificial Sequence
  Description of Artificial Sequence: Synthetic oligonucleotide
  Antisense strand to SEQ ID NO: 736018
auuucuggaggaaaccgag

SEQ ID NO: 736020 - RNA, 19 nt, Artificial Sequence
  Description of Artificial Sequence: Synthetic oligonucleotide
  Sense strand starting at position 3024 of SEQ ID NO: 586677
ugggcacuugguuacaauu

SEQ ID NO: 736021 - RNA, 19 nt, Artificial Sequence
  Description of Artificial Sequence: Synthetic oligonucleotide
  Antisense strand to SEQ ID NO: 736020
aauuguaaccaagugccca

SEQ ID NO: 736022 - RNA, 19 nt, Artificial Sequence
  Description of Artificial Sequence: Synthetic oligonucleotide
  Sense strand starting at position 3171 of SEQ ID NO: 586677
gugaguggcgcuguaauga

SEQ ID NO: 736023 - RNA, 19 nt, Artificial Sequence
  Description of Artificial Sequence: Synthetic oligonucleotide
  Antisense strand to SEQ ID NO: 736022
ucauuacagcgccacucac

SEQ ID NO: 736024 - RNA, 19 nt, Artificial Sequence
  Description of Artificial Sequence: Synthetic oligonucleotide
  Sense strand starting at position 3181 of SEQ ID NO: 586677
cuguaaugagcaggaggaa

SEQ ID NO: 736025 - RNA, 19 nt, Artificial Sequence
  Description of Artificial Sequence: Synthetic oligonucleotide
  Antisense strand to SEQ ID NO: 736024
uuccuccugcucauuacag

SEQ ID NO: 736026 - RNA, 19 nt, Artificial Sequence
  Description of Artificial Sequence: Synthetic oligonucleotide
  Sense strand starting at position 3229 of SEQ ID NO: 586677
ucaggagaauaucuguagu

SEQ ID NO: 736027 - RNA, 19 nt, Artificial Sequence
  Description of Artificial Sequence: Synthetic oligonucleotide
  Antisense strand to SEQ ID NO: 736026
acuacagauauucuccuga

SEQ ID NO: 736028 - RNA, 19 nt, Artificial Sequence
  Description of Artificial Sequence: Synthetic oligonucleotide
  Sense strand starting at position 3231 of SEQ ID NO: 586677
aggagaauaucuguaguca

SEQ ID NO: 736029 - RNA, 19 nt, Artificial Sequence
  Description of Artificial Sequence: Synthetic oligonucleotide
  Antisense strand to SEQ ID NO: 736028
ugacuacagauauucuccu

SEQ ID NO: 736030 - RNA, 19 nt, Artificial Sequence
  Description of Artificial Sequence: Synthetic oligonucleotide
  Sense strand starting at position 3323 of SEQ ID NO: 586677
ggaugaugaccaggucuuu

SEQ ID NO: 736031 - RNA, 19 nt, Artificial Sequence
  Description of Artificial Sequence: Synthetic oligonucleotide
  Antisense strand to SEQ ID NO: 736030
aaagaccuggucaucaucc

SEQ ID NO: 736032 - RNA, 19 nt, Artificial Sequence
  Description of Artificial Sequence: Synthetic oligonucleotide
  Sense strand starting at position 3342 of SEQ ID NO: 586677
gaaguuguuagugggauua

SEQ ID NO: 736033 - RNA, 19 nt, Artificial Sequence
  Description of Artificial Sequence: Synthetic oligonucleotide
  Antisense strand to SEQ ID NO: 736032
uaaucccacuaacaacuuc

SEQ ID NO: 736034 - RNA, 19 nt, Artificial Sequence
  Description of Artificial Sequence: Synthetic oligonucleotide
  Sense strand starting at position 3369 of SEQ ID NO: 586677
agcaaacugggcuagacau

SEQ ID NO: 736035 - RNA, 19 nt, Artificial Sequence
  Description of Artificial Sequence: Synthetic oligonucleotide
  Antisense strand to SEQ ID NO: 736034
augucuagcccaguuugcu

SEQ ID NO: 736036 - RNA, 19 nt, Artificial Sequence
  Description of Artificial Sequence: Synthetic oligonucleotide
  Sense strand starting at position 3380 of SEQ ID NO: 586677
cuagacaucugguuugaau

SEQ ID NO: 736037 - RNA, 19 nt, Artificial Sequence
  Description of Artificial Sequence: Synthetic oligonucleotide
  Antisense strand to SEQ ID NO: 736036
auucaaaccagaugucuag

SEQ ID NO: 736038 - RNA, 19 nt, Artificial Sequence
  Description of Artificial Sequence: Synthetic oligonucleotide
  Sense strand starting at position 3382 of SEQ ID NO: 586677
agacaucugguuugaauua

SEQ ID NO: 736039 - RNA, 19 nt, Artificial Sequence
  Description of Artificial Sequence: Synthetic oligonucleotide
  Antisense strand to SEQ ID NO: 736038
uaauucaaaccagaugucu

SEQ ID NO: 736040 - RNA, 19 nt, Artificial Sequence
  Description of Artificial Sequence: Synthetic oligonucleotide
  Sense strand starting at position 3407 of SEQ ID NO: 586677
agcauugauuaaucuuuga

SEQ ID NO: 736041 - RNA, 19 nt, Artificial Sequence
  Description of Artificial Sequence: Synthetic oligonucleotide
  Antisense strand to SEQ ID NO: 736040
ucaaagauuaaucaaugcu

SEQ ID NO: 736042 - RNA, 19 nt, Artificial Sequence
  Description of Artificial Sequence: Synthetic oligonucleotide
  Sense strand starting at position 3529 of SEQ ID NO: 586677
caauaacauccgugugaaa

SEQ ID NO: 736043 - RNA, 19 nt, Artificial Sequence
  Description of Artificial Sequence: Synthetic oligonucleotide
  Antisense strand to SEQ ID NO: 736042
uuucacacggauguuauug

SEQ ID NO: 736044 - RNA, 19 nt, Artificial Sequence
  Description of Artificial Sequence: Synthetic oligonucleotide
  Sense strand starting at position 3531 of SEQ ID NO: 586677
auaacauccgugugaaaga

SEQ ID NO: 736045 - RNA, 19 nt, Artificial Sequence
  Description of Artificial Sequence: Synthetic oligonucleotide
  Antisense strand to SEQ ID NO: 736044
ucuuucacacggauguuau

SEQ ID NO: 736046 - RNA, 19 nt, Artificial Sequence
  Description of Artificial Sequence: Synthetic oligonucleotide
  Sense strand starting at position 3536 of SEQ ID NO: 586677
auccgugugaaagaucgaa

SEQ ID NO: 736047 - RNA, 19 nt, Artificial Sequence
  Description of Artificial Sequence: Synthetic oligonucleotide
  Antisense strand to SEQ ID NO: 736046
uucgaucuuucacacggau

SEQ ID NO: 736048 - RNA, 19 nt, Artificial Sequence
  Description of Artificial Sequence: Synthetic oligonucleotide
  Sense strand starting at position 3540 of SEQ ID NO: 586677
gugugaaagaucgaauugu

SEQ ID NO: 736049 - RNA, 19 nt, Artificial Sequence
  Description of Artificial Sequence: Synthetic oligonucleotide
  Antisense strand to SEQ ID NO: 736048
acaauucgaucuuucacac

SEQ ID NO: 736050 - RNA, 19 nt, Artificial Sequence
  Description of Artificial Sequence: Synthetic oligonucleotide
  Sense strand starting at position 3597 of SEQ ID NO: 586677
caggaauucugagauuugu

SEQ ID NO: 736051 - RNA, 19 nt, Artificial Sequence
  Description of Artificial Sequence: Synthetic oligonucleotide
  Antisense strand to SEQ ID NO: 736050
acaaaucucagaauuccug

SEQ ID NO: 736052 - RNA, 19 nt, Artificial Sequence
  Description of Artificial Sequence: Synthetic oligonucleotide
  Sense strand starting at position 3614 of SEQ ID NO: 586677
guaagcgcugcuuucuuua

SEQ ID NO: 736053 - RNA, 19 nt, Artificial Sequence
  Description of Artificial Sequence: Synthetic oligonucleotide
  Antisense strand to SEQ ID NO: 736052
uaaagaaagcagcgcuuac

SEQ ID NO: 736054 - RNA, 19 nt, Artificial Sequence
  Description of Artificial Sequence: Synthetic oligonucleotide
  Sense strand starting at position 3632 of SEQ ID NO: 586677
aacggaaauugagcucuau

SEQ ID NO: 736055 - RNA, 19 nt, Artificial Sequence
  Description of Artificial Sequence: Synthetic oligonucleotide
  Antisense strand to SEQ ID NO: 736054
auagagcucaauuuccguu

SEQ ID NO: 736056 - RNA, 19 nt, Artificial Sequence
  Description of Artificial Sequence: Synthetic oligonucleotide
  Sense strand starting at position 3759 of SEQ ID NO: 586677
caagucugacgguaagacu

SEQ ID NO: 736057 - RNA, 19 nt, Artificial Sequence
  Description of Artificial Sequence: Synthetic oligonucleotide
  Antisense strand to SEQ ID NO: 736056
agucuuaccgucagacuug

SEQ ID NO: 736058 - RNA, 19 nt, Artificial Sequence
  Description of Artificial Sequence: Synthetic oligonucleotide
  Sense strand starting at position 3962 of SEQ ID NO: 586677
guuauaguccuccaauauc

SEQ ID NO: 736059 - RNA, 19 nt, Artificial Sequence
  Description of Artificial Sequence: Synthetic oligonucleotide
  Antisense strand to SEQ ID NO: 736058
gauauuggaggacuauaac

SEQ ID NO: 736060 - RNA, 19 nt, Artificial Sequence
  Description of Artificial Sequence: Synthetic oligonucleotide
  Sense strand starting at position 1222 of SEQ ID NO: 586678
gcagcuauguccggcccua

SEQ ID NO: 736061 - RNA, 19 nt, Artificial Sequence
  Description of Artificial Sequence: Synthetic oligonucleotide
  Antisense strand to SEQ ID NO: 736060
uagggccggacauagcugc

SEQ ID NO: 736062 - RNA, 19 nt, Artificial Sequence
  Description of Artificial Sequence: Synthetic oligonucleotide
  Sense strand starting at position 1325 of SEQ ID NO: 586678
gacccuuguuccugaggaa

SEQ ID NO: 736063 - RNA, 19 nt, Artificial Sequence
  Description of Artificial Sequence: Synthetic oligonucleotide
  Antisense strand to SEQ ID NO: 736062
uuccucaggaacaaggguc

SEQ ID NO: 736064 - RNA, 19 nt, Artificial Sequence
  Description of Artificial Sequence: Synthetic oligonucleotide
  Sense strand starting at position 1326 of SEQ ID NO: 586678
acccuuguuccugaggaau

SEQ ID NO: 736065 - RNA, 19 nt, Artificial Sequence
  Description of Artificial Sequence: Synthetic oligonucleotide
  Antisense strand to SEQ ID NO: 736064
auuccucaggaacaagggu

SEQ ID NO: 736066 - RNA, 19 nt, Artificial Sequence
  Description of Artificial Sequence: Synthetic oligonucleotide
  Sense strand starting at position 1328 of SEQ ID NO: 586678
ccuuguuccugaggaauga

SEQ ID NO: 736067 - RNA, 19 nt, Artificial Sequence
  Description of Artificial Sequence: Synthetic oligonucleotide
  Antisense strand to SEQ ID NO: 736066
ucauuccucaggaacaagg

SEQ ID NO: 736068 - RNA, 19 nt, Artificial Sequence
  Description of Artificial Sequence: Synthetic oligonucleotide
  Sense strand starting at position 1341 of SEQ ID NO: 586678
gaaugagucucagcggucu

SEQ ID NO: 736069 - RNA, 19 nt, Artificial Sequence
  Description of Artificial Sequence: Synthetic oligonucleotide
  Antisense strand to SEQ ID NO: 736068
agaccgcugagacucauuc

SEQ ID NO: 736070 - RNA, 19 nt, Artificial Sequence
  Description of Artificial Sequence: Synthetic oligonucleotide
  Sense strand starting at position 1508 of SEQ ID NO: 586678
cugugacgucgcuuccuua

SEQ ID NO: 736071 - RNA, 19 nt, Artificial Sequence
  Description of Artificial Sequence: Synthetic oligonucleotide
  Antisense strand to SEQ ID NO: 736070
uaaggaagcgacgucacag

SEQ ID NO: 736072 - RNA, 19 nt, Artificial Sequence
  Description of Artificial Sequence: Synthetic oligonucleotide
  Sense strand starting at position 1509 of SEQ ID NO: 586678
ugugacgucgcuuccuuaa

SEQ ID NO: 736073 - RNA, 19 nt, Artificial Sequence
  Description of Artificial Sequence: Synthetic oligonucleotide
  Antisense strand to SEQ ID NO: 736072
uuaaggaagcgacgucaca

SEQ ID NO: 736074 - RNA, 19 nt, Artificial Sequence
  Description of Artificial Sequence: Synthetic oligonucleotide
  Sense strand starting at position 1512 of SEQ ID NO: 586678
gacgucgcuuccuuaaguu

SEQ ID NO: 736075 - RNA, 19 nt, Artificial Sequence
  Description of Artificial Sequence: Synthetic oligonucleotide
  Antisense strand to SEQ ID NO: 736074
aacuuaaggaagcgacguc

SEQ ID NO: 736076 - RNA, 19 nt, Artificial Sequence
  Description of Artificial Sequence: Synthetic oligonucleotide
  Sense strand starting at position 1520 of SEQ ID NO: 586678
uuccuuaaguuugguaaac

SEQ ID NO: 736077 - RNA, 19 nt, Artificial Sequence
  Description of Artificial Sequence: Synthetic oligonucleotide
  Antisense strand to SEQ ID NO: 736076
guuuaccaaacuuaaggaa

SEQ ID NO: 736078 - RNA, 19 nt, Artificial Sequence
  Description of Artificial Sequence: Synthetic oligonucleotide
  Sense strand starting at position 1607 of SEQ ID NO: 586678
augagcuguugguagcaaa

SEQ ID NO: 736079 - RNA, 19 nt, Artificial Sequence
  Description of Artificial Sequence: Synthetic oligonucleotide
  Antisense strand to SEQ ID NO: 736078
uuugcuaccaacagcucau

SEQ ID NO: 736080 - RNA, 19 nt, Artificial Sequence
  Description of Artificial Sequence: Synthetic oligonucleotide
  Sense strand starting at position 1728 of SEQ ID NO: 586678
cgcgauaggucauuauaac

SEQ ID NO: 736081 - RNA, 19 nt, Artificial Sequence
  Description of Artificial Sequence: Synthetic oligonucleotide
  Antisense strand to SEQ ID NO: 736080
guuauaaugaccuaucgcg

SEQ ID NO: 736082 - RNA, 19 nt, Artificial Sequence
  Description of Artificial Sequence: Synthetic oligonucleotide
  Sense strand starting at position 1729 of SEQ ID NO: 586678
gcgauaggucauuauaacu

SEQ ID NO: 736083 - RNA, 19 nt, Artificial Sequence
  Description of Artificial Sequence: Synthetic oligonucleotide
  Antisense strand to SEQ ID NO: 736082
aguuauaaugaccuaucgc

SEQ ID NO: 736084 - RNA, 19 nt, Artificial Sequence
  Description of Artificial Sequence: Synthetic oligonucleotide
  Sense strand starting at position 2012 of SEQ ID NO: 586678
gcgccacgccgacuuauau

SEQ ID NO: 736085 - RNA, 19 nt, Artificial Sequence
  Description of Artificial Sequence: Synthetic oligonucleotide
  Antisense strand to SEQ ID NO: 736084
auauaagucggcguggcgc

SEQ ID NO: 736086 - RNA, 19 nt, Artificial Sequence
  Description of Artificial Sequence: Synthetic oligonucleotide
  Sense strand starting at position 2013 of SEQ ID NO: 586678
cgccacgccgacuuauaua

SEQ ID NO: 736087 - RNA, 19 nt, Artificial Sequence
  Description of Artificial Sequence: Synthetic oligonucleotide
  Antisense strand to SEQ ID NO: 736086
uauauaagucggcguggcg

SEQ ID NO: 736088 - RNA, 19 nt, Artificial Sequence
  Description of Artificial Sequence: Synthetic oligonucleotide
  Sense strand starting at position 2024 of SEQ ID NO: 586678
cuuauauaccagcgagugu

SEQ ID NO: 736089 - RNA, 19 nt, Artificial Sequence
  Description of Artificial Sequence: Synthetic oligonucleotide
  Antisense strand to SEQ ID NO: 736088
acacucgcugguauauaag

SEQ ID NO: 736090 - RNA, 19 nt, Artificial Sequence
  Description of Artificial Sequence: Synthetic oligonucleotide
  Sense strand starting at position 2081 of SEQ ID NO: 586678
agcuucugccaaugaggaa

SEQ ID NO: 736091 - RNA, 19 nt, Artificial Sequence
  Description of Artificial Sequence: Synthetic oligonucleotide
  Antisense strand to SEQ ID NO: 736090
uuccucauuggcagaagcu

SEQ ID NO: 736092 - RNA, 19 nt, Artificial Sequence
  Description of Artificial Sequence: Synthetic oligonucleotide
  Sense strand starting at position 2310 of SEQ ID NO: 586678
guagaugugcuucaggaac

SEQ ID NO: 736093 - RNA, 19 nt, Artificial Sequence
  Description of Artificial Sequence: Synthetic oligonucleotide
  Antisense strand to SEQ ID NO: 736092
guuccugaagcacaucuac

SEQ ID NO: 736094 - RNA, 19 nt, Artificial Sequence
  Description of Artificial Sequence: Synthetic oligonucleotide
  Sense strand starting at position 2368 of SEQ ID NO: 586678
caaagaggauucugggauu

SEQ ID NO: 736095 - RNA, 19 nt, Artificial Sequence
  Description of Artificial Sequence: Synthetic oligonucleotide
  Antisense strand to SEQ ID NO: 736094
aaucccagaauccucuuug

SEQ ID NO: 736096 - RNA, 19 nt, Artificial Sequence
  Description of Artificial Sequence: Synthetic oligonucleotide
  Sense strand starting at position 2371 of SEQ ID NO: 586678
agaggauucugggauuugu

SEQ ID NO: 736097 - RNA, 19 nt, Artificial Sequence
  Description of Artificial Sequence: Synthetic oligonucleotide
  Antisense strand to SEQ ID NO: 736096
acaaaucccagaauccucu

SEQ ID NO: 736098 - RNA, 19 nt, Artificial Sequence
  Description of Artificial Sequence: Synthetic oligonucleotide
  Sense strand starting at position 2399 of SEQ ID NO: 586678
gggacguucggguggaaga

SEQ ID NO: 736099 - RNA, 19 nt, Artificial Sequence
  Description of Artificial Sequence: Synthetic oligonucleotide
  Antisense strand to SEQ ID NO: 736098
ucuuccacccgaacguccc

SEQ ID NO: 736100 - RNA, 19 nt, Artificial Sequence
  Description of Artificial Sequence: Synthetic oligonucleotide
  Sense strand starting at position 2400 of SEQ ID NO: 586678
ggacguucggguggaagau

SEQ ID NO: 736101 - RNA, 19 nt, Artificial Sequence
  Description of Artificial Sequence: Synthetic oligonucleotide
  Antisense strand to SEQ ID NO: 736100
aucuuccacccgaacgucc

SEQ ID NO: 736102 - RNA, 19 nt, Artificial Sequence
  Description of Artificial Sequence: Synthetic oligonucleotide
  Sense strand starting at position 2620 of SEQ ID NO: 586678
cuccuugcuccugaaggua

SEQ ID NO: 736103 - RNA, 19 nt, Artificial Sequence
  Description of Artificial Sequence: Synthetic oligonucleotide
  Antisense strand to SEQ ID NO: 736102
uaccuucaggagcaaggag

SEQ ID NO: 736104 - RNA, 19 nt, Artificial Sequence
  Description of Artificial Sequence: Synthetic oligonucleotide
  Sense strand starting at position 2641 of SEQ ID NO: 586678
cagcuaguuucugguugua

SEQ ID NO: 736105 - RNA, 19 nt, Artificial Sequence
  Description of Artificial Sequence: Synthetic oligonucleotide
  Antisense strand to SEQ ID NO: 736104
uacaaccagaaacuagcug

SEQ ID NO: 736106 - RNA, 19 nt, Artificial Sequence
  Description of Artificial Sequence: Synthetic oligonucleotide
  Sense strand starting at position 2692 of SEQ ID NO: 586678
cccguugccugaggagaaa

SEQ ID NO: 736107 - RNA, 19 nt, Artificial Sequence
  Description of Artificial Sequence: Synthetic oligonucleotide
  Antisense strand to SEQ ID NO: 736106
uuucuccucaggcaacggg

SEQ ID NO: 736108 - RNA, 19 nt, Artificial Sequence
  Description of Artificial Sequence: Synthetic oligonucleotide
  Sense strand starting at position 2708 of SEQ ID NO: 586678
aaacuuucucagggcgaca

SEQ ID NO: 736109 - RNA, 19 nt, Artificial Sequence
  Description of Artificial Sequence: Synthetic oligonucleotide
  Antisense strand to SEQ ID NO: 736108
ugucgcccugagaaaguuu

SEQ ID NO: 736110 - RNA, 19 nt, Artificial Sequence
  Description of Artificial Sequence: Synthetic oligonucleotide
  Sense strand starting at position 2807 of SEQ ID NO: 586678
gcaccaacgauaugaguga

SEQ ID NO: 736111 - RNA, 19 nt, Artificial Sequence
  Description of Artificial Sequence: Synthetic oligonucleotide
  Antisense strand to SEQ ID NO: 736110
ucacucauaucguuggugc

SEQ ID NO: 736112 - RNA, 19 nt, Artificial Sequence
  Description of Artificial Sequence: Synthetic oligonucleotide
  Sense strand starting at position 2811 of SEQ ID NO: 586678
caacgauaugagugagaau

SEQ ID NO: 736113 - RNA, 19 nt, Artificial Sequence
  Description of Artificial Sequence: Synthetic oligonucleotide
  Antisense strand to SEQ ID NO: 736112
auucucacucauaucguug

SEQ ID NO: 736114 - RNA, 19 nt, Artificial Sequence
  Description of Artificial Sequence: Synthetic oligonucleotide
  Sense strand starting at position 2814 of SEQ ID NO: 586678
cgauaugagugagaauaag

SEQ ID NO: 736115 - RNA, 19 nt, Artificial Sequence
  Description of Artificial Sequence: Synthetic oligonucleotide
  Antisense strand to SEQ ID NO: 736114
cuuauucucacucauaucg

SEQ ID NO: 736116 - RNA, 19 nt, Artificial Sequence
  Description of Artificial Sequence: Synthetic oligonucleotide
  Sense strand starting at position 2949 of SEQ ID NO: 586678
aaccgcuaucccugagaga

SEQ ID NO: 736117 - RNA, 19 nt, Artificial Sequence
  Description of Artificial Sequence: Synthetic oligonucleotide
  Antisense strand to SEQ ID NO: 736116
ucucucagggauagcgguu

SEQ ID NO: 736118 - RNA, 19 nt, Artificial Sequence
  Description of Artificial Sequence: Synthetic oligonucleotide
  Sense strand starting at position 2950 of SEQ ID NO: 586678
accgcuaucccugagagag

SEQ ID NO: 736119 - RNA, 19 nt, Artificial Sequence
  Description of Artificial Sequence: Synthetic oligonucleotide
  Antisense strand to SEQ ID NO: 736118
cucucucagggauagcggu

SEQ ID NO: 736120 - RNA, 19 nt, Artificial Sequence
  Description of Artificial Sequence: Synthetic oligonucleotide
  Sense strand starting at position 3016 of SEQ ID NO: 586678
ggaagaacuucucugcaaa

SEQ ID NO: 736121 - RNA, 19 nt, Artificial Sequence
  Description of Artificial Sequence: Synthetic oligonucleotide
  Antisense strand to SEQ ID NO: 736120
uuugcagagaaguucuucc

SEQ ID NO: 736122 - RNA, 19 nt, Artificial Sequence
  Description of Artificial Sequence: Synthetic oligonucleotide
  Sense strand starting at position 3457 of SEQ ID NO: 586678
cgccucuucuuucuuguua

SEQ ID NO: 736123 - RNA, 19 nt, Artificial Sequence
  Description of Artificial Sequence: Synthetic oligonucleotide
  Antisense strand to SEQ ID NO: 736122
uaacaagaaagaagaggcg

SEQ ID NO: 736124 - RNA, 19 nt, Artificial Sequence
  Description of Artificial Sequence: Synthetic oligonucleotide
  Sense strand starting at position 3494 of SEQ ID NO: 586678
ugcugagcuugugcacaaa

SEQ ID NO: 736125 - RNA, 19 nt, Artificial Sequence
  Description of Artificial Sequence: Synthetic oligonucleotide
  Antisense strand to SEQ ID NO: 736124
uuugugcacaagcucagca

SEQ ID NO: 736126 - RNA, 19 nt, Artificial Sequence
  Description of Artificial Sequence: Synthetic oligonucleotide
  Sense strand starting at position 2063 of SEQ ID NO: 586679
gcagcuauguccggcccua

SEQ ID NO: 736127 - RNA, 19 nt, Artificial Sequence
  Description of Artificial Sequence: Synthetic oligonucleotide
  Antisense strand to SEQ ID NO: 736126
uagggccggacauagcugc

SEQ ID NO: 736128 - RNA, 19 nt, Artificial Sequence
  Description of Artificial Sequence: Synthetic oligonucleotide
  Sense strand starting at position 2166 of SEQ ID NO: 586679
gacccuuguuccugaggaa

SEQ ID NO: 736129 - RNA, 19 nt, Artificial Sequence
  Description of Artificial Sequence: Synthetic oligonucleotide
  Antisense strand to SEQ ID NO: 736128
uuccucaggaacaaggguc

SEQ ID NO: 736130 - RNA, 19 nt, Artificial Sequence
  Description of Artificial Sequence: Synthetic oligonucleotide
  Sense strand starting at position 2167 of SEQ ID NO: 586679
acccuuguuccugaggaau

SEQ ID NO: 736131 - RNA, 19 nt, Artificial Sequence
  Description of Artificial Sequence: Synthetic oligonucleotide
  Antisense strand to SEQ ID NO: 736130
auuccucaggaacaagggu

SEQ ID NO: 736132 - RNA, 19 nt, Artificial Sequence
  Description of Artificial Sequence: Synthetic oligonucleotide
  Sense strand starting at position 2169 of SEQ ID NO: 586679
ccuuguuccugaggaauga

SEQ ID NO: 736133 - RNA, 19 nt, Artificial Sequence
  Description of Artificial Sequence: Synthetic oligonucleotide
  Antisense strand to SEQ ID NO: 736132
ucauuccucaggaacaagg

SEQ ID NO: 736134 - RNA, 19 nt, Artificial Sequence
  Description of Artificial Sequence: Synthetic oligonucleotide
  Sense strand starting at position 2182 of SEQ ID NO: 586679
gaaugagucucagcggucu

SEQ ID NO: 736135 - RNA, 19 nt, Artificial Sequence
  Description of Artificial Sequence: Synthetic oligonucleotide
  Antisense strand to SEQ ID NO: 736134
agaccgcugagacucauuc

SEQ ID NO: 736136 - RNA, 19 nt, Artificial Sequence
  Description of Artificial Sequence: Synthetic oligonucleotide
  Sense strand starting at position 2349 of SEQ ID NO: 586679
cugugacgucgcuuccuua

SEQ ID NO: 736137 - RNA, 19 nt, Artificial Sequence
  Description of Artificial Sequence: Synthetic oligonucleotide
  Antisense strand to SEQ ID NO: 736136
uaaggaagcgacgucacag

SEQ ID NO: 736138 - RNA, 19 nt, Artificial Sequence
  Description of Artificial Sequence: Synthetic oligonucleotide
  Sense strand starting at position 2350 of SEQ ID NO: 586679
ugugacgucgcuuccuuaa

SEQ ID NO: 736139 - RNA, 19 nt, Artificial Sequence
  Description of Artificial Sequence: Synthetic oligonucleotide
  Antisense strand to SEQ ID NO: 736138
uuaaggaagcgacgucaca

SEQ ID NO: 736140 - RNA, 19 nt, Artificial Sequence
  Description of Artificial Sequence: Synthetic oligonucleotide
  Sense strand starting at position 2353 of SEQ ID NO: 586679
gacgucgcuuccuuaaguu

SEQ ID NO: 736141 - RNA, 19 nt, Artificial Sequence
  Description of Artificial Sequence: Synthetic oligonucleotide
  Antisense strand to SEQ ID NO: 736140
aacuuaaggaagcgacguc

SEQ ID NO: 736142 - RNA, 19 nt, Artificial Sequence
  Description of Artificial Sequence: Synthetic oligonucleotide
  Sense strand starting at position 2361 of SEQ ID NO: 586679
uuccuuaaguuugguaaac

SEQ ID NO: 736143 - RNA, 19 nt, Artificial Sequence
  Description of Artificial Sequence: Synthetic oligonucleotide
  Antisense strand to SEQ ID NO: 736142
guuuaccaaacuuaaggaa

SEQ ID NO: 736144 - RNA, 19 nt, Artificial Sequence
  Description of Artificial Sequence: Synthetic oligonucleotide
  Sense strand starting at position 2448 of SEQ ID NO: 586679
augagcuguugguagcaaa

SEQ ID NO: 736145 - RNA, 19 nt, Artificial Sequence
  Description of Artificial Sequence: Synthetic oligonucleotide
  Antisense strand to SEQ ID NO: 736144
uuugcuaccaacagcucau

SEQ ID NO: 736146 - RNA, 19 nt, Artificial Sequence
  Description of Artificial Sequence: Synthetic oligonucleotide
  Sense strand starting at position 2569 of SEQ ID NO: 586679
cgcgauaggucauuauaac

SEQ ID NO: 736147 - RNA, 19 nt, Artificial Sequence
  Description of Artificial Sequence: Synthetic oligonucleotide
  Antisense strand to SEQ ID NO: 736146
guuauaaugaccuaucgcg

SEQ ID NO: 736148 - RNA, 19 nt, Artificial Sequence
  Description of Artificial Sequence: Synthetic oligonucleotide
  Sense strand starting at position 2570 of SEQ ID NO: 586679
gcgauaggucauuauaacu

SEQ ID NO: 736149 - RNA, 19 nt, Artificial Sequence
  Description of Artificial Sequence: Synthetic oligonucleotide
  Antisense strand to SEQ ID NO: 736148
aguuauaaugaccuaucgc

SEQ ID NO: 736150 - RNA, 19 nt, Artificial Sequence
  Description of Artificial Sequence: Synthetic oligonucleotide
  Sense strand starting at position 2853 of SEQ ID NO: 586679
gcgccacgccgacuuauau

SEQ ID NO: 736151 - RNA, 19 nt, Artificial Sequence
  Description of Artificial Sequence: Synthetic oligonucleotide
  Antisense strand to SEQ ID NO: 736150
auauaagucggcguggcgc

SEQ ID NO: 736152 - RNA, 19 nt, Artificial Sequence
  Description of Artificial Sequence: Synthetic oligonucleotide
  Sense strand starting at position 2854 of SEQ ID NO: 586679
cgccacgccgacuuauaua

SEQ ID NO: 736153 - RNA, 19 nt, Artificial Sequence
  Description of Artificial Sequence: Synthetic oligonucleotide
  Antisense strand to SEQ ID NO: 736152
uauauaagucggcguggcg

SEQ ID NO: 736154 - RNA, 19 nt, Artificial Sequence
  Description of Artificial Sequence: Synthetic oligonucleotide
  Sense strand starting at position 2865 of SEQ ID NO: 586679
cuuauauaccagcgagugu

SEQ ID NO: 736155 - RNA, 19 nt, Artificial Sequence
  Description of Artificial Sequence: Synthetic oligonucleotide
  Antisense strand to SEQ ID NO: 736154
acacucgcugguauauaag

SEQ ID NO: 736156 - RNA, 19 nt, Artificial Sequence
  Description of Artificial Sequence: Synthetic oligonucleotide
  Sense strand starting at position 2922 of SEQ ID NO: 586679
agcuucugccaaugaggaa

SEQ ID NO: 736157 - RNA, 19 nt, Artificial Sequence
  Description of Artificial Sequence: Synthetic oligonucleotide
  Antisense strand to SEQ ID NO: 736156
uuccucauuggcagaagcu

SEQ ID NO: 736158 - RNA, 19 nt, Artificial Sequence
  Description of Artificial Sequence: Synthetic oligonucleotide
  Sense strand starting at position 3151 of SEQ ID NO: 586679
guagaugugcuucaggaac

SEQ ID NO: 736159 - RNA, 19 nt, Artificial Sequence
  Description of Artificial Sequence: Synthetic oligonucleotide
  Antisense strand to SEQ ID NO: 736158
guuccugaagcacaucuac

SEQ ID NO: 736160 - RNA, 19 nt, Artificial Sequence
  Description of Artificial Sequence: Synthetic oligonucleotide
  Sense strand starting at position 3209 of SEQ ID NO: 586679
caaagaggauucugggauu

SEQ ID NO: 736161 - RNA, 19 nt, Artificial Sequence
  Description of Artificial Sequence: Synthetic oligonucleotide
  Antisense strand to SEQ ID NO: 736160
aaucccagaauccucuuug

SEQ ID NO: 736162 - RNA, 19 nt, Artificial Sequence
  Description of Artificial Sequence: Synthetic oligonucleotide
  Sense strand starting at position 3212 of SEQ ID NO: 586679
agaggauucugggauuugu

SEQ ID NO: 736163 - RNA, 19 nt, Artificial Sequence
  Description of Artificial Sequence: Synthetic oligonucleotide
  Antisense strand to SEQ ID NO: 736162
acaaaucccagaauccucu

SEQ ID NO: 736164 - RNA, 19 nt, Artificial Sequence
  Description of Artificial Sequence: Synthetic oligonucleotide
  Sense strand starting at position 3240 of SEQ ID NO: 586679
gggacguucggguggaaga

SEQ ID NO: 736165 - RNA, 19 nt, Artificial Sequence
  Description of Artificial Sequence: Synthetic oligonucleotide
  Antisense strand to SEQ ID NO: 736164
ucuuccacccgaacguccc

SEQ ID NO: 736166 - RNA, 19 nt, Artificial Sequence
  Description of Artificial Sequence: Synthetic oligonucleotide
  Sense strand starting at position 3241 of SEQ ID NO: 586679
ggacguucggguggaagau

SEQ ID NO: 736167 - RNA, 19 nt, Artificial Sequence
  Description of Artificial Sequence: Synthetic oligonucleotide
  Antisense strand to SEQ ID NO: 736166
aucuuccacccgaacgucc

SEQ ID NO: 736168 - RNA, 19 nt, Artificial Sequence
  Description of Artificial Sequence: Synthetic oligonucleotide
  Sense strand starting at position 3461 of SEQ ID NO: 586679
cuccuugcuccugaaggua

SEQ ID NO: 736169 - RNA, 19 nt, Artificial Sequence
  Description of Artificial Sequence: Synthetic oligonucleotide
  Antisense strand to SEQ ID NO: 736168
uaccuucaggagcaaggag

SEQ ID NO: 736170 - RNA, 19 nt, Artificial Sequence
  Description of Artificial Sequence: Synthetic oligonucleotide
  Sense strand starting at position 3482 of SEQ ID NO: 586679
cagcuaguuucugguugua

SEQ ID NO: 736171 - RNA, 19 nt, Artificial Sequence
  Description of Artificial Sequence: Synthetic oligonucleotide
  Antisense strand to SEQ ID NO: 736170
uacaaccagaaacuagcug

SEQ ID NO: 736172 - RNA, 19 nt, Artificial Sequence
  Description of Artificial Sequence: Synthetic oligonucleotide
  Sense strand starting at position 3533 of SEQ ID NO: 586679
cccguugccugaggagaaa

SEQ ID NO: 736173 - RNA, 19 nt, Artificial Sequence
  Description of Artificial Sequence: Synthetic oligonucleotide
  Antisense strand to SEQ ID NO: 736172
uuucuccucaggcaacggg

SEQ ID NO: 736174 - RNA, 19 nt, Artificial Sequence
  Description of Artificial Sequence: Synthetic oligonucleotide
  Sense strand starting at position 3549 of SEQ ID NO: 586679
aaacuuucucagggcgaca

SEQ ID NO: 736175 - RNA, 19 nt, Artificial Sequence
  Description of Artificial Sequence: Synthetic oligonucleotide
  Antisense strand to SEQ ID NO: 736174
ugucgcccugagaaaguuu

SEQ ID NO: 736176 - RNA, 19 nt, Artificial Sequence
  Description of Artificial Sequence: Synthetic oligonucleotide
  Sense strand starting at position 3648 of SEQ ID NO: 586679
gcaccaacgauaugaguga

SEQ ID NO: 736177 - RNA, 19 nt, Artificial Sequence
  Description of Artificial Sequence: Synthetic oligonucleotide
  Antisense strand to SEQ ID NO: 736176
ucacucauaucguuggugc

SEQ ID NO: 736178 - RNA, 19 nt, Artificial Sequence
  Description of Artificial Sequence: Synthetic oligonucleotide
  Sense strand starting at position 3652 of SEQ ID NO: 586679
caacgauaugagugagaau

SEQ ID NO: 736179 - RNA, 19 nt, Artificial Sequence
  Description of Artificial Sequence: Synthetic oligonucleotide
  Antisense strand to SEQ ID NO: 736178
auucucacucauaucguug

SEQ ID NO: 736180 - RNA, 19 nt, Artificial Sequence
  Description of Artificial Sequence: Synthetic oligonucleotide
  Sense strand starting at position 3655 of SEQ ID NO: 586679
cgauaugagugagaauaag

SEQ ID NO: 736181 - RNA, 19 nt, Artificial Sequence
  Description of Artificial Sequence: Synthetic oligonucleotide
  Antisense strand to SEQ ID NO: 736180
cuuauucucacucauaucg

SEQ ID NO: 736182 - RNA, 19 nt, Artificial Sequence
  Description of Artificial Sequence: Synthetic oligonucleotide
  Sense strand starting at position 3790 of SEQ ID NO: 586679
aaccgcuaucccugagaga

SEQ ID NO: 736183 - RNA, 19 nt, Artificial Sequence
  Description of Artificial Sequence: Synthetic oligonucleotide
  Antisense strand to SEQ ID NO: 736182
ucucucagggauagcgguu

SEQ ID NO: 736184 - RNA, 19 nt, Artificial Sequence
  Description of Artificial Sequence: Synthetic oligonucleotide
  Sense strand starting at position 3791 of SEQ ID NO: 586679
accgcuaucccugagagag

SEQ ID NO: 736185 - RNA, 19 nt, Artificial Sequence
  Description of Artificial Sequence: Synthetic oligonucleotide
  Antisense strand to SEQ ID NO: 736184
cucucucagggauagcggu

SEQ ID NO: 736186 - RNA, 19 nt, Artificial Sequence
  Description of Artificial Sequence: Synthetic oligonucleotide
  Sense strand starting at position 3857 of SEQ ID NO: 586679
ggaagaacuucucugcaaa

SEQ ID NO: 736187 - RNA, 19 nt, Artificial Sequence
  Description of Artificial Sequence: Synthetic oligonucleotide
  Antisense strand to SEQ ID NO: 736186
uuugcagagaaguucuucc

SEQ ID NO: 736188 - RNA, 19 nt, Artificial Sequence
  Description of Artificial Sequence: Synthetic oligonucleotide
  Sense strand starting at position 6 of SEQ ID NO: 586680
gcauuauuagggcagucau

SEQ ID NO: 736189 - RNA, 19 nt, Artificial Sequence
  Description of Artificial Sequence: Synthetic oligonucleotide
  Antisense strand to SEQ ID NO: 736188
augacugcccuaauaaugc

SEQ ID NO: 736190 - RNA, 19 nt, Artificial Sequence
  Description of Artificial Sequence: Synthetic oligonucleotide
  Sense strand starting at position 47 of SEQ ID NO: 586680
uguccauaagacggauaga

SEQ ID NO: 736191 - RNA, 19 nt, Artificial Sequence
  Description of Artificial Sequence: Synthetic oligonucleotide
  Antisense strand to SEQ ID NO: 736190
ucuauccgucuuauggaca

SEQ ID NO: 736192 - RNA, 19 nt, Artificial Sequence
  Description of Artificial Sequence: Synthetic oligonucleotide
  Sense strand starting at position 117 of SEQ ID NO: 586680
ccagaacaugaugguuaua

SEQ ID NO: 736193 - RNA, 19 nt, Artificial Sequence
  Description of Artificial Sequence: Synthetic oligonucleotide
  Antisense strand to SEQ ID NO: 736192
uauaaccaucauguucugg

SEQ ID NO: 736194 - RNA, 19 nt, Artificial Sequence
  Description of Artificial Sequence: Synthetic oligonucleotide
  Sense strand starting at position 119 of SEQ ID NO: 586680
agaacaugaugguuauauc

SEQ ID NO: 736195 - RNA, 19 nt, Artificial Sequence
  Description of Artificial Sequence: Synthetic oligonucleotide
  Antisense strand to SEQ ID NO: 736194
gauauaaccaucauguucu

SEQ ID NO: 736196 - RNA, 19 nt, Artificial Sequence
  Description of Artificial Sequence: Synthetic oligonucleotide
  Sense strand starting at position 169 of SEQ ID NO: 586680
cccaguaucuccuugaaag

SEQ ID NO: 736197 - RNA, 19 nt, Artificial Sequence
  Description of Artificial Sequence: Synthetic oligonucleotide
  Antisense strand to SEQ ID NO: 736196
cuuucaaggagauacuggg

SEQ ID NO: 736198 - RNA, 19 nt, Artificial Sequence
  Description of Artificial Sequence: Synthetic oligonucleotide
  Sense strand starting at position 170 of SEQ ID NO: 586680
ccaguaucuccuugaaagg

SEQ ID NO: 736199 - RNA, 19 nt, Artificial Sequence
  Description of Artificial Sequence: Synthetic oligonucleotide
  Antisense strand to SEQ ID NO: 736198
ccuuucaaggagauacugg

SEQ ID NO: 736200 - RNA, 19 nt, Artificial Sequence
  Description of Artificial Sequence: Synthetic oligonucleotide
  Sense strand starting at position 171 of SEQ ID NO: 586680
caguaucuccuugaaaggu

SEQ ID NO: 736201 - RNA, 19 nt, Artificial Sequence
  Description of Artificial Sequence: Synthetic oligonucleotide
  Antisense strand to SEQ ID NO: 736200
accuuucaaggagauacug

SEQ ID NO: 736202 - RNA, 19 nt, Artificial Sequence
  Description of Artificial Sequence: Synthetic oligonucleotide
  Sense strand starting at position 332 of SEQ ID NO: 586680
agcugaaucucugcaguga

SEQ ID NO: 736203 - RNA, 19 nt, Artificial Sequence
  Description of Artificial Sequence: Synthetic oligonucleotide
  Antisense strand to SEQ ID NO: 736202
ucacugcagagauucagcu

SEQ ID NO: 736204 - RNA, 19 nt, Artificial Sequence
  Description of Artificial Sequence: Synthetic oligonucleotide
  Sense strand starting at position 336 of SEQ ID NO: 586680
gaaucucugcagugacuca

SEQ ID NO: 736205 - RNA, 19 nt, Artificial Sequence
  Description of Artificial Sequence: Synthetic oligonucleotide
  Antisense strand to SEQ ID NO: 736204
ugagucacugcagagauuc

SEQ ID NO: 736206 - RNA, 19 nt, Artificial Sequence
  Description of Artificial Sequence: Synthetic oligonucleotide
  Sense strand starting at position 343 of SEQ ID NO: 586680
ugcagugacucagcagaga

SEQ ID NO: 736207 - RNA, 19 nt, Artificial Sequence
  Description of Artificial Sequence: Synthetic oligonucleotide
  Antisense strand to SEQ ID NO: 736206
ucucugcugagucacugca

SEQ ID NO: 736208 - RNA, 19 nt, Artificial Sequence
  Description of Artificial Sequence: Synthetic oligonucleotide
  Sense strand starting at position 440 of SEQ ID NO: 586680
gaggcuaucgaccaacaua

SEQ ID NO: 736209 - RNA, 19 nt, Artificial Sequence
  Description of Artificial Sequence: Synthetic oligonucleotide
  Antisense strand to SEQ ID NO: 736208
uauguuggucgauagccuc

SEQ ID NO: 736210 - RNA, 19 nt, Artificial Sequence
  Description of Artificial Sequence: Synthetic oligonucleotide
  Sense strand starting at position 541 of SEQ ID NO: 586680
uugucuuauuaccucagua

SEQ ID NO: 736211 - RNA, 19 nt, Artificial Sequence
  Description of Artificial Sequence: Synthetic oligonucleotide
  Antisense strand to SEQ ID NO: 736210
uacugagguaauaagacaa

SEQ ID NO: 736212 - RNA, 19 nt, Artificial Sequence
  Description of Artificial Sequence: Synthetic oligonucleotide
  Sense strand starting at position 543 of SEQ ID NO: 586680
gucuuauuaccucaguaaa

SEQ ID NO: 736213 - RNA, 19 nt, Artificial Sequence
  Description of Artificial Sequence: Synthetic oligonucleotide
  Antisense strand to SEQ ID NO: 736212
uuuacugagguaauaagac

SEQ ID NO: 736214 - RNA, 19 nt, Artificial Sequence
  Description of Artificial Sequence: Synthetic oligonucleotide
  Sense strand starting at position 655 of SEQ ID NO: 586680
ccaacuauuugaugagcca

SEQ ID NO: 736215 - RNA, 19 nt, Artificial Sequence
  Description of Artificial Sequence: Synthetic oligonucleotide
  Antisense strand to SEQ ID NO: 736214
uggcucaucaaauaguugg

SEQ ID NO: 736216 - RNA, 19 nt, Artificial Sequence
  Description of Artificial Sequence: Synthetic oligonucleotide
  Sense strand starting at position 866 of SEQ ID NO: 586680
augacaguuuggucacauc

SEQ ID NO: 736217 - RNA, 19 nt, Artificial Sequence
  Description of Artificial Sequence: Synthetic oligonucleotide
  Antisense strand to SEQ ID NO: 736216
gaugugaccaaacugucau

SEQ ID NO: 736218 - RNA, 19 nt, Artificial Sequence
  Description of Artificial Sequence: Synthetic oligonucleotide
  Sense strand starting at position 979 of SEQ ID NO: 586680
ccgugauaccugggucuug

SEQ ID NO: 736219 - RNA, 19 nt, Artificial Sequence
  Description of Artificial Sequence: Synthetic oligonucleotide
  Antisense strand to SEQ ID NO: 736218
caagacccagguaucacgg

SEQ ID NO: 736220 - RNA, 19 nt, Artificial Sequence
  Description of Artificial Sequence: Synthetic oligonucleotide
  Sense strand starting at position 980 of SEQ ID NO: 586680
cgugauaccugggucuuga

SEQ ID NO: 736221 - RNA, 19 nt, Artificial Sequence
  Description of Artificial Sequence: Synthetic oligonucleotide
  Antisense strand to SEQ ID NO: 736220
ucaagacccagguaucacg

SEQ ID NO: 736222 - RNA, 19 nt, Artificial Sequence
  Description of Artificial Sequence: Synthetic oligonucleotide
  Sense strand starting at position 1035 of SEQ ID NO: 586680
auuaucccguucuugaaau

SEQ ID NO: 736223 - RNA, 19 nt, Artificial Sequence
  Description of Artificial Sequence: Synthetic oligonucleotide
  Antisense strand to SEQ ID NO: 736222
auuucaagaacgggauaau

SEQ ID NO: 736224 - RNA, 19 nt, Artificial Sequence
  Description of Artificial Sequence: Synthetic oligonucleotide
  Sense strand starting at position 1178 of SEQ ID NO: 586680
agggcuuugccgggaucua

SEQ ID NO: 736225 - RNA, 19 nt, Artificial Sequence
  Description of Artificial Sequence: Synthetic oligonucleotide
  Antisense strand to SEQ ID NO: 736224
uagaucccggcaaagcccu

SEQ ID NO: 736226 - RNA, 19 nt, Artificial Sequence
  Description of Artificial Sequence: Synthetic oligonucleotide
  Sense strand starting at position 1179 of SEQ ID NO: 586680
gggcuuugccgggaucuau

SEQ ID NO: 736227 - RNA, 19 nt, Artificial Sequence
  Description of Artificial Sequence: Synthetic oligonucleotide
  Antisense strand to SEQ ID NO: 736226
auagaucccggcaaagccc

SEQ ID NO: 736228 - RNA, 19 nt, Artificial Sequence
  Description of Artificial Sequence: Synthetic oligonucleotide
  Sense strand starting at position 1183 of SEQ ID NO: 586680
uuugccgggaucuauaaau

SEQ ID NO: 736229 - RNA, 19 nt, Artificial Sequence
  Description of Artificial Sequence: Synthetic oligonucleotide
  Antisense strand to SEQ ID NO: 736228
auuuauagaucccggcaaa

SEQ ID NO: 736230 - RNA, 19 nt, Artificial Sequence
  Description of Artificial Sequence: Synthetic oligonucleotide
  Sense strand starting at position 1220 of SEQ ID NO: 586680
aacggcggagucuaagaau

SEQ ID NO: 736231 - RNA, 19 nt, Artificial Sequence
  Description of Artificial Sequence: Synthetic oligonucleotide
  Antisense strand to SEQ ID NO: 736230
auucuuagacuccgccguu

SEQ ID NO: 736232 - RNA, 19 nt, Artificial Sequence
  Description of Artificial Sequence: Synthetic oligonucleotide
  Sense strand starting at position 1257 of SEQ ID NO: 586680
gaagccggagucuaaauau

SEQ ID NO: 736233 - RNA, 19 nt, Artificial Sequence
  Description of Artificial Sequence: Synthetic oligonucleotide
  Antisense strand to SEQ ID NO: 736232
auauuuagacuccggcuuc

SEQ ID NO: 736234 - RNA, 19 nt, Artificial Sequence
  Description of Artificial Sequence: Synthetic oligonucleotide
  Sense strand starting at position 1325 of SEQ ID NO: 586680
ugcagcaaugacugaguau

SEQ ID NO: 736235 - RNA, 19 nt, Artificial Sequence
  Description of Artificial Sequence: Synthetic oligonucleotide
  Antisense strand to SEQ ID NO: 736234
auacucagucauugcugca

SEQ ID NO: 736236 - RNA, 19 nt, Artificial Sequence
  Description of Artificial Sequence: Synthetic oligonucleotide
  Sense strand starting at position 1326 of SEQ ID NO: 586680
gcagcaaugacugaguaua

SEQ ID NO: 736237 - RNA, 19 nt, Artificial Sequence
  Description of Artificial Sequence: Synthetic oligonucleotide
  Antisense strand to SEQ ID NO: 736236
uauacucagucauugcugc

SEQ ID NO: 736238 - RNA, 19 nt, Artificial Sequence
  Description of Artificial Sequence: Synthetic oligonucleotide
  Sense strand starting at position 1328 of SEQ ID NO: 586680
agcaaugacugaguauaaa

SEQ ID NO: 736239 - RNA, 19 nt, Artificial Sequence
  Description of Artificial Sequence: Synthetic oligonucleotide
  Antisense strand to SEQ ID NO: 736238
uuuauacucagucauugcu

SEQ ID NO: 736240 - RNA, 19 nt, Artificial Sequence
  Description of Artificial Sequence: Synthetic oligonucleotide
  Sense strand starting at position 1364 of SEQ ID NO: 586680
gggugaugccaggaucuaa

SEQ ID NO: 736241 - RNA, 19 nt, Artificial Sequence
  Description of Artificial Sequence: Synthetic oligonucleotide
  Antisense strand to SEQ ID NO: 736240
uuagauccuggcaucaccc

SEQ ID NO: 736242 - RNA, 19 nt, Artificial Sequence
  Description of Artificial Sequence: Synthetic oligonucleotide
  Sense strand starting at position 1401 of SEQ ID NO: 586680
gggugagaccagggucauu

SEQ ID NO: 736243 - RNA, 19 nt, Artificial Sequence
  Description of Artificial Sequence: Synthetic oligonucleotide
  Antisense strand to SEQ ID NO: 736242
aaugacccuggucucaccc

SEQ ID NO: 736244 - RNA, 19 nt, Artificial Sequence
  Description of Artificial Sequence: Synthetic oligonucleotide
  Sense strand starting at position 1593 of SEQ ID NO: 586680
ccgccugucgguagaguuu

SEQ ID NO: 736245 - RNA, 19 nt, Artificial Sequence
  Description of Artificial Sequence: Synthetic oligonucleotide
  Antisense strand to SEQ ID NO: 736244
aaacucuaccgacaggcgg

SEQ ID NO: 736246 - RNA, 19 nt, Artificial Sequence
  Description of Artificial Sequence: Synthetic oligonucleotide
  Sense strand starting at position 2101 of SEQ ID NO: 586680
ccgccauggccacaaagau

SEQ ID NO: 736247 - RNA, 19 nt, Artificial Sequence
  Description of Artificial Sequence: Synthetic oligonucleotide
  Antisense strand to SEQ ID NO: 736246
aucuuuguggccauggcgg

SEQ ID NO: 736248 - RNA, 19 nt, Artificial Sequence
  Description of Artificial Sequence: Synthetic oligonucleotide
  Sense strand starting at position 2224 of SEQ ID NO: 586680
gagauucugcugcagaaac

SEQ ID NO: 736249 - RNA, 19 nt, Artificial Sequence
  Description of Artificial Sequence: Synthetic oligonucleotide
  Antisense strand to SEQ ID NO: 736248
guuucugcagcagaaucuc

SEQ ID NO: 736250 - RNA, 19 nt, Artificial Sequence
  Description of Artificial Sequence: Synthetic oligonucleotide
  Sense strand starting at position 3308 of SEQ ID NO: 586680
gugcgaaauaaaugagaaa

SEQ ID NO: 736251 - RNA, 19 nt, Artificial Sequence
  Description of Artificial Sequence: Synthetic oligonucleotide
  Antisense strand to SEQ ID NO: 736250
uuucucauuuauuucgcac

SEQ ID NO: 736252 - RNA, 19 nt, Artificial Sequence
  Description of Artificial Sequence: Synthetic oligonucleotide
  Sense strand starting at position 3311 of SEQ ID NO: 586680
cgaaauaaaugagaaauag

SEQ ID NO: 736253 - RNA, 19 nt, Artificial Sequence
  Description of Artificial Sequence: Synthetic oligonucleotide
  Antisense strand to SEQ ID NO: 736252
cuauuucucauuuauuucg

SEQ ID NO: 736254 - RNA, 19 nt, Artificial Sequence
  Description of Artificial Sequence: Synthetic oligonucleotide
  Sense strand starting at position 3609 of SEQ ID NO: 586680
ggcgaaggguggucuugaa

SEQ ID NO: 736255 - RNA, 19 nt, Artificial Sequence
  Description of Artificial Sequence: Synthetic oligonucleotide
  Antisense strand to SEQ ID NO: 736254
uucaagaccacccuucgcc

SEQ ID NO: 736256 - RNA, 19 nt, Artificial Sequence
  Description of Artificial Sequence: Synthetic oligonucleotide
  Sense strand starting at position 3616 of SEQ ID NO: 586680
gguggucuugaaugaugaa

SEQ ID NO: 736257 - RNA, 19 nt, Artificial Sequence
  Description of Artificial Sequence: Synthetic oligonucleotide
  Antisense strand to SEQ ID NO: 736256
uucaucauucaagaccacc

SEQ ID NO: 736258 - RNA, 19 nt, Artificial Sequence
  Description of Artificial Sequence: Synthetic oligonucleotide
  Sense strand starting at position 3617 of SEQ ID NO: 586680
guggucuugaaugaugaau

SEQ ID NO: 736259 - RNA, 19 nt, Artificial Sequence
  Description of Artificial Sequence: Synthetic oligonucleotide
  Antisense strand to SEQ ID NO: 736258
auucaucauucaagaccac

SEQ ID NO: 736260 - RNA, 19 nt, Artificial Sequence
  Description of Artificial Sequence: Synthetic oligonucleotide
  Sense strand starting at position 3788 of SEQ ID NO: 586680
aggaauuuguucuagagaa

SEQ ID NO: 736261 - RNA, 19 nt, Artificial Sequence
  Description of Artificial Sequence: Synthetic oligonucleotide
  Antisense strand to SEQ ID NO: 736260
uucucuagaacaaauuccu

SEQ ID NO: 736262 - RNA, 19 nt, Artificial Sequence
  Description of Artificial Sequence: Synthetic oligonucleotide
  Sense strand starting at position 3841 of SEQ ID NO: 586680
ggccuuaauugguuacuua

SEQ ID NO: 736263 - RNA, 19 nt, Artificial Sequence
  Description of Artificial Sequence: Synthetic oligonucleotide
  Antisense strand to SEQ ID NO: 736262
uaaguaaccaauuaaggcc

SEQ ID NO: 736264 - RNA, 19 nt, Artificial Sequence
  Description of Artificial Sequence: Synthetic oligonucleotide
  Sense strand starting at position 3842 of SEQ ID NO: 586680
gccuuaauugguuacuuaa

SEQ ID NO: 736265 - RNA, 19 nt, Artificial Sequence
  Description of Artificial Sequence: Synthetic oligonucleotide
  Antisense strand to SEQ ID NO: 736264
uuaaguaaccaauuaaggc

SEQ ID NO: 736266 - RNA, 19 nt, Artificial Sequence
  Description of Artificial Sequence: Synthetic oligonucleotide
  Sense strand starting at position 3947 of SEQ ID NO: 586680
cuaaaucgguucuuccaaa

SEQ ID NO: 736267 - RNA, 19 nt, Artificial Sequence
  Description of Artificial Sequence: Synthetic oligonucleotide
  Antisense strand to SEQ ID NO: 736266
uuuggaagaaccgauuuag

SEQ ID NO: 736268 - RNA, 19 nt, Artificial Sequence
  Description of Artificial Sequence: Synthetic oligonucleotide
  Sense strand starting at position 49 of SEQ ID NO: 586681
ggaacuuggccagggugau

SEQ ID NO: 736269 - RNA, 19 nt, Artificial Sequence
  Description of Artificial Sequence: Synthetic oligonucleotide
  Antisense strand to SEQ ID NO: 736268
aucacccuggccaaguucc

SEQ ID NO: 736270 - RNA, 19 nt, Artificial Sequence
  Description of Artificial Sequence: Synthetic oligonucleotide
  Sense strand starting at position 92 of SEQ ID NO: 586681
agcucagucuucccuaguu

SEQ ID NO: 736271 - RNA, 19 nt, Artificial Sequence
  Description of Artificial Sequence: Synthetic oligonucleotide
  Antisense strand to SEQ ID NO: 736270
aacuagggaagacugagcu

SEQ ID NO: 736272 - RNA, 19 nt, Artificial Sequence
  Description of Artificial Sequence: Synthetic oligonucleotide
  Sense strand starting at position 94 of SEQ ID NO: 586681
cucagucuucccuaguuau

SEQ ID NO: 736273 - RNA, 19 nt, Artificial Sequence
  Description of Artificial Sequence: Synthetic oligonucleotide
  Antisense strand to SEQ ID NO: 736272
auaacuagggaagacugag

SEQ ID NO: 736274 - RNA, 19 nt, Artificial Sequence
  Description of Artificial Sequence: Synthetic oligonucleotide
  Sense strand starting at position 122 of SEQ ID NO: 586681
cccagaacccuugguacaa

SEQ ID NO: 736275 - RNA, 19 nt, Artificial Sequence
  Description of Artificial Sequence: Synthetic oligonucleotide
  Antisense strand to SEQ ID NO: 736274
uuguaccaaggguucuggg

SEQ ID NO: 736276 - RNA, 19 nt, Artificial Sequence
  Description of Artificial Sequence: Synthetic oligonucleotide
  Sense strand starting at position 698 of SEQ ID NO: 586681
guuguuucuccaggugaca

SEQ ID NO: 736277 - RNA, 19 nt, Artificial Sequence
  Description of Artificial Sequence: Synthetic oligonucleotide
  Antisense strand to SEQ ID NO: 736276
ugucaccuggagaaacaac

SEQ ID NO: 736278 - RNA, 19 nt, Artificial Sequence
  Description of Artificial Sequence: Synthetic oligonucleotide
  Sense strand starting at position 700 of SEQ ID NO: 586681
uguuucuccaggugacagu

SEQ ID NO: 736279 - RNA, 19 nt, Artificial Sequence
  Description of Artificial Sequence: Synthetic oligonucleotide
  Antisense strand to SEQ ID NO: 736278
acugucaccuggagaaaca

SEQ ID NO: 736280 - RNA, 19 nt, Artificial Sequence
  Description of Artificial Sequence: Synthetic oligonucleotide
  Sense strand starting at position 867 of SEQ ID NO: 586681
gcugaaggauucuaauuaa

SEQ ID NO: 736281 - RNA, 19 nt, Artificial Sequence
  Description of Artificial Sequence: Synthetic oligonucleotide
  Antisense strand to SEQ ID NO: 736280
uuaauuagaauccuucagc

SEQ ID NO: 736282 - RNA, 19 nt, Artificial Sequence
  Description of Artificial Sequence: Synthetic oligonucleotide
  Sense strand starting at position 886 of SEQ ID NO: 586681
guaauagaaucuugcauuu

SEQ ID NO: 736283 - RNA, 19 nt, Artificial Sequence
  Description of Artificial Sequence: Synthetic oligonucleotide
  Antisense strand to SEQ ID NO: 736282
aaaugcaagauucuauuac

SEQ ID NO: 736284 - RNA, 19 nt, Artificial Sequence
  Description of Artificial Sequence: Synthetic oligonucleotide
  Sense strand starting at position 1327 of SEQ ID NO: 586681
gugccugcgaccuuuccaa

SEQ ID NO: 736285 - RNA, 19 nt, Artificial Sequence
  Description of Artificial Sequence: Synthetic oligonucleotide
  Antisense strand to SEQ ID NO: 736284
uuggaaaggucgcaggcac

SEQ ID NO: 736286 - RNA, 19 nt, Artificial Sequence
  Description of Artificial Sequence: Synthetic oligonucleotide
  Sense strand starting at position 1473 of SEQ ID NO: 586681
gcgaggguugugugacuuu

SEQ ID NO: 736287 - RNA, 19 nt, Artificial Sequence
  Description of Artificial Sequence: Synthetic oligonucleotide
  Antisense strand to SEQ ID NO: 736286
aaagucacacaacccucgc

SEQ ID NO: 736288 - RNA, 19 nt, Artificial Sequence
  Description of Artificial Sequence: Synthetic oligonucleotide
  Sense strand starting at position 2041 of SEQ ID NO: 586681
gacaauagccuccggcauu

SEQ ID NO: 736289 - RNA, 19 nt, Artificial Sequence
  Description of Artificial Sequence: Synthetic oligonucleotide
  Antisense strand to SEQ ID NO: 736288
aaugccggaggcuauuguc

SEQ ID NO: 736290 - RNA, 19 nt, Artificial Sequence
  Description of Artificial Sequence: Synthetic oligonucleotide
  Sense strand starting at position 2078 of SEQ ID NO: 586681
uguauucggccugaucuga

SEQ ID NO: 736291 - RNA, 19 nt, Artificial Sequence
  Description of Artificial Sequence: Synthetic oligonucleotide
  Antisense strand to SEQ ID NO: 736290
ucagaucaggccgaauaca

SEQ ID NO: 736292 - RNA, 19 nt, Artificial Sequence
  Description of Artificial Sequence: Synthetic oligonucleotide
  Sense strand starting at position 2120 of SEQ ID NO: 586681
aggccaaagaagugacauu

SEQ ID NO: 736293 - RNA, 19 nt, Artificial Sequence
  Description of Artificial Sequence: Synthetic oligonucleotide
  Antisense strand to SEQ ID NO: 736292
aaugucacuucuuuggccu

SEQ ID NO: 736294 - RNA, 19 nt, Artificial Sequence
  Description of Artificial Sequence: Synthetic oligonucleotide
  Sense strand starting at position 2145 of SEQ ID NO: 586681
guuauuaacuaccuagaga

SEQ ID NO: 736295 - RNA, 19 nt, Artificial Sequence
  Description of Artificial Sequence: Synthetic oligonucleotide
  Antisense strand to SEQ ID NO: 736294
ucucuagguaguuaauaac

SEQ ID NO: 736296 - RNA, 19 nt, Artificial Sequence
  Description of Artificial Sequence: Synthetic oligonucleotide
  Sense strand starting at position 2170 of SEQ ID NO: 586681
gcgagccuuccguauuuca

SEQ ID NO: 736297 - RNA, 19 nt, Artificial Sequence
  Description of Artificial Sequence: Synthetic oligonucleotide
  Antisense strand to SEQ ID NO: 736296
ugaaauacggaaggcucgc

SEQ ID NO: 736298 - RNA, 19 nt, Artificial Sequence
  Description of Artificial Sequence: Synthetic oligonucleotide
  Sense strand starting at position 2204 of SEQ ID NO: 586681
ucgcaauuacccuaaagau

SEQ ID NO: 736299 - RNA, 19 nt, Artificial Sequence
  Description of Artificial Sequence: Synthetic oligonucleotide
  Antisense strand to SEQ ID NO: 736298
aucuuuaggguaauugcga

SEQ ID NO: 736300 - RNA, 19 nt, Artificial Sequence
  Description of Artificial Sequence: Synthetic oligonucleotide
  Sense strand starting at position 2251 of SEQ ID NO: 586681
ccgugcucucgauccuuau

SEQ ID NO: 736301 - RNA, 19 nt, Artificial Sequence
  Description of Artificial Sequence: Synthetic oligonucleotide
  Antisense strand to SEQ ID NO: 736300
auaaggaucgagagcacgg

SEQ ID NO: 736302 - RNA, 19 nt, Artificial Sequence
  Description of Artificial Sequence: Synthetic oligonucleotide
  Sense strand starting at position 2254 of SEQ ID NO: 586681
ugcucucgauccuuauauu

SEQ ID NO: 736303 - RNA, 19 nt, Artificial Sequence
  Description of Artificial Sequence: Synthetic oligonucleotide
  Antisense strand to SEQ ID NO: 736302
aauauaaggaucgagagca

SEQ ID NO: 736304 - RNA, 19 nt, Artificial Sequence
  Description of Artificial Sequence: Synthetic oligonucleotide
  Sense strand starting at position 2416 of SEQ ID NO: 586681
cuguaucuugguuaacgca

SEQ ID NO: 736305 - RNA, 19 nt, Artificial Sequence
  Description of Artificial Sequence: Synthetic oligonucleotide
  Antisense strand to SEQ ID NO: 736304
ugcguuaaccaagauacag

SEQ ID NO: 736306 - RNA, 19 nt, Artificial Sequence
  Description of Artificial Sequence: Synthetic oligonucleotide
  Sense strand starting at position 2684 of SEQ ID NO: 586681
ucacacauuucugguccau

SEQ ID NO: 736307 - RNA, 19 nt, Artificial Sequence
  Description of Artificial Sequence: Synthetic oligonucleotide
  Antisense strand to SEQ ID NO: 736306
auggaccagaaauguguga

SEQ ID NO: 736308 - RNA, 19 nt, Artificial Sequence
  Description of Artificial Sequence: Synthetic oligonucleotide
  Sense strand starting at position 2846 of SEQ ID NO: 586681
ugccuugacuuccucuaga

SEQ ID NO: 736309 - RNA, 19 nt, Artificial Sequence
  Description of Artificial Sequence: Synthetic oligonucleotide
  Antisense strand to SEQ ID NO: 736308
ucuagaggaagucaaggca

SEQ ID NO: 736310 - RNA, 19 nt, Artificial Sequence
  Description of Artificial Sequence: Synthetic oligonucleotide
  Sense strand starting at position 3082 of SEQ ID NO: 586681
gcaagccuuccaugaaacu

SEQ ID NO: 736311 - RNA, 19 nt, Artificial Sequence
  Description of Artificial Sequence: Synthetic oligonucleotide
  Antisense strand to SEQ ID NO: 736310
aguuucauggaaggcuugc

SEQ ID NO: 736312 - RNA, 19 nt, Artificial Sequence
  Description of Artificial Sequence: Synthetic oligonucleotide
  Sense strand starting at position 3093 of SEQ ID NO: 586681
augaaacuuuccuauggaa

SEQ ID NO: 736313 - RNA, 19 nt, Artificial Sequence
  Description of Artificial Sequence: Synthetic oligonucleotide
  Antisense strand to SEQ ID NO: 736312
uuccauaggaaaguuucau

SEQ ID NO: 736314 - RNA, 19 nt, Artificial Sequence
  Description of Artificial Sequence: Synthetic oligonucleotide
  Sense strand starting at position 3146 of SEQ ID NO: 586681
ucuguugccuuaucacauu

SEQ ID NO: 736315 - RNA, 19 nt, Artificial Sequence
  Description of Artificial Sequence: Synthetic oligonucleotide
  Antisense strand to SEQ ID NO: 736314
aaugugauaaggcaacaga

SEQ ID NO: 736316 - RNA, 19 nt, Artificial Sequence
  Description of Artificial Sequence: Synthetic oligonucleotide
  Sense strand starting at position 3401 of SEQ ID NO: 586681
ucaaauagcugguauuaca

SEQ ID NO: 736317 - RNA, 19 nt, Artificial Sequence
  Description of Artificial Sequence: Synthetic oligonucleotide
  Antisense strand to SEQ ID NO: 736316
uguaauaccagcuauuuga

SEQ ID NO: 736318 - RNA, 19 nt, Artificial Sequence
  Description of Artificial Sequence: Synthetic oligonucleotide
  Sense strand starting at position 3494 of SEQ ID NO: 586681
uguuaaucgcuuugugcca

SEQ ID NO: 736319 - RNA, 19 nt, Artificial Sequence
  Description of Artificial Sequence: Synthetic oligonucleotide
  Antisense strand to SEQ ID NO: 736318
uggcacaaagcgauuaaca

SEQ ID NO: 736320 - RNA, 19 nt, Artificial Sequence
  Description of Artificial Sequence: Synthetic oligonucleotide
  Sense strand starting at position 3509 of SEQ ID NO: 586681
gccagacucugugcugaau

SEQ ID NO: 736321 - RNA, 19 nt, Artificial Sequence
  Description of Artificial Sequence: Synthetic oligonucleotide
  Antisense strand to SEQ ID NO: 736320
auucagcacagagucuggc

SEQ ID NO: 736322 - RNA, 19 nt, Artificial Sequence
  Description of Artificial Sequence: Synthetic oligonucleotide
  Sense strand starting at position 3511 of SEQ ID NO: 586681
cagacucugugcugaauuu

SEQ ID NO: 736323 - RNA, 19 nt, Artificial Sequence
  Description of Artificial Sequence: Synthetic oligonucleotide
  Antisense strand to SEQ ID NO: 736322
aaauucagcacagagucug

SEQ ID NO: 736324 - RNA, 19 nt, Artificial Sequence
  Description of Artificial Sequence: Synthetic oligonucleotide
  Sense strand starting at position 3518 of SEQ ID NO: 586681
ugugcugaauuucucauau

SEQ ID NO: 736325 - RNA, 19 nt, Artificial Sequence
  Description of Artificial Sequence: Synthetic oligonucleotide
  Antisense strand to SEQ ID NO: 736324
auaugagaaauucagcaca

SEQ ID NO: 736326 - RNA, 19 nt, Artificial Sequence
  Description of Artificial Sequence: Synthetic oligonucleotide
  Sense strand starting at position 3636 of SEQ ID NO: 586681
uggucacagagcugguaaa

SEQ ID NO: 736327 - RNA, 19 nt, Artificial Sequence
  Description of Artificial Sequence: Synthetic oligonucleotide
  Antisense strand to SEQ ID NO: 736326
uuuaccagcucugugacca

SEQ ID NO: 736328 - RNA, 19 nt, Artificial Sequence
  Description of Artificial Sequence: Synthetic oligonucleotide
  Sense strand starting at position 3676 of SEQ ID NO: 586681
ccagaucuaucugcucaug

SEQ ID NO: 736329 - RNA, 19 nt, Artificial Sequence
  Description of Artificial Sequence: Synthetic oligonucleotide
  Antisense strand to SEQ ID NO: 736328
caugagcagauagaucugg

SEQ ID NO: 736330 - RNA, 19 nt, Artificial Sequence
  Description of Artificial Sequence: Synthetic oligonucleotide
  Sense strand starting at position 3678 of SEQ ID NO: 586681
agaucuaucugcucauguu

SEQ ID NO: 736331 - RNA, 19 nt, Artificial Sequence
  Description of Artificial Sequence: Synthetic oligonucleotide
  Antisense strand to SEQ ID NO: 736330
aacaugagcagauagaucu

SEQ ID NO: 736332 - RNA, 19 nt, Artificial Sequence
  Description of Artificial Sequence: Synthetic oligonucleotide
  Sense strand starting at position 3684 of SEQ ID NO: 586681
aucugcucauguuuaucua

SEQ ID NO: 736333 - RNA, 19 nt, Artificial Sequence
  Description of Artificial Sequence: Synthetic oligonucleotide
  Antisense strand to SEQ ID NO: 736332
uagauaaacaugagcagau

SEQ ID NO: 736334 - RNA, 19 nt, Artificial Sequence
  Description of Artificial Sequence: Synthetic oligonucleotide
  Sense strand starting at position 3704 of SEQ ID NO: 586681
ucaucaguuugguagaacu

SEQ ID NO: 736335 - RNA, 19 nt, Artificial Sequence
  Description of Artificial Sequence: Synthetic oligonucleotide
  Antisense strand to SEQ ID NO: 736334
aguucuaccaaacugauga

SEQ ID NO: 736336 - RNA, 19 nt, Artificial Sequence
  Description of Artificial Sequence: Synthetic oligonucleotide
  Sense strand starting at position 3756 of SEQ ID NO: 586681
aguauuaaugcuuacagag

SEQ ID NO: 736337 - RNA, 19 nt, Artificial Sequence
  Description of Artificial Sequence: Synthetic oligonucleotide
  Antisense strand to SEQ ID NO: 736336
cucuguaagcauuaauacu

SEQ ID NO: 736338 - RNA, 19 nt, Artificial Sequence
  Description of Artificial Sequence: Synthetic oligonucleotide
  Sense strand starting at position 3812 of SEQ ID NO: 586681
uacucuaguggauggaaau

SEQ ID NO: 736339 - RNA, 19 nt, Artificial Sequence
  Description of Artificial Sequence: Synthetic oligonucleotide
  Antisense strand to SEQ ID NO: 736338
auuuccauccacuagagua

SEQ ID NO: 736340 - RNA, 19 nt, Artificial Sequence
  Description of Artificial Sequence: Synthetic oligonucleotide
  Sense strand starting at position 3823 of SEQ ID NO: 586681
auggaaauagaguguucua

SEQ ID NO: 736341 - RNA, 19 nt, Artificial Sequence
  Description of Artificial Sequence: Synthetic oligonucleotide
  Antisense strand to SEQ ID NO: 736340
uagaacacucuauuuccau

SEQ ID NO: 736342 - RNA, 19 nt, Artificial Sequence
  Description of Artificial Sequence: Synthetic oligonucleotide
  Sense strand starting at position 3826 of SEQ ID NO: 586681
gaaauagaguguucuaauu

SEQ ID NO: 736343 - RNA, 19 nt, Artificial Sequence
  Description of Artificial Sequence: Synthetic oligonucleotide
  Antisense strand to SEQ ID NO: 736342
aauuagaacacucuauuuc

SEQ ID NO: 736344 - RNA, 19 nt, Artificial Sequence
  Description of Artificial Sequence: Synthetic oligonucleotide
  Sense strand starting at position 3937 of SEQ ID NO: 586681
uuauaugaauguuacgagu

SEQ ID NO: 736345 - RNA, 19 nt, Artificial Sequence
  Description of Artificial Sequence: Synthetic oligonucleotide
  Antisense strand to SEQ ID NO: 736344
acucguaacauucauauaa

SEQ ID NO: 736346 - RNA, 19 nt, Artificial Sequence
  Description of Artificial Sequence: Synthetic oligonucleotide
  Sense strand starting at position 3960 of SEQ ID NO: 586681
uugcuuagagauugauaua

SEQ ID NO: 736347 - RNA, 19 nt, Artificial Sequence
  Description of Artificial Sequence: Synthetic oligonucleotide
  Antisense strand to SEQ ID NO: 736346
uauaucaaucucuaagcaa

SEQ ID NO: 736348 - RNA, 19 nt, Artificial Sequence
  Description of Artificial Sequence: Synthetic oligonucleotide
  Sense strand starting at position 93 of SEQ ID NO: 586682
gggacaaauucucugucca

SEQ ID NO: 736349 - RNA, 19 nt, Artificial Sequence
  Description of Artificial Sequence: Synthetic oligonucleotide
  Antisense strand to SEQ ID NO: 736348
uggacagagaauuuguccc

SEQ ID NO: 736350 - RNA, 19 nt, Artificial Sequence
  Description of Artificial Sequence: Synthetic oligonucleotide
  Sense strand starting at position 94 of SEQ ID NO: 586682
ggacaaauucucuguccac

SEQ ID NO: 736351 - RNA, 19 nt, Artificial Sequence
  Description of Artificial Sequence: Synthetic oligonucleotide
  Antisense strand to SEQ ID NO: 736350
guggacagagaauuugucc

SEQ ID NO: 736352 - RNA, 19 nt, Artificial Sequence
  Description of Artificial Sequence: Synthetic oligonucleotide
  Sense strand starting at position 136 of SEQ ID NO: 586682
agguaugcgagcucugcau

SEQ ID NO: 736353 - RNA, 19 nt, Artificial Sequence
  Description of Artificial Sequence: Synthetic oligonucleotide
  Antisense strand to SEQ ID NO: 736352
augcagagcucgcauaccu

SEQ ID NO: 736354 - RNA, 19 nt, Artificial Sequence
  Description of Artificial Sequence: Synthetic oligonucleotide
  Sense strand starting at position 140 of SEQ ID NO: 586682
augcgagcucugcauguaa

SEQ ID NO: 736355 - RNA, 19 nt, Artificial Sequence
  Description of Artificial Sequence: Synthetic oligonucleotide
  Antisense strand to SEQ ID NO: 736354
uuacaugcagagcucgcau

SEQ ID NO: 736356 - RNA, 19 nt, Artificial Sequence
  Description of Artificial Sequence: Synthetic oligonucleotide
  Sense strand starting at position 142 of SEQ ID NO: 586682
gcgagcucugcauguaaga

SEQ ID NO: 736357 - RNA, 19 nt, Artificial Sequence
  Description of Artificial Sequence: Synthetic oligonucleotide
  Antisense strand to SEQ ID NO: 736356
ucuuacaugcagagcucgc

SEQ ID NO: 736358 - RNA, 19 nt, Artificial Sequence
  Description of Artificial Sequence: Synthetic oligonucleotide
  Sense strand starting at position 221 of SEQ ID NO: 586682
ggaacuuggccagggugau

SEQ ID NO: 736359 - RNA, 19 nt, Artificial Sequence
  Description of Artificial Sequence: Synthetic oligonucleotide
  Antisense strand to SEQ ID NO: 736358
aucacccuggccaaguucc

SEQ ID NO: 736360 - RNA, 19 nt, Artificial Sequence
  Description of Artificial Sequence: Synthetic oligonucleotide
  Sense strand starting at position 264 of SEQ ID NO: 586682
agcucagucuucccuaguu

SEQ ID NO: 736361 - RNA, 19 nt, Artificial Sequence
  Description of Artificial Sequence: Synthetic oligonucleotide
  Antisense strand to SEQ ID NO: 736360
aacuagggaagacugagcu

SEQ ID NO: 736362 - RNA, 19 nt, Artificial Sequence
  Description of Artificial Sequence: Synthetic oligonucleotide
  Sense strand starting at position 266 of SEQ ID NO: 586682
cucagucuucccuaguuau

SEQ ID NO: 736363 - RNA, 19 nt, Artificial Sequence
  Description of Artificial Sequence: Synthetic oligonucleotide
  Antisense strand to SEQ ID NO: 736362
auaacuagggaagacugag

SEQ ID NO: 736364 - RNA, 19 nt, Artificial Sequence
  Description of Artificial Sequence: Synthetic oligonucleotide
  Sense strand starting at position 294 of SEQ ID NO: 586682
cccagaacccuugguacaa

SEQ ID NO: 736365 - RNA, 19 nt, Artificial Sequence
  Description of Artificial Sequence: Synthetic oligonucleotide
  Antisense strand to SEQ ID NO: 736364
uuguaccaaggguucuggg

SEQ ID NO: 736366 - RNA, 19 nt, Artificial Sequence
  Description of Artificial Sequence: Synthetic oligonucleotide
  Sense strand starting at position 870 of SEQ ID NO: 586682
guuguuucuccaggugaca

SEQ ID NO: 736367 - RNA, 19 nt, Artificial Sequence
  Description of Artificial Sequence: Synthetic oligonucleotide
  Antisense strand to SEQ ID NO: 736366
ugucaccuggagaaacaac

SEQ ID NO: 736368 - RNA, 19 nt, Artificial Sequence
  Description of Artificial Sequence: Synthetic oligonucleotide
  Sense strand starting at position 872 of SEQ ID NO: 586682
uguuucuccaggugacagu

SEQ ID NO: 736369 - RNA, 19 nt, Artificial Sequence
  Description of Artificial Sequence: Synthetic oligonucleotide
  Antisense strand to SEQ ID NO: 736368
acugucaccuggagaaaca

SEQ ID NO: 736370 - RNA, 19 nt, Artificial Sequence
  Description of Artificial Sequence: Synthetic oligonucleotide
  Sense strand starting at position 1039 of SEQ ID NO: 586682
gcugaaggauucuaauuaa

SEQ ID NO: 736371 - RNA, 19 nt, Artificial Sequence
  Description of Artificial Sequence: Synthetic oligonucleotide
  Antisense strand to SEQ ID NO: 736370
uuaauuagaauccuucagc

SEQ ID NO: 736372 - RNA, 19 nt, Artificial Sequence
  Description of Artificial Sequence: Synthetic oligonucleotide
  Sense strand starting at position 1058 of SEQ ID NO: 586682
guaauagaaucuugcauuu

SEQ ID NO: 736373 - RNA, 19 nt, Artificial Sequence
  Description of Artificial Sequence: Synthetic oligonucleotide
  Antisense strand to SEQ ID NO: 736372
aaaugcaagauucuauuac

SEQ ID NO: 736374 - RNA, 19 nt, Artificial Sequence
  Description of Artificial Sequence: Synthetic oligonucleotide
  Sense strand starting at position 1499 of SEQ ID NO: 586682
gugccugcgaccuuuccaa

SEQ ID NO: 736375 - RNA, 19 nt, Artificial Sequence
  Description of Artificial Sequence: Synthetic oligonucleotide
  Antisense strand to SEQ ID NO: 736374
uuggaaaggucgcaggcac

SEQ ID NO: 736376 - RNA, 19 nt, Artificial Sequence
  Description of Artificial Sequence: Synthetic oligonucleotide
  Sense strand starting at position 1645 of SEQ ID NO: 586682
gcgaggguugugugacuuu

SEQ ID NO: 736377 - RNA, 19 nt, Artificial Sequence
  Description of Artificial Sequence: Synthetic oligonucleotide
  Antisense strand to SEQ ID NO: 736376
aaagucacacaacccucgc

SEQ ID NO: 736378 - RNA, 19 nt, Artificial Sequence
  Description of Artificial Sequence: Synthetic oligonucleotide
  Sense strand starting at position 2213 of SEQ ID NO: 586682
gacaauagccuccggcauu

SEQ ID NO: 736379 - RNA, 19 nt, Artificial Sequence
  Description of Artificial Sequence: Synthetic oligonucleotide
  Antisense strand to SEQ ID NO: 736378
aaugccggaggcuauuguc

SEQ ID NO: 736380 - RNA, 19 nt, Artificial Sequence
  Description of Artificial Sequence: Synthetic oligonucleotide
  Sense strand starting at position 2250 of SEQ ID NO: 586682
uguauucggccugaucuga

SEQ ID NO: 736381 - RNA, 19 nt, Artificial Sequence
  Description of Artificial Sequence: Synthetic oligonucleotide
  Antisense strand to SEQ ID NO: 736380
ucagaucaggccgaauaca

SEQ ID NO: 736382 - RNA, 19 nt, Artificial Sequence
  Description of Artificial Sequence: Synthetic oligonucleotide
  Sense strand starting at position 2292 of SEQ ID NO: 586682
aggccaaagaagugacauu

SEQ ID NO: 736383 - RNA, 19 nt, Artificial Sequence
  Description of Artificial Sequence: Synthetic oligonucleotide
  Antisense strand to SEQ ID NO: 736382
aaugucacuucuuuggccu

SEQ ID NO: 736384 - RNA, 19 nt, Artificial Sequence
  Description of Artificial Sequence: Synthetic oligonucleotide
  Sense strand starting at position 2317 of SEQ ID NO: 586682
guuauuaacuaccuagaga

SEQ ID NO: 736385 - RNA, 19 nt, Artificial Sequence
  Description of Artificial Sequence: Synthetic oligonucleotide
  Antisense strand to SEQ ID NO: 736384
ucucuagguaguuaauaac

SEQ ID NO: 736386 - RNA, 19 nt, Artificial Sequence
  Description of Artificial Sequence: Synthetic oligonucleotide
  Sense strand starting at position 2342 of SEQ ID NO: 586682
gcgagccuuccguauuuca

SEQ ID NO: 736387 - RNA, 19 nt, Artificial Sequence
  Description of Artificial Sequence: Synthetic oligonucleotide
  Antisense strand to SEQ ID NO: 736386
ugaaauacggaaggcucgc

SEQ ID NO: 736388 - RNA, 19 nt, Artificial Sequence
  Description of Artificial Sequence: Synthetic oligonucleotide
  Sense strand starting at position 2376 of SEQ ID NO: 586682
ucgcaauuacccuaaagau

SEQ ID NO: 736389 - RNA, 19 nt, Artificial Sequence
  Description of Artificial Sequence: Synthetic oligonucleotide
  Antisense strand to SEQ ID NO: 736388
aucuuuaggguaauugcga

SEQ ID NO: 736390 - RNA, 19 nt, Artificial Sequence
  Description of Artificial Sequence: Synthetic oligonucleotide
  Sense strand starting at position 2423 of SEQ ID NO: 586682
ccgugcucucgauccuuau

SEQ ID NO: 736391 - RNA, 19 nt, Artificial Sequence
  Description of Artificial Sequence: Synthetic oligonucleotide
  Antisense strand to SEQ ID NO: 736390
auaaggaucgagagcacgg

SEQ ID NO: 736392 - RNA, 19 nt, Artificial Sequence
  Description of Artificial Sequence: Synthetic oligonucleotide
  Sense strand starting at position 2426 of SEQ ID NO: 586682
ugcucucgauccuuauauu

SEQ ID NO: 736393 - RNA, 19 nt, Artificial Sequence
  Description of Artificial Sequence: Synthetic oligonucleotide
  Antisense strand to SEQ ID NO: 736392
aauauaaggaucgagagca

SEQ ID NO: 736394 - RNA, 19 nt, Artificial Sequence
  Description of Artificial Sequence: Synthetic oligonucleotide
  Sense strand starting at position 2588 of SEQ ID NO: 586682
cuguaucuugguuaacgca

SEQ ID NO: 736395 - RNA, 19 nt, Artificial Sequence
  Description of Artificial Sequence: Synthetic oligonucleotide
  Antisense strand to SEQ ID NO: 736394
ugcguuaaccaagauacag

SEQ ID NO: 736396 - RNA, 19 nt, Artificial Sequence
  Description of Artificial Sequence: Synthetic oligonucleotide
  Sense strand starting at position 2856 of SEQ ID NO: 586682
ucacacauuucugguccau

SEQ ID NO: 736397 - RNA, 19 nt, Artificial Sequence
  Description of Artificial Sequence: Synthetic oligonucleotide
  Antisense strand to SEQ ID NO: 736396
auggaccagaaauguguga

SEQ ID NO: 736398 - RNA, 19 nt, Artificial Sequence
  Description of Artificial Sequence: Synthetic oligonucleotide
  Sense strand starting at position 3018 of SEQ ID NO: 586682
ugccuugacuuccucuaga

SEQ ID NO: 736399 - RNA, 19 nt, Artificial Sequence
  Description of Artificial Sequence: Synthetic oligonucleotide
  Antisense strand to SEQ ID NO: 736398
ucuagaggaagucaaggca

SEQ ID NO: 736400 - RNA, 19 nt, Artificial Sequence
  Description of Artificial Sequence: Synthetic oligonucleotide
  Sense strand starting at position 3254 of SEQ ID NO: 586682
gcaagccuuccaugaaacu

SEQ ID NO: 736401 - RNA, 19 nt, Artificial Sequence
  Description of Artificial Sequence: Synthetic oligonucleotide
  Antisense strand to SEQ ID NO: 736400
aguuucauggaaggcuugc

SEQ ID NO: 736402 - RNA, 19 nt, Artificial Sequence
  Description of Artificial Sequence: Synthetic oligonucleotide
  Sense strand starting at position 3265 of SEQ ID NO: 586682
augaaacuuuccuauggaa

SEQ ID NO: 736403 - RNA, 19 nt, Artificial Sequence
  Description of Artificial Sequence: Synthetic oligonucleotide
  Antisense strand to SEQ ID NO: 736402
uuccauaggaaaguuucau

SEQ ID NO: 736404 - RNA, 19 nt, Artificial Sequence
  Description of Artificial Sequence: Synthetic oligonucleotide
  Sense strand starting at position 3318 of SEQ ID NO: 586682
ucuguugccuuaucacauu

SEQ ID NO: 736405 - RNA, 19 nt, Artificial Sequence
  Description of Artificial Sequence: Synthetic oligonucleotide
  Antisense strand to SEQ ID NO: 736404
aaugugauaaggcaacaga

SEQ ID NO: 736406 - RNA, 19 nt, Artificial Sequence
  Description of Artificial Sequence: Synthetic oligonucleotide
  Sense strand starting at position 3573 of SEQ ID NO: 586682
ucaaauagcugguauuaca

SEQ ID NO: 736407 - RNA, 19 nt, Artificial Sequence
  Description of Artificial Sequence: Synthetic oligonucleotide
  Antisense strand to SEQ ID NO: 736406
uguaauaccagcuauuuga

SEQ ID NO: 736408 - RNA, 19 nt, Artificial Sequence
  Description of Artificial Sequence: Synthetic oligonucleotide
  Sense strand starting at position 3666 of SEQ ID NO: 586682
uguuaaucgcuuugugcca

SEQ ID NO: 736409 - RNA, 19 nt, Artificial Sequence
  Description of Artificial Sequence: Synthetic oligonucleotide
  Antisense strand to SEQ ID NO: 736408
uggcacaaagcgauuaaca

SEQ ID NO: 736410 - RNA, 19 nt, Artificial Sequence
  Description of Artificial Sequence: Synthetic oligonucleotide
  Sense strand starting at position 3681 of SEQ ID NO: 586682
gccagacucugugcugaau

SEQ ID NO: 736411 - RNA, 19 nt, Artificial Sequence
  Description of Artificial Sequence: Synthetic oligonucleotide
  Antisense strand to SEQ ID NO: 736410
auucagcacagagucuggc

SEQ ID NO: 736412 - RNA, 19 nt, Artificial Sequence
  Description of Artificial Sequence: Synthetic oligonucleotide
  Sense strand starting at position 3683 of SEQ ID NO: 586682
cagacucugugcugaauuu

SEQ ID NO: 736413 - RNA, 19 nt, Artificial Sequence
  Description of Artificial Sequence: Synthetic oligonucleotide
  Antisense strand to SEQ ID NO: 736412
aaauucagcacagagucug

SEQ ID NO: 736414 - RNA, 19 nt, Artificial Sequence
  Description of Artificial Sequence: Synthetic oligonucleotide
  Sense strand starting at position 3690 of SEQ ID NO: 586682
ugugcugaauuucucauau

SEQ ID NO: 736415 - RNA, 19 nt, Artificial Sequence
  Description of Artificial Sequence: Synthetic oligonucleotide
  Antisense strand to SEQ ID NO: 736414
auaugagaaauucagcaca

SEQ ID NO: 736416 - RNA, 19 nt, Artificial Sequence
  Description of Artificial Sequence: Synthetic oligonucleotide
  Sense strand starting at position 3808 of SEQ ID NO: 586682
uggucacagagcugguaaa

SEQ ID NO: 736417 - RNA, 19 nt, Artificial Sequence
  Description of Artificial Sequence: Synthetic oligonucleotide
  Antisense strand to SEQ ID NO: 736416
uuuaccagcucugugacca

SEQ ID NO: 736418 - RNA, 19 nt, Artificial Sequence
  Description of Artificial Sequence: Synthetic oligonucleotide
  Sense strand starting at position 3848 of SEQ ID NO: 586682
ccagaucuaucugcucaug

SEQ ID NO: 736419 - RNA, 19 nt, Artificial Sequence
  Description of Artificial Sequence: Synthetic oligonucleotide
  Antisense strand to SEQ ID NO: 736418
caugagcagauagaucugg

SEQ ID NO: 736420 - RNA, 19 nt, Artificial Sequence
  Description of Artificial Sequence: Synthetic oligonucleotide
  Sense strand starting at position 3850 of SEQ ID NO: 586682
agaucuaucugcucauguu

SEQ ID NO: 736421 - RNA, 19 nt, Artificial Sequence
  Description of Artificial Sequence: Synthetic oligonucleotide
  Antisense strand to SEQ ID NO: 736420
aacaugagcagauagaucu

SEQ ID NO: 736422 - RNA, 19 nt, Artificial Sequence
  Description of Artificial Sequence: Synthetic oligonucleotide
  Sense strand starting at position 3856 of SEQ ID NO: 586682
aucugcucauguuuaucua

SEQ ID NO: 736423 - RNA, 19 nt, Artificial Sequence
  Description of Artificial Sequence: Synthetic oligonucleotide
  Antisense strand to SEQ ID NO: 736422
uagauaaacaugagcagau

SEQ ID NO: 736424 - RNA, 19 nt, Artificial Sequence
  Description of Artificial Sequence: Synthetic oligonucleotide
  Sense strand starting at position 3876 of SEQ ID NO: 586682
ucaucaguuugguagaacu

SEQ ID NO: 736425 - RNA, 19 nt, Artificial Sequence
  Description of Artificial Sequence: Synthetic oligonucleotide
  Antisense strand to SEQ ID NO: 736424
aguucuaccaaacugauga

SEQ ID NO: 736426 - RNA, 19 nt, Artificial Sequence
  Description of Artificial Sequence: Synthetic oligonucleotide
  Sense strand starting at position 3928 of SEQ ID NO: 586682
aguauuaaugcuuacagag

SEQ ID NO: 736427 - RNA, 19 nt, Artificial Sequence
  Description of Artificial Sequence: Synthetic oligonucleotide
  Antisense strand to SEQ ID NO: 736426
cucuguaagcauuaauacu

SEQ ID NO: 736428 - RNA, 19 nt, Artificial Sequence
  Description of Artificial Sequence: Synthetic oligonucleotide
  Sense strand starting at position 137 of SEQ ID NO: 586683
augacaguuuggucacauc

SEQ ID NO: 736429 - RNA, 19 nt, Artificial Sequence
  Description of Artificial Sequence: Synthetic oligonucleotide
  Antisense strand to SEQ ID NO: 736428
gaugugaccaaacugucau

SEQ ID NO: 736430 - RNA, 19 nt, Artificial Sequence
  Description of Artificial Sequence: Synthetic oligonucleotide
  Sense strand starting at position 250 of SEQ ID NO: 586683
ccgugauaccugggucuug

SEQ ID NO: 736431 - RNA, 19 nt, Artificial Sequence
  Description of Artificial Sequence: Synthetic oligonucleotide
  Antisense strand to SEQ ID NO: 736430
caagacccagguaucacgg

SEQ ID NO: 736432 - RNA, 19 nt, Artificial Sequence
  Description of Artificial Sequence: Synthetic oligonucleotide
  Sense strand starting at position 251 of SEQ ID NO: 586683
cgugauaccugggucuuga

SEQ ID NO: 736433 - RNA, 19 nt, Artificial Sequence
  Description of Artificial Sequence: Synthetic oligonucleotide
  Antisense strand to SEQ ID NO: 736432
ucaagacccagguaucacg

SEQ ID NO: 736434 - RNA, 19 nt, Artificial Sequence
  Description of Artificial Sequence: Synthetic oligonucleotide
  Sense strand starting at position 306 of SEQ ID NO: 586683
auuaucccguucuugaaau

SEQ ID NO: 736435 - RNA, 19 nt, Artificial Sequence
  Description of Artificial Sequence: Synthetic oligonucleotide
  Antisense strand to SEQ ID NO: 736434
auuucaagaacgggauaau

SEQ ID NO: 736436 - RNA, 19 nt, Artificial Sequence
  Description of Artificial Sequence: Synthetic oligonucleotide
  Sense strand starting at position 449 of SEQ ID NO: 586683
agggcuuugccgggaucua

SEQ ID NO: 736437 - RNA, 19 nt, Artificial Sequence
  Description of Artificial Sequence: Synthetic oligonucleotide
  Antisense strand to SEQ ID NO: 736436
uagaucccggcaaagcccu

SEQ ID NO: 736438 - RNA, 19 nt, Artificial Sequence
  Description of Artificial Sequence: Synthetic oligonucleotide
  Sense strand starting at position 450 of SEQ ID NO: 586683
gggcuuugccgggaucuau

SEQ ID NO: 736439 - RNA, 19 nt, Artificial Sequence
  Description of Artificial Sequence: Synthetic oligonucleotide
  Antisense strand to SEQ ID NO: 736438
auagaucccggcaaagccc

SEQ ID NO: 736440 - RNA, 19 nt, Artificial Sequence
  Description of Artificial Sequence: Synthetic oligonucleotide
  Sense strand starting at position 454 of SEQ ID NO: 586683
uuugccgggaucuauaaau

SEQ ID NO: 736441 - RNA, 19 nt, Artificial Sequence
  Description of Artificial Sequence: Synthetic oligonucleotide
  Antisense strand to SEQ ID NO: 736440
auuuauagaucccggcaaa

SEQ ID NO: 736442 - RNA, 19 nt, Artificial Sequence
  Description of Artificial Sequence: Synthetic oligonucleotide
  Sense strand starting at position 491 of SEQ ID NO: 586683
aacggcggagucuaagaau

SEQ ID NO: 736443 - RNA, 19 nt, Artificial Sequence
  Description of Artificial Sequence: Synthetic oligonucleotide
  Antisense strand to SEQ ID NO: 736442
auucuuagacuccgccguu

SEQ ID NO: 736444 - RNA, 19 nt, Artificial Sequence
  Description of Artificial Sequence: Synthetic oligonucleotide
  Sense strand starting at position 528 of SEQ ID NO: 586683
gaagccggagucuaaauau

SEQ ID NO: 736445 - RNA, 19 nt, Artificial Sequence
  Description of Artificial Sequence: Synthetic oligonucleotide
  Antisense strand to SEQ ID NO: 736444
auauuuagacuccggcuuc

SEQ ID NO: 736446 - RNA, 19 nt, Artificial Sequence
  Description of Artificial Sequence: Synthetic oligonucleotide
  Sense strand starting at position 596 of SEQ ID NO: 586683
ugcagcaaugacugaguau

SEQ ID NO: 736447 - RNA, 19 nt, Artificial Sequence
  Description of Artificial Sequence: Synthetic oligonucleotide
  Antisense strand to SEQ ID NO: 736446
auacucagucauugcugca

SEQ ID NO: 736448 - RNA, 19 nt, Artificial Sequence
  Description of Artificial Sequence: Synthetic oligonucleotide
  Sense strand starting at position 597 of SEQ ID NO: 586683
gcagcaaugacugaguaua

SEQ ID NO: 736449 - RNA, 19 nt, Artificial Sequence
  Description of Artificial Sequence: Synthetic oligonucleotide
  Antisense strand to SEQ ID NO: 736448
uauacucagucauugcugc

SEQ ID NO: 736450 - RNA, 19 nt, Artificial Sequence
  Description of Artificial Sequence: Synthetic oligonucleotide
  Sense strand starting at position 599 of SEQ ID NO: 586683
agcaaugacugaguauaaa

SEQ ID NO: 736451 - RNA, 19 nt, Artificial Sequence
  Description of Artificial Sequence: Synthetic oligonucleotide
  Antisense strand to SEQ ID NO: 736450
uuuauacucagucauugcu

SEQ ID NO: 736452 - RNA, 19 nt, Artificial Sequence
  Description of Artificial Sequence: Synthetic oligonucleotide
  Sense strand starting at position 635 of SEQ ID NO: 586683
gggugaugccaggaucuaa

SEQ ID NO: 736453 - RNA, 19 nt, Artificial Sequence
  Description of Artificial Sequence: Synthetic oligonucleotide
  Antisense strand to SEQ ID NO: 736452
uuagauccuggcaucaccc

SEQ ID NO: 736454 - RNA, 19 nt, Artificial Sequence
  Description of Artificial Sequence: Synthetic oligonucleotide
  Sense strand starting at position 672 of SEQ ID NO: 586683
gggugagaccagggucauu

SEQ ID NO: 736455 - RNA, 19 nt, Artificial Sequence
  Description of Artificial Sequence: Synthetic oligonucleotide
  Antisense strand to SEQ ID NO: 736454
aaugacccuggucucaccc

SEQ ID NO: 736456 - RNA, 19 nt, Artificial Sequence
  Description of Artificial Sequence: Synthetic oligonucleotide
  Sense strand starting at position 864 of SEQ ID NO: 586683
ccgccugucgguagaguuu

SEQ ID NO: 736457 - RNA, 19 nt, Artificial Sequence
  Description of Artificial Sequence: Synthetic oligonucleotide
  Antisense strand to SEQ ID NO: 736456
aaacucuaccgacaggcgg

SEQ ID NO: 736458 - RNA, 19 nt, Artificial Sequence
  Description of Artificial Sequence: Synthetic oligonucleotide
  Sense strand starting at position 1372 of SEQ ID NO: 586683
ccgccauggccacaaagau

SEQ ID NO: 736459 - RNA, 19 nt, Artificial Sequence
  Description of Artificial Sequence: Synthetic oligonucleotide
  Antisense strand to SEQ ID NO: 736458
aucuuuguggccauggcgg

SEQ ID NO: 736460 - RNA, 19 nt, Artificial Sequence
  Description of Artificial Sequence: Synthetic oligonucleotide
  Sense strand starting at position 1495 of SEQ ID NO: 586683
gagauucugcugcagaaac

SEQ ID NO: 736461 - RNA, 19 nt, Artificial Sequence
  Description of Artificial Sequence: Synthetic oligonucleotide
  Antisense strand to SEQ ID NO: 736460
guuucugcagcagaaucuc

SEQ ID NO: 736462 - RNA, 19 nt, Artificial Sequence
  Description of Artificial Sequence: Synthetic oligonucleotide
  Sense strand starting at position 2579 of SEQ ID NO: 586683
gugcgaaauaaaugagaaa

SEQ ID NO: 736463 - RNA, 19 nt, Artificial Sequence
  Description of Artificial Sequence: Synthetic oligonucleotide
  Antisense strand to SEQ ID NO: 736462
uuucucauuuauuucgcac

SEQ ID NO: 736464 - RNA, 19 nt, Artificial Sequence
  Description of Artificial Sequence: Synthetic oligonucleotide
  Sense strand starting at position 2582 of SEQ ID NO: 586683
cgaaauaaaugagaaauag

SEQ ID NO: 736465 - RNA, 19 nt, Artificial Sequence
  Description of Artificial Sequence: Synthetic oligonucleotide
  Antisense strand to SEQ ID NO: 736464
cuauuucucauuuauuucg

SEQ ID NO: 736466 - RNA, 19 nt, Artificial Sequence
  Description of Artificial Sequence: Synthetic oligonucleotide
  Sense strand starting at position 2880 of SEQ ID NO: 586683
ggcgaaggguggucuugaa

SEQ ID NO: 736467 - RNA, 19 nt, Artificial Sequence
  Description of Artificial Sequence: Synthetic oligonucleotide
  Antisense strand to SEQ ID NO: 736466
uucaagaccacccuucgcc

SEQ ID NO: 736468 - RNA, 19 nt, Artificial Sequence
  Description of Artificial Sequence: Synthetic oligonucleotide
  Sense strand starting at position 2887 of SEQ ID NO: 586683
gguggucuugaaugaugaa

SEQ ID NO: 736469 - RNA, 19 nt, Artificial Sequence
  Description of Artificial Sequence: Synthetic oligonucleotide
  Antisense strand to SEQ ID NO: 736468
uucaucauucaagaccacc

SEQ ID NO: 736470 - RNA, 19 nt, Artificial Sequence
  Description of Artificial Sequence: Synthetic oligonucleotide
  Sense strand starting at position 2888 of SEQ ID NO: 586683
guggucuugaaugaugaau

SEQ ID NO: 736471 - RNA, 19 nt, Artificial Sequence
  Description of Artificial Sequence: Synthetic oligonucleotide
  Antisense strand to SEQ ID NO: 736470
auucaucauucaagaccac

SEQ ID NO: 736472 - RNA, 19 nt, Artificial Sequence
  Description of Artificial Sequence: Synthetic oligonucleotide
  Sense strand starting at position 3059 of SEQ ID NO: 586683
aggaauuuguucuagagaa

SEQ ID NO: 736473 - RNA, 19 nt, Artificial Sequence
  Description of Artificial Sequence: Synthetic oligonucleotide
  Antisense strand to SEQ ID NO: 736472
uucucuagaacaaauuccu

SEQ ID NO: 736474 - RNA, 19 nt, Artificial Sequence
  Description of Artificial Sequence: Synthetic oligonucleotide
  Sense strand starting at position 3112 of SEQ ID NO: 586683
ggccuuaauugguuacuua

SEQ ID NO: 736475 - RNA, 19 nt, Artificial Sequence
  Description of Artificial Sequence: Synthetic oligonucleotide
  Antisense strand to SEQ ID NO: 736474
uaaguaaccaauuaaggcc

SEQ ID NO: 736476 - RNA, 19 nt, Artificial Sequence
  Description of Artificial Sequence: Synthetic oligonucleotide
  Sense strand starting at position 3113 of SEQ ID NO: 586683
gccuuaauugguuacuuaa

SEQ ID NO: 736477 - RNA, 19 nt, Artificial Sequence
  Description of Artificial Sequence: Synthetic oligonucleotide
  Antisense strand to SEQ ID NO: 736476
uuaaguaaccaauuaaggc

SEQ ID NO: 736478 - RNA, 19 nt, Artificial Sequence
  Description of Artificial Sequence: Synthetic oligonucleotide
  Sense strand starting at position 3218 of SEQ ID NO: 586683
cuaaaucgguucuuccaaa

SEQ ID NO: 736479 - RNA, 19 nt, Artificial Sequence
  Description of Artificial Sequence: Synthetic oligonucleotide
  Antisense strand to SEQ ID NO: 736478
uuuggaagaaccgauuuag

SEQ ID NO: 736480 - RNA, 19 nt, Artificial Sequence
  Description of Artificial Sequence: Synthetic oligonucleotide
  Sense strand starting at position 3562 of SEQ ID NO: 586683
ucuggcacucgggagaaau

SEQ ID NO: 736481 - RNA, 19 nt, Artificial Sequence
  Description of Artificial Sequence: Synthetic oligonucleotide
  Antisense strand to SEQ ID NO: 736480
auuucucccgagugccaga

SEQ ID NO: 736482 - RNA, 19 nt, Artificial Sequence
  Description of Artificial Sequence: Synthetic oligonucleotide
  Sense strand starting at position 3594 of SEQ ID NO: 586683
auuauugaugucuggccga

SEQ ID NO: 736483 - RNA, 19 nt, Artificial Sequence
  Description of Artificial Sequence: Synthetic oligonucleotide
  Antisense strand to SEQ ID NO: 736482
ucggccagacaucaauaau

SEQ ID NO: 736484 - RNA, 19 nt, Artificial Sequence
  Description of Artificial Sequence: Synthetic oligonucleotide
  Sense strand starting at position 3599 of SEQ ID NO: 586683
ugaugucuggccgaggagu

SEQ ID NO: 736485 - RNA, 19 nt, Artificial Sequence
  Description of Artificial Sequence: Synthetic oligonucleotide
  Antisense strand to SEQ ID NO: 736484
acuccucggccagacauca

SEQ ID NO: 736486 - RNA, 19 nt, Artificial Sequence
  Description of Artificial Sequence: Synthetic oligonucleotide
  Sense strand starting at position 3667 of SEQ ID NO: 586683
cccagaucuuaggcagaga

SEQ ID NO: 736487 - RNA, 19 nt, Artificial Sequence
  Description of Artificial Sequence: Synthetic oligonucleotide
  Antisense strand to SEQ ID NO: 736486
ucucugccuaagaucuggg

SEQ ID NO: 736488 - RNA, 19 nt, Artificial Sequence
  Description of Artificial Sequence: Synthetic oligonucleotide
  Sense strand starting at position 3682 of SEQ ID NO: 586683
gagaaagcauauuccuguu

SEQ ID NO: 736489 - RNA, 19 nt, Artificial Sequence
  Description of Artificial Sequence: Synthetic oligonucleotide
  Antisense strand to SEQ ID NO: 736488
aacaggaauaugcuuucuc

SEQ ID NO: 736490 - RNA, 19 nt, Artificial Sequence
  Description of Artificial Sequence: Synthetic oligonucleotide
  Sense strand starting at position 3688 of SEQ ID NO: 586683
gcauauuccuguuuggaag

SEQ ID NO: 736491 - RNA, 19 nt, Artificial Sequence
  Description of Artificial Sequence: Synthetic oligonucleotide
  Antisense strand to SEQ ID NO: 736490
cuuccaaacaggaauaugc

SEQ ID NO: 736492 - RNA, 19 nt, Artificial Sequence
  Description of Artificial Sequence: Synthetic oligonucleotide
  Sense strand starting at position 3689 of SEQ ID NO: 586683
cauauuccuguuuggaaga

SEQ ID NO: 736493 - RNA, 19 nt, Artificial Sequence
  Description of Artificial Sequence: Synthetic oligonucleotide
  Antisense strand to SEQ ID NO: 736492
ucuuccaaacaggaauaug

SEQ ID NO: 736494 - RNA, 19 nt, Artificial Sequence
  Description of Artificial Sequence: Synthetic oligonucleotide
  Sense strand starting at position 3752 of SEQ ID NO: 586683
ccaggaauucgcuguggga

SEQ ID NO: 736495 - RNA, 19 nt, Artificial Sequence
  Description of Artificial Sequence: Synthetic oligonucleotide
  Antisense strand to SEQ ID NO: 736494
ucccacagcgaauuccugg

SEQ ID NO: 736496 - RNA, 19 nt, Artificial Sequence
  Description of Artificial Sequence: Synthetic oligonucleotide
  Sense strand starting at position 3754 of SEQ ID NO: 586683
aggaauucgcugugggaag

SEQ ID NO: 736497 - RNA, 19 nt, Artificial Sequence
  Description of Artificial Sequence: Synthetic oligonucleotide
  Antisense strand to SEQ ID NO: 736496
cuucccacagcgaauuccu

SEQ ID NO: 736498 - RNA, 19 nt, Artificial Sequence
  Description of Artificial Sequence: Synthetic oligonucleotide
  Sense strand starting at position 3766 of SEQ ID NO: 586683
ugggaagucuaagagagaa

SEQ ID NO: 736499 - RNA, 19 nt, Artificial Sequence
  Description of Artificial Sequence: Synthetic oligonucleotide
  Antisense strand to SEQ ID NO: 736498
uucucucuuagacuuccca

SEQ ID NO: 736500 - RNA, 19 nt, Artificial Sequence
  Description of Artificial Sequence: Synthetic oligonucleotide
  Sense strand starting at position 3817 of SEQ ID NO: 586683
guuaacgaaucuucuaaau

SEQ ID NO: 736501 - RNA, 19 nt, Artificial Sequence
  Description of Artificial Sequence: Synthetic oligonucleotide
  Antisense strand to SEQ ID NO: 736500
auuuagaagauucguuaac

SEQ ID NO: 736502 - RNA, 19 nt, Artificial Sequence
  Description of Artificial Sequence: Synthetic oligonucleotide
  Sense strand starting at position 3828 of SEQ ID NO: 586683
uucuaaaugugccugauuu

SEQ ID NO: 736503 - RNA, 19 nt, Artificial Sequence
  Description of Artificial Sequence: Synthetic oligonucleotide
  Antisense strand to SEQ ID NO: 736502
aaaucaggcacauuuagaa

SEQ ID NO: 736504 - RNA, 19 nt, Artificial Sequence
  Description of Artificial Sequence: Synthetic oligonucleotide
  Sense strand starting at position 3840 of SEQ ID NO: 586683
cugauuuacuuccagaaag

SEQ ID NO: 736505 - RNA, 19 nt, Artificial Sequence
  Description of Artificial Sequence: Synthetic oligonucleotide
  Antisense strand to SEQ ID NO: 736504
cuuucuggaaguaaaucag

SEQ ID NO: 736506 - RNA, 19 nt, Artificial Sequence
  Description of Artificial Sequence: Synthetic oligonucleotide
  Sense strand starting at position 3977 of SEQ ID NO: 586683
ucaguuccucuggacagau

SEQ ID NO: 736507 - RNA, 19 nt, Artificial Sequence
  Description of Artificial Sequence: Synthetic oligonucleotide
  Antisense strand to SEQ ID NO: 736506
aucuguccagaggaacuga

SEQ ID NO: 736508 - RNA, 19 nt, Artificial Sequence
  Description of Artificial Sequence: Synthetic oligonucleotide
  Sense strand starting at position 42 of SEQ ID NO: 586684
auggguauuucuccugcuu

SEQ ID NO: 736509 - RNA, 19 nt, Artificial Sequence
  Description of Artificial Sequence: Synthetic oligonucleotide
  Antisense strand to SEQ ID NO: 736508
aagcaggagaaauacccau

SEQ ID NO: 736510 - RNA, 19 nt, Artificial Sequence
  Description of Artificial Sequence: Synthetic oligonucleotide
  Sense strand starting at position 127 of SEQ ID NO: 586684
auugacuggcuaugauuaa

SEQ ID NO: 736511 - RNA, 19 nt, Artificial Sequence
  Description of Artificial Sequence: Synthetic oligonucleotide
  Antisense strand to SEQ ID NO: 736510
uuaaucauagccagucaau

SEQ ID NO: 736512 - RNA, 19 nt, Artificial Sequence
  Description of Artificial Sequence: Synthetic oligonucleotide
  Sense strand starting at position 134 of SEQ ID NO: 586684
ggcuaugauuaaucuggua

SEQ ID NO: 736513 - RNA, 19 nt, Artificial Sequence
  Description of Artificial Sequence: Synthetic oligonucleotide
  Antisense strand to SEQ ID NO: 736512
uaccagauuaaucauagcc

SEQ ID NO: 736514 - RNA, 19 nt, Artificial Sequence
  Description of Artificial Sequence: Synthetic oligonucleotide
  Sense strand starting at position 262 of SEQ ID NO: 586684
gcaguagucggcagacugu

SEQ ID NO: 736515 - RNA, 19 nt, Artificial Sequence
  Description of Artificial Sequence: Synthetic oligonucleotide
  Antisense strand to SEQ ID NO: 736514
acagucugccgacuacugc

SEQ ID NO: 736516 - RNA, 19 nt, Artificial Sequence
  Description of Artificial Sequence: Synthetic oligonucleotide
  Sense strand starting at position 578 of SEQ ID NO: 586684
gcucaauuagcuuagauca

SEQ ID NO: 736517 - RNA, 19 nt, Artificial Sequence
  Description of Artificial Sequence: Synthetic oligonucleotide
  Antisense strand to SEQ ID NO: 736516
ugaucuaagcuaauugagc

SEQ ID NO: 736518 - RNA, 19 nt, Artificial Sequence
  Description of Artificial Sequence: Synthetic oligonucleotide
  Sense strand starting at position 599 of SEQ ID NO: 586684
gaaggaaagcuauguaccu

SEQ ID NO: 736519 - RNA, 19 nt, Artificial Sequence
  Description of Artificial Sequence: Synthetic oligonucleotide
  Antisense strand to SEQ ID NO: 736518
agguacauagcuuuccuuc

SEQ ID NO: 736520 - RNA, 19 nt, Artificial Sequence
  Description of Artificial Sequence: Synthetic oligonucleotide
  Sense strand starting at position 658 of SEQ ID NO: 586684
ugcaauuuaugucccugua

SEQ ID NO: 736521 - RNA, 19 nt, Artificial Sequence
  Description of Artificial Sequence: Synthetic oligonucleotide
  Antisense strand to SEQ ID NO: 736520
uacagggacauaaauugca

SEQ ID NO: 736522 - RNA, 19 nt, Artificial Sequence
  Description of Artificial Sequence: Synthetic oligonucleotide
  Sense strand starting at position 733 of SEQ ID NO: 586684
auuagucagcuauaauagu

SEQ ID NO: 736523 - RNA, 19 nt, Artificial Sequence
  Description of Artificial Sequence: Synthetic oligonucleotide
  Antisense strand to SEQ ID NO: 736522
acuauuauagcugacuaau

SEQ ID NO: 736524 - RNA, 19 nt, Artificial Sequence
  Description of Artificial Sequence: Synthetic oligonucleotide
  Sense strand starting at position 747 of SEQ ID NO: 586684
auaguuuagcuguaaggga

SEQ ID NO: 736525 - RNA, 19 nt, Artificial Sequence
  Description of Artificial Sequence: Synthetic oligonucleotide
  Antisense strand to SEQ ID NO: 736524
ucccuuacagcuaaacuau

SEQ ID NO: 736526 - RNA, 19 nt, Artificial Sequence
  Description of Artificial Sequence: Synthetic oligonucleotide
  Sense strand starting at position 751 of SEQ ID NO: 586684
uuuagcuguaagggaauau

SEQ ID NO: 736527 - RNA, 19 nt, Artificial Sequence
  Description of Artificial Sequence: Synthetic oligonucleotide
  Antisense strand to SEQ ID NO: 736526
auauucccuuacagcuaaa

SEQ ID NO: 736528 - RNA, 19 nt, Artificial Sequence
  Description of Artificial Sequence: Synthetic oligonucleotide
  Sense strand starting at position 805 of SEQ ID NO: 586684
augugucuggcugaugaaa

SEQ ID NO: 736529 - RNA, 19 nt, Artificial Sequence
  Description of Artificial Sequence: Synthetic oligonucleotide
  Antisense strand to SEQ ID NO: 736528
uuucaucagccagacacau

SEQ ID NO: 736530 - RNA, 19 nt, Artificial Sequence
  Description of Artificial Sequence: Synthetic oligonucleotide
  Sense strand starting at position 858 of SEQ ID NO: 586684
ugugaacagucuucuuaaa

SEQ ID NO: 736531 - RNA, 19 nt, Artificial Sequence
  Description of Artificial Sequence: Synthetic oligonucleotide
  Antisense strand to SEQ ID NO: 736530
uuuaagaagacuguucaca

SEQ ID NO: 736532 - RNA, 19 nt, Artificial Sequence
  Description of Artificial Sequence: Synthetic oligonucleotide
  Sense strand starting at position 887 of SEQ ID NO: 586684
ggguccagauagucuauau

SEQ ID NO: 736533 - RNA, 19 nt, Artificial Sequence
  Description of Artificial Sequence: Synthetic oligonucleotide
  Antisense strand to SEQ ID NO: 736532
auauagacuaucuggaccc

SEQ ID NO: 736534 - RNA, 19 nt, Artificial Sequence
  Description of Artificial Sequence: Synthetic oligonucleotide
  Sense strand starting at position 986 of SEQ ID NO: 586684
gccuaagagaguugacaau

SEQ ID NO: 736535 - RNA, 19 nt, Artificial Sequence
  Description of Artificial Sequence: Synthetic oligonucleotide
  Antisense strand to SEQ ID NO: 736534
auugucaacucucuuaggc

SEQ ID NO: 736536 - RNA, 19 nt, Artificial Sequence
  Description of Artificial Sequence: Synthetic oligonucleotide
  Sense strand starting at position 1164 of SEQ ID NO: 586684
ggaguaaauucugcauuga

SEQ ID NO: 736537 - RNA, 19 nt, Artificial Sequence
  Description of Artificial Sequence: Synthetic oligonucleotide
  Antisense strand to SEQ ID NO: 736536
ucaaugcagaauuuacucc

SEQ ID NO: 736538 - RNA, 19 nt, Artificial Sequence
  Description of Artificial Sequence: Synthetic oligonucleotide
  Sense strand starting at position 1165 of SEQ ID NO: 586684
gaguaaauucugcauugac

SEQ ID NO: 736539 - RNA, 19 nt, Artificial Sequence
  Description of Artificial Sequence: Synthetic oligonucleotide
  Antisense strand to SEQ ID NO: 736538
gucaaugcagaauuuacuc

SEQ ID NO: 736540 - RNA, 19 nt, Artificial Sequence
  Description of Artificial Sequence: Synthetic oligonucleotide
  Sense strand starting at position 1216 of SEQ ID NO: 586684
uaauuaucgggucagcacu

SEQ ID NO: 736541 - RNA, 19 nt, Artificial Sequence
  Description of Artificial Sequence: Synthetic oligonucleotide
  Antisense strand to SEQ ID NO: 736540
agugcugacccgauaauua

SEQ ID NO: 736542 - RNA, 19 nt, Artificial Sequence
  Description of Artificial Sequence: Synthetic oligonucleotide
  Sense strand starting at position 2377 of SEQ ID NO: 586684
aggugaaacuuucuaggug

SEQ ID NO: 736543 - RNA, 19 nt, Artificial Sequence
  Description of Artificial Sequence: Synthetic oligonucleotide
  Antisense strand to SEQ ID NO: 736542
caccuagaaaguuucaccu

SEQ ID NO: 736544 - RNA, 19 nt, Artificial Sequence
  Description of Artificial Sequence: Synthetic oligonucleotide
  Sense strand starting at position 2667 of SEQ ID NO: 586684
aggaguucauuguuagagg

SEQ ID NO: 736545 - RNA, 19 nt, Artificial Sequence
  Description of Artificial Sequence: Synthetic oligonucleotide
  Antisense strand to SEQ ID NO: 736544
ccucuaacaaugaacuccu

SEQ ID NO: 736546 - RNA, 19 nt, Artificial Sequence
  Description of Artificial Sequence: Synthetic oligonucleotide
  Sense strand starting at position 2786 of SEQ ID NO: 586684
ggaguuuaacccugaggag

SEQ ID NO: 736547 - RNA, 19 nt, Artificial Sequence
  Description of Artificial Sequence: Synthetic oligonucleotide
  Antisense strand to SEQ ID NO: 736546
cuccucaggguuaaacucc

SEQ ID NO: 736548 - RNA, 19 nt, Artificial Sequence
  Description of Artificial Sequence: Synthetic oligonucleotide
  Sense strand starting at position 2846 of SEQ ID NO: 586684
gaagcaggcugauuaaaua

SEQ ID NO: 736549 - RNA, 19 nt, Artificial Sequence
  Description of Artificial Sequence: Synthetic oligonucleotide
  Antisense strand to SEQ ID NO: 736548
uauuuaaucagccugcuuc

SEQ ID NO: 736550 - RNA, 19 nt, Artificial Sequence
  Description of Artificial Sequence: Synthetic oligonucleotide
  Sense strand starting at position 2867 of SEQ ID NO: 586684
ugggcaaauagcgaugaau

SEQ ID NO: 736551 - RNA, 19 nt, Artificial Sequence
  Description of Artificial Sequence: Synthetic oligonucleotide
  Antisense strand to SEQ ID NO: 736550
auucaucgcuauuugccca

SEQ ID NO: 736552 - RNA, 19 nt, Artificial Sequence
  Description of Artificial Sequence: Synthetic oligonucleotide
  Sense strand starting at position 2869 of SEQ ID NO: 586684
ggcaaauagcgaugaauaa

SEQ ID NO: 736553 - RNA, 19 nt, Artificial Sequence
  Description of Artificial Sequence: Synthetic oligonucleotide
  Antisense strand to SEQ ID NO: 736552
uuauucaucgcuauuugcc

SEQ ID NO: 736554 - RNA, 19 nt, Artificial Sequence
  Description of Artificial Sequence: Synthetic oligonucleotide
  Sense strand starting at position 2870 of SEQ ID NO: 586684
gcaaauagcgaugaauaag

SEQ ID NO: 736555 - RNA, 19 nt, Artificial Sequence
  Description of Artificial Sequence: Synthetic oligonucleotide
  Antisense strand to SEQ ID NO: 736554
cuuauucaucgcuauuugc

SEQ ID NO: 736556 - RNA, 19 nt, Artificial Sequence
  Description of Artificial Sequence: Synthetic oligonucleotide
  Sense strand starting at position 2970 of SEQ ID NO: 586684
cucuauuaggaguaauugu

SEQ ID NO: 736557 - RNA, 19 nt, Artificial Sequence
  Description of Artificial Sequence: Synthetic oligonucleotide
  Antisense strand to SEQ ID NO: 736556
acaauuacuccuaauagag

SEQ ID NO: 736558 - RNA, 19 nt, Artificial Sequence
  Description of Artificial Sequence: Synthetic oligonucleotide
  Sense strand starting at position 2977 of SEQ ID NO: 586684
aggaguaauuguguuggga

SEQ ID NO: 736559 - RNA, 19 nt, Artificial Sequence
  Description of Artificial Sequence: Synthetic oligonucleotide
  Antisense strand to SEQ ID NO: 736558
ucccaacacaauuacuccu

SEQ ID NO: 736560 - RNA, 19 nt, Artificial Sequence
  Description of Artificial Sequence: Synthetic oligonucleotide
  Sense strand starting at position 2980 of SEQ ID NO: 586684
aguaauuguguugggauaa

SEQ ID NO: 736561 - RNA, 19 nt, Artificial Sequence
  Description of Artificial Sequence: Synthetic oligonucleotide
  Antisense strand to SEQ ID NO: 736560
uuaucccaacacaauuacu

SEQ ID NO: 736562 - RNA, 19 nt, Artificial Sequence
  Description of Artificial Sequence: Synthetic oligonucleotide
  Sense strand starting at position 2999 of SEQ ID NO: 586684
cuuuguauuucgcuauaaa

SEQ ID NO: 736563 - RNA, 19 nt, Artificial Sequence
  Description of Artificial Sequence: Synthetic oligonucleotide
  Antisense strand to SEQ ID NO: 736562
uuuauagcgaaauacaaag

SEQ ID NO: 736564 - RNA, 19 nt, Artificial Sequence
  Description of Artificial Sequence: Synthetic oligonucleotide
  Sense strand starting at position 3095 of SEQ ID NO: 586684
guucguuccggcucucaua

SEQ ID NO: 736565 - RNA, 19 nt, Artificial Sequence
  Description of Artificial Sequence: Synthetic oligonucleotide
  Antisense strand to SEQ ID NO: 736564
uaugagagccggaacgaac

SEQ ID NO: 736566 - RNA, 19 nt, Artificial Sequence
  Description of Artificial Sequence: Synthetic oligonucleotide
  Sense strand starting at position 3145 of SEQ ID NO: 586684
agacauagauaucuucguu

SEQ ID NO: 736567 - RNA, 19 nt, Artificial Sequence
  Description of Artificial Sequence: Synthetic oligonucleotide
  Antisense strand to SEQ ID NO: 736566
aacgaagauaucuaugucu

SEQ ID NO: 736568 - RNA, 19 nt, Artificial Sequence
  Description of Artificial Sequence: Synthetic oligonucleotide
  Sense strand starting at position 3151 of SEQ ID NO: 586684
agauaucuucguuauugaa

SEQ ID NO: 736569 - RNA, 19 nt, Artificial Sequence
  Description of Artificial Sequence: Synthetic oligonucleotide
  Antisense strand to SEQ ID NO: 736568
uucaauaacgaagauaucu

SEQ ID NO: 736570 - RNA, 19 nt, Artificial Sequence
  Description of Artificial Sequence: Synthetic oligonucleotide
  Sense strand starting at position 3153 of SEQ ID NO: 586684
auaucuucguuauugaaag

SEQ ID NO: 736571 - RNA, 19 nt, Artificial Sequence
  Description of Artificial Sequence: Synthetic oligonucleotide
  Antisense strand to SEQ ID NO: 736570
cuuucaauaacgaagauau

SEQ ID NO: 736572 - RNA, 19 nt, Artificial Sequence
  Description of Artificial Sequence: Synthetic oligonucleotide
  Sense strand starting at position 3164 of SEQ ID NO: 586684
auugaaagucauggguuaa

SEQ ID NO: 736573 - RNA, 19 nt, Artificial Sequence
  Description of Artificial Sequence: Synthetic oligonucleotide
  Antisense strand to SEQ ID NO: 736572
uuaacccaugacuuucaau

SEQ ID NO: 736574 - RNA, 19 nt, Artificial Sequence
  Description of Artificial Sequence: Synthetic oligonucleotide
  Sense strand starting at position 3165 of SEQ ID NO: 586684
uugaaagucauggguuaaa

SEQ ID NO: 736575 - RNA, 19 nt, Artificial Sequence
  Description of Artificial Sequence: Synthetic oligonucleotide
  Antisense strand to SEQ ID NO: 736574
uuuaacccaugacuuucaa

SEQ ID NO: 736576 - RNA, 19 nt, Artificial Sequence
  Description of Artificial Sequence: Synthetic oligonucleotide
  Sense strand starting at position 3370 of SEQ ID NO: 586684
gaaaguucccauuacguua

SEQ ID NO: 736577 - RNA, 19 nt, Artificial Sequence
  Description of Artificial Sequence: Synthetic oligonucleotide
  Antisense strand to SEQ ID NO: 736576
uaacguaaugggaacuuuc

SEQ ID NO: 736578 - RNA, 19 nt, Artificial Sequence
  Description of Artificial Sequence: Synthetic oligonucleotide
  Sense strand starting at position 3535 of SEQ ID NO: 586684
gccucagcaggcuaaauaa

SEQ ID NO: 736579 - RNA, 19 nt, Artificial Sequence
  Description of Artificial Sequence: Synthetic oligonucleotide
  Antisense strand to SEQ ID NO: 736578
uuauuuagccugcugaggc

SEQ ID NO: 736580 - RNA, 19 nt, Artificial Sequence
  Description of Artificial Sequence: Synthetic oligonucleotide
  Sense strand starting at position 3591 of SEQ ID NO: 586684
ggcauaauuuaucaaugac

SEQ ID NO: 736581 - RNA, 19 nt, Artificial Sequence
  Description of Artificial Sequence: Synthetic oligonucleotide
  Antisense strand to SEQ ID NO: 736580
gucauugauaaauuaugcc

SEQ ID NO: 736582 - RNA, 19 nt, Artificial Sequence
  Description of Artificial Sequence: Synthetic oligonucleotide
  Sense strand starting at position 3629 of SEQ ID NO: 586684
cuaauuuacugguaauaag

SEQ ID NO: 736583 - RNA, 19 nt, Artificial Sequence
  Description of Artificial Sequence: Synthetic oligonucleotide
  Antisense strand to SEQ ID NO: 736582
cuuauuaccaguaaauuag

SEQ ID NO: 736584 - RNA, 19 nt, Artificial Sequence
  Description of Artificial Sequence: Synthetic oligonucleotide
  Sense strand starting at position 3781 of SEQ ID NO: 586684
gccauaguugucuaaagga

SEQ ID NO: 736585 - RNA, 19 nt, Artificial Sequence
  Description of Artificial Sequence: Synthetic oligonucleotide
  Antisense strand to SEQ ID NO: 736584
uccuuuagacaacuauggc

SEQ ID NO: 736586 - RNA, 19 nt, Artificial Sequence
  Description of Artificial Sequence: Synthetic oligonucleotide
  Sense strand starting at position 3837 of SEQ ID NO: 586684
gcaauauguuaacuggauu

SEQ ID NO: 736587 - RNA, 19 nt, Artificial Sequence
  Description of Artificial Sequence: Synthetic oligonucleotide
  Antisense strand to SEQ ID NO: 736586
aauccaguuaacauauugc

SEQ ID NO: 736588 - RNA, 19 nt, Artificial Sequence
  Description of Artificial Sequence: Synthetic oligonucleotide
  Sense strand starting at position 536 of SEQ ID NO: 586685
guuuacugcucuugccagu

SEQ ID NO: 736589 - RNA, 19 nt, Artificial Sequence
  Description of Artificial Sequence: Synthetic oligonucleotide
  Antisense strand to SEQ ID NO: 736588
acuggcaagagcaguaaac

SEQ ID NO: 736590 - RNA, 19 nt, Artificial Sequence
  Description of Artificial Sequence: Synthetic oligonucleotide
  Sense strand starting at position 844 of SEQ ID NO: 586685
ugaucuaguugcugucaga

SEQ ID NO: 736591 - RNA, 19 nt, Artificial Sequence
  Description of Artificial Sequence: Synthetic oligonucleotide
  Antisense strand to SEQ ID NO: 736590
ucugacagcaacuagauca

SEQ ID NO: 736592 - RNA, 19 nt, Artificial Sequence
  Description of Artificial Sequence: Synthetic oligonucleotide
  Sense strand starting at position 847 of SEQ ID NO: 586685
ucuaguugcugucagacua

SEQ ID NO: 736593 - RNA, 19 nt, Artificial Sequence
  Description of Artificial Sequence: Synthetic oligonucleotide
  Antisense strand to SEQ ID NO: 736592
uagucugacagcaacuaga

SEQ ID NO: 736594 - RNA, 19 nt, Artificial Sequence
  Description of Artificial Sequence: Synthetic oligonucleotide
  Sense strand starting at position 859 of SEQ ID NO: 586685
cagacuaugcagggugaau

SEQ ID NO: 736595 - RNA, 19 nt, Artificial Sequence
  Description of Artificial Sequence: Synthetic oligonucleotide
  Antisense strand to SEQ ID NO: 736594
auucacccugcauagucug

SEQ ID NO: 736596 - RNA, 19 nt, Artificial Sequence
  Description of Artificial Sequence: Synthetic oligonucleotide
  Sense strand starting at position 923 of SEQ ID NO: 586685
guacuaaauuuguagugcu

SEQ ID NO: 736597 - RNA, 19 nt, Artificial Sequence
  Description of Artificial Sequence: Synthetic oligonucleotide
  Antisense strand to SEQ ID NO: 736596
agcacuacaaauuuaguac

SEQ ID NO: 736598 - RNA, 19 nt, Artificial Sequence
  Description of Artificial Sequence: Synthetic oligonucleotide
  Sense strand starting at position 926 of SEQ ID NO: 586685
cuaaauuuguagugcuauc

SEQ ID NO: 736599 - RNA, 19 nt, Artificial Sequence
  Description of Artificial Sequence: Synthetic oligonucleotide
  Antisense strand to SEQ ID NO: 736598
gauagcacuacaaauuuag

SEQ ID NO: 736600 - RNA, 19 nt, Artificial Sequence
  Description of Artificial Sequence: Synthetic oligonucleotide
  Sense strand starting at position 1424 of SEQ ID NO: 586685
cugcucuacuccugagauc

SEQ ID NO: 736601 - RNA, 19 nt, Artificial Sequence
  Description of Artificial Sequence: Synthetic oligonucleotide
  Antisense strand to SEQ ID NO: 736600
gaucucaggaguagagcag

SEQ ID NO: 736602 - RNA, 19 nt, Artificial Sequence
  Description of Artificial Sequence: Synthetic oligonucleotide
  Sense strand starting at position 1443 of SEQ ID NO: 586685
cgcaucaggccaggaauaa

SEQ ID NO: 736603 - RNA, 19 nt, Artificial Sequence
  Description of Artificial Sequence: Synthetic oligonucleotide
  Antisense strand to SEQ ID NO: 736602
uuauuccuggccugaugcg

SEQ ID NO: 736604 - RNA, 19 nt, Artificial Sequence
  Description of Artificial Sequence: Synthetic oligonucleotide
  Sense strand starting at position 1845 of SEQ ID NO: 586685
gggugauuaccaggcauug

SEQ ID NO: 736605 - RNA, 19 nt, Artificial Sequence
  Description of Artificial Sequence: Synthetic oligonucleotide
  Antisense strand to SEQ ID NO: 736604
caaugccugguaaucaccc

SEQ ID NO: 736606 - RNA, 19 nt, Artificial Sequence
  Description of Artificial Sequence: Synthetic oligonucleotide
  Sense strand starting at position 2189 of SEQ ID NO: 586685
ggagucguaucucauugau

SEQ ID NO: 736607 - RNA, 19 nt, Artificial Sequence
  Description of Artificial Sequence: Synthetic oligonucleotide
  Antisense strand to SEQ ID NO: 736606
aucaaugagauacgacucc

SEQ ID NO: 736608 - RNA, 19 nt, Artificial Sequence
  Description of Artificial Sequence: Synthetic oligonucleotide
  Sense strand starting at position 2191 of SEQ ID NO: 586685
agucguaucucauugauga

SEQ ID NO: 736609 - RNA, 19 nt, Artificial Sequence
  Description of Artificial Sequence: Synthetic oligonucleotide
  Antisense strand to SEQ ID NO: 736608
ucaucaaugagauacgacu

SEQ ID NO: 736610 - RNA, 19 nt, Artificial Sequence
  Description of Artificial Sequence: Synthetic oligonucleotide
  Sense strand starting at position 2192 of SEQ ID NO: 586685
gucguaucucauugaugag

SEQ ID NO: 736611 - RNA, 19 nt, Artificial Sequence
  Description of Artificial Sequence: Synthetic oligonucleotide
  Antisense strand to SEQ ID NO: 736610
cucaucaaugagauacgac

SEQ ID NO: 736612 - RNA, 19 nt, Artificial Sequence
  Description of Artificial Sequence: Synthetic oligonucleotide
  Sense strand starting at position 2195 of SEQ ID NO: 586685
guaucucauugaugaggug

SEQ ID NO: 736613 - RNA, 19 nt, Artificial Sequence
  Description of Artificial Sequence: Synthetic oligonucleotide
  Antisense strand to SEQ ID NO: 736612
caccucaucaaugagauac

SEQ ID NO: 736614 - RNA, 19 nt, Artificial Sequence
  Description of Artificial Sequence: Synthetic oligonucleotide
  Sense strand starting at position 2450 of SEQ ID NO: 586685
uucauaguguggguguaua

SEQ ID NO: 736615 - RNA, 19 nt, Artificial Sequence
  Description of Artificial Sequence: Synthetic oligonucleotide
  Antisense strand to SEQ ID NO: 736614
uauacacccacacuaugaa

SEQ ID NO: 736616 - RNA, 19 nt, Artificial Sequence
  Description of Artificial Sequence: Synthetic oligonucleotide
  Sense strand starting at position 2665 of SEQ ID NO: 586685
acacauacaguuugucaua

SEQ ID NO: 736617 - RNA, 19 nt, Artificial Sequence
  Description of Artificial Sequence: Synthetic oligonucleotide
  Antisense strand to SEQ ID NO: 736616
uaugacaaacuguaugugu

SEQ ID NO: 736618 - RNA, 19 nt, Artificial Sequence
  Description of Artificial Sequence: Synthetic oligonucleotide
  Sense strand starting at position 2667 of SEQ ID NO: 586685
acauacaguuugucauagu

SEQ ID NO: 736619 - RNA, 19 nt, Artificial Sequence
  Description of Artificial Sequence: Synthetic oligonucleotide
  Antisense strand to SEQ ID NO: 736618
acuaugacaaacuguaugu

SEQ ID NO: 736620 - RNA, 19 nt, Artificial Sequence
  Description of Artificial Sequence: Synthetic oligonucleotide
  Sense strand starting at position 2950 of SEQ ID NO: 586685
gacauagcacauugguaau

SEQ ID NO: 736621 - RNA, 19 nt, Artificial Sequence
  Description of Artificial Sequence: Synthetic oligonucleotide
  Antisense strand to SEQ ID NO: 736620
auuaccaaugugcuauguc

SEQ ID NO: 736622 - RNA, 19 nt, Artificial Sequence
  Description of Artificial Sequence: Synthetic oligonucleotide
  Sense strand starting at position 3036 of SEQ ID NO: 586685
uggaucucagcucguuaua

SEQ ID NO: 736623 - RNA, 19 nt, Artificial Sequence
  Description of Artificial Sequence: Synthetic oligonucleotide
  Antisense strand to SEQ ID NO: 736622
uauaacgagcugagaucca

SEQ ID NO: 736624 - RNA, 19 nt, Artificial Sequence
  Description of Artificial Sequence: Synthetic oligonucleotide
  Sense strand starting at position 3467 of SEQ ID NO: 586685
ucuuguggucuuuggaaac

SEQ ID NO: 736625 - RNA, 19 nt, Artificial Sequence
  Description of Artificial Sequence: Synthetic oligonucleotide
  Antisense strand to SEQ ID NO: 736624
guuuccaaagaccacaaga

SEQ ID NO: 736626 - RNA, 19 nt, Artificial Sequence
  Description of Artificial Sequence: Synthetic oligonucleotide
  Sense strand starting at position 3711 of SEQ ID NO: 586685
cuauauuaguuccaaugga

SEQ ID NO: 736627 - RNA, 19 nt, Artificial Sequence
  Description of Artificial Sequence: Synthetic oligonucleotide
  Antisense strand to SEQ ID NO: 736626
uccauuggaacuaauauag

SEQ ID NO: 736628 - RNA, 19 nt, Artificial Sequence
  Description of Artificial Sequence: Synthetic oligonucleotide
  Sense strand starting at position 3766 of SEQ ID NO: 586685
uaugaaaugugcuaaagua

SEQ ID NO: 736629 - RNA, 19 nt, Artificial Sequence
  Description of Artificial Sequence: Synthetic oligonucleotide
  Antisense strand to SEQ ID NO: 736628
uacuuuagcacauuucaua

SEQ ID NO: 736630 - RNA, 19 nt, Artificial Sequence
  Description of Artificial Sequence: Synthetic oligonucleotide
  Sense strand starting at position 7 of SEQ ID NO: 586686
aaugcugggcgauauuagu

SEQ ID NO: 736631 - RNA, 19 nt, Artificial Sequence
  Description of Artificial Sequence: Synthetic oligonucleotide
  Antisense strand to SEQ ID NO: 736630
acuaauaucgcccagcauu

SEQ ID NO: 736632 - RNA, 19 nt, Artificial Sequence
  Description of Artificial Sequence: Synthetic oligonucleotide
  Sense strand starting at position 66 of SEQ ID NO: 586686
gggauaagguagcuaauga

SEQ ID NO: 736633 - RNA, 19 nt, Artificial Sequence
  Description of Artificial Sequence: Synthetic oligonucleotide
  Antisense strand to SEQ ID NO: 736632
ucauuagcuaccuuauccc

SEQ ID NO: 736634 - RNA, 19 nt, Artificial Sequence
  Description of Artificial Sequence: Synthetic oligonucleotide
  Sense strand starting at position 347 of SEQ ID NO: 586686
aguuccauuccaugcuuau

SEQ ID NO: 736635 - RNA, 19 nt, Artificial Sequence
  Description of Artificial Sequence: Synthetic oligonucleotide
  Antisense strand to SEQ ID NO: 736634
auaagcauggaauggaacu

SEQ ID NO: 736636 - RNA, 19 nt, Artificial Sequence
  Description of Artificial Sequence: Synthetic oligonucleotide
  Sense strand starting at position 401 of SEQ ID NO: 586686
aaauguauuugugagggaa

SEQ ID NO: 736637 - RNA, 19 nt, Artificial Sequence
  Description of Artificial Sequence: Synthetic oligonucleotide
  Antisense strand to SEQ ID NO: 736636
uucccucacaaauacauuu

SEQ ID NO: 736638 - RNA, 19 nt, Artificial Sequence
  Description of Artificial Sequence: Synthetic oligonucleotide
  Sense strand starting at position 403 of SEQ ID NO: 586686
auguauuugugagggaaug

SEQ ID NO: 736639 - RNA, 19 nt, Artificial Sequence
  Description of Artificial Sequence: Synthetic oligonucleotide
  Antisense strand to SEQ ID NO: 736638
cauucccucacaaauacau

SEQ ID NO: 736640 - RNA, 19 nt, Artificial Sequence
  Description of Artificial Sequence: Synthetic oligonucleotide
  Sense strand starting at position 415 of SEQ ID NO: 586686
gggaaugccugauaauaaa

SEQ ID NO: 736641 - RNA, 19 nt, Artificial Sequence
  Description of Artificial Sequence: Synthetic oligonucleotide
  Antisense strand to SEQ ID NO: 736640
uuuauuaucaggcauuccc

SEQ ID NO: 736642 - RNA, 19 nt, Artificial Sequence
  Description of Artificial Sequence: Synthetic oligonucleotide
  Sense strand starting at position 453 of SEQ ID NO: 586686
gugagagugugacugaaau

SEQ ID NO: 736643 - RNA, 19 nt, Artificial Sequence
  Description of Artificial Sequence: Synthetic oligonucleotide
  Antisense strand to SEQ ID NO: 736642
auuucagucacacucucac

SEQ ID NO: 736644 - RNA, 19 nt, Artificial Sequence
  Description of Artificial Sequence: Synthetic oligonucleotide
  Sense strand starting at position 473 of SEQ ID NO: 586686
gcaacaagcugucuuaaau

SEQ ID NO: 736645 - RNA, 19 nt, Artificial Sequence
  Description of Artificial Sequence: Synthetic oligonucleotide
  Antisense strand to SEQ ID NO: 736644
auuuaagacagcuuguugc

SEQ ID NO: 736646 - RNA, 19 nt, Artificial Sequence
  Description of Artificial Sequence: Synthetic oligonucleotide
  Sense strand starting at position 676 of SEQ ID NO: 586686
ucagauccugcaugaagaa

SEQ ID NO: 736647 - RNA, 19 nt, Artificial Sequence
  Description of Artificial Sequence: Synthetic oligonucleotide
  Antisense strand to SEQ ID NO: 736646
uucuucaugcaggaucuga

SEQ ID NO: 736648 - RNA, 19 nt, Artificial Sequence
  Description of Artificial Sequence: Synthetic oligonucleotide
  Sense strand starting at position 1308 of SEQ ID NO: 586686
uuuccagaaucugaaagaa

SEQ ID NO: 736649 - RNA, 19 nt, Artificial Sequence
  Description of Artificial Sequence: Synthetic oligonucleotide
  Antisense strand to SEQ ID NO: 736648
uucuuucagauucuggaaa

SEQ ID NO: 736650 - RNA, 19 nt, Artificial Sequence
  Description of Artificial Sequence: Synthetic oligonucleotide
  Sense strand starting at position 1515 of SEQ ID NO: 586686
gauuuauuauugguguugu

SEQ ID NO: 736651 - RNA, 19 nt, Artificial Sequence
  Description of Artificial Sequence: Synthetic oligonucleotide
  Antisense strand to SEQ ID NO: 736650
acaacaccaauaauaaauc

SEQ ID NO: 736652 - RNA, 19 nt, Artificial Sequence
  Description of Artificial Sequence: Synthetic oligonucleotide
  Sense strand starting at position 1523 of SEQ ID NO: 586686
auugguguuguuuaucuuu

SEQ ID NO: 736653 - RNA, 19 nt, Artificial Sequence
  Description of Artificial Sequence: Synthetic oligonucleotide
  Antisense strand to SEQ ID NO: 736652
aaagauaaacaacaccaau

SEQ ID NO: 736654 - RNA, 19 nt, Artificial Sequence
  Description of Artificial Sequence: Synthetic oligonucleotide
  Sense strand starting at position 1532 of SEQ ID NO: 586686
guuuaucuuuguguuuaac

SEQ ID NO: 736655 - RNA, 19 nt, Artificial Sequence
  Description of Artificial Sequence: Synthetic oligonucleotide
  Antisense strand to SEQ ID NO: 736654
guuaaacacaaagauaaac

SEQ ID NO: 736656 - RNA, 19 nt, Artificial Sequence
  Description of Artificial Sequence: Synthetic oligonucleotide
  Sense strand starting at position 1907 of SEQ ID NO: 586686
acacaucuguaaccguaaa

SEQ ID NO: 736657 - RNA, 19 nt, Artificial Sequence
  Description of Artificial Sequence: Synthetic oligonucleotide
  Antisense strand to SEQ ID NO: 736656
uuuacgguuacagaugugu

SEQ ID NO: 736658 - RNA, 19 nt, Artificial Sequence
  Description of Artificial Sequence: Synthetic oligonucleotide
  Sense strand starting at position 1985 of SEQ ID NO: 586686
aaggauggcuuagcaauaa

SEQ ID NO: 736659 - RNA, 19 nt, Artificial Sequence
  Description of Artificial Sequence: Synthetic oligonucleotide
  Antisense strand to SEQ ID NO: 736658
uuauugcuaagccauccuu

SEQ ID NO: 736660 - RNA, 19 nt, Artificial Sequence
  Description of Artificial Sequence: Synthetic oligonucleotide
  Sense strand starting at position 2133 of SEQ ID NO: 586686
guuaauuaguaaucguggu

SEQ ID NO: 736661 - RNA, 19 nt, Artificial Sequence
  Description of Artificial Sequence: Synthetic oligonucleotide
  Antisense strand to SEQ ID NO: 736660
accacgauuacuaauuaac

SEQ ID NO: 736662 - RNA, 19 nt, Artificial Sequence
  Description of Artificial Sequence: Synthetic oligonucleotide
  Sense strand starting at position 2147 of SEQ ID NO: 586686
guggucuugcucuaagaag

SEQ ID NO: 736663 - RNA, 19 nt, Artificial Sequence
  Description of Artificial Sequence: Synthetic oligonucleotide
  Antisense strand to SEQ ID NO: 736662
cuucuuagagcaagaccac

SEQ ID NO: 736664 - RNA, 19 nt, Artificial Sequence
  Description of Artificial Sequence: Synthetic oligonucleotide
  Sense strand starting at position 2223 of SEQ ID NO: 586686
ccaggcacugaauguuuaa

SEQ ID NO: 736665 - RNA, 19 nt, Artificial Sequence
  Description of Artificial Sequence: Synthetic oligonucleotide
  Antisense strand to SEQ ID NO: 736664
uuaaacauucagugccugg

SEQ ID NO: 736666 - RNA, 19 nt, Artificial Sequence
  Description of Artificial Sequence: Synthetic oligonucleotide
  Sense strand starting at position 2232 of SEQ ID NO: 586686
gaauguuuaaucgguggug

SEQ ID NO: 736667 - RNA, 19 nt, Artificial Sequence
  Description of Artificial Sequence: Synthetic oligonucleotide
  Antisense strand to SEQ ID NO: 736666
caccaccgauuaaacauuc

SEQ ID NO: 736668 - RNA, 19 nt, Artificial Sequence
  Description of Artificial Sequence: Synthetic oligonucleotide
  Sense strand starting at position 2233 of SEQ ID NO: 586686
aauguuuaaucggugguga

SEQ ID NO: 736669 - RNA, 19 nt, Artificial Sequence
  Description of Artificial Sequence: Synthetic oligonucleotide
  Antisense strand to SEQ ID NO: 736668
ucaccaccgauuaaacauu

SEQ ID NO: 736670 - RNA, 19 nt, Artificial Sequence
  Description of Artificial Sequence: Synthetic oligonucleotide
  Sense strand starting at position 2234 of SEQ ID NO: 586686
auguuuaaucgguggugag

SEQ ID NO: 736671 - RNA, 19 nt, Artificial Sequence
  Description of Artificial Sequence: Synthetic oligonucleotide
  Antisense strand to SEQ ID NO: 736670
cucaccaccgauuaaacau

SEQ ID NO: 736672 - RNA, 19 nt, Artificial Sequence
  Description of Artificial Sequence: Synthetic oligonucleotide
  Sense strand starting at position 2255 of SEQ ID NO: 586686
cacccuguaugucugguaa

SEQ ID NO: 736673 - RNA, 19 nt, Artificial Sequence
  Description of Artificial Sequence: Synthetic oligonucleotide
  Antisense strand to SEQ ID NO: 736672
uuaccagacauacagggug

SEQ ID NO: 736674 - RNA, 19 nt, Artificial Sequence
  Description of Artificial Sequence: Synthetic oligonucleotide
  Sense strand starting at position 2282 of SEQ ID NO: 586686
agacacaauuuguagauga

SEQ ID NO: 736675 - RNA, 19 nt, Artificial Sequence
  Description of Artificial Sequence: Synthetic oligonucleotide
  Antisense strand to SEQ ID NO: 736674
ucaucuacaaauugugucu

SEQ ID NO: 736676 - RNA, 19 nt, Artificial Sequence
  Description of Artificial Sequence: Synthetic oligonucleotide
  Sense strand starting at position 2397 of SEQ ID NO: 586686
acaaucugaugauugugau

SEQ ID NO: 736677 - RNA, 19 nt, Artificial Sequence
  Description of Artificial Sequence: Synthetic oligonucleotide
  Antisense strand to SEQ ID NO: 736676
aucacaaucaucagauugu

SEQ ID NO: 736678 - RNA, 19 nt, Artificial Sequence
  Description of Artificial Sequence: Synthetic oligonucleotide
  Sense strand starting at position 2398 of SEQ ID NO: 586686
caaucugaugauugugaug

SEQ ID NO: 736679 - RNA, 19 nt, Artificial Sequence
  Description of Artificial Sequence: Synthetic oligonucleotide
  Antisense strand to SEQ ID NO: 736678
caucacaaucaucagauug

SEQ ID NO: 736680 - RNA, 19 nt, Artificial Sequence
  Description of Artificial Sequence: Synthetic oligonucleotide
  Sense strand starting at position 2464 of SEQ ID NO: 586686
ucuuuaagguguccuuaag

SEQ ID NO: 736681 - RNA, 19 nt, Artificial Sequence
  Description of Artificial Sequence: Synthetic oligonucleotide
  Antisense strand to SEQ ID NO: 736680
cuuaaggacaccuuaaaga

SEQ ID NO: 736682 - RNA, 19 nt, Artificial Sequence
  Description of Artificial Sequence: Synthetic oligonucleotide
  Sense strand starting at position 2474 of SEQ ID NO: 586686
guccuuaagcuuguuugca

SEQ ID NO: 736683 - RNA, 19 nt, Artificial Sequence
  Description of Artificial Sequence: Synthetic oligonucleotide
  Antisense strand to SEQ ID NO: 736682
ugcaaacaagcuuaaggac

SEQ ID NO: 736684 - RNA, 19 nt, Artificial Sequence
  Description of Artificial Sequence: Synthetic oligonucleotide
  Sense strand starting at position 2482 of SEQ ID NO: 586686
gcuuguuugcaguauggaa

SEQ ID NO: 736685 - RNA, 19 nt, Artificial Sequence
  Description of Artificial Sequence: Synthetic oligonucleotide
  Antisense strand to SEQ ID NO: 736684
uuccauacugcaaacaagc

SEQ ID NO: 736686 - RNA, 19 nt, Artificial Sequence
  Description of Artificial Sequence: Synthetic oligonucleotide
  Sense strand starting at position 2484 of SEQ ID NO: 586686
uuguuugcaguauggaaau

SEQ ID NO: 736687 - RNA, 19 nt, Artificial Sequence
  Description of Artificial Sequence: Synthetic oligonucleotide
  Antisense strand to SEQ ID NO: 736686
auuuccauacugcaaacaa

SEQ ID NO: 736688 - RNA, 19 nt, Artificial Sequence
  Description of Artificial Sequence: Synthetic oligonucleotide
  Sense strand starting at position 2528 of SEQ ID NO: 586686
acugccuuugcagaacuau

SEQ ID NO: 736689 - RNA, 19 nt, Artificial Sequence
  Description of Artificial Sequence: Synthetic oligonucleotide
  Antisense strand to SEQ ID NO: 736688
auaguucugcaaaggcagu

SEQ ID NO: 736690 - RNA, 19 nt, Artificial Sequence
  Description of Artificial Sequence: Synthetic oligonucleotide
  Sense strand starting at position 2552 of SEQ ID NO: 586686
agagaaaucuaacaagacu

SEQ ID NO: 736691 - RNA, 19 nt, Artificial Sequence
  Description of Artificial Sequence: Synthetic oligonucleotide
  Antisense strand to SEQ ID NO: 736690
agucuuguuagauuucucu

SEQ ID NO: 736692 - RNA, 19 nt, Artificial Sequence
  Description of Artificial Sequence: Synthetic oligonucleotide
  Sense strand starting at position 2695 of SEQ ID NO: 586686
auaguuaaacuuggaguca

SEQ ID NO: 736693 - RNA, 19 nt, Artificial Sequence
  Description of Artificial Sequence: Synthetic oligonucleotide
  Antisense strand to SEQ ID NO: 736692
ugacuccaaguuuaacuau

SEQ ID NO: 736694 - RNA, 19 nt, Artificial Sequence
  Description of Artificial Sequence: Synthetic oligonucleotide
  Sense strand starting at position 2785 of SEQ ID NO: 586686
gggcuuagacuuugcuaaa

SEQ ID NO: 736695 - RNA, 19 nt, Artificial Sequence
  Description of Artificial Sequence: Synthetic oligonucleotide
  Antisense strand to SEQ ID NO: 736694
uuuagcaaagucuaagccc

SEQ ID NO: 736696 - RNA, 19 nt, Artificial Sequence
  Description of Artificial Sequence: Synthetic oligonucleotide
  Sense strand starting at position 2786 of SEQ ID NO: 586686
ggcuuagacuuugcuaaag

SEQ ID NO: 736697 - RNA, 19 nt, Artificial Sequence
  Description of Artificial Sequence: Synthetic oligonucleotide
  Antisense strand to SEQ ID NO: 736696
cuuuagcaaagucuaagcc

SEQ ID NO: 736698 - RNA, 19 nt, Artificial Sequence
  Description of Artificial Sequence: Synthetic oligonucleotide
  Sense strand starting at position 2915 of SEQ ID NO: 586686
agauaacaucacuguauug

SEQ ID NO: 736699 - RNA, 19 nt, Artificial Sequence
  Description of Artificial Sequence: Synthetic oligonucleotide
  Antisense strand to SEQ ID NO: 736698
caauacagugauguuaucu

SEQ ID NO: 736700 - RNA, 19 nt, Artificial Sequence
  Description of Artificial Sequence: Synthetic oligonucleotide
  Sense strand starting at position 2998 of SEQ ID NO: 586686
cguugacucaguuccgcaa

SEQ ID NO: 736701 - RNA, 19 nt, Artificial Sequence
  Description of Artificial Sequence: Synthetic oligonucleotide
  Antisense strand to SEQ ID NO: 736700
uugcggaacugagucaacg

SEQ ID NO: 736702 - RNA, 19 nt, Artificial Sequence
  Description of Artificial Sequence: Synthetic oligonucleotide
  Sense strand starting at position 3002 of SEQ ID NO: 586686
gacucaguuccgcaagggu

SEQ ID NO: 736703 - RNA, 19 nt, Artificial Sequence
  Description of Artificial Sequence: Synthetic oligonucleotide
  Antisense strand to SEQ ID NO: 736702
acccuugcggaacugaguc

SEQ ID NO: 736704 - RNA, 19 nt, Artificial Sequence
  Description of Artificial Sequence: Synthetic oligonucleotide
  Sense strand starting at position 3568 of SEQ ID NO: 586686
uggccaacacugugauuau

SEQ ID NO: 736705 - RNA, 19 nt, Artificial Sequence
  Description of Artificial Sequence: Synthetic oligonucleotide
  Antisense strand to SEQ ID NO: 736704
auaaucacaguguuggcca

SEQ ID NO: 736706 - RNA, 19 nt, Artificial Sequence
  Description of Artificial Sequence: Synthetic oligonucleotide
  Sense strand starting at position 3612 of SEQ ID NO: 586686
ugcuguucucauugaucuu

SEQ ID NO: 736707 - RNA, 19 nt, Artificial Sequence
  Description of Artificial Sequence: Synthetic oligonucleotide
  Antisense strand to SEQ ID NO: 736706
aagaucaaugagaacagca

SEQ ID NO: 736708 - RNA, 19 nt, Artificial Sequence
  Description of Artificial Sequence: Synthetic oligonucleotide
  Sense strand starting at position 3661 of SEQ ID NO: 586686
ggagcugagacaugcuuau

SEQ ID NO: 736709 - RNA, 19 nt, Artificial Sequence
  Description of Artificial Sequence: Synthetic oligonucleotide
  Antisense strand to SEQ ID NO: 736708
auaagcaugucucagcucc

SEQ ID NO: 736710 - RNA, 19 nt, Artificial Sequence
  Description of Artificial Sequence: Synthetic oligonucleotide
  Sense strand starting at position 9 of SEQ ID NO: 586687
gucucugugaccggaacau

SEQ ID NO: 736711 - RNA, 19 nt, Artificial Sequence
  Description of Artificial Sequence: Synthetic oligonucleotide
  Antisense strand to SEQ ID NO: 736710
auguuccggucacagagac

SEQ ID NO: 736712 - RNA, 19 nt, Artificial Sequence
  Description of Artificial Sequence: Synthetic oligonucleotide
  Sense strand starting at position 254 of SEQ ID NO: 586687
accagugauccaugaagcu

SEQ ID NO: 736713 - RNA, 19 nt, Artificial Sequence
  Description of Artificial Sequence: Synthetic oligonucleotide
  Antisense strand to SEQ ID NO: 736712
agcuucauggaucacuggu

SEQ ID NO: 736714 - RNA, 19 nt, Artificial Sequence
  Description of Artificial Sequence: Synthetic oligonucleotide
  Sense strand starting at position 476 of SEQ ID NO: 586687
ucaggcuuuccauguggaa

SEQ ID NO: 736715 - RNA, 19 nt, Artificial Sequence
  Description of Artificial Sequence: Synthetic oligonucleotide
  Antisense strand to SEQ ID NO: 736714
uuccacauggaaagccuga

SEQ ID NO: 736716 - RNA, 19 nt, Artificial Sequence
  Description of Artificial Sequence: Synthetic oligonucleotide
  Sense strand starting at position 845 of SEQ ID NO: 586687
ccgagaccuucccaccaaa

SEQ ID NO: 736717 - RNA, 19 nt, Artificial Sequence
  Description of Artificial Sequence: Synthetic oligonucleotide
  Antisense strand to SEQ ID NO: 736716
uuuggugggaaggucucgg

SEQ ID NO: 736718 - RNA, 19 nt, Artificial Sequence
  Description of Artificial Sequence: Synthetic oligonucleotide
  Sense strand starting at position 1002 of SEQ ID NO: 586687
caaagagcguuugcugagu

SEQ ID NO: 736719 - RNA, 19 nt, Artificial Sequence
  Description of Artificial Sequence: Synthetic oligonucleotide
  Antisense strand to SEQ ID NO: 736718
acucagcaaacgcucuuug

SEQ ID NO: 736720 - RNA, 19 nt, Artificial Sequence
  Description of Artificial Sequence: Synthetic oligonucleotide
  Sense strand starting at position 1004 of SEQ ID NO: 586687
aagagcguuugcugaguga

SEQ ID NO: 736721 - RNA, 19 nt, Artificial Sequence
  Description of Artificial Sequence: Synthetic oligonucleotide
  Antisense strand to SEQ ID NO: 736720
ucacucagcaaacgcucuu

SEQ ID NO: 736722 - RNA, 19 nt, Artificial Sequence
  Description of Artificial Sequence: Synthetic oligonucleotide
  Sense strand starting at position 1007 of SEQ ID NO: 586687
agcguuugcugagugaaua

SEQ ID NO: 736723 - RNA, 19 nt, Artificial Sequence
  Description of Artificial Sequence: Synthetic oligonucleotide
  Antisense strand to SEQ ID NO: 736722
uauucacucagcaaacgcu

SEQ ID NO: 736724 - RNA, 19 nt, Artificial Sequence
  Description of Artificial Sequence: Synthetic oligonucleotide
  Sense strand starting at position 1008 of SEQ ID NO: 586687
gcguuugcugagugaauaa

SEQ ID NO: 736725 - RNA, 19 nt, Artificial Sequence
  Description of Artificial Sequence: Synthetic oligonucleotide
  Antisense strand to SEQ ID NO: 736724
uuauucacucagcaaacgc

SEQ ID NO: 736726 - RNA, 19 nt, Artificial Sequence
  Description of Artificial Sequence: Synthetic oligonucleotide
  Sense strand starting at position 1144 of SEQ ID NO: 586687
uccugcugcucccagagau

SEQ ID NO: 736727 - RNA, 19 nt, Artificial Sequence
  Description of Artificial Sequence: Synthetic oligonucleotide
  Antisense strand to SEQ ID NO: 736726
aucucugggagcagcagga

SEQ ID NO: 736728 - RNA, 19 nt, Artificial Sequence
  Description of Artificial Sequence: Synthetic oligonucleotide
  Sense strand starting at position 1471 of SEQ ID NO: 586687
cugagucacgucugacuca

SEQ ID NO: 736729 - RNA, 19 nt, Artificial Sequence
  Description of Artificial Sequence: Synthetic oligonucleotide
  Antisense strand to SEQ ID NO: 736728
ugagucagacgugacucag

SEQ ID NO: 736730 - RNA, 19 nt, Artificial Sequence
  Description of Artificial Sequence: Synthetic oligonucleotide
  Sense strand starting at position 1668 of SEQ ID NO: 586687
agccgaacagcagaagaau

SEQ ID NO: 736731 - RNA, 19 nt, Artificial Sequence
  Description of Artificial Sequence: Synthetic oligonucleotide
  Antisense strand to SEQ ID NO: 736730
auucuucugcuguucggcu

SEQ ID NO: 736732 - RNA, 19 nt, Artificial Sequence
  Description of Artificial Sequence: Synthetic oligonucleotide
  Sense strand starting at position 1763 of SEQ ID NO: 586687
ggaacgacguggucauguu

SEQ ID NO: 736733 - RNA, 19 nt, Artificial Sequence
  Description of Artificial Sequence: Synthetic oligonucleotide
  Antisense strand to SEQ ID NO: 736732
aacaugaccacgucguucc

SEQ ID NO: 736734 - RNA, 19 nt, Artificial Sequence
  Description of Artificial Sequence: Synthetic oligonucleotide
  Sense strand starting at position 1771 of SEQ ID NO: 586687
guggucauguugcagauau

SEQ ID NO: 736735 - RNA, 19 nt, Artificial Sequence
  Description of Artificial Sequence: Synthetic oligonucleotide
  Antisense strand to SEQ ID NO: 736734
auaucugcaacaugaccac

SEQ ID NO: 736736 - RNA, 19 nt, Artificial Sequence
  Description of Artificial Sequence: Synthetic oligonucleotide
  Sense strand starting at position 1773 of SEQ ID NO: 586687
ggucauguugcagauauuc

SEQ ID NO: 736737 - RNA, 19 nt, Artificial Sequence
  Description of Artificial Sequence: Synthetic oligonucleotide
  Antisense strand to SEQ ID NO: 736736
gaauaucugcaacaugacc

SEQ ID NO: 736738 - RNA, 19 nt, Artificial Sequence
  Description of Artificial Sequence: Synthetic oligonucleotide
  Sense strand starting at position 1784 of SEQ ID NO: 586687
agauauucacgucgcggua

SEQ ID NO: 736739 - RNA, 19 nt, Artificial Sequence
  Description of Artificial Sequence: Synthetic oligonucleotide
  Antisense strand to SEQ ID NO: 736738
uaccgcgacgugaauaucu

SEQ ID NO: 736740 - RNA, 19 nt, Artificial Sequence
  Description of Artificial Sequence: Synthetic oligonucleotide
  Sense strand starting at position 2606 of SEQ ID NO: 586687
aggaaaggccguugacaaa

SEQ ID NO: 736741 - RNA, 19 nt, Artificial Sequence
  Description of Artificial Sequence: Synthetic oligonucleotide
  Antisense strand to SEQ ID NO: 736740
uuugucaacggccuuuccu

SEQ ID NO: 736742 - RNA, 19 nt, Artificial Sequence
  Description of Artificial Sequence: Synthetic oligonucleotide
  Sense strand starting at position 2803 of SEQ ID NO: 586687
ugggcauugccagaggaga

SEQ ID NO: 736743 - RNA, 19 nt, Artificial Sequence
  Description of Artificial Sequence: Synthetic oligonucleotide
  Antisense strand to SEQ ID NO: 736742
ucuccucuggcaaugccca

SEQ ID NO: 736744 - RNA, 19 nt, Artificial Sequence
  Description of Artificial Sequence: Synthetic oligonucleotide
  Sense strand starting at position 2805 of SEQ ID NO: 586687
ggcauugccagaggagaaa

SEQ ID NO: 736745 - RNA, 19 nt, Artificial Sequence
  Description of Artificial Sequence: Synthetic oligonucleotide
  Antisense strand to SEQ ID NO: 736744
uuucuccucuggcaaugcc

SEQ ID NO: 736746 - RNA, 19 nt, Artificial Sequence
  Description of Artificial Sequence: Synthetic oligonucleotide
  Sense strand starting at position 2914 of SEQ ID NO: 586687
gcaggagauuccucaggcu

SEQ ID NO: 736747 - RNA, 19 nt, Artificial Sequence
  Description of Artificial Sequence: Synthetic oligonucleotide
  Antisense strand to SEQ ID NO: 736746
agccugaggaaucuccugc

SEQ ID NO: 736748 - RNA, 19 nt, Artificial Sequence
  Description of Artificial Sequence: Synthetic oligonucleotide
  Sense strand starting at position 2917 of SEQ ID NO: 586687
ggagauuccucaggcugac

SEQ ID NO: 736749 - RNA, 19 nt, Artificial Sequence
  Description of Artificial Sequence: Synthetic oligonucleotide
  Antisense strand to SEQ ID NO: 736748
gucagccugaggaaucucc

SEQ ID NO: 736750 - RNA, 19 nt, Artificial Sequence
  Description of Artificial Sequence: Synthetic oligonucleotide
  Sense strand starting at position 2958 of SEQ ID NO: 586687
cacuuugagcugugacaga

SEQ ID NO: 736751 - RNA, 19 nt, Artificial Sequence
  Description of Artificial Sequence: Synthetic oligonucleotide
  Antisense strand to SEQ ID NO: 736750
ucugucacagcucaaagug

SEQ ID NO: 736752 - RNA, 19 nt, Artificial Sequence
  Description of Artificial Sequence: Synthetic oligonucleotide
  Sense strand starting at position 3003 of SEQ ID NO: 586687
ggcccuaaauuaucccaga

SEQ ID NO: 736753 - RNA, 19 nt, Artificial Sequence
  Description of Artificial Sequence: Synthetic oligonucleotide
  Antisense strand to SEQ ID NO: 736752
ucugggauaauuuagggcc

SEQ ID NO: 736754 - RNA, 19 nt, Artificial Sequence
  Description of Artificial Sequence: Synthetic oligonucleotide
  Sense strand starting at position 3082 of SEQ ID NO: 586687
ggcggaaucacugacacca

SEQ ID NO: 736755 - RNA, 19 nt, Artificial Sequence
  Description of Artificial Sequence: Synthetic oligonucleotide
  Antisense strand to SEQ ID NO: 736754
uggugucagugauuccgcc

SEQ ID NO: 736756 - RNA, 19 nt, Artificial Sequence
  Description of Artificial Sequence: Synthetic oligonucleotide
  Sense strand starting at position 3268 of SEQ ID NO: 586687
ggugcuguuccagaucuuu

SEQ ID NO: 736757 - RNA, 19 nt, Artificial Sequence
  Description of Artificial Sequence: Synthetic oligonucleotide
  Antisense strand to SEQ ID NO: 736756
aaagaucuggaacagcacc

SEQ ID NO: 736758 - RNA, 19 nt, Artificial Sequence
  Description of Artificial Sequence: Synthetic oligonucleotide
  Sense strand starting at position 3293 of SEQ ID NO: 586687
gcuggucccuggugagaca

SEQ ID NO: 736759 - RNA, 19 nt, Artificial Sequence
  Description of Artificial Sequence: Synthetic oligonucleotide
  Antisense strand to SEQ ID NO: 736758
ugucucaccagggaccagc

SEQ ID NO: 736760 - RNA, 19 nt, Artificial Sequence
  Description of Artificial Sequence: Synthetic oligonucleotide
  Sense strand starting at position 3304 of SEQ ID NO: 586687
gugagacaccguaguguuc

SEQ ID NO: 736761 - RNA, 19 nt, Artificial Sequence
  Description of Artificial Sequence: Synthetic oligonucleotide
  Antisense strand to SEQ ID NO: 736760
gaacacuacggugucucac

SEQ ID NO: 736762 - RNA, 19 nt, Artificial Sequence
  Description of Artificial Sequence: Synthetic oligonucleotide
  Sense strand starting at position 3412 of SEQ ID NO: 586687
gcccuuguggccugggaau

SEQ ID NO: 736763 - RNA, 19 nt, Artificial Sequence
  Description of Artificial Sequence: Synthetic oligonucleotide
  Antisense strand to SEQ ID NO: 736762
auucccaggccacaagggc

SEQ ID NO: 736764 - RNA, 19 nt, Artificial Sequence
  Description of Artificial Sequence: Synthetic oligonucleotide
  Sense strand starting at position 3483 of SEQ ID NO: 586687
gggauaucgugccagcaca

SEQ ID NO: 736765 - RNA, 19 nt, Artificial Sequence
  Description of Artificial Sequence: Synthetic oligonucleotide
  Antisense strand to SEQ ID NO: 736764
ugugcuggcacgauauccc

SEQ ID NO: 736766 - RNA, 19 nt, Artificial Sequence
  Description of Artificial Sequence: Synthetic oligonucleotide
  Sense strand starting at position 3815 of SEQ ID NO: 586687
ggcagcauuugugacguuu

SEQ ID NO: 736767 - RNA, 19 nt, Artificial Sequence
  Description of Artificial Sequence: Synthetic oligonucleotide
  Antisense strand to SEQ ID NO: 736766
aaacgucacaaaugcugcc

SEQ ID NO: 736768 - RNA, 19 nt, Artificial Sequence
  Description of Artificial Sequence: Synthetic oligonucleotide
  Sense strand starting at position 52 of SEQ ID NO: 586688
caugacucucaacggagaa

SEQ ID NO: 736769 - RNA, 19 nt, Artificial Sequence
  Description of Artificial Sequence: Synthetic oligonucleotide
  Antisense strand to SEQ ID NO: 736768
uucuccguugagagucaug

SEQ ID NO: 736770 - RNA, 19 nt, Artificial Sequence
  Description of Artificial Sequence: Synthetic oligonucleotide
  Sense strand starting at position 248 of SEQ ID NO: 586688
acuuccguccuagauuacu

SEQ ID NO: 736771 - RNA, 19 nt, Artificial Sequence
  Description of Artificial Sequence: Synthetic oligonucleotide
  Antisense strand to SEQ ID NO: 736770
aguaaucuaggacggaagu

SEQ ID NO: 736772 - RNA, 19 nt, Artificial Sequence
  Description of Artificial Sequence: Synthetic oligonucleotide
  Sense strand starting at position 427 of SEQ ID NO: 586688
cagguugcacaucauaaga

SEQ ID NO: 736773 - RNA, 19 nt, Artificial Sequence
  Description of Artificial Sequence: Synthetic oligonucleotide
  Antisense strand to SEQ ID NO: 736772
ucuuaugaugugcaaccug

SEQ ID NO: 736774 - RNA, 19 nt, Artificial Sequence
  Description of Artificial Sequence: Synthetic oligonucleotide
  Sense strand starting at position 443 of SEQ ID NO: 586688
agaguagcccuguauagag

SEQ ID NO: 736775 - RNA, 19 nt, Artificial Sequence
  Description of Artificial Sequence: Synthetic oligonucleotide
  Antisense strand to SEQ ID NO: 736774
cucuauacagggcuacucu

SEQ ID NO: 736776 - RNA, 19 nt, Artificial Sequence
  Description of Artificial Sequence: Synthetic oligonucleotide
  Sense strand starting at position 455 of SEQ ID NO: 586688
uauagagaggugcaucuau

SEQ ID NO: 736777 - RNA, 19 nt, Artificial Sequence
  Description of Artificial Sequence: Synthetic oligonucleotide
  Antisense strand to SEQ ID NO: 736776
auagaugcaccucucuaua

SEQ ID NO: 736778 - RNA, 19 nt, Artificial Sequence
  Description of Artificial Sequence: Synthetic oligonucleotide
  Sense strand starting at position 526 of SEQ ID NO: 586688
acaguuccuugcucaugaa

SEQ ID NO: 736779 - RNA, 19 nt, Artificial Sequence
  Description of Artificial Sequence: Synthetic oligonucleotide
  Antisense strand to SEQ ID NO: 736778
uucaugagcaaggaacugu

SEQ ID NO: 736780 - RNA, 19 nt, Artificial Sequence
  Description of Artificial Sequence: Synthetic oligonucleotide
  Sense strand starting at position 682 of SEQ ID NO: 586688
cucacaaagcugugacaau

SEQ ID NO: 736781 - RNA, 19 nt, Artificial Sequence
  Description of Artificial Sequence: Synthetic oligonucleotide
  Antisense strand to SEQ ID NO: 736780
auugucacagcuuugugag

SEQ ID NO: 736782 - RNA, 19 nt, Artificial Sequence
  Description of Artificial Sequence: Synthetic oligonucleotide
  Sense strand starting at position 731 of SEQ ID NO: 586688
auguuaguauuacuaccau

SEQ ID NO: 736783 - RNA, 19 nt, Artificial Sequence
  Description of Artificial Sequence: Synthetic oligonucleotide
  Antisense strand to SEQ ID NO: 736782
augguaguaauacuaacau

SEQ ID NO: 736784 - RNA, 19 nt, Artificial Sequence
  Description of Artificial Sequence: Synthetic oligonucleotide
  Sense strand starting at position 753 of SEQ ID NO: 586688
cuuaaucagcccugaaagu

SEQ ID NO: 736785 - RNA, 19 nt, Artificial Sequence
  Description of Artificial Sequence: Synthetic oligonucleotide
  Antisense strand to SEQ ID NO: 736784
acuuucagggcugauuaag

SEQ ID NO: 736786 - RNA, 19 nt, Artificial Sequence
  Description of Artificial Sequence: Synthetic oligonucleotide
  Sense strand starting at position 754 of SEQ ID NO: 586688
uuaaucagcccugaaaguu

SEQ ID NO: 736787 - RNA, 19 nt, Artificial Sequence
  Description of Artificial Sequence: Synthetic oligonucleotide
  Antisense strand to SEQ ID NO: 736786
aacuuucagggcugauuaa

SEQ ID NO: 736788 - RNA, 19 nt, Artificial Sequence
  Description of Artificial Sequence: Synthetic oligonucleotide
  Sense strand starting at position 977 of SEQ ID NO: 586688
cagugugagccauaugauu

SEQ ID NO: 736789 - RNA, 19 nt, Artificial Sequence
  Description of Artificial Sequence: Synthetic oligonucleotide
  Antisense strand to SEQ ID NO: 736788
aaucauauggcucacacug

SEQ ID NO: 736790 - RNA, 19 nt, Artificial Sequence
  Description of Artificial Sequence: Synthetic oligonucleotide
  Sense strand starting at position 1142 of SEQ ID NO: 586688
gcaccaacucugggaaauc

SEQ ID NO: 736791 - RNA, 19 nt, Artificial Sequence
  Description of Artificial Sequence: Synthetic oligonucleotide
  Antisense strand to SEQ ID NO: 736790
gauuucccagaguuggugc

SEQ ID NO: 736792 - RNA, 19 nt, Artificial Sequence
  Description of Artificial Sequence: Synthetic oligonucleotide
  Sense strand starting at position 1152 of SEQ ID NO: 586688
ugggaaauccgauguguau

SEQ ID NO: 736793 - RNA, 19 nt, Artificial Sequence
  Description of Artificial Sequence: Synthetic oligonucleotide
  Antisense strand to SEQ ID NO: 736792
auacacaucggauuuccca

SEQ ID NO: 736794 - RNA, 19 nt, Artificial Sequence
  Description of Artificial Sequence: Synthetic oligonucleotide
  Sense strand starting at position 1431 of SEQ ID NO: 586688
ccacaacaugugugagguu

SEQ ID NO: 736795 - RNA, 19 nt, Artificial Sequence
  Description of Artificial Sequence: Synthetic oligonucleotide
  Antisense strand to SEQ ID NO: 736794
aaccucacacauguugugg

SEQ ID NO: 736796 - RNA, 19 nt, Artificial Sequence
  Description of Artificial Sequence: Synthetic oligonucleotide
  Sense strand starting at position 1513 of SEQ ID NO: 586688
ccguuuaagaaguauagua

SEQ ID NO: 736797 - RNA, 19 nt, Artificial Sequence
  Description of Artificial Sequence: Synthetic oligonucleotide
  Antisense strand to SEQ ID NO: 736796
uacuauacuucuuaaacgg

SEQ ID NO: 736798 - RNA, 19 nt, Artificial Sequence
  Description of Artificial Sequence: Synthetic oligonucleotide
  Sense strand starting at position 1525 of SEQ ID NO: 586688
uauaguauuuaagagggua

SEQ ID NO: 736799 - RNA, 19 nt, Artificial Sequence
  Description of Artificial Sequence: Synthetic oligonucleotide
  Antisense strand to SEQ ID NO: 736798
uacccucuuaaauacuaua

SEQ ID NO: 736800 - RNA, 19 nt, Artificial Sequence
  Description of Artificial Sequence: Synthetic oligonucleotide
  Sense strand starting at position 2256 of SEQ ID NO: 586688
ugggacugcuucucagaac

SEQ ID NO: 736801 - RNA, 19 nt, Artificial Sequence
  Description of Artificial Sequence: Synthetic oligonucleotide
  Antisense strand to SEQ ID NO: 736800
guucugagaagcaguccca

SEQ ID NO: 736802 - RNA, 19 nt, Artificial Sequence
  Description of Artificial Sequence: Synthetic oligonucleotide
  Sense strand starting at position 2374 of SEQ ID NO: 586688
gauccaagguguuugguua

SEQ ID NO: 736803 - RNA, 19 nt, Artificial Sequence
  Description of Artificial Sequence: Synthetic oligonucleotide
  Antisense strand to SEQ ID NO: 736802
uaaccaaacaccuuggauc

SEQ ID NO: 736804 - RNA, 19 nt, Artificial Sequence
  Description of Artificial Sequence: Synthetic oligonucleotide
  Sense strand starting at position 2375 of SEQ ID NO: 586688
auccaagguguuugguuaa

SEQ ID NO: 736805 - RNA, 19 nt, Artificial Sequence
  Description of Artificial Sequence: Synthetic oligonucleotide
  Antisense strand to SEQ ID NO: 736804
uuaaccaaacaccuuggau

SEQ ID NO: 736806 - RNA, 19 nt, Artificial Sequence
  Description of Artificial Sequence: Synthetic oligonucleotide
  Sense strand starting at position 2378 of SEQ ID NO: 586688
caagguguuugguuaauga

SEQ ID NO: 736807 - RNA, 19 nt, Artificial Sequence
  Description of Artificial Sequence: Synthetic oligonucleotide
  Antisense strand to SEQ ID NO: 736806
ucauuaaccaaacaccuug

SEQ ID NO: 736808 - RNA, 19 nt, Artificial Sequence
  Description of Artificial Sequence: Synthetic oligonucleotide
  Sense strand starting at position 2591 of SEQ ID NO: 586688
agcaaagcuuccuuaagga

SEQ ID NO: 736809 - RNA, 19 nt, Artificial Sequence
  Description of Artificial Sequence: Synthetic oligonucleotide
  Antisense strand to SEQ ID NO: 736808
uccuuaaggaagcuuugcu

SEQ ID NO: 736810 - RNA, 19 nt, Artificial Sequence
  Description of Artificial Sequence: Synthetic oligonucleotide
  Sense strand starting at position 2688 of SEQ ID NO: 586688
gccuucuaggacugggaaa

SEQ ID NO: 736811 - RNA, 19 nt, Artificial Sequence
  Description of Artificial Sequence: Synthetic oligonucleotide
  Antisense strand to SEQ ID NO: 736810
uuucccaguccuagaaggc

SEQ ID NO: 736812 - RNA, 19 nt, Artificial Sequence
  Description of Artificial Sequence: Synthetic oligonucleotide
  Sense strand starting at position 2749 of SEQ ID NO: 586688
gcaguagguauggaugaau

SEQ ID NO: 736813 - RNA, 19 nt, Artificial Sequence
  Description of Artificial Sequence: Synthetic oligonucleotide
  Antisense strand to SEQ ID NO: 736812
auucauccauaccuacugc

SEQ ID NO: 736814 - RNA, 19 nt, Artificial Sequence
  Description of Artificial Sequence: Synthetic oligonucleotide
  Sense strand starting at position 2819 of SEQ ID NO: 586688
ccaguuuagugaguuugga

SEQ ID NO: 736815 - RNA, 19 nt, Artificial Sequence
  Description of Artificial Sequence: Synthetic oligonucleotide
  Antisense strand to SEQ ID NO: 736814
uccaaacucacuaaacugg

SEQ ID NO: 736816 - RNA, 19 nt, Artificial Sequence
  Description of Artificial Sequence: Synthetic oligonucleotide
  Sense strand starting at position 2827 of SEQ ID NO: 586688
gugaguuuggauggcauuu

SEQ ID NO: 736817 - RNA, 19 nt, Artificial Sequence
  Description of Artificial Sequence: Synthetic oligonucleotide
  Antisense strand to SEQ ID NO: 736816
aaaugccauccaaacucac

SEQ ID NO: 736818 - RNA, 19 nt, Artificial Sequence
  Description of Artificial Sequence: Synthetic oligonucleotide
  Sense strand starting at position 2846 of SEQ ID NO: 586688
accuaaaggcaauguuaga

SEQ ID NO: 736819 - RNA, 19 nt, Artificial Sequence
  Description of Artificial Sequence: Synthetic oligonucleotide
  Antisense strand to SEQ ID NO: 736818
ucuaacauugccuuuaggu

SEQ ID NO: 736820 - RNA, 19 nt, Artificial Sequence
  Description of Artificial Sequence: Synthetic oligonucleotide
  Sense strand starting at position 2857 of SEQ ID NO: 586688
auguuagagucaucgaaag

SEQ ID NO: 736821 - RNA, 19 nt, Artificial Sequence
  Description of Artificial Sequence: Synthetic oligonucleotide
  Antisense strand to SEQ ID NO: 736820
cuuucgaugacucuaacau

SEQ ID NO: 736822 - RNA, 19 nt, Artificial Sequence
  Description of Artificial Sequence: Synthetic oligonucleotide
  Sense strand starting at position 2859 of SEQ ID NO: 586688
guuagagucaucgaaaguu

SEQ ID NO: 736823 - RNA, 19 nt, Artificial Sequence
  Description of Artificial Sequence: Synthetic oligonucleotide
  Antisense strand to SEQ ID NO: 736822
aacuuucgaugacucuaac

SEQ ID NO: 736824 - RNA, 19 nt, Artificial Sequence
  Description of Artificial Sequence: Synthetic oligonucleotide
  Sense strand starting at position 3351 of SEQ ID NO: 586688
gagcuuggugacugaccaa

SEQ ID NO: 736825 - RNA, 19 nt, Artificial Sequence
  Description of Artificial Sequence: Synthetic oligonucleotide
  Antisense strand to SEQ ID NO: 736824
uuggucagucaccaagcuc

SEQ ID NO: 736826 - RNA, 19 nt, Artificial Sequence
  Description of Artificial Sequence: Synthetic oligonucleotide
  Sense strand starting at position 3369 of SEQ ID NO: 586688
agugaaugacggugaaaga

SEQ ID NO: 736827 - RNA, 19 nt, Artificial Sequence
  Description of Artificial Sequence: Synthetic oligonucleotide
  Antisense strand to SEQ ID NO: 736826
ucuuucaccgucauucacu

SEQ ID NO: 736828 - RNA, 19 nt, Artificial Sequence
  Description of Artificial Sequence: Synthetic oligonucleotide
  Sense strand starting at position 3530 of SEQ ID NO: 586688
uggugauggcuguaaacag

SEQ ID NO: 736829 - RNA, 19 nt, Artificial Sequence
  Description of Artificial Sequence: Synthetic oligonucleotide
  Antisense strand to SEQ ID NO: 736828
cuguuuacagccaucacca

SEQ ID NO: 736830 - RNA, 19 nt, Artificial Sequence
  Description of Artificial Sequence: Synthetic oligonucleotide
  Sense strand starting at position 3548 of SEQ ID NO: 586688
gcauaaugagcuuaguccu

SEQ ID NO: 736831 - RNA, 19 nt, Artificial Sequence
  Description of Artificial Sequence: Synthetic oligonucleotide
  Antisense strand to SEQ ID NO: 736830
aggacuaagcucauuaugc

SEQ ID NO: 736832 - RNA, 19 nt, Artificial Sequence
  Description of Artificial Sequence: Synthetic oligonucleotide
  Sense strand starting at position 3551 of SEQ ID NO: 586688
uaaugagcuuaguccugau

SEQ ID NO: 736833 - RNA, 19 nt, Artificial Sequence
  Description of Artificial Sequence: Synthetic oligonucleotide
  Antisense strand to SEQ ID NO: 736832
aucaggacuaagcucauua

SEQ ID NO: 736834 - RNA, 19 nt, Artificial Sequence
  Description of Artificial Sequence: Synthetic oligonucleotide
  Sense strand starting at position 3555 of SEQ ID NO: 586688
gagcuuaguccugaugauc

SEQ ID NO: 736835 - RNA, 19 nt, Artificial Sequence
  Description of Artificial Sequence: Synthetic oligonucleotide
  Antisense strand to SEQ ID NO: 736834
gaucaucaggacuaagcuc

SEQ ID NO: 736836 - RNA, 19 nt, Artificial Sequence
  Description of Artificial Sequence: Synthetic oligonucleotide
  Sense strand starting at position 3567 of SEQ ID NO: 586688
gaugaucuugguggcagau

SEQ ID NO: 736837 - RNA, 19 nt, Artificial Sequence
  Description of Artificial Sequence: Synthetic oligonucleotide
  Antisense strand to SEQ ID NO: 736836
aucugccaccaagaucauc

SEQ ID NO: 736838 - RNA, 19 nt, Artificial Sequence
  Description of Artificial Sequence: Synthetic oligonucleotide
  Sense strand starting at position 3633 of SEQ ID NO: 586688
cugccauuagaagaaugua

SEQ ID NO: 736839 - RNA, 19 nt, Artificial Sequence
  Description of Artificial Sequence: Synthetic oligonucleotide
  Antisense strand to SEQ ID NO: 736838
uacauucuucuaauggcag

SEQ ID NO: 736840 - RNA, 19 nt, Artificial Sequence
  Description of Artificial Sequence: Synthetic oligonucleotide
  Sense strand starting at position 3657 of SEQ ID NO: 586688
aagaaagugcuguauuacu

SEQ ID NO: 736841 - RNA, 19 nt, Artificial Sequence
  Description of Artificial Sequence: Synthetic oligonucleotide
  Antisense strand to SEQ ID NO: 736840
aguaauacagcacuuucuu

SEQ ID NO: 736842 - RNA, 19 nt, Artificial Sequence
  Description of Artificial Sequence: Synthetic oligonucleotide
  Sense strand starting at position 3664 of SEQ ID NO: 586688
ugcuguauuacugagagga

SEQ ID NO: 736843 - RNA, 19 nt, Artificial Sequence
  Description of Artificial Sequence: Synthetic oligonucleotide
  Antisense strand to SEQ ID NO: 736842
uccucucaguaauacagca

SEQ ID NO: 736844 - RNA, 19 nt, Artificial Sequence
  Description of Artificial Sequence: Synthetic oligonucleotide
  Sense strand starting at position 3829 of SEQ ID NO: 586688
ucugcuugcacucaggaga

SEQ ID NO: 736845 - RNA, 19 nt, Artificial Sequence
  Description of Artificial Sequence: Synthetic oligonucleotide
  Antisense strand to SEQ ID NO: 736844
ucuccugagugcaagcaga

SEQ ID NO: 736846 - RNA, 19 nt, Artificial Sequence
  Description of Artificial Sequence: Synthetic oligonucleotide
  Sense strand starting at position 3832 of SEQ ID NO: 586688
gcuugcacucaggagauga

SEQ ID NO: 736847 - RNA, 19 nt, Artificial Sequence
  Description of Artificial Sequence: Synthetic oligonucleotide
  Antisense strand to SEQ ID NO: 736846
ucaucuccugagugcaagc

SEQ ID NO: 736848 - RNA, 19 nt, Artificial Sequence
  Description of Artificial Sequence: Synthetic oligonucleotide
  Sense strand starting at position 259 of SEQ ID NO: 586689
ccuuguuuagucuaaauga

SEQ ID NO: 736849 - RNA, 19 nt, Artificial Sequence
  Description of Artificial Sequence: Synthetic oligonucleotide
  Antisense strand to SEQ ID NO: 736848
ucauuuagacuaaacaagg

SEQ ID NO: 736850 - RNA, 19 nt, Artificial Sequence
  Description of Artificial Sequence: Synthetic oligonucleotide
  Sense strand starting at position 380 of SEQ ID NO: 586689
aguucuagugcugaggaau

SEQ ID NO: 736851 - RNA, 19 nt, Artificial Sequence
  Description of Artificial Sequence: Synthetic oligonucleotide
  Antisense strand to SEQ ID NO: 736850
auuccucagcacuagaacu

SEQ ID NO: 736852 - RNA, 19 nt, Artificial Sequence
  Description of Artificial Sequence: Synthetic oligonucleotide
  Sense strand starting at position 386 of SEQ ID NO: 586689
agugcugaggaaugaagau

SEQ ID NO: 736853 - RNA, 19 nt, Artificial Sequence
  Description of Artificial Sequence: Synthetic oligonucleotide
  Antisense strand to SEQ ID NO: 736852
aucuucauuccucagcacu

SEQ ID NO: 736854 - RNA, 19 nt, Artificial Sequence
  Description of Artificial Sequence: Synthetic oligonucleotide
  Sense strand starting at position 457 of SEQ ID NO: 586689
aaggauuguuucucaaaug

SEQ ID NO: 736855 - RNA, 19 nt, Artificial Sequence
  Description of Artificial Sequence: Synthetic oligonucleotide
  Antisense strand to SEQ ID NO: 736854
cauuugagaaacaauccuu

SEQ ID NO: 736856 - RNA, 19 nt, Artificial Sequence
  Description of Artificial Sequence: Synthetic oligonucleotide
  Sense strand starting at position 572 of SEQ ID NO: 586689
ccaagaggaucaguuugau

SEQ ID NO: 736857 - RNA, 19 nt, Artificial Sequence
  Description of Artificial Sequence: Synthetic oligonucleotide
  Antisense strand to SEQ ID NO: 736856
aucaaacugauccucuugg

SEQ ID NO: 736858 - RNA, 19 nt, Artificial Sequence
  Description of Artificial Sequence: Synthetic oligonucleotide
  Sense strand starting at position 607 of SEQ ID NO: 586689
gugcuacgagaccaaauau

SEQ ID NO: 736859 - RNA, 19 nt, Artificial Sequence
  Description of Artificial Sequence: Synthetic oligonucleotide
  Antisense strand to SEQ ID NO: 736858
auauuuggucucguagcac

SEQ ID NO: 736860 - RNA, 19 nt, Artificial Sequence
  Description of Artificial Sequence: Synthetic oligonucleotide
  Sense strand starting at position 647 of SEQ ID NO: 586689
aagugaacugacuggucua

SEQ ID NO: 736861 - RNA, 19 nt, Artificial Sequence
  Description of Artificial Sequence: Synthetic oligonucleotide
  Antisense strand to SEQ ID NO: 736860
uagaccagucaguucacuu

SEQ ID NO: 736862 - RNA, 19 nt, Artificial Sequence
  Description of Artificial Sequence: Synthetic oligonucleotide
  Sense strand starting at position 715 of SEQ ID NO: 586689
acaagauauguggguguga

SEQ ID NO: 736863 - RNA, 19 nt, Artificial Sequence
  Description of Artificial Sequence: Synthetic oligonucleotide
  Antisense strand to SEQ ID NO: 736862
ucacacccacauaucuugu

SEQ ID NO: 736864 - RNA, 19 nt, Artificial Sequence
  Description of Artificial Sequence: Synthetic oligonucleotide
  Sense strand starting at position 816 of SEQ ID NO: 586689
gcaguuugauuuccacgga

SEQ ID NO: 736865 - RNA, 19 nt, Artificial Sequence
  Description of Artificial Sequence: Synthetic oligonucleotide
  Antisense strand to SEQ ID NO: 736864
uccguggaaaucaaacugc

SEQ ID NO: 736866 - RNA, 19 nt, Artificial Sequence
  Description of Artificial Sequence: Synthetic oligonucleotide
  Sense strand starting at position 937 of SEQ ID NO: 586689
ccucuaaauguaugacuga

SEQ ID NO: 736867 - RNA, 19 nt, Artificial Sequence
  Description of Artificial Sequence: Synthetic oligonucleotide
  Antisense strand to SEQ ID NO: 736866
ucagucauacauuuagagg

SEQ ID NO: 736868 - RNA, 19 nt, Artificial Sequence
  Description of Artificial Sequence: Synthetic oligonucleotide
  Sense strand starting at position 940 of SEQ ID NO: 586689
cuaaauguaugacugacau

SEQ ID NO: 736869 - RNA, 19 nt, Artificial Sequence
  Description of Artificial Sequence: Synthetic oligonucleotide
  Antisense strand to SEQ ID NO: 736868
augucagucauacauuuag

SEQ ID NO: 736870 - RNA, 19 nt, Artificial Sequence
  Description of Artificial Sequence: Synthetic oligonucleotide
  Sense strand starting at position 975 of SEQ ID NO: 586689
uagaaagugcuuugaaauu

SEQ ID NO: 736871 - RNA, 19 nt, Artificial Sequence
  Description of Artificial Sequence: Synthetic oligonucleotide
  Antisense strand to SEQ ID NO: 736870
aauuucaaagcacuuucua

SEQ ID NO: 736872 - RNA, 19 nt, Artificial Sequence
  Description of Artificial Sequence: Synthetic oligonucleotide
  Sense strand starting at position 1054 of SEQ ID NO: 586689
cagugaaggaaguaauguu

SEQ ID NO: 736873 - RNA, 19 nt, Artificial Sequence
  Description of Artificial Sequence: Synthetic oligonucleotide
  Antisense strand to SEQ ID NO: 736872
aacauuacuuccuucacug

SEQ ID NO: 736874 - RNA, 19 nt, Artificial Sequence
  Description of Artificial Sequence: Synthetic oligonucleotide
  Sense strand starting at position 1082 of SEQ ID NO: 586689
caagccuguccguauauuu

SEQ ID NO: 736875 - RNA, 19 nt, Artificial Sequence
  Description of Artificial Sequence: Synthetic oligonucleotide
  Antisense strand to SEQ ID NO: 736874
aaauauacggacaggcuug

SEQ ID NO: 736876 - RNA, 19 nt, Artificial Sequence
  Description of Artificial Sequence: Synthetic oligonucleotide
  Sense strand starting at position 1142 of SEQ ID NO: 586689
gggcaagggaggugaaauu

SEQ ID NO: 736877 - RNA, 19 nt, Artificial Sequence
  Description of Artificial Sequence: Synthetic oligonucleotide
  Antisense strand to SEQ ID NO: 736876
aauuucaccucccuugccc

SEQ ID NO: 736878 - RNA, 19 nt, Artificial Sequence
  Description of Artificial Sequence: Synthetic oligonucleotide
  Sense strand starting at position 1151 of SEQ ID NO: 586689
aggugaaauuguucagagu

SEQ ID NO: 736879 - RNA, 19 nt, Artificial Sequence
  Description of Artificial Sequence: Synthetic oligonucleotide
  Antisense strand to SEQ ID NO: 736878
acucugaacaauuucaccu

SEQ ID NO: 736880 - RNA, 19 nt, Artificial Sequence
  Description of Artificial Sequence: Synthetic oligonucleotide
  Sense strand starting at position 1152 of SEQ ID NO: 586689
ggugaaauuguucagaguu

SEQ ID NO: 736881 - RNA, 19 nt, Artificial Sequence
  Description of Artificial Sequence: Synthetic oligonucleotide
  Antisense strand to SEQ ID NO: 736880
aacucugaacaauuucacc

SEQ ID NO: 736882 - RNA, 19 nt, Artificial Sequence
  Description of Artificial Sequence: Synthetic oligonucleotide
  Sense strand starting at position 1185 of SEQ ID NO: 586689
caccuaaagugaguaguau

SEQ ID NO: 736883 - RNA, 19 nt, Artificial Sequence
  Description of Artificial Sequence: Synthetic oligonucleotide
  Antisense strand to SEQ ID NO: 736882
auacuacucacuuuaggug

SEQ ID NO: 736884 - RNA, 19 nt, Artificial Sequence
  Description of Artificial Sequence: Synthetic oligonucleotide
  Sense strand starting at position 1186 of SEQ ID NO: 586689
accuaaagugaguaguauu

SEQ ID NO: 736885 - RNA, 19 nt, Artificial Sequence
  Description of Artificial Sequence: Synthetic oligonucleotide
  Antisense strand to SEQ ID NO: 736884
aauacuacucacuuuaggu

SEQ ID NO: 736886 - RNA, 19 nt, Artificial Sequence
  Description of Artificial Sequence: Synthetic oligonucleotide
  Sense strand starting at position 1215 of SEQ ID NO: 586689
uuggaaucauggcucugaa

SEQ ID NO: 736887 - RNA, 19 nt, Artificial Sequence
  Description of Artificial Sequence: Synthetic oligonucleotide
  Antisense strand to SEQ ID NO: 736886
uucagagccaugauuccaa

SEQ ID NO: 736888 - RNA, 19 nt, Artificial Sequence
  Description of Artificial Sequence: Synthetic oligonucleotide
  Sense strand starting at position 1218 of SEQ ID NO: 586689
gaaucauggcucugaagau

SEQ ID NO: 736889 - RNA, 19 nt, Artificial Sequence
  Description of Artificial Sequence: Synthetic oligonucleotide
  Antisense strand to SEQ ID NO: 736888
aucuucagagccaugauuc

SEQ ID NO: 736890 - RNA, 19 nt, Artificial Sequence
  Description of Artificial Sequence: Synthetic oligonucleotide
  Sense strand starting at position 1339 of SEQ ID NO: 586689
gagguaugcuggucaaagg

SEQ ID NO: 736891 - RNA, 19 nt, Artificial Sequence
  Description of Artificial Sequence: Synthetic oligonucleotide
  Antisense strand to SEQ ID NO: 736890
ccuuugaccagcauaccuc

SEQ ID NO: 736892 - RNA, 19 nt, Artificial Sequence
  Description of Artificial Sequence: Synthetic oligonucleotide
  Sense strand starting at position 1340 of SEQ ID NO: 586689
agguaugcuggucaaagga

SEQ ID NO: 736893 - RNA, 19 nt, Artificial Sequence
  Description of Artificial Sequence: Synthetic oligonucleotide
  Antisense strand to SEQ ID NO: 736892
uccuuugaccagcauaccu

SEQ ID NO: 736894 - RNA, 19 nt, Artificial Sequence
  Description of Artificial Sequence: Synthetic oligonucleotide
  Sense strand starting at position 1608 of SEQ ID NO: 586689
ggcugauacuucucaaacc

SEQ ID NO: 736895 - RNA, 19 nt, Artificial Sequence
  Description of Artificial Sequence: Synthetic oligonucleotide
  Antisense strand to SEQ ID NO: 736894
gguuugagaaguaucagcc

SEQ ID NO: 736896 - RNA, 19 nt, Artificial Sequence
  Description of Artificial Sequence: Synthetic oligonucleotide
  Sense strand starting at position 2848 of SEQ ID NO: 586689
ggcuuagauuuacaggaua

SEQ ID NO: 736897 - RNA, 19 nt, Artificial Sequence
  Description of Artificial Sequence: Synthetic oligonucleotide
  Antisense strand to SEQ ID NO: 736896
uauccuguaaaucuaagcc

SEQ ID NO: 736898 - RNA, 19 nt, Artificial Sequence
  Description of Artificial Sequence: Synthetic oligonucleotide
  Sense strand starting at position 2904 of SEQ ID NO: 586689
ugggauuuaugguacaaac

SEQ ID NO: 736899 - RNA, 19 nt, Artificial Sequence
  Description of Artificial Sequence: Synthetic oligonucleotide
  Antisense strand to SEQ ID NO: 736898
guuuguaccauaaauccca

SEQ ID NO: 736900 - RNA, 19 nt, Artificial Sequence
  Description of Artificial Sequence: Synthetic oligonucleotide
  Sense strand starting at position 2923 of SEQ ID NO: 586689
ccuuuaagggacugugagu

SEQ ID NO: 736901 - RNA, 19 nt, Artificial Sequence
  Description of Artificial Sequence: Synthetic oligonucleotide
  Antisense strand to SEQ ID NO: 736900
acucacagucccuuaaagg

SEQ ID NO: 736902 - RNA, 19 nt, Artificial Sequence
  Description of Artificial Sequence: Synthetic oligonucleotide
  Sense strand starting at position 2930 of SEQ ID NO: 586689
gggacugugagucaguaau

SEQ ID NO: 736903 - RNA, 19 nt, Artificial Sequence
  Description of Artificial Sequence: Synthetic oligonucleotide
  Antisense strand to SEQ ID NO: 736902
auuacugacucacaguccc

SEQ ID NO: 736904 - RNA, 19 nt, Artificial Sequence
  Description of Artificial Sequence: Synthetic oligonucleotide
  Sense strand starting at position 2932 of SEQ ID NO: 586689
gacugugagucaguaauac

SEQ ID NO: 736905 - RNA, 19 nt, Artificial Sequence
  Description of Artificial Sequence: Synthetic oligonucleotide
  Antisense strand to SEQ ID NO: 736904
guauuacugacucacaguc

SEQ ID NO: 736906 - RNA, 19 nt, Artificial Sequence
  Description of Artificial Sequence: Synthetic oligonucleotide
  Sense strand starting at position 2992 of SEQ ID NO: 586689
uugagugagucuuuccaag

SEQ ID NO: 736907 - RNA, 19 nt, Artificial Sequence
  Description of Artificial Sequence: Synthetic oligonucleotide
  Antisense strand to SEQ ID NO: 736906
cuuggaaagacucacucaa

SEQ ID NO: 736908 - RNA, 19 nt, Artificial Sequence
  Description of Artificial Sequence: Synthetic oligonucleotide
  Sense strand starting at position 3135 of SEQ ID NO: 586689
augguauggcuagggauaa

SEQ ID NO: 736909 - RNA, 19 nt, Artificial Sequence
  Description of Artificial Sequence: Synthetic oligonucleotide
  Antisense strand to SEQ ID NO: 736908
uuaucccuagccauaccau

SEQ ID NO: 736910 - RNA, 19 nt, Artificial Sequence
  Description of Artificial Sequence: Synthetic oligonucleotide
  Sense strand starting at position 3219 of SEQ ID NO: 586689
uugucaccauuugaaagaa

SEQ ID NO: 736911 - RNA, 19 nt, Artificial Sequence
  Description of Artificial Sequence: Synthetic oligonucleotide
  Antisense strand to SEQ ID NO: 736910
uucuuucaaauggugacaa

SEQ ID NO: 736912 - RNA, 19 nt, Artificial Sequence
  Description of Artificial Sequence: Synthetic oligonucleotide
  Sense strand starting at position 3425 of SEQ ID NO: 586689
ggaggaacguaauuccaga

SEQ ID NO: 736913 - RNA, 19 nt, Artificial Sequence
  Description of Artificial Sequence: Synthetic oligonucleotide
  Antisense strand to SEQ ID NO: 736912
ucuggaauuacguuccucc

SEQ ID NO: 736914 - RNA, 19 nt, Artificial Sequence
  Description of Artificial Sequence: Synthetic oligonucleotide
  Sense strand starting at position 3459 of SEQ ID NO: 586689
ggugaugguaauuauguau

SEQ ID NO: 736915 - RNA, 19 nt, Artificial Sequence
  Description of Artificial Sequence: Synthetic oligonucleotide
  Antisense strand to SEQ ID NO: 736914
auacauaauuaccaucacc

SEQ ID NO: 736916 - RNA, 19 nt, Artificial Sequence
  Description of Artificial Sequence: Synthetic oligonucleotide
  Sense strand starting at position 3462 of SEQ ID NO: 586689
gaugguaauuauguaucaa

SEQ ID NO: 736917 - RNA, 19 nt, Artificial Sequence
  Description of Artificial Sequence: Synthetic oligonucleotide
  Antisense strand to SEQ ID NO: 736916
uugauacauaauuaccauc

SEQ ID NO: 736918 - RNA, 19 nt, Artificial Sequence
  Description of Artificial Sequence: Synthetic oligonucleotide
  Sense strand starting at position 3485 of SEQ ID NO: 586689
cugguucuauuucuguuau

SEQ ID NO: 736919 - RNA, 19 nt, Artificial Sequence
  Description of Artificial Sequence: Synthetic oligonucleotide
  Antisense strand to SEQ ID NO: 736918
auaacagaaauagaaccag

SEQ ID NO: 736920 - RNA, 19 nt, Artificial Sequence
  Description of Artificial Sequence: Synthetic oligonucleotide
  Sense strand starting at position 3487 of SEQ ID NO: 586689
gguucuauuucuguuauua

SEQ ID NO: 736921 - RNA, 19 nt, Artificial Sequence
  Description of Artificial Sequence: Synthetic oligonucleotide
  Antisense strand to SEQ ID NO: 736920
uaauaacagaaauagaacc

SEQ ID NO: 736922 - RNA, 19 nt, Artificial Sequence
  Description of Artificial Sequence: Synthetic oligonucleotide
  Sense strand starting at position 3590 of SEQ ID NO: 586689
cuaaaucaggccugauaga

SEQ ID NO: 736923 - RNA, 19 nt, Artificial Sequence
  Description of Artificial Sequence: Synthetic oligonucleotide
  Antisense strand to SEQ ID NO: 736922
ucuaucaggccugauuuag

SEQ ID NO: 736924 - RNA, 19 nt, Artificial Sequence
  Description of Artificial Sequence: Synthetic oligonucleotide
  Sense strand starting at position 3719 of SEQ ID NO: 586689
uuccuaugucaugagcaca

SEQ ID NO: 736925 - RNA, 19 nt, Artificial Sequence
  Description of Artificial Sequence: Synthetic oligonucleotide
  Antisense strand to SEQ ID NO: 736924
ugugcucaugacauaggaa

SEQ ID NO: 736926 - RNA, 19 nt, Artificial Sequence
  Description of Artificial Sequence: Synthetic oligonucleotide
  Sense strand starting at position 3948 of SEQ ID NO: 586689
ucuggugucacaugaugga

SEQ ID NO: 736927 - RNA, 19 nt, Artificial Sequence
  Description of Artificial Sequence: Synthetic oligonucleotide
  Antisense strand to SEQ ID NO: 736926
uccaucaugugacaccaga

SEQ ID NO: 736928 - RNA, 19 nt, Artificial Sequence
  Description of Artificial Sequence: Synthetic oligonucleotide
  Sense strand starting at position 149 of SEQ ID NO: 586690
acagauaacgcggauggua

SEQ ID NO: 736929 - RNA, 19 nt, Artificial Sequence
  Description of Artificial Sequence: Synthetic oligonucleotide
  Antisense strand to SEQ ID NO: 736928
uaccauccgcguuaucugu

SEQ ID NO: 736930 - RNA, 19 nt, Artificial Sequence
  Description of Artificial Sequence: Synthetic oligonucleotide
  Sense strand starting at position 182 of SEQ ID NO: 586690
gccucaggccuacaucaaa

SEQ ID NO: 736931 - RNA, 19 nt, Artificial Sequence
  Description of Artificial Sequence: Synthetic oligonucleotide
  Antisense strand to SEQ ID NO: 736930
uuugauguaggccugaggc

SEQ ID NO: 736932 - RNA, 19 nt, Artificial Sequence
  Description of Artificial Sequence: Synthetic oligonucleotide
  Sense strand starting at position 209 of SEQ ID NO: 586690
gagugacguccuggaaaua

SEQ ID NO: 736933 - RNA, 19 nt, Artificial Sequence
  Description of Artificial Sequence: Synthetic oligonucleotide
  Antisense strand to SEQ ID NO: 736932
uauuuccaggacgucacuc

SEQ ID NO: 736934 - RNA, 19 nt, Artificial Sequence
  Description of Artificial Sequence: Synthetic oligonucleotide
  Sense strand starting at position 457 of SEQ ID NO: 586690
agcaucaaucagggauaug

SEQ ID NO: 736935 - RNA, 19 nt, Artificial Sequence
  Description of Artificial Sequence: Synthetic oligonucleotide
  Antisense strand to SEQ ID NO: 736934
cauaucccugauugaugcu

SEQ ID NO: 736936 - RNA, 19 nt, Artificial Sequence
  Description of Artificial Sequence: Synthetic oligonucleotide
  Sense strand starting at position 468 of SEQ ID NO: 586690
gggauauggccaugaauag

SEQ ID NO: 736937 - RNA, 19 nt, Artificial Sequence
  Description of Artificial Sequence: Synthetic oligonucleotide
  Antisense strand to SEQ ID NO: 736936
cuauucauggccauauccc

SEQ ID NO: 736938 - RNA, 19 nt, Artificial Sequence
  Description of Artificial Sequence: Synthetic oligonucleotide
  Sense strand starting at position 555 of SEQ ID NO: 586690
aacccuugaccuggugaau

SEQ ID NO: 736939 - RNA, 19 nt, Artificial Sequence
  Description of Artificial Sequence: Synthetic oligonucleotide
  Antisense strand to SEQ ID NO: 736938
auucaccaggucaaggguu

SEQ ID NO: 736940 - RNA, 19 nt, Artificial Sequence
  Description of Artificial Sequence: Synthetic oligonucleotide
  Sense strand starting at position 584 of SEQ ID NO: 586690
gcuggcagucaugacagau

SEQ ID NO: 736941 - RNA, 19 nt, Artificial Sequence
  Description of Artificial Sequence: Synthetic oligonucleotide
  Antisense strand to SEQ ID NO: 736940
aucugucaugacugccagc

SEQ ID NO: 736942 - RNA, 19 nt, Artificial Sequence
  Description of Artificial Sequence: Synthetic oligonucleotide
  Sense strand starting at position 594 of SEQ ID NO: 586690
augacagauucuuccaguu

SEQ ID NO: 736943 - RNA, 19 nt, Artificial Sequence
  Description of Artificial Sequence: Synthetic oligonucleotide
  Antisense strand to SEQ ID NO: 736942
aacuggaagaaucugucau

SEQ ID NO: 736944 - RNA, 19 nt, Artificial Sequence
  Description of Artificial Sequence: Synthetic oligonucleotide
  Sense strand starting at position 796 of SEQ ID NO: 586690
cguuucgguccugugagau

SEQ ID NO: 736945 - RNA, 19 nt, Artificial Sequence
  Description of Artificial Sequence: Synthetic oligonucleotide
  Antisense strand to SEQ ID NO: 736944
aucucacaggaccgaaacg

SEQ ID NO: 736946 - RNA, 19 nt, Artificial Sequence
  Description of Artificial Sequence: Synthetic oligonucleotide
  Sense strand starting at position 981 of SEQ ID NO: 586690
gaaggaauuugcuagagaa

SEQ ID NO: 736947 - RNA, 19 nt, Artificial Sequence
  Description of Artificial Sequence: Synthetic oligonucleotide
  Antisense strand to SEQ ID NO: 736946
uucucuagcaaauuccuuc

SEQ ID NO: 736948 - RNA, 19 nt, Artificial Sequence
  Description of Artificial Sequence: Synthetic oligonucleotide
  Sense strand starting at position 1092 of SEQ ID NO: 586690
ucauuaaagccagauguuu

SEQ ID NO: 736949 - RNA, 19 nt, Artificial Sequence
  Description of Artificial Sequence: Synthetic oligonucleotide
  Antisense strand to SEQ ID NO: 736948
aaacaucuggcuuuaauga

SEQ ID NO: 736950 - RNA, 19 nt, Artificial Sequence
  Description of Artificial Sequence: Synthetic oligonucleotide
  Sense strand starting at position 1103 of SEQ ID NO: 586690
agauguuucuauguuugag

SEQ ID NO: 736951 - RNA, 19 nt, Artificial Sequence
  Description of Artificial Sequence: Synthetic oligonucleotide
  Antisense strand to SEQ ID NO: 736950
cucaaacauagaaacaucu

SEQ ID NO: 736952 - RNA, 19 nt, Artificial Sequence
  Description of Artificial Sequence: Synthetic oligonucleotide
  Sense strand starting at position 1119 of SEQ ID NO: 586690
gaguuuccggacugggaaa

SEQ ID NO: 736953 - RNA, 19 nt, Artificial Sequence
  Description of Artificial Sequence: Synthetic oligonucleotide
  Antisense strand to SEQ ID NO: 736952
uuucccaguccggaaacuc

SEQ ID NO: 736954 - RNA, 19 nt, Artificial Sequence
  Description of Artificial Sequence: Synthetic oligonucleotide
  Sense strand starting at position 1165 of SEQ ID NO: 586690
ucuaaugagccguaauacu

SEQ ID NO: 736955 - RNA, 19 nt, Artificial Sequence
  Description of Artificial Sequence: Synthetic oligonucleotide
  Antisense strand to SEQ ID NO: 736954
aguauuacggcucauuaga

SEQ ID NO: 736956 - RNA, 19 nt, Artificial Sequence
  Description of Artificial Sequence: Synthetic oligonucleotide
  Sense strand starting at position 1180 of SEQ ID NO: 586690
uacugaaauucuucgguaa

SEQ ID NO: 736957 - RNA, 19 nt, Artificial Sequence
  Description of Artificial Sequence: Synthetic oligonucleotide
  Antisense strand to SEQ ID NO: 736956
uuaccgaagaauuucagua

SEQ ID NO: 736958 - RNA, 19 nt, Artificial Sequence
  Description of Artificial Sequence: Synthetic oligonucleotide
  Sense strand starting at position 1181 of SEQ ID NO: 586690
acugaaauucuucgguaac

SEQ ID NO: 736959 - RNA, 19 nt, Artificial Sequence
  Description of Artificial Sequence: Synthetic oligonucleotide
  Antisense strand to SEQ ID NO: 736958
guuaccgaagaauuucagu

SEQ ID NO: 736960 - RNA, 19 nt, Artificial Sequence
  Description of Artificial Sequence: Synthetic oligonucleotide
  Sense strand starting at position 1227 of SEQ ID NO: 586690
ucagaacuuccaggcauua

SEQ ID NO: 736961 - RNA, 19 nt, Artificial Sequence
  Description of Artificial Sequence: Synthetic oligonucleotide
  Antisense strand to SEQ ID NO: 736960
uaaugccuggaaguucuga

SEQ ID NO: 736962 - RNA, 19 nt, Artificial Sequence
  Description of Artificial Sequence: Synthetic oligonucleotide
  Sense strand starting at position 1832 of SEQ ID NO: 586690
gcacuuacucgggaaggua

SEQ ID NO: 736963 - RNA, 19 nt, Artificial Sequence
  Description of Artificial Sequence: Synthetic oligonucleotide
  Antisense strand to SEQ ID NO: 736962
uaccuucccgaguaagugc

SEQ ID NO: 736964 - RNA, 19 nt, Artificial Sequence
  Description of Artificial Sequence: Synthetic oligonucleotide
  Sense strand starting at position 1996 of SEQ ID NO: 586690
gggcguggccugcucuuaa

SEQ ID NO: 736965 - RNA, 19 nt, Artificial Sequence
  Description of Artificial Sequence: Synthetic oligonucleotide
  Antisense strand to SEQ ID NO: 736964
uuaagagcaggccacgccc

SEQ ID NO: 736966 - RNA, 19 nt, Artificial Sequence
  Description of Artificial Sequence: Synthetic oligonucleotide
  Sense strand starting at position 2335 of SEQ ID NO: 586690
ccgcccucgccaguuuaua

SEQ ID NO: 736967 - RNA, 19 nt, Artificial Sequence
  Description of Artificial Sequence: Synthetic oligonucleotide
  Antisense strand to SEQ ID NO: 736966
uauaaacuggcgagggcgg

SEQ ID NO: 736968 - RNA, 19 nt, Artificial Sequence
  Description of Artificial Sequence: Synthetic oligonucleotide
  Sense strand starting at position 2336 of SEQ ID NO: 586690
cgcccucgccaguuuauaa

SEQ ID NO: 736969 - RNA, 19 nt, Artificial Sequence
  Description of Artificial Sequence: Synthetic oligonucleotide
  Antisense strand to SEQ ID NO: 736968
uuauaaacuggcgagggcg

SEQ ID NO: 736970 - RNA, 19 nt, Artificial Sequence
  Description of Artificial Sequence: Synthetic oligonucleotide
  Sense strand starting at position 2349 of SEQ ID NO: 586690
uuauaaguccuuuacggaa

SEQ ID NO: 736971 - RNA, 19 nt, Artificial Sequence
  Description of Artificial Sequence: Synthetic oligonucleotide
  Antisense strand to SEQ ID NO: 736970
uuccguaaaggacuuauaa

SEQ ID NO: 736972 - RNA, 19 nt, Artificial Sequence
  Description of Artificial Sequence: Synthetic oligonucleotide
  Sense strand starting at position 2579 of SEQ ID NO: 586690
ugguuugcucgggaaugac

SEQ ID NO: 736973 - RNA, 19 nt, Artificial Sequence
  Description of Artificial Sequence: Synthetic oligonucleotide
  Antisense strand to SEQ ID NO: 736972
gucauucccgagcaaacca

SEQ ID NO: 736974 - RNA, 19 nt, Artificial Sequence
  Description of Artificial Sequence: Synthetic oligonucleotide
  Sense strand starting at position 2810 of SEQ ID NO: 586690
gugcacuuggucuaaauua

SEQ ID NO: 736975 - RNA, 19 nt, Artificial Sequence
  Description of Artificial Sequence: Synthetic oligonucleotide
  Antisense strand to SEQ ID NO: 736974
uaauuuagaccaagugcac

SEQ ID NO: 736976 - RNA, 19 nt, Artificial Sequence
  Description of Artificial Sequence: Synthetic oligonucleotide
  Sense strand starting at position 2869 of SEQ ID NO: 586690
guuguaguuaugcauauuu

SEQ ID NO: 736977 - RNA, 19 nt, Artificial Sequence
  Description of Artificial Sequence: Synthetic oligonucleotide
  Antisense strand to SEQ ID NO: 736976
aaauaugcauaacuacaac

SEQ ID NO: 736978 - RNA, 19 nt, Artificial Sequence
  Description of Artificial Sequence: Synthetic oligonucleotide
  Sense strand starting at position 2907 of SEQ ID NO: 586690
gcaguuaccaaagaguaug

SEQ ID NO: 736979 - RNA, 19 nt, Artificial Sequence
  Description of Artificial Sequence: Synthetic oligonucleotide
  Antisense strand to SEQ ID NO: 736978
cauacucuuugguaacugc

SEQ ID NO: 736980 - RNA, 19 nt, Artificial Sequence
  Description of Artificial Sequence: Synthetic oligonucleotide
  Sense strand starting at position 2951 of SEQ ID NO: 586690
uccugaaagccuggacagu

SEQ ID NO: 736981 - RNA, 19 nt, Artificial Sequence
  Description of Artificial Sequence: Synthetic oligonucleotide
  Antisense strand to SEQ ID NO: 736980
acuguccaggcuuucagga

SEQ ID NO: 736982 - RNA, 19 nt, Artificial Sequence
  Description of Artificial Sequence: Synthetic oligonucleotide
  Sense strand starting at position 3068 of SEQ ID NO: 586690
cguuguaaucauuaaccug

SEQ ID NO: 736983 - RNA, 19 nt, Artificial Sequence
  Description of Artificial Sequence: Synthetic oligonucleotide
  Antisense strand to SEQ ID NO: 736982
cagguuaaugauuacaacg

SEQ ID NO: 736984 - RNA, 19 nt, Artificial Sequence
  Description of Artificial Sequence: Synthetic oligonucleotide
  Sense strand starting at position 3120 of SEQ ID NO: 586690
guuucuauagauggaaauu

SEQ ID NO: 736985 - RNA, 19 nt, Artificial Sequence
  Description of Artificial Sequence: Synthetic oligonucleotide
  Antisense strand to SEQ ID NO: 736984
aauuuccaucuauagaaac

SEQ ID NO: 736986 - RNA, 19 nt, Artificial Sequence
  Description of Artificial Sequence: Synthetic oligonucleotide
  Sense strand starting at position 3544 of SEQ ID NO: 586690
gcauguguuccuuaaggga

SEQ ID NO: 736987 - RNA, 19 nt, Artificial Sequence
  Description of Artificial Sequence: Synthetic oligonucleotide
  Antisense strand to SEQ ID NO: 736986
ucccuuaaggaacacaugc

SEQ ID NO: 736988 - RNA, 19 nt, Artificial Sequence
  Description of Artificial Sequence: Synthetic oligonucleotide
  Sense strand starting at position 3557 of SEQ ID NO: 586690
aagggaaugcuguaacugu

SEQ ID NO: 736989 - RNA, 19 nt, Artificial Sequence
  Description of Artificial Sequence: Synthetic oligonucleotide
  Antisense strand to SEQ ID NO: 736988
acaguuacagcauucccuu

SEQ ID NO: 736990 - RNA, 19 nt, Artificial Sequence
  Description of Artificial Sequence: Synthetic oligonucleotide
  Sense strand starting at position 3637 of SEQ ID NO: 586690
agaugauauagugguuauc

SEQ ID NO: 736991 - RNA, 19 nt, Artificial Sequence
  Description of Artificial Sequence: Synthetic oligonucleotide
  Antisense strand to SEQ ID NO: 736990
gauaaccacuauaucaucu

SEQ ID NO: 736992 - RNA, 19 nt, Artificial Sequence
  Description of Artificial Sequence: Synthetic oligonucleotide
  Sense strand starting at position 3639 of SEQ ID NO: 586690
augauauagugguuaucuu

SEQ ID NO: 736993 - RNA, 19 nt, Artificial Sequence
  Description of Artificial Sequence: Synthetic oligonucleotide
  Antisense strand to SEQ ID NO: 736992
aagauaaccacuauaucau

SEQ ID NO: 736994 - RNA, 19 nt, Artificial Sequence
  Description of Artificial Sequence: Synthetic oligonucleotide
  Sense strand starting at position 3640 of SEQ ID NO: 586690
ugauauagugguuaucuuu

SEQ ID NO: 736995 - RNA, 19 nt, Artificial Sequence
  Description of Artificial Sequence: Synthetic oligonucleotide
  Antisense strand to SEQ ID NO: 736994
aaagauaaccacuauauca

SEQ ID NO: 736996 - RNA, 19 nt, Artificial Sequence
  Description of Artificial Sequence: Synthetic oligonucleotide
  Sense strand starting at position 3643 of SEQ ID NO: 586690
uauagugguuaucuuugaa

SEQ ID NO: 736997 - RNA, 19 nt, Artificial Sequence
  Description of Artificial Sequence: Synthetic oligonucleotide
  Antisense strand to SEQ ID NO: 736996
uucaaagauaaccacuaua

SEQ ID NO: 736998 - RNA, 19 nt, Artificial Sequence
  Description of Artificial Sequence: Synthetic oligonucleotide
  Sense strand starting at position 3646 of SEQ ID NO: 586690
agugguuaucuuugaagaa

SEQ ID NO: 736999 - RNA, 19 nt, Artificial Sequence
  Description of Artificial Sequence: Synthetic oligonucleotide
  Antisense strand to SEQ ID NO: 736998
uucuucaaagauaaccacu

SEQ ID NO: 737000 - RNA, 19 nt, Artificial Sequence
  Description of Artificial Sequence: Synthetic oligonucleotide
  Sense strand starting at position 3771 of SEQ ID NO: 586690
cagacauaguuccugagca

SEQ ID NO: 737001 - RNA, 19 nt, Artificial Sequence
  Description of Artificial Sequence: Synthetic oligonucleotide
  Antisense strand to SEQ ID NO: 737000
ugcucaggaacuaugucug

SEQ ID NO: 737002 - RNA, 19 nt, Artificial Sequence
  Description of Artificial Sequence: Synthetic oligonucleotide
  Sense strand starting at position 3773 of SEQ ID NO: 586690
gacauaguuccugagcaau

SEQ ID NO: 737003 - RNA, 19 nt, Artificial Sequence
  Description of Artificial Sequence: Synthetic oligonucleotide
  Antisense strand to SEQ ID NO: 737002
auugcucaggaacuauguc

SEQ ID NO: 737004 - RNA, 19 nt, Artificial Sequence
  Description of Artificial Sequence: Synthetic oligonucleotide
  Sense strand starting at position 3776 of SEQ ID NO: 586690
auaguuccugagcaaucuu

SEQ ID NO: 737005 - RNA, 19 nt, Artificial Sequence
  Description of Artificial Sequence: Synthetic oligonucleotide
  Antisense strand to SEQ ID NO: 737004
aagauugcucaggaacuau

SEQ ID NO: 737006 - RNA, 19 nt, Artificial Sequence
  Description of Artificial Sequence: Synthetic oligonucleotide
  Sense strand starting at position 3983 of SEQ ID NO: 586690
ugaauuuguucccauagag

SEQ ID NO: 737007 - RNA, 19 nt, Artificial Sequence
  Description of Artificial Sequence: Synthetic oligonucleotide
  Antisense strand to SEQ ID NO: 737006
cucuaugggaacaaauuca

SEQ ID NO: 737008 - RNA, 19 nt, Artificial Sequence
  Description of Artificial Sequence: Synthetic oligonucleotide
  Sense strand starting at position 240 of SEQ ID NO: 586691
auagaucaacuguagcauu

SEQ ID NO: 737009 - RNA, 19 nt, Artificial Sequence
  Description of Artificial Sequence: Synthetic oligonucleotide
  Antisense strand to SEQ ID NO: 737008
aaugcuacaguugaucuau

SEQ ID NO: 737010 - RNA, 19 nt, Artificial Sequence
  Description of Artificial Sequence: Synthetic oligonucleotide
  Sense strand starting at position 286 of SEQ ID NO: 586691
uuugcuccaugaguagaaa

SEQ ID NO: 737011 - RNA, 19 nt, Artificial Sequence
  Description of Artificial Sequence: Synthetic oligonucleotide
  Antisense strand to SEQ ID NO: 737010
uuucuacucauggagcaaa

SEQ ID NO: 737012 - RNA, 19 nt, Artificial Sequence
  Description of Artificial Sequence: Synthetic oligonucleotide
  Sense strand starting at position 289 of SEQ ID NO: 586691
gcuccaugaguagaaacuu

SEQ ID NO: 737013 - RNA, 19 nt, Artificial Sequence
  Description of Artificial Sequence: Synthetic oligonucleotide
  Antisense strand to SEQ ID NO: 737012
aaguuucuacucauggagc

SEQ ID NO: 737014 - RNA, 19 nt, Artificial Sequence
  Description of Artificial Sequence: Synthetic oligonucleotide
  Sense strand starting at position 338 of SEQ ID NO: 586691
uuuacaauccaccgaugaa

SEQ ID NO: 737015 - RNA, 19 nt, Artificial Sequence
  Description of Artificial Sequence: Synthetic oligonucleotide
  Antisense strand to SEQ ID NO: 737014
uucaucgguggauuguaaa

SEQ ID NO: 737016 - RNA, 19 nt, Artificial Sequence
  Description of Artificial Sequence: Synthetic oligonucleotide
  Sense strand starting at position 368 of SEQ ID NO: 586691
accugaaauugcguuuaug

SEQ ID NO: 737017 - RNA, 19 nt, Artificial Sequence
  Description of Artificial Sequence: Synthetic oligonucleotide
  Antisense strand to SEQ ID NO: 737016
cauaaacgcaauuucaggu

SEQ ID NO: 737018 - RNA, 19 nt, Artificial Sequence
  Description of Artificial Sequence: Synthetic oligonucleotide
  Sense strand starting at position 371 of SEQ ID NO: 586691
ugaaauugcguuuaugcuu

SEQ ID NO: 737019 - RNA, 19 nt, Artificial Sequence
  Description of Artificial Sequence: Synthetic oligonucleotide
  Antisense strand to SEQ ID NO: 737018
aagcauaaacgcaauuuca

SEQ ID NO: 737020 - RNA, 19 nt, Artificial Sequence
  Description of Artificial Sequence: Synthetic oligonucleotide
  Sense strand starting at position 377 of SEQ ID NO: 586691
ugcguuuaugcuuucuaca

SEQ ID NO: 737021 - RNA, 19 nt, Artificial Sequence
  Description of Artificial Sequence: Synthetic oligonucleotide
  Antisense strand to SEQ ID NO: 737020
uguagaaagcauaaacgca

SEQ ID NO: 737022 - RNA, 19 nt, Artificial Sequence
  Description of Artificial Sequence: Synthetic oligonucleotide
  Sense strand starting at position 378 of SEQ ID NO: 586691
gcguuuaugcuuucuacau

SEQ ID NO: 737023 - RNA, 19 nt, Artificial Sequence
  Description of Artificial Sequence: Synthetic oligonucleotide
  Antisense strand to SEQ ID NO: 737022
auguagaaagcauaaacgc

SEQ ID NO: 737024 - RNA, 19 nt, Artificial Sequence
  Description of Artificial Sequence: Synthetic oligonucleotide
  Sense strand starting at position 455 of SEQ ID NO: 586691
cugagagaccuucgaaggu

SEQ ID NO: 737025 - RNA, 19 nt, Artificial Sequence
  Description of Artificial Sequence: Synthetic oligonucleotide
  Antisense strand to SEQ ID NO: 737024
accuucgaaggucucucag

SEQ ID NO: 737026 - RNA, 19 nt, Artificial Sequence
  Description of Artificial Sequence: Synthetic oligonucleotide
  Sense strand starting at position 468 of SEQ ID NO: 586691
gaaggucgccaggauaaau

SEQ ID NO: 737027 - RNA, 19 nt, Artificial Sequence
  Description of Artificial Sequence: Synthetic oligonucleotide
  Antisense strand to SEQ ID NO: 737026
auuuauccuggcgaccuuc

SEQ ID NO: 737028 - RNA, 19 nt, Artificial Sequence
  Description of Artificial Sequence: Synthetic oligonucleotide
  Sense strand starting at position 479 of SEQ ID NO: 586691
ggauaaauguaucacauca

SEQ ID NO: 737029 - RNA, 19 nt, Artificial Sequence
  Description of Artificial Sequence: Synthetic oligonucleotide
  Antisense strand to SEQ ID NO: 737028
ugaugugauacauuuaucc

SEQ ID NO: 737030 - RNA, 19 nt, Artificial Sequence
  Description of Artificial Sequence: Synthetic oligonucleotide
  Sense strand starting at position 639 of SEQ ID NO: 586691
gcuuacagucgcuacugau

SEQ ID NO: 737031 - RNA, 19 nt, Artificial Sequence
  Description of Artificial Sequence: Synthetic oligonucleotide
  Antisense strand to SEQ ID NO: 737030
aucaguagcgacuguaagc

SEQ ID NO: 737032 - RNA, 19 nt, Artificial Sequence
  Description of Artificial Sequence: Synthetic oligonucleotide
  Sense strand starting at position 645 of SEQ ID NO: 586691
agucgcuacugaucacuau

SEQ ID NO: 737033 - RNA, 19 nt, Artificial Sequence
  Description of Artificial Sequence: Synthetic oligonucleotide
  Antisense strand to SEQ ID NO: 737032
auagugaucaguagcgacu

SEQ ID NO: 737034 - RNA, 19 nt, Artificial Sequence
  Description of Artificial Sequence: Synthetic oligonucleotide
  Sense strand starting at position 646 of SEQ ID NO: 586691
gucgcuacugaucacuauu

SEQ ID NO: 737035 - RNA, 19 nt, Artificial Sequence
  Description of Artificial Sequence: Synthetic oligonucleotide
  Antisense strand to SEQ ID NO: 737034
aauagugaucaguagcgac

SEQ ID NO: 737036 - RNA, 19 nt, Artificial Sequence
  Description of Artificial Sequence: Synthetic oligonucleotide
  Sense strand starting at position 779 of SEQ ID NO: 586691
uuucgucucgcauaucaaa

SEQ ID NO: 737037 - RNA, 19 nt, Artificial Sequence
  Description of Artificial Sequence: Synthetic oligonucleotide
  Antisense strand to SEQ ID NO: 737036
uuugauaugcgagacgaaa

SEQ ID NO: 737038 - RNA, 19 nt, Artificial Sequence
  Description of Artificial Sequence: Synthetic oligonucleotide
  Sense strand starting at position 813 of SEQ ID NO: 586691
ucucucuuccgggagcgaa

SEQ ID NO: 737039 - RNA, 19 nt, Artificial Sequence
  Description of Artificial Sequence: Synthetic oligonucleotide
  Antisense strand to SEQ ID NO: 737038
uucgcucccggaagagaga

SEQ ID NO: 737040 - RNA, 19 nt, Artificial Sequence
  Description of Artificial Sequence: Synthetic oligonucleotide
  Sense strand starting at position 848 of SEQ ID NO: 586691
uucggaagaugcguaaauu

SEQ ID NO: 737041 - RNA, 19 nt, Artificial Sequence
  Description of Artificial Sequence: Synthetic oligonucleotide
  Antisense strand to SEQ ID NO: 737040
aauuuacgcaucuuccgaa

SEQ ID NO: 737042 - RNA, 19 nt, Artificial Sequence
  Description of Artificial Sequence: Synthetic oligonucleotide
  Sense strand starting at position 893 of SEQ ID NO: 586691
aggguaauaaucugcagcu

SEQ ID NO: 737043 - RNA, 19 nt, Artificial Sequence
  Description of Artificial Sequence: Synthetic oligonucleotide
  Antisense strand to SEQ ID NO: 737042
agcugcagauuauuacccu

SEQ ID NO: 737044 - RNA, 19 nt, Artificial Sequence
  Description of Artificial Sequence: Synthetic oligonucleotide
  Sense strand starting at position 895 of SEQ ID NO: 586691
gguaauaaucugcagcuca

SEQ ID NO: 737045 - RNA, 19 nt, Artificial Sequence
  Description of Artificial Sequence: Synthetic oligonucleotide
  Antisense strand to SEQ ID NO: 737044
ugagcugcagauuauuacc

SEQ ID NO: 737046 - RNA, 19 nt, Artificial Sequence
  Description of Artificial Sequence: Synthetic oligonucleotide
  Sense strand starting at position 1452 of SEQ ID NO: 586691
gcugcagagaucgagacaa

SEQ ID NO: 737047 - RNA, 19 nt, Artificial Sequence
  Description of Artificial Sequence: Synthetic oligonucleotide
  Antisense strand to SEQ ID NO: 737046
uugucucgaucucugcagc

SEQ ID NO: 737048 - RNA, 19 nt, Artificial Sequence
  Description of Artificial Sequence: Synthetic oligonucleotide
  Sense strand starting at position 1746 of SEQ ID NO: 586691
uguuguuccgggaguugca

SEQ ID NO: 737049 - RNA, 19 nt, Artificial Sequence
  Description of Artificial Sequence: Synthetic oligonucleotide
  Antisense strand to SEQ ID NO: 737048
ugcaacucccggaacaaca

SEQ ID NO: 737050 - RNA, 19 nt, Artificial Sequence
  Description of Artificial Sequence: Synthetic oligonucleotide
  Sense strand starting at position 1778 of SEQ ID NO: 586691
cuguuuaucccacacagca

SEQ ID NO: 737051 - RNA, 19 nt, Artificial Sequence
  Description of Artificial Sequence: Synthetic oligonucleotide
  Antisense strand to SEQ ID NO: 737050
ugcugugugggauaaacag

SEQ ID NO: 737052 - RNA, 19 nt, Artificial Sequence
  Description of Artificial Sequence: Synthetic oligonucleotide
  Sense strand starting at position 2006 of SEQ ID NO: 586691
ggacgucuccuccggaaag

SEQ ID NO: 737053 - RNA, 19 nt, Artificial Sequence
  Description of Artificial Sequence: Synthetic oligonucleotide
  Antisense strand to SEQ ID NO: 737052
cuuuccggaggagacgucc

SEQ ID NO: 737054 - RNA, 19 nt, Artificial Sequence
  Description of Artificial Sequence: Synthetic oligonucleotide
  Sense strand starting at position 2078 of SEQ ID NO: 586691
gacgaaaguccauaguuag

SEQ ID NO: 737055 - RNA, 19 nt, Artificial Sequence
  Description of Artificial Sequence: Synthetic oligonucleotide
  Antisense strand to SEQ ID NO: 737054
cuaacuauggacuuucguc

SEQ ID NO: 737056 - RNA, 19 nt, Artificial Sequence
  Description of Artificial Sequence: Synthetic oligonucleotide
  Sense strand starting at position 2107 of SEQ ID NO: 586691
ccuagcagaggcugauaua

SEQ ID NO: 737057 - RNA, 19 nt, Artificial Sequence
  Description of Artificial Sequence: Synthetic oligonucleotide
  Antisense strand to SEQ ID NO: 737056
uauaucagccucugcuagg

SEQ ID NO: 737058 - RNA, 19 nt, Artificial Sequence
  Description of Artificial Sequence: Synthetic oligonucleotide
  Sense strand starting at position 2148 of SEQ ID NO: 586691
gggacuugcagucggaaga

SEQ ID NO: 737059 - RNA, 19 nt, Artificial Sequence
  Description of Artificial Sequence: Synthetic oligonucleotide
  Antisense strand to SEQ ID NO: 737058
ucuuccgacugcaaguccc

SEQ ID NO: 737060 - RNA, 19 nt, Artificial Sequence
  Description of Artificial Sequence: Synthetic oligonucleotide
  Sense strand starting at position 2159 of SEQ ID NO: 586691
ucggaagaccuggguuuga

SEQ ID NO: 737061 - RNA, 19 nt, Artificial Sequence
  Description of Artificial Sequence: Synthetic oligonucleotide
  Antisense strand to SEQ ID NO: 737060
ucaaacccaggucuuccga

SEQ ID NO: 737062 - RNA, 19 nt, Artificial Sequence
  Description of Artificial Sequence: Synthetic oligonucleotide
  Sense strand starting at position 2246 of SEQ ID NO: 586691
gccucucucgaauaaggau

SEQ ID NO: 737063 - RNA, 19 nt, Artificial Sequence
  Description of Artificial Sequence: Synthetic oligonucleotide
  Antisense strand to SEQ ID NO: 737062
auccuuauucgagagaggc

SEQ ID NO: 737064 - RNA, 19 nt, Artificial Sequence
  Description of Artificial Sequence: Synthetic oligonucleotide
  Sense strand starting at position 2296 of SEQ ID NO: 586691
auuauaugauguccuuaga

SEQ ID NO: 737065 - RNA, 19 nt, Artificial Sequence
  Description of Artificial Sequence: Synthetic oligonucleotide
  Antisense strand to SEQ ID NO: 737064
ucuaaggacaucauauaau

SEQ ID NO: 737066 - RNA, 19 nt, Artificial Sequence
  Description of Artificial Sequence: Synthetic oligonucleotide
  Sense strand starting at position 2312 of SEQ ID NO: 586691
agaaaucacugagcuuagu

SEQ ID NO: 737067 - RNA, 19 nt, Artificial Sequence
  Description of Artificial Sequence: Synthetic oligonucleotide
  Antisense strand to SEQ ID NO: 737066
acuaagcucagugauuucu

SEQ ID NO: 737068 - RNA, 19 nt, Artificial Sequence
  Description of Artificial Sequence: Synthetic oligonucleotide
  Sense strand starting at position 2322 of SEQ ID NO: 586691
gagcuuagugccugguaca

SEQ ID NO: 737069 - RNA, 19 nt, Artificial Sequence
  Description of Artificial Sequence: Synthetic oligonucleotide
  Antisense strand to SEQ ID NO: 737068
uguaccaggcacuaagcuc

SEQ ID NO: 737070 - RNA, 19 nt, Artificial Sequence
  Description of Artificial Sequence: Synthetic oligonucleotide
  Sense strand starting at position 2360 of SEQ ID NO: 586691
guuaucucauuccugguau

SEQ ID NO: 737071 - RNA, 19 nt, Artificial Sequence
  Description of Artificial Sequence: Synthetic oligonucleotide
  Antisense strand to SEQ ID NO: 737070
auaccaggaaugagauaac

SEQ ID NO: 737072 - RNA, 19 nt, Artificial Sequence
  Description of Artificial Sequence: Synthetic oligonucleotide
  Sense strand starting at position 2371 of SEQ ID NO: 586691
ccugguaucagagauguga

SEQ ID NO: 737073 - RNA, 19 nt, Artificial Sequence
  Description of Artificial Sequence: Synthetic oligonucleotide
  Antisense strand to SEQ ID NO: 737072
ucacaucucugauaccagg

SEQ ID NO: 737074 - RNA, 19 nt, Artificial Sequence
  Description of Artificial Sequence: Synthetic oligonucleotide
  Sense strand starting at position 2373 of SEQ ID NO: 586691
ugguaucagagaugugauc

SEQ ID NO: 737075 - RNA, 19 nt, Artificial Sequence
  Description of Artificial Sequence: Synthetic oligonucleotide
  Antisense strand to SEQ ID NO: 737074
gaucacaucucugauacca

SEQ ID NO: 737076 - RNA, 19 nt, Artificial Sequence
  Description of Artificial Sequence: Synthetic oligonucleotide
  Sense strand starting at position 2375 of SEQ ID NO: 586691
guaucagagaugugaucuu

SEQ ID NO: 737077 - RNA, 19 nt, Artificial Sequence
  Description of Artificial Sequence: Synthetic oligonucleotide
  Antisense strand to SEQ ID NO: 737076
aagaucacaucucugauac

SEQ ID NO: 737078 - RNA, 19 nt, Artificial Sequence
  Description of Artificial Sequence: Synthetic oligonucleotide
  Sense strand starting at position 2382 of SEQ ID NO: 586691
agaugugaucuuggccaag

SEQ ID NO: 737079 - RNA, 19 nt, Artificial Sequence
  Description of Artificial Sequence: Synthetic oligonucleotide
  Antisense strand to SEQ ID NO: 737078
cuuggccaagaucacaucu

SEQ ID NO: 737080 - RNA, 19 nt, Artificial Sequence
  Description of Artificial Sequence: Synthetic oligonucleotide
  Sense strand starting at position 2855 of SEQ ID NO: 586691
cagagauggcugugaaagu

SEQ ID NO: 737081 - RNA, 19 nt, Artificial Sequence
  Description of Artificial Sequence: Synthetic oligonucleotide
  Antisense strand to SEQ ID NO: 737080
acuuucacagccaucucug

SEQ ID NO: 737082 - RNA, 19 nt, Artificial Sequence
  Description of Artificial Sequence: Synthetic oligonucleotide
  Sense strand starting at position 2862 of SEQ ID NO: 586691
ggcugugaaaguuaaauga

SEQ ID NO: 737083 - RNA, 19 nt, Artificial Sequence
  Description of Artificial Sequence: Synthetic oligonucleotide
  Antisense strand to SEQ ID NO: 737082
ucauuuaacuuucacagcc

SEQ ID NO: 737084 - RNA, 19 nt, Artificial Sequence
  Description of Artificial Sequence: Synthetic oligonucleotide
  Sense strand starting at position 3931 of SEQ ID NO: 586691
cugguaaaccacuguucua

SEQ ID NO: 737085 - RNA, 19 nt, Artificial Sequence
  Description of Artificial Sequence: Synthetic oligonucleotide
  Antisense strand to SEQ ID NO: 737084
uagaacagugguuuaccag

SEQ ID NO: 737086 - RNA, 19 nt, Artificial Sequence
  Description of Artificial Sequence: Synthetic oligonucleotide
  Sense strand starting at position 3983 of SEQ ID NO: 586691
ucacguauaagugagauaa

SEQ ID NO: 737087 - RNA, 19 nt, Artificial Sequence
  Description of Artificial Sequence: Synthetic oligonucleotide
  Antisense strand to SEQ ID NO: 737086
uuaucucacuuauacguga

SEQ ID NO: 737088 - RNA, 19 nt, Artificial Sequence
  Description of Artificial Sequence: Synthetic oligonucleotide
  Sense strand starting at position 30 of SEQ ID NO: 586692
ucaagcaauccuuggauga

SEQ ID NO: 737089 - RNA, 19 nt, Artificial Sequence
  Description of Artificial Sequence: Synthetic oligonucleotide
  Antisense strand to SEQ ID NO: 737088
ucauccaaggauugcuuga

SEQ ID NO: 737090 - RNA, 19 nt, Artificial Sequence
  Description of Artificial Sequence: Synthetic oligonucleotide
  Sense strand starting at position 31 of SEQ ID NO: 586692
caagcaauccuuggaugag

SEQ ID NO: 737091 - RNA, 19 nt, Artificial Sequence
  Description of Artificial Sequence: Synthetic oligonucleotide
  Antisense strand to SEQ ID NO: 737090
cucauccaaggauugcuug

SEQ ID NO: 737092 - RNA, 19 nt, Artificial Sequence
  Description of Artificial Sequence: Synthetic oligonucleotide
  Sense strand starting at position 32 of SEQ ID NO: 586692
aagcaauccuuggaugaga

SEQ ID NO: 737093 - RNA, 19 nt, Artificial Sequence
  Description of Artificial Sequence: Synthetic oligonucleotide
  Antisense strand to SEQ ID NO: 737092
ucucauccaaggauugcuu

SEQ ID NO: 737094 - RNA, 19 nt, Artificial Sequence
  Description of Artificial Sequence: Synthetic oligonucleotide
  Sense strand starting at position 34 of SEQ ID NO: 586692
gcaauccuuggaugagaac

SEQ ID NO: 737095 - RNA, 19 nt, Artificial Sequence
  Description of Artificial Sequence: Synthetic oligonucleotide
  Antisense strand to SEQ ID NO: 737094
guucucauccaaggauugc

SEQ ID NO: 737096 - RNA, 19 nt, Artificial Sequence
  Description of Artificial Sequence: Synthetic oligonucleotide
  Sense strand starting at position 179 of SEQ ID NO: 586692
uuacaucagccuugaguca

SEQ ID NO: 737097 - RNA, 19 nt, Artificial Sequence
  Description of Artificial Sequence: Synthetic oligonucleotide
  Antisense strand to SEQ ID NO: 737096
ugacucaaggcugauguaa

SEQ ID NO: 737098 - RNA, 19 nt, Artificial Sequence
  Description of Artificial Sequence: Synthetic oligonucleotide
  Sense strand starting at position 310 of SEQ ID NO: 586692
cccaaauagagugaugugu

SEQ ID NO: 737099 - RNA, 19 nt, Artificial Sequence
  Description of Artificial Sequence: Synthetic oligonucleotide
  Antisense strand to SEQ ID NO: 737098
acacaucacucuauuuggg

SEQ ID NO: 737100 - RNA, 19 nt, Artificial Sequence
  Description of Artificial Sequence: Synthetic oligonucleotide
  Sense strand starting at position 312 of SEQ ID NO: 586692
caaauagagugauguguag

SEQ ID NO: 737101 - RNA, 19 nt, Artificial Sequence
  Description of Artificial Sequence: Synthetic oligonucleotide
  Antisense strand to SEQ ID NO: 737100
cuacacaucacucuauuug

SEQ ID NO: 737102 - RNA, 19 nt, Artificial Sequence
  Description of Artificial Sequence: Synthetic oligonucleotide
  Sense strand starting at position 314 of SEQ ID NO: 586692
aauagagugauguguagua

SEQ ID NO: 737103 - RNA, 19 nt, Artificial Sequence
  Description of Artificial Sequence: Synthetic oligonucleotide
  Antisense strand to SEQ ID NO: 737102
uacuacacaucacucuauu

SEQ ID NO: 737104 - RNA, 19 nt, Artificial Sequence
  Description of Artificial Sequence: Synthetic oligonucleotide
  Sense strand starting at position 316 of SEQ ID NO: 586692
uagagugauguguaguaua

SEQ ID NO: 737105 - RNA, 19 nt, Artificial Sequence
  Description of Artificial Sequence: Synthetic oligonucleotide
  Antisense strand to SEQ ID NO: 737104
uauacuacacaucacucua

SEQ ID NO: 737106 - RNA, 19 nt, Artificial Sequence
  Description of Artificial Sequence: Synthetic oligonucleotide
  Sense strand starting at position 319 of SEQ ID NO: 586692
agugauguguaguauauaa

SEQ ID NO: 737107 - RNA, 19 nt, Artificial Sequence
  Description of Artificial Sequence: Synthetic oligonucleotide
  Antisense strand to SEQ ID NO: 737106
uuauauacuacacaucacu

SEQ ID NO: 737108 - RNA, 19 nt, Artificial Sequence
  Description of Artificial Sequence: Synthetic oligonucleotide
  Sense strand starting at position 321 of SEQ ID NO: 586692
ugauguguaguauauaaug

SEQ ID NO: 737109 - RNA, 19 nt, Artificial Sequence
  Description of Artificial Sequence: Synthetic oligonucleotide
  Antisense strand to SEQ ID NO: 737108
cauuauauacuacacauca

SEQ ID NO: 737110 - RNA, 19 nt, Artificial Sequence
  Description of Artificial Sequence: Synthetic oligonucleotide
  Sense strand starting at position 432 of SEQ ID NO: 586692
caggcagucgcgugacauu

SEQ ID NO: 737111 - RNA, 19 nt, Artificial Sequence
  Description of Artificial Sequence: Synthetic oligonucleotide
  Antisense strand to SEQ ID NO: 737110
aaugucacgcgacugccug

SEQ ID NO: 737112 - RNA, 19 nt, Artificial Sequence
  Description of Artificial Sequence: Synthetic oligonucleotide
  Sense strand starting at position 725 of SEQ ID NO: 586692
gaggaauauuugcacagag

SEQ ID NO: 737113 - RNA, 19 nt, Artificial Sequence
  Description of Artificial Sequence: Synthetic oligonucleotide
  Antisense strand to SEQ ID NO: 737112
cucugugcaaauauuccuc

SEQ ID NO: 737114 - RNA, 19 nt, Artificial Sequence
  Description of Artificial Sequence: Synthetic oligonucleotide
  Sense strand starting at position 823 of SEQ ID NO: 586692
ggaacuuugcuccagggca

SEQ ID NO: 737115 - RNA, 19 nt, Artificial Sequence
  Description of Artificial Sequence: Synthetic oligonucleotide
  Antisense strand to SEQ ID NO: 737114
ugcccuggagcaaaguucc

SEQ ID NO: 737116 - RNA, 19 nt, Artificial Sequence
  Description of Artificial Sequence: Synthetic oligonucleotide
  Sense strand starting at position 1034 of SEQ ID NO: 586692
cuuggacauuucugggaca

SEQ ID NO: 737117 - RNA, 19 nt, Artificial Sequence
  Description of Artificial Sequence: Synthetic oligonucleotide
  Antisense strand to SEQ ID NO: 737116
ugucccagaaauguccaag

SEQ ID NO: 737118 - RNA, 19 nt, Artificial Sequence
  Description of Artificial Sequence: Synthetic oligonucleotide
  Sense strand starting at position 1035 of SEQ ID NO: 586692
uuggacauuucugggacau

SEQ ID NO: 737119 - RNA, 19 nt, Artificial Sequence
  Description of Artificial Sequence: Synthetic oligonucleotide
  Antisense strand to SEQ ID NO: 737118
augucccagaaauguccaa

SEQ ID NO: 737120 - RNA, 19 nt, Artificial Sequence
  Description of Artificial Sequence: Synthetic oligonucleotide
  Sense strand starting at position 1067 of SEQ ID NO: 586692
cccuuaauguagcagauca

SEQ ID NO: 737121 - RNA, 19 nt, Artificial Sequence
  Description of Artificial Sequence: Synthetic oligonucleotide
  Antisense strand to SEQ ID NO: 737120
ugaucugcuacauuaaggg

SEQ ID NO: 737122 - RNA, 19 nt, Artificial Sequence
  Description of Artificial Sequence: Synthetic oligonucleotide
  Sense strand starting at position 1089 of SEQ ID NO: 586692
agaggugucucagcaauug

SEQ ID NO: 737123 - RNA, 19 nt, Artificial Sequence
  Description of Artificial Sequence: Synthetic oligonucleotide
  Antisense strand to SEQ ID NO: 737122
caauugcugagacaccucu

SEQ ID NO: 737124 - RNA, 19 nt, Artificial Sequence
  Description of Artificial Sequence: Synthetic oligonucleotide
  Sense strand starting at position 1140 of SEQ ID NO: 586692
aguccacuuugguuaugaa

SEQ ID NO: 737125 - RNA, 19 nt, Artificial Sequence
  Description of Artificial Sequence: Synthetic oligonucleotide
  Antisense strand to SEQ ID NO: 737124
uucauaaccaaaguggacu

SEQ ID NO: 737126 - RNA, 19 nt, Artificial Sequence
  Description of Artificial Sequence: Synthetic oligonucleotide
  Sense strand starting at position 1148 of SEQ ID NO: 586692
uugguuaugaacugggaca

SEQ ID NO: 737127 - RNA, 19 nt, Artificial Sequence
  Description of Artificial Sequence: Synthetic oligonucleotide
  Antisense strand to SEQ ID NO: 737126
ugucccaguucauaaccaa

SEQ ID NO: 737128 - RNA, 19 nt, Artificial Sequence
  Description of Artificial Sequence: Synthetic oligonucleotide
  Sense strand starting at position 1179 of SEQ ID NO: 586692
gggaguaucucagggucca

SEQ ID NO: 737129 - RNA, 19 nt, Artificial Sequence
  Description of Artificial Sequence: Synthetic oligonucleotide
  Antisense strand to SEQ ID NO: 737128
uggacccugagauacuccc

SEQ ID NO: 737130 - RNA, 19 nt, Artificial Sequence
  Description of Artificial Sequence: Synthetic oligonucleotide
  Sense strand starting at position 1680 of SEQ ID NO: 586692
cucgaagaggcgugugagu

SEQ ID NO: 737131 - RNA, 19 nt, Artificial Sequence
  Description of Artificial Sequence: Synthetic oligonucleotide
  Antisense strand to SEQ ID NO: 737130
acucacacgccucuucgag

SEQ ID NO: 737132 - RNA, 19 nt, Artificial Sequence
  Description of Artificial Sequence: Synthetic oligonucleotide
  Sense strand starting at position 1796 of SEQ ID NO: 586692
ugaagugaccgcuguggau

SEQ ID NO: 737133 - RNA, 19 nt, Artificial Sequence
  Description of Artificial Sequence: Synthetic oligonucleotide
  Antisense strand to SEQ ID NO: 737132
auccacagcggucacuuca

SEQ ID NO: 737134 - RNA, 19 nt, Artificial Sequence
  Description of Artificial Sequence: Synthetic oligonucleotide
  Sense strand starting at position 2088 of SEQ ID NO: 586692
gggcuuguauuagcauaau

SEQ ID NO: 737135 - RNA, 19 nt, Artificial Sequence
  Description of Artificial Sequence: Synthetic oligonucleotide
  Antisense strand to SEQ ID NO: 737134
auuaugcuaauacaagccc

SEQ ID NO: 737136 - RNA, 19 nt, Artificial Sequence
  Description of Artificial Sequence: Synthetic oligonucleotide
  Sense strand starting at position 2105 of SEQ ID NO: 586692
auccuuacgccaggugaga

SEQ ID NO: 737137 - RNA, 19 nt, Artificial Sequence
  Description of Artificial Sequence: Synthetic oligonucleotide
  Antisense strand to SEQ ID NO: 737136
ucucaccuggcguaaggau

SEQ ID NO: 737138 - RNA, 19 nt, Artificial Sequence
  Description of Artificial Sequence: Synthetic oligonucleotide
  Sense strand starting at position 2214 of SEQ ID NO: 586692
aagggauauuaagaaaggu

SEQ ID NO: 737139 - RNA, 19 nt, Artificial Sequence
  Description of Artificial Sequence: Synthetic oligonucleotide
  Antisense strand to SEQ ID NO: 737138
accuuucuuaauaucccuu

SEQ ID NO: 737140 - RNA, 19 nt, Artificial Sequence
  Description of Artificial Sequence: Synthetic oligonucleotide
  Sense strand starting at position 2441 of SEQ ID NO: 586692
agcccaggaguucgacaau

SEQ ID NO: 737141 - RNA, 19 nt, Artificial Sequence
  Description of Artificial Sequence: Synthetic oligonucleotide
  Antisense strand to SEQ ID NO: 737140
auugucgaacuccugggcu

SEQ ID NO: 737142 - RNA, 19 nt, Artificial Sequence
  Description of Artificial Sequence: Synthetic oligonucleotide
  Sense strand starting at position 2447 of SEQ ID NO: 586692
ggaguucgacaauauggca

SEQ ID NO: 737143 - RNA, 19 nt, Artificial Sequence
  Description of Artificial Sequence: Synthetic oligonucleotide
  Antisense strand to SEQ ID NO: 737142
ugccauauugucgaacucc

SEQ ID NO: 737144 - RNA, 19 nt, Artificial Sequence
  Description of Artificial Sequence: Synthetic oligonucleotide
  Sense strand starting at position 2945 of SEQ ID NO: 586692
gguggcucucgccuucaau

SEQ ID NO: 737145 - RNA, 19 nt, Artificial Sequence
  Description of Artificial Sequence: Synthetic oligonucleotide
  Antisense strand to SEQ ID NO: 737144
auugaaggcgagagccacc

SEQ ID NO: 737146 - RNA, 19 nt, Artificial Sequence
  Description of Artificial Sequence: Synthetic oligonucleotide
  Sense strand starting at position 3083 of SEQ ID NO: 586692
augcgugcuuggcuuauaa

SEQ ID NO: 737147 - RNA, 19 nt, Artificial Sequence
  Description of Artificial Sequence: Synthetic oligonucleotide
  Antisense strand to SEQ ID NO: 737146
uuauaagccaagcacgcau

SEQ ID NO: 737148 - RNA, 19 nt, Artificial Sequence
  Description of Artificial Sequence: Synthetic oligonucleotide
  Sense strand starting at position 3085 of SEQ ID NO: 586692
gcgugcuuggcuuauaauc

SEQ ID NO: 737149 - RNA, 19 nt, Artificial Sequence
  Description of Artificial Sequence: Synthetic oligonucleotide
  Antisense strand to SEQ ID NO: 737148
gauuauaagccaagcacgc

SEQ ID NO: 737150 - RNA, 19 nt, Artificial Sequence
  Description of Artificial Sequence: Synthetic oligonucleotide
  Sense strand starting at position 3315 of SEQ ID NO: 586692
gacuguuacugguagggau

SEQ ID NO: 737151 - RNA, 19 nt, Artificial Sequence
  Description of Artificial Sequence: Synthetic oligonucleotide
  Antisense strand to SEQ ID NO: 737150
aucccuaccaguaacaguc

SEQ ID NO: 737152 - RNA, 19 nt, Artificial Sequence
  Description of Artificial Sequence: Synthetic oligonucleotide
  Sense strand starting at position 102 of SEQ ID NO: 586693
agccuuagugugggugaca

SEQ ID NO: 737153 - RNA, 19 nt, Artificial Sequence
  Description of Artificial Sequence: Synthetic oligonucleotide
  Antisense strand to SEQ ID NO: 737152
ugucacccacacuaaggcu

SEQ ID NO: 737154 - RNA, 19 nt, Artificial Sequence
  Description of Artificial Sequence: Synthetic oligonucleotide
  Sense strand starting at position 484 of SEQ ID NO: 586693
cagagucaauccgcaggaa

SEQ ID NO: 737155 - RNA, 19 nt, Artificial Sequence
  Description of Artificial Sequence: Synthetic oligonucleotide
  Antisense strand to SEQ ID NO: 737154
uuccugcggauugacucug

SEQ ID NO: 737156 - RNA, 19 nt, Artificial Sequence
  Description of Artificial Sequence: Synthetic oligonucleotide
  Sense strand starting at position 487 of SEQ ID NO: 586693
agucaauccgcaggaacuu

SEQ ID NO: 737157 - RNA, 19 nt, Artificial Sequence
  Description of Artificial Sequence: Synthetic oligonucleotide
  Antisense strand to SEQ ID NO: 737156
aaguuccugcggauugacu

SEQ ID NO: 737158 - RNA, 19 nt, Artificial Sequence
  Description of Artificial Sequence: Synthetic oligonucleotide
  Sense strand starting at position 531 of SEQ ID NO: 586693
cacaucucugggugggauu

SEQ ID NO: 737159 - RNA, 19 nt, Artificial Sequence
  Description of Artificial Sequence: Synthetic oligonucleotide
  Antisense strand to SEQ ID NO: 737158
aaucccacccagagaugug

SEQ ID NO: 737160 - RNA, 19 nt, Artificial Sequence
  Description of Artificial Sequence: Synthetic oligonucleotide
  Sense strand starting at position 562 of SEQ ID NO: 586693
gagauagacucaucauguc

SEQ ID NO: 737161 - RNA, 19 nt, Artificial Sequence
  Description of Artificial Sequence: Synthetic oligonucleotide
  Antisense strand to SEQ ID NO: 737160
gacaugaugagucuaucuc

SEQ ID NO: 737162 - RNA, 19 nt, Artificial Sequence
  Description of Artificial Sequence: Synthetic oligonucleotide
  Sense strand starting at position 681 of SEQ ID NO: 586693
cuugucaagcugugcucaa

SEQ ID NO: 737163 - RNA, 19 nt, Artificial Sequence
  Description of Artificial Sequence: Synthetic oligonucleotide
  Antisense strand to SEQ ID NO: 737162
uugagcacagcuugacaag

SEQ ID NO: 737164 - RNA, 19 nt, Artificial Sequence
  Description of Artificial Sequence: Synthetic oligonucleotide
  Sense strand starting at position 682 of SEQ ID NO: 586693
uugucaagcugugcucaau

SEQ ID NO: 737165 - RNA, 19 nt, Artificial Sequence
  Description of Artificial Sequence: Synthetic oligonucleotide
  Antisense strand to SEQ ID NO: 737164
auugagcacagcuugacaa

SEQ ID NO: 737166 - RNA, 19 nt, Artificial Sequence
  Description of Artificial Sequence: Synthetic oligonucleotide
  Sense strand starting at position 704 of SEQ ID NO: 586693
accagaacuuguggagacu

SEQ ID NO: 737167 - RNA, 19 nt, Artificial Sequence
  Description of Artificial Sequence: Synthetic oligonucleotide
  Antisense strand to SEQ ID NO: 737166
agucuccacaaguucuggu

SEQ ID NO: 737168 - RNA, 19 nt, Artificial Sequence
  Description of Artificial Sequence: Synthetic oligonucleotide
  Sense strand starting at position 774 of SEQ ID NO: 586693
ugaugugaguaggaagaau

SEQ ID NO: 737169 - RNA, 19 nt, Artificial Sequence
  Description of Artificial Sequence: Synthetic oligonucleotide
  Antisense strand to SEQ ID NO: 737168
auucuuccuacucacauca

SEQ ID NO: 737170 - RNA, 19 nt, Artificial Sequence
  Description of Artificial Sequence: Synthetic oligonucleotide
  Sense strand starting at position 958 of SEQ ID NO: 586693
ggucugugcucgccgaaga

SEQ ID NO: 737171 - RNA, 19 nt, Artificial Sequence
  Description of Artificial Sequence: Synthetic oligonucleotide
  Antisense strand to SEQ ID NO: 737170
ucuucggcgagcacagacc

SEQ ID NO: 737172 - RNA, 19 nt, Artificial Sequence
  Description of Artificial Sequence: Synthetic oligonucleotide
  Sense strand starting at position 1142 of SEQ ID NO: 586693
auaucacaaugucuguuaa

SEQ ID NO: 737173 - RNA, 19 nt, Artificial Sequence
  Description of Artificial Sequence: Synthetic oligonucleotide
  Antisense strand to SEQ ID NO: 737172
uuaacagacauugugauau

SEQ ID NO: 737174 - RNA, 19 nt, Artificial Sequence
  Description of Artificial Sequence: Synthetic oligonucleotide
  Sense strand starting at position 1144 of SEQ ID NO: 586693
aucacaaugucuguuaauc

SEQ ID NO: 737175 - RNA, 19 nt, Artificial Sequence
  Description of Artificial Sequence: Synthetic oligonucleotide
  Antisense strand to SEQ ID NO: 737174
gauuaacagacauugugau

SEQ ID NO: 737176 - RNA, 19 nt, Artificial Sequence
  Description of Artificial Sequence: Synthetic oligonucleotide
  Sense strand starting at position 1416 of SEQ ID NO: 586693
ugcgcaaagugcucugcaa

SEQ ID NO: 737177 - RNA, 19 nt, Artificial Sequence
  Description of Artificial Sequence: Synthetic oligonucleotide
  Antisense strand to SEQ ID NO: 737176
uugcagagcacuuugcgca

SEQ ID NO: 737178 - RNA, 19 nt, Artificial Sequence
  Description of Artificial Sequence: Synthetic oligonucleotide
  Sense strand starting at position 1494 of SEQ ID NO: 586693
uuugcaaacguggaaauga

SEQ ID NO: 737179 - RNA, 19 nt, Artificial Sequence
  Description of Artificial Sequence: Synthetic oligonucleotide
  Antisense strand to SEQ ID NO: 737178
ucauuuccacguuugcaaa

SEQ ID NO: 737180 - RNA, 19 nt, Artificial Sequence
  Description of Artificial Sequence: Synthetic oligonucleotide
  Sense strand starting at position 1762 of SEQ ID NO: 586693
cguauuucgucuucuggaa

SEQ ID NO: 737181 - RNA, 19 nt, Artificial Sequence
  Description of Artificial Sequence: Synthetic oligonucleotide
  Antisense strand to SEQ ID NO: 737180
uuccagaagacgaaauacg

SEQ ID NO: 737182 - RNA, 19 nt, Artificial Sequence
  Description of Artificial Sequence: Synthetic oligonucleotide
  Sense strand starting at position 1764 of SEQ ID NO: 586693
uauuucgucuucuggaaau

SEQ ID NO: 737183 - RNA, 19 nt, Artificial Sequence
  Description of Artificial Sequence: Synthetic oligonucleotide
  Antisense strand to SEQ ID NO: 737182
auuuccagaagacgaaaua

SEQ ID NO: 737184 - RNA, 19 nt, Artificial Sequence
  Description of Artificial Sequence: Synthetic oligonucleotide
  Sense strand starting at position 1808 of SEQ ID NO: 586693
ggcgcuuccaugggaaucu

SEQ ID NO: 737185 - RNA, 19 nt, Artificial Sequence
  Description of Artificial Sequence: Synthetic oligonucleotide
  Antisense strand to SEQ ID NO: 737184
agauucccauggaagcgcc

SEQ ID NO: 737186 - RNA, 19 nt, Artificial Sequence
  Description of Artificial Sequence: Synthetic oligonucleotide
  Sense strand starting at position 3064 of SEQ ID NO: 586693
ccagguauccuccaccagu

SEQ ID NO: 737187 - RNA, 19 nt, Artificial Sequence
  Description of Artificial Sequence: Synthetic oligonucleotide
  Antisense strand to SEQ ID NO: 737186
acugguggaggauaccugg

SEQ ID NO: 737188 - RNA, 19 nt, Artificial Sequence
  Description of Artificial Sequence: Synthetic oligonucleotide
  Sense strand starting at position 3374 of SEQ ID NO: 586693
ccgccaugacagggucauu

SEQ ID NO: 737189 - RNA, 19 nt, Artificial Sequence
  Description of Artificial Sequence: Synthetic oligonucleotide
  Antisense strand to SEQ ID NO: 737188
aaugacccugucauggcgg

SEQ ID NO: 737190 - RNA, 19 nt, Artificial Sequence
  Description of Artificial Sequence: Synthetic oligonucleotide
  Sense strand starting at position 3406 of SEQ ID NO: 586693
uggauucccgaguacaaau

SEQ ID NO: 737191 - RNA, 19 nt, Artificial Sequence
  Description of Artificial Sequence: Synthetic oligonucleotide
  Antisense strand to SEQ ID NO: 737190
auuuguacucgggaaucca

SEQ ID NO: 737192 - RNA, 19 nt, Artificial Sequence
  Description of Artificial Sequence: Synthetic oligonucleotide
  Sense strand starting at position 3426 of SEQ ID NO: 586693
ccagcuuucucccguagga

SEQ ID NO: 737193 - RNA, 19 nt, Artificial Sequence
  Description of Artificial Sequence: Synthetic oligonucleotide
  Antisense strand to SEQ ID NO: 737192
uccuacgggagaaagcugg

SEQ ID NO: 737194 - RNA, 19 nt, Artificial Sequence
  Description of Artificial Sequence: Synthetic oligonucleotide
  Sense strand starting at position 3428 of SEQ ID NO: 586693
agcuuucucccguaggaga

SEQ ID NO: 737195 - RNA, 19 nt, Artificial Sequence
  Description of Artificial Sequence: Synthetic oligonucleotide
  Antisense strand to SEQ ID NO: 737194
ucuccuacgggagaaagcu

SEQ ID NO: 737196 - RNA, 19 nt, Artificial Sequence
  Description of Artificial Sequence: Synthetic oligonucleotide
  Sense strand starting at position 3679 of SEQ ID NO: 586693
uugagauccugcugaacau

SEQ ID NO: 737197 - RNA, 19 nt, Artificial Sequence
  Description of Artificial Sequence: Synthetic oligonucleotide
  Antisense strand to SEQ ID NO: 737196
auguucagcaggaucucaa

SEQ ID NO: 737198 - RNA, 19 nt, Artificial Sequence
  Description of Artificial Sequence: Synthetic oligonucleotide
  Sense strand starting at position 3680 of SEQ ID NO: 586693
ugagauccugcugaacauu

SEQ ID NO: 737199 - RNA, 19 nt, Artificial Sequence
  Description of Artificial Sequence: Synthetic oligonucleotide
  Antisense strand to SEQ ID NO: 737198
aauguucagcaggaucuca

SEQ ID NO: 737200 - RNA, 19 nt, Artificial Sequence
  Description of Artificial Sequence: Synthetic oligonucleotide
  Sense strand starting at position 107 of SEQ ID NO: 586694
ggacaauucucauuacgca

SEQ ID NO: 737201 - RNA, 19 nt, Artificial Sequence
  Description of Artificial Sequence: Synthetic oligonucleotide
  Antisense strand to SEQ ID NO: 737200
ugcguaaugagaauugucc

SEQ ID NO: 737202 - RNA, 19 nt, Artificial Sequence
  Description of Artificial Sequence: Synthetic oligonucleotide
  Sense strand starting at position 155 of SEQ ID NO: 586694
gguucucuguguguucaag

SEQ ID NO: 737203 - RNA, 19 nt, Artificial Sequence
  Description of Artificial Sequence: Synthetic oligonucleotide
  Antisense strand to SEQ ID NO: 737202
cuugaacacacagagaacc

SEQ ID NO: 737204 - RNA, 19 nt, Artificial Sequence
  Description of Artificial Sequence: Synthetic oligonucleotide
  Sense strand starting at position 184 of SEQ ID NO: 586694
cggcuuuauuuacauaauu

SEQ ID NO: 737205 - RNA, 19 nt, Artificial Sequence
  Description of Artificial Sequence: Synthetic oligonucleotide
  Antisense strand to SEQ ID NO: 737204
aauuauguaaauaaagccg

SEQ ID NO: 737206 - RNA, 19 nt, Artificial Sequence
  Description of Artificial Sequence: Synthetic oligonucleotide
  Sense strand starting at position 197 of SEQ ID NO: 586694
auaauuucgcacgguuaca

SEQ ID NO: 737207 - RNA, 19 nt, Artificial Sequence
  Description of Artificial Sequence: Synthetic oligonucleotide
  Antisense strand to SEQ ID NO: 737206
uguaaccgugcgaaauuau

SEQ ID NO: 737208 - RNA, 19 nt, Artificial Sequence
  Description of Artificial Sequence: Synthetic oligonucleotide
  Sense strand starting at position 207 of SEQ ID NO: 586694
acgguuacaucacagagaa

SEQ ID NO: 737209 - RNA, 19 nt, Artificial Sequence
  Description of Artificial Sequence: Synthetic oligonucleotide
  Antisense strand to SEQ ID NO: 737208
uucucugugauguaaccgu

SEQ ID NO: 737210 - RNA, 19 nt, Artificial Sequence
  Description of Artificial Sequence: Synthetic oligonucleotide
  Sense strand starting at position 265 of SEQ ID NO: 586694
gagccugacaaguguugga

SEQ ID NO: 737211 - RNA, 19 nt, Artificial Sequence
  Description of Artificial Sequence: Synthetic oligonucleotide
  Antisense strand to SEQ ID NO: 737210
uccaacacuugucaggcuc

SEQ ID NO: 737212 - RNA, 19 nt, Artificial Sequence
  Description of Artificial Sequence: Synthetic oligonucleotide
  Sense strand starting at position 269 of SEQ ID NO: 586694
cugacaaguguuggacaau

SEQ ID NO: 737213 - RNA, 19 nt, Artificial Sequence
  Description of Artificial Sequence: Synthetic oligonucleotide
  Antisense strand to SEQ ID NO: 737212
auuguccaacacuugucag

SEQ ID NO: 737214 - RNA, 19 nt, Artificial Sequence
  Description of Artificial Sequence: Synthetic oligonucleotide
  Sense strand starting at position 270 of SEQ ID NO: 586694
ugacaaguguuggacaaua

SEQ ID NO: 737215 - RNA, 19 nt, Artificial Sequence
  Description of Artificial Sequence: Synthetic oligonucleotide
  Antisense strand to SEQ ID NO: 737214
uauuguccaacacuuguca

SEQ ID NO: 737216 - RNA, 19 nt, Artificial Sequence
  Description of Artificial Sequence: Synthetic oligonucleotide
  Sense strand starting at position 358 of SEQ ID NO: 586694
ggcaguuugcuuuagagga

SEQ ID NO: 737217 - RNA, 19 nt, Artificial Sequence
  Description of Artificial Sequence: Synthetic oligonucleotide
  Antisense strand to SEQ ID NO: 737216
uccucuaaagcaaacugcc

SEQ ID NO: 737218 - RNA, 19 nt, Artificial Sequence
  Description of Artificial Sequence: Synthetic oligonucleotide
  Sense strand starting at position 464 of SEQ ID NO: 586694
gagggaccauuugggaaau

SEQ ID NO: 737219 - RNA, 19 nt, Artificial Sequence
  Description of Artificial Sequence: Synthetic oligonucleotide
  Antisense strand to SEQ ID NO: 737218
auuucccaaauggucccuc

SEQ ID NO: 737220 - RNA, 19 nt, Artificial Sequence
  Description of Artificial Sequence: Synthetic oligonucleotide
  Sense strand starting at position 600 of SEQ ID NO: 586694
uggauugccaggugcagau

SEQ ID NO: 737221 - RNA, 19 nt, Artificial Sequence
  Description of Artificial Sequence: Synthetic oligonucleotide
  Antisense strand to SEQ ID NO: 737220
aucugcaccuggcaaucca

SEQ ID NO: 737222 - RNA, 19 nt, Artificial Sequence
  Description of Artificial Sequence: Synthetic oligonucleotide
  Sense strand starting at position 613 of SEQ ID NO: 586694
gcagauaccucuucugaac

SEQ ID NO: 737223 - RNA, 19 nt, Artificial Sequence
  Description of Artificial Sequence: Synthetic oligonucleotide
  Antisense strand to SEQ ID NO: 737222
guucagaagagguaucugc

SEQ ID NO: 737224 - RNA, 19 nt, Artificial Sequence
  Description of Artificial Sequence: Synthetic oligonucleotide
  Sense strand starting at position 630 of SEQ ID NO: 586694
acuuaagacugguuguguu

SEQ ID NO: 737225 - RNA, 19 nt, Artificial Sequence
  Description of Artificial Sequence: Synthetic oligonucleotide
  Antisense strand to SEQ ID NO: 737224
aacacaaccagucuuaagu

SEQ ID NO: 737226 - RNA, 19 nt, Artificial Sequence
  Description of Artificial Sequence: Synthetic oligonucleotide
  Sense strand starting at position 634 of SEQ ID NO: 586694
aagacugguuguguuuaaa

SEQ ID NO: 737227 - RNA, 19 nt, Artificial Sequence
  Description of Artificial Sequence: Synthetic oligonucleotide
  Antisense strand to SEQ ID NO: 737226
uuuaaacacaaccagucuu

SEQ ID NO: 737228 - RNA, 19 nt, Artificial Sequence
  Description of Artificial Sequence: Synthetic oligonucleotide
  Sense strand starting at position 697 of SEQ ID NO: 586694
ggugucucacuuuaauaaa

SEQ ID NO: 737229 - RNA, 19 nt, Artificial Sequence
  Description of Artificial Sequence: Synthetic oligonucleotide
  Antisense strand to SEQ ID NO: 737228
uuuauuaaagugagacacc

SEQ ID NO: 737230 - RNA, 19 nt, Artificial Sequence
  Description of Artificial Sequence: Synthetic oligonucleotide
  Sense strand starting at position 820 of SEQ ID NO: 586694
cguccuuggcucugggaaa

SEQ ID NO: 737231 - RNA, 19 nt, Artificial Sequence
  Description of Artificial Sequence: Synthetic oligonucleotide
  Antisense strand to SEQ ID NO: 737230
uuucccagagccaaggacg

SEQ ID NO: 737232 - RNA, 19 nt, Artificial Sequence
  Description of Artificial Sequence: Synthetic oligonucleotide
  Sense strand starting at position 831 of SEQ ID NO: 586694
cugggaaaugcaggucaua

SEQ ID NO: 737233 - RNA, 19 nt, Artificial Sequence
  Description of Artificial Sequence: Synthetic oligonucleotide
  Antisense strand to SEQ ID NO: 737232
uaugaccugcauuucccag

SEQ ID NO: 737234 - RNA, 19 nt, Artificial Sequence
  Description of Artificial Sequence: Synthetic oligonucleotide
  Sense strand starting at position 845 of SEQ ID NO: 586694
ucauauugguggcuuucua

SEQ ID NO: 737235 - RNA, 19 nt, Artificial Sequence
  Description of Artificial Sequence: Synthetic oligonucleotide
  Antisense strand to SEQ ID NO: 737234
uagaaagccaccaauauga

SEQ ID NO: 737236 - RNA, 19 nt, Artificial Sequence
  Description of Artificial Sequence: Synthetic oligonucleotide
  Sense strand starting at position 855 of SEQ ID NO: 586694
ggcuuucuaucagaaggga

SEQ ID NO: 737237 - RNA, 19 nt, Artificial Sequence
  Description of Artificial Sequence: Synthetic oligonucleotide
  Antisense strand to SEQ ID NO: 737236
ucccuucugauagaaagcc

SEQ ID NO: 737238 - RNA, 19 nt, Artificial Sequence
  Description of Artificial Sequence: Synthetic oligonucleotide
  Sense strand starting at position 1168 of SEQ ID NO: 586694
aucugaauucuggaguguu

SEQ ID NO: 737239 - RNA, 19 nt, Artificial Sequence
  Description of Artificial Sequence: Synthetic oligonucleotide
  Antisense strand to SEQ ID NO: 737238
aacacuccagaauucagau

SEQ ID NO: 737240 - RNA, 19 nt, Artificial Sequence
  Description of Artificial Sequence: Synthetic oligonucleotide
  Sense strand starting at position 1171 of SEQ ID NO: 586694
ugaauucuggaguguuuau

SEQ ID NO: 737241 - RNA, 19 nt, Artificial Sequence
  Description of Artificial Sequence: Synthetic oligonucleotide
  Antisense strand to SEQ ID NO: 737240
auaaacacuccagaauuca

SEQ ID NO: 737242 - RNA, 19 nt, Artificial Sequence
  Description of Artificial Sequence: Synthetic oligonucleotide
  Sense strand starting at position 1178 of SEQ ID NO: 586694
uggaguguuuauuucuguu

SEQ ID NO: 737243 - RNA, 19 nt, Artificial Sequence
  Description of Artificial Sequence: Synthetic oligonucleotide
  Antisense strand to SEQ ID NO: 737242
aacagaaauaaacacucca

SEQ ID NO: 737244 - RNA, 19 nt, Artificial Sequence
  Description of Artificial Sequence: Synthetic oligonucleotide
  Sense strand starting at position 1283 of SEQ ID NO: 586694
ggguguucggcggcugaaa

SEQ ID NO: 737245 - RNA, 19 nt, Artificial Sequence
  Description of Artificial Sequence: Synthetic oligonucleotide
  Antisense strand to SEQ ID NO: 737244
uuucagccgccgaacaccc

SEQ ID NO: 737246 - RNA, 19 nt, Artificial Sequence
  Description of Artificial Sequence: Synthetic oligonucleotide
  Sense strand starting at position 1294 of SEQ ID NO: 586694
ggcugaaagcguugagcca

SEQ ID NO: 737247 - RNA, 19 nt, Artificial Sequence
  Description of Artificial Sequence: Synthetic oligonucleotide
  Antisense strand to SEQ ID NO: 737246
uggcucaacgcuuucagcc

SEQ ID NO: 737248 - RNA, 19 nt, Artificial Sequence
  Description of Artificial Sequence: Synthetic oligonucleotide
  Sense strand starting at position 1295 of SEQ ID NO: 586694
gcugaaagcguugagccau

SEQ ID NO: 737249 - RNA, 19 nt, Artificial Sequence
  Description of Artificial Sequence: Synthetic oligonucleotide
  Antisense strand to SEQ ID NO: 737248
auggcucaacgcuuucagc

SEQ ID NO: 737250 - RNA, 19 nt, Artificial Sequence
  Description of Artificial Sequence: Synthetic oligonucleotide
  Sense strand starting at position 1301 of SEQ ID NO: 586694
agcguugagccauauacau

SEQ ID NO: 737251 - RNA, 19 nt, Artificial Sequence
  Description of Artificial Sequence: Synthetic oligonucleotide
  Antisense strand to SEQ ID NO: 737250
auguauauggcucaacgcu

SEQ ID NO: 737252 - RNA, 19 nt, Artificial Sequence
  Description of Artificial Sequence: Synthetic oligonucleotide
  Sense strand starting at position 1458 of SEQ ID NO: 586694
cgaggugucccgcccggau

SEQ ID NO: 737253 - RNA, 19 nt, Artificial Sequence
  Description of Artificial Sequence: Synthetic oligonucleotide
  Antisense strand to SEQ ID NO: 737252
auccgggcgggacaccucg

SEQ ID NO: 737254 - RNA, 19 nt, Artificial Sequence
  Description of Artificial Sequence: Synthetic oligonucleotide
  Sense strand starting at position 1550 of SEQ ID NO: 586694
gggcauucguuaccuuguu

SEQ ID NO: 737255 - RNA, 19 nt, Artificial Sequence
  Description of Artificial Sequence: Synthetic oligonucleotide
  Antisense strand to SEQ ID NO: 737254
aacaagguaacgaaugccc

SEQ ID NO: 737256 - RNA, 19 nt, Artificial Sequence
  Description of Artificial Sequence: Synthetic oligonucleotide
  Sense strand starting at position 1758 of SEQ ID NO: 586694
cuuguuugcugcuccugaa

SEQ ID NO: 737257 - RNA, 19 nt, Artificial Sequence
  Description of Artificial Sequence: Synthetic oligonucleotide
  Antisense strand to SEQ ID NO: 737256
uucaggagcagcaaacaag

SEQ ID NO: 737258 - RNA, 19 nt, Artificial Sequence
  Description of Artificial Sequence: Synthetic oligonucleotide
  Sense strand starting at position 1937 of SEQ ID NO: 586694
cagccuucggguuaaucau

SEQ ID NO: 737259 - RNA, 19 nt, Artificial Sequence
  Description of Artificial Sequence: Synthetic oligonucleotide
  Antisense strand to SEQ ID NO: 737258
augauuaacccgaaggcug

SEQ ID NO: 737260 - RNA, 19 nt, Artificial Sequence
  Description of Artificial Sequence: Synthetic oligonucleotide
  Sense strand starting at position 1943 of SEQ ID NO: 586694
ucggguuaaucauuagauc

SEQ ID NO: 737261 - RNA, 19 nt, Artificial Sequence
  Description of Artificial Sequence: Synthetic oligonucleotide
  Antisense strand to SEQ ID NO: 737260
gaucuaaugauuaacccga

SEQ ID NO: 737262 - RNA, 19 nt, Artificial Sequence
  Description of Artificial Sequence: Synthetic oligonucleotide
  Sense strand starting at position 1944 of SEQ ID NO: 586694
cggguuaaucauuagaucu

SEQ ID NO: 737263 - RNA, 19 nt, Artificial Sequence
  Description of Artificial Sequence: Synthetic oligonucleotide
  Antisense strand to SEQ ID NO: 737262
agaucuaaugauuaacccg

SEQ ID NO: 737264 - RNA, 19 nt, Artificial Sequence
  Description of Artificial Sequence: Synthetic oligonucleotide
  Sense strand starting at position 1946 of SEQ ID NO: 586694
gguuaaucauuagaucuca

SEQ ID NO: 737265 - RNA, 19 nt, Artificial Sequence
  Description of Artificial Sequence: Synthetic oligonucleotide
  Antisense strand to SEQ ID NO: 737264
ugagaucuaaugauuaacc

SEQ ID NO: 737266 - RNA, 19 nt, Artificial Sequence
  Description of Artificial Sequence: Synthetic oligonucleotide
  Sense strand starting at position 2226 of SEQ ID NO: 586694
guugaagucgggcaucuua

SEQ ID NO: 737267 - RNA, 19 nt, Artificial Sequence
  Description of Artificial Sequence: Synthetic oligonucleotide
  Antisense strand to SEQ ID NO: 737266
uaagaugcccgacuucaac

SEQ ID NO: 737268 - RNA, 19 nt, Artificial Sequence
  Description of Artificial Sequence: Synthetic oligonucleotide
  Sense strand starting at position 2237 of SEQ ID NO: 586694
gcaucuuaggcaggaucau

SEQ ID NO: 737269 - RNA, 19 nt, Artificial Sequence
  Description of Artificial Sequence: Synthetic oligonucleotide
  Antisense strand to SEQ ID NO: 737268
augauccugccuaagaugc

SEQ ID NO: 737270 - RNA, 19 nt, Artificial Sequence
  Description of Artificial Sequence: Synthetic oligonucleotide
  Sense strand starting at position 2883 of SEQ ID NO: 586694
ggcgucgaugcggaaauuu

SEQ ID NO: 737271 - RNA, 19 nt, Artificial Sequence
  Description of Artificial Sequence: Synthetic oligonucleotide
  Antisense strand to SEQ ID NO: 737270
aaauuuccgcaucgacgcc

SEQ ID NO: 737272 - RNA, 19 nt, Artificial Sequence
  Description of Artificial Sequence: Synthetic oligonucleotide
  Sense strand starting at position 3015 of SEQ ID NO: 586694
uauuguuauggugguuauu

SEQ ID NO: 737273 - RNA, 19 nt, Artificial Sequence
  Description of Artificial Sequence: Synthetic oligonucleotide
  Antisense strand to SEQ ID NO: 737272
aauaaccaccauaacaaua

SEQ ID NO: 737274 - RNA, 19 nt, Artificial Sequence
  Description of Artificial Sequence: Synthetic oligonucleotide
  Sense strand starting at position 3025 of SEQ ID NO: 586694
gugguuauuugccaauaau

SEQ ID NO: 737275 - RNA, 19 nt, Artificial Sequence
  Description of Artificial Sequence: Synthetic oligonucleotide
  Antisense strand to SEQ ID NO: 737274
auuauuggcaaauaaccac

SEQ ID NO: 737276 - RNA, 19 nt, Artificial Sequence
  Description of Artificial Sequence: Synthetic oligonucleotide
  Sense strand starting at position 3894 of SEQ ID NO: 586694
gguguaaacgcgcauguga

SEQ ID NO: 737277 - RNA, 19 nt, Artificial Sequence
  Description of Artificial Sequence: Synthetic oligonucleotide
  Antisense strand to SEQ ID NO: 737276
ucacaugcgcguuuacacc

SEQ ID NO: 737278 - RNA, 19 nt, Artificial Sequence
  Description of Artificial Sequence: Synthetic oligonucleotide
  Sense strand starting at position 3917 of SEQ ID NO: 586694
gaguuuggccuccacgaau

SEQ ID NO: 737279 - RNA, 19 nt, Artificial Sequence
  Description of Artificial Sequence: Synthetic oligonucleotide
  Antisense strand to SEQ ID NO: 737278
auucguggaggccaaacuc

SEQ ID NO: 737280 - RNA, 19 nt, Artificial Sequence
  Description of Artificial Sequence: Synthetic oligonucleotide
  Sense strand starting at position 65 of SEQ ID NO: 586695
ggguguucggcggcugaaa

SEQ ID NO: 737281 - RNA, 19 nt, Artificial Sequence
  Description of Artificial Sequence: Synthetic oligonucleotide
  Antisense strand to SEQ ID NO: 737280
uuucagccgccgaacaccc

SEQ ID NO: 737282 - RNA, 19 nt, Artificial Sequence
  Description of Artificial Sequence: Synthetic oligonucleotide
  Sense strand starting at position 76 of SEQ ID NO: 586695
ggcugaaagcguugagcca

SEQ ID NO: 737283 - RNA, 19 nt, Artificial Sequence
  Description of Artificial Sequence: Synthetic oligonucleotide
  Antisense strand to SEQ ID NO: 737282
uggcucaacgcuuucagcc

SEQ ID NO: 737284 - RNA, 19 nt, Artificial Sequence
  Description of Artificial Sequence: Synthetic oligonucleotide
  Sense strand starting at position 77 of SEQ ID NO: 586695
gcugaaagcguugagccau

SEQ ID NO: 737285 - RNA, 19 nt, Artificial Sequence
  Description of Artificial Sequence: Synthetic oligonucleotide
  Antisense strand to SEQ ID NO: 737284
auggcucaacgcuuucagc

SEQ ID NO: 737286 - RNA, 19 nt, Artificial Sequence
  Description of Artificial Sequence: Synthetic oligonucleotide
  Sense strand starting at position 83 of SEQ ID NO: 586695
agcguugagccauauacau

SEQ ID NO: 737287 - RNA, 19 nt, Artificial Sequence
  Description of Artificial Sequence: Synthetic oligonucleotide
  Antisense strand to SEQ ID NO: 737286
auguauauggcucaacgcu

SEQ ID NO: 737288 - RNA, 19 nt, Artificial Sequence
  Description of Artificial Sequence: Synthetic oligonucleotide
  Sense strand starting at position 240 of SEQ ID NO: 586695
cgaggugucccgcccggau

SEQ ID NO: 737289 - RNA, 19 nt, Artificial Sequence
  Description of Artificial Sequence: Synthetic oligonucleotide
  Antisense strand to SEQ ID NO: 737288
auccgggcgggacaccucg

SEQ ID NO: 737290 - RNA, 19 nt, Artificial Sequence
  Description of Artificial Sequence: Synthetic oligonucleotide
  Sense strand starting at position 332 of SEQ ID NO: 586695
gggcauucguuaccuuguu

SEQ ID NO: 737291 - RNA, 19 nt, Artificial Sequence
  Description of Artificial Sequence: Synthetic oligonucleotide
  Antisense strand to SEQ ID NO: 737290
aacaagguaacgaaugccc

SEQ ID NO: 737292 - RNA, 19 nt, Artificial Sequence
  Description of Artificial Sequence: Synthetic oligonucleotide
  Sense strand starting at position 540 of SEQ ID NO: 586695
cuuguuugcugcuccugaa

SEQ ID NO: 737293 - RNA, 19 nt, Artificial Sequence
  Description of Artificial Sequence: Synthetic oligonucleotide
  Antisense strand to SEQ ID NO: 737292
uucaggagcagcaaacaag

SEQ ID NO: 737294 - RNA, 19 nt, Artificial Sequence
  Description of Artificial Sequence: Synthetic oligonucleotide
  Sense strand starting at position 719 of SEQ ID NO: 586695
cagccuucggguuaaucau

SEQ ID NO: 737295 - RNA, 19 nt, Artificial Sequence
  Description of Artificial Sequence: Synthetic oligonucleotide
  Antisense strand to SEQ ID NO: 737294
augauuaacccgaaggcug

SEQ ID NO: 737296 - RNA, 19 nt, Artificial Sequence
  Description of Artificial Sequence: Synthetic oligonucleotide
  Sense strand starting at position 725 of SEQ ID NO: 586695
ucggguuaaucauuagauc

SEQ ID NO: 737297 - RNA, 19 nt, Artificial Sequence
  Description of Artificial Sequence: Synthetic oligonucleotide
  Antisense strand to SEQ ID NO: 737296
gaucuaaugauuaacccga

SEQ ID NO: 737298 - RNA, 19 nt, Artificial Sequence
  Description of Artificial Sequence: Synthetic oligonucleotide
  Sense strand starting at position 726 of SEQ ID NO: 586695
cggguuaaucauuagaucu

SEQ ID NO: 737299 - RNA, 19 nt, Artificial Sequence
  Description of Artificial Sequence: Synthetic oligonucleotide
  Antisense strand to SEQ ID NO: 737298
agaucuaaugauuaacccg

SEQ ID NO: 737300 - RNA, 19 nt, Artificial Sequence
  Description of Artificial Sequence: Synthetic oligonucleotide
  Sense strand starting at position 728 of SEQ ID NO: 586695
gguuaaucauuagaucuca

SEQ ID NO: 737301 - RNA, 19 nt, Artificial Sequence
  Description of Artificial Sequence: Synthetic oligonucleotide
  Antisense strand to SEQ ID NO: 737300
ugagaucuaaugauuaacc

SEQ ID NO: 737302 - RNA, 19 nt, Artificial Sequence
  Description of Artificial Sequence: Synthetic oligonucleotide
  Sense strand starting at position 1008 of SEQ ID NO: 586695
guugaagucgggcaucuua

SEQ ID NO: 737303 - RNA, 19 nt, Artificial Sequence
  Description of Artificial Sequence: Synthetic oligonucleotide
  Antisense strand to SEQ ID NO: 737302
uaagaugcccgacuucaac

SEQ ID NO: 737304 - RNA, 19 nt, Artificial Sequence
  Description of Artificial Sequence: Synthetic oligonucleotide
  Sense strand starting at position 1019 of SEQ ID NO: 586695
gcaucuuaggcaggaucau

SEQ ID NO: 737305 - RNA, 19 nt, Artificial Sequence
  Description of Artificial Sequence: Synthetic oligonucleotide
  Antisense strand to SEQ ID NO: 737304
augauccugccuaagaugc

SEQ ID NO: 737306 - RNA, 19 nt, Artificial Sequence
  Description of Artificial Sequence: Synthetic oligonucleotide
  Sense strand starting at position 1665 of SEQ ID NO: 586695
ggcgucgaugcggaaauuu

SEQ ID NO: 737307 - RNA, 19 nt, Artificial Sequence
  Description of Artificial Sequence: Synthetic oligonucleotide
  Antisense strand to SEQ ID NO: 737306
aaauuuccgcaucgacgcc

SEQ ID NO: 737308 - RNA, 19 nt, Artificial Sequence
  Description of Artificial Sequence: Synthetic oligonucleotide
  Sense strand starting at position 1797 of SEQ ID NO: 586695
uauuguuauggugguuauu

SEQ ID NO: 737309 - RNA, 19 nt, Artificial Sequence
  Description of Artificial Sequence: Synthetic oligonucleotide
  Antisense strand to SEQ ID NO: 737308
aauaaccaccauaacaaua

SEQ ID NO: 737310 - RNA, 19 nt, Artificial Sequence
  Description of Artificial Sequence: Synthetic oligonucleotide
  Sense strand starting at position 1807 of SEQ ID NO: 586695
gugguuauuugccaauaau

SEQ ID NO: 737311 - RNA, 19 nt, Artificial Sequence
  Description of Artificial Sequence: Synthetic oligonucleotide
  Antisense strand to SEQ ID NO: 737310
auuauuggcaaauaaccac

SEQ ID NO: 737312 - RNA, 19 nt, Artificial Sequence
  Description of Artificial Sequence: Synthetic oligonucleotide
  Sense strand starting at position 2676 of SEQ ID NO: 586695
gguguaaacgcgcauguga

SEQ ID NO: 737313 - RNA, 19 nt, Artificial Sequence
  Description of Artificial Sequence: Synthetic oligonucleotide
  Antisense strand to SEQ ID NO: 737312
ucacaugcgcguuuacacc

SEQ ID NO: 737314 - RNA, 19 nt, Artificial Sequence
  Description of Artificial Sequence: Synthetic oligonucleotide
  Sense strand starting at position 2699 of SEQ ID NO: 586695
gaguuuggccuccacgaau

SEQ ID NO: 737315 - RNA, 19 nt, Artificial Sequence
  Description of Artificial Sequence: Synthetic oligonucleotide
  Antisense strand to SEQ ID NO: 737314
auucguggaggccaaacuc

SEQ ID NO: 737316 - RNA, 19 nt, Artificial Sequence
  Description of Artificial Sequence: Synthetic oligonucleotide
  Sense strand starting at position 2765 of SEQ ID NO: 586695
ggcgcucuggccugcagaa

SEQ ID NO: 737317 - RNA, 19 nt, Artificial Sequence
  Description of Artificial Sequence: Synthetic oligonucleotide
  Antisense strand to SEQ ID NO: 737316
uucugcaggccagagcgcc

SEQ ID NO: 737318 - RNA, 19 nt, Artificial Sequence
  Description of Artificial Sequence: Synthetic oligonucleotide
  Sense strand starting at position 2827 of SEQ ID NO: 586695
agcggguccucggugacaa

SEQ ID NO: 737319 - RNA, 19 nt, Artificial Sequence
  Description of Artificial Sequence: Synthetic oligonucleotide
  Antisense strand to SEQ ID NO: 737318
uugucaccgaggacccgcu

SEQ ID NO: 737320 - RNA, 19 nt, Artificial Sequence
  Description of Artificial Sequence: Synthetic oligonucleotide
  Sense strand starting at position 2863 of SEQ ID NO: 586695
gagggaugcccaugggcuu

SEQ ID NO: 737321 - RNA, 19 nt, Artificial Sequence
  Description of Artificial Sequence: Synthetic oligonucleotide
  Antisense strand to SEQ ID NO: 737320
aagcccaugggcaucccuc

SEQ ID NO: 737322 - RNA, 19 nt, Artificial Sequence
  Description of Artificial Sequence: Synthetic oligonucleotide
  Sense strand starting at position 3039 of SEQ ID NO: 586695
aagggcuucccgugaguga

SEQ ID NO: 737323 - RNA, 19 nt, Artificial Sequence
  Description of Artificial Sequence: Synthetic oligonucleotide
  Antisense strand to SEQ ID NO: 737322
ucacucacgggaagcccuu

SEQ ID NO: 737324 - RNA, 19 nt, Artificial Sequence
  Description of Artificial Sequence: Synthetic oligonucleotide
  Sense strand starting at position 3194 of SEQ ID NO: 586695
acaccaggcuuugucaaua

SEQ ID NO: 737325 - RNA, 19 nt, Artificial Sequence
  Description of Artificial Sequence: Synthetic oligonucleotide
  Antisense strand to SEQ ID NO: 737324
uauugacaaagccuggugu

SEQ ID NO: 737326 - RNA, 19 nt, Artificial Sequence
  Description of Artificial Sequence: Synthetic oligonucleotide
  Sense strand starting at position 3205 of SEQ ID NO: 586695
ugucaauagcgccauuaga

SEQ ID NO: 737327 - RNA, 19 nt, Artificial Sequence
  Description of Artificial Sequence: Synthetic oligonucleotide
  Antisense strand to SEQ ID NO: 737326
ucuaauggcgcuauugaca

SEQ ID NO: 737328 - RNA, 19 nt, Artificial Sequence
  Description of Artificial Sequence: Synthetic oligonucleotide
  Sense strand starting at position 3258 of SEQ ID NO: 586695
gagggaguuccagguucca

SEQ ID NO: 737329 - RNA, 19 nt, Artificial Sequence
  Description of Artificial Sequence: Synthetic oligonucleotide
  Antisense strand to SEQ ID NO: 737328
uggaaccuggaacucccuc

SEQ ID NO: 737330 - RNA, 19 nt, Artificial Sequence
  Description of Artificial Sequence: Synthetic oligonucleotide
  Sense strand starting at position 3279 of SEQ ID NO: 586695
gcuugcuaugcaggugaga

SEQ ID NO: 737331 - RNA, 19 nt, Artificial Sequence
  Description of Artificial Sequence: Synthetic oligonucleotide
  Antisense strand to SEQ ID NO: 737330
ucucaccugcauagcaagc

SEQ ID NO: 737332 - RNA, 19 nt, Artificial Sequence
  Description of Artificial Sequence: Synthetic oligonucleotide
  Sense strand starting at position 3288 of SEQ ID NO: 586695
gcaggugagaggugaauaa

SEQ ID NO: 737333 - RNA, 19 nt, Artificial Sequence
  Description of Artificial Sequence: Synthetic oligonucleotide
  Antisense strand to SEQ ID NO: 737332
uuauucaccucucaccugc

SEQ ID NO: 737334 - RNA, 19 nt, Artificial Sequence
  Description of Artificial Sequence: Synthetic oligonucleotide
  Sense strand starting at position 3540 of SEQ ID NO: 586695
aggacugguuggaagguua

SEQ ID NO: 737335 - RNA, 19 nt, Artificial Sequence
  Description of Artificial Sequence: Synthetic oligonucleotide
  Antisense strand to SEQ ID NO: 737334
uaaccuuccaaccaguccu

SEQ ID NO: 737336 - RNA, 19 nt, Artificial Sequence
  Description of Artificial Sequence: Synthetic oligonucleotide
  Sense strand starting at position 3563 of SEQ ID NO: 586695
gauggcaauggaugaguaa

SEQ ID NO: 737337 - RNA, 19 nt, Artificial Sequence
  Description of Artificial Sequence: Synthetic oligonucleotide
  Antisense strand to SEQ ID NO: 737336
uuacucauccauugccauc

SEQ ID NO: 737338 - RNA, 19 nt, Artificial Sequence
  Description of Artificial Sequence: Synthetic oligonucleotide
  Sense strand starting at position 3583 of SEQ ID NO: 586695
ugcaacuuggaguaaaugu

SEQ ID NO: 737339 - RNA, 19 nt, Artificial Sequence
  Description of Artificial Sequence: Synthetic oligonucleotide
  Antisense strand to SEQ ID NO: 737338
acauuuacuccaaguugca

SEQ ID NO: 737340 - RNA, 19 nt, Artificial Sequence
  Description of Artificial Sequence: Synthetic oligonucleotide
  Sense strand starting at position 3594 of SEQ ID NO: 586695
guaaaugugaucuggcuuu

SEQ ID NO: 737341 - RNA, 19 nt, Artificial Sequence
  Description of Artificial Sequence: Synthetic oligonucleotide
  Antisense strand to SEQ ID NO: 737340
aaagccagaucacauuuac

SEQ ID NO: 737342 - RNA, 19 nt, Artificial Sequence
  Description of Artificial Sequence: Synthetic oligonucleotide
  Sense strand starting at position 3656 of SEQ ID NO: 586695
ggaguuugucgugccuuua

SEQ ID NO: 737343 - RNA, 19 nt, Artificial Sequence
  Description of Artificial Sequence: Synthetic oligonucleotide
  Antisense strand to SEQ ID NO: 737342
uaaaggcacgacaaacucc

SEQ ID NO: 737344 - RNA, 19 nt, Artificial Sequence
  Description of Artificial Sequence: Synthetic oligonucleotide
  Sense strand starting at position 3659 of SEQ ID NO: 586695
guuugucgugccuuuagau

SEQ ID NO: 737345 - RNA, 19 nt, Artificial Sequence
  Description of Artificial Sequence: Synthetic oligonucleotide
  Antisense strand to SEQ ID NO: 737344
aucuaaaggcacgacaaac

SEQ ID NO: 737346 - RNA, 19 nt, Artificial Sequence
  Description of Artificial Sequence: Synthetic oligonucleotide
  Sense strand starting at position 3671 of SEQ ID NO: 586695
uuuagaugucuuuguggug

SEQ ID NO: 737347 - RNA, 19 nt, Artificial Sequence
  Description of Artificial Sequence: Synthetic oligonucleotide
  Antisense strand to SEQ ID NO: 737346
caccacaaagacaucuaaa

SEQ ID NO: 737348 - RNA, 19 nt, Artificial Sequence
  Description of Artificial Sequence: Synthetic oligonucleotide
  Sense strand starting at position 3672 of SEQ ID NO: 586695
uuagaugucuuugugguga

SEQ ID NO: 737349 - RNA, 19 nt, Artificial Sequence
  Description of Artificial Sequence: Synthetic oligonucleotide
  Antisense strand to SEQ ID NO: 737348
ucaccacaaagacaucuaa

SEQ ID NO: 737350 - RNA, 19 nt, Artificial Sequence
  Description of Artificial Sequence: Synthetic oligonucleotide
  Sense strand starting at position 3677 of SEQ ID NO: 586695
ugucuuuguggugacacaa

SEQ ID NO: 737351 - RNA, 19 nt, Artificial Sequence
  Description of Artificial Sequence: Synthetic oligonucleotide
  Antisense strand to SEQ ID NO: 737350
uugugucaccacaaagaca

SEQ ID NO: 737352 - RNA, 19 nt, Artificial Sequence
  Description of Artificial Sequence: Synthetic oligonucleotide
  Sense strand starting at position 3750 of SEQ ID NO: 586695
uacuaugugcuaugagcuu

SEQ ID NO: 737353 - RNA, 19 nt, Artificial Sequence
  Description of Artificial Sequence: Synthetic oligonucleotide
  Antisense strand to SEQ ID NO: 737352
aagcucauagcacauagua

SEQ ID NO: 737354 - RNA, 19 nt, Artificial Sequence
  Description of Artificial Sequence: Synthetic oligonucleotide
  Sense strand starting at position 3756 of SEQ ID NO: 586695
gugcuaugagcuuucugca

SEQ ID NO: 737355 - RNA, 19 nt, Artificial Sequence
  Description of Artificial Sequence: Synthetic oligonucleotide
  Antisense strand to SEQ ID NO: 737354
ugcagaaagcucauagcac

SEQ ID NO: 737356 - RNA, 19 nt, Artificial Sequence
  Description of Artificial Sequence: Synthetic oligonucleotide
  Sense strand starting at position 3761 of SEQ ID NO: 586695
augagcuuucugcaauucu

SEQ ID NO: 737357 - RNA, 19 nt, Artificial Sequence
  Description of Artificial Sequence: Synthetic oligonucleotide
  Antisense strand to SEQ ID NO: 737356
agaauugcagaaagcucau

SEQ ID NO: 737358 - RNA, 19 nt, Artificial Sequence
  Description of Artificial Sequence: Synthetic oligonucleotide
  Sense strand starting at position 3770 of SEQ ID NO: 586695
cugcaauucucauccguaa

SEQ ID NO: 737359 - RNA, 19 nt, Artificial Sequence
  Description of Artificial Sequence: Synthetic oligonucleotide
  Antisense strand to SEQ ID NO: 737358
uuacggaugagaauugcag

SEQ ID NO: 737360 - RNA, 19 nt, Artificial Sequence
  Description of Artificial Sequence: Synthetic oligonucleotide
  Sense strand starting at position 121 of SEQ ID NO: 586696
ggauuacaggcaugcgaaa

SEQ ID NO: 737361 - RNA, 19 nt, Artificial Sequence
  Description of Artificial Sequence: Synthetic oligonucleotide
  Antisense strand to SEQ ID NO: 737360
uuucgcaugccuguaaucc

SEQ ID NO: 737362 - RNA, 19 nt, Artificial Sequence
  Description of Artificial Sequence: Synthetic oligonucleotide
  Sense strand starting at position 134 of SEQ ID NO: 586696
gcgaaacuaugcccagcua

SEQ ID NO: 737363 - RNA, 19 nt, Artificial Sequence
  Description of Artificial Sequence: Synthetic oligonucleotide
  Antisense strand to SEQ ID NO: 737362
uagcugggcauaguuucgc

SEQ ID NO: 737364 - RNA, 19 nt, Artificial Sequence
  Description of Artificial Sequence: Synthetic oligonucleotide
  Sense strand starting at position 135 of SEQ ID NO: 586696
cgaaacuaugcccagcuaa

SEQ ID NO: 737365 - RNA, 19 nt, Artificial Sequence
  Description of Artificial Sequence: Synthetic oligonucleotide
  Antisense strand to SEQ ID NO: 737364
uuagcugggcauaguuucg

SEQ ID NO: 737366 - RNA, 19 nt, Artificial Sequence
  Description of Artificial Sequence: Synthetic oligonucleotide
  Sense strand starting at position 1206 of SEQ ID NO: 586696
ccaucaccuugacaggaua

SEQ ID NO: 737367 - RNA, 19 nt, Artificial Sequence
  Description of Artificial Sequence: Synthetic oligonucleotide
  Antisense strand to SEQ ID NO: 737366
uauccugucaaggugaugg

SEQ ID NO: 737368 - RNA, 19 nt, Artificial Sequence
  Description of Artificial Sequence: Synthetic oligonucleotide
  Sense strand starting at position 1220 of SEQ ID NO: 586696
ggauaauaaucccuuaguu

SEQ ID NO: 737369 - RNA, 19 nt, Artificial Sequence
  Description of Artificial Sequence: Synthetic oligonucleotide
  Antisense strand to SEQ ID NO: 737368
aacuaagggauuauuaucc

SEQ ID NO: 737370 - RNA, 19 nt, Artificial Sequence
  Description of Artificial Sequence: Synthetic oligonucleotide
  Sense strand starting at position 1222 of SEQ ID NO: 586696
auaauaaucccuuaguugu

SEQ ID NO: 737371 - RNA, 19 nt, Artificial Sequence
  Description of Artificial Sequence: Synthetic oligonucleotide
  Antisense strand to SEQ ID NO: 737370
acaacuaagggauuauuau

SEQ ID NO: 737372 - RNA, 19 nt, Artificial Sequence
  Description of Artificial Sequence: Synthetic oligonucleotide
  Sense strand starting at position 1228 of SEQ ID NO: 586696
aucccuuaguugucuccaa

SEQ ID NO: 737373 - RNA, 19 nt, Artificial Sequence
  Description of Artificial Sequence: Synthetic oligonucleotide
  Antisense strand to SEQ ID NO: 737372
uuggagacaacuaagggau

SEQ ID NO: 737374 - RNA, 19 nt, Artificial Sequence
  Description of Artificial Sequence: Synthetic oligonucleotide
  Sense strand starting at position 1229 of SEQ ID NO: 586696
ucccuuaguugucuccaaa

SEQ ID NO: 737375 - RNA, 19 nt, Artificial Sequence
  Description of Artificial Sequence: Synthetic oligonucleotide
  Antisense strand to SEQ ID NO: 737374
uuuggagacaacuaaggga

SEQ ID NO: 737376 - RNA, 19 nt, Artificial Sequence
  Description of Artificial Sequence: Synthetic oligonucleotide
  Sense strand starting at position 1232 of SEQ ID NO: 586696
cuuaguugucuccaaauug

SEQ ID NO: 737377 - RNA, 19 nt, Artificial Sequence
  Description of Artificial Sequence: Synthetic oligonucleotide
  Antisense strand to SEQ ID NO: 737376
caauuuggagacaacuaag

SEQ ID NO: 737378 - RNA, 19 nt, Artificial Sequence
  Description of Artificial Sequence: Synthetic oligonucleotide
  Sense strand starting at position 1293 of SEQ ID NO: 586696
augagauacugguggacga

SEQ ID NO: 737379 - RNA, 19 nt, Artificial Sequence
  Description of Artificial Sequence: Synthetic oligonucleotide
  Antisense strand to SEQ ID NO: 737378
ucguccaccaguaucucau

SEQ ID NO: 737380 - RNA, 19 nt, Artificial Sequence
  Description of Artificial Sequence: Synthetic oligonucleotide
  Sense strand starting at position 1294 of SEQ ID NO: 586696
ugagauacugguggacgaa

SEQ ID NO: 737381 - RNA, 19 nt, Artificial Sequence
  Description of Artificial Sequence: Synthetic oligonucleotide
  Antisense strand to SEQ ID NO: 737380
uucguccaccaguaucuca

SEQ ID NO: 737382 - RNA, 19 nt, Artificial Sequence
  Description of Artificial Sequence: Synthetic oligonucleotide
  Sense strand starting at position 1624 of SEQ ID NO: 586696
ggucacuguccucaggcau

SEQ ID NO: 737383 - RNA, 19 nt, Artificial Sequence
  Description of Artificial Sequence: Synthetic oligonucleotide
  Antisense strand to SEQ ID NO: 737382
augccugaggacagugacc

SEQ ID NO: 737384 - RNA, 19 nt, Artificial Sequence
  Description of Artificial Sequence: Synthetic oligonucleotide
  Sense strand starting at position 1757 of SEQ ID NO: 586696
gcgcccacugcuucuagau

SEQ ID NO: 737385 - RNA, 19 nt, Artificial Sequence
  Description of Artificial Sequence: Synthetic oligonucleotide
  Antisense strand to SEQ ID NO: 737384
aucuagaagcagugggcgc

SEQ ID NO: 737386 - RNA, 19 nt, Artificial Sequence
  Description of Artificial Sequence: Synthetic oligonucleotide
  Sense strand starting at position 1822 of SEQ ID NO: 586696
ggcaacucccauugcagaa

SEQ ID NO: 737387 - RNA, 19 nt, Artificial Sequence
  Description of Artificial Sequence: Synthetic oligonucleotide
  Antisense strand to SEQ ID NO: 737386
uucugcaaugggaguugcc

SEQ ID NO: 737388 - RNA, 19 nt, Artificial Sequence
  Description of Artificial Sequence: Synthetic oligonucleotide
  Sense strand starting at position 1945 of SEQ ID NO: 586696
cuggcuaagucgcaaauca

SEQ ID NO: 737389 - RNA, 19 nt, Artificial Sequence
  Description of Artificial Sequence: Synthetic oligonucleotide
  Antisense strand to SEQ ID NO: 737388
ugauuugcgacuuagccag

SEQ ID NO: 737390 - RNA, 19 nt, Artificial Sequence
  Description of Artificial Sequence: Synthetic oligonucleotide
  Sense strand starting at position 2001 of SEQ ID NO: 586696
gggagaucuuuggauccag

SEQ ID NO: 737391 - RNA, 19 nt, Artificial Sequence
  Description of Artificial Sequence: Synthetic oligonucleotide
  Antisense strand to SEQ ID NO: 737390
cuggauccaaagaucuccc

SEQ ID NO: 737392 - RNA, 19 nt, Artificial Sequence
  Description of Artificial Sequence: Synthetic oligonucleotide
  Sense strand starting at position 2023 of SEQ ID NO: 586696
cccagaugucucuggguuu

SEQ ID NO: 737393 - RNA, 19 nt, Artificial Sequence
  Description of Artificial Sequence: Synthetic oligonucleotide
  Antisense strand to SEQ ID NO: 737392
aaacccagagacaucuggg

SEQ ID NO: 737394 - RNA, 19 nt, Artificial Sequence
  Description of Artificial Sequence: Synthetic oligonucleotide
  Sense strand starting at position 2043 of SEQ ID NO: 586696
uucucagccugaucuuuga

SEQ ID NO: 737395 - RNA, 19 nt, Artificial Sequence
  Description of Artificial Sequence: Synthetic oligonucleotide
  Antisense strand to SEQ ID NO: 737394
ucaaagaucaggcugagaa

SEQ ID NO: 737396 - RNA, 19 nt, Artificial Sequence
  Description of Artificial Sequence: Synthetic oligonucleotide
  Sense strand starting at position 2046 of SEQ ID NO: 586696
ucagccugaucuuugaacu

SEQ ID NO: 737397 - RNA, 19 nt, Artificial Sequence
  Description of Artificial Sequence: Synthetic oligonucleotide
  Antisense strand to SEQ ID NO: 737396
aguucaaagaucaggcuga

SEQ ID NO: 737398 - RNA, 19 nt, Artificial Sequence
  Description of Artificial Sequence: Synthetic oligonucleotide
  Sense strand starting at position 2056 of SEQ ID NO: 586696
cuuugaacuuccugucagu

SEQ ID NO: 737399 - RNA, 19 nt, Artificial Sequence
  Description of Artificial Sequence: Synthetic oligonucleotide
  Antisense strand to SEQ ID NO: 737398
acugacaggaaguucaaag

SEQ ID NO: 737400 - RNA, 19 nt, Artificial Sequence
  Description of Artificial Sequence: Synthetic oligonucleotide
  Sense strand starting at position 2140 of SEQ ID NO: 586696
acccgagugccucaggaau

SEQ ID NO: 737401 - RNA, 19 nt, Artificial Sequence
  Description of Artificial Sequence: Synthetic oligonucleotide
  Antisense strand to SEQ ID NO: 737400
auuccugaggcacucgggu

SEQ ID NO: 737402 - RNA, 19 nt, Artificial Sequence
  Description of Artificial Sequence: Synthetic oligonucleotide
  Sense strand starting at position 2142 of SEQ ID NO: 586696
ccgagugccucaggaauug

SEQ ID NO: 737403 - RNA, 19 nt, Artificial Sequence
  Description of Artificial Sequence: Synthetic oligonucleotide
  Antisense strand to SEQ ID NO: 737402
caauuccugaggcacucgg

SEQ ID NO: 737404 - RNA, 19 nt, Artificial Sequence
  Description of Artificial Sequence: Synthetic oligonucleotide
  Sense strand starting at position 2173 of SEQ ID NO: 586696
acaagagugaucuggcuag

SEQ ID NO: 737405 - RNA, 19 nt, Artificial Sequence
  Description of Artificial Sequence: Synthetic oligonucleotide
  Antisense strand to SEQ ID NO: 737404
cuagccagaucacucuugu

SEQ ID NO: 737406 - RNA, 19 nt, Artificial Sequence
  Description of Artificial Sequence: Synthetic oligonucleotide
  Sense strand starting at position 2359 of SEQ ID NO: 586696
aggucuguuucccacuuua

SEQ ID NO: 737407 - RNA, 19 nt, Artificial Sequence
  Description of Artificial Sequence: Synthetic oligonucleotide
  Antisense strand to SEQ ID NO: 737406
uaaagugggaaacagaccu

SEQ ID NO: 737408 - RNA, 19 nt, Artificial Sequence
  Description of Artificial Sequence: Synthetic oligonucleotide
  Sense strand starting at position 2705 of SEQ ID NO: 586696
ugccgccagucuuuaauuu

SEQ ID NO: 737409 - RNA, 19 nt, Artificial Sequence
  Description of Artificial Sequence: Synthetic oligonucleotide
  Antisense strand to SEQ ID NO: 737408
aaauuaaagacuggcggca

SEQ ID NO: 737410 - RNA, 19 nt, Artificial Sequence
  Description of Artificial Sequence: Synthetic oligonucleotide
  Sense strand starting at position 3267 of SEQ ID NO: 586696
gcucauucucccuggagaa

SEQ ID NO: 737411 - RNA, 19 nt, Artificial Sequence
  Description of Artificial Sequence: Synthetic oligonucleotide
  Antisense strand to SEQ ID NO: 737410
uucuccagggagaaugagc

SEQ ID NO: 737412 - RNA, 19 nt, Artificial Sequence
  Description of Artificial Sequence: Synthetic oligonucleotide
  Sense strand starting at position 3268 of SEQ ID NO: 586696
cucauucucccuggagaag

SEQ ID NO: 737413 - RNA, 19 nt, Artificial Sequence
  Description of Artificial Sequence: Synthetic oligonucleotide
  Antisense strand to SEQ ID NO: 737412
cuucuccagggagaaugag

SEQ ID NO: 737414 - RNA, 19 nt, Artificial Sequence
  Description of Artificial Sequence: Synthetic oligonucleotide
  Sense strand starting at position 101 of SEQ ID NO: 586697
caggguuaauugcucaaua

SEQ ID NO: 737415 - RNA, 19 nt, Artificial Sequence
  Description of Artificial Sequence: Synthetic oligonucleotide
  Antisense strand to SEQ ID NO: 737414
uauugagcaauuaacccug

SEQ ID NO: 737416 - RNA, 19 nt, Artificial Sequence
  Description of Artificial Sequence: Synthetic oligonucleotide
  Sense strand starting at position 102 of SEQ ID NO: 586697
aggguuaauugcucaauac

SEQ ID NO: 737417 - RNA, 19 nt, Artificial Sequence
  Description of Artificial Sequence: Synthetic oligonucleotide
  Antisense strand to SEQ ID NO: 737416
guauugagcaauuaacccu

SEQ ID NO: 737418 - RNA, 19 nt, Artificial Sequence
  Description of Artificial Sequence: Synthetic oligonucleotide
  Sense strand starting at position 103 of SEQ ID NO: 586697
ggguuaauugcucaauaca

SEQ ID NO: 737419 - RNA, 19 nt, Artificial Sequence
  Description of Artificial Sequence: Synthetic oligonucleotide
  Antisense strand to SEQ ID NO: 737418
uguauugagcaauuaaccc

SEQ ID NO: 737420 - RNA, 19 nt, Artificial Sequence
  Description of Artificial Sequence: Synthetic oligonucleotide
  Sense strand starting at position 119 of SEQ ID NO: 586697
acagguuucuuauugaacu

SEQ ID NO: 737421 - RNA, 19 nt, Artificial Sequence
  Description of Artificial Sequence: Synthetic oligonucleotide
  Antisense strand to SEQ ID NO: 737420
aguucaauaagaaaccugu

SEQ ID NO: 737422 - RNA, 19 nt, Artificial Sequence
  Description of Artificial Sequence: Synthetic oligonucleotide
  Sense strand starting at position 167 of SEQ ID NO: 586697
ugcgguuacagucaaggaa

SEQ ID NO: 737423 - RNA, 19 nt, Artificial Sequence
  Description of Artificial Sequence: Synthetic oligonucleotide
  Antisense strand to SEQ ID NO: 737422
uuccuugacuguaaccgca

SEQ ID NO: 737424 - RNA, 19 nt, Artificial Sequence
  Description of Artificial Sequence: Synthetic oligonucleotide
  Sense strand starting at position 256 of SEQ ID NO: 586697
aaucucaacucggaggaau

SEQ ID NO: 737425 - RNA, 19 nt, Artificial Sequence
  Description of Artificial Sequence: Synthetic oligonucleotide
  Antisense strand to SEQ ID NO: 737424
auuccuccgaguugagauu

SEQ ID NO: 737426 - RNA, 19 nt, Artificial Sequence
  Description of Artificial Sequence: Synthetic oligonucleotide
  Sense strand starting at position 268 of SEQ ID NO: 586697
gaggaauguuuccaccaaa

SEQ ID NO: 737427 - RNA, 19 nt, Artificial Sequence
  Description of Artificial Sequence: Synthetic oligonucleotide
  Antisense strand to SEQ ID NO: 737426
uuugguggaaacauuccuc

SEQ ID NO: 737428 - RNA, 19 nt, Artificial Sequence
  Description of Artificial Sequence: Synthetic oligonucleotide
  Sense strand starting at position 328 of SEQ ID NO: 586697
aucucaucucuagggaaau

SEQ ID NO: 737429 - RNA, 19 nt, Artificial Sequence
  Description of Artificial Sequence: Synthetic oligonucleotide
  Antisense strand to SEQ ID NO: 737428
auuucccuagagaugagau

SEQ ID NO: 737430 - RNA, 19 nt, Artificial Sequence
  Description of Artificial Sequence: Synthetic oligonucleotide
  Sense strand starting at position 329 of SEQ ID NO: 586697
ucucaucucuagggaaaug

SEQ ID NO: 737431 - RNA, 19 nt, Artificial Sequence
  Description of Artificial Sequence: Synthetic oligonucleotide
  Antisense strand to SEQ ID NO: 737430
cauuucccuagagaugaga

SEQ ID NO: 737432 - RNA, 19 nt, Artificial Sequence
  Description of Artificial Sequence: Synthetic oligonucleotide
  Sense strand starting at position 657 of SEQ ID NO: 586697
gggugaaugaggcaguaau

SEQ ID NO: 737433 - RNA, 19 nt, Artificial Sequence
  Description of Artificial Sequence: Synthetic oligonucleotide
  Antisense strand to SEQ ID NO: 737432
auuacugccucauucaccc

SEQ ID NO: 737434 - RNA, 19 nt, Artificial Sequence
  Description of Artificial Sequence: Synthetic oligonucleotide
  Sense strand starting at position 668 of SEQ ID NO: 586697
gcaguaauccaaggaaauc

SEQ ID NO: 737435 - RNA, 19 nt, Artificial Sequence
  Description of Artificial Sequence: Synthetic oligonucleotide
  Antisense strand to SEQ ID NO: 737434
gauuuccuuggauuacugc

SEQ ID NO: 737436 - RNA, 19 nt, Artificial Sequence
  Description of Artificial Sequence: Synthetic oligonucleotide
  Sense strand starting at position 698 of SEQ ID NO: 586697
ccagaagucucucccuuag

SEQ ID NO: 737437 - RNA, 19 nt, Artificial Sequence
  Description of Artificial Sequence: Synthetic oligonucleotide
  Antisense strand to SEQ ID NO: 737436
cuaagggagagacuucugg

SEQ ID NO: 737438 - RNA, 19 nt, Artificial Sequence
  Description of Artificial Sequence: Synthetic oligonucleotide
  Sense strand starting at position 829 of SEQ ID NO: 586697
cucacaugucaaugcaaga

SEQ ID NO: 737439 - RNA, 19 nt, Artificial Sequence
  Description of Artificial Sequence: Synthetic oligonucleotide
  Antisense strand to SEQ ID NO: 737438
ucuugcauugacaugugag

SEQ ID NO: 737440 - RNA, 19 nt, Artificial Sequence
  Description of Artificial Sequence: Synthetic oligonucleotide
  Sense strand starting at position 1858 of SEQ ID NO: 586697
ccaccuugugguuaaagca

SEQ ID NO: 737441 - RNA, 19 nt, Artificial Sequence
  Description of Artificial Sequence: Synthetic oligonucleotide
  Antisense strand to SEQ ID NO: 737440
ugcuuuaaccacaaggugg

SEQ ID NO: 737442 - RNA, 19 nt, Artificial Sequence
  Description of Artificial Sequence: Synthetic oligonucleotide
  Sense strand starting at position 1996 of SEQ ID NO: 586697
gccgauuggugugcugaaa

SEQ ID NO: 737443 - RNA, 19 nt, Artificial Sequence
  Description of Artificial Sequence: Synthetic oligonucleotide
  Antisense strand to SEQ ID NO: 737442
uuucagcacaccaaucggc

SEQ ID NO: 737444 - RNA, 19 nt, Artificial Sequence
  Description of Artificial Sequence: Synthetic oligonucleotide
  Sense strand starting at position 2051 of SEQ ID NO: 586697
gcuggauuccggugacgua

SEQ ID NO: 737445 - RNA, 19 nt, Artificial Sequence
  Description of Artificial Sequence: Synthetic oligonucleotide
  Antisense strand to SEQ ID NO: 737444
uacgucaccggaauccagc

SEQ ID NO: 737446 - RNA, 19 nt, Artificial Sequence
  Description of Artificial Sequence: Synthetic oligonucleotide
  Sense strand starting at position 2052 of SEQ ID NO: 586697
cuggauuccggugacguaa

SEQ ID NO: 737447 - RNA, 19 nt, Artificial Sequence
  Description of Artificial Sequence: Synthetic oligonucleotide
  Antisense strand to SEQ ID NO: 737446
uuacgucaccggaauccag

SEQ ID NO: 737448 - RNA, 19 nt, Artificial Sequence
  Description of Artificial Sequence: Synthetic oligonucleotide
  Sense strand starting at position 2086 of SEQ ID NO: 586697
gaacucgagcccugaagua

SEQ ID NO: 737449 - RNA, 19 nt, Artificial Sequence
  Description of Artificial Sequence: Synthetic oligonucleotide
  Antisense strand to SEQ ID NO: 737448
uacuucagggcucgaguuc

SEQ ID NO: 737450 - RNA, 19 nt, Artificial Sequence
  Description of Artificial Sequence: Synthetic oligonucleotide
  Sense strand starting at position 2156 of SEQ ID NO: 586697
uauucuugagaugguccaa

SEQ ID NO: 737451 - RNA, 19 nt, Artificial Sequence
  Description of Artificial Sequence: Synthetic oligonucleotide
  Antisense strand to SEQ ID NO: 737450
uuggaccaucucaagaaua

SEQ ID NO: 737452 - RNA, 19 nt, Artificial Sequence
  Description of Artificial Sequence: Synthetic oligonucleotide
  Sense strand starting at position 2618 of SEQ ID NO: 586697
ggcgcuaucauugcucacu

SEQ ID NO: 737453 - RNA, 19 nt, Artificial Sequence
  Description of Artificial Sequence: Synthetic oligonucleotide
  Antisense strand to SEQ ID NO: 737452
agugagcaaugauagcgcc

SEQ ID NO: 737454 - RNA, 19 nt, Artificial Sequence
  Description of Artificial Sequence: Synthetic oligonucleotide
  Sense strand starting at position 2743 of SEQ ID NO: 586697
agacgaucucgcuauguuc

SEQ ID NO: 737455 - RNA, 19 nt, Artificial Sequence
  Description of Artificial Sequence: Synthetic oligonucleotide
  Antisense strand to SEQ ID NO: 737454
gaacauagcgagaucgucu

SEQ ID NO: 737456 - RNA, 19 nt, Artificial Sequence
  Description of Artificial Sequence: Synthetic oligonucleotide
  Sense strand starting at position 2990 of SEQ ID NO: 586697
aacccauguuguuugagua

SEQ ID NO: 737457 - RNA, 19 nt, Artificial Sequence
  Description of Artificial Sequence: Synthetic oligonucleotide
  Antisense strand to SEQ ID NO: 737456
uacucaaacaacauggguu

SEQ ID NO: 737458 - RNA, 19 nt, Artificial Sequence
  Description of Artificial Sequence: Synthetic oligonucleotide
  Sense strand starting at position 2991 of SEQ ID NO: 586697
acccauguuguuugaguaa

SEQ ID NO: 737459 - RNA, 19 nt, Artificial Sequence
  Description of Artificial Sequence: Synthetic oligonucleotide
  Antisense strand to SEQ ID NO: 737458
uuacucaaacaacaugggu

SEQ ID NO: 737460 - RNA, 19 nt, Artificial Sequence
  Description of Artificial Sequence: Synthetic oligonucleotide
  Sense strand starting at position 2994 of SEQ ID NO: 586697
cauguuguuugaguaauua

SEQ ID NO: 737461 - RNA, 19 nt, Artificial Sequence
  Description of Artificial Sequence: Synthetic oligonucleotide
  Antisense strand to SEQ ID NO: 737460
uaauuacucaaacaacaug

SEQ ID NO: 737462 - RNA, 19 nt, Artificial Sequence
  Description of Artificial Sequence: Synthetic oligonucleotide
  Sense strand starting at position 3047 of SEQ ID NO: 586697
cuuuaauugcaucgaaucu

SEQ ID NO: 737463 - RNA, 19 nt, Artificial Sequence
  Description of Artificial Sequence: Synthetic oligonucleotide
  Antisense strand to SEQ ID NO: 737462
agauucgaugcaauuaaag

SEQ ID NO: 737464 - RNA, 19 nt, Artificial Sequence
  Description of Artificial Sequence: Synthetic oligonucleotide
  Sense strand starting at position 3090 of SEQ ID NO: 586697
aggugaagaaucugggucu

SEQ ID NO: 737465 - RNA, 19 nt, Artificial Sequence
  Description of Artificial Sequence: Synthetic oligonucleotide
  Antisense strand to SEQ ID NO: 737464
agacccagauucuucaccu

SEQ ID NO: 737466 - RNA, 19 nt, Artificial Sequence
  Description of Artificial Sequence: Synthetic oligonucleotide
  Sense strand starting at position 3093 of SEQ ID NO: 586697
ugaagaaucugggucucug

SEQ ID NO: 737467 - RNA, 19 nt, Artificial Sequence
  Description of Artificial Sequence: Synthetic oligonucleotide
  Antisense strand to SEQ ID NO: 737466
cagagacccagauucuuca

SEQ ID NO: 737468 - RNA, 19 nt, Artificial Sequence
  Description of Artificial Sequence: Synthetic oligonucleotide
  Sense strand starting at position 3119 of SEQ ID NO: 586697
ccaguuagcaauggagcaa

SEQ ID NO: 737469 - RNA, 19 nt, Artificial Sequence
  Description of Artificial Sequence: Synthetic oligonucleotide
  Antisense strand to SEQ ID NO: 737468
uugcuccauugcuaacugg

SEQ ID NO: 737470 - RNA, 19 nt, Artificial Sequence
  Description of Artificial Sequence: Synthetic oligonucleotide
  Sense strand starting at position 3138 of SEQ ID NO: 586697
agacaaaguugaucuuauc

SEQ ID NO: 737471 - RNA, 19 nt, Artificial Sequence
  Description of Artificial Sequence: Synthetic oligonucleotide
  Antisense strand to SEQ ID NO: 737470
gauaagaucaacuuugucu

SEQ ID NO: 737472 - RNA, 19 nt, Artificial Sequence
  Description of Artificial Sequence: Synthetic oligonucleotide
  Sense strand starting at position 3144 of SEQ ID NO: 586697
aguugaucuuaucugaaag

SEQ ID NO: 737473 - RNA, 19 nt, Artificial Sequence
  Description of Artificial Sequence: Synthetic oligonucleotide
  Antisense strand to SEQ ID NO: 737472
cuuucagauaagaucaacu

SEQ ID NO: 737474 - RNA, 19 nt, Artificial Sequence
  Description of Artificial Sequence: Synthetic oligonucleotide
  Sense strand starting at position 3146 of SEQ ID NO: 586697
uugaucuuaucugaaaguc

SEQ ID NO: 737475 - RNA, 19 nt, Artificial Sequence
  Description of Artificial Sequence: Synthetic oligonucleotide
  Antisense strand to SEQ ID NO: 737474
gacuuucagauaagaucaa

SEQ ID NO: 737476 - RNA, 19 nt, Artificial Sequence
  Description of Artificial Sequence: Synthetic oligonucleotide
  Sense strand starting at position 3154 of SEQ ID NO: 586697
aucugaaagucuccucuga

SEQ ID NO: 737477 - RNA, 19 nt, Artificial Sequence
  Description of Artificial Sequence: Synthetic oligonucleotide
  Antisense strand to SEQ ID NO: 737476
ucagaggagacuuucagau

SEQ ID NO: 737478 - RNA, 19 nt, Artificial Sequence
  Description of Artificial Sequence: Synthetic oligonucleotide
  Sense strand starting at position 3156 of SEQ ID NO: 586697
cugaaagucuccucugaac

SEQ ID NO: 737479 - RNA, 19 nt, Artificial Sequence
  Description of Artificial Sequence: Synthetic oligonucleotide
  Antisense strand to SEQ ID NO: 737478
guucagaggagacuuucag

SEQ ID NO: 737480 - RNA, 19 nt, Artificial Sequence
  Description of Artificial Sequence: Synthetic oligonucleotide
  Sense strand starting at position 3170 of SEQ ID NO: 586697
ugaacaucuuguguagaau

SEQ ID NO: 737481 - RNA, 19 nt, Artificial Sequence
  Description of Artificial Sequence: Synthetic oligonucleotide
  Antisense strand to SEQ ID NO: 737480
auucuacacaagauguuca

SEQ ID NO: 737482 - RNA, 19 nt, Artificial Sequence
  Description of Artificial Sequence: Synthetic oligonucleotide
  Sense strand starting at position 3171 of SEQ ID NO: 586697
gaacaucuuguguagaauc

SEQ ID NO: 737483 - RNA, 19 nt, Artificial Sequence
  Description of Artificial Sequence: Synthetic oligonucleotide
  Antisense strand to SEQ ID NO: 737482
gauucuacacaagauguuc

SEQ ID NO: 737484 - RNA, 19 nt, Artificial Sequence
  Description of Artificial Sequence: Synthetic oligonucleotide
  Sense strand starting at position 3317 of SEQ ID NO: 586697
cuugguugcgcucaaccaa

SEQ ID NO: 737485 - RNA, 19 nt, Artificial Sequence
  Description of Artificial Sequence: Synthetic oligonucleotide
  Antisense strand to SEQ ID NO: 737484
uugguugagcgcaaccaag

SEQ ID NO: 737486 - RNA, 19 nt, Artificial Sequence
  Description of Artificial Sequence: Synthetic oligonucleotide
  Sense strand starting at position 3771 of SEQ ID NO: 586697
agugauacaugaccuccua

SEQ ID NO: 737487 - RNA, 19 nt, Artificial Sequence
  Description of Artificial Sequence: Synthetic oligonucleotide
  Antisense strand to SEQ ID NO: 737486
uaggaggucauguaucacu

SEQ ID NO: 737488 - RNA, 19 nt, Artificial Sequence
  Description of Artificial Sequence: Synthetic oligonucleotide
  Sense strand starting at position 3876 of SEQ ID NO: 586697
gacuuaugacagugccuac

SEQ ID NO: 737489 - RNA, 19 nt, Artificial Sequence
  Description of Artificial Sequence: Synthetic oligonucleotide
  Antisense strand to SEQ ID NO: 737488
guaggcacugucauaaguc

SEQ ID NO: 737490 - RNA, 19 nt, Artificial Sequence
  Description of Artificial Sequence: Synthetic oligonucleotide
  Sense strand starting at position 3974 of SEQ ID NO: 586697
agauaugucuaugggagag

SEQ ID NO: 737491 - RNA, 19 nt, Artificial Sequence
  Description of Artificial Sequence: Synthetic oligonucleotide
  Antisense strand to SEQ ID NO: 737490
cucucccauagacauaucu

SEQ ID NO: 737492 - RNA, 19 nt, Artificial Sequence
  Description of Artificial Sequence: Synthetic oligonucleotide
  Sense strand starting at position 3976 of SEQ ID NO: 586697
auaugucuaugggagagaa

SEQ ID NO: 737493 - RNA, 19 nt, Artificial Sequence
  Description of Artificial Sequence: Synthetic oligonucleotide
  Antisense strand to SEQ ID NO: 737492
uucucucccauagacauau

SEQ ID NO: 737494 - RNA, 19 nt, Artificial Sequence
  Description of Artificial Sequence: Synthetic oligonucleotide
  Sense strand starting at position 279 of SEQ ID NO: 586698
cugcaaguguccucuccuu

SEQ ID NO: 737495 - RNA, 19 nt, Artificial Sequence
  Description of Artificial Sequence: Synthetic oligonucleotide
  Antisense strand to SEQ ID NO: 737494
aaggagaggacacuugcag

SEQ ID NO: 737496 - RNA, 19 nt, Artificial Sequence
  Description of Artificial Sequence: Synthetic oligonucleotide
  Sense strand starting at position 429 of SEQ ID NO: 586698
caggguuaauugcucaaua

SEQ ID NO: 737497 - RNA, 19 nt, Artificial Sequence
  Description of Artificial Sequence: Synthetic oligonucleotide
  Antisense strand to SEQ ID NO: 737496
uauugagcaauuaacccug

SEQ ID NO: 737498 - RNA, 19 nt, Artificial Sequence
  Description of Artificial Sequence: Synthetic oligonucleotide
  Sense strand starting at position 430 of SEQ ID NO: 586698
aggguuaauugcucaauac

SEQ ID NO: 737499 - RNA, 19 nt, Artificial Sequence
  Description of Artificial Sequence: Synthetic oligonucleotide
  Antisense strand to SEQ ID NO: 737498
guauugagcaauuaacccu

SEQ ID NO: 737500 - RNA, 19 nt, Artificial Sequence
  Description of Artificial Sequence: Synthetic oligonucleotide
  Sense strand starting at position 431 of SEQ ID NO: 586698
ggguuaauugcucaauaca

SEQ ID NO: 737501 - RNA, 19 nt, Artificial Sequence
  Description of Artificial Sequence: Synthetic oligonucleotide
  Antisense strand to SEQ ID NO: 737500
uguauugagcaauuaaccc

SEQ ID NO: 737502 - RNA, 19 nt, Artificial Sequence
  Description of Artificial Sequence: Synthetic oligonucleotide
  Sense strand starting at position 447 of SEQ ID NO: 586698
acagguuucuuauugaacu

SEQ ID NO: 737503 - RNA, 19 nt, Artificial Sequence
  Description of Artificial Sequence: Synthetic oligonucleotide
  Antisense strand to SEQ ID NO: 737502
aguucaauaagaaaccugu

SEQ ID NO: 737504 - RNA, 19 nt, Artificial Sequence
  Description of Artificial Sequence: Synthetic oligonucleotide
  Sense strand starting at position 495 of SEQ ID NO: 586698
ugcgguuacagucaaggaa

SEQ ID NO: 737505 - RNA, 19 nt, Artificial Sequence
  Description of Artificial Sequence: Synthetic oligonucleotide
  Antisense strand to SEQ ID NO: 737504
uuccuugacuguaaccgca

SEQ ID NO: 737506 - RNA, 19 nt, Artificial Sequence
  Description of Artificial Sequence: Synthetic oligonucleotide
  Sense strand starting at position 584 of SEQ ID NO: 586698
aaucucaacucggaggaau

SEQ ID NO: 737507 - RNA, 19 nt, Artificial Sequence
  Description of Artificial Sequence: Synthetic oligonucleotide
  Antisense strand to SEQ ID NO: 737506
auuccuccgaguugagauu

SEQ ID NO: 737508 - RNA, 19 nt, Artificial Sequence
  Description of Artificial Sequence: Synthetic oligonucleotide
  Sense strand starting at position 596 of SEQ ID NO: 586698
gaggaauguuuccaccaaa

SEQ ID NO: 737509 - RNA, 19 nt, Artificial Sequence
  Description of Artificial Sequence: Synthetic oligonucleotide
  Antisense strand to SEQ ID NO: 737508
uuugguggaaacauuccuc

SEQ ID NO: 737510 - RNA, 19 nt, Artificial Sequence
  Description of Artificial Sequence: Synthetic oligonucleotide
  Sense strand starting at position 656 of SEQ ID NO: 586698
aucucaucucuagggaaau

SEQ ID NO: 737511 - RNA, 19 nt, Artificial Sequence
  Description of Artificial Sequence: Synthetic oligonucleotide
  Antisense strand to SEQ ID NO: 737510
auuucccuagagaugagau

SEQ ID NO: 737512 - RNA, 19 nt, Artificial Sequence
  Description of Artificial Sequence: Synthetic oligonucleotide
  Sense strand starting at position 657 of SEQ ID NO: 586698
ucucaucucuagggaaaug

SEQ ID NO: 737513 - RNA, 19 nt, Artificial Sequence
  Description of Artificial Sequence: Synthetic oligonucleotide
  Antisense strand to SEQ ID NO: 737512
cauuucccuagagaugaga

SEQ ID NO: 737514 - RNA, 19 nt, Artificial Sequence
  Description of Artificial Sequence: Synthetic oligonucleotide
  Sense strand starting at position 985 of SEQ ID NO: 586698
gggugaaugaggcaguaau

SEQ ID NO: 737515 - RNA, 19 nt, Artificial Sequence
  Description of Artificial Sequence: Synthetic oligonucleotide
  Antisense strand to SEQ ID NO: 737514
auuacugccucauucaccc

SEQ ID NO: 737516 - RNA, 19 nt, Artificial Sequence
  Description of Artificial Sequence: Synthetic oligonucleotide
  Sense strand starting at position 996 of SEQ ID NO: 586698
gcaguaauccaaggaaauc

SEQ ID NO: 737517 - RNA, 19 nt, Artificial Sequence
  Description of Artificial Sequence: Synthetic oligonucleotide
  Antisense strand to SEQ ID NO: 737516
gauuuccuuggauuacugc

SEQ ID NO: 737518 - RNA, 19 nt, Artificial Sequence
  Description of Artificial Sequence: Synthetic oligonucleotide
  Sense strand starting at position 1026 of SEQ ID NO: 586698
ccagaagucucucccuuag

SEQ ID NO: 737519 - RNA, 19 nt, Artificial Sequence
  Description of Artificial Sequence: Synthetic oligonucleotide
  Antisense strand to SEQ ID NO: 737518
cuaagggagagacuucugg

SEQ ID NO: 737520 - RNA, 19 nt, Artificial Sequence
  Description of Artificial Sequence: Synthetic oligonucleotide
  Sense strand starting at position 1157 of SEQ ID NO: 586698
cucacaugucaaugcaaga

SEQ ID NO: 737521 - RNA, 19 nt, Artificial Sequence
  Description of Artificial Sequence: Synthetic oligonucleotide
  Antisense strand to SEQ ID NO: 737520
ucuugcauugacaugugag

SEQ ID NO: 737522 - RNA, 19 nt, Artificial Sequence
  Description of Artificial Sequence: Synthetic oligonucleotide
  Sense strand starting at position 1318 of SEQ ID NO: 586698
acaugacuuucccagucca

SEQ ID NO: 737523 - RNA, 19 nt, Artificial Sequence
  Description of Artificial Sequence: Synthetic oligonucleotide
  Antisense strand to SEQ ID NO: 737522
uggacugggaaagucaugu

SEQ ID NO: 737524 - RNA, 19 nt, Artificial Sequence
  Description of Artificial Sequence: Synthetic oligonucleotide
  Sense strand starting at position 2186 of SEQ ID NO: 586698
ccaccuugugguuaaagca

SEQ ID NO: 737525 - RNA, 19 nt, Artificial Sequence
  Description of Artificial Sequence: Synthetic oligonucleotide
  Antisense strand to SEQ ID NO: 737524
ugcuuuaaccacaaggugg

SEQ ID NO: 737526 - RNA, 19 nt, Artificial Sequence
  Description of Artificial Sequence: Synthetic oligonucleotide
  Sense strand starting at position 2323 of SEQ ID NO: 586698
cgccgauuggugugcugaa

SEQ ID NO: 737527 - RNA, 19 nt, Artificial Sequence
  Description of Artificial Sequence: Synthetic oligonucleotide
  Antisense strand to SEQ ID NO: 737526
uucagcacaccaaucggcg

SEQ ID NO: 737528 - RNA, 19 nt, Artificial Sequence
  Description of Artificial Sequence: Synthetic oligonucleotide
  Sense strand starting at position 2324 of SEQ ID NO: 586698
gccgauuggugugcugaaa

SEQ ID NO: 737529 - RNA, 19 nt, Artificial Sequence
  Description of Artificial Sequence: Synthetic oligonucleotide
  Antisense strand to SEQ ID NO: 737528
uuucagcacaccaaucggc

SEQ ID NO: 737530 - RNA, 19 nt, Artificial Sequence
  Description of Artificial Sequence: Synthetic oligonucleotide
  Sense strand starting at position 2379 of SEQ ID NO: 586698
gcuggauuccggugacgua

SEQ ID NO: 737531 - RNA, 19 nt, Artificial Sequence
  Description of Artificial Sequence: Synthetic oligonucleotide
  Antisense strand to SEQ ID NO: 737530
uacgucaccggaauccagc

SEQ ID NO: 737532 - RNA, 19 nt, Artificial Sequence
  Description of Artificial Sequence: Synthetic oligonucleotide
  Sense strand starting at position 2380 of SEQ ID NO: 586698
cuggauuccggugacguaa

SEQ ID NO: 737533 - RNA, 19 nt, Artificial Sequence
  Description of Artificial Sequence: Synthetic oligonucleotide
  Antisense strand to SEQ ID NO: 737532
uuacgucaccggaauccag

SEQ ID NO: 737534 - RNA, 19 nt, Artificial Sequence
  Description of Artificial Sequence: Synthetic oligonucleotide
  Sense strand starting at position 2414 of SEQ ID NO: 586698
gaacucgagcccugaagua

SEQ ID NO: 737535 - RNA, 19 nt, Artificial Sequence
  Description of Artificial Sequence: Synthetic oligonucleotide
  Antisense strand to SEQ ID NO: 737534
uacuucagggcucgaguuc

SEQ ID NO: 737536 - RNA, 19 nt, Artificial Sequence
  Description of Artificial Sequence: Synthetic oligonucleotide
  Sense strand starting at position 2481 of SEQ ID NO: 586698
cccuauucuugagaugguc

SEQ ID NO: 737537 - RNA, 19 nt, Artificial Sequence
  Description of Artificial Sequence: Synthetic oligonucleotide
  Antisense strand to SEQ ID NO: 737536
gaccaucucaagaauaggg

SEQ ID NO: 737538 - RNA, 19 nt, Artificial Sequence
  Description of Artificial Sequence: Synthetic oligonucleotide
  Sense strand starting at position 2484 of SEQ ID NO: 586698
uauucuugagaugguccaa

SEQ ID NO: 737539 - RNA, 19 nt, Artificial Sequence
  Description of Artificial Sequence: Synthetic oligonucleotide
  Antisense strand to SEQ ID NO: 737538
uuggaccaucucaagaaua

SEQ ID NO: 737540 - RNA, 19 nt, Artificial Sequence
  Description of Artificial Sequence: Synthetic oligonucleotide
  Sense strand starting at position 2946 of SEQ ID NO: 586698
ggcgcuaucauugcucacu

SEQ ID NO: 737541 - RNA, 19 nt, Artificial Sequence
  Description of Artificial Sequence: Synthetic oligonucleotide
  Antisense strand to SEQ ID NO: 737540
agugagcaaugauagcgcc

SEQ ID NO: 737542 - RNA, 19 nt, Artificial Sequence
  Description of Artificial Sequence: Synthetic oligonucleotide
  Sense strand starting at position 3071 of SEQ ID NO: 586698
agacgaucucgcuauguuc

SEQ ID NO: 737543 - RNA, 19 nt, Artificial Sequence
  Description of Artificial Sequence: Synthetic oligonucleotide
  Antisense strand to SEQ ID NO: 737542
gaacauagcgagaucgucu

SEQ ID NO: 737544 - RNA, 19 nt, Artificial Sequence
  Description of Artificial Sequence: Synthetic oligonucleotide
  Sense strand starting at position 3318 of SEQ ID NO: 586698
aacccauguuguuugagua

SEQ ID NO: 737545 - RNA, 19 nt, Artificial Sequence
  Description of Artificial Sequence: Synthetic oligonucleotide
  Antisense strand to SEQ ID NO: 737544
uacucaaacaacauggguu

SEQ ID NO: 737546 - RNA, 19 nt, Artificial Sequence
  Description of Artificial Sequence: Synthetic oligonucleotide
  Sense strand starting at position 3319 of SEQ ID NO: 586698
acccauguuguuugaguaa

SEQ ID NO: 737547 - RNA, 19 nt, Artificial Sequence
  Description of Artificial Sequence: Synthetic oligonucleotide
  Antisense strand to SEQ ID NO: 737546
uuacucaaacaacaugggu

SEQ ID NO: 737548 - RNA, 19 nt, Artificial Sequence
  Description of Artificial Sequence: Synthetic oligonucleotide
  Sense strand starting at position 3322 of SEQ ID NO: 586698
cauguuguuugaguaauua

SEQ ID NO: 737549 - RNA, 19 nt, Artificial Sequence
  Description of Artificial Sequence: Synthetic oligonucleotide
  Antisense strand to SEQ ID NO: 737548
uaauuacucaaacaacaug

SEQ ID NO: 737550 - RNA, 19 nt, Artificial Sequence
  Description of Artificial Sequence: Synthetic oligonucleotide
  Sense strand starting at position 3375 of SEQ ID NO: 586698
cuuuaauugcaucgaaucu

SEQ ID NO: 737551 - RNA, 19 nt, Artificial Sequence
  Description of Artificial Sequence: Synthetic oligonucleotide
  Antisense strand to SEQ ID NO: 737550
agauucgaugcaauuaaag

SEQ ID NO: 737552 - RNA, 19 nt, Artificial Sequence
  Description of Artificial Sequence: Synthetic oligonucleotide
  Sense strand starting at position 3418 of SEQ ID NO: 586698
aggugaagaaucugggucu

SEQ ID NO: 737553 - RNA, 19 nt, Artificial Sequence
  Description of Artificial Sequence: Synthetic oligonucleotide
  Antisense strand to SEQ ID NO: 737552
agacccagauucuucaccu

SEQ ID NO: 737554 - RNA, 19 nt, Artificial Sequence
  Description of Artificial Sequence: Synthetic oligonucleotide
  Sense strand starting at position 3421 of SEQ ID NO: 586698
ugaagaaucugggucucug

SEQ ID NO: 737555 - RNA, 19 nt, Artificial Sequence
  Description of Artificial Sequence: Synthetic oligonucleotide
  Antisense strand to SEQ ID NO: 737554
cagagacccagauucuuca

SEQ ID NO: 737556 - RNA, 19 nt, Artificial Sequence
  Description of Artificial Sequence: Synthetic oligonucleotide
  Sense strand starting at position 3447 of SEQ ID NO: 586698
ccaguuagcaauggagcaa

SEQ ID NO: 737557 - RNA, 19 nt, Artificial Sequence
  Description of Artificial Sequence: Synthetic oligonucleotide
  Antisense strand to SEQ ID NO: 737556
uugcuccauugcuaacugg

SEQ ID NO: 737558 - RNA, 19 nt, Artificial Sequence
  Description of Artificial Sequence: Synthetic oligonucleotide
  Sense strand starting at position 3466 of SEQ ID NO: 586698
agacaaaguugaucuuauc

SEQ ID NO: 737559 - RNA, 19 nt, Artificial Sequence
  Description of Artificial Sequence: Synthetic oligonucleotide
  Antisense strand to SEQ ID NO: 737558
gauaagaucaacuuugucu

SEQ ID NO: 737560 - RNA, 19 nt, Artificial Sequence
  Description of Artificial Sequence: Synthetic oligonucleotide
  Sense strand starting at position 3472 of SEQ ID NO: 586698
aguugaucuuaucugaaag

SEQ ID NO: 737561 - RNA, 19 nt, Artificial Sequence
  Description of Artificial Sequence: Synthetic oligonucleotide
  Antisense strand to SEQ ID NO: 737560
cuuucagauaagaucaacu

SEQ ID NO: 737562 - RNA, 19 nt, Artificial Sequence
  Description of Artificial Sequence: Synthetic oligonucleotide
  Sense strand starting at position 3474 of SEQ ID NO: 586698
uugaucuuaucugaaaguc

SEQ ID NO: 737563 - RNA, 19 nt, Artificial Sequence
  Description of Artificial Sequence: Synthetic oligonucleotide
  Antisense strand to SEQ ID NO: 737562
gacuuucagauaagaucaa

SEQ ID NO: 737564 - RNA, 19 nt, Artificial Sequence
  Description of Artificial Sequence: Synthetic oligonucleotide
  Sense strand starting at position 3482 of SEQ ID NO: 586698
aucugaaagucuccucuga

SEQ ID NO: 737565 - RNA, 19 nt, Artificial Sequence
  Description of Artificial Sequence: Synthetic oligonucleotide
  Antisense strand to SEQ ID NO: 737564
ucagaggagacuuucagau

SEQ ID NO: 737566 - RNA, 19 nt, Artificial Sequence
  Description of Artificial Sequence: Synthetic oligonucleotide
  Sense strand starting at position 3484 of SEQ ID NO: 586698
cugaaagucuccucugaac

SEQ ID NO: 737567 - RNA, 19 nt, Artificial Sequence
  Description of Artificial Sequence: Synthetic oligonucleotide
  Antisense strand to SEQ ID NO: 737566
guucagaggagacuuucag

SEQ ID NO: 737568 - RNA, 19 nt, Artificial Sequence
  Description of Artificial Sequence: Synthetic oligonucleotide
  Sense strand starting at position 3498 of SEQ ID NO: 586698
ugaacaucuuguguagaau

SEQ ID NO: 737569 - RNA, 19 nt, Artificial Sequence
  Description of Artificial Sequence: Synthetic oligonucleotide
  Antisense strand to SEQ ID NO: 737568
auucuacacaagauguuca

SEQ ID NO: 737570 - RNA, 19 nt, Artificial Sequence
  Description of Artificial Sequence: Synthetic oligonucleotide
  Sense strand starting at position 3499 of SEQ ID NO: 586698
gaacaucuuguguagaauc

SEQ ID NO: 737571 - RNA, 19 nt, Artificial Sequence
  Description of Artificial Sequence: Synthetic oligonucleotide
  Antisense strand to SEQ ID NO: 737570
gauucuacacaagauguuc

SEQ ID NO: 737572 - RNA, 19 nt, Artificial Sequence
  Description of Artificial Sequence: Synthetic oligonucleotide
  Sense strand starting at position 3645 of SEQ ID NO: 586698
cuugguugcgcucaaccaa

SEQ ID NO: 737573 - RNA, 19 nt, Artificial Sequence
  Description of Artificial Sequence: Synthetic oligonucleotide
  Antisense strand to SEQ ID NO: 737572
uugguugagcgcaaccaag

SEQ ID NO: 737574 - RNA, 19 nt, Artificial Sequence
  Description of Artificial Sequence: Synthetic oligonucleotide
  Sense strand starting at position 340 of SEQ ID NO: 586699
cugcaaguguccucuccuu

SEQ ID NO: 737575 - RNA, 19 nt, Artificial Sequence
  Description of Artificial Sequence: Synthetic oligonucleotide
  Antisense strand to SEQ ID NO: 737574
aaggagaggacacuugcag

SEQ ID NO: 737576 - RNA, 19 nt, Artificial Sequence
  Description of Artificial Sequence: Synthetic oligonucleotide
  Sense strand starting at position 490 of SEQ ID NO: 586699
caggguuaauugcucaaua

SEQ ID NO: 737577 - RNA, 19 nt, Artificial Sequence
  Description of Artificial Sequence: Synthetic oligonucleotide
  Antisense strand to SEQ ID NO: 737576
uauugagcaauuaacccug

SEQ ID NO: 737578 - RNA, 19 nt, Artificial Sequence
  Description of Artificial Sequence: Synthetic oligonucleotide
  Sense strand starting at position 491 of SEQ ID NO: 586699
aggguuaauugcucaauac

SEQ ID NO: 737579 - RNA, 19 nt, Artificial Sequence
  Description of Artificial Sequence: Synthetic oligonucleotide
  Antisense strand to SEQ ID NO: 737578
guauugagcaauuaacccu

SEQ ID NO: 737580 - RNA, 19 nt, Artificial Sequence
  Description of Artificial Sequence: Synthetic oligonucleotide
  Sense strand starting at position 492 of SEQ ID NO: 586699
ggguuaauugcucaauaca

SEQ ID NO: 737581 - RNA, 19 nt, Artificial Sequence
  Description of Artificial Sequence: Synthetic oligonucleotide
  Antisense strand to SEQ ID NO: 737580
uguauugagcaauuaaccc

SEQ ID NO: 737582 - RNA, 19 nt, Artificial Sequence
  Description of Artificial Sequence: Synthetic oligonucleotide
  Sense strand starting at position 508 of SEQ ID NO: 586699
acagguuucuuauugaacu

SEQ ID NO: 737583 - RNA, 19 nt, Artificial Sequence
  Description of Artificial Sequence: Synthetic oligonucleotide
  Antisense strand to SEQ ID NO: 737582
aguucaauaagaaaccugu

SEQ ID NO: 737584 - RNA, 19 nt, Artificial Sequence
  Description of Artificial Sequence: Synthetic oligonucleotide
  Sense strand starting at position 556 of SEQ ID NO: 586699
ugcgguuacagucaaggaa

SEQ ID NO: 737585 - RNA, 19 nt, Artificial Sequence
  Description of Artificial Sequence: Synthetic oligonucleotide
  Antisense strand to SEQ ID NO: 737584
uuccuugacuguaaccgca

SEQ ID NO: 737586 - RNA, 19 nt, Artificial Sequence
  Description of Artificial Sequence: Synthetic oligonucleotide
  Sense strand starting at position 645 of SEQ ID NO: 586699
aaucucaacucggaggaau

SEQ ID NO: 737587 - RNA, 19 nt, Artificial Sequence
  Description of Artificial Sequence: Synthetic oligonucleotide
  Antisense strand to SEQ ID NO: 737586
auuccuccgaguugagauu

SEQ ID NO: 737588 - RNA, 19 nt, Artificial Sequence
  Description of Artificial Sequence: Synthetic oligonucleotide
  Sense strand starting at position 657 of SEQ ID NO: 586699
gaggaauguuuccaccaaa

SEQ ID NO: 737589 - RNA, 19 nt, Artificial Sequence
  Description of Artificial Sequence: Synthetic oligonucleotide
  Antisense strand to SEQ ID NO: 737588
uuugguggaaacauuccuc

SEQ ID NO: 737590 - RNA, 19 nt, Artificial Sequence
  Description of Artificial Sequence: Synthetic oligonucleotide
  Sense strand starting at position 717 of SEQ ID NO: 586699
aucucaucucuagggaaau

SEQ ID NO: 737591 - RNA, 19 nt, Artificial Sequence
  Description of Artificial Sequence: Synthetic oligonucleotide
  Antisense strand to SEQ ID NO: 737590
auuucccuagagaugagau

SEQ ID NO: 737592 - RNA, 19 nt, Artificial Sequence
  Description of Artificial Sequence: Synthetic oligonucleotide
  Sense strand starting at position 718 of SEQ ID NO: 586699
ucucaucucuagggaaaug

SEQ ID NO: 737593 - RNA, 19 nt, Artificial Sequence
  Description of Artificial Sequence: Synthetic oligonucleotide
  Antisense strand to SEQ ID NO: 737592
cauuucccuagagaugaga

SEQ ID NO: 737594 - RNA, 19 nt, Artificial Sequence
  Description of Artificial Sequence: Synthetic oligonucleotide
  Sense strand starting at position 1046 of SEQ ID NO: 586699
gggugaaugaggcaguaau

SEQ ID NO: 737595 - RNA, 19 nt, Artificial Sequence
  Description of Artificial Sequence: Synthetic oligonucleotide
  Antisense strand to SEQ ID NO: 737594
auuacugccucauucaccc

SEQ ID NO: 737596 - RNA, 19 nt, Artificial Sequence
  Description of Artificial Sequence: Synthetic oligonucleotide
  Sense strand starting at position 1057 of SEQ ID NO: 586699
gcaguaauccaaggaaauc

SEQ ID NO: 737597 - RNA, 19 nt, Artificial Sequence
  Description of Artificial Sequence: Synthetic oligonucleotide
  Antisense strand to SEQ ID NO: 737596
gauuuccuuggauuacugc

SEQ ID NO: 737598 - RNA, 19 nt, Artificial Sequence
  Description of Artificial Sequence: Synthetic oligonucleotide
  Sense strand starting at position 1087 of SEQ ID NO: 586699
ccagaagucucucccuuag

SEQ ID NO: 737599 - RNA, 19 nt, Artificial Sequence
  Description of Artificial Sequence: Synthetic oligonucleotide
  Antisense strand to SEQ ID NO: 737598
cuaagggagagacuucugg

SEQ ID NO: 737600 - RNA, 19 nt, Artificial Sequence
  Description of Artificial Sequence: Synthetic oligonucleotide
  Sense strand starting at position 1218 of SEQ ID NO: 586699
cucacaugucaaugcaaga

SEQ ID NO: 737601 - RNA, 19 nt, Artificial Sequence
  Description of Artificial Sequence: Synthetic oligonucleotide
  Antisense strand to SEQ ID NO: 737600
ucuugcauugacaugugag

SEQ ID NO: 737602 - RNA, 19 nt, Artificial Sequence
  Description of Artificial Sequence: Synthetic oligonucleotide
  Sense strand starting at position 1379 of SEQ ID NO: 586699
acaugacuuucccagucca

SEQ ID NO: 737603 - RNA, 19 nt, Artificial Sequence
  Description of Artificial Sequence: Synthetic oligonucleotide
  Antisense strand to SEQ ID NO: 737602
uggacugggaaagucaugu

SEQ ID NO: 737604 - RNA, 19 nt, Artificial Sequence
  Description of Artificial Sequence: Synthetic oligonucleotide
  Sense strand starting at position 2247 of SEQ ID NO: 586699
ccaccuugugguuaaagca

SEQ ID NO: 737605 - RNA, 19 nt, Artificial Sequence
  Description of Artificial Sequence: Synthetic oligonucleotide
  Antisense strand to SEQ ID NO: 737604
ugcuuuaaccacaaggugg

SEQ ID NO: 737606 - RNA, 19 nt, Artificial Sequence
  Description of Artificial Sequence: Synthetic oligonucleotide
  Sense strand starting at position 2384 of SEQ ID NO: 586699
cgccgauuggugugcugaa

SEQ ID NO: 737607 - RNA, 19 nt, Artificial Sequence
  Description of Artificial Sequence: Synthetic oligonucleotide
  Antisense strand to SEQ ID NO: 737606
uucagcacaccaaucggcg

SEQ ID NO: 737608 - RNA, 19 nt, Artificial Sequence
  Description of Artificial Sequence: Synthetic oligonucleotide
  Sense strand starting at position 2385 of SEQ ID NO: 586699
gccgauuggugugcugaaa

SEQ ID NO: 737609 - RNA, 19 nt, Artificial Sequence
  Description of Artificial Sequence: Synthetic oligonucleotide
  Antisense strand to SEQ ID NO: 737608
uuucagcacaccaaucggc

SEQ ID NO: 737610 - RNA, 19 nt, Artificial Sequence
  Description of Artificial Sequence: Synthetic oligonucleotide
  Sense strand starting at position 2440 of SEQ ID NO: 586699
gcuggauuccggugacgua

SEQ ID NO: 737611 - RNA, 19 nt, Artificial Sequence
  Description of Artificial Sequence: Synthetic oligonucleotide
  Antisense strand to SEQ ID NO: 737610
uacgucaccggaauccagc

SEQ ID NO: 737612 - RNA, 19 nt, Artificial Sequence
  Description of Artificial Sequence: Synthetic oligonucleotide
  Sense strand starting at position 2441 of SEQ ID NO: 586699
cuggauuccggugacguaa

SEQ ID NO: 737613 - RNA, 19 nt, Artificial Sequence
  Description of Artificial Sequence: Synthetic oligonucleotide
  Antisense strand to SEQ ID NO: 737612
uuacgucaccggaauccag

SEQ ID NO: 737614 - RNA, 19 nt, Artificial Sequence
  Description of Artificial Sequence: Synthetic oligonucleotide
  Sense strand starting at position 2475 of SEQ ID NO: 586699
gaacucgagcccugaagua

SEQ ID NO: 737615 - RNA, 19 nt, Artificial Sequence
  Description of Artificial Sequence: Synthetic oligonucleotide
  Antisense strand to SEQ ID NO: 737614
uacuucagggcucgaguuc

SEQ ID NO: 737616 - RNA, 19 nt, Artificial Sequence
  Description of Artificial Sequence: Synthetic oligonucleotide
  Sense strand starting at position 2542 of SEQ ID NO: 586699
cccuauucuugagaugguc

SEQ ID NO: 737617 - RNA, 19 nt, Artificial Sequence
  Description of Artificial Sequence: Synthetic oligonucleotide
  Antisense strand to SEQ ID NO: 737616
gaccaucucaagaauaggg

SEQ ID NO: 737618 - RNA, 19 nt, Artificial Sequence
  Description of Artificial Sequence: Synthetic oligonucleotide
  Sense strand starting at position 2545 of SEQ ID NO: 586699
uauucuugagaugguccaa

SEQ ID NO: 737619 - RNA, 19 nt, Artificial Sequence
  Description of Artificial Sequence: Synthetic oligonucleotide
  Antisense strand to SEQ ID NO: 737618
uuggaccaucucaagaaua

SEQ ID NO: 737620 - RNA, 19 nt, Artificial Sequence
  Description of Artificial Sequence: Synthetic oligonucleotide
  Sense strand starting at position 3007 of SEQ ID NO: 586699
ggcgcuaucauugcucacu

SEQ ID NO: 737621 - RNA, 19 nt, Artificial Sequence
  Description of Artificial Sequence: Synthetic oligonucleotide
  Antisense strand to SEQ ID NO: 737620
agugagcaaugauagcgcc

SEQ ID NO: 737622 - RNA, 19 nt, Artificial Sequence
  Description of Artificial Sequence: Synthetic oligonucleotide
  Sense strand starting at position 3132 of SEQ ID NO: 586699
agacgaucucgcuauguuc

SEQ ID NO: 737623 - RNA, 19 nt, Artificial Sequence
  Description of Artificial Sequence: Synthetic oligonucleotide
  Antisense strand to SEQ ID NO: 737622
gaacauagcgagaucgucu

SEQ ID NO: 737624 - RNA, 19 nt, Artificial Sequence
  Description of Artificial Sequence: Synthetic oligonucleotide
  Sense strand starting at position 3379 of SEQ ID NO: 586699
aacccauguuguuugagua

SEQ ID NO: 737625 - RNA, 19 nt, Artificial Sequence
  Description of Artificial Sequence: Synthetic oligonucleotide
  Antisense strand to SEQ ID NO: 737624
uacucaaacaacauggguu

SEQ ID NO: 737626 - RNA, 19 nt, Artificial Sequence
  Description of Artificial Sequence: Synthetic oligonucleotide
  Sense strand starting at position 3380 of SEQ ID NO: 586699
acccauguuguuugaguaa

SEQ ID NO: 737627 - RNA, 19 nt, Artificial Sequence
  Description of Artificial Sequence: Synthetic oligonucleotide
  Antisense strand to SEQ ID NO: 737626
uuacucaaacaacaugggu

SEQ ID NO: 737628 - RNA, 19 nt, Artificial Sequence
  Description of Artificial Sequence: Synthetic oligonucleotide
  Sense strand starting at position 3383 of SEQ ID NO: 586699
cauguuguuugaguaauua

SEQ ID NO: 737629 - RNA, 19 nt, Artificial Sequence
  Description of Artificial Sequence: Synthetic oligonucleotide
  Antisense strand to SEQ ID NO: 737628
uaauuacucaaacaacaug

SEQ ID NO: 737630 - RNA, 19 nt, Artificial Sequence
  Description of Artificial Sequence: Synthetic oligonucleotide
  Sense strand starting at position 3436 of SEQ ID NO: 586699
cuuuaauugcaucgaaucu

SEQ ID NO: 737631 - RNA, 19 nt, Artificial Sequence
  Description of Artificial Sequence: Synthetic oligonucleotide
  Antisense strand to SEQ ID NO: 737630
agauucgaugcaauuaaag

SEQ ID NO: 737632 - RNA, 19 nt, Artificial Sequence
  Description of Artificial Sequence: Synthetic oligonucleotide
  Sense strand starting at position 3479 of SEQ ID NO: 586699
aggugaagaaucugggucu

SEQ ID NO: 737633 - RNA, 19 nt, Artificial Sequence
  Description of Artificial Sequence: Synthetic oligonucleotide
  Antisense strand to SEQ ID NO: 737632
agacccagauucuucaccu

SEQ ID NO: 737634 - RNA, 19 nt, Artificial Sequence
  Description of Artificial Sequence: Synthetic oligonucleotide
  Sense strand starting at position 3482 of SEQ ID NO: 586699
ugaagaaucugggucucug

SEQ ID NO: 737635 - RNA, 19 nt, Artificial Sequence
  Description of Artificial Sequence: Synthetic oligonucleotide
  Antisense strand to SEQ ID NO: 737634
cagagacccagauucuuca

SEQ ID NO: 737636 - RNA, 19 nt, Artificial Sequence
  Description of Artificial Sequence: Synthetic oligonucleotide
  Sense strand starting at position 3508 of SEQ ID NO: 586699
ccaguuagcaauggagcaa

SEQ ID NO: 737637 - RNA, 19 nt, Artificial Sequence
  Description of Artificial Sequence: Synthetic oligonucleotide
  Antisense strand to SEQ ID NO: 737636
uugcuccauugcuaacugg

SEQ ID NO: 737638 - RNA, 19 nt, Artificial Sequence
  Description of Artificial Sequence: Synthetic oligonucleotide
  Sense strand starting at position 3527 of SEQ ID NO: 586699
agacaaaguugaucuuauc

SEQ ID NO: 737639 - RNA, 19 nt, Artificial Sequence
  Description of Artificial Sequence: Synthetic oligonucleotide
  Antisense strand to SEQ ID NO: 737638
gauaagaucaacuuugucu

SEQ ID NO: 737640 - RNA, 19 nt, Artificial Sequence
  Description of Artificial Sequence: Synthetic oligonucleotide
  Sense strand starting at position 3533 of SEQ ID NO: 586699
aguugaucuuaucugaaag

SEQ ID NO: 737641 - RNA, 19 nt, Artificial Sequence
  Description of Artificial Sequence: Synthetic oligonucleotide
  Antisense strand to SEQ ID NO: 737640
cuuucagauaagaucaacu

SEQ ID NO: 737642 - RNA, 19 nt, Artificial Sequence
  Description of Artificial Sequence: Synthetic oligonucleotide
  Sense strand starting at position 3535 of SEQ ID NO: 586699
uugaucuuaucugaaaguc

SEQ ID NO: 737643 - RNA, 19 nt, Artificial Sequence
  Description of Artificial Sequence: Synthetic oligonucleotide
  Antisense strand to SEQ ID NO: 737642
gacuuucagauaagaucaa

SEQ ID NO: 737644 - RNA, 19 nt, Artificial Sequence
  Description of Artificial Sequence: Synthetic oligonucleotide
  Sense strand starting at position 3543 of SEQ ID NO: 586699
aucugaaagucuccucuga

SEQ ID NO: 737645 - RNA, 19 nt, Artificial Sequence
  Description of Artificial Sequence: Synthetic oligonucleotide
  Antisense strand to SEQ ID NO: 737644
ucagaggagacuuucagau

SEQ ID NO: 737646 - RNA, 19 nt, Artificial Sequence
  Description of Artificial Sequence: Synthetic oligonucleotide
  Sense strand starting at position 3545 of SEQ ID NO: 586699
cugaaagucuccucugaac

SEQ ID NO: 737647 - RNA, 19 nt, Artificial Sequence
  Description of Artificial Sequence: Synthetic oligonucleotide
  Antisense strand to SEQ ID NO: 737646
guucagaggagacuuucag

SEQ ID NO: 737648 - RNA, 19 nt, Artificial Sequence
  Description of Artificial Sequence: Synthetic oligonucleotide
  Sense strand starting at position 3559 of SEQ ID NO: 586699
ugaacaucuuguguagaau

SEQ ID NO: 737649 - RNA, 19 nt, Artificial Sequence
  Description of Artificial Sequence: Synthetic oligonucleotide
  Antisense strand to SEQ ID NO: 737648
auucuacacaagauguuca

SEQ ID NO: 737650 - RNA, 19 nt, Artificial Sequence
  Description of Artificial Sequence: Synthetic oligonucleotide
  Sense strand starting at position 3560 of SEQ ID NO: 586699
gaacaucuuguguagaauc

SEQ ID NO: 737651 - RNA, 19 nt, Artificial Sequence
  Description of Artificial Sequence: Synthetic oligonucleotide
  Antisense strand to SEQ ID NO: 737650
gauucuacacaagauguuc

SEQ ID NO: 737652 - RNA, 19 nt, Artificial Sequence
  Description of Artificial Sequence: Synthetic oligonucleotide
  Sense strand starting at position 3706 of SEQ ID NO: 586699
cuugguugcgcucaaccaa

SEQ ID NO: 737653 - RNA, 19 nt, Artificial Sequence
  Description of Artificial Sequence: Synthetic oligonucleotide
  Antisense strand to SEQ ID NO: 737652
uugguugagcgcaaccaag

SEQ ID NO: 737654 - RNA, 19 nt, Artificial Sequence
  Description of Artificial Sequence: Synthetic oligonucleotide
  Sense strand starting at position 37 of SEQ ID NO: 586700
aaagcauuacuguaguaag

SEQ ID NO: 737655 - RNA, 19 nt, Artificial Sequence
  Description of Artificial Sequence: Synthetic oligonucleotide
  Antisense strand to SEQ ID NO: 737654
cuuacuacaguaaugcuuu

SEQ ID NO: 737656 - RNA, 19 nt, Artificial Sequence
  Description of Artificial Sequence: Synthetic oligonucleotide
  Sense strand starting at position 145 of SEQ ID NO: 586700
uccauuauguaaccaggaa

SEQ ID NO: 737657 - RNA, 19 nt, Artificial Sequence
  Description of Artificial Sequence: Synthetic oligonucleotide
  Antisense strand to SEQ ID NO: 737656
uuccugguuacauaaugga

SEQ ID NO: 737658 - RNA, 19 nt, Artificial Sequence
  Description of Artificial Sequence: Synthetic oligonucleotide
  Sense strand starting at position 149 of SEQ ID NO: 586700
uuauguaaccaggaauguu

SEQ ID NO: 737659 - RNA, 19 nt, Artificial Sequence
  Description of Artificial Sequence: Synthetic oligonucleotide
  Antisense strand to SEQ ID NO: 737658
aacauuccugguuacauaa

SEQ ID NO: 737660 - RNA, 19 nt, Artificial Sequence
  Description of Artificial Sequence: Synthetic oligonucleotide
  Sense strand starting at position 152 of SEQ ID NO: 586700
uguaaccaggaauguuaaa

SEQ ID NO: 737661 - RNA, 19 nt, Artificial Sequence
  Description of Artificial Sequence: Synthetic oligonucleotide
  Antisense strand to SEQ ID NO: 737660
uuuaacauuccugguuaca

SEQ ID NO: 737662 - RNA, 19 nt, Artificial Sequence
  Description of Artificial Sequence: Synthetic oligonucleotide
  Sense strand starting at position 170 of SEQ ID NO: 586700
auauauggaaacgguaaau

SEQ ID NO: 737663 - RNA, 19 nt, Artificial Sequence
  Description of Artificial Sequence: Synthetic oligonucleotide
  Antisense strand to SEQ ID NO: 737662
auuuaccguuuccauauau

SEQ ID NO: 737664 - RNA, 19 nt, Artificial Sequence
  Description of Artificial Sequence: Synthetic oligonucleotide
  Sense strand starting at position 202 of SEQ ID NO: 586700
uagguacuuccagagcuaa

SEQ ID NO: 737665 - RNA, 19 nt, Artificial Sequence
  Description of Artificial Sequence: Synthetic oligonucleotide
  Antisense strand to SEQ ID NO: 737664
uuagcucuggaaguaccua

SEQ ID NO: 737666 - RNA, 19 nt, Artificial Sequence
  Description of Artificial Sequence: Synthetic oligonucleotide
  Sense strand starting at position 311 of SEQ ID NO: 586700
aagucaucaucuuugggua

SEQ ID NO: 737667 - RNA, 19 nt, Artificial Sequence
  Description of Artificial Sequence: Synthetic oligonucleotide
  Antisense strand to SEQ ID NO: 737666
uacccaaagaugaugacuu

SEQ ID NO: 737668 - RNA, 19 nt, Artificial Sequence
  Description of Artificial Sequence: Synthetic oligonucleotide
  Sense strand starting at position 312 of SEQ ID NO: 586700
agucaucaucuuuggguaa

SEQ ID NO: 737669 - RNA, 19 nt, Artificial Sequence
  Description of Artificial Sequence: Synthetic oligonucleotide
  Antisense strand to SEQ ID NO: 737668
uuacccaaagaugaugacu

SEQ ID NO: 737670 - RNA, 19 nt, Artificial Sequence
  Description of Artificial Sequence: Synthetic oligonucleotide
  Sense strand starting at position 324 of SEQ ID NO: 586700
uggguaaauuuauaucaac

SEQ ID NO: 737671 - RNA, 19 nt, Artificial Sequence
  Description of Artificial Sequence: Synthetic oligonucleotide
  Antisense strand to SEQ ID NO: 737670
guugauauaaauuuaccca

SEQ ID NO: 737672 - RNA, 19 nt, Artificial Sequence
  Description of Artificial Sequence: Synthetic oligonucleotide
  Sense strand starting at position 577 of SEQ ID NO: 586700
auccaaaugguguagaugu

SEQ ID NO: 737673 - RNA, 19 nt, Artificial Sequence
  Description of Artificial Sequence: Synthetic oligonucleotide
  Antisense strand to SEQ ID NO: 737672
acaucuacaccauuuggau

SEQ ID NO: 737674 - RNA, 19 nt, Artificial Sequence
  Description of Artificial Sequence: Synthetic oligonucleotide
  Sense strand starting at position 587 of SEQ ID NO: 586700
uguagauguccuuggagaa

SEQ ID NO: 737675 - RNA, 19 nt, Artificial Sequence
  Description of Artificial Sequence: Synthetic oligonucleotide
  Antisense strand to SEQ ID NO: 737674
uucuccaaggacaucuaca

SEQ ID NO: 737676 - RNA, 19 nt, Artificial Sequence
  Description of Artificial Sequence: Synthetic oligonucleotide
  Sense strand starting at position 588 of SEQ ID NO: 586700
guagauguccuuggagaac

SEQ ID NO: 737677 - RNA, 19 nt, Artificial Sequence
  Description of Artificial Sequence: Synthetic oligonucleotide
  Antisense strand to SEQ ID NO: 737676
guucuccaaggacaucuac

SEQ ID NO: 737678 - RNA, 19 nt, Artificial Sequence
  Description of Artificial Sequence: Synthetic oligonucleotide
  Sense strand starting at position 754 of SEQ ID NO: 586700
uuaaucaaguguuccuauu

SEQ ID NO: 737679 - RNA, 19 nt, Artificial Sequence
  Description of Artificial Sequence: Synthetic oligonucleotide
  Antisense strand to SEQ ID NO: 737678
aauaggaacacuugauuaa

SEQ ID NO: 737680 - RNA, 19 nt, Artificial Sequence
  Description of Artificial Sequence: Synthetic oligonucleotide
  Sense strand starting at position 864 of SEQ ID NO: 586700
guaacuuugcaguaauuaa

SEQ ID NO: 737681 - RNA, 19 nt, Artificial Sequence
  Description of Artificial Sequence: Synthetic oligonucleotide
  Antisense strand to SEQ ID NO: 737680
uuaauuacugcaaaguuac

SEQ ID NO: 737682 - RNA, 19 nt, Artificial Sequence
  Description of Artificial Sequence: Synthetic oligonucleotide
  Sense strand starting at position 1216 of SEQ ID NO: 586700
uguagcucgaaagaaagau

SEQ ID NO: 737683 - RNA, 19 nt, Artificial Sequence
  Description of Artificial Sequence: Synthetic oligonucleotide
  Antisense strand to SEQ ID NO: 737682
aucuuucuuucgagcuaca

SEQ ID NO: 737684 - RNA, 19 nt, Artificial Sequence
  Description of Artificial Sequence: Synthetic oligonucleotide
  Sense strand starting at position 1400 of SEQ ID NO: 586700
uucggauaaucuuccggaa

SEQ ID NO: 737685 - RNA, 19 nt, Artificial Sequence
  Description of Artificial Sequence: Synthetic oligonucleotide
  Antisense strand to SEQ ID NO: 737684
uuccggaagauuauccgaa

SEQ ID NO: 737686 - RNA, 19 nt, Artificial Sequence
  Description of Artificial Sequence: Synthetic oligonucleotide
  Sense strand starting at position 1404 of SEQ ID NO: 586700
gauaaucuuccggaaguca

SEQ ID NO: 737687 - RNA, 19 nt, Artificial Sequence
  Description of Artificial Sequence: Synthetic oligonucleotide
  Antisense strand to SEQ ID NO: 737686
ugacuuccggaagauuauc

SEQ ID NO: 737688 - RNA, 19 nt, Artificial Sequence
  Description of Artificial Sequence: Synthetic oligonucleotide
  Sense strand starting at position 1539 of SEQ ID NO: 586700
aaaguaagagcucggcaaa

SEQ ID NO: 737689 - RNA, 19 nt, Artificial Sequence
  Description of Artificial Sequence: Synthetic oligonucleotide
  Antisense strand to SEQ ID NO: 737688
uuugccgagcucuuacuuu

SEQ ID NO: 737690 - RNA, 19 nt, Artificial Sequence
  Description of Artificial Sequence: Synthetic oligonucleotide
  Sense strand starting at position 1551 of SEQ ID NO: 586700
cggcaaacgcuggcuauua

SEQ ID NO: 737691 - RNA, 19 nt, Artificial Sequence
  Description of Artificial Sequence: Synthetic oligonucleotide
  Antisense strand to SEQ ID NO: 737690
uaauagccagcguuugccg

SEQ ID NO: 737692 - RNA, 19 nt, Artificial Sequence
  Description of Artificial Sequence: Synthetic oligonucleotide
  Sense strand starting at position 1986 of SEQ ID NO: 586700
gagaacugcuaguccuuua

SEQ ID NO: 737693 - RNA, 19 nt, Artificial Sequence
  Description of Artificial Sequence: Synthetic oligonucleotide
  Antisense strand to SEQ ID NO: 737692
uaaaggacuagcaguucuc

SEQ ID NO: 737694 - RNA, 19 nt, Artificial Sequence
  Description of Artificial Sequence: Synthetic oligonucleotide
  Sense strand starting at position 2104 of SEQ ID NO: 586700
gcgagagacucaguggauu

SEQ ID NO: 737695 - RNA, 19 nt, Artificial Sequence
  Description of Artificial Sequence: Synthetic oligonucleotide
  Antisense strand to SEQ ID NO: 737694
aauccacugagucucucgc

SEQ ID NO: 737696 - RNA, 19 nt, Artificial Sequence
  Description of Artificial Sequence: Synthetic oligonucleotide
  Sense strand starting at position 2203 of SEQ ID NO: 586700
uggucugaccgacagacua

SEQ ID NO: 737697 - RNA, 19 nt, Artificial Sequence
  Description of Artificial Sequence: Synthetic oligonucleotide
  Antisense strand to SEQ ID NO: 737696
uagucugucggucagacca

SEQ ID NO: 737698 - RNA, 19 nt, Artificial Sequence
  Description of Artificial Sequence: Synthetic oligonucleotide
  Sense strand starting at position 2465 of SEQ ID NO: 586700
ucagguacccuccgagauu

SEQ ID NO: 737699 - RNA, 19 nt, Artificial Sequence
  Description of Artificial Sequence: Synthetic oligonucleotide
  Antisense strand to SEQ ID NO: 737698
aaucucggaggguaccuga

SEQ ID NO: 737700 - RNA, 19 nt, Artificial Sequence
  Description of Artificial Sequence: Synthetic oligonucleotide
  Sense strand starting at position 2770 of SEQ ID NO: 586700
aaguuuaaguaacuucgaa

SEQ ID NO: 737701 - RNA, 19 nt, Artificial Sequence
  Description of Artificial Sequence: Synthetic oligonucleotide
  Antisense strand to SEQ ID NO: 737700
uucgaaguuacuuaaacuu

SEQ ID NO: 737702 - RNA, 19 nt, Artificial Sequence
  Description of Artificial Sequence: Synthetic oligonucleotide
  Sense strand starting at position 2830 of SEQ ID NO: 586700
ugcuuugaauaacuugaca

SEQ ID NO: 737703 - RNA, 19 nt, Artificial Sequence
  Description of Artificial Sequence: Synthetic oligonucleotide
  Antisense strand to SEQ ID NO: 737702
ugucaaguuauucaaagca

SEQ ID NO: 737704 - RNA, 19 nt, Artificial Sequence
  Description of Artificial Sequence: Synthetic oligonucleotide
  Sense strand starting at position 2954 of SEQ ID NO: 586700
cucugaauuugggaauggu

SEQ ID NO: 737705 - RNA, 19 nt, Artificial Sequence
  Description of Artificial Sequence: Synthetic oligonucleotide
  Antisense strand to SEQ ID NO: 737704
accauucccaaauucagag

SEQ ID NO: 737706 - RNA, 19 nt, Artificial Sequence
  Description of Artificial Sequence: Synthetic oligonucleotide
  Sense strand starting at position 2963 of SEQ ID NO: 586700
ugggaaugguaauccacua

SEQ ID NO: 737707 - RNA, 19 nt, Artificial Sequence
  Description of Artificial Sequence: Synthetic oligonucleotide
  Antisense strand to SEQ ID NO: 737706
uaguggauuaccauuccca

SEQ ID NO: 737708 - RNA, 19 nt, Artificial Sequence
  Description of Artificial Sequence: Synthetic oligonucleotide
  Sense strand starting at position 2970 of SEQ ID NO: 586700
gguaauccacuaugaaucu

SEQ ID NO: 737709 - RNA, 19 nt, Artificial Sequence
  Description of Artificial Sequence: Synthetic oligonucleotide
  Antisense strand to SEQ ID NO: 737708
agauucauaguggauuacc

SEQ ID NO: 737710 - RNA, 19 nt, Artificial Sequence
  Description of Artificial Sequence: Synthetic oligonucleotide
  Sense strand starting at position 3281 of SEQ ID NO: 586700
agacguaaucucuaugauu

SEQ ID NO: 737711 - RNA, 19 nt, Artificial Sequence
  Description of Artificial Sequence: Synthetic oligonucleotide
  Antisense strand to SEQ ID NO: 737710
aaucauagagauuacgucu

SEQ ID NO: 737712 - RNA, 19 nt, Artificial Sequence
  Description of Artificial Sequence: Synthetic oligonucleotide
  Sense strand starting at position 3283 of SEQ ID NO: 586700
acguaaucucuaugauuau

SEQ ID NO: 737713 - RNA, 19 nt, Artificial Sequence
  Description of Artificial Sequence: Synthetic oligonucleotide
  Antisense strand to SEQ ID NO: 737712
auaaucauagagauuacgu

SEQ ID NO: 737714 - RNA, 19 nt, Artificial Sequence
  Description of Artificial Sequence: Synthetic oligonucleotide
  Sense strand starting at position 3322 of SEQ ID NO: 586700
cuugaaauuaguugcagga

SEQ ID NO: 737715 - RNA, 19 nt, Artificial Sequence
  Description of Artificial Sequence: Synthetic oligonucleotide
  Antisense strand to SEQ ID NO: 737714
uccugcaacuaauuucaag

SEQ ID NO: 737716 - RNA, 19 nt, Artificial Sequence
  Description of Artificial Sequence: Synthetic oligonucleotide
  Sense strand starting at position 3469 of SEQ ID NO: 586700
uagaguagccgagauuaca

SEQ ID NO: 737717 - RNA, 19 nt, Artificial Sequence
  Description of Artificial Sequence: Synthetic oligonucleotide
  Antisense strand to SEQ ID NO: 737716
uguaaucucggcuacucua

SEQ ID NO: 737718 - RNA, 19 nt, Artificial Sequence
  Description of Artificial Sequence: Synthetic oligonucleotide
  Sense strand starting at position 3759 of SEQ ID NO: 586700
uugacauguucugugacau

SEQ ID NO: 737719 - RNA, 19 nt, Artificial Sequence
  Description of Artificial Sequence: Synthetic oligonucleotide
  Antisense strand to SEQ ID NO: 737718
augucacagaacaugucaa

SEQ ID NO: 737720 - RNA, 19 nt, Artificial Sequence
  Description of Artificial Sequence: Synthetic oligonucleotide
  Sense strand starting at position 3760 of SEQ ID NO: 586700
ugacauguucugugacauc

SEQ ID NO: 737721 - RNA, 19 nt, Artificial Sequence
  Description of Artificial Sequence: Synthetic oligonucleotide
  Antisense strand to SEQ ID NO: 737720
gaugucacagaacauguca

SEQ ID NO: 737722 - RNA, 19 nt, Artificial Sequence
  Description of Artificial Sequence: Synthetic oligonucleotide
  Sense strand starting at position 3858 of SEQ ID NO: 586700
guuuauucuguggaaauuc

SEQ ID NO: 737723 - RNA, 19 nt, Artificial Sequence
  Description of Artificial Sequence: Synthetic oligonucleotide
  Antisense strand to SEQ ID NO: 737722
gaauuuccacagaauaaac

SEQ ID NO: 737724 - RNA, 19 nt, Artificial Sequence
  Description of Artificial Sequence: Synthetic oligonucleotide
  Sense strand starting at position 3892 of SEQ ID NO: 586700
guuucuucuguagauacaa

SEQ ID NO: 737725 - RNA, 19 nt, Artificial Sequence
  Description of Artificial Sequence: Synthetic oligonucleotide
  Antisense strand to SEQ ID NO: 737724
uuguaucuacagaagaaac

SEQ ID NO: 737726 - RNA, 19 nt, Artificial Sequence
  Description of Artificial Sequence: Synthetic oligonucleotide
  Sense strand starting at position 3900 of SEQ ID NO: 586700
uguagauacaagugauaga

SEQ ID NO: 737727 - RNA, 19 nt, Artificial Sequence
  Description of Artificial Sequence: Synthetic oligonucleotide
  Antisense strand to SEQ ID NO: 737726
ucuaucacuuguaucuaca

SEQ ID NO: 737728 - RNA, 19 nt, Artificial Sequence
  Description of Artificial Sequence: Synthetic oligonucleotide
  Sense strand starting at position 3916 of SEQ ID NO: 586700
agacuuaaucaagguagca

SEQ ID NO: 737729 - RNA, 19 nt, Artificial Sequence
  Description of Artificial Sequence: Synthetic oligonucleotide
  Antisense strand to SEQ ID NO: 737728
ugcuaccuugauuaagucu

SEQ ID NO: 737730 - RNA, 19 nt, Artificial Sequence
  Description of Artificial Sequence: Synthetic oligonucleotide
  Sense strand starting at position 3939 of SEQ ID NO: 586700
gccauuaaggcuuagugau

SEQ ID NO: 737731 - RNA, 19 nt, Artificial Sequence
  Description of Artificial Sequence: Synthetic oligonucleotide
  Antisense strand to SEQ ID NO: 737730
aucacuaagccuuaauggc

SEQ ID NO: 737732 - RNA, 19 nt, Artificial Sequence
  Description of Artificial Sequence: Synthetic oligonucleotide
  Sense strand starting at position 3941 of SEQ ID NO: 586700
cauuaaggcuuagugauac

SEQ ID NO: 737733 - RNA, 19 nt, Artificial Sequence
  Description of Artificial Sequence: Synthetic oligonucleotide
  Antisense strand to SEQ ID NO: 737732
guaucacuaagccuuaaug

SEQ ID NO: 737734 - RNA, 19 nt, Artificial Sequence
  Description of Artificial Sequence: Synthetic oligonucleotide
  Sense strand starting at position 2 of SEQ ID NO: 586701
uguagugcucuggaacaau

SEQ ID NO: 737735 - RNA, 19 nt, Artificial Sequence
  Description of Artificial Sequence: Synthetic oligonucleotide
  Antisense strand to SEQ ID NO: 737734
auuguuccagagcacuaca

SEQ ID NO: 737736 - RNA, 19 nt, Artificial Sequence
  Description of Artificial Sequence: Synthetic oligonucleotide
  Sense strand starting at position 207 of SEQ ID NO: 586701
uuugacauuccagauguca

SEQ ID NO: 737737 - RNA, 19 nt, Artificial Sequence
  Description of Artificial Sequence: Synthetic oligonucleotide
  Antisense strand to SEQ ID NO: 737736
ugacaucuggaaugucaaa

SEQ ID NO: 737738 - RNA, 19 nt, Artificial Sequence
  Description of Artificial Sequence: Synthetic oligonucleotide
  Sense strand starting at position 223 of SEQ ID NO: 586701
ucaagaauucgguggcauc

SEQ ID NO: 737739 - RNA, 19 nt, Artificial Sequence
  Description of Artificial Sequence: Synthetic oligonucleotide
  Antisense strand to SEQ ID NO: 737738
gaugccaccgaauucuuga

SEQ ID NO: 737740 - RNA, 19 nt, Artificial Sequence
  Description of Artificial Sequence: Synthetic oligonucleotide
  Sense strand starting at position 224 of SEQ ID NO: 586701
caagaauucgguggcauca

SEQ ID NO: 737741 - RNA, 19 nt, Artificial Sequence
  Description of Artificial Sequence: Synthetic oligonucleotide
  Antisense strand to SEQ ID NO: 737740
ugaugccaccgaauucuug

SEQ ID NO: 737742 - RNA, 19 nt, Artificial Sequence
  Description of Artificial Sequence: Synthetic oligonucleotide
  Sense strand starting at position 277 of SEQ ID NO: 586701
gugugcagucuccauagga

SEQ ID NO: 737743 - RNA, 19 nt, Artificial Sequence
  Description of Artificial Sequence: Synthetic oligonucleotide
  Antisense strand to SEQ ID NO: 737742
uccuauggagacugcacac

SEQ ID NO: 737744 - RNA, 19 nt, Artificial Sequence
  Description of Artificial Sequence: Synthetic oligonucleotide
  Sense strand starting at position 314 of SEQ ID NO: 586701
aguguuaccauuuguguau

SEQ ID NO: 737745 - RNA, 19 nt, Artificial Sequence
  Description of Artificial Sequence: Synthetic oligonucleotide
  Antisense strand to SEQ ID NO: 737744
auacacaaaugguaacacu

SEQ ID NO: 737746 - RNA, 19 nt, Artificial Sequence
  Description of Artificial Sequence: Synthetic oligonucleotide
  Sense strand starting at position 315 of SEQ ID NO: 586701
guguuaccauuuguguauu

SEQ ID NO: 737747 - RNA, 19 nt, Artificial Sequence
  Description of Artificial Sequence: Synthetic oligonucleotide
  Antisense strand to SEQ ID NO: 737746
aauacacaaaugguaacac

SEQ ID NO: 737748 - RNA, 19 nt, Artificial Sequence
  Description of Artificial Sequence: Synthetic oligonucleotide
  Sense strand starting at position 317 of SEQ ID NO: 586701
guuaccauuuguguauuau

SEQ ID NO: 737749 - RNA, 19 nt, Artificial Sequence
  Description of Artificial Sequence: Synthetic oligonucleotide
  Antisense strand to SEQ ID NO: 737748
auaauacacaaaugguaac

SEQ ID NO: 737750 - RNA, 19 nt, Artificial Sequence
  Description of Artificial Sequence: Synthetic oligonucleotide
  Sense strand starting at position 338 of SEQ ID NO: 586701
aaccguaguccagaaugaa

SEQ ID NO: 737751 - RNA, 19 nt, Artificial Sequence
  Description of Artificial Sequence: Synthetic oligonucleotide
  Antisense strand to SEQ ID NO: 737750
uucauucuggacuacgguu

SEQ ID NO: 737752 - RNA, 19 nt, Artificial Sequence
  Description of Artificial Sequence: Synthetic oligonucleotide
  Sense strand starting at position 374 of SEQ ID NO: 586701
agaguaacacaucgugcaa

SEQ ID NO: 737753 - RNA, 19 nt, Artificial Sequence
  Description of Artificial Sequence: Synthetic oligonucleotide
  Antisense strand to SEQ ID NO: 737752
uugcacgauguguuacucu

SEQ ID NO: 737754 - RNA, 19 nt, Artificial Sequence
  Description of Artificial Sequence: Synthetic oligonucleotide
  Sense strand starting at position 386 of SEQ ID NO: 586701
cgugcaaacacgcauuuaa

SEQ ID NO: 737755 - RNA, 19 nt, Artificial Sequence
  Description of Artificial Sequence: Synthetic oligonucleotide
  Antisense strand to SEQ ID NO: 737754
uuaaaugcguguuugcacg

SEQ ID NO: 737756 - RNA, 19 nt, Artificial Sequence
  Description of Artificial Sequence: Synthetic oligonucleotide
  Sense strand starting at position 535 of SEQ ID NO: 586701
ccuaucauugcacaguaga

SEQ ID NO: 737757 - RNA, 19 nt, Artificial Sequence
  Description of Artificial Sequence: Synthetic oligonucleotide
  Antisense strand to SEQ ID NO: 737756
ucuacugugcaaugauagg

SEQ ID NO: 737758 - RNA, 19 nt, Artificial Sequence
  Description of Artificial Sequence: Synthetic oligonucleotide
  Sense strand starting at position 546 of SEQ ID NO: 586701
acaguagaugccuacaaua

SEQ ID NO: 737759 - RNA, 19 nt, Artificial Sequence
  Description of Artificial Sequence: Synthetic oligonucleotide
  Antisense strand to SEQ ID NO: 737758
uauuguaggcaucuacugu

SEQ ID NO: 737760 - RNA, 19 nt, Artificial Sequence
  Description of Artificial Sequence: Synthetic oligonucleotide
  Sense strand starting at position 564 of SEQ ID NO: 586701
aagcaauauuacuugaggu

SEQ ID NO: 737761 - RNA, 19 nt, Artificial Sequence
  Description of Artificial Sequence: Synthetic oligonucleotide
  Antisense strand to SEQ ID NO: 737760
accucaaguaauauugcuu

SEQ ID NO: 737762 - RNA, 19 nt, Artificial Sequence
  Description of Artificial Sequence: Synthetic oligonucleotide
  Sense strand starting at position 643 of SEQ ID NO: 586701
gguauauucgaccaacaua

SEQ ID NO: 737763 - RNA, 19 nt, Artificial Sequence
  Description of Artificial Sequence: Synthetic oligonucleotide
  Antisense strand to SEQ ID NO: 737762
uauguuggucgaauauacc

SEQ ID NO: 737764 - RNA, 19 nt, Artificial Sequence
  Description of Artificial Sequence: Synthetic oligonucleotide
  Sense strand starting at position 867 of SEQ ID NO: 586701
uuauaaguaaugcggagaa

SEQ ID NO: 737765 - RNA, 19 nt, Artificial Sequence
  Description of Artificial Sequence: Synthetic oligonucleotide
  Antisense strand to SEQ ID NO: 737764
uucuccgcauuacuuauaa

SEQ ID NO: 737766 - RNA, 19 nt, Artificial Sequence
  Description of Artificial Sequence: Synthetic oligonucleotide
  Sense strand starting at position 869 of SEQ ID NO: 586701
auaaguaaugcggagaauu

SEQ ID NO: 737767 - RNA, 19 nt, Artificial Sequence
  Description of Artificial Sequence: Synthetic oligonucleotide
  Antisense strand to SEQ ID NO: 737766
aauucuccgcauuacuuau

SEQ ID NO: 737768 - RNA, 19 nt, Artificial Sequence
  Description of Artificial Sequence: Synthetic oligonucleotide
  Sense strand starting at position 1202 of SEQ ID NO: 586701
gcacgaucucagcagcgaa

SEQ ID NO: 737769 - RNA, 19 nt, Artificial Sequence
  Description of Artificial Sequence: Synthetic oligonucleotide
  Antisense strand to SEQ ID NO: 737768
uucgcugcugagaucgugc

SEQ ID NO: 737770 - RNA, 19 nt, Artificial Sequence
  Description of Artificial Sequence: Synthetic oligonucleotide
  Sense strand starting at position 1389 of SEQ ID NO: 586701
ggaggugucagucacagca

SEQ ID NO: 737771 - RNA, 19 nt, Artificial Sequence
  Description of Artificial Sequence: Synthetic oligonucleotide
  Antisense strand to SEQ ID NO: 737770
ugcugugacugacaccucc

SEQ ID NO: 737772 - RNA, 19 nt, Artificial Sequence
  Description of Artificial Sequence: Synthetic oligonucleotide
  Sense strand starting at position 1995 of SEQ ID NO: 586701
guaguugagaacuggaaau

SEQ ID NO: 737773 - RNA, 19 nt, Artificial Sequence
  Description of Artificial Sequence: Synthetic oligonucleotide
  Antisense strand to SEQ ID NO: 737772
auuuccaguucucaacuac

SEQ ID NO: 737774 - RNA, 19 nt, Artificial Sequence
  Description of Artificial Sequence: Synthetic oligonucleotide
  Sense strand starting at position 2459 of SEQ ID NO: 586701
agcugucugucagcauuua

SEQ ID NO: 737775 - RNA, 19 nt, Artificial Sequence
  Description of Artificial Sequence: Synthetic oligonucleotide
  Antisense strand to SEQ ID NO: 737774
uaaaugcugacagacagcu

SEQ ID NO: 737776 - RNA, 19 nt, Artificial Sequence
  Description of Artificial Sequence: Synthetic oligonucleotide
  Sense strand starting at position 2645 of SEQ ID NO: 586701
guguauuuggcagguucua

SEQ ID NO: 737777 - RNA, 19 nt, Artificial Sequence
  Description of Artificial Sequence: Synthetic oligonucleotide
  Antisense strand to SEQ ID NO: 737776
uagaaccugccaaauacac

SEQ ID NO: 737778 - RNA, 19 nt, Artificial Sequence
  Description of Artificial Sequence: Synthetic oligonucleotide
  Sense strand starting at position 2938 of SEQ ID NO: 586701
uccggauguguagaugaca

SEQ ID NO: 737779 - RNA, 19 nt, Artificial Sequence
  Description of Artificial Sequence: Synthetic oligonucleotide
  Antisense strand to SEQ ID NO: 737778
ugucaucuacacauccgga

SEQ ID NO: 737780 - RNA, 19 nt, Artificial Sequence
  Description of Artificial Sequence: Synthetic oligonucleotide
  Sense strand starting at position 3019 of SEQ ID NO: 586701
agagacuucuggcuagaaa

SEQ ID NO: 737781 - RNA, 19 nt, Artificial Sequence
  Description of Artificial Sequence: Synthetic oligonucleotide
  Antisense strand to SEQ ID NO: 737780
uuucuagccagaagucucu

SEQ ID NO: 737782 - RNA, 19 nt, Artificial Sequence
  Description of Artificial Sequence: Synthetic oligonucleotide
  Sense strand starting at position 3124 of SEQ ID NO: 586701
acuauuguguucuuccuaa

SEQ ID NO: 737783 - RNA, 19 nt, Artificial Sequence
  Description of Artificial Sequence: Synthetic oligonucleotide
  Antisense strand to SEQ ID NO: 737782
uuaggaagaacacaauagu

SEQ ID NO: 737784 - RNA, 19 nt, Artificial Sequence
  Description of Artificial Sequence: Synthetic oligonucleotide
  Sense strand starting at position 3220 of SEQ ID NO: 586701
aaacuuuacgugugaggag

SEQ ID NO: 737785 - RNA, 19 nt, Artificial Sequence
  Description of Artificial Sequence: Synthetic oligonucleotide
  Antisense strand to SEQ ID NO: 737784
cuccucacacguaaaguuu

SEQ ID NO: 737786 - RNA, 19 nt, Artificial Sequence
  Description of Artificial Sequence: Synthetic oligonucleotide
  Sense strand starting at position 3307 of SEQ ID NO: 586701
auuaauaaguguuugcaga

SEQ ID NO: 737787 - RNA, 19 nt, Artificial Sequence
  Description of Artificial Sequence: Synthetic oligonucleotide
  Antisense strand to SEQ ID NO: 737786
ucugcaaacacuuauuaau

SEQ ID NO: 737788 - RNA, 19 nt, Artificial Sequence
  Description of Artificial Sequence: Synthetic oligonucleotide
  Sense strand starting at position 3308 of SEQ ID NO: 586701
uuaauaaguguuugcagaa

SEQ ID NO: 737789 - RNA, 19 nt, Artificial Sequence
  Description of Artificial Sequence: Synthetic oligonucleotide
  Antisense strand to SEQ ID NO: 737788
uucugcaaacacuuauuaa

SEQ ID NO: 737790 - RNA, 19 nt, Artificial Sequence
  Description of Artificial Sequence: Synthetic oligonucleotide
  Sense strand starting at position 3309 of SEQ ID NO: 586701
uaauaaguguuugcagaau

SEQ ID NO: 737791 - RNA, 19 nt, Artificial Sequence
  Description of Artificial Sequence: Synthetic oligonucleotide
  Antisense strand to SEQ ID NO: 737790
auucugcaaacacuuauua

SEQ ID NO: 737792 - RNA, 19 nt, Artificial Sequence
  Description of Artificial Sequence: Synthetic oligonucleotide
  Sense strand starting at position 3323 of SEQ ID NO: 586701
agaauaaaugcgugcauca

SEQ ID NO: 737793 - RNA, 19 nt, Artificial Sequence
  Description of Artificial Sequence: Synthetic oligonucleotide
  Antisense strand to SEQ ID NO: 737792
ugaugcacgcauuuauucu

SEQ ID NO: 737794 - RNA, 19 nt, Artificial Sequence
  Description of Artificial Sequence: Synthetic oligonucleotide
  Sense strand starting at position 3325 of SEQ ID NO: 586701
aauaaaugcgugcaucaug

SEQ ID NO: 737795 - RNA, 19 nt, Artificial Sequence
  Description of Artificial Sequence: Synthetic oligonucleotide
  Antisense strand to SEQ ID NO: 737794
caugaugcacgcauuuauu

SEQ ID NO: 737796 - RNA, 19 nt, Artificial Sequence
  Description of Artificial Sequence: Synthetic oligonucleotide
  Sense strand starting at position 3380 of SEQ ID NO: 586701
ugucuccucucuuugugaa

SEQ ID NO: 737797 - RNA, 19 nt, Artificial Sequence
  Description of Artificial Sequence: Synthetic oligonucleotide
  Antisense strand to SEQ ID NO: 737796
uucacaaagagaggagaca

SEQ ID NO: 737798 - RNA, 19 nt, Artificial Sequence
  Description of Artificial Sequence: Synthetic oligonucleotide
  Sense strand starting at position 3381 of SEQ ID NO: 586701
gucuccucucuuugugaau

SEQ ID NO: 737799 - RNA, 19 nt, Artificial Sequence
  Description of Artificial Sequence: Synthetic oligonucleotide
  Antisense strand to SEQ ID NO: 737798
auucacaaagagaggagac

SEQ ID NO: 737800 - RNA, 19 nt, Artificial Sequence
  Description of Artificial Sequence: Synthetic oligonucleotide
  Sense strand starting at position 3478 of SEQ ID NO: 586701
uuguguuuauccucaacca

SEQ ID NO: 737801 - RNA, 19 nt, Artificial Sequence
  Description of Artificial Sequence: Synthetic oligonucleotide
  Antisense strand to SEQ ID NO: 737800
ugguugaggauaaacacaa

SEQ ID NO: 737802 - RNA, 19 nt, Artificial Sequence
  Description of Artificial Sequence: Synthetic oligonucleotide
  Sense strand starting at position 3479 of SEQ ID NO: 586701
uguguuuauccucaaccaa

SEQ ID NO: 737803 - RNA, 19 nt, Artificial Sequence
  Description of Artificial Sequence: Synthetic oligonucleotide
  Antisense strand to SEQ ID NO: 737802
uugguugaggauaaacaca

SEQ ID NO: 737804 - RNA, 19 nt, Artificial Sequence
  Description of Artificial Sequence: Synthetic oligonucleotide
  Sense strand starting at position 3570 of SEQ ID NO: 586701
aguguuaauuuagaaccuu

SEQ ID NO: 737805 - RNA, 19 nt, Artificial Sequence
  Description of Artificial Sequence: Synthetic oligonucleotide
  Antisense strand to SEQ ID NO: 737804
aagguucuaaauuaacacu

SEQ ID NO: 737806 - RNA, 19 nt, Artificial Sequence
  Description of Artificial Sequence: Synthetic oligonucleotide
  Sense strand starting at position 3581 of SEQ ID NO: 586701
agaaccuucuuuccuggaa

SEQ ID NO: 737807 - RNA, 19 nt, Artificial Sequence
  Description of Artificial Sequence: Synthetic oligonucleotide
  Antisense strand to SEQ ID NO: 737806
uuccaggaaagaagguucu

SEQ ID NO: 737808 - RNA, 19 nt, Artificial Sequence
  Description of Artificial Sequence: Synthetic oligonucleotide
  Sense strand starting at position 3624 of SEQ ID NO: 586701
ggaagcauuuaaggagacu

SEQ ID NO: 737809 - RNA, 19 nt, Artificial Sequence
  Description of Artificial Sequence: Synthetic oligonucleotide
  Antisense strand to SEQ ID NO: 737808
agucuccuuaaaugcuucc

SEQ ID NO: 737810 - RNA, 19 nt, Artificial Sequence
  Description of Artificial Sequence: Synthetic oligonucleotide
  Sense strand starting at position 3768 of SEQ ID NO: 586701
gggugucagcaagaccuuu

SEQ ID NO: 737811 - RNA, 19 nt, Artificial Sequence
  Description of Artificial Sequence: Synthetic oligonucleotide
  Antisense strand to SEQ ID NO: 737810
aaaggucuugcugacaccc

SEQ ID NO: 737812 - RNA, 19 nt, Artificial Sequence
  Description of Artificial Sequence: Synthetic oligonucleotide
  Sense strand starting at position 3962 of SEQ ID NO: 586701
ggagguaggguaugaaugu

SEQ ID NO: 737813 - RNA, 19 nt, Artificial Sequence
  Description of Artificial Sequence: Synthetic oligonucleotide
  Antisense strand to SEQ ID NO: 737812
acauucauacccuaccucc

SEQ ID NO: 737814 - RNA, 19 nt, Artificial Sequence
  Description of Artificial Sequence: Synthetic oligonucleotide
  Sense strand starting at position 430 of SEQ ID NO: 586702
ucaguauguccacaaguau

SEQ ID NO: 737815 - RNA, 19 nt, Artificial Sequence
  Description of Artificial Sequence: Synthetic oligonucleotide
  Antisense strand to SEQ ID NO: 737814
auacuuguggacauacuga

SEQ ID NO: 737816 - RNA, 19 nt, Artificial Sequence
  Description of Artificial Sequence: Synthetic oligonucleotide
  Sense strand starting at position 483 of SEQ ID NO: 586702
ucaggacugucugugaacu

SEQ ID NO: 737817 - RNA, 19 nt, Artificial Sequence
  Description of Artificial Sequence: Synthetic oligonucleotide
  Antisense strand to SEQ ID NO: 737816
aguucacagacaguccuga

SEQ ID NO: 737818 - RNA, 19 nt, Artificial Sequence
  Description of Artificial Sequence: Synthetic oligonucleotide
  Sense strand starting at position 484 of SEQ ID NO: 586702
caggacugucugugaacuu

SEQ ID NO: 737819 - RNA, 19 nt, Artificial Sequence
  Description of Artificial Sequence: Synthetic oligonucleotide
  Antisense strand to SEQ ID NO: 737818
aaguucacagacaguccug

SEQ ID NO: 737820 - RNA, 19 nt, Artificial Sequence
  Description of Artificial Sequence: Synthetic oligonucleotide
  Sense strand starting at position 504 of SEQ ID NO: 586702
ggaccauugugagccuacu

SEQ ID NO: 737821 - RNA, 19 nt, Artificial Sequence
  Description of Artificial Sequence: Synthetic oligonucleotide
  Antisense strand to SEQ ID NO: 737820
aguaggcucacaauggucc

SEQ ID NO: 737822 - RNA, 19 nt, Artificial Sequence
  Description of Artificial Sequence: Synthetic oligonucleotide
  Sense strand starting at position 550 of SEQ ID NO: 586702
augggacuguugucaagau

SEQ ID NO: 737823 - RNA, 19 nt, Artificial Sequence
  Description of Artificial Sequence: Synthetic oligonucleotide
  Antisense strand to SEQ ID NO: 737822
aucuugacaacagucccau

SEQ ID NO: 737824 - RNA, 19 nt, Artificial Sequence
  Description of Artificial Sequence: Synthetic oligonucleotide
  Sense strand starting at position 554 of SEQ ID NO: 586702
gacuguugucaagauuauc

SEQ ID NO: 737825 - RNA, 19 nt, Artificial Sequence
  Description of Artificial Sequence: Synthetic oligonucleotide
  Antisense strand to SEQ ID NO: 737824
gauaaucuugacaacaguc

SEQ ID NO: 737826 - RNA, 19 nt, Artificial Sequence
  Description of Artificial Sequence: Synthetic oligonucleotide
  Sense strand starting at position 585 of SEQ ID NO: 586702
uguagaaagcuuggcacau

SEQ ID NO: 737827 - RNA, 19 nt, Artificial Sequence
  Description of Artificial Sequence: Synthetic oligonucleotide
  Antisense strand to SEQ ID NO: 737826
augugccaagcuuucuaca

SEQ ID NO: 737828 - RNA, 19 nt, Artificial Sequence
  Description of Artificial Sequence: Synthetic oligonucleotide
  Sense strand starting at position 690 of SEQ ID NO: 586702
augccaaagccaugacagu

SEQ ID NO: 737829 - RNA, 19 nt, Artificial Sequence
  Description of Artificial Sequence: Synthetic oligonucleotide
  Antisense strand to SEQ ID NO: 737828
acugucauggcuuuggcau

SEQ ID NO: 737830 - RNA, 19 nt, Artificial Sequence
  Description of Artificial Sequence: Synthetic oligonucleotide
  Sense strand starting at position 948 of SEQ ID NO: 586702
ccaagugagaccugcagaa

SEQ ID NO: 737831 - RNA, 19 nt, Artificial Sequence
  Description of Artificial Sequence: Synthetic oligonucleotide
  Antisense strand to SEQ ID NO: 737830
uucugcaggucucacuugg

SEQ ID NO: 737832 - RNA, 19 nt, Artificial Sequence
  Description of Artificial Sequence: Synthetic oligonucleotide
  Sense strand starting at position 975 of SEQ ID NO: 586702
ucaggacaacucuguacaa

SEQ ID NO: 737833 - RNA, 19 nt, Artificial Sequence
  Description of Artificial Sequence: Synthetic oligonucleotide
  Antisense strand to SEQ ID NO: 737832
uuguacagaguuguccuga

SEQ ID NO: 737834 - RNA, 19 nt, Artificial Sequence
  Description of Artificial Sequence: Synthetic oligonucleotide
  Sense strand starting at position 1041 of SEQ ID NO: 586702
agcauaaggcuguauccua

SEQ ID NO: 737835 - RNA, 19 nt, Artificial Sequence
  Description of Artificial Sequence: Synthetic oligonucleotide
  Antisense strand to SEQ ID NO: 737834
uaggauacagccuuaugcu

SEQ ID NO: 737836 - RNA, 19 nt, Artificial Sequence
  Description of Artificial Sequence: Synthetic oligonucleotide
  Sense strand starting at position 1048 of SEQ ID NO: 586702
ggcuguauccuaggaugac

SEQ ID NO: 737837 - RNA, 19 nt, Artificial Sequence
  Description of Artificial Sequence: Synthetic oligonucleotide
  Antisense strand to SEQ ID NO: 737836
gucauccuaggauacagcc

SEQ ID NO: 737838 - RNA, 19 nt, Artificial Sequence
  Description of Artificial Sequence: Synthetic oligonucleotide
  Sense strand starting at position 1172 of SEQ ID NO: 586702
uagagcauuuccuggaaag

SEQ ID NO: 737839 - RNA, 19 nt, Artificial Sequence
  Description of Artificial Sequence: Synthetic oligonucleotide
  Antisense strand to SEQ ID NO: 737838
cuuuccaggaaaugcucua

SEQ ID NO: 737840 - RNA, 19 nt, Artificial Sequence
  Description of Artificial Sequence: Synthetic oligonucleotide
  Sense strand starting at position 1253 of SEQ ID NO: 586702
gagagccauuccuucgaaa

SEQ ID NO: 737841 - RNA, 19 nt, Artificial Sequence
  Description of Artificial Sequence: Synthetic oligonucleotide
  Antisense strand to SEQ ID NO: 737840
uuucgaaggaauggcucuc

SEQ ID NO: 737842 - RNA, 19 nt, Artificial Sequence
  Description of Artificial Sequence: Synthetic oligonucleotide
  Sense strand starting at position 1265 of SEQ ID NO: 586702
uucgaaaucuaaucauuag

SEQ ID NO: 737843 - RNA, 19 nt, Artificial Sequence
  Description of Artificial Sequence: Synthetic oligonucleotide
  Antisense strand to SEQ ID NO: 737842
cuaaugauuagauuucgaa

SEQ ID NO: 737844 - RNA, 19 nt, Artificial Sequence
  Description of Artificial Sequence: Synthetic oligonucleotide
  Sense strand starting at position 1573 of SEQ ID NO: 586702
acacaagcuuggguuacau

SEQ ID NO: 737845 - RNA, 19 nt, Artificial Sequence
  Description of Artificial Sequence: Synthetic oligonucleotide
  Antisense strand to SEQ ID NO: 737844
auguaacccaagcuugugu

SEQ ID NO: 737846 - RNA, 19 nt, Artificial Sequence
  Description of Artificial Sequence: Synthetic oligonucleotide
  Sense strand starting at position 1586 of SEQ ID NO: 586702
uuacauucuguguacgaau

SEQ ID NO: 737847 - RNA, 19 nt, Artificial Sequence
  Description of Artificial Sequence: Synthetic oligonucleotide
  Antisense strand to SEQ ID NO: 737846
auucguacacagaauguaa

SEQ ID NO: 737848 - RNA, 19 nt, Artificial Sequence
  Description of Artificial Sequence: Synthetic oligonucleotide
  Sense strand starting at position 1593 of SEQ ID NO: 586702
cuguguacgaauggaacaa

SEQ ID NO: 737849 - RNA, 19 nt, Artificial Sequence
  Description of Artificial Sequence: Synthetic oligonucleotide
  Antisense strand to SEQ ID NO: 737848
uuguuccauucguacacag

SEQ ID NO: 737850 - RNA, 19 nt, Artificial Sequence
  Description of Artificial Sequence: Synthetic oligonucleotide
  Sense strand starting at position 1665 of SEQ ID NO: 586702
cguucuguucucgcuaaua

SEQ ID NO: 737851 - RNA, 19 nt, Artificial Sequence
  Description of Artificial Sequence: Synthetic oligonucleotide
  Antisense strand to SEQ ID NO: 737850
uauuagcgagaacagaacg

SEQ ID NO: 737852 - RNA, 19 nt, Artificial Sequence
  Description of Artificial Sequence: Synthetic oligonucleotide
  Sense strand starting at position 1750 of SEQ ID NO: 586702
guguaagcugcgucugcua

SEQ ID NO: 737853 - RNA, 19 nt, Artificial Sequence
  Description of Artificial Sequence: Synthetic oligonucleotide
  Antisense strand to SEQ ID NO: 737852
uagcagacgcagcuuacac

SEQ ID NO: 737854 - RNA, 19 nt, Artificial Sequence
  Description of Artificial Sequence: Synthetic oligonucleotide
  Sense strand starting at position 2166 of SEQ ID NO: 586702
uggcucuucggguaaagau

SEQ ID NO: 737855 - RNA, 19 nt, Artificial Sequence
  Description of Artificial Sequence: Synthetic oligonucleotide
  Antisense strand to SEQ ID NO: 737854
aucuuuacccgaagagcca

SEQ ID NO: 737856 - RNA, 19 nt, Artificial Sequence
  Description of Artificial Sequence: Synthetic oligonucleotide
  Sense strand starting at position 2611 of SEQ ID NO: 586702
cuuggaaucuuggucaaau

SEQ ID NO: 737857 - RNA, 19 nt, Artificial Sequence
  Description of Artificial Sequence: Synthetic oligonucleotide
  Antisense strand to SEQ ID NO: 737856
auuugaccaagauuccaag

SEQ ID NO: 737858 - RNA, 19 nt, Artificial Sequence
  Description of Artificial Sequence: Synthetic oligonucleotide
  Sense strand starting at position 2612 of SEQ ID NO: 586702
uuggaaucuuggucaaaua

SEQ ID NO: 737859 - RNA, 19 nt, Artificial Sequence
  Description of Artificial Sequence: Synthetic oligonucleotide
  Antisense strand to SEQ ID NO: 737858
uauuugaccaagauuccaa

SEQ ID NO: 737860 - RNA, 19 nt, Artificial Sequence
  Description of Artificial Sequence: Synthetic oligonucleotide
  Sense strand starting at position 2960 of SEQ ID NO: 586702
cauggcucucaacgugaga

SEQ ID NO: 737861 - RNA, 19 nt, Artificial Sequence
  Description of Artificial Sequence: Synthetic oligonucleotide
  Antisense strand to SEQ ID NO: 737860
ucucacguugagagccaug

SEQ ID NO: 737862 - RNA, 19 nt, Artificial Sequence
  Description of Artificial Sequence: Synthetic oligonucleotide
  Sense strand starting at position 2962 of SEQ ID NO: 586702
uggcucucaacgugagaaa

SEQ ID NO: 737863 - RNA, 19 nt, Artificial Sequence
  Description of Artificial Sequence: Synthetic oligonucleotide
  Antisense strand to SEQ ID NO: 737862
uuucucacguugagagcca

SEQ ID NO: 737864 - RNA, 19 nt, Artificial Sequence
  Description of Artificial Sequence: Synthetic oligonucleotide
  Sense strand starting at position 3045 of SEQ ID NO: 586702
aucaguaaugcccaguuua

SEQ ID NO: 737865 - RNA, 19 nt, Artificial Sequence
  Description of Artificial Sequence: Synthetic oligonucleotide
  Antisense strand to SEQ ID NO: 737864
uaaacugggcauuacugau

SEQ ID NO: 737866 - RNA, 19 nt, Artificial Sequence
  Description of Artificial Sequence: Synthetic oligonucleotide
  Sense strand starting at position 3096 of SEQ ID NO: 586702
cgggaucuaacuuguugag

SEQ ID NO: 737867 - RNA, 19 nt, Artificial Sequence
  Description of Artificial Sequence: Synthetic oligonucleotide
  Antisense strand to SEQ ID NO: 737866
cucaacaaguuagaucccg

SEQ ID NO: 737868 - RNA, 19 nt, Artificial Sequence
  Description of Artificial Sequence: Synthetic oligonucleotide
  Sense strand starting at position 3098 of SEQ ID NO: 586702
ggaucuaacuuguugagua

SEQ ID NO: 737869 - RNA, 19 nt, Artificial Sequence
  Description of Artificial Sequence: Synthetic oligonucleotide
  Antisense strand to SEQ ID NO: 737868
uacucaacaaguuagaucc

SEQ ID NO: 737870 - RNA, 19 nt, Artificial Sequence
  Description of Artificial Sequence: Synthetic oligonucleotide
  Sense strand starting at position 3102 of SEQ ID NO: 586702
cuaacuuguugaguacuuu

SEQ ID NO: 737871 - RNA, 19 nt, Artificial Sequence
  Description of Artificial Sequence: Synthetic oligonucleotide
  Antisense strand to SEQ ID NO: 737870
aaaguacucaacaaguuag

SEQ ID NO: 737872 - RNA, 19 nt, Artificial Sequence
  Description of Artificial Sequence: Synthetic oligonucleotide
  Sense strand starting at position 3117 of SEQ ID NO: 586702
cuuuguuaggugcaacuua

SEQ ID NO: 737873 - RNA, 19 nt, Artificial Sequence
  Description of Artificial Sequence: Synthetic oligonucleotide
  Antisense strand to SEQ ID NO: 737872
uaaguugcaccuaacaaag

SEQ ID NO: 737874 - RNA, 19 nt, Artificial Sequence
  Description of Artificial Sequence: Synthetic oligonucleotide
  Sense strand starting at position 3163 of SEQ ID NO: 586702
ugcuauaaugaauguuauc

SEQ ID NO: 737875 - RNA, 19 nt, Artificial Sequence
  Description of Artificial Sequence: Synthetic oligonucleotide
  Antisense strand to SEQ ID NO: 737874
gauaacauucauuauagca

SEQ ID NO: 737876 - RNA, 19 nt, Artificial Sequence
  Description of Artificial Sequence: Synthetic oligonucleotide
  Sense strand starting at position 3246 of SEQ ID NO: 586702
gugaguagcugaguugaca

SEQ ID NO: 737877 - RNA, 19 nt, Artificial Sequence
  Description of Artificial Sequence: Synthetic oligonucleotide
  Antisense strand to SEQ ID NO: 737876
ugucaacucagcuacucac

SEQ ID NO: 737878 - RNA, 19 nt, Artificial Sequence
  Description of Artificial Sequence: Synthetic oligonucleotide
  Sense strand starting at position 3307 of SEQ ID NO: 586702
auuacauaacguugucuua

SEQ ID NO: 737879 - RNA, 19 nt, Artificial Sequence
  Description of Artificial Sequence: Synthetic oligonucleotide
  Antisense strand to SEQ ID NO: 737878
uaagacaacguuauguaau

SEQ ID NO: 737880 - RNA, 19 nt, Artificial Sequence
  Description of Artificial Sequence: Synthetic oligonucleotide
  Sense strand starting at position 3310 of SEQ ID NO: 586702
acauaacguugucuuaaau

SEQ ID NO: 737881 - RNA, 19 nt, Artificial Sequence
  Description of Artificial Sequence: Synthetic oligonucleotide
  Antisense strand to SEQ ID NO: 737880
auuuaagacaacguuaugu

SEQ ID NO: 737882 - RNA, 19 nt, Artificial Sequence
  Description of Artificial Sequence: Synthetic oligonucleotide
  Sense strand starting at position 3363 of SEQ ID NO: 586702
agcaguggguguauguaau

SEQ ID NO: 737883 - RNA, 19 nt, Artificial Sequence
  Description of Artificial Sequence: Synthetic oligonucleotide
  Antisense strand to SEQ ID NO: 737882
auuacauacacccacugcu

SEQ ID NO: 737884 - RNA, 19 nt, Artificial Sequence
  Description of Artificial Sequence: Synthetic oligonucleotide
  Sense strand starting at position 3391 of SEQ ID NO: 586702
guaaccuuugaacgagauu

SEQ ID NO: 737885 - RNA, 19 nt, Artificial Sequence
  Description of Artificial Sequence: Synthetic oligonucleotide
  Antisense strand to SEQ ID NO: 737884
aaucucguucaaagguuac

SEQ ID NO: 737886 - RNA, 19 nt, Artificial Sequence
  Description of Artificial Sequence: Synthetic oligonucleotide
  Sense strand starting at position 3452 of SEQ ID NO: 586702
cagaauagugugugcagga

SEQ ID NO: 737887 - RNA, 19 nt, Artificial Sequence
  Description of Artificial Sequence: Synthetic oligonucleotide
  Antisense strand to SEQ ID NO: 737886
uccugcacacacuauucug

SEQ ID NO: 737888 - RNA, 19 nt, Artificial Sequence
  Description of Artificial Sequence: Synthetic oligonucleotide
  Sense strand starting at position 3453 of SEQ ID NO: 586702
agaauagugugugcaggau

SEQ ID NO: 737889 - RNA, 19 nt, Artificial Sequence
  Description of Artificial Sequence: Synthetic oligonucleotide
  Antisense strand to SEQ ID NO: 737888
auccugcacacacuauucu

SEQ ID NO: 737890 - RNA, 19 nt, Artificial Sequence
  Description of Artificial Sequence: Synthetic oligonucleotide
  Sense strand starting at position 3481 of SEQ ID NO: 586702
guuccuauuuaugaagaaa

SEQ ID NO: 737891 - RNA, 19 nt, Artificial Sequence
  Description of Artificial Sequence: Synthetic oligonucleotide
  Antisense strand to SEQ ID NO: 737890
uuucuucauaaauaggaac

SEQ ID NO: 737892 - RNA, 19 nt, Artificial Sequence
  Description of Artificial Sequence: Synthetic oligonucleotide
  Sense strand starting at position 3689 of SEQ ID NO: 586702
aagaaaguguaauccuagu

SEQ ID NO: 737893 - RNA, 19 nt, Artificial Sequence
  Description of Artificial Sequence: Synthetic oligonucleotide
  Antisense strand to SEQ ID NO: 737892
acuaggauuacacuuucuu

SEQ ID NO: 737894 - RNA, 19 nt, Artificial Sequence
  Description of Artificial Sequence: Synthetic oligonucleotide
  Sense strand starting at position 83 of SEQ ID NO: 586703
uugugaauugugcauggua

SEQ ID NO: 737895 - RNA, 19 nt, Artificial Sequence
  Description of Artificial Sequence: Synthetic oligonucleotide
  Antisense strand to SEQ ID NO: 737894
uaccaugcacaauucacaa

SEQ ID NO: 737896 - RNA, 19 nt, Artificial Sequence
  Description of Artificial Sequence: Synthetic oligonucleotide
  Sense strand starting at position 405 of SEQ ID NO: 586703
agcaguuagaguggauuga

SEQ ID NO: 737897 - RNA, 19 nt, Artificial Sequence
  Description of Artificial Sequence: Synthetic oligonucleotide
  Antisense strand to SEQ ID NO: 737896
ucaauccacucuaacugcu

SEQ ID NO: 737898 - RNA, 19 nt, Artificial Sequence
  Description of Artificial Sequence: Synthetic oligonucleotide
  Sense strand starting at position 409 of SEQ ID NO: 586703
guuagaguggauugacauu

SEQ ID NO: 737899 - RNA, 19 nt, Artificial Sequence
  Description of Artificial Sequence: Synthetic oligonucleotide
  Antisense strand to SEQ ID NO: 737898
aaugucaauccacucuaac

SEQ ID NO: 737900 - RNA, 19 nt, Artificial Sequence
  Description of Artificial Sequence: Synthetic oligonucleotide
  Sense strand starting at position 415 of SEQ ID NO: 586703
guggauugacauuaacugu

SEQ ID NO: 737901 - RNA, 19 nt, Artificial Sequence
  Description of Artificial Sequence: Synthetic oligonucleotide
  Antisense strand to SEQ ID NO: 737900
acaguuaaugucaauccac

SEQ ID NO: 737902 - RNA, 19 nt, Artificial Sequence
  Description of Artificial Sequence: Synthetic oligonucleotide
  Sense strand starting at position 441 of SEQ ID NO: 586703
gaauguguaaaccguguua

SEQ ID NO: 737903 - RNA, 19 nt, Artificial Sequence
  Description of Artificial Sequence: Synthetic oligonucleotide
  Antisense strand to SEQ ID NO: 737902
uaacacgguuuacacauuc

SEQ ID NO: 737904 - RNA, 19 nt, Artificial Sequence
  Description of Artificial Sequence: Synthetic oligonucleotide
  Sense strand starting at position 443 of SEQ ID NO: 586703
auguguaaaccguguuaua

SEQ ID NO: 737905 - RNA, 19 nt, Artificial Sequence
  Description of Artificial Sequence: Synthetic oligonucleotide
  Antisense strand to SEQ ID NO: 737904
uauaacacgguuuacacau

SEQ ID NO: 737906 - RNA, 19 nt, Artificial Sequence
  Description of Artificial Sequence: Synthetic oligonucleotide
  Sense strand starting at position 454 of SEQ ID NO: 586703
guguuauaccuacagacca

SEQ ID NO: 737907 - RNA, 19 nt, Artificial Sequence
  Description of Artificial Sequence: Synthetic oligonucleotide
  Antisense strand to SEQ ID NO: 737906
uggucuguagguauaacac

SEQ ID NO: 737908 - RNA, 19 nt, Artificial Sequence
  Description of Artificial Sequence: Synthetic oligonucleotide
  Sense strand starting at position 506 of SEQ ID NO: 586703
agacaucuuuacugagaga

SEQ ID NO: 737909 - RNA, 19 nt, Artificial Sequence
  Description of Artificial Sequence: Synthetic oligonucleotide
  Antisense strand to SEQ ID NO: 737908
ucucucaguaaagaugucu

SEQ ID NO: 737910 - RNA, 19 nt, Artificial Sequence
  Description of Artificial Sequence: Synthetic oligonucleotide
  Sense strand starting at position 549 of SEQ ID NO: 586703
aggacaugguggugauuua

SEQ ID NO: 737911 - RNA, 19 nt, Artificial Sequence
  Description of Artificial Sequence: Synthetic oligonucleotide
  Antisense strand to SEQ ID NO: 737910
uaaaucaccaccauguccu

SEQ ID NO: 737912 - RNA, 19 nt, Artificial Sequence
  Description of Artificial Sequence: Synthetic oligonucleotide
  Sense strand starting at position 728 of SEQ ID NO: 586703
uggcuuuggucaccugaaa

SEQ ID NO: 737913 - RNA, 19 nt, Artificial Sequence
  Description of Artificial Sequence: Synthetic oligonucleotide
  Antisense strand to SEQ ID NO: 737912
uuucaggugaccaaagcca

SEQ ID NO: 737914 - RNA, 19 nt, Artificial Sequence
  Description of Artificial Sequence: Synthetic oligonucleotide
  Sense strand starting at position 760 of SEQ ID NO: 586703
gucucauauucuggugguu

SEQ ID NO: 737915 - RNA, 19 nt, Artificial Sequence
  Description of Artificial Sequence: Synthetic oligonucleotide
  Antisense strand to SEQ ID NO: 737914
aaccaccagaauaugagac

SEQ ID NO: 737916 - RNA, 19 nt, Artificial Sequence
  Description of Artificial Sequence: Synthetic oligonucleotide
  Sense strand starting at position 762 of SEQ ID NO: 586703
cucauauucuggugguuau

SEQ ID NO: 737917 - RNA, 19 nt, Artificial Sequence
  Description of Artificial Sequence: Synthetic oligonucleotide
  Antisense strand to SEQ ID NO: 737916
auaaccaccagaauaugag

SEQ ID NO: 737918 - RNA, 19 nt, Artificial Sequence
  Description of Artificial Sequence: Synthetic oligonucleotide
  Sense strand starting at position 765 of SEQ ID NO: 586703
auauucuggugguuaugau

SEQ ID NO: 737919 - RNA, 19 nt, Artificial Sequence
  Description of Artificial Sequence: Synthetic oligonucleotide
  Antisense strand to SEQ ID NO: 737918
aucauaaccaccagaauau

SEQ ID NO: 737920 - RNA, 19 nt, Artificial Sequence
  Description of Artificial Sequence: Synthetic oligonucleotide
  Sense strand starting at position 774 of SEQ ID NO: 586703
ugguuaugaugccacauga

SEQ ID NO: 737921 - RNA, 19 nt, Artificial Sequence
  Description of Artificial Sequence: Synthetic oligonucleotide
  Antisense strand to SEQ ID NO: 737920
ucauguggcaucauaacca

SEQ ID NO: 737922 - RNA, 19 nt, Artificial Sequence
  Description of Artificial Sequence: Synthetic oligonucleotide
  Sense strand starting at position 803 of SEQ ID NO: 586703
aagaacuguccagguuagu

SEQ ID NO: 737923 - RNA, 19 nt, Artificial Sequence
  Description of Artificial Sequence: Synthetic oligonucleotide
  Antisense strand to SEQ ID NO: 737922
acuaaccuggacaguucuu

SEQ ID NO: 737924 - RNA, 19 nt, Artificial Sequence
  Description of Artificial Sequence: Synthetic oligonucleotide
  Sense strand starting at position 1186 of SEQ ID NO: 586703
agaugaaguuuaguucuuu

SEQ ID NO: 737925 - RNA, 19 nt, Artificial Sequence
  Description of Artificial Sequence: Synthetic oligonucleotide
  Antisense strand to SEQ ID NO: 737924
aaagaacuaaacuucaucu

SEQ ID NO: 737926 - RNA, 19 nt, Artificial Sequence
  Description of Artificial Sequence: Synthetic oligonucleotide
  Sense strand starting at position 1531 of SEQ ID NO: 586703
cuuacaaagcgguaacuuu

SEQ ID NO: 737927 - RNA, 19 nt, Artificial Sequence
  Description of Artificial Sequence: Synthetic oligonucleotide
  Antisense strand to SEQ ID NO: 737926
aaaguuaccgcuuuguaag

SEQ ID NO: 737928 - RNA, 19 nt, Artificial Sequence
  Description of Artificial Sequence: Synthetic oligonucleotide
  Sense strand starting at position 1590 of SEQ ID NO: 586703
aggccuauuucgcaggagu

SEQ ID NO: 737929 - RNA, 19 nt, Artificial Sequence
  Description of Artificial Sequence: Synthetic oligonucleotide
  Antisense strand to SEQ ID NO: 737928
acuccugcgaaauaggccu

SEQ ID NO: 737930 - RNA, 19 nt, Artificial Sequence
  Description of Artificial Sequence: Synthetic oligonucleotide
  Sense strand starting at position 1601 of SEQ ID NO: 586703
gcaggagugcuuugagaau

SEQ ID NO: 737931 - RNA, 19 nt, Artificial Sequence
  Description of Artificial Sequence: Synthetic oligonucleotide
  Antisense strand to SEQ ID NO: 737930
auucucaaagcacuccugc

SEQ ID NO: 737932 - RNA, 19 nt, Artificial Sequence
  Description of Artificial Sequence: Synthetic oligonucleotide
  Sense strand starting at position 1634 of SEQ ID NO: 586703
gcucaauaccacggacaaa

SEQ ID NO: 737933 - RNA, 19 nt, Artificial Sequence
  Description of Artificial Sequence: Synthetic oligonucleotide
  Antisense strand to SEQ ID NO: 737932
uuuguccgugguauugagc

SEQ ID NO: 737934 - RNA, 19 nt, Artificial Sequence
  Description of Artificial Sequence: Synthetic oligonucleotide
  Sense strand starting at position 1657 of SEQ ID NO: 586703
ggacguuacuggucccuua

SEQ ID NO: 737935 - RNA, 19 nt, Artificial Sequence
  Description of Artificial Sequence: Synthetic oligonucleotide
  Antisense strand to SEQ ID NO: 737934
uaagggaccaguaacgucc

SEQ ID NO: 737936 - RNA, 19 nt, Artificial Sequence
  Description of Artificial Sequence: Synthetic oligonucleotide
  Sense strand starting at position 2107 of SEQ ID NO: 586703
agccgugggcggaguuaaa

SEQ ID NO: 737937 - RNA, 19 nt, Artificial Sequence
  Description of Artificial Sequence: Synthetic oligonucleotide
  Antisense strand to SEQ ID NO: 737936
uuuaacuccgcccacggcu

SEQ ID NO: 737938 - RNA, 19 nt, Artificial Sequence
  Description of Artificial Sequence: Synthetic oligonucleotide
  Sense strand starting at position 2228 of SEQ ID NO: 586703
gcaggagguuucggacuuu

SEQ ID NO: 737939 - RNA, 19 nt, Artificial Sequence
  Description of Artificial Sequence: Synthetic oligonucleotide
  Antisense strand to SEQ ID NO: 737938
aaaguccgaaaccuccugc

SEQ ID NO: 737940 - RNA, 19 nt, Artificial Sequence
  Description of Artificial Sequence: Synthetic oligonucleotide
  Sense strand starting at position 2908 of SEQ ID NO: 586703
cugaccaguuauuguauca

SEQ ID NO: 737941 - RNA, 19 nt, Artificial Sequence
  Description of Artificial Sequence: Synthetic oligonucleotide
  Antisense strand to SEQ ID NO: 737940
ugauacaauaacuggucag

SEQ ID NO: 737942 - RNA, 19 nt, Artificial Sequence
  Description of Artificial Sequence: Synthetic oligonucleotide
  Sense strand starting at position 2913 of SEQ ID NO: 586703
caguuauuguaucagaagu

SEQ ID NO: 737943 - RNA, 19 nt, Artificial Sequence
  Description of Artificial Sequence: Synthetic oligonucleotide
  Antisense strand to SEQ ID NO: 737942
acuucugauacaauaacug

SEQ ID NO: 737944 - RNA, 19 nt, Artificial Sequence
  Description of Artificial Sequence: Synthetic oligonucleotide
  Sense strand starting at position 2915 of SEQ ID NO: 586703
guuauuguaucagaaguuu

SEQ ID NO: 737945 - RNA, 19 nt, Artificial Sequence
  Description of Artificial Sequence: Synthetic oligonucleotide
  Antisense strand to SEQ ID NO: 737944
aaacuucugauacaauaac

SEQ ID NO: 737946 - RNA, 19 nt, Artificial Sequence
  Description of Artificial Sequence: Synthetic oligonucleotide
  Sense strand starting at position 2955 of SEQ ID NO: 586703
gggagugguacuuagcaac

SEQ ID NO: 737947 - RNA, 19 nt, Artificial Sequence
  Description of Artificial Sequence: Synthetic oligonucleotide
  Antisense strand to SEQ ID NO: 737946
guugcuaaguaccacuccc

SEQ ID NO: 737948 - RNA, 19 nt, Artificial Sequence
  Description of Artificial Sequence: Synthetic oligonucleotide
  Sense strand starting at position 2958 of SEQ ID NO: 586703
agugguacuuagcaacaaa

SEQ ID NO: 737949 - RNA, 19 nt, Artificial Sequence
  Description of Artificial Sequence: Synthetic oligonucleotide
  Antisense strand to SEQ ID NO: 737948
uuuguugcuaaguaccacu

SEQ ID NO: 737950 - RNA, 19 nt, Artificial Sequence
  Description of Artificial Sequence: Synthetic oligonucleotide
  Sense strand starting at position 2976 of SEQ ID NO: 586703
agcucugagugcuagguga

SEQ ID NO: 737951 - RNA, 19 nt, Artificial Sequence
  Description of Artificial Sequence: Synthetic oligonucleotide
  Antisense strand to SEQ ID NO: 737950
ucaccuagcacucagagcu

SEQ ID NO: 737952 - RNA, 19 nt, Artificial Sequence
  Description of Artificial Sequence: Synthetic oligonucleotide
  Sense strand starting at position 2980 of SEQ ID NO: 586703
cugagugcuaggugagcaa

SEQ ID NO: 737953 - RNA, 19 nt, Artificial Sequence
  Description of Artificial Sequence: Synthetic oligonucleotide
  Antisense strand to SEQ ID NO: 737952
uugcucaccuagcacucag

SEQ ID NO: 737954 - RNA, 19 nt, Artificial Sequence
  Description of Artificial Sequence: Synthetic oligonucleotide
  Sense strand starting at position 2995 of SEQ ID NO: 586703
gcaacuugcuacugggauu

SEQ ID NO: 737955 - RNA, 19 nt, Artificial Sequence
  Description of Artificial Sequence: Synthetic oligonucleotide
  Antisense strand to SEQ ID NO: 737954
aaucccaguagcaaguugc

SEQ ID NO: 737956 - RNA, 19 nt, Artificial Sequence
  Description of Artificial Sequence: Synthetic oligonucleotide
  Sense strand starting at position 3035 of SEQ ID NO: 586703
agcagauguagcuaucgau

SEQ ID NO: 737957 - RNA, 19 nt, Artificial Sequence
  Description of Artificial Sequence: Synthetic oligonucleotide
  Antisense strand to SEQ ID NO: 737956
aucgauagcuacaucugcu

SEQ ID NO: 737958 - RNA, 19 nt, Artificial Sequence
  Description of Artificial Sequence: Synthetic oligonucleotide
  Sense strand starting at position 3038 of SEQ ID NO: 586703
agauguagcuaucgauaca

SEQ ID NO: 737959 - RNA, 19 nt, Artificial Sequence
  Description of Artificial Sequence: Synthetic oligonucleotide
  Antisense strand to SEQ ID NO: 737958
uguaucgauagcuacaucu

SEQ ID NO: 737960 - RNA, 19 nt, Artificial Sequence
  Description of Artificial Sequence: Synthetic oligonucleotide
  Sense strand starting at position 3561 of SEQ ID NO: 586703
uucuaagugaugcgugaga

SEQ ID NO: 737961 - RNA, 19 nt, Artificial Sequence
  Description of Artificial Sequence: Synthetic oligonucleotide
  Antisense strand to SEQ ID NO: 737960
ucucacgcaucacuuagaa

SEQ ID NO: 737962 - RNA, 19 nt, Artificial Sequence
  Description of Artificial Sequence: Synthetic oligonucleotide
  Sense strand starting at position 3563 of SEQ ID NO: 586703
cuaagugaugcgugagauu

SEQ ID NO: 737963 - RNA, 19 nt, Artificial Sequence
  Description of Artificial Sequence: Synthetic oligonucleotide
  Antisense strand to SEQ ID NO: 737962
aaucucacgcaucacuuag

SEQ ID NO: 737964 - RNA, 19 nt, Artificial Sequence
  Description of Artificial Sequence: Synthetic oligonucleotide
  Sense strand starting at position 3566 of SEQ ID NO: 586703
agugaugcgugagauuauu

SEQ ID NO: 737965 - RNA, 19 nt, Artificial Sequence
  Description of Artificial Sequence: Synthetic oligonucleotide
  Antisense strand to SEQ ID NO: 737964
aauaaucucacgcaucacu

SEQ ID NO: 737966 - RNA, 19 nt, Artificial Sequence
  Description of Artificial Sequence: Synthetic oligonucleotide
  Sense strand starting at position 3599 of SEQ ID NO: 586703
uuguccuuagaguguacaa

SEQ ID NO: 737967 - RNA, 19 nt, Artificial Sequence
  Description of Artificial Sequence: Synthetic oligonucleotide
  Antisense strand to SEQ ID NO: 737966
uuguacacucuaaggacaa

SEQ ID NO: 737968 - RNA, 19 nt, Artificial Sequence
  Description of Artificial Sequence: Synthetic oligonucleotide
  Sense strand starting at position 3601 of SEQ ID NO: 586703
guccuuagaguguacaaug

SEQ ID NO: 737969 - RNA, 19 nt, Artificial Sequence
  Description of Artificial Sequence: Synthetic oligonucleotide
  Antisense strand to SEQ ID NO: 737968
cauuguacacucuaaggac

SEQ ID NO: 737970 - RNA, 19 nt, Artificial Sequence
  Description of Artificial Sequence: Synthetic oligonucleotide
  Sense strand starting at position 3714 of SEQ ID NO: 586703
gacggagucucgcucacaa

SEQ ID NO: 737971 - RNA, 19 nt, Artificial Sequence
  Description of Artificial Sequence: Synthetic oligonucleotide
  Antisense strand to SEQ ID NO: 737970
uugugagcgagacuccguc

SEQ ID NO: 737972 - RNA, 19 nt, Artificial Sequence
  Description of Artificial Sequence: Synthetic oligonucleotide
  Sense strand starting at position 3886 of SEQ ID NO: 586703
gucuccaucuugugaccua

SEQ ID NO: 737973 - RNA, 19 nt, Artificial Sequence
  Description of Artificial Sequence: Synthetic oligonucleotide
  Antisense strand to SEQ ID NO: 737972
uaggucacaagauggagac

SEQ ID NO: 737974 - RNA, 19 nt, Artificial Sequence
  Description of Artificial Sequence: Synthetic oligonucleotide
  Sense strand starting at position 295 of SEQ ID NO: 586704
uuaaguaaguucucuagau

SEQ ID NO: 737975 - RNA, 19 nt, Artificial Sequence
  Description of Artificial Sequence: Synthetic oligonucleotide
  Antisense strand to SEQ ID NO: 737974
aucuagagaacuuacuuaa

SEQ ID NO: 737976 - RNA, 19 nt, Artificial Sequence
  Description of Artificial Sequence: Synthetic oligonucleotide
  Sense strand starting at position 296 of SEQ ID NO: 586704
uaaguaaguucucuagaug

SEQ ID NO: 737977 - RNA, 19 nt, Artificial Sequence
  Description of Artificial Sequence: Synthetic oligonucleotide
  Antisense strand to SEQ ID NO: 737976
caucuagagaacuuacuua

SEQ ID NO: 737978 - RNA, 19 nt, Artificial Sequence
  Description of Artificial Sequence: Synthetic oligonucleotide
  Sense strand starting at position 297 of SEQ ID NO: 586704
aaguaaguucucuagaugc

SEQ ID NO: 737979 - RNA, 19 nt, Artificial Sequence
  Description of Artificial Sequence: Synthetic oligonucleotide
  Antisense strand to SEQ ID NO: 737978
gcaucuagagaacuuacuu

SEQ ID NO: 737980 - RNA, 19 nt, Artificial Sequence
  Description of Artificial Sequence: Synthetic oligonucleotide
  Sense strand starting at position 350 of SEQ ID NO: 586704
agcacaguugguuaucaau

SEQ ID NO: 737981 - RNA, 19 nt, Artificial Sequence
  Description of Artificial Sequence: Synthetic oligonucleotide
  Antisense strand to SEQ ID NO: 737980
auugauaaccaacugugcu

SEQ ID NO: 737982 - RNA, 19 nt, Artificial Sequence
  Description of Artificial Sequence: Synthetic oligonucleotide
  Sense strand starting at position 440 of SEQ ID NO: 586704
ggugaaauacaggguuaga

SEQ ID NO: 737983 - RNA, 19 nt, Artificial Sequence
  Description of Artificial Sequence: Synthetic oligonucleotide
  Antisense strand to SEQ ID NO: 737982
ucuaacccuguauuucacc

SEQ ID NO: 737984 - RNA, 19 nt, Artificial Sequence
  Description of Artificial Sequence: Synthetic oligonucleotide
  Sense strand starting at position 592 of SEQ ID NO: 586704
gcaacucaugacugaagaa

SEQ ID NO: 737985 - RNA, 19 nt, Artificial Sequence
  Description of Artificial Sequence: Synthetic oligonucleotide
  Antisense strand to SEQ ID NO: 737984
uucuucagucaugaguugc

SEQ ID NO: 737986 - RNA, 19 nt, Artificial Sequence
  Description of Artificial Sequence: Synthetic oligonucleotide
  Sense strand starting at position 966 of SEQ ID NO: 586704
gaggguugucuguauauau

SEQ ID NO: 737987 - RNA, 19 nt, Artificial Sequence
  Description of Artificial Sequence: Synthetic oligonucleotide
  Antisense strand to SEQ ID NO: 737986
auauauacagacaacccuc

SEQ ID NO: 737988 - RNA, 19 nt, Artificial Sequence
  Description of Artificial Sequence: Synthetic oligonucleotide
  Sense strand starting at position 1169 of SEQ ID NO: 586704
uguucaguggaggaucaau

SEQ ID NO: 737989 - RNA, 19 nt, Artificial Sequence
  Description of Artificial Sequence: Synthetic oligonucleotide
  Antisense strand to SEQ ID NO: 737988
auugauccuccacugaaca

SEQ ID NO: 737990 - RNA, 19 nt, Artificial Sequence
  Description of Artificial Sequence: Synthetic oligonucleotide
  Sense strand starting at position 1314 of SEQ ID NO: 586704
cuagcauuauuuccugagu

SEQ ID NO: 737991 - RNA, 19 nt, Artificial Sequence
  Description of Artificial Sequence: Synthetic oligonucleotide
  Antisense strand to SEQ ID NO: 737990
acucaggaaauaaugcuag

SEQ ID NO: 737992 - RNA, 19 nt, Artificial Sequence
  Description of Artificial Sequence: Synthetic oligonucleotide
  Sense strand starting at position 1543 of SEQ ID NO: 586704
ggccgugacuccacgagau

SEQ ID NO: 737993 - RNA, 19 nt, Artificial Sequence
  Description of Artificial Sequence: Synthetic oligonucleotide
  Antisense strand to SEQ ID NO: 737992
aucucguggagucacggcc

SEQ ID NO: 737994 - RNA, 19 nt, Artificial Sequence
  Description of Artificial Sequence: Synthetic oligonucleotide
  Sense strand starting at position 2357 of SEQ ID NO: 586704
uccaaauaauauucguaga

SEQ ID NO: 737995 - RNA, 19 nt, Artificial Sequence
  Description of Artificial Sequence: Synthetic oligonucleotide
  Antisense strand to SEQ ID NO: 737994
ucuacgaauauuauuugga

SEQ ID NO: 737996 - RNA, 19 nt, Artificial Sequence
  Description of Artificial Sequence: Synthetic oligonucleotide
  Sense strand starting at position 2461 of SEQ ID NO: 586704
ggaugacuuacgcaguuau

SEQ ID NO: 737997 - RNA, 19 nt, Artificial Sequence
  Description of Artificial Sequence: Synthetic oligonucleotide
  Antisense strand to SEQ ID NO: 737996
auaacugcguaagucaucc

SEQ ID NO: 737998 - RNA, 19 nt, Artificial Sequence
  Description of Artificial Sequence: Synthetic oligonucleotide
  Sense strand starting at position 2481 of SEQ ID NO: 586704
caagaauggguuugccaca

SEQ ID NO: 737999 - RNA, 19 nt, Artificial Sequence
  Description of Artificial Sequence: Synthetic oligonucleotide
  Antisense strand to SEQ ID NO: 737998
uguggcaaacccauucuug

SEQ ID NO: 738000 - RNA, 19 nt, Artificial Sequence
  Description of Artificial Sequence: Synthetic oligonucleotide
  Sense strand starting at position 2620 of SEQ ID NO: 586704
ccacuauuauugguaucca

SEQ ID NO: 738001 - RNA, 19 nt, Artificial Sequence
  Description of Artificial Sequence: Synthetic oligonucleotide
  Antisense strand to SEQ ID NO: 738000
uggauaccaauaauagugg

SEQ ID NO: 738002 - RNA, 19 nt, Artificial Sequence
  Description of Artificial Sequence: Synthetic oligonucleotide
  Sense strand starting at position 2628 of SEQ ID NO: 586704
auugguauccaguaauuau

SEQ ID NO: 738003 - RNA, 19 nt, Artificial Sequence
  Description of Artificial Sequence: Synthetic oligonucleotide
  Antisense strand to SEQ ID NO: 738002
auaauuacuggauaccaau

SEQ ID NO: 738004 - RNA, 19 nt, Artificial Sequence
  Description of Artificial Sequence: Synthetic oligonucleotide
  Sense strand starting at position 2631 of SEQ ID NO: 586704
gguauccaguaauuauuaa

SEQ ID NO: 738005 - RNA, 19 nt, Artificial Sequence
  Description of Artificial Sequence: Synthetic oligonucleotide
  Antisense strand to SEQ ID NO: 738004
uuaauaauuacuggauacc

SEQ ID NO: 738006 - RNA, 19 nt, Artificial Sequence
  Description of Artificial Sequence: Synthetic oligonucleotide
  Sense strand starting at position 2724 of SEQ ID NO: 586704
uggagucagacccauguau

SEQ ID NO: 738007 - RNA, 19 nt, Artificial Sequence
  Description of Artificial Sequence: Synthetic oligonucleotide
  Antisense strand to SEQ ID NO: 738006
auacaugggucugacucca

SEQ ID NO: 738008 - RNA, 19 nt, Artificial Sequence
  Description of Artificial Sequence: Synthetic oligonucleotide
  Sense strand starting at position 2726 of SEQ ID NO: 586704
gagucagacccauguauaa

SEQ ID NO: 738009 - RNA, 19 nt, Artificial Sequence
  Description of Artificial Sequence: Synthetic oligonucleotide
  Antisense strand to SEQ ID NO: 738008
uuauacaugggucugacuc

SEQ ID NO: 738010 - RNA, 19 nt, Artificial Sequence
  Description of Artificial Sequence: Synthetic oligonucleotide
  Sense strand starting at position 2739 of SEQ ID NO: 586704
guauaacaaucuuuguaca

SEQ ID NO: 738011 - RNA, 19 nt, Artificial Sequence
  Description of Artificial Sequence: Synthetic oligonucleotide
  Antisense strand to SEQ ID NO: 738010
uguacaaagauuguuauac

SEQ ID NO: 738012 - RNA, 19 nt, Artificial Sequence
  Description of Artificial Sequence: Synthetic oligonucleotide
  Sense strand starting at position 2741 of SEQ ID NO: 586704
auaacaaucuuuguacagu

SEQ ID NO: 738013 - RNA, 19 nt, Artificial Sequence
  Description of Artificial Sequence: Synthetic oligonucleotide
  Antisense strand to SEQ ID NO: 738012
acuguacaaagauuguuau

SEQ ID NO: 738014 - RNA, 19 nt, Artificial Sequence
  Description of Artificial Sequence: Synthetic oligonucleotide
  Sense strand starting at position 2744 of SEQ ID NO: 586704
acaaucuuuguacaguuaa

SEQ ID NO: 738015 - RNA, 19 nt, Artificial Sequence
  Description of Artificial Sequence: Synthetic oligonucleotide
  Antisense strand to SEQ ID NO: 738014
uuaacuguacaaagauugu

SEQ ID NO: 738016 - RNA, 19 nt, Artificial Sequence
  Description of Artificial Sequence: Synthetic oligonucleotide
  Sense strand starting at position 2757 of SEQ ID NO: 586704
aguuaagacucaguucuau

SEQ ID NO: 738017 - RNA, 19 nt, Artificial Sequence
  Description of Artificial Sequence: Synthetic oligonucleotide
  Antisense strand to SEQ ID NO: 738016
auagaacugagucuuaacu

SEQ ID NO: 738018 - RNA, 19 nt, Artificial Sequence
  Description of Artificial Sequence: Synthetic oligonucleotide
  Sense strand starting at position 3009 of SEQ ID NO: 586704
ggaaaugaguugcccauga

SEQ ID NO: 738019 - RNA, 19 nt, Artificial Sequence
  Description of Artificial Sequence: Synthetic oligonucleotide
  Antisense strand to SEQ ID NO: 738018
ucaugggcaacucauuucc

SEQ ID NO: 738020 - RNA, 19 nt, Artificial Sequence
  Description of Artificial Sequence: Synthetic oligonucleotide
  Sense strand starting at position 3096 of SEQ ID NO: 586704
ugaccaagauuccucugau

SEQ ID NO: 738021 - RNA, 19 nt, Artificial Sequence
  Description of Artificial Sequence: Synthetic oligonucleotide
  Antisense strand to SEQ ID NO: 738020
aucagaggaaucuugguca

SEQ ID NO: 738022 - RNA, 19 nt, Artificial Sequence
  Description of Artificial Sequence: Synthetic oligonucleotide
  Sense strand starting at position 3102 of SEQ ID NO: 586704
agauuccucugauuacaug

SEQ ID NO: 738023 - RNA, 19 nt, Artificial Sequence
  Description of Artificial Sequence: Synthetic oligonucleotide
  Antisense strand to SEQ ID NO: 738022
cauguaaucagaggaaucu

SEQ ID NO: 738024 - RNA, 19 nt, Artificial Sequence
  Description of Artificial Sequence: Synthetic oligonucleotide
  Sense strand starting at position 3151 of SEQ ID NO: 586704
aggacaaggucuuccaugu

SEQ ID NO: 738025 - RNA, 19 nt, Artificial Sequence
  Description of Artificial Sequence: Synthetic oligonucleotide
  Antisense strand to SEQ ID NO: 738024
acauggaagaccuuguccu

SEQ ID NO: 738026 - RNA, 19 nt, Artificial Sequence
  Description of Artificial Sequence: Synthetic oligonucleotide
  Sense strand starting at position 3427 of SEQ ID NO: 586704
ucugaauugccugagucca

SEQ ID NO: 738027 - RNA, 19 nt, Artificial Sequence
  Description of Artificial Sequence: Synthetic oligonucleotide
  Antisense strand to SEQ ID NO: 738026
uggacucaggcaauucaga

SEQ ID NO: 738028 - RNA, 19 nt, Artificial Sequence
  Description of Artificial Sequence: Synthetic oligonucleotide
  Sense strand starting at position 3429 of SEQ ID NO: 586704
ugaauugccugaguccaaa

SEQ ID NO: 738029 - RNA, 19 nt, Artificial Sequence
  Description of Artificial Sequence: Synthetic oligonucleotide
  Antisense strand to SEQ ID NO: 738028
uuuggacucaggcaauuca

SEQ ID NO: 738030 - RNA, 19 nt, Artificial Sequence
  Description of Artificial Sequence: Synthetic oligonucleotide
  Sense strand starting at position 3441 of SEQ ID NO: 586704
guccaaaucguggacccaa

SEQ ID NO: 738031 - RNA, 19 nt, Artificial Sequence
  Description of Artificial Sequence: Synthetic oligonucleotide
  Antisense strand to SEQ ID NO: 738030
uuggguccacgauuuggac

SEQ ID NO: 738032 - RNA, 19 nt, Artificial Sequence
  Description of Artificial Sequence: Synthetic oligonucleotide
  Sense strand starting at position 3460 of SEQ ID NO: 586704
ugcuuccuggcuguguaau

SEQ ID NO: 738033 - RNA, 19 nt, Artificial Sequence
  Description of Artificial Sequence: Synthetic oligonucleotide
  Antisense strand to SEQ ID NO: 738032
auuacacagccaggaagca

SEQ ID NO: 738034 - RNA, 19 nt, Artificial Sequence
  Description of Artificial Sequence: Synthetic oligonucleotide
  Sense strand starting at position 3536 of SEQ ID NO: 586704
aauaauggugguugugaga

SEQ ID NO: 738035 - RNA, 19 nt, Artificial Sequence
  Description of Artificial Sequence: Synthetic oligonucleotide
  Antisense strand to SEQ ID NO: 738034
ucucacaaccaccauuauu

SEQ ID NO: 738036 - RNA, 19 nt, Artificial Sequence
  Description of Artificial Sequence: Synthetic oligonucleotide
  Sense strand starting at position 3545 of SEQ ID NO: 586704
gguugugagaaguacagua

SEQ ID NO: 738037 - RNA, 19 nt, Artificial Sequence
  Description of Artificial Sequence: Synthetic oligonucleotide
  Antisense strand to SEQ ID NO: 738036
uacuguacuucucacaacc

SEQ ID NO: 738038 - RNA, 19 nt, Artificial Sequence
  Description of Artificial Sequence: Synthetic oligonucleotide
  Sense strand starting at position 3632 of SEQ ID NO: 586704
cacauaucccguuagggag

SEQ ID NO: 738039 - RNA, 19 nt, Artificial Sequence
  Description of Artificial Sequence: Synthetic oligonucleotide
  Antisense strand to SEQ ID NO: 738038
cucccuaacgggauaugug

SEQ ID NO: 738040 - RNA, 19 nt, Artificial Sequence
  Description of Artificial Sequence: Synthetic oligonucleotide
  Sense strand starting at position 3734 of SEQ ID NO: 586704
gauccuugggcugaucaga

SEQ ID NO: 738041 - RNA, 19 nt, Artificial Sequence
  Description of Artificial Sequence: Synthetic oligonucleotide
  Antisense strand to SEQ ID NO: 738040
ucugaucagcccaaggauc

SEQ ID NO: 738042 - RNA, 19 nt, Artificial Sequence
  Description of Artificial Sequence: Synthetic oligonucleotide
  Sense strand starting at position 3820 of SEQ ID NO: 586704
gugguugggaaucaaguuu

SEQ ID NO: 738043 - RNA, 19 nt, Artificial Sequence
  Description of Artificial Sequence: Synthetic oligonucleotide
  Antisense strand to SEQ ID NO: 738042
aaacuugauucccaaccac

SEQ ID NO: 738044 - RNA, 19 nt, Artificial Sequence
  Description of Artificial Sequence: Synthetic oligonucleotide
  Sense strand starting at position 3831 of SEQ ID NO: 586704
ucaaguuuagcccauaaag

SEQ ID NO: 738045 - RNA, 19 nt, Artificial Sequence
  Description of Artificial Sequence: Synthetic oligonucleotide
  Antisense strand to SEQ ID NO: 738044
cuuuaugggcuaaacuuga

SEQ ID NO: 738046 - RNA, 19 nt, Artificial Sequence
  Description of Artificial Sequence: Synthetic oligonucleotide
  Sense strand starting at position 3849 of SEQ ID NO: 586704
gcaguaggcaaucaaauga

SEQ ID NO: 738047 - RNA, 19 nt, Artificial Sequence
  Description of Artificial Sequence: Synthetic oligonucleotide
  Antisense strand to SEQ ID NO: 738046
ucauuugauugccuacugc

SEQ ID NO: 738048 - RNA, 19 nt, Artificial Sequence
  Description of Artificial Sequence: Synthetic oligonucleotide
  Sense strand starting at position 3901 of SEQ ID NO: 586704
ucccuuaugccugagaucu

SEQ ID NO: 738049 - RNA, 19 nt, Artificial Sequence
  Description of Artificial Sequence: Synthetic oligonucleotide
  Antisense strand to SEQ ID NO: 738048
agaucucaggcauaaggga

SEQ ID NO: 738050 - RNA, 19 nt, Artificial Sequence
  Description of Artificial Sequence: Synthetic oligonucleotide
  Sense strand starting at position 3938 of SEQ ID NO: 586704
cgaucuagaucuuuccaag

SEQ ID NO: 738051 - RNA, 19 nt, Artificial Sequence
  Description of Artificial Sequence: Synthetic oligonucleotide
  Antisense strand to SEQ ID NO: 738050
cuuggaaagaucuagaucg

SEQ ID NO: 738052 - RNA, 19 nt, Artificial Sequence
  Description of Artificial Sequence: Synthetic oligonucleotide
  Sense strand starting at position 3965 of SEQ ID NO: 586704
uggccauuucaguggcaga

SEQ ID NO: 738053 - RNA, 19 nt, Artificial Sequence
  Description of Artificial Sequence: Synthetic oligonucleotide
  Antisense strand to SEQ ID NO: 738052
ucugccacugaaauggcca

SEQ ID NO: 738054 - RNA, 19 nt, Artificial Sequence
  Description of Artificial Sequence: Synthetic oligonucleotide
  Sense strand starting at position 41 of SEQ ID NO: 586705
ugguaugggaacuaucagu

SEQ ID NO: 738055 - RNA, 19 nt, Artificial Sequence
  Description of Artificial Sequence: Synthetic oligonucleotide
  Antisense strand to SEQ ID NO: 738054
acugauaguucccauacca

SEQ ID NO: 738056 - RNA, 19 nt, Artificial Sequence
  Description of Artificial Sequence: Synthetic oligonucleotide
  Sense strand starting at position 180 of SEQ ID NO: 586705
gguuauugugaacaguuac

SEQ ID NO: 738057 - RNA, 19 nt, Artificial Sequence
  Description of Artificial Sequence: Synthetic oligonucleotide
  Antisense strand to SEQ ID NO: 738056
guaacuguucacaauaacc

SEQ ID NO: 738058 - RNA, 19 nt, Artificial Sequence
  Description of Artificial Sequence: Synthetic oligonucleotide
  Sense strand starting at position 263 of SEQ ID NO: 586705
aguggcacugaguaguaaa

SEQ ID NO: 738059 - RNA, 19 nt, Artificial Sequence
  Description of Artificial Sequence: Synthetic oligonucleotide
  Antisense strand to SEQ ID NO: 738058
uuuacuacucagugccacu

SEQ ID NO: 738060 - RNA, 19 nt, Artificial Sequence
  Description of Artificial Sequence: Synthetic oligonucleotide
  Sense strand starting at position 271 of SEQ ID NO: 586705
ugaguaguaaaugguaacu

SEQ ID NO: 738061 - RNA, 19 nt, Artificial Sequence
  Description of Artificial Sequence: Synthetic oligonucleotide
  Antisense strand to SEQ ID NO: 738060
aguuaccauuuacuacuca

SEQ ID NO: 738062 - RNA, 19 nt, Artificial Sequence
  Description of Artificial Sequence: Synthetic oligonucleotide
  Sense strand starting at position 276 of SEQ ID NO: 586705
aguaaaugguaacuuacaa

SEQ ID NO: 738063 - RNA, 19 nt, Artificial Sequence
  Description of Artificial Sequence: Synthetic oligonucleotide
  Antisense strand to SEQ ID NO: 738062
uuguaaguuaccauuuacu

SEQ ID NO: 738064 - RNA, 19 nt, Artificial Sequence
  Description of Artificial Sequence: Synthetic oligonucleotide
  Sense strand starting at position 448 of SEQ ID NO: 586705
cuggaaugaugaccucauu

SEQ ID NO: 738065 - RNA, 19 nt, Artificial Sequence
  Description of Artificial Sequence: Synthetic oligonucleotide
  Antisense strand to SEQ ID NO: 738064
aaugaggucaucauuccag

SEQ ID NO: 738066 - RNA, 19 nt, Artificial Sequence
  Description of Artificial Sequence: Synthetic oligonucleotide
  Sense strand starting at position 507 of SEQ ID NO: 586705
gcaccuugauaacuugaca

SEQ ID NO: 738067 - RNA, 19 nt, Artificial Sequence
  Description of Artificial Sequence: Synthetic oligonucleotide
  Antisense strand to SEQ ID NO: 738066
ugucaaguuaucaaggugc

SEQ ID NO: 738068 - RNA, 19 nt, Artificial Sequence
  Description of Artificial Sequence: Synthetic oligonucleotide
  Sense strand starting at position 618 of SEQ ID NO: 586705
uggcaaauuacugggauac

SEQ ID NO: 738069 - RNA, 19 nt, Artificial Sequence
  Description of Artificial Sequence: Synthetic oligonucleotide
  Antisense strand to SEQ ID NO: 738068
guaucccaguaauuugcca

SEQ ID NO: 738070 - RNA, 19 nt, Artificial Sequence
  Description of Artificial Sequence: Synthetic oligonucleotide
  Sense strand starting at position 619 of SEQ ID NO: 586705
ggcaaauuacugggauaca

SEQ ID NO: 738071 - RNA, 19 nt, Artificial Sequence
  Description of Artificial Sequence: Synthetic oligonucleotide
  Antisense strand to SEQ ID NO: 738070
uguaucccaguaauuugcc

SEQ ID NO: 738072 - RNA, 19 nt, Artificial Sequence
  Description of Artificial Sequence: Synthetic oligonucleotide
  Sense strand starting at position 629 of SEQ ID NO: 586705
ugggauacauaacuuguaa

SEQ ID NO: 738073 - RNA, 19 nt, Artificial Sequence
  Description of Artificial Sequence: Synthetic oligonucleotide
  Antisense strand to SEQ ID NO: 738072
uuacaaguuauguauccca

SEQ ID NO: 738074 - RNA, 19 nt, Artificial Sequence
  Description of Artificial Sequence: Synthetic oligonucleotide
  Sense strand starting at position 662 of SEQ ID NO: 586705
cuagaauaggcuggaacau

SEQ ID NO: 738075 - RNA, 19 nt, Artificial Sequence
  Description of Artificial Sequence: Synthetic oligonucleotide
  Antisense strand to SEQ ID NO: 738074
auguuccagccuauucuag

SEQ ID NO: 738076 - RNA, 19 nt, Artificial Sequence
  Description of Artificial Sequence: Synthetic oligonucleotide
  Sense strand starting at position 859 of SEQ ID NO: 586705
caugucucucacgaagaau

SEQ ID NO: 738077 - RNA, 19 nt, Artificial Sequence
  Description of Artificial Sequence: Synthetic oligonucleotide
  Antisense strand to SEQ ID NO: 738076
auucuucgugagagacaug

SEQ ID NO: 738078 - RNA, 19 nt, Artificial Sequence
  Description of Artificial Sequence: Synthetic oligonucleotide
  Sense strand starting at position 862 of SEQ ID NO: 586705
gucucucacgaagaauaac

SEQ ID NO: 738079 - RNA, 19 nt, Artificial Sequence
  Description of Artificial Sequence: Synthetic oligonucleotide
  Antisense strand to SEQ ID NO: 738078
guuauucuucgugagagac

SEQ ID NO: 738080 - RNA, 19 nt, Artificial Sequence
  Description of Artificial Sequence: Synthetic oligonucleotide
  Sense strand starting at position 945 of SEQ ID NO: 586705
gaguacaagucacuuuaag

SEQ ID NO: 738081 - RNA, 19 nt, Artificial Sequence
  Description of Artificial Sequence: Synthetic oligonucleotide
  Antisense strand to SEQ ID NO: 738080
cuuaaagugacuuguacuc

SEQ ID NO: 738082 - RNA, 19 nt, Artificial Sequence
  Description of Artificial Sequence: Synthetic oligonucleotide
  Sense strand starting at position 1054 of SEQ ID NO: 586705
cucaaaugugcugagcaaa

SEQ ID NO: 738083 - RNA, 19 nt, Artificial Sequence
  Description of Artificial Sequence: Synthetic oligonucleotide
  Antisense strand to SEQ ID NO: 738082
uuugcucagcacauuugag

SEQ ID NO: 738084 - RNA, 19 nt, Artificial Sequence
  Description of Artificial Sequence: Synthetic oligonucleotide
  Sense strand starting at position 1126 of SEQ ID NO: 586705
agggcaaacuucuuugauc

SEQ ID NO: 738085 - RNA, 19 nt, Artificial Sequence
  Description of Artificial Sequence: Synthetic oligonucleotide
  Antisense strand to SEQ ID NO: 738084
gaucaaagaaguuugcccu

SEQ ID NO: 738086 - RNA, 19 nt, Artificial Sequence
  Description of Artificial Sequence: Synthetic oligonucleotide
  Sense strand starting at position 1238 of SEQ ID NO: 586705
aagaguucuuaaccgggau

SEQ ID NO: 738087 - RNA, 19 nt, Artificial Sequence
  Description of Artificial Sequence: Synthetic oligonucleotide
  Antisense strand to SEQ ID NO: 738086
aucccgguuaagaacucuu

SEQ ID NO: 738088 - RNA, 19 nt, Artificial Sequence
  Description of Artificial Sequence: Synthetic oligonucleotide
  Sense strand starting at position 1682 of SEQ ID NO: 586705
uacggagucauagaggcau

SEQ ID NO: 738089 - RNA, 19 nt, Artificial Sequence
  Description of Artificial Sequence: Synthetic oligonucleotide
  Antisense strand to SEQ ID NO: 738088
augccucuaugacuccgua

SEQ ID NO: 738090 - RNA, 19 nt, Artificial Sequence
  Description of Artificial Sequence: Synthetic oligonucleotide
  Sense strand starting at position 1879 of SEQ ID NO: 586705
uucuuaaggugguuacaaa

SEQ ID NO: 738091 - RNA, 19 nt, Artificial Sequence
  Description of Artificial Sequence: Synthetic oligonucleotide
  Antisense strand to SEQ ID NO: 738090
uuuguaaccaccuuaagaa

SEQ ID NO: 738092 - RNA, 19 nt, Artificial Sequence
  Description of Artificial Sequence: Synthetic oligonucleotide
  Sense strand starting at position 1939 of SEQ ID NO: 586705
ccgugugaugagcagagaa

SEQ ID NO: 738093 - RNA, 19 nt, Artificial Sequence
  Description of Artificial Sequence: Synthetic oligonucleotide
  Antisense strand to SEQ ID NO: 738092
uucucugcucaucacacgg

SEQ ID NO: 738094 - RNA, 19 nt, Artificial Sequence
  Description of Artificial Sequence: Synthetic oligonucleotide
  Sense strand starting at position 1941 of SEQ ID NO: 586705
gugugaugagcagagaaac

SEQ ID NO: 738095 - RNA, 19 nt, Artificial Sequence
  Description of Artificial Sequence: Synthetic oligonucleotide
  Antisense strand to SEQ ID NO: 738094
guuucucugcucaucacac

SEQ ID NO: 738096 - RNA, 19 nt, Artificial Sequence
  Description of Artificial Sequence: Synthetic oligonucleotide
  Sense strand starting at position 2034 of SEQ ID NO: 586705
guauucuacguuuaagaaa

SEQ ID NO: 738097 - RNA, 19 nt, Artificial Sequence
  Description of Artificial Sequence: Synthetic oligonucleotide
  Antisense strand to SEQ ID NO: 738096
uuucuuaaacguagaauac

SEQ ID NO: 738098 - RNA, 19 nt, Artificial Sequence
  Description of Artificial Sequence: Synthetic oligonucleotide
  Sense strand starting at position 2075 of SEQ ID NO: 586705
ggccaaguuauuuguguga

SEQ ID NO: 738099 - RNA, 19 nt, Artificial Sequence
  Description of Artificial Sequence: Synthetic oligonucleotide
  Antisense strand to SEQ ID NO: 738098
ucacacaaauaacuuggcc

SEQ ID NO: 738100 - RNA, 19 nt, Artificial Sequence
  Description of Artificial Sequence: Synthetic oligonucleotide
  Sense strand starting at position 2079 of SEQ ID NO: 586705
aaguuauuugugugaugca

SEQ ID NO: 738101 - RNA, 19 nt, Artificial Sequence
  Description of Artificial Sequence: Synthetic oligonucleotide
  Antisense strand to SEQ ID NO: 738100
ugcaucacacaaauaacuu

SEQ ID NO: 738102 - RNA, 19 nt, Artificial Sequence
  Description of Artificial Sequence: Synthetic oligonucleotide
  Sense strand starting at position 2109 of SEQ ID NO: 586705
cgagcuggucacuaaugaa

SEQ ID NO: 738103 - RNA, 19 nt, Artificial Sequence
  Description of Artificial Sequence: Synthetic oligonucleotide
  Antisense strand to SEQ ID NO: 738102
uucauuagugaccagcucg

SEQ ID NO: 738104 - RNA, 19 nt, Artificial Sequence
  Description of Artificial Sequence: Synthetic oligonucleotide
  Sense strand starting at position 2596 of SEQ ID NO: 586705
ugccguguggucuuucuga

SEQ ID NO: 738105 - RNA, 19 nt, Artificial Sequence
  Description of Artificial Sequence: Synthetic oligonucleotide
  Antisense strand to SEQ ID NO: 738104
ucagaaagaccacacggca

SEQ ID NO: 738106 - RNA, 19 nt, Artificial Sequence
  Description of Artificial Sequence: Synthetic oligonucleotide
  Sense strand starting at position 2903 of SEQ ID NO: 586705
uugauaguuugggugagga

SEQ ID NO: 738107 - RNA, 19 nt, Artificial Sequence
  Description of Artificial Sequence: Synthetic oligonucleotide
  Antisense strand to SEQ ID NO: 738106
uccucacccaaacuaucaa

SEQ ID NO: 738108 - RNA, 19 nt, Artificial Sequence
  Description of Artificial Sequence: Synthetic oligonucleotide
  Sense strand starting at position 2984 of SEQ ID NO: 586705
gaauuaauaucgguaguga

SEQ ID NO: 738109 - RNA, 19 nt, Artificial Sequence
  Description of Artificial Sequence: Synthetic oligonucleotide
  Antisense strand to SEQ ID NO: 738108
ucacuaccgauauuaauuc

SEQ ID NO: 738110 - RNA, 19 nt, Artificial Sequence
  Description of Artificial Sequence: Synthetic oligonucleotide
  Sense strand starting at position 2985 of SEQ ID NO: 586705
aauuaauaucgguagugag

SEQ ID NO: 738111 - RNA, 19 nt, Artificial Sequence
  Description of Artificial Sequence: Synthetic oligonucleotide
  Antisense strand to SEQ ID NO: 738110
cucacuaccgauauuaauu

SEQ ID NO: 738112 - RNA, 19 nt, Artificial Sequence
  Description of Artificial Sequence: Synthetic oligonucleotide
  Sense strand starting at position 3129 of SEQ ID NO: 586705
uguuaucagccuuauauga

SEQ ID NO: 738113 - RNA, 19 nt, Artificial Sequence
  Description of Artificial Sequence: Synthetic oligonucleotide
  Antisense strand to SEQ ID NO: 738112
ucauauaaggcugauaaca

SEQ ID NO: 738114 - RNA, 19 nt, Artificial Sequence
  Description of Artificial Sequence: Synthetic oligonucleotide
  Sense strand starting at position 3204 of SEQ ID NO: 586705
gguaaugaguauccuauac

SEQ ID NO: 738115 - RNA, 19 nt, Artificial Sequence
  Description of Artificial Sequence: Synthetic oligonucleotide
  Antisense strand to SEQ ID NO: 738114
guauaggauacucauuacc

SEQ ID NO: 738116 - RNA, 19 nt, Artificial Sequence
  Description of Artificial Sequence: Synthetic oligonucleotide
  Sense strand starting at position 3254 of SEQ ID NO: 586705
agcgaaacuccugggagaa

SEQ ID NO: 738117 - RNA, 19 nt, Artificial Sequence
  Description of Artificial Sequence: Synthetic oligonucleotide
  Antisense strand to SEQ ID NO: 738116
uucucccaggaguuucgcu

SEQ ID NO: 738118 - RNA, 19 nt, Artificial Sequence
  Description of Artificial Sequence: Synthetic oligonucleotide
  Sense strand starting at position 3255 of SEQ ID NO: 586705
gcgaaacuccugggagaaa

SEQ ID NO: 738119 - RNA, 19 nt, Artificial Sequence
  Description of Artificial Sequence: Synthetic oligonucleotide
  Antisense strand to SEQ ID NO: 738118
uuucucccaggaguuucgc

SEQ ID NO: 738120 - RNA, 19 nt, Artificial Sequence
  Description of Artificial Sequence: Synthetic oligonucleotide
  Sense strand starting at position 3403 of SEQ ID NO: 586705
cgaggcaagagcuauauau

SEQ ID NO: 738121 - RNA, 19 nt, Artificial Sequence
  Description of Artificial Sequence: Synthetic oligonucleotide
  Antisense strand to SEQ ID NO: 738120
auauauagcucuugccucg

SEQ ID NO: 738122 - RNA, 19 nt, Artificial Sequence
  Description of Artificial Sequence: Synthetic oligonucleotide
  Sense strand starting at position 3549 of SEQ ID NO: 586705
ugugaauuacuauaagcua

SEQ ID NO: 738123 - RNA, 19 nt, Artificial Sequence
  Description of Artificial Sequence: Synthetic oligonucleotide
  Antisense strand to SEQ ID NO: 738122
uagcuuauaguaauucaca

SEQ ID NO: 738124 - RNA, 19 nt, Artificial Sequence
  Description of Artificial Sequence: Synthetic oligonucleotide
  Sense strand starting at position 3580 of SEQ ID NO: 586705
cuugaaacauagcuaggua

SEQ ID NO: 738125 - RNA, 19 nt, Artificial Sequence
  Description of Artificial Sequence: Synthetic oligonucleotide
  Antisense strand to SEQ ID NO: 738124
uaccuagcuauguuucaag

SEQ ID NO: 738126 - RNA, 19 nt, Artificial Sequence
  Description of Artificial Sequence: Synthetic oligonucleotide
  Sense strand starting at position 3583 of SEQ ID NO: 586705
gaaacauagcuagguauau

SEQ ID NO: 738127 - RNA, 19 nt, Artificial Sequence
  Description of Artificial Sequence: Synthetic oligonucleotide
  Antisense strand to SEQ ID NO: 738126
auauaccuagcuauguuuc

SEQ ID NO: 738128 - RNA, 19 nt, Artificial Sequence
  Description of Artificial Sequence: Synthetic oligonucleotide
  Sense strand starting at position 3746 of SEQ ID NO: 586705
aguucuagaggccauaaau

SEQ ID NO: 738129 - RNA, 19 nt, Artificial Sequence
  Description of Artificial Sequence: Synthetic oligonucleotide
  Antisense strand to SEQ ID NO: 738128
auuuauggccucuagaacu

SEQ ID NO: 738130 - RNA, 19 nt, Artificial Sequence
  Description of Artificial Sequence: Synthetic oligonucleotide
  Sense strand starting at position 3808 of SEQ ID NO: 586705
cuguguucccuccagagac

SEQ ID NO: 738131 - RNA, 19 nt, Artificial Sequence
  Description of Artificial Sequence: Synthetic oligonucleotide
  Antisense strand to SEQ ID NO: 738130
gucucuggagggaacacag

SEQ ID NO: 738132 - RNA, 19 nt, Artificial Sequence
  Description of Artificial Sequence: Synthetic oligonucleotide
  Sense strand starting at position 3834 of SEQ ID NO: 586705
gagaaucaguucuuugacu

SEQ ID NO: 738133 - RNA, 19 nt, Artificial Sequence
  Description of Artificial Sequence: Synthetic oligonucleotide
  Antisense strand to SEQ ID NO: 738132
agucaaagaacugauucuc

SEQ ID NO: 738134 - RNA, 19 nt, Artificial Sequence
  Description of Artificial Sequence: Synthetic oligonucleotide
  Sense strand starting at position 146 of SEQ ID NO: 586706
cuggaaugaugaccucauu

SEQ ID NO: 738135 - RNA, 19 nt, Artificial Sequence
  Description of Artificial Sequence: Synthetic oligonucleotide
  Antisense strand to SEQ ID NO: 738134
aaugaggucaucauuccag

SEQ ID NO: 738136 - RNA, 19 nt, Artificial Sequence
  Description of Artificial Sequence: Synthetic oligonucleotide
  Sense strand starting at position 205 of SEQ ID NO: 586706
gcaccuugauaacuugaca

SEQ ID NO: 738137 - RNA, 19 nt, Artificial Sequence
  Description of Artificial Sequence: Synthetic oligonucleotide
  Antisense strand to SEQ ID NO: 738136
ugucaaguuaucaaggugc

SEQ ID NO: 738138 - RNA, 19 nt, Artificial Sequence
  Description of Artificial Sequence: Synthetic oligonucleotide
  Sense strand starting at position 316 of SEQ ID NO: 586706
uggcaaauuacugggauac

SEQ ID NO: 738139 - RNA, 19 nt, Artificial Sequence
  Description of Artificial Sequence: Synthetic oligonucleotide
  Antisense strand to SEQ ID NO: 738138
guaucccaguaauuugcca

SEQ ID NO: 738140 - RNA, 19 nt, Artificial Sequence
  Description of Artificial Sequence: Synthetic oligonucleotide
  Sense strand starting at position 317 of SEQ ID NO: 586706
ggcaaauuacugggauaca

SEQ ID NO: 738141 - RNA, 19 nt, Artificial Sequence
  Description of Artificial Sequence: Synthetic oligonucleotide
  Antisense strand to SEQ ID NO: 738140
uguaucccaguaauuugcc

SEQ ID NO: 738142 - RNA, 19 nt, Artificial Sequence
  Description of Artificial Sequence: Synthetic oligonucleotide
  Sense strand starting at position 327 of SEQ ID NO: 586706
ugggauacauaacuuguaa

SEQ ID NO: 738143 - RNA, 19 nt, Artificial Sequence
  Description of Artificial Sequence: Synthetic oligonucleotide
  Antisense strand to SEQ ID NO: 738142
uuacaaguuauguauccca

SEQ ID NO: 738144 - RNA, 19 nt, Artificial Sequence
  Description of Artificial Sequence: Synthetic oligonucleotide
  Sense strand starting at position 360 of SEQ ID NO: 586706
cuagaauaggcuggaacau

SEQ ID NO: 738145 - RNA, 19 nt, Artificial Sequence
  Description of Artificial Sequence: Synthetic oligonucleotide
  Antisense strand to SEQ ID NO: 738144
auguuccagccuauucuag

SEQ ID NO: 738146 - RNA, 19 nt, Artificial Sequence
  Description of Artificial Sequence: Synthetic oligonucleotide
  Sense strand starting at position 557 of SEQ ID NO: 586706
caugucucucacgaagaau

SEQ ID NO: 738147 - RNA, 19 nt, Artificial Sequence
  Description of Artificial Sequence: Synthetic oligonucleotide
  Antisense strand to SEQ ID NO: 738146
auucuucgugagagacaug

SEQ ID NO: 738148 - RNA, 19 nt, Artificial Sequence
  Description of Artificial Sequence: Synthetic oligonucleotide
  Sense strand starting at position 560 of SEQ ID NO: 586706
gucucucacgaagaauaac

SEQ ID NO: 738149 - RNA, 19 nt, Artificial Sequence
  Description of Artificial Sequence: Synthetic oligonucleotide
  Antisense strand to SEQ ID NO: 738148
guuauucuucgugagagac

SEQ ID NO: 738150 - RNA, 19 nt, Artificial Sequence
  Description of Artificial Sequence: Synthetic oligonucleotide
  Sense strand starting at position 643 of SEQ ID NO: 586706
gaguacaagucacuuuaag

SEQ ID NO: 738151 - RNA, 19 nt, Artificial Sequence
  Description of Artificial Sequence: Synthetic oligonucleotide
  Antisense strand to SEQ ID NO: 738150
cuuaaagugacuuguacuc

SEQ ID NO: 738152 - RNA, 19 nt, Artificial Sequence
  Description of Artificial Sequence: Synthetic oligonucleotide
  Sense strand starting at position 752 of SEQ ID NO: 586706
cucaaaugugcugagcaaa

SEQ ID NO: 738153 - RNA, 19 nt, Artificial Sequence
  Description of Artificial Sequence: Synthetic oligonucleotide
  Antisense strand to SEQ ID NO: 738152
uuugcucagcacauuugag

SEQ ID NO: 738154 - RNA, 19 nt, Artificial Sequence
  Description of Artificial Sequence: Synthetic oligonucleotide
  Sense strand starting at position 824 of SEQ ID NO: 586706
agggcaaacuucuuugauc

SEQ ID NO: 738155 - RNA, 19 nt, Artificial Sequence
  Description of Artificial Sequence: Synthetic oligonucleotide
  Antisense strand to SEQ ID NO: 738154
gaucaaagaaguuugcccu

SEQ ID NO: 738156 - RNA, 19 nt, Artificial Sequence
  Description of Artificial Sequence: Synthetic oligonucleotide
  Sense strand starting at position 936 of SEQ ID NO: 586706
aagaguucuuaaccgggau

SEQ ID NO: 738157 - RNA, 19 nt, Artificial Sequence
  Description of Artificial Sequence: Synthetic oligonucleotide
  Antisense strand to SEQ ID NO: 738156
aucccgguuaagaacucuu

SEQ ID NO: 738158 - RNA, 19 nt, Artificial Sequence
  Description of Artificial Sequence: Synthetic oligonucleotide
  Sense strand starting at position 1380 of SEQ ID NO: 586706
uacggagucauagaggcau

SEQ ID NO: 738159 - RNA, 19 nt, Artificial Sequence
  Description of Artificial Sequence: Synthetic oligonucleotide
  Antisense strand to SEQ ID NO: 738158
augccucuaugacuccgua

SEQ ID NO: 738160 - RNA, 19 nt, Artificial Sequence
  Description of Artificial Sequence: Synthetic oligonucleotide
  Sense strand starting at position 1577 of SEQ ID NO: 586706
uucuuaaggugguuacaaa

SEQ ID NO: 738161 - RNA, 19 nt, Artificial Sequence
  Description of Artificial Sequence: Synthetic oligonucleotide
  Antisense strand to SEQ ID NO: 738160
uuuguaaccaccuuaagaa

SEQ ID NO: 738162 - RNA, 19 nt, Artificial Sequence
  Description of Artificial Sequence: Synthetic oligonucleotide
  Sense strand starting at position 1639 of SEQ ID NO: 586706
gugugaugagcagagaaac

SEQ ID NO: 738163 - RNA, 19 nt, Artificial Sequence
  Description of Artificial Sequence: Synthetic oligonucleotide
  Antisense strand to SEQ ID NO: 738162
guuucucugcucaucacac

SEQ ID NO: 738164 - RNA, 19 nt, Artificial Sequence
  Description of Artificial Sequence: Synthetic oligonucleotide
  Sense strand starting at position 1732 of SEQ ID NO: 586706
guauucuacguuuaagaaa

SEQ ID NO: 738165 - RNA, 19 nt, Artificial Sequence
  Description of Artificial Sequence: Synthetic oligonucleotide
  Antisense strand to SEQ ID NO: 738164
uuucuuaaacguagaauac

SEQ ID NO: 738166 - RNA, 19 nt, Artificial Sequence
  Description of Artificial Sequence: Synthetic oligonucleotide
  Sense strand starting at position 1773 of SEQ ID NO: 586706
ggccaaguuauuuguguga

SEQ ID NO: 738167 - RNA, 19 nt, Artificial Sequence
  Description of Artificial Sequence: Synthetic oligonucleotide
  Antisense strand to SEQ ID NO: 738166
ucacacaaauaacuuggcc

SEQ ID NO: 738168 - RNA, 19 nt, Artificial Sequence
  Description of Artificial Sequence: Synthetic oligonucleotide
  Sense strand starting at position 1777 of SEQ ID NO: 586706
aaguuauuugugugaugca

SEQ ID NO: 738169 - RNA, 19 nt, Artificial Sequence
  Description of Artificial Sequence: Synthetic oligonucleotide
  Antisense strand to SEQ ID NO: 738168
ugcaucacacaaauaacuu

SEQ ID NO: 738170 - RNA, 19 nt, Artificial Sequence
  Description of Artificial Sequence: Synthetic oligonucleotide
  Sense strand starting at position 1807 of SEQ ID NO: 586706
cgagcuggucacuaaugaa

SEQ ID NO: 738171 - RNA, 19 nt, Artificial Sequence
  Description of Artificial Sequence: Synthetic oligonucleotide
  Antisense strand to SEQ ID NO: 738170
uucauuagugaccagcucg

SEQ ID NO: 738172 - RNA, 19 nt, Artificial Sequence
  Description of Artificial Sequence: Synthetic oligonucleotide
  Sense strand starting at position 2294 of SEQ ID NO: 586706
ugccguguggucuuucuga

SEQ ID NO: 738173 - RNA, 19 nt, Artificial Sequence
  Description of Artificial Sequence: Synthetic oligonucleotide
  Antisense strand to SEQ ID NO: 738172
ucagaaagaccacacggca

SEQ ID NO: 738174 - RNA, 19 nt, Artificial Sequence
  Description of Artificial Sequence: Synthetic oligonucleotide
  Sense strand starting at position 2601 of SEQ ID NO: 586706
uugauaguuugggugagga

SEQ ID NO: 738175 - RNA, 19 nt, Artificial Sequence
  Description of Artificial Sequence: Synthetic oligonucleotide
  Antisense strand to SEQ ID NO: 738174
uccucacccaaacuaucaa

SEQ ID NO: 738176 - RNA, 19 nt, Artificial Sequence
  Description of Artificial Sequence: Synthetic oligonucleotide
  Sense strand starting at position 2683 of SEQ ID NO: 586706
aauuaauaucgguagugag

SEQ ID NO: 738177 - RNA, 19 nt, Artificial Sequence
  Description of Artificial Sequence: Synthetic oligonucleotide
  Antisense strand to SEQ ID NO: 738176
cucacuaccgauauuaauu

SEQ ID NO: 738178 - RNA, 19 nt, Artificial Sequence
  Description of Artificial Sequence: Synthetic oligonucleotide
  Sense strand starting at position 2827 of SEQ ID NO: 586706
uguuaucagccuuauauga

SEQ ID NO: 738179 - RNA, 19 nt, Artificial Sequence
  Description of Artificial Sequence: Synthetic oligonucleotide
  Antisense strand to SEQ ID NO: 738178
ucauauaaggcugauaaca

SEQ ID NO: 738180 - RNA, 19 nt, Artificial Sequence
  Description of Artificial Sequence: Synthetic oligonucleotide
  Sense strand starting at position 2902 of SEQ ID NO: 586706
gguaaugaguauccuauac

SEQ ID NO: 738181 - RNA, 19 nt, Artificial Sequence
  Description of Artificial Sequence: Synthetic oligonucleotide
  Antisense strand to SEQ ID NO: 738180
guauaggauacucauuacc

SEQ ID NO: 738182 - RNA, 19 nt, Artificial Sequence
  Description of Artificial Sequence: Synthetic oligonucleotide
  Sense strand starting at position 2952 of SEQ ID NO: 586706
agcgaaacuccugggagaa

SEQ ID NO: 738183 - RNA, 19 nt, Artificial Sequence
  Description of Artificial Sequence: Synthetic oligonucleotide
  Antisense strand to SEQ ID NO: 738182
uucucccaggaguuucgcu

SEQ ID NO: 738184 - RNA, 19 nt, Artificial Sequence
  Description of Artificial Sequence: Synthetic oligonucleotide
  Sense strand starting at position 2953 of SEQ ID NO: 586706
gcgaaacuccugggagaaa

SEQ ID NO: 738185 - RNA, 19 nt, Artificial Sequence
  Description of Artificial Sequence: Synthetic oligonucleotide
  Antisense strand to SEQ ID NO: 738184
uuucucccaggaguuucgc

SEQ ID NO: 738186 - RNA, 19 nt, Artificial Sequence
  Description of Artificial Sequence: Synthetic oligonucleotide
  Sense strand starting at position 3101 of SEQ ID NO: 586706
cgaggcaagagcuauauau

SEQ ID NO: 738187 - RNA, 19 nt, Artificial Sequence
  Description of Artificial Sequence: Synthetic oligonucleotide
  Antisense strand to SEQ ID NO: 738186
auauauagcucuugccucg

SEQ ID NO: 738188 - RNA, 19 nt, Artificial Sequence
  Description of Artificial Sequence: Synthetic oligonucleotide
  Sense strand starting at position 3247 of SEQ ID NO: 586706
ugugaauuacuauaagcua

SEQ ID NO: 738189 - RNA, 19 nt, Artificial Sequence
  Description of Artificial Sequence: Synthetic oligonucleotide
  Antisense strand to SEQ ID NO: 738188
uagcuuauaguaauucaca

SEQ ID NO: 738190 - RNA, 19 nt, Artificial Sequence
  Description of Artificial Sequence: Synthetic oligonucleotide
  Sense strand starting at position 3278 of SEQ ID NO: 586706
cuugaaacauagcuaggua

SEQ ID NO: 738191 - RNA, 19 nt, Artificial Sequence
  Description of Artificial Sequence: Synthetic oligonucleotide
  Antisense strand to SEQ ID NO: 738190
uaccuagcuauguuucaag

SEQ ID NO: 738192 - RNA, 19 nt, Artificial Sequence
  Description of Artificial Sequence: Synthetic oligonucleotide
  Sense strand starting at position 3281 of SEQ ID NO: 586706
gaaacauagcuagguauau

SEQ ID NO: 738193 - RNA, 19 nt, Artificial Sequence
  Description of Artificial Sequence: Synthetic oligonucleotide
  Antisense strand to SEQ ID NO: 738192
auauaccuagcuauguuuc

SEQ ID NO: 738194 - RNA, 19 nt, Artificial Sequence
  Description of Artificial Sequence: Synthetic oligonucleotide
  Sense strand starting at position 3444 of SEQ ID NO: 586706
aguucuagaggccauaaau

SEQ ID NO: 738195 - RNA, 19 nt, Artificial Sequence
  Description of Artificial Sequence: Synthetic oligonucleotide
  Antisense strand to SEQ ID NO: 738194
auuuauggccucuagaacu

SEQ ID NO: 738196 - RNA, 19 nt, Artificial Sequence
  Description of Artificial Sequence: Synthetic oligonucleotide
  Sense strand starting at position 3532 of SEQ ID NO: 586706
gagaaucaguucuuugacu

SEQ ID NO: 738197 - RNA, 19 nt, Artificial Sequence
  Description of Artificial Sequence: Synthetic oligonucleotide
  Antisense strand to SEQ ID NO: 738196
agucaaagaacugauucuc

SEQ ID NO: 738198 - RNA, 19 nt, Artificial Sequence
  Description of Artificial Sequence: Synthetic oligonucleotide
  Sense strand starting at position 3807 of SEQ ID NO: 586706
gcaggucccagggauuaga

SEQ ID NO: 738199 - RNA, 19 nt, Artificial Sequence
  Description of Artificial Sequence: Synthetic oligonucleotide
  Antisense strand to SEQ ID NO: 738198
ucuaaucccugggaccugc

SEQ ID NO: 738200 - RNA, 19 nt, Artificial Sequence
  Description of Artificial Sequence: Synthetic oligonucleotide
  Sense strand starting at position 3817 of SEQ ID NO: 586706
gggauuagacucuguuauc

SEQ ID NO: 738201 - RNA, 19 nt, Artificial Sequence
  Description of Artificial Sequence: Synthetic oligonucleotide
  Antisense strand to SEQ ID NO: 738200
gauaacagagucuaauccc

SEQ ID NO: 738202 - RNA, 19 nt, Artificial Sequence
  Description of Artificial Sequence: Synthetic oligonucleotide
  Sense strand starting at position 3818 of SEQ ID NO: 586706
ggauuagacucuguuaucu

SEQ ID NO: 738203 - RNA, 19 nt, Artificial Sequence
  Description of Artificial Sequence: Synthetic oligonucleotide
  Antisense strand to SEQ ID NO: 738202
agauaacagagucuaaucc

SEQ ID NO: 738204 - RNA, 19 nt, Artificial Sequence
  Description of Artificial Sequence: Synthetic oligonucleotide
  Sense strand starting at position 3872 of SEQ ID NO: 586706
ggaguaagccauugaaauu

SEQ ID NO: 738205 - RNA, 19 nt, Artificial Sequence
  Description of Artificial Sequence: Synthetic oligonucleotide
  Antisense strand to SEQ ID NO: 738204
aauuucaauggcuuacucc

SEQ ID NO: 738206 - RNA, 19 nt, Artificial Sequence
  Description of Artificial Sequence: Synthetic oligonucleotide
  Sense strand starting at position 3890 of SEQ ID NO: 586706
uggccaaucagagacuguu

SEQ ID NO: 738207 - RNA, 19 nt, Artificial Sequence
  Description of Artificial Sequence: Synthetic oligonucleotide
  Antisense strand to SEQ ID NO: 738206
aacagucucugauuggcca

SEQ ID NO: 738208 - RNA, 19 nt, Artificial Sequence
  Description of Artificial Sequence: Synthetic oligonucleotide
  Sense strand starting at position 3893 of SEQ ID NO: 586706
ccaaucagagacuguuacu

SEQ ID NO: 738209 - RNA, 19 nt, Artificial Sequence
  Description of Artificial Sequence: Synthetic oligonucleotide
  Antisense strand to SEQ ID NO: 738208
aguaacagucucugauugg

SEQ ID NO: 738210 - RNA, 19 nt, Artificial Sequence
  Description of Artificial Sequence: Synthetic oligonucleotide
  Sense strand starting at position 3899 of SEQ ID NO: 586706
agagacuguuacuuaucaa

SEQ ID NO: 738211 - RNA, 19 nt, Artificial Sequence
  Description of Artificial Sequence: Synthetic oligonucleotide
  Antisense strand to SEQ ID NO: 738210
uugauaaguaacagucucu

SEQ ID NO: 738212 - RNA, 19 nt, Artificial Sequence
  Description of Artificial Sequence: Synthetic oligonucleotide
  Sense strand starting at position 3968 of SEQ ID NO: 586706
uugaaccuccuauggauau

SEQ ID NO: 738213 - RNA, 19 nt, Artificial Sequence
  Description of Artificial Sequence: Synthetic oligonucleotide
  Antisense strand to SEQ ID NO: 738212
auauccauaggagguucaa

SEQ ID NO: 738214 - RNA, 19 nt, Artificial Sequence
  Description of Artificial Sequence: Synthetic oligonucleotide
  Sense strand starting at position 53 of SEQ ID NO: 586707
ugcagugagccauaaucua

SEQ ID NO: 738215 - RNA, 19 nt, Artificial Sequence
  Description of Artificial Sequence: Synthetic oligonucleotide
  Antisense strand to SEQ ID NO: 738214
uagauuauggcucacugca

SEQ ID NO: 738216 - RNA, 19 nt, Artificial Sequence
  Description of Artificial Sequence: Synthetic oligonucleotide
  Sense strand starting at position 124 of SEQ ID NO: 586707
aagacaauauguguuuguu

SEQ ID NO: 738217 - RNA, 19 nt, Artificial Sequence
  Description of Artificial Sequence: Synthetic oligonucleotide
  Antisense strand to SEQ ID NO: 738216
aacaaacacauauugucuu

SEQ ID NO: 738218 - RNA, 19 nt, Artificial Sequence
  Description of Artificial Sequence: Synthetic oligonucleotide
  Sense strand starting at position 200 of SEQ ID NO: 586707
ugagauguuggccaggagu

SEQ ID NO: 738219 - RNA, 19 nt, Artificial Sequence
  Description of Artificial Sequence: Synthetic oligonucleotide
  Antisense strand to SEQ ID NO: 738218
acuccuggccaacaucuca

SEQ ID NO: 738220 - RNA, 19 nt, Artificial Sequence
  Description of Artificial Sequence: Synthetic oligonucleotide
  Sense strand starting at position 286 of SEQ ID NO: 586707
ggugauauaugucucuaau

SEQ ID NO: 738221 - RNA, 19 nt, Artificial Sequence
  Description of Artificial Sequence: Synthetic oligonucleotide
  Antisense strand to SEQ ID NO: 738220
auuagagacauauaucacc

SEQ ID NO: 738222 - RNA, 19 nt, Artificial Sequence
  Description of Artificial Sequence: Synthetic oligonucleotide
  Sense strand starting at position 541 of SEQ ID NO: 586707
ugguacaucuaugcaauau

SEQ ID NO: 738223 - RNA, 19 nt, Artificial Sequence
  Description of Artificial Sequence: Synthetic oligonucleotide
  Antisense strand to SEQ ID NO: 738222
auauugcauagauguacca

SEQ ID NO: 738224 - RNA, 19 nt, Artificial Sequence
  Description of Artificial Sequence: Synthetic oligonucleotide
  Sense strand starting at position 552 of SEQ ID NO: 586707
ugcaauauacuauaaaggu

SEQ ID NO: 738225 - RNA, 19 nt, Artificial Sequence
  Description of Artificial Sequence: Synthetic oligonucleotide
  Antisense strand to SEQ ID NO: 738224
accuuuauaguauauugca

SEQ ID NO: 738226 - RNA, 19 nt, Artificial Sequence
  Description of Artificial Sequence: Synthetic oligonucleotide
  Sense strand starting at position 584 of SEQ ID NO: 586707
gccgaucuacugcaaucaa

SEQ ID NO: 738227 - RNA, 19 nt, Artificial Sequence
  Description of Artificial Sequence: Synthetic oligonucleotide
  Antisense strand to SEQ ID NO: 738226
uugauugcaguagaucggc

SEQ ID NO: 738228 - RNA, 19 nt, Artificial Sequence
  Description of Artificial Sequence: Synthetic oligonucleotide
  Sense strand starting at position 623 of SEQ ID NO: 586707
ugacaaacugcuuaacagu

SEQ ID NO: 738229 - RNA, 19 nt, Artificial Sequence
  Description of Artificial Sequence: Synthetic oligonucleotide
  Antisense strand to SEQ ID NO: 738228
acuguuaagcaguuuguca

SEQ ID NO: 738230 - RNA, 19 nt, Artificial Sequence
  Description of Artificial Sequence: Synthetic oligonucleotide
  Sense strand starting at position 629 of SEQ ID NO: 586707
acugcuuaacaguauggau

SEQ ID NO: 738231 - RNA, 19 nt, Artificial Sequence
  Description of Artificial Sequence: Synthetic oligonucleotide
  Antisense strand to SEQ ID NO: 738230
auccauacuguuaagcagu

SEQ ID NO: 738232 - RNA, 19 nt, Artificial Sequence
  Description of Artificial Sequence: Synthetic oligonucleotide
  Sense strand starting at position 631 of SEQ ID NO: 586707
ugcuuaacaguauggauaa

SEQ ID NO: 738233 - RNA, 19 nt, Artificial Sequence
  Description of Artificial Sequence: Synthetic oligonucleotide
  Antisense strand to SEQ ID NO: 738232
uuauccauacuguuaagca

SEQ ID NO: 738234 - RNA, 19 nt, Artificial Sequence
  Description of Artificial Sequence: Synthetic oligonucleotide
  Sense strand starting at position 643 of SEQ ID NO: 586707
uggauaaugccauguauau

SEQ ID NO: 738235 - RNA, 19 nt, Artificial Sequence
  Description of Artificial Sequence: Synthetic oligonucleotide
  Antisense strand to SEQ ID NO: 738234
auauacauggcauuaucca

SEQ ID NO: 738236 - RNA, 19 nt, Artificial Sequence
  Description of Artificial Sequence: Synthetic oligonucleotide
  Sense strand starting at position 752 of SEQ ID NO: 586707
ucugaaauacugggacuuu

SEQ ID NO: 738237 - RNA, 19 nt, Artificial Sequence
  Description of Artificial Sequence: Synthetic oligonucleotide
  Antisense strand to SEQ ID NO: 738236
aaagucccaguauuucaga

SEQ ID NO: 738238 - RNA, 19 nt, Artificial Sequence
  Description of Artificial Sequence: Synthetic oligonucleotide
  Sense strand starting at position 964 of SEQ ID NO: 586707
uaauaucuaguaggguaaa

SEQ ID NO: 738239 - RNA, 19 nt, Artificial Sequence
  Description of Artificial Sequence: Synthetic oligonucleotide
  Antisense strand to SEQ ID NO: 738238
uuuacccuacuagauauua

SEQ ID NO: 738240 - RNA, 19 nt, Artificial Sequence
  Description of Artificial Sequence: Synthetic oligonucleotide
  Sense strand starting at position 1004 of SEQ ID NO: 586707
acaagaaaguuagcaacuu

SEQ ID NO: 738241 - RNA, 19 nt, Artificial Sequence
  Description of Artificial Sequence: Synthetic oligonucleotide
  Antisense strand to SEQ ID NO: 738240
aaguugcuaacuuucuugu

SEQ ID NO: 738242 - RNA, 19 nt, Artificial Sequence
  Description of Artificial Sequence: Synthetic oligonucleotide
  Sense strand starting at position 1207 of SEQ ID NO: 586707
ccacaacuggccuguuaaa

SEQ ID NO: 738243 - RNA, 19 nt, Artificial Sequence
  Description of Artificial Sequence: Synthetic oligonucleotide
  Antisense strand to SEQ ID NO: 738242
uuuaacaggccaguugugg

SEQ ID NO: 738244 - RNA, 19 nt, Artificial Sequence
  Description of Artificial Sequence: Synthetic oligonucleotide
  Sense strand starting at position 1322 of SEQ ID NO: 586707
augcauuucucaccuuguu

SEQ ID NO: 738245 - RNA, 19 nt, Artificial Sequence
  Description of Artificial Sequence: Synthetic oligonucleotide
  Antisense strand to SEQ ID NO: 738244
aacaaggugagaaaugcau

SEQ ID NO: 738246 - RNA, 19 nt, Artificial Sequence
  Description of Artificial Sequence: Synthetic oligonucleotide
  Sense strand starting at position 1474 of SEQ ID NO: 586707
aacguucucguugcauuau

SEQ ID NO: 738247 - RNA, 19 nt, Artificial Sequence
  Description of Artificial Sequence: Synthetic oligonucleotide
  Antisense strand to SEQ ID NO: 738246
auaaugcaacgagaacguu

SEQ ID NO: 738248 - RNA, 19 nt, Artificial Sequence
  Description of Artificial Sequence: Synthetic oligonucleotide
  Sense strand starting at position 1477 of SEQ ID NO: 586707
guucucguugcauuauguu

SEQ ID NO: 738249 - RNA, 19 nt, Artificial Sequence
  Description of Artificial Sequence: Synthetic oligonucleotide
  Antisense strand to SEQ ID NO: 738248
aacauaaugcaacgagaac

SEQ ID NO: 738250 - RNA, 19 nt, Artificial Sequence
  Description of Artificial Sequence: Synthetic oligonucleotide
  Sense strand starting at position 1558 of SEQ ID NO: 586707
aguacaugccuacauauga

SEQ ID NO: 738251 - RNA, 19 nt, Artificial Sequence
  Description of Artificial Sequence: Synthetic oligonucleotide
  Antisense strand to SEQ ID NO: 738250
ucauauguaggcauguacu

SEQ ID NO: 738252 - RNA, 19 nt, Artificial Sequence
  Description of Artificial Sequence: Synthetic oligonucleotide
  Sense strand starting at position 1590 of SEQ ID NO: 586707
cggaaucacgaauacguuu

SEQ ID NO: 738253 - RNA, 19 nt, Artificial Sequence
  Description of Artificial Sequence: Synthetic oligonucleotide
  Antisense strand to SEQ ID NO: 738252
aaacguauucgugauuccg

SEQ ID NO: 738254 - RNA, 19 nt, Artificial Sequence
  Description of Artificial Sequence: Synthetic oligonucleotide
  Sense strand starting at position 1762 of SEQ ID NO: 586707
ccaggugggucuuucuuaa

SEQ ID NO: 738255 - RNA, 19 nt, Artificial Sequence
  Description of Artificial Sequence: Synthetic oligonucleotide
  Antisense strand to SEQ ID NO: 738254
uuaagaaagacccaccugg

SEQ ID NO: 738256 - RNA, 19 nt, Artificial Sequence
  Description of Artificial Sequence: Synthetic oligonucleotide
  Sense strand starting at position 2155 of SEQ ID NO: 586707
gguauugaacgccaaagaa

SEQ ID NO: 738257 - RNA, 19 nt, Artificial Sequence
  Description of Artificial Sequence: Synthetic oligonucleotide
  Antisense strand to SEQ ID NO: 738256
uucuuuggcguucaauacc

SEQ ID NO: 738258 - RNA, 19 nt, Artificial Sequence
  Description of Artificial Sequence: Synthetic oligonucleotide
  Sense strand starting at position 2233 of SEQ ID NO: 586707
ggaacuguaaggcaucuua

SEQ ID NO: 738259 - RNA, 19 nt, Artificial Sequence
  Description of Artificial Sequence: Synthetic oligonucleotide
  Antisense strand to SEQ ID NO: 738258
uaagaugccuuacaguucc

SEQ ID NO: 738260 - RNA, 19 nt, Artificial Sequence
  Description of Artificial Sequence: Synthetic oligonucleotide
  Sense strand starting at position 2314 of SEQ ID NO: 586707
uuuacaugcguguugcagu

SEQ ID NO: 738261 - RNA, 19 nt, Artificial Sequence
  Description of Artificial Sequence: Synthetic oligonucleotide
  Antisense strand to SEQ ID NO: 738260
acugcaacacgcauguaaa

SEQ ID NO: 738262 - RNA, 19 nt, Artificial Sequence
  Description of Artificial Sequence: Synthetic oligonucleotide
  Sense strand starting at position 2341 of SEQ ID NO: 586707
augcgauugcugcugcuaa

SEQ ID NO: 738263 - RNA, 19 nt, Artificial Sequence
  Description of Artificial Sequence: Synthetic oligonucleotide
  Antisense strand to SEQ ID NO: 738262
uuagcagcagcaaucgcau

SEQ ID NO: 738264 - RNA, 19 nt, Artificial Sequence
  Description of Artificial Sequence: Synthetic oligonucleotide
  Sense strand starting at position 2343 of SEQ ID NO: 586707
gcgauugcugcugcuaaug

SEQ ID NO: 738265 - RNA, 19 nt, Artificial Sequence
  Description of Artificial Sequence: Synthetic oligonucleotide
  Antisense strand to SEQ ID NO: 738264
cauuagcagcagcaaucgc

SEQ ID NO: 738266 - RNA, 19 nt, Artificial Sequence
  Description of Artificial Sequence: Synthetic oligonucleotide
  Sense strand starting at position 2430 of SEQ ID NO: 586707
uguuuagucccagauucuc

SEQ ID NO: 738267 - RNA, 19 nt, Artificial Sequence
  Description of Artificial Sequence: Synthetic oligonucleotide
  Antisense strand to SEQ ID NO: 738266
gagaaucugggacuaaaca

SEQ ID NO: 738268 - RNA, 19 nt, Artificial Sequence
  Description of Artificial Sequence: Synthetic oligonucleotide
  Sense strand starting at position 2456 of SEQ ID NO: 586707
aaugaacuaccguggaaau

SEQ ID NO: 738269 - RNA, 19 nt, Artificial Sequence
  Description of Artificial Sequence: Synthetic oligonucleotide
  Antisense strand to SEQ ID NO: 738268
auuuccacgguaguucauu

SEQ ID NO: 738270 - RNA, 19 nt, Artificial Sequence
  Description of Artificial Sequence: Synthetic oligonucleotide
  Sense strand starting at position 2467 of SEQ ID NO: 586707
guggaaauccuggaguguc

SEQ ID NO: 738271 - RNA, 19 nt, Artificial Sequence
  Description of Artificial Sequence: Synthetic oligonucleotide
  Antisense strand to SEQ ID NO: 738270
gacacuccaggauuuccac

SEQ ID NO: 738272 - RNA, 19 nt, Artificial Sequence
  Description of Artificial Sequence: Synthetic oligonucleotide
  Sense strand starting at position 2531 of SEQ ID NO: 586707
ucuaguauacuucgauuuc

SEQ ID NO: 738273 - RNA, 19 nt, Artificial Sequence
  Description of Artificial Sequence: Synthetic oligonucleotide
  Antisense strand to SEQ ID NO: 738272
gaaaucgaaguauacuaga

SEQ ID NO: 738274 - RNA, 19 nt, Artificial Sequence
  Description of Artificial Sequence: Synthetic oligonucleotide
  Sense strand starting at position 2593 of SEQ ID NO: 586707
gaggguuugcgcuauuuaa

SEQ ID NO: 738275 - RNA, 19 nt, Artificial Sequence
  Description of Artificial Sequence: Synthetic oligonucleotide
  Antisense strand to SEQ ID NO: 738274
uuaaauagcgcaaacccuc

SEQ ID NO: 738276 - RNA, 19 nt, Artificial Sequence
  Description of Artificial Sequence: Synthetic oligonucleotide
  Sense strand starting at position 2808 of SEQ ID NO: 586707
gugucugucgaguuauccu

SEQ ID NO: 738277 - RNA, 19 nt, Artificial Sequence
  Description of Artificial Sequence: Synthetic oligonucleotide
  Antisense strand to SEQ ID NO: 738276
aggauaacucgacagacac

SEQ ID NO: 738278 - RNA, 19 nt, Artificial Sequence
  Description of Artificial Sequence: Synthetic oligonucleotide
  Sense strand starting at position 2815 of SEQ ID NO: 586707
ucgaguuauccucaggaga

SEQ ID NO: 738279 - RNA, 19 nt, Artificial Sequence
  Description of Artificial Sequence: Synthetic oligonucleotide
  Antisense strand to SEQ ID NO: 738278
ucuccugaggauaacucga

SEQ ID NO: 738280 - RNA, 19 nt, Artificial Sequence
  Description of Artificial Sequence: Synthetic oligonucleotide
  Sense strand starting at position 2826 of SEQ ID NO: 586707
ucaggagacgauggugauu

SEQ ID NO: 738281 - RNA, 19 nt, Artificial Sequence
  Description of Artificial Sequence: Synthetic oligonucleotide
  Antisense strand to SEQ ID NO: 738280
aaucaccaucgucuccuga

SEQ ID NO: 738282 - RNA, 19 nt, Artificial Sequence
  Description of Artificial Sequence: Synthetic oligonucleotide
  Sense strand starting at position 3222 of SEQ ID NO: 586707
agugaaccuugucucaaga

SEQ ID NO: 738283 - RNA, 19 nt, Artificial Sequence
  Description of Artificial Sequence: Synthetic oligonucleotide
  Antisense strand to SEQ ID NO: 738282
ucuugagacaagguucacu

SEQ ID NO: 738284 - RNA, 19 nt, Artificial Sequence
  Description of Artificial Sequence: Synthetic oligonucleotide
  Sense strand starting at position 3727 of SEQ ID NO: 586707
guugguuuagaaggauaaa

SEQ ID NO: 738285 - RNA, 19 nt, Artificial Sequence
  Description of Artificial Sequence: Synthetic oligonucleotide
  Antisense strand to SEQ ID NO: 738284
uuuauccuucuaaaccaac

SEQ ID NO: 738286 - RNA, 19 nt, Artificial Sequence
  Description of Artificial Sequence: Synthetic oligonucleotide
  Sense strand starting at position 3806 of SEQ ID NO: 586707
cugcaauuccuccagguaa

SEQ ID NO: 738287 - RNA, 19 nt, Artificial Sequence
  Description of Artificial Sequence: Synthetic oligonucleotide
  Antisense strand to SEQ ID NO: 738286
uuaccuggaggaauugcag

SEQ ID NO: 738288 - RNA, 19 nt, Artificial Sequence
  Description of Artificial Sequence: Synthetic oligonucleotide
  Sense strand starting at position 3879 of SEQ ID NO: 586707
auauuccuucugcauggaa

SEQ ID NO: 738289 - RNA, 19 nt, Artificial Sequence
  Description of Artificial Sequence: Synthetic oligonucleotide
  Antisense strand to SEQ ID NO: 738288
uuccaugcagaaggaauau

SEQ ID NO: 738290 - RNA, 19 nt, Artificial Sequence
  Description of Artificial Sequence: Synthetic oligonucleotide
  Sense strand starting at position 3897 of SEQ ID NO: 586707
aggagcuccuaugucugaa

SEQ ID NO: 738291 - RNA, 19 nt, Artificial Sequence
  Description of Artificial Sequence: Synthetic oligonucleotide
  Antisense strand to SEQ ID NO: 738290
uucagacauaggagcuccu

SEQ ID NO: 738292 - RNA, 19 nt, Artificial Sequence
  Description of Artificial Sequence: Synthetic oligonucleotide
  Sense strand starting at position 3958 of SEQ ID NO: 586707
cuuuacaaucggcauguaa

SEQ ID NO: 738293 - RNA, 19 nt, Artificial Sequence
  Description of Artificial Sequence: Synthetic oligonucleotide
  Antisense strand to SEQ ID NO: 738292
uuacaugccgauuguaaag

SEQ ID NO: 738294 - RNA, 19 nt, Artificial Sequence
  Description of Artificial Sequence: Synthetic oligonucleotide
  Sense strand starting at position 22 of SEQ ID NO: 586708
aggacuuacuucccaguau

SEQ ID NO: 738295 - RNA, 19 nt, Artificial Sequence
  Description of Artificial Sequence: Synthetic oligonucleotide
  Antisense strand to SEQ ID NO: 738294
auacugggaaguaaguccu

SEQ ID NO: 738296 - RNA, 19 nt, Artificial Sequence
  Description of Artificial Sequence: Synthetic oligonucleotide
  Sense strand starting at position 115 of SEQ ID NO: 586708
guuaguacuuaaucaacuu

SEQ ID NO: 738297 - RNA, 19 nt, Artificial Sequence
  Description of Artificial Sequence: Synthetic oligonucleotide
  Antisense strand to SEQ ID NO: 738296
aaguugauuaaguacuaac

SEQ ID NO: 738298 - RNA, 19 nt, Artificial Sequence
  Description of Artificial Sequence: Synthetic oligonucleotide
  Sense strand starting at position 195 of SEQ ID NO: 586708
uuacuuccagaguauugca

SEQ ID NO: 738299 - RNA, 19 nt, Artificial Sequence
  Description of Artificial Sequence: Synthetic oligonucleotide
  Antisense strand to SEQ ID NO: 738298
ugcaauacucuggaaguaa

SEQ ID NO: 738300 - RNA, 19 nt, Artificial Sequence
  Description of Artificial Sequence: Synthetic oligonucleotide
  Sense strand starting at position 435 of SEQ ID NO: 586708
ugcacaauccuguaaguuu

SEQ ID NO: 738301 - RNA, 19 nt, Artificial Sequence
  Description of Artificial Sequence: Synthetic oligonucleotide
  Antisense strand to SEQ ID NO: 738300
aaacuuacaggauugugca

SEQ ID NO: 738302 - RNA, 19 nt, Artificial Sequence
  Description of Artificial Sequence: Synthetic oligonucleotide
  Sense strand starting at position 513 of SEQ ID NO: 586708
agguccuauucuuugaaga

SEQ ID NO: 738303 - RNA, 19 nt, Artificial Sequence
  Description of Artificial Sequence: Synthetic oligonucleotide
  Antisense strand to SEQ ID NO: 738302
ucuucaaagaauaggaccu

SEQ ID NO: 738304 - RNA, 19 nt, Artificial Sequence
  Description of Artificial Sequence: Synthetic oligonucleotide
  Sense strand starting at position 514 of SEQ ID NO: 586708
gguccuauucuuugaagag

SEQ ID NO: 738305 - RNA, 19 nt, Artificial Sequence
  Description of Artificial Sequence: Synthetic oligonucleotide
  Antisense strand to SEQ ID NO: 738304
cucuucaaagaauaggacc

SEQ ID NO: 738306 - RNA, 19 nt, Artificial Sequence
  Description of Artificial Sequence: Synthetic oligonucleotide
  Sense strand starting at position 652 of SEQ ID NO: 586708
auguuaaguucucucauaa

SEQ ID NO: 738307 - RNA, 19 nt, Artificial Sequence
  Description of Artificial Sequence: Synthetic oligonucleotide
  Antisense strand to SEQ ID NO: 738306
uuaugagagaacuuaacau

SEQ ID NO: 738308 - RNA, 19 nt, Artificial Sequence
  Description of Artificial Sequence: Synthetic oligonucleotide
  Sense strand starting at position 971 of SEQ ID NO: 586708
gcaaauauguauuuguugu

SEQ ID NO: 738309 - RNA, 19 nt, Artificial Sequence
  Description of Artificial Sequence: Synthetic oligonucleotide
  Antisense strand to SEQ ID NO: 738308
acaacaaauacauauuugc

SEQ ID NO: 738310 - RNA, 19 nt, Artificial Sequence
  Description of Artificial Sequence: Synthetic oligonucleotide
  Sense strand starting at position 1226 of SEQ ID NO: 586708
uaaguaacuuugguguaga

SEQ ID NO: 738311 - RNA, 19 nt, Artificial Sequence
  Description of Artificial Sequence: Synthetic oligonucleotide
  Antisense strand to SEQ ID NO: 738310
ucuacaccaaaguuacuua

SEQ ID NO: 738312 - RNA, 19 nt, Artificial Sequence
  Description of Artificial Sequence: Synthetic oligonucleotide
  Sense strand starting at position 1229 of SEQ ID NO: 586708
guaacuuugguguagaaga

SEQ ID NO: 738313 - RNA, 19 nt, Artificial Sequence
  Description of Artificial Sequence: Synthetic oligonucleotide
  Antisense strand to SEQ ID NO: 738312
ucuucuacaccaaaguuac

SEQ ID NO: 738314 - RNA, 19 nt, Artificial Sequence
  Description of Artificial Sequence: Synthetic oligonucleotide
  Sense strand starting at position 1259 of SEQ ID NO: 586708
aaaugaucagugcgcagaa

SEQ ID NO: 738315 - RNA, 19 nt, Artificial Sequence
  Description of Artificial Sequence: Synthetic oligonucleotide
  Antisense strand to SEQ ID NO: 738314
uucugcgcacugaucauuu

SEQ ID NO: 738316 - RNA, 19 nt, Artificial Sequence
  Description of Artificial Sequence: Synthetic oligonucleotide
  Sense strand starting at position 1261 of SEQ ID NO: 586708
augaucagugcgcagaaga

SEQ ID NO: 738317 - RNA, 19 nt, Artificial Sequence
  Description of Artificial Sequence: Synthetic oligonucleotide
  Antisense strand to SEQ ID NO: 738316
ucuucugcgcacugaucau

SEQ ID NO: 738318 - RNA, 19 nt, Artificial Sequence
  Description of Artificial Sequence: Synthetic oligonucleotide
  Sense strand starting at position 2126 of SEQ ID NO: 586708
gagugagaguacuuucgau

SEQ ID NO: 738319 - RNA, 19 nt, Artificial Sequence
  Description of Artificial Sequence: Synthetic oligonucleotide
  Antisense strand to SEQ ID NO: 738318
aucgaaaguacucucacuc

SEQ ID NO: 738320 - RNA, 19 nt, Artificial Sequence
  Description of Artificial Sequence: Synthetic oligonucleotide
  Sense strand starting at position 2132 of SEQ ID NO: 586708
gaguacuuucgaugggauu

SEQ ID NO: 738321 - RNA, 19 nt, Artificial Sequence
  Description of Artificial Sequence: Synthetic oligonucleotide
  Antisense strand to SEQ ID NO: 738320
aaucccaucgaaaguacuc

SEQ ID NO: 738322 - RNA, 19 nt, Artificial Sequence
  Description of Artificial Sequence: Synthetic oligonucleotide
  Sense strand starting at position 2133 of SEQ ID NO: 586708
aguacuuucgaugggauua

SEQ ID NO: 738323 - RNA, 19 nt, Artificial Sequence
  Description of Artificial Sequence: Synthetic oligonucleotide
  Antisense strand to SEQ ID NO: 738322
uaaucccaucgaaaguacu

SEQ ID NO: 738324 - RNA, 19 nt, Artificial Sequence
  Description of Artificial Sequence: Synthetic oligonucleotide
  Sense strand starting at position 2134 of SEQ ID NO: 586708
guacuuucgaugggauuag

SEQ ID NO: 738325 - RNA, 19 nt, Artificial Sequence
  Description of Artificial Sequence: Synthetic oligonucleotide
  Antisense strand to SEQ ID NO: 738324
cuaaucccaucgaaaguac

SEQ ID NO: 738326 - RNA, 19 nt, Artificial Sequence
  Description of Artificial Sequence: Synthetic oligonucleotide
  Sense strand starting at position 2326 of SEQ ID NO: 586708
ccagucugacugggcuaaa

SEQ ID NO: 738327 - RNA, 19 nt, Artificial Sequence
  Description of Artificial Sequence: Synthetic oligonucleotide
  Antisense strand to SEQ ID NO: 738326
uuuagcccagucagacugg

SEQ ID NO: 738328 - RNA, 19 nt, Artificial Sequence
  Description of Artificial Sequence: Synthetic oligonucleotide
  Sense strand starting at position 2362 of SEQ ID NO: 586708
auuccugcccuccaggaaa

SEQ ID NO: 738329 - RNA, 19 nt, Artificial Sequence
  Description of Artificial Sequence: Synthetic oligonucleotide
  Antisense strand to SEQ ID NO: 738328
uuuccuggagggcaggaau

SEQ ID NO: 738330 - RNA, 19 nt, Artificial Sequence
  Description of Artificial Sequence: Synthetic oligonucleotide
  Sense strand starting at position 2400 of SEQ ID NO: 586708
aauguaaauugaguguguu

SEQ ID NO: 738331 - RNA, 19 nt, Artificial Sequence
  Description of Artificial Sequence: Synthetic oligonucleotide
  Antisense strand to SEQ ID NO: 738330
aacacacucaauuuacauu

SEQ ID NO: 738332 - RNA, 19 nt, Artificial Sequence
  Description of Artificial Sequence: Synthetic oligonucleotide
  Sense strand starting at position 2404 of SEQ ID NO: 586708
uaaauugaguguguuaaca

SEQ ID NO: 738333 - RNA, 19 nt, Artificial Sequence
  Description of Artificial Sequence: Synthetic oligonucleotide
  Antisense strand to SEQ ID NO: 738332
uguuaacacacucaauuua

SEQ ID NO: 738334 - RNA, 19 nt, Artificial Sequence
  Description of Artificial Sequence: Synthetic oligonucleotide
  Sense strand starting at position 2412 of SEQ ID NO: 586708
guguguuaacacuauguau

SEQ ID NO: 738335 - RNA, 19 nt, Artificial Sequence
  Description of Artificial Sequence: Synthetic oligonucleotide
  Antisense strand to SEQ ID NO: 738334
auacauaguguuaacacac

SEQ ID NO: 738336 - RNA, 19 nt, Artificial Sequence
  Description of Artificial Sequence: Synthetic oligonucleotide
  Sense strand starting at position 2414 of SEQ ID NO: 586708
guguuaacacuauguauaa

SEQ ID NO: 738337 - RNA, 19 nt, Artificial Sequence
  Description of Artificial Sequence: Synthetic oligonucleotide
  Antisense strand to SEQ ID NO: 738336
uuauacauaguguuaacac

SEQ ID NO: 738338 - RNA, 19 nt, Artificial Sequence
  Description of Artificial Sequence: Synthetic oligonucleotide
  Sense strand starting at position 2426 of SEQ ID NO: 586708
uguauaauguucccuggag

SEQ ID NO: 738339 - RNA, 19 nt, Artificial Sequence
  Description of Artificial Sequence: Synthetic oligonucleotide
  Antisense strand to SEQ ID NO: 738338
cuccagggaacauuauaca

SEQ ID NO: 738340 - RNA, 19 nt, Artificial Sequence
  Description of Artificial Sequence: Synthetic oligonucleotide
  Sense strand starting at position 2428 of SEQ ID NO: 586708
uauaauguucccuggagca

SEQ ID NO: 738341 - RNA, 19 nt, Artificial Sequence
  Description of Artificial Sequence: Synthetic oligonucleotide
  Antisense strand to SEQ ID NO: 738340
ugcuccagggaacauuaua

SEQ ID NO: 738342 - RNA, 19 nt, Artificial Sequence
  Description of Artificial Sequence: Synthetic oligonucleotide
  Sense strand starting at position 2430 of SEQ ID NO: 586708
uaauguucccuggagcaaa

SEQ ID NO: 738343 - RNA, 19 nt, Artificial Sequence
  Description of Artificial Sequence: Synthetic oligonucleotide
  Antisense strand to SEQ ID NO: 738342
uuugcuccagggaacauua

SEQ ID NO: 738344 - RNA, 19 nt, Artificial Sequence
  Description of Artificial Sequence: Synthetic oligonucleotide
  Sense strand starting at position 2613 of SEQ ID NO: 586708
gacuguucuggugaaguca

SEQ ID NO: 738345 - RNA, 19 nt, Artificial Sequence
  Description of Artificial Sequence: Synthetic oligonucleotide
  Antisense strand to SEQ ID NO: 738344
ugacuucaccagaacaguc

SEQ ID NO: 738346 - RNA, 19 nt, Artificial Sequence
  Description of Artificial Sequence: Synthetic oligonucleotide
  Sense strand starting at position 2909 of SEQ ID NO: 586708
ggagccaaauuguuuaguu

SEQ ID NO: 738347 - RNA, 19 nt, Artificial Sequence
  Description of Artificial Sequence: Synthetic oligonucleotide
  Antisense strand to SEQ ID NO: 738346
aacuaaacaauuuggcucc

SEQ ID NO: 738348 - RNA, 19 nt, Artificial Sequence
  Description of Artificial Sequence: Synthetic oligonucleotide
  Sense strand starting at position 2960 of SEQ ID NO: 586708
ugucuucuugggcaaguua

SEQ ID NO: 738349 - RNA, 19 nt, Artificial Sequence
  Description of Artificial Sequence: Synthetic oligonucleotide
  Antisense strand to SEQ ID NO: 738348
uaacuugcccaagaagaca

SEQ ID NO: 738350 - RNA, 19 nt, Artificial Sequence
  Description of Artificial Sequence: Synthetic oligonucleotide
  Sense strand starting at position 3024 of SEQ ID NO: 586708
ugucaauaguguuuggaaa

SEQ ID NO: 738351 - RNA, 19 nt, Artificial Sequence
  Description of Artificial Sequence: Synthetic oligonucleotide
  Antisense strand to SEQ ID NO: 738350
uuuccaaacacuauugaca

SEQ ID NO: 738352 - RNA, 19 nt, Artificial Sequence
  Description of Artificial Sequence: Synthetic oligonucleotide
  Sense strand starting at position 3025 of SEQ ID NO: 586708
gucaauaguguuuggaaau

SEQ ID NO: 738353 - RNA, 19 nt, Artificial Sequence
  Description of Artificial Sequence: Synthetic oligonucleotide
  Antisense strand to SEQ ID NO: 738352
auuuccaaacacuauugac

SEQ ID NO: 738354 - RNA, 19 nt, Artificial Sequence
  Description of Artificial Sequence: Synthetic oligonucleotide
  Sense strand starting at position 3060 of SEQ ID NO: 586708
ugcuaucauuuagaguaga

SEQ ID NO: 738355 - RNA, 19 nt, Artificial Sequence
  Description of Artificial Sequence: Synthetic oligonucleotide
  Antisense strand to SEQ ID NO: 738354
ucuacucuaaaugauagca

SEQ ID NO: 738356 - RNA, 19 nt, Artificial Sequence
  Description of Artificial Sequence: Synthetic oligonucleotide
  Sense strand starting at position 3125 of SEQ ID NO: 586708
aucuaccuagauugucauu

SEQ ID NO: 738357 - RNA, 19 nt, Artificial Sequence
  Description of Artificial Sequence: Synthetic oligonucleotide
  Antisense strand to SEQ ID NO: 738356
aaugacaaucuagguagau

SEQ ID NO: 738358 - RNA, 19 nt, Artificial Sequence
  Description of Artificial Sequence: Synthetic oligonucleotide
  Sense strand starting at position 3195 of SEQ ID NO: 586708
ugauacgauuucuggaaac

SEQ ID NO: 738359 - RNA, 19 nt, Artificial Sequence
  Description of Artificial Sequence: Synthetic oligonucleotide
  Antisense strand to SEQ ID NO: 738358
guuuccagaaaucguauca

SEQ ID NO: 738360 - RNA, 19 nt, Artificial Sequence
  Description of Artificial Sequence: Synthetic oligonucleotide
  Sense strand starting at position 3382 of SEQ ID NO: 586708
gcuggaagaucgcuugaag

SEQ ID NO: 738361 - RNA, 19 nt, Artificial Sequence
  Description of Artificial Sequence: Synthetic oligonucleotide
  Antisense strand to SEQ ID NO: 738360
cuucaagcgaucuuccagc

SEQ ID NO: 738362 - RNA, 19 nt, Artificial Sequence
  Description of Artificial Sequence: Synthetic oligonucleotide
  Sense strand starting at position 3641 of SEQ ID NO: 586708
uuuccuaugugaucuauuc

SEQ ID NO: 738363 - RNA, 19 nt, Artificial Sequence
  Description of Artificial Sequence: Synthetic oligonucleotide
  Antisense strand to SEQ ID NO: 738362
gaauagaucacauaggaaa

SEQ ID NO: 738364 - RNA, 19 nt, Artificial Sequence
  Description of Artificial Sequence: Synthetic oligonucleotide
  Sense strand starting at position 3717 of SEQ ID NO: 586708
ucuggucuccuguagaugu

SEQ ID NO: 738365 - RNA, 19 nt, Artificial Sequence
  Description of Artificial Sequence: Synthetic oligonucleotide
  Antisense strand to SEQ ID NO: 738364
acaucuacaggagaccaga

SEQ ID NO: 738366 - RNA, 19 nt, Artificial Sequence
  Description of Artificial Sequence: Synthetic oligonucleotide
  Sense strand starting at position 3719 of SEQ ID NO: 586708
uggucuccuguagauguua

SEQ ID NO: 738367 - RNA, 19 nt, Artificial Sequence
  Description of Artificial Sequence: Synthetic oligonucleotide
  Antisense strand to SEQ ID NO: 738366
uaacaucuacaggagacca

SEQ ID NO: 738368 - RNA, 19 nt, Artificial Sequence
  Description of Artificial Sequence: Synthetic oligonucleotide
  Sense strand starting at position 3721 of SEQ ID NO: 586708
gucuccuguagauguuaaa

SEQ ID NO: 738369 - RNA, 19 nt, Artificial Sequence
  Description of Artificial Sequence: Synthetic oligonucleotide
  Antisense strand to SEQ ID NO: 738368
uuuaacaucuacaggagac

SEQ ID NO: 738370 - RNA, 19 nt, Artificial Sequence
  Description of Artificial Sequence: Synthetic oligonucleotide
  Sense strand starting at position 3730 of SEQ ID NO: 586708
agauguuaaaccuaguugu

SEQ ID NO: 738371 - RNA, 19 nt, Artificial Sequence
  Description of Artificial Sequence: Synthetic oligonucleotide
  Antisense strand to SEQ ID NO: 738370
acaacuagguuuaacaucu

SEQ ID NO: 738372 - RNA, 19 nt, Artificial Sequence
  Description of Artificial Sequence: Synthetic oligonucleotide
  Sense strand starting at position 3954 of SEQ ID NO: 586708
acugucaucucugucuaca

SEQ ID NO: 738373 - RNA, 19 nt, Artificial Sequence
  Description of Artificial Sequence: Synthetic oligonucleotide
  Antisense strand to SEQ ID NO: 738372
uguagacagagaugacagu

SEQ ID NO: 738374 - RNA, 19 nt, Artificial Sequence
  Description of Artificial Sequence: Synthetic oligonucleotide
  Sense strand starting at position 314 of SEQ ID NO: 586709
uugcaugucuucuuucuca

SEQ ID NO: 738375 - RNA, 19 nt, Artificial Sequence
  Description of Artificial Sequence: Synthetic oligonucleotide
  Antisense strand to SEQ ID NO: 738374
ugagaaagaagacaugcaa

SEQ ID NO: 738376 - RNA, 19 nt, Artificial Sequence
  Description of Artificial Sequence: Synthetic oligonucleotide
  Sense strand starting at position 374 of SEQ ID NO: 586709
aacguucucccauguaugu

SEQ ID NO: 738377 - RNA, 19 nt, Artificial Sequence
  Description of Artificial Sequence: Synthetic oligonucleotide
  Antisense strand to SEQ ID NO: 738376
acauacaugggagaacguu

SEQ ID NO: 738378 - RNA, 19 nt, Artificial Sequence
  Description of Artificial Sequence: Synthetic oligonucleotide
  Sense strand starting at position 376 of SEQ ID NO: 586709
cguucucccauguauguuu

SEQ ID NO: 738379 - RNA, 19 nt, Artificial Sequence
  Description of Artificial Sequence: Synthetic oligonucleotide
  Antisense strand to SEQ ID NO: 738378
aaacauacaugggagaacg

SEQ ID NO: 738380 - RNA, 19 nt, Artificial Sequence
  Description of Artificial Sequence: Synthetic oligonucleotide
  Sense strand starting at position 1984 of SEQ ID NO: 586709
uaagguuauucgguaguac

SEQ ID NO: 738381 - RNA, 19 nt, Artificial Sequence
  Description of Artificial Sequence: Synthetic oligonucleotide
  Antisense strand to SEQ ID NO: 738380
guacuaccgaauaaccuua

SEQ ID NO: 738382 - RNA, 19 nt, Artificial Sequence
  Description of Artificial Sequence: Synthetic oligonucleotide
  Sense strand starting at position 1985 of SEQ ID NO: 586709
aagguuauucgguaguacu

SEQ ID NO: 738383 - RNA, 19 nt, Artificial Sequence
  Description of Artificial Sequence: Synthetic oligonucleotide
  Antisense strand to SEQ ID NO: 738382
aguacuaccgaauaaccuu

SEQ ID NO: 738384 - RNA, 19 nt, Artificial Sequence
  Description of Artificial Sequence: Synthetic oligonucleotide
  Sense strand starting at position 2029 of SEQ ID NO: 586709
ggcacaagguggucaaauu

SEQ ID NO: 738385 - RNA, 19 nt, Artificial Sequence
  Description of Artificial Sequence: Synthetic oligonucleotide
  Antisense strand to SEQ ID NO: 738384
aauuugaccaccuugugcc

SEQ ID NO: 738386 - RNA, 19 nt, Artificial Sequence
  Description of Artificial Sequence: Synthetic oligonucleotide
  Sense strand starting at position 2030 of SEQ ID NO: 586709
gcacaagguggucaaauua

SEQ ID NO: 738387 - RNA, 19 nt, Artificial Sequence
  Description of Artificial Sequence: Synthetic oligonucleotide
  Antisense strand to SEQ ID NO: 738386
uaauuugaccaccuugugc

SEQ ID NO: 738388 - RNA, 19 nt, Artificial Sequence
  Description of Artificial Sequence: Synthetic oligonucleotide
  Sense strand starting at position 2049 of SEQ ID NO: 586709
uggugaaaucuggguguaa

SEQ ID NO: 738389 - RNA, 19 nt, Artificial Sequence
  Description of Artificial Sequence: Synthetic oligonucleotide
  Antisense strand to SEQ ID NO: 738388
uuacacccagauuucacca

SEQ ID NO: 738390 - RNA, 19 nt, Artificial Sequence
  Description of Artificial Sequence: Synthetic oligonucleotide
  Sense strand starting at position 2050 of SEQ ID NO: 586709
ggugaaaucuggguguaag

SEQ ID NO: 738391 - RNA, 19 nt, Artificial Sequence
  Description of Artificial Sequence: Synthetic oligonucleotide
  Antisense strand to SEQ ID NO: 738390
cuuacacccagauuucacc

SEQ ID NO: 738392 - RNA, 19 nt, Artificial Sequence
  Description of Artificial Sequence: Synthetic oligonucleotide
  Sense strand starting at position 2051 of SEQ ID NO: 586709
gugaaaucuggguguaaga

SEQ ID NO: 738393 - RNA, 19 nt, Artificial Sequence
  Description of Artificial Sequence: Synthetic oligonucleotide
  Antisense strand to SEQ ID NO: 738392
ucuuacacccagauuucac

SEQ ID NO: 738394 - RNA, 19 nt, Artificial Sequence
  Description of Artificial Sequence: Synthetic oligonucleotide
  Sense strand starting at position 2060 of SEQ ID NO: 586709
ggguguaagacagaugcuu

SEQ ID NO: 738395 - RNA, 19 nt, Artificial Sequence
  Description of Artificial Sequence: Synthetic oligonucleotide
  Antisense strand to SEQ ID NO: 738394
aagcaucugucuuacaccc

SEQ ID NO: 738396 - RNA, 19 nt, Artificial Sequence
  Description of Artificial Sequence: Synthetic oligonucleotide
  Sense strand starting at position 2062 of SEQ ID NO: 586709
guguaagacagaugcuuug

SEQ ID NO: 738397 - RNA, 19 nt, Artificial Sequence
  Description of Artificial Sequence: Synthetic oligonucleotide
  Antisense strand to SEQ ID NO: 738396
caaagcaucugucuuacac

SEQ ID NO: 738398 - RNA, 19 nt, Artificial Sequence
  Description of Artificial Sequence: Synthetic oligonucleotide
  Sense strand starting at position 2068 of SEQ ID NO: 586709
gacagaugcuuuguguuaa

SEQ ID NO: 738399 - RNA, 19 nt, Artificial Sequence
  Description of Artificial Sequence: Synthetic oligonucleotide
  Antisense strand to SEQ ID NO: 738398
uuaacacaaagcaucuguc

SEQ ID NO: 738400 - RNA, 19 nt, Artificial Sequence
  Description of Artificial Sequence: Synthetic oligonucleotide
  Sense strand starting at position 2228 of SEQ ID NO: 586709
gcuuuauggccucauccaa

SEQ ID NO: 738401 - RNA, 19 nt, Artificial Sequence
  Description of Artificial Sequence: Synthetic oligonucleotide
  Antisense strand to SEQ ID NO: 738400
uuggaugaggccauaaagc

SEQ ID NO: 738402 - RNA, 19 nt, Artificial Sequence
  Description of Artificial Sequence: Synthetic oligonucleotide
  Sense strand starting at position 2297 of SEQ ID NO: 586709
uuucauaaggguugugaga

SEQ ID NO: 738403 - RNA, 19 nt, Artificial Sequence
  Description of Artificial Sequence: Synthetic oligonucleotide
  Antisense strand to SEQ ID NO: 738402
ucucacaacccuuaugaaa

SEQ ID NO: 738404 - RNA, 19 nt, Artificial Sequence
  Description of Artificial Sequence: Synthetic oligonucleotide
  Sense strand starting at position 2393 of SEQ ID NO: 586709
acuugugcuuacuuuguga

SEQ ID NO: 738405 - RNA, 19 nt, Artificial Sequence
  Description of Artificial Sequence: Synthetic oligonucleotide
  Antisense strand to SEQ ID NO: 738404
ucacaaaguaagcacaagu

SEQ ID NO: 738406 - RNA, 19 nt, Artificial Sequence
  Description of Artificial Sequence: Synthetic oligonucleotide
  Sense strand starting at position 2396 of SEQ ID NO: 586709
ugugcuuacuuugugacuu

SEQ ID NO: 738407 - RNA, 19 nt, Artificial Sequence
  Description of Artificial Sequence: Synthetic oligonucleotide
  Antisense strand to SEQ ID NO: 738406
aagucacaaaguaagcaca

SEQ ID NO: 738408 - RNA, 19 nt, Artificial Sequence
  Description of Artificial Sequence: Synthetic oligonucleotide
  Sense strand starting at position 2453 of SEQ ID NO: 586709
gcaagaaguggugagguaa

SEQ ID NO: 738409 - RNA, 19 nt, Artificial Sequence
  Description of Artificial Sequence: Synthetic oligonucleotide
  Antisense strand to SEQ ID NO: 738408
uuaccucaccacuucuugc

SEQ ID NO: 738410 - RNA, 19 nt, Artificial Sequence
  Description of Artificial Sequence: Synthetic oligonucleotide
  Sense strand starting at position 2714 of SEQ ID NO: 586709
ugagaugaagcuuagcuuu

SEQ ID NO: 738411 - RNA, 19 nt, Artificial Sequence
  Description of Artificial Sequence: Synthetic oligonucleotide
  Antisense strand to SEQ ID NO: 738410
aaagcuaagcuucaucuca

SEQ ID NO: 738412 - RNA, 19 nt, Artificial Sequence
  Description of Artificial Sequence: Synthetic oligonucleotide
  Sense strand starting at position 2722 of SEQ ID NO: 586709
agcuuagcuuuauuaagga

SEQ ID NO: 738413 - RNA, 19 nt, Artificial Sequence
  Description of Artificial Sequence: Synthetic oligonucleotide
  Antisense strand to SEQ ID NO: 738412
uccuuaauaaagcuaagcu

SEQ ID NO: 738414 - RNA, 19 nt, Artificial Sequence
  Description of Artificial Sequence: Synthetic oligonucleotide
  Sense strand starting at position 2755 of SEQ ID NO: 586709
ucuuuaugcugaguucuau

SEQ ID NO: 738415 - RNA, 19 nt, Artificial Sequence
  Description of Artificial Sequence: Synthetic oligonucleotide
  Antisense strand to SEQ ID NO: 738414
auagaacucagcauaaaga

SEQ ID NO: 738416 - RNA, 19 nt, Artificial Sequence
  Description of Artificial Sequence: Synthetic oligonucleotide
  Sense strand starting at position 2861 of SEQ ID NO: 586709
uugcuaaaggucuaucacu

SEQ ID NO: 738417 - RNA, 19 nt, Artificial Sequence
  Description of Artificial Sequence: Synthetic oligonucleotide
  Antisense strand to SEQ ID NO: 738416
agugauagaccuuuagcaa

SEQ ID NO: 738418 - RNA, 19 nt, Artificial Sequence
  Description of Artificial Sequence: Synthetic oligonucleotide
  Sense strand starting at position 2867 of SEQ ID NO: 586709
aaggucuaucacuguuguu

SEQ ID NO: 738419 - RNA, 19 nt, Artificial Sequence
  Description of Artificial Sequence: Synthetic oligonucleotide
  Antisense strand to SEQ ID NO: 738418
aacaacagugauagaccuu

SEQ ID NO: 738420 - RNA, 19 nt, Artificial Sequence
  Description of Artificial Sequence: Synthetic oligonucleotide
  Sense strand starting at position 2881 of SEQ ID NO: 586709
uuguuucccguggaaguuu

SEQ ID NO: 738421 - RNA, 19 nt, Artificial Sequence
  Description of Artificial Sequence: Synthetic oligonucleotide
  Antisense strand to SEQ ID NO: 738420
aaacuuccacgggaaacaa

SEQ ID NO: 738422 - RNA, 19 nt, Artificial Sequence
  Description of Artificial Sequence: Synthetic oligonucleotide
  Sense strand starting at position 2892 of SEQ ID NO: 586709
ggaaguuuggcugagcaac

SEQ ID NO: 738423 - RNA, 19 nt, Artificial Sequence
  Description of Artificial Sequence: Synthetic oligonucleotide
  Antisense strand to SEQ ID NO: 738422
guugcucagccaaacuucc

SEQ ID NO: 738424 - RNA, 19 nt, Artificial Sequence
  Description of Artificial Sequence: Synthetic oligonucleotide
  Sense strand starting at position 2922 of SEQ ID NO: 586709
ugcauuugugcgugccuga

SEQ ID NO: 738425 - RNA, 19 nt, Artificial Sequence
  Description of Artificial Sequence: Synthetic oligonucleotide
  Antisense strand to SEQ ID NO: 738424
ucaggcacgcacaaaugca

SEQ ID NO: 738426 - RNA, 19 nt, Artificial Sequence
  Description of Artificial Sequence: Synthetic oligonucleotide
  Sense strand starting at position 3037 of SEQ ID NO: 586709
gaccaagacugucuguuua

SEQ ID NO: 738427 - RNA, 19 nt, Artificial Sequence
  Description of Artificial Sequence: Synthetic oligonucleotide
  Antisense strand to SEQ ID NO: 738426
uaaacagacagucuugguc

SEQ ID NO: 738428 - RNA, 19 nt, Artificial Sequence
  Description of Artificial Sequence: Synthetic oligonucleotide
  Sense strand starting at position 3039 of SEQ ID NO: 586709
ccaagacugucuguuuaug

SEQ ID NO: 738429 - RNA, 19 nt, Artificial Sequence
  Description of Artificial Sequence: Synthetic oligonucleotide
  Antisense strand to SEQ ID NO: 738428
cauaaacagacagucuugg

SEQ ID NO: 738430 - RNA, 19 nt, Artificial Sequence
  Description of Artificial Sequence: Synthetic oligonucleotide
  Sense strand starting at position 3232 of SEQ ID NO: 586709
uuaguacucgcgagugguu

SEQ ID NO: 738431 - RNA, 19 nt, Artificial Sequence
  Description of Artificial Sequence: Synthetic oligonucleotide
  Antisense strand to SEQ ID NO: 738430
aaccacucgcgaguacuaa

SEQ ID NO: 738432 - RNA, 19 nt, Artificial Sequence
  Description of Artificial Sequence: Synthetic oligonucleotide
  Sense strand starting at position 3287 of SEQ ID NO: 586709
uguguaaauuuaggauaug

SEQ ID NO: 738433 - RNA, 19 nt, Artificial Sequence
  Description of Artificial Sequence: Synthetic oligonucleotide
  Antisense strand to SEQ ID NO: 738432
cauauccuaaauuuacaca

SEQ ID NO: 738434 - RNA, 19 nt, Artificial Sequence
  Description of Artificial Sequence: Synthetic oligonucleotide
  Sense strand starting at position 3320 of SEQ ID NO: 586709
ugggcgugcguguuagaua

SEQ ID NO: 738435 - RNA, 19 nt, Artificial Sequence
  Description of Artificial Sequence: Synthetic oligonucleotide
  Antisense strand to SEQ ID NO: 738434
uaucuaacacgcacgccca

SEQ ID NO: 738436 - RNA, 19 nt, Artificial Sequence
  Description of Artificial Sequence: Synthetic oligonucleotide
  Sense strand starting at position 3325 of SEQ ID NO: 586709
gugcguguuagauauaauu

SEQ ID NO: 738437 - RNA, 19 nt, Artificial Sequence
  Description of Artificial Sequence: Synthetic oligonucleotide
  Antisense strand to SEQ ID NO: 738436
aauuauaucuaacacgcac

SEQ ID NO: 738438 - RNA, 19 nt, Artificial Sequence
  Description of Artificial Sequence: Synthetic oligonucleotide
  Sense strand starting at position 3327 of SEQ ID NO: 586709
gcguguuagauauaauugu

SEQ ID NO: 738439 - RNA, 19 nt, Artificial Sequence
  Description of Artificial Sequence: Synthetic oligonucleotide
  Antisense strand to SEQ ID NO: 738438
acaauuauaucuaacacgc

SEQ ID NO: 738440 - RNA, 19 nt, Artificial Sequence
  Description of Artificial Sequence: Synthetic oligonucleotide
  Sense strand starting at position 3353 of SEQ ID NO: 586709
guagaauuagauuggugag

SEQ ID NO: 738441 - RNA, 19 nt, Artificial Sequence
  Description of Artificial Sequence: Synthetic oligonucleotide
  Antisense strand to SEQ ID NO: 738440
cucaccaaucuaauucuac

SEQ ID NO: 738442 - RNA, 19 nt, Artificial Sequence
  Description of Artificial Sequence: Synthetic oligonucleotide
  Sense strand starting at position 3592 of SEQ ID NO: 586709
auguguuugucuguuaauu

SEQ ID NO: 738443 - RNA, 19 nt, Artificial Sequence
  Description of Artificial Sequence: Synthetic oligonucleotide
  Antisense strand to SEQ ID NO: 738442
aauuaacagacaaacacau

SEQ ID NO: 738444 - RNA, 19 nt, Artificial Sequence
  Description of Artificial Sequence: Synthetic oligonucleotide
  Sense strand starting at position 3600 of SEQ ID NO: 586709
gucuguuaauuacuguuau

SEQ ID NO: 738445 - RNA, 19 nt, Artificial Sequence
  Description of Artificial Sequence: Synthetic oligonucleotide
  Antisense strand to SEQ ID NO: 738444
auaacaguaauuaacagac

SEQ ID NO: 738446 - RNA, 19 nt, Artificial Sequence
  Description of Artificial Sequence: Synthetic oligonucleotide
  Sense strand starting at position 3768 of SEQ ID NO: 586709
gauagcauacccgaaaguu

SEQ ID NO: 738447 - RNA, 19 nt, Artificial Sequence
  Description of Artificial Sequence: Synthetic oligonucleotide
  Antisense strand to SEQ ID NO: 738446
aacuuucggguaugcuauc

SEQ ID NO: 738448 - RNA, 19 nt, Artificial Sequence
  Description of Artificial Sequence: Synthetic oligonucleotide
  Sense strand starting at position 3805 of SEQ ID NO: 586709
cagugcucccaugacugau

SEQ ID NO: 738449 - RNA, 19 nt, Artificial Sequence
  Description of Artificial Sequence: Synthetic oligonucleotide
  Antisense strand to SEQ ID NO: 738448
aucagucaugggagcacug

SEQ ID NO: 738450 - RNA, 19 nt, Artificial Sequence
  Description of Artificial Sequence: Synthetic oligonucleotide
  Sense strand starting at position 3808 of SEQ ID NO: 586709
ugcucccaugacugauuaa

SEQ ID NO: 738451 - RNA, 19 nt, Artificial Sequence
  Description of Artificial Sequence: Synthetic oligonucleotide
  Antisense strand to SEQ ID NO: 738450
uuaaucagucaugggagca

SEQ ID NO: 738452 - RNA, 19 nt, Artificial Sequence
  Description of Artificial Sequence: Synthetic oligonucleotide
  Sense strand starting at position 3820 of SEQ ID NO: 586709
ugauuaauagggugauagu

SEQ ID NO: 738453 - RNA, 19 nt, Artificial Sequence
  Description of Artificial Sequence: Synthetic oligonucleotide
  Antisense strand to SEQ ID NO: 738452
acuaucacccuauuaauca

SEQ ID NO: 738454 - RNA, 19 nt, Artificial Sequence
  Description of Artificial Sequence: Synthetic oligonucleotide
  Sense strand starting at position 71 of SEQ ID NO: 586710
cuguguguuagggacuauu

SEQ ID NO: 738455 - RNA, 19 nt, Artificial Sequence
  Description of Artificial Sequence: Synthetic oligonucleotide
  Antisense strand to SEQ ID NO: 738454
aauagucccuaacacacag

SEQ ID NO: 738456 - RNA, 19 nt, Artificial Sequence
  Description of Artificial Sequence: Synthetic oligonucleotide
  Sense strand starting at position 92 of SEQ ID NO: 586710
gugcguuaccuauaugaac

SEQ ID NO: 738457 - RNA, 19 nt, Artificial Sequence
  Description of Artificial Sequence: Synthetic oligonucleotide
  Antisense strand to SEQ ID NO: 738456
guucauauagguaacgcac

SEQ ID NO: 738458 - RNA, 19 nt, Artificial Sequence
  Description of Artificial Sequence: Synthetic oligonucleotide
  Sense strand starting at position 115 of SEQ ID NO: 586710
gggugcuggcauuauuaua

SEQ ID NO: 738459 - RNA, 19 nt, Artificial Sequence
  Description of Artificial Sequence: Synthetic oligonucleotide
  Antisense strand to SEQ ID NO: 738458
uauaauaaugccagcaccc

SEQ ID NO: 738460 - RNA, 19 nt, Artificial Sequence
  Description of Artificial Sequence: Synthetic oligonucleotide
  Sense strand starting at position 167 of SEQ ID NO: 586710
guggguauuugagcacagu

SEQ ID NO: 738461 - RNA, 19 nt, Artificial Sequence
  Description of Artificial Sequence: Synthetic oligonucleotide
  Antisense strand to SEQ ID NO: 738460
acugugcucaaauacccac

SEQ ID NO: 738462 - RNA, 19 nt, Artificial Sequence
  Description of Artificial Sequence: Synthetic oligonucleotide
  Sense strand starting at position 199 of SEQ ID NO: 586710
cucaaaucuggcugucaca

SEQ ID NO: 738463 - RNA, 19 nt, Artificial Sequence
  Description of Artificial Sequence: Synthetic oligonucleotide
  Antisense strand to SEQ ID NO: 738462
ugugacagccagauuugag

SEQ ID NO: 738464 - RNA, 19 nt, Artificial Sequence
  Description of Artificial Sequence: Synthetic oligonucleotide
  Sense strand starting at position 235 of SEQ ID NO: 586710
uggagugccacuuguggaa

SEQ ID NO: 738465 - RNA, 19 nt, Artificial Sequence
  Description of Artificial Sequence: Synthetic oligonucleotide
  Antisense strand to SEQ ID NO: 738464
uuccacaaguggcacucca

SEQ ID NO: 738466 - RNA, 19 nt, Artificial Sequence
  Description of Artificial Sequence: Synthetic oligonucleotide
  Sense strand starting at position 248 of SEQ ID NO: 586710
guggaaugcccagguggau

SEQ ID NO: 738467 - RNA, 19 nt, Artificial Sequence
  Description of Artificial Sequence: Synthetic oligonucleotide
  Antisense strand to SEQ ID NO: 738466
auccaccugggcauuccac

SEQ ID NO: 738468 - RNA, 19 nt, Artificial Sequence
  Description of Artificial Sequence: Synthetic oligonucleotide
  Sense strand starting at position 300 of SEQ ID NO: 586710
gggaaugcuuuaucggcca

SEQ ID NO: 738469 - RNA, 19 nt, Artificial Sequence
  Description of Artificial Sequence: Synthetic oligonucleotide
  Antisense strand to SEQ ID NO: 738468
uggccgauaaagcauuccc

SEQ ID NO: 738470 - RNA, 19 nt, Artificial Sequence
  Description of Artificial Sequence: Synthetic oligonucleotide
  Sense strand starting at position 984 of SEQ ID NO: 586710
gcgcgcgugcguauuaaga

SEQ ID NO: 738471 - RNA, 19 nt, Artificial Sequence
  Description of Artificial Sequence: Synthetic oligonucleotide
  Antisense strand to SEQ ID NO: 738470
ucuuaauacgcacgcgcgc

SEQ ID NO: 738472 - RNA, 19 nt, Artificial Sequence
  Description of Artificial Sequence: Synthetic oligonucleotide
  Sense strand starting at position 1007 of SEQ ID NO: 586710
ggguguaauuccgcaaaga

SEQ ID NO: 738473 - RNA, 19 nt, Artificial Sequence
  Description of Artificial Sequence: Synthetic oligonucleotide
  Antisense strand to SEQ ID NO: 738472
ucuuugcggaauuacaccc

SEQ ID NO: 738474 - RNA, 19 nt, Artificial Sequence
  Description of Artificial Sequence: Synthetic oligonucleotide
  Sense strand starting at position 1008 of SEQ ID NO: 586710
gguguaauuccgcaaagaa

SEQ ID NO: 738475 - RNA, 19 nt, Artificial Sequence
  Description of Artificial Sequence: Synthetic oligonucleotide
  Antisense strand to SEQ ID NO: 738474
uucuuugcggaauuacacc

SEQ ID NO: 738476 - RNA, 19 nt, Artificial Sequence
  Description of Artificial Sequence: Synthetic oligonucleotide
  Sense strand starting at position 1048 of SEQ ID NO: 586710
cuaguauggacagagcuuu

SEQ ID NO: 738477 - RNA, 19 nt, Artificial Sequence
  Description of Artificial Sequence: Synthetic oligonucleotide
  Antisense strand to SEQ ID NO: 738476
aaagcucuguccauacuag

SEQ ID NO: 738478 - RNA, 19 nt, Artificial Sequence
  Description of Artificial Sequence: Synthetic oligonucleotide
  Sense strand starting at position 1059 of SEQ ID NO: 586710
agagcuuuguguccaaaca

SEQ ID NO: 738479 - RNA, 19 nt, Artificial Sequence
  Description of Artificial Sequence: Synthetic oligonucleotide
  Antisense strand to SEQ ID NO: 738478
uguuuggacacaaagcucu

SEQ ID NO: 738480 - RNA, 19 nt, Artificial Sequence
  Description of Artificial Sequence: Synthetic oligonucleotide
  Sense strand starting at position 1060 of SEQ ID NO: 586710
gagcuuuguguccaaacag

SEQ ID NO: 738481 - RNA, 19 nt, Artificial Sequence
  Description of Artificial Sequence: Synthetic oligonucleotide
  Antisense strand to SEQ ID NO: 738480
cuguuuggacacaaagcuc

SEQ ID NO: 738482 - RNA, 19 nt, Artificial Sequence
  Description of Artificial Sequence: Synthetic oligonucleotide
  Sense strand starting at position 2364 of SEQ ID NO: 586710
ggaagcguuugcccaaaug

SEQ ID NO: 738483 - RNA, 19 nt, Artificial Sequence
  Description of Artificial Sequence: Synthetic oligonucleotide
  Antisense strand to SEQ ID NO: 738482
cauuugggcaaacgcuucc

SEQ ID NO: 738484 - RNA, 19 nt, Artificial Sequence
  Description of Artificial Sequence: Synthetic oligonucleotide
  Sense strand starting at position 2402 of SEQ ID NO: 586710
gccauagaacugcagauaa

SEQ ID NO: 738485 - RNA, 19 nt, Artificial Sequence
  Description of Artificial Sequence: Synthetic oligonucleotide
  Antisense strand to SEQ ID NO: 738484
uuaucugcaguucuauggc

SEQ ID NO: 738486 - RNA, 19 nt, Artificial Sequence
  Description of Artificial Sequence: Synthetic oligonucleotide
  Sense strand starting at position 2412 of SEQ ID NO: 586710
ugcagauaacuuggaccuu

SEQ ID NO: 738487 - RNA, 19 nt, Artificial Sequence
  Description of Artificial Sequence: Synthetic oligonucleotide
  Antisense strand to SEQ ID NO: 738486
aagguccaaguuaucugca

SEQ ID NO: 738488 - RNA, 19 nt, Artificial Sequence
  Description of Artificial Sequence: Synthetic oligonucleotide
  Sense strand starting at position 2499 of SEQ ID NO: 586710
aaaguucuguucuccgauu

SEQ ID NO: 738489 - RNA, 19 nt, Artificial Sequence
  Description of Artificial Sequence: Synthetic oligonucleotide
  Antisense strand to SEQ ID NO: 738488
aaucggagaacagaacuuu

SEQ ID NO: 738490 - RNA, 19 nt, Artificial Sequence
  Description of Artificial Sequence: Synthetic oligonucleotide
  Sense strand starting at position 2501 of SEQ ID NO: 586710
aguucuguucuccgauuga

SEQ ID NO: 738491 - RNA, 19 nt, Artificial Sequence
  Description of Artificial Sequence: Synthetic oligonucleotide
  Antisense strand to SEQ ID NO: 738490
ucaaucggagaacagaacu

SEQ ID NO: 738492 - RNA, 19 nt, Artificial Sequence
  Description of Artificial Sequence: Synthetic oligonucleotide
  Sense strand starting at position 2505 of SEQ ID NO: 586710
cuguucuccgauugauuua

SEQ ID NO: 738493 - RNA, 19 nt, Artificial Sequence
  Description of Artificial Sequence: Synthetic oligonucleotide
  Antisense strand to SEQ ID NO: 738492
uaaaucaaucggagaacag

SEQ ID NO: 738494 - RNA, 19 nt, Artificial Sequence
  Description of Artificial Sequence: Synthetic oligonucleotide
  Sense strand starting at position 2523 of SEQ ID NO: 586710
aagggaaugugucuucuua

SEQ ID NO: 738495 - RNA, 19 nt, Artificial Sequence
  Description of Artificial Sequence: Synthetic oligonucleotide
  Antisense strand to SEQ ID NO: 738494
uaagaagacacauucccuu

SEQ ID NO: 738496 - RNA, 19 nt, Artificial Sequence
  Description of Artificial Sequence: Synthetic oligonucleotide
  Sense strand starting at position 2525 of SEQ ID NO: 586710
gggaaugugucuucuuaau

SEQ ID NO: 738497 - RNA, 19 nt, Artificial Sequence
  Description of Artificial Sequence: Synthetic oligonucleotide
  Antisense strand to SEQ ID NO: 738496
auuaagaagacacauuccc

SEQ ID NO: 738498 - RNA, 19 nt, Artificial Sequence
  Description of Artificial Sequence: Synthetic oligonucleotide
  Sense strand starting at position 2527 of SEQ ID NO: 586710
gaaugugucuucuuaaugc

SEQ ID NO: 738499 - RNA, 19 nt, Artificial Sequence
  Description of Artificial Sequence: Synthetic oligonucleotide
  Antisense strand to SEQ ID NO: 738498
gcauuaagaagacacauuc

SEQ ID NO: 738500 - RNA, 19 nt, Artificial Sequence
  Description of Artificial Sequence: Synthetic oligonucleotide
  Sense strand starting at position 2604 of SEQ ID NO: 586710
gcguuacguaaagcugaau

SEQ ID NO: 738501 - RNA, 19 nt, Artificial Sequence
  Description of Artificial Sequence: Synthetic oligonucleotide
  Antisense strand to SEQ ID NO: 738500
auucagcuuuacguaacgc

SEQ ID NO: 738502 - RNA, 19 nt, Artificial Sequence
  Description of Artificial Sequence: Synthetic oligonucleotide
  Sense strand starting at position 2607 of SEQ ID NO: 586710
uuacguaaagcugaauauu

SEQ ID NO: 738503 - RNA, 19 nt, Artificial Sequence
  Description of Artificial Sequence: Synthetic oligonucleotide
  Antisense strand to SEQ ID NO: 738502
aauauucagcuuuacguaa

SEQ ID NO: 738504 - RNA, 19 nt, Artificial Sequence
  Description of Artificial Sequence: Synthetic oligonucleotide
  Sense strand starting at position 2728 of SEQ ID NO: 586710
gaguguguggcccaacgau

SEQ ID NO: 738505 - RNA, 19 nt, Artificial Sequence
  Description of Artificial Sequence: Synthetic oligonucleotide
  Antisense strand to SEQ ID NO: 738504
aucguugggccacacacuc

SEQ ID NO: 738506 - RNA, 19 nt, Artificial Sequence
  Description of Artificial Sequence: Synthetic oligonucleotide
  Sense strand starting at position 2788 of SEQ ID NO: 586710
gcauuacuggauugcagaa

SEQ ID NO: 738507 - RNA, 19 nt, Artificial Sequence
  Description of Artificial Sequence: Synthetic oligonucleotide
  Antisense strand to SEQ ID NO: 738506
uucugcaauccaguaaugc

SEQ ID NO: 738508 - RNA, 19 nt, Artificial Sequence
  Description of Artificial Sequence: Synthetic oligonucleotide
  Sense strand starting at position 2885 of SEQ ID NO: 586710
uguaaagugugucuucuga

SEQ ID NO: 738509 - RNA, 19 nt, Artificial Sequence
  Description of Artificial Sequence: Synthetic oligonucleotide
  Antisense strand to SEQ ID NO: 738508
ucagaagacacacuuuaca

SEQ ID NO: 738510 - RNA, 19 nt, Artificial Sequence
  Description of Artificial Sequence: Synthetic oligonucleotide
  Sense strand starting at position 2887 of SEQ ID NO: 586710
uaaagugugucuucugaac

SEQ ID NO: 738511 - RNA, 19 nt, Artificial Sequence
  Description of Artificial Sequence: Synthetic oligonucleotide
  Antisense strand to SEQ ID NO: 738510
guucagaagacacacuuua

SEQ ID NO: 738512 - RNA, 19 nt, Artificial Sequence
  Description of Artificial Sequence: Synthetic oligonucleotide
  Sense strand starting at position 2907 of SEQ ID NO: 586710
aggcacugugcacgaauuu

SEQ ID NO: 738513 - RNA, 19 nt, Artificial Sequence
  Description of Artificial Sequence: Synthetic oligonucleotide
  Antisense strand to SEQ ID NO: 738512
aaauucgugcacagugccu

SEQ ID NO: 738514 - RNA, 19 nt, Artificial Sequence
  Description of Artificial Sequence: Synthetic oligonucleotide
  Sense strand starting at position 3061 of SEQ ID NO: 586710
cugauaauuaguggauguu

SEQ ID NO: 738515 - RNA, 19 nt, Artificial Sequence
  Description of Artificial Sequence: Synthetic oligonucleotide
  Antisense strand to SEQ ID NO: 738514
aacauccacuaauuaucag

SEQ ID NO: 738516 - RNA, 19 nt, Artificial Sequence
  Description of Artificial Sequence: Synthetic oligonucleotide
  Sense strand starting at position 3096 of SEQ ID NO: 586710
guucguuggccacuuguau

SEQ ID NO: 738517 - RNA, 19 nt, Artificial Sequence
  Description of Artificial Sequence: Synthetic oligonucleotide
  Antisense strand to SEQ ID NO: 738516
auacaaguggccaacgaac

SEQ ID NO: 738518 - RNA, 19 nt, Artificial Sequence
  Description of Artificial Sequence: Synthetic oligonucleotide
  Sense strand starting at position 3493 of SEQ ID NO: 586710
gccugacuauuaccaugau

SEQ ID NO: 738519 - RNA, 19 nt, Artificial Sequence
  Description of Artificial Sequence: Synthetic oligonucleotide
  Antisense strand to SEQ ID NO: 738518
aucaugguaauagucaggc

SEQ ID NO: 738520 - RNA, 19 nt, Artificial Sequence
  Description of Artificial Sequence: Synthetic oligonucleotide
  Sense strand starting at position 3577 of SEQ ID NO: 586710
ucagaacugugggcuauua

SEQ ID NO: 738521 - RNA, 19 nt, Artificial Sequence
  Description of Artificial Sequence: Synthetic oligonucleotide
  Antisense strand to SEQ ID NO: 738520
uaauagcccacaguucuga

SEQ ID NO: 738522 - RNA, 19 nt, Artificial Sequence
  Description of Artificial Sequence: Synthetic oligonucleotide
  Sense strand starting at position 3587 of SEQ ID NO: 586710
gggcuauuaaauggguguu

SEQ ID NO: 738523 - RNA, 19 nt, Artificial Sequence
  Description of Artificial Sequence: Synthetic oligonucleotide
  Antisense strand to SEQ ID NO: 738522
aacacccauuuaauagccc

SEQ ID NO: 738524 - RNA, 19 nt, Artificial Sequence
  Description of Artificial Sequence: Synthetic oligonucleotide
  Sense strand starting at position 3590 of SEQ ID NO: 586710
cuauuaaauggguguuguu

SEQ ID NO: 738525 - RNA, 19 nt, Artificial Sequence
  Description of Artificial Sequence: Synthetic oligonucleotide
  Antisense strand to SEQ ID NO: 738524
aacaacacccauuuaauag

SEQ ID NO: 738526 - RNA, 19 nt, Artificial Sequence
  Description of Artificial Sequence: Synthetic oligonucleotide
  Sense strand starting at position 3744 of SEQ ID NO: 586710
aaguaugggugucuccaga

SEQ ID NO: 738527 - RNA, 19 nt, Artificial Sequence
  Description of Artificial Sequence: Synthetic oligonucleotide
  Antisense strand to SEQ ID NO: 738526
ucuggagacacccauacuu

SEQ ID NO: 738528 - RNA, 19 nt, Artificial Sequence
  Description of Artificial Sequence: Synthetic oligonucleotide
  Sense strand starting at position 3751 of SEQ ID NO: 586710
ggugucuccagauagcaca

SEQ ID NO: 738529 - RNA, 19 nt, Artificial Sequence
  Description of Artificial Sequence: Synthetic oligonucleotide
  Antisense strand to SEQ ID NO: 738528
ugugcuaucuggagacacc

SEQ ID NO: 738530 - RNA, 19 nt, Artificial Sequence
  Description of Artificial Sequence: Synthetic oligonucleotide
  Sense strand starting at position 3806 of SEQ ID NO: 586710
agcauaauauguguuccaa

SEQ ID NO: 738531 - RNA, 19 nt, Artificial Sequence
  Description of Artificial Sequence: Synthetic oligonucleotide
  Antisense strand to SEQ ID NO: 738530
uuggaacacauauuaugcu

SEQ ID NO: 738532 - RNA, 19 nt, Artificial Sequence
  Description of Artificial Sequence: Synthetic oligonucleotide
  Sense strand starting at position 3832 of SEQ ID NO: 586710
uuccuuaaauuggagauga

SEQ ID NO: 738533 - RNA, 19 nt, Artificial Sequence
  Description of Artificial Sequence: Synthetic oligonucleotide
  Antisense strand to SEQ ID NO: 738532
ucaucuccaauuuaaggaa

SEQ ID NO: 738534 - RNA, 19 nt, Artificial Sequence
  Description of Artificial Sequence: Synthetic oligonucleotide
  Sense strand starting at position 67 of SEQ ID NO: 586711
ggaggucucaucugucaag

SEQ ID NO: 738535 - RNA, 19 nt, Artificial Sequence
  Description of Artificial Sequence: Synthetic oligonucleotide
  Antisense strand to SEQ ID NO: 738534
cuugacagaugagaccucc

SEQ ID NO: 738536 - RNA, 19 nt, Artificial Sequence
  Description of Artificial Sequence: Synthetic oligonucleotide
  Sense strand starting at position 142 of SEQ ID NO: 586711
gaacuucccugguggguua

SEQ ID NO: 738537 - RNA, 19 nt, Artificial Sequence
  Description of Artificial Sequence: Synthetic oligonucleotide
  Antisense strand to SEQ ID NO: 738536
uaacccaccagggaaguuc

SEQ ID NO: 738538 - RNA, 19 nt, Artificial Sequence
  Description of Artificial Sequence: Synthetic oligonucleotide
  Sense strand starting at position 152 of SEQ ID NO: 586711
gguggguuaccucgaaggu

SEQ ID NO: 738539 - RNA, 19 nt, Artificial Sequence
  Description of Artificial Sequence: Synthetic oligonucleotide
  Antisense strand to SEQ ID NO: 738538
accuucgagguaacccacc

SEQ ID NO: 738540 - RNA, 19 nt, Artificial Sequence
  Description of Artificial Sequence: Synthetic oligonucleotide
  Sense strand starting at position 154 of SEQ ID NO: 586711
uggguuaccucgaaggugu

SEQ ID NO: 738541 - RNA, 19 nt, Artificial Sequence
  Description of Artificial Sequence: Synthetic oligonucleotide
  Antisense strand to SEQ ID NO: 738540
acaccuucgagguaaccca

SEQ ID NO: 738542 - RNA, 19 nt, Artificial Sequence
  Description of Artificial Sequence: Synthetic oligonucleotide
  Sense strand starting at position 306 of SEQ ID NO: 586711
aucagaaagucuguucugu

SEQ ID NO: 738543 - RNA, 19 nt, Artificial Sequence
  Description of Artificial Sequence: Synthetic oligonucleotide
  Antisense strand to SEQ ID NO: 738542
acagaacagacuuucugau

SEQ ID NO: 738544 - RNA, 19 nt, Artificial Sequence
  Description of Artificial Sequence: Synthetic oligonucleotide
  Sense strand starting at position 308 of SEQ ID NO: 586711
cagaaagucuguucuguau

SEQ ID NO: 738545 - RNA, 19 nt, Artificial Sequence
  Description of Artificial Sequence: Synthetic oligonucleotide
  Antisense strand to SEQ ID NO: 738544
auacagaacagacuuucug

SEQ ID NO: 738546 - RNA, 19 nt, Artificial Sequence
  Description of Artificial Sequence: Synthetic oligonucleotide
  Sense strand starting at position 310 of SEQ ID NO: 586711
gaaagucuguucuguauga

SEQ ID NO: 738547 - RNA, 19 nt, Artificial Sequence
  Description of Artificial Sequence: Synthetic oligonucleotide
  Antisense strand to SEQ ID NO: 738546
ucauacagaacagacuuuc

SEQ ID NO: 738548 - RNA, 19 nt, Artificial Sequence
  Description of Artificial Sequence: Synthetic oligonucleotide
  Sense strand starting at position 314 of SEQ ID NO: 586711
gucuguucuguaugaggga

SEQ ID NO: 738549 - RNA, 19 nt, Artificial Sequence
  Description of Artificial Sequence: Synthetic oligonucleotide
  Antisense strand to SEQ ID NO: 738548
ucccucauacagaacagac

SEQ ID NO: 738550 - RNA, 19 nt, Artificial Sequence
  Description of Artificial Sequence: Synthetic oligonucleotide
  Sense strand starting at position 315 of SEQ ID NO: 586711
ucuguucuguaugagggaa

SEQ ID NO: 738551 - RNA, 19 nt, Artificial Sequence
  Description of Artificial Sequence: Synthetic oligonucleotide
  Antisense strand to SEQ ID NO: 738550
uucccucauacagaacaga

SEQ ID NO: 738552 - RNA, 19 nt, Artificial Sequence
  Description of Artificial Sequence: Synthetic oligonucleotide
  Sense strand starting at position 329 of SEQ ID NO: 586711
gggaaaucagcgggucaga

SEQ ID NO: 738553 - RNA, 19 nt, Artificial Sequence
  Description of Artificial Sequence: Synthetic oligonucleotide
  Antisense strand to SEQ ID NO: 738552
ucugacccgcugauuuccc

SEQ ID NO: 738554 - RNA, 19 nt, Artificial Sequence
  Description of Artificial Sequence: Synthetic oligonucleotide
  Sense strand starting at position 340 of SEQ ID NO: 586711
gggucagagucaucucuca

SEQ ID NO: 738555 - RNA, 19 nt, Artificial Sequence
  Description of Artificial Sequence: Synthetic oligonucleotide
  Antisense strand to SEQ ID NO: 738554
ugagagaugacucugaccc

SEQ ID NO: 738556 - RNA, 19 nt, Artificial Sequence
  Description of Artificial Sequence: Synthetic oligonucleotide
  Sense strand starting at position 345 of SEQ ID NO: 586711
agagucaucucucagacac

SEQ ID NO: 738557 - RNA, 19 nt, Artificial Sequence
  Description of Artificial Sequence: Synthetic oligonucleotide
  Antisense strand to SEQ ID NO: 738556
gugucugagagaugacucu

SEQ ID NO: 738558 - RNA, 19 nt, Artificial Sequence
  Description of Artificial Sequence: Synthetic oligonucleotide
  Sense strand starting at position 1477 of SEQ ID NO: 586711
aagagaugauacugucaca

SEQ ID NO: 738559 - RNA, 19 nt, Artificial Sequence
  Description of Artificial Sequence: Synthetic oligonucleotide
  Antisense strand to SEQ ID NO: 738558
ugugacaguaucaucucuu

SEQ ID NO: 738560 - RNA, 19 nt, Artificial Sequence
  Description of Artificial Sequence: Synthetic oligonucleotide
  Sense strand starting at position 1548 of SEQ ID NO: 586711
cuccgugagguuuggaaag

SEQ ID NO: 738561 - RNA, 19 nt, Artificial Sequence
  Description of Artificial Sequence: Synthetic oligonucleotide
  Antisense strand to SEQ ID NO: 738560
cuuuccaaaccucacggag

SEQ ID NO: 738562 - RNA, 19 nt, Artificial Sequence
  Description of Artificial Sequence: Synthetic oligonucleotide
  Sense strand starting at position 1607 of SEQ ID NO: 586711
ggcagagaugacugucuau

SEQ ID NO: 738563 - RNA, 19 nt, Artificial Sequence
  Description of Artificial Sequence: Synthetic oligonucleotide
  Antisense strand to SEQ ID NO: 738562
auagacagucaucucugcc

SEQ ID NO: 738564 - RNA, 19 nt, Artificial Sequence
  Description of Artificial Sequence: Synthetic oligonucleotide
  Sense strand starting at position 1613 of SEQ ID NO: 586711
gaugacugucuaugugaca

SEQ ID NO: 738565 - RNA, 19 nt, Artificial Sequence
  Description of Artificial Sequence: Synthetic oligonucleotide
  Antisense strand to SEQ ID NO: 738564
ugucacauagacagucauc

SEQ ID NO: 738566 - RNA, 19 nt, Artificial Sequence
  Description of Artificial Sequence: Synthetic oligonucleotide
  Sense strand starting at position 1614 of SEQ ID NO: 586711
augacugucuaugugacaa

SEQ ID NO: 738567 - RNA, 19 nt, Artificial Sequence
  Description of Artificial Sequence: Synthetic oligonucleotide
  Antisense strand to SEQ ID NO: 738566
uugucacauagacagucau

SEQ ID NO: 738568 - RNA, 19 nt, Artificial Sequence
  Description of Artificial Sequence: Synthetic oligonucleotide
  Sense strand starting at position 2100 of SEQ ID NO: 586711
agagaacuuugccuugaag

SEQ ID NO: 738569 - RNA, 19 nt, Artificial Sequence
  Description of Artificial Sequence: Synthetic oligonucleotide
  Antisense strand to SEQ ID NO: 738568
cuucaaggcaaaguucucu

SEQ ID NO: 738570 - RNA, 19 nt, Artificial Sequence
  Description of Artificial Sequence: Synthetic oligonucleotide
  Sense strand starting at position 2102 of SEQ ID NO: 586711
agaacuuugccuugaagaa

SEQ ID NO: 738571 - RNA, 19 nt, Artificial Sequence
  Description of Artificial Sequence: Synthetic oligonucleotide
  Antisense strand to SEQ ID NO: 738570
uucuucaaggcaaaguucu

SEQ ID NO: 738572 - RNA, 19 nt, Artificial Sequence
  Description of Artificial Sequence: Synthetic oligonucleotide
  Sense strand starting at position 2223 of SEQ ID NO: 586711
ccuuauaaguccuggagua

SEQ ID NO: 738573 - RNA, 19 nt, Artificial Sequence
  Description of Artificial Sequence: Synthetic oligonucleotide
  Antisense strand to SEQ ID NO: 738572
uacuccaggacuuauaagg

SEQ ID NO: 738574 - RNA, 19 nt, Artificial Sequence
  Description of Artificial Sequence: Synthetic oligonucleotide
  Sense strand starting at position 2224 of SEQ ID NO: 586711
cuuauaaguccuggaguag

SEQ ID NO: 738575 - RNA, 19 nt, Artificial Sequence
  Description of Artificial Sequence: Synthetic oligonucleotide
  Antisense strand to SEQ ID NO: 738574
cuacuccaggacuuauaag

SEQ ID NO: 738576 - RNA, 19 nt, Artificial Sequence
  Description of Artificial Sequence: Synthetic oligonucleotide
  Sense strand starting at position 2225 of SEQ ID NO: 586711
uuauaaguccuggaguagu

SEQ ID NO: 738577 - RNA, 19 nt, Artificial Sequence
  Description of Artificial Sequence: Synthetic oligonucleotide
  Antisense strand to SEQ ID NO: 738576
acuacuccaggacuuauaa

SEQ ID NO: 738578 - RNA, 19 nt, Artificial Sequence
  Description of Artificial Sequence: Synthetic oligonucleotide
  Sense strand starting at position 2396 of SEQ ID NO: 586711
ggaagaaguucagaaccgu

SEQ ID NO: 738579 - RNA, 19 nt, Artificial Sequence
  Description of Artificial Sequence: Synthetic oligonucleotide
  Antisense strand to SEQ ID NO: 738578
acgguucugaacuucuucc

SEQ ID NO: 738580 - RNA, 19 nt, Artificial Sequence
  Description of Artificial Sequence: Synthetic oligonucleotide
  Sense strand starting at position 2530 of SEQ ID NO: 586711
gccaaauguccagggcuuu

SEQ ID NO: 738581 - RNA, 19 nt, Artificial Sequence
  Description of Artificial Sequence: Synthetic oligonucleotide
  Antisense strand to SEQ ID NO: 738580
aaagcccuggacauuuggc

SEQ ID NO: 738582 - RNA, 19 nt, Artificial Sequence
  Description of Artificial Sequence: Synthetic oligonucleotide
  Sense strand starting at position 2604 of SEQ ID NO: 586711
gagacuuuaugguccuugu

SEQ ID NO: 738583 - RNA, 19 nt, Artificial Sequence
  Description of Artificial Sequence: Synthetic oligonucleotide
  Antisense strand to SEQ ID NO: 738582
acaaggaccauaaagucuc

SEQ ID NO: 738584 - RNA, 19 nt, Artificial Sequence
  Description of Artificial Sequence: Synthetic oligonucleotide
  Sense strand starting at position 2730 of SEQ ID NO: 586711
acacguuauuucugaucac

SEQ ID NO: 738585 - RNA, 19 nt, Artificial Sequence
  Description of Artificial Sequence: Synthetic oligonucleotide
  Antisense strand to SEQ ID NO: 738584
gugaucagaaauaacgugu

SEQ ID NO: 738586 - RNA, 19 nt, Artificial Sequence
  Description of Artificial Sequence: Synthetic oligonucleotide
  Sense strand starting at position 2733 of SEQ ID NO: 586711
cguuauuucugaucacucu

SEQ ID NO: 738587 - RNA, 19 nt, Artificial Sequence
  Description of Artificial Sequence: Synthetic oligonucleotide
  Antisense strand to SEQ ID NO: 738586
agagugaucagaaauaacg

SEQ ID NO: 738588 - RNA, 19 nt, Artificial Sequence
  Description of Artificial Sequence: Synthetic oligonucleotide
  Sense strand starting at position 2819 of SEQ ID NO: 586711
ggcucugcugugugaguuu

SEQ ID NO: 738589 - RNA, 19 nt, Artificial Sequence
  Description of Artificial Sequence: Synthetic oligonucleotide
  Antisense strand to SEQ ID NO: 738588
aaacucacacagcagagcc

SEQ ID NO: 738590 - RNA, 19 nt, Artificial Sequence
  Description of Artificial Sequence: Synthetic oligonucleotide
  Sense strand starting at position 2824 of SEQ ID NO: 586711
ugcugugugaguuugcuau

SEQ ID NO: 738591 - RNA, 19 nt, Artificial Sequence
  Description of Artificial Sequence: Synthetic oligonucleotide
  Antisense strand to SEQ ID NO: 738590
auagcaaacucacacagca

SEQ ID NO: 738592 - RNA, 19 nt, Artificial Sequence
  Description of Artificial Sequence: Synthetic oligonucleotide
  Sense strand starting at position 2826 of SEQ ID NO: 586711
cugugugaguuugcuauca

SEQ ID NO: 738593 - RNA, 19 nt, Artificial Sequence
  Description of Artificial Sequence: Synthetic oligonucleotide
  Antisense strand to SEQ ID NO: 738592
ugauagcaaacucacacag

SEQ ID NO: 738594 - RNA, 19 nt, Artificial Sequence
  Description of Artificial Sequence: Synthetic oligonucleotide
  Sense strand starting at position 2828 of SEQ ID NO: 586711
gugugaguuugcuaucagg

SEQ ID NO: 738595 - RNA, 19 nt, Artificial Sequence
  Description of Artificial Sequence: Synthetic oligonucleotide
  Antisense strand to SEQ ID NO: 738594
ccugauagcaaacucacac

SEQ ID NO: 738596 - RNA, 19 nt, Artificial Sequence
  Description of Artificial Sequence: Synthetic oligonucleotide
  Sense strand starting at position 2831 of SEQ ID NO: 586711
ugaguuugcuaucaggguu

SEQ ID NO: 738597 - RNA, 19 nt, Artificial Sequence
  Description of Artificial Sequence: Synthetic oligonucleotide
  Antisense strand to SEQ ID NO: 738596
aacccugauagcaaacuca

SEQ ID NO: 738598 - RNA, 19 nt, Artificial Sequence
  Description of Artificial Sequence: Synthetic oligonucleotide
  Sense strand starting at position 2970 of SEQ ID NO: 586711
gggucuaauugcucccuaa

SEQ ID NO: 738599 - RNA, 19 nt, Artificial Sequence
  Description of Artificial Sequence: Synthetic oligonucleotide
  Antisense strand to SEQ ID NO: 738598
uuagggagcaauuagaccc

SEQ ID NO: 738600 - RNA, 19 nt, Artificial Sequence
  Description of Artificial Sequence: Synthetic oligonucleotide
  Sense strand starting at position 3196 of SEQ ID NO: 586711
cagugccaccucuggaaau

SEQ ID NO: 738601 - RNA, 19 nt, Artificial Sequence
  Description of Artificial Sequence: Synthetic oligonucleotide
  Antisense strand to SEQ ID NO: 738600
auuuccagagguggcacug

SEQ ID NO: 738602 - RNA, 19 nt, Artificial Sequence
  Description of Artificial Sequence: Synthetic oligonucleotide
  Sense strand starting at position 3206 of SEQ ID NO: 586711
ucuggaaaucccuguucuc

SEQ ID NO: 738603 - RNA, 19 nt, Artificial Sequence
  Description of Artificial Sequence: Synthetic oligonucleotide
  Antisense strand to SEQ ID NO: 738602
gagaacagggauuuccaga

SEQ ID NO: 738604 - RNA, 19 nt, Artificial Sequence
  Description of Artificial Sequence: Synthetic oligonucleotide
  Sense strand starting at position 3209 of SEQ ID NO: 586711
ggaaaucccuguucucuga

SEQ ID NO: 738605 - RNA, 19 nt, Artificial Sequence
  Description of Artificial Sequence: Synthetic oligonucleotide
  Antisense strand to SEQ ID NO: 738604
ucagagaacagggauuucc

SEQ ID NO: 738606 - RNA, 19 nt, Artificial Sequence
  Description of Artificial Sequence: Synthetic oligonucleotide
  Sense strand starting at position 140 of SEQ ID NO: 586712
gcaauauaaccaggugauc

SEQ ID NO: 738607 - RNA, 19 nt, Artificial Sequence
  Description of Artificial Sequence: Synthetic oligonucleotide
  Antisense strand to SEQ ID NO: 738606
gaucaccugguuauauugc

SEQ ID NO: 738608 - RNA, 19 nt, Artificial Sequence
  Description of Artificial Sequence: Synthetic oligonucleotide
  Sense strand starting at position 396 of SEQ ID NO: 586712
ggaacagggucugagaagu

SEQ ID NO: 738609 - RNA, 19 nt, Artificial Sequence
  Description of Artificial Sequence: Synthetic oligonucleotide
  Antisense strand to SEQ ID NO: 738608
acuucucagacccuguucc

SEQ ID NO: 738610 - RNA, 19 nt, Artificial Sequence
  Description of Artificial Sequence: Synthetic oligonucleotide
  Sense strand starting at position 828 of SEQ ID NO: 586712
cugacaucacgcuacagaa

SEQ ID NO: 738611 - RNA, 19 nt, Artificial Sequence
  Description of Artificial Sequence: Synthetic oligonucleotide
  Antisense strand to SEQ ID NO: 738610
uucuguagcgugaugucag

SEQ ID NO: 738612 - RNA, 19 nt, Artificial Sequence
  Description of Artificial Sequence: Synthetic oligonucleotide
  Sense strand starting at position 946 of SEQ ID NO: 586712
ugucuaagaugcuguuauu

SEQ ID NO: 738613 - RNA, 19 nt, Artificial Sequence
  Description of Artificial Sequence: Synthetic oligonucleotide
  Antisense strand to SEQ ID NO: 738612
aauaacagcaucuuagaca

SEQ ID NO: 738614 - RNA, 19 nt, Artificial Sequence
  Description of Artificial Sequence: Synthetic oligonucleotide
  Sense strand starting at position 949 of SEQ ID NO: 586712
cuaagaugcuguuauuaga

SEQ ID NO: 738615 - RNA, 19 nt, Artificial Sequence
  Description of Artificial Sequence: Synthetic oligonucleotide
  Antisense strand to SEQ ID NO: 738614
ucuaauaacagcaucuuag

SEQ ID NO: 738616 - RNA, 19 nt, Artificial Sequence
  Description of Artificial Sequence: Synthetic oligonucleotide
  Sense strand starting at position 952 of SEQ ID NO: 586712
agaugcuguuauuagagau

SEQ ID NO: 738617 - RNA, 19 nt, Artificial Sequence
  Description of Artificial Sequence: Synthetic oligonucleotide
  Antisense strand to SEQ ID NO: 738616
aucucuaauaacagcaucu

SEQ ID NO: 738618 - RNA, 19 nt, Artificial Sequence
  Description of Artificial Sequence: Synthetic oligonucleotide
  Sense strand starting at position 1038 of SEQ ID NO: 586712
cuggcagaucugggugaga

SEQ ID NO: 738619 - RNA, 19 nt, Artificial Sequence
  Description of Artificial Sequence: Synthetic oligonucleotide
  Antisense strand to SEQ ID NO: 738618
ucucacccagaucugccag

SEQ ID NO: 738620 - RNA, 19 nt, Artificial Sequence
  Description of Artificial Sequence: Synthetic oligonucleotide
  Sense strand starting at position 1040 of SEQ ID NO: 586712
ggcagaucugggugagauu

SEQ ID NO: 738621 - RNA, 19 nt, Artificial Sequence
  Description of Artificial Sequence: Synthetic oligonucleotide
  Antisense strand to SEQ ID NO: 738620
aaucucacccagaucugcc

SEQ ID NO: 738622 - RNA, 19 nt, Artificial Sequence
  Description of Artificial Sequence: Synthetic oligonucleotide
  Sense strand starting at position 1247 of SEQ ID NO: 586712
gcggcugagcuggaaugau

SEQ ID NO: 738623 - RNA, 19 nt, Artificial Sequence
  Description of Artificial Sequence: Synthetic oligonucleotide
  Antisense strand to SEQ ID NO: 738622
aucauuccagcucagccgc

SEQ ID NO: 738624 - RNA, 19 nt, Artificial Sequence
  Description of Artificial Sequence: Synthetic oligonucleotide
  Sense strand starting at position 1274 of SEQ ID NO: 586712
guccuaaugccuugucuuu

SEQ ID NO: 738625 - RNA, 19 nt, Artificial Sequence
  Description of Artificial Sequence: Synthetic oligonucleotide
  Antisense strand to SEQ ID NO: 738624
aaagacaaggcauuaggac

SEQ ID NO: 738626 - RNA, 19 nt, Artificial Sequence
  Description of Artificial Sequence: Synthetic oligonucleotide
  Sense strand starting at position 1340 of SEQ ID NO: 586712
gcugguucauggcaggauu

SEQ ID NO: 738627 - RNA, 19 nt, Artificial Sequence
  Description of Artificial Sequence: Synthetic oligonucleotide
  Antisense strand to SEQ ID NO: 738626
aauccugccaugaaccagc

SEQ ID NO: 738628 - RNA, 19 nt, Artificial Sequence
  Description of Artificial Sequence: Synthetic oligonucleotide
  Sense strand starting at position 1343 of SEQ ID NO: 586712
gguucauggcaggauuaga

SEQ ID NO: 738629 - RNA, 19 nt, Artificial Sequence
  Description of Artificial Sequence: Synthetic oligonucleotide
  Antisense strand to SEQ ID NO: 738628
ucuaauccugccaugaacc

SEQ ID NO: 738630 - RNA, 19 nt, Artificial Sequence
  Description of Artificial Sequence: Synthetic oligonucleotide
  Sense strand starting at position 1397 of SEQ ID NO: 586712
uggcuaugucccggaaaca

SEQ ID NO: 738631 - RNA, 19 nt, Artificial Sequence
  Description of Artificial Sequence: Synthetic oligonucleotide
  Antisense strand to SEQ ID NO: 738630
uguuuccgggacauagcca

SEQ ID NO: 738632 - RNA, 19 nt, Artificial Sequence
  Description of Artificial Sequence: Synthetic oligonucleotide
  Sense strand starting at position 1398 of SEQ ID NO: 586712
ggcuaugucccggaaacau

SEQ ID NO: 738633 - RNA, 19 nt, Artificial Sequence
  Description of Artificial Sequence: Synthetic oligonucleotide
  Antisense strand to SEQ ID NO: 738632
auguuuccgggacauagcc

SEQ ID NO: 738634 - RNA, 19 nt, Artificial Sequence
  Description of Artificial Sequence: Synthetic oligonucleotide
  Sense strand starting at position 1459 of SEQ ID NO: 586712
gggacuuggcgggaacauu

SEQ ID NO: 738635 - RNA, 19 nt, Artificial Sequence
  Description of Artificial Sequence: Synthetic oligonucleotide
  Antisense strand to SEQ ID NO: 738634
aauguucccgccaaguccc

SEQ ID NO: 738636 - RNA, 19 nt, Artificial Sequence
  Description of Artificial Sequence: Synthetic oligonucleotide
  Sense strand starting at position 1468 of SEQ ID NO: 586712
cgggaacauucacugggua

SEQ ID NO: 738637 - RNA, 19 nt, Artificial Sequence
  Description of Artificial Sequence: Synthetic oligonucleotide
  Antisense strand to SEQ ID NO: 738636
uacccagugaauguucccg

SEQ ID NO: 738638 - RNA, 19 nt, Artificial Sequence
  Description of Artificial Sequence: Synthetic oligonucleotide
  Sense strand starting at position 1489 of SEQ ID NO: 586712
gauagacucuaauaugggu

SEQ ID NO: 738639 - RNA, 19 nt, Artificial Sequence
  Description of Artificial Sequence: Synthetic oligonucleotide
  Antisense strand to SEQ ID NO: 738638
acccauauuagagucuauc

SEQ ID NO: 738640 - RNA, 19 nt, Artificial Sequence
  Description of Artificial Sequence: Synthetic oligonucleotide
  Sense strand starting at position 1494 of SEQ ID NO: 586712
acucuaauauggguugaac

SEQ ID NO: 738641 - RNA, 19 nt, Artificial Sequence
  Description of Artificial Sequence: Synthetic oligonucleotide
  Antisense strand to SEQ ID NO: 738640
guucaacccauauuagagu

SEQ ID NO: 738642 - RNA, 19 nt, Artificial Sequence
  Description of Artificial Sequence: Synthetic oligonucleotide
  Sense strand starting at position 1516 of SEQ ID NO: 586712
agucuugugccagggauca

SEQ ID NO: 738643 - RNA, 19 nt, Artificial Sequence
  Description of Artificial Sequence: Synthetic oligonucleotide
  Antisense strand to SEQ ID NO: 738642
ugaucccuggcacaagacu

SEQ ID NO: 738644 - RNA, 19 nt, Artificial Sequence
  Description of Artificial Sequence: Synthetic oligonucleotide
  Sense strand starting at position 2025 of SEQ ID NO: 586712
uaaauaaaugggugccaga

SEQ ID NO: 738645 - RNA, 19 nt, Artificial Sequence
  Description of Artificial Sequence: Synthetic oligonucleotide
  Antisense strand to SEQ ID NO: 738644
ucuggcacccauuuauuua

SEQ ID NO: 738646 - RNA, 19 nt, Artificial Sequence
  Description of Artificial Sequence: Synthetic oligonucleotide
  Sense strand starting at position 2044 of SEQ ID NO: 586712
gaccuuuggucccugagac

SEQ ID NO: 738647 - RNA, 19 nt, Artificial Sequence
  Description of Artificial Sequence: Synthetic oligonucleotide
  Antisense strand to SEQ ID NO: 738646
gucucagggaccaaagguc

SEQ ID NO: 738648 - RNA, 19 nt, Artificial Sequence
  Description of Artificial Sequence: Synthetic oligonucleotide
  Sense strand starting at position 2045 of SEQ ID NO: 586712
accuuuggucccugagaca

SEQ ID NO: 738649 - RNA, 19 nt, Artificial Sequence
  Description of Artificial Sequence: Synthetic oligonucleotide
  Antisense strand to SEQ ID NO: 738648
ugucucagggaccaaaggu

SEQ ID NO: 738650 - RNA, 19 nt, Artificial Sequence
  Description of Artificial Sequence: Synthetic oligonucleotide
  Sense strand starting at position 2090 of SEQ ID NO: 586712
ugagucagucuggaagcuu

SEQ ID NO: 738651 - RNA, 19 nt, Artificial Sequence
  Description of Artificial Sequence: Synthetic oligonucleotide
  Antisense strand to SEQ ID NO: 738650
aagcuuccagacugacuca

SEQ ID NO: 738652 - RNA, 19 nt, Artificial Sequence
  Description of Artificial Sequence: Synthetic oligonucleotide
  Sense strand starting at position 2099 of SEQ ID NO: 586712
cuggaagcuucccucauga

SEQ ID NO: 738653 - RNA, 19 nt, Artificial Sequence
  Description of Artificial Sequence: Synthetic oligonucleotide
  Antisense strand to SEQ ID NO: 738652
ucaugagggaagcuuccag

SEQ ID NO: 738654 - RNA, 19 nt, Artificial Sequence
  Description of Artificial Sequence: Synthetic oligonucleotide
  Sense strand starting at position 2101 of SEQ ID NO: 586712
ggaagcuucccucaugacu

SEQ ID NO: 738655 - RNA, 19 nt, Artificial Sequence
  Description of Artificial Sequence: Synthetic oligonucleotide
  Antisense strand to SEQ ID NO: 738654
agucaugagggaagcuucc

SEQ ID NO: 738656 - RNA, 19 nt, Artificial Sequence
  Description of Artificial Sequence: Synthetic oligonucleotide
  Sense strand starting at position 2129 of SEQ ID NO: 586712
gggccuguuucaggccaaa

SEQ ID NO: 738657 - RNA, 19 nt, Artificial Sequence
  Description of Artificial Sequence: Synthetic oligonucleotide
  Antisense strand to SEQ ID NO: 738656
uuuggccugaaacaggccc

SEQ ID NO: 738658 - RNA, 19 nt, Artificial Sequence
  Description of Artificial Sequence: Synthetic oligonucleotide
  Sense strand starting at position 2192 of SEQ ID NO: 586712
gcaugaggguuaucagcuu

SEQ ID NO: 738659 - RNA, 19 nt, Artificial Sequence
  Description of Artificial Sequence: Synthetic oligonucleotide
  Antisense strand to SEQ ID NO: 738658
aagcugauaacccucaugc

SEQ ID NO: 738660 - RNA, 19 nt, Artificial Sequence
  Description of Artificial Sequence: Synthetic oligonucleotide
  Sense strand starting at position 2398 of SEQ ID NO: 586712
cuucuuauuggccggguau

SEQ ID NO: 738661 - RNA, 19 nt, Artificial Sequence
  Description of Artificial Sequence: Synthetic oligonucleotide
  Antisense strand to SEQ ID NO: 738660
auacccggccaauaagaag

SEQ ID NO: 738662 - RNA, 19 nt, Artificial Sequence
  Description of Artificial Sequence: Synthetic oligonucleotide
  Sense strand starting at position 2676 of SEQ ID NO: 586712
aagacucugucucggcaaa

SEQ ID NO: 738663 - RNA, 19 nt, Artificial Sequence
  Description of Artificial Sequence: Synthetic oligonucleotide
  Antisense strand to SEQ ID NO: 738662
uuugccgagacagagucuu

SEQ ID NO: 738664 - RNA, 19 nt, Artificial Sequence
  Description of Artificial Sequence: Synthetic oligonucleotide
  Sense strand starting at position 2714 of SEQ ID NO: 586712
ccuucuuauuguccuauga

SEQ ID NO: 738665 - RNA, 19 nt, Artificial Sequence
  Description of Artificial Sequence: Synthetic oligonucleotide
  Antisense strand to SEQ ID NO: 738664
ucauaggacaauaagaagg

SEQ ID NO: 738666 - RNA, 19 nt, Artificial Sequence
  Description of Artificial Sequence: Synthetic oligonucleotide
  Sense strand starting at position 2716 of SEQ ID NO: 586712
uucuuauuguccuaugagu

SEQ ID NO: 738667 - RNA, 19 nt, Artificial Sequence
  Description of Artificial Sequence: Synthetic oligonucleotide
  Antisense strand to SEQ ID NO: 738666
acucauaggacaauaagaa

SEQ ID NO: 738668 - RNA, 19 nt, Artificial Sequence
  Description of Artificial Sequence: Synthetic oligonucleotide
  Sense strand starting at position 2718 of SEQ ID NO: 586712
cuuauuguccuaugaguau

SEQ ID NO: 738669 - RNA, 19 nt, Artificial Sequence
  Description of Artificial Sequence: Synthetic oligonucleotide
  Antisense strand to SEQ ID NO: 738668
auacucauaggacaauaag

SEQ ID NO: 738670 - RNA, 19 nt, Artificial Sequence
  Description of Artificial Sequence: Synthetic oligonucleotide
  Sense strand starting at position 2727 of SEQ ID NO: 586712
cuaugaguaugcccugaag

SEQ ID NO: 738671 - RNA, 19 nt, Artificial Sequence
  Description of Artificial Sequence: Synthetic oligonucleotide
  Antisense strand to SEQ ID NO: 738670
cuucagggcauacucauag

SEQ ID NO: 738672 - RNA, 19 nt, Artificial Sequence
  Description of Artificial Sequence: Synthetic oligonucleotide
  Sense strand starting at position 2729 of SEQ ID NO: 586712
augaguaugcccugaagac

SEQ ID NO: 738673 - RNA, 19 nt, Artificial Sequence
  Description of Artificial Sequence: Synthetic oligonucleotide
  Antisense strand to SEQ ID NO: 738672
gucuucagggcauacucau

SEQ ID NO: 738674 - RNA, 19 nt, Artificial Sequence
  Description of Artificial Sequence: Synthetic oligonucleotide
  Sense strand starting at position 2730 of SEQ ID NO: 586712
ugaguaugcccugaagaca

SEQ ID NO: 738675 - RNA, 19 nt, Artificial Sequence
  Description of Artificial Sequence: Synthetic oligonucleotide
  Antisense strand to SEQ ID NO: 738674
ugucuucagggcauacuca

SEQ ID NO: 738676 - RNA, 19 nt, Artificial Sequence
  Description of Artificial Sequence: Synthetic oligonucleotide
  Sense strand starting at position 2765 of SEQ ID NO: 586712
gggaguucuuggguuuggu

SEQ ID NO: 738677 - RNA, 19 nt, Artificial Sequence
  Description of Artificial Sequence: Synthetic oligonucleotide
  Antisense strand to SEQ ID NO: 738676
accaaacccaagaacuccc

SEQ ID NO: 738678 - RNA, 19 nt, Artificial Sequence
  Description of Artificial Sequence: Synthetic oligonucleotide
  Sense strand starting at position 3020 of SEQ ID NO: 586712
cccagagcauucguuccau

SEQ ID NO: 738679 - RNA, 19 nt, Artificial Sequence
  Description of Artificial Sequence: Synthetic oligonucleotide
  Antisense strand to SEQ ID NO: 738678
auggaacgaaugcucuggg

SEQ ID NO: 738680 - RNA, 19 nt, Artificial Sequence
  Description of Artificial Sequence: Synthetic oligonucleotide
  Sense strand starting at position 3049 of SEQ ID NO: 586712
gcagccaguccugggagaa

SEQ ID NO: 738681 - RNA, 19 nt, Artificial Sequence
  Description of Artificial Sequence: Synthetic oligonucleotide
  Antisense strand to SEQ ID NO: 738680
uucucccaggacuggcugc

SEQ ID NO: 738682 - RNA, 19 nt, Artificial Sequence
  Description of Artificial Sequence: Synthetic oligonucleotide
  Sense strand starting at position 3050 of SEQ ID NO: 586712
cagccaguccugggagaaa

SEQ ID NO: 738683 - RNA, 19 nt, Artificial Sequence
  Description of Artificial Sequence: Synthetic oligonucleotide
  Antisense strand to SEQ ID NO: 738682
uuucucccaggacuggcug

SEQ ID NO: 738684 - RNA, 19 nt, Artificial Sequence
  Description of Artificial Sequence: Synthetic oligonucleotide
  Sense strand starting at position 553 of SEQ ID NO: 586713
gcagucaggcgugaugagu

SEQ ID NO: 738685 - RNA, 19 nt, Artificial Sequence
  Description of Artificial Sequence: Synthetic oligonucleotide
  Antisense strand to SEQ ID NO: 738684
acucaucacgccugacugc

SEQ ID NO: 738686 - RNA, 19 nt, Artificial Sequence
  Description of Artificial Sequence: Synthetic oligonucleotide
  Sense strand starting at position 562 of SEQ ID NO: 586713
cgugaugaguucuggagac

SEQ ID NO: 738687 - RNA, 19 nt, Artificial Sequence
  Description of Artificial Sequence: Synthetic oligonucleotide
  Antisense strand to SEQ ID NO: 738686
gucuccagaacucaucacg

SEQ ID NO: 738688 - RNA, 19 nt, Artificial Sequence
  Description of Artificial Sequence: Synthetic oligonucleotide
  Sense strand starting at position 645 of SEQ ID NO: 586713
ggccgugggauucauuagu

SEQ ID NO: 738689 - RNA, 19 nt, Artificial Sequence
  Description of Artificial Sequence: Synthetic oligonucleotide
  Antisense strand to SEQ ID NO: 738688
acuaaugaaucccacggcc

SEQ ID NO: 738690 - RNA, 19 nt, Artificial Sequence
  Description of Artificial Sequence: Synthetic oligonucleotide
  Sense strand starting at position 704 of SEQ ID NO: 586713
cacaauuugucagaguuag

SEQ ID NO: 738691 - RNA, 19 nt, Artificial Sequence
  Description of Artificial Sequence: Synthetic oligonucleotide
  Antisense strand to SEQ ID NO: 738690
cuaacucugacaaauugug

SEQ ID NO: 738692 - RNA, 19 nt, Artificial Sequence
  Description of Artificial Sequence: Synthetic oligonucleotide
  Sense strand starting at position 852 of SEQ ID NO: 586713
ggugucacgucucaaccua

SEQ ID NO: 738693 - RNA, 19 nt, Artificial Sequence
  Description of Artificial Sequence: Synthetic oligonucleotide
  Antisense strand to SEQ ID NO: 738692
uagguugagacgugacacc

SEQ ID NO: 738694 - RNA, 19 nt, Artificial Sequence
  Description of Artificial Sequence: Synthetic oligonucleotide
  Sense strand starting at position 1048 of SEQ ID NO: 586713
gaggaauugcgagguguuc

SEQ ID NO: 738695 - RNA, 19 nt, Artificial Sequence
  Description of Artificial Sequence: Synthetic oligonucleotide
  Antisense strand to SEQ ID NO: 738694
gaacaccucgcaauuccuc

SEQ ID NO: 738696 - RNA, 19 nt, Artificial Sequence
  Description of Artificial Sequence: Synthetic oligonucleotide
  Sense strand starting at position 1102 of SEQ ID NO: 586713
acggguagucucagacgca

SEQ ID NO: 738697 - RNA, 19 nt, Artificial Sequence
  Description of Artificial Sequence: Synthetic oligonucleotide
  Antisense strand to SEQ ID NO: 738696
ugcgucugagacuacccgu

SEQ ID NO: 738698 - RNA, 19 nt, Artificial Sequence
  Description of Artificial Sequence: Synthetic oligonucleotide
  Sense strand starting at position 1388 of SEQ ID NO: 586713
gggcacugcucugggaaga

SEQ ID NO: 738699 - RNA, 19 nt, Artificial Sequence
  Description of Artificial Sequence: Synthetic oligonucleotide
  Antisense strand to SEQ ID NO: 738698
ucuucccagagcagugccc

SEQ ID NO: 738700 - RNA, 19 nt, Artificial Sequence
  Description of Artificial Sequence: Synthetic oligonucleotide
  Sense strand starting at position 2330 of SEQ ID NO: 586713
gggaguaauuaacacagaa

SEQ ID NO: 738701 - RNA, 19 nt, Artificial Sequence
  Description of Artificial Sequence: Synthetic oligonucleotide
  Antisense strand to SEQ ID NO: 738700
uucuguguuaauuacuccc

SEQ ID NO: 738702 - RNA, 19 nt, Artificial Sequence
  Description of Artificial Sequence: Synthetic oligonucleotide
  Sense strand starting at position 2345 of SEQ ID NO: 586713
agaauuccaucugaaguca

SEQ ID NO: 738703 - RNA, 19 nt, Artificial Sequence
  Description of Artificial Sequence: Synthetic oligonucleotide
  Antisense strand to SEQ ID NO: 738702
ugacuucagauggaauucu

SEQ ID NO: 738704 - RNA, 19 nt, Artificial Sequence
  Description of Artificial Sequence: Synthetic oligonucleotide
  Sense strand starting at position 2735 of SEQ ID NO: 586713
ugggcaaaggugugaagaa

SEQ ID NO: 738705 - RNA, 19 nt, Artificial Sequence
  Description of Artificial Sequence: Synthetic oligonucleotide
  Antisense strand to SEQ ID NO: 738704
uucuucacaccuuugccca

SEQ ID NO: 738706 - RNA, 19 nt, Artificial Sequence
  Description of Artificial Sequence: Synthetic oligonucleotide
  Sense strand starting at position 2806 of SEQ ID NO: 586713
agaguaauuugaggaucac

SEQ ID NO: 738707 - RNA, 19 nt, Artificial Sequence
  Description of Artificial Sequence: Synthetic oligonucleotide
  Antisense strand to SEQ ID NO: 738706
gugauccucaaauuacucu

SEQ ID NO: 738708 - RNA, 19 nt, Artificial Sequence
  Description of Artificial Sequence: Synthetic oligonucleotide
  Sense strand starting at position 3095 of SEQ ID NO: 586713
uggguuggguugcuuuaaa

SEQ ID NO: 738709 - RNA, 19 nt, Artificial Sequence
  Description of Artificial Sequence: Synthetic oligonucleotide
  Antisense strand to SEQ ID NO: 738708
uuuaaagcaacccaaccca

SEQ ID NO: 738710 - RNA, 19 nt, Artificial Sequence
  Description of Artificial Sequence: Synthetic oligonucleotide
  Sense strand starting at position 3115 of SEQ ID NO: 586713
ggguaauuugguggcaucu

SEQ ID NO: 738711 - RNA, 19 nt, Artificial Sequence
  Description of Artificial Sequence: Synthetic oligonucleotide
  Antisense strand to SEQ ID NO: 738710
agaugccaccaaauuaccc

SEQ ID NO: 738712 - RNA, 19 nt, Artificial Sequence
  Description of Artificial Sequence: Synthetic oligonucleotide
  Sense strand starting at position 3117 of SEQ ID NO: 586713
guaauuugguggcaucuau

SEQ ID NO: 738713 - RNA, 19 nt, Artificial Sequence
  Description of Artificial Sequence: Synthetic oligonucleotide
  Antisense strand to SEQ ID NO: 738712
auagaugccaccaaauuac

SEQ ID NO: 738714 - RNA, 19 nt, Artificial Sequence
  Description of Artificial Sequence: Synthetic oligonucleotide
  Sense strand starting at position 3143 of SEQ ID NO: 586713
uuaaaugagugccuuagga

SEQ ID NO: 738715 - RNA, 19 nt, Artificial Sequence
  Description of Artificial Sequence: Synthetic oligonucleotide
  Antisense strand to SEQ ID NO: 738714
uccuaaggcacucauuuaa

SEQ ID NO: 738716 - RNA, 19 nt, Artificial Sequence
  Description of Artificial Sequence: Synthetic oligonucleotide
  Sense strand starting at position 3176 of SEQ ID NO: 586713
ccuccaucucuguguccaa

SEQ ID NO: 738717 - RNA, 19 nt, Artificial Sequence
  Description of Artificial Sequence: Synthetic oligonucleotide
  Antisense strand to SEQ ID NO: 738716
uuggacacagagauggagg

SEQ ID NO: 738718 - RNA, 19 nt, Artificial Sequence
  Description of Artificial Sequence: Synthetic oligonucleotide
  Sense strand starting at position 3179 of SEQ ID NO: 586713
ccaucucuguguccaagaa

SEQ ID NO: 738719 - RNA, 19 nt, Artificial Sequence
  Description of Artificial Sequence: Synthetic oligonucleotide
  Antisense strand to SEQ ID NO: 738718
uucuuggacacagagaugg

SEQ ID NO: 738720 - RNA, 19 nt, Artificial Sequence
  Description of Artificial Sequence: Synthetic oligonucleotide
  Sense strand starting at position 3215 of SEQ ID NO: 586713
ucaugaggauguuuauuga

SEQ ID NO: 738721 - RNA, 19 nt, Artificial Sequence
  Description of Artificial Sequence: Synthetic oligonucleotide
  Antisense strand to SEQ ID NO: 738720
ucaauaaacauccucauga

SEQ ID NO: 738722 - RNA, 19 nt, Artificial Sequence
  Description of Artificial Sequence: Synthetic oligonucleotide
  Sense strand starting at position 3222 of SEQ ID NO: 586713
gauguuuauugacucucga

SEQ ID NO: 738723 - RNA, 19 nt, Artificial Sequence
  Description of Artificial Sequence: Synthetic oligonucleotide
  Antisense strand to SEQ ID NO: 738722
ucgagagucaauaaacauc

SEQ ID NO: 738724 - RNA, 19 nt, Artificial Sequence
  Description of Artificial Sequence: Synthetic oligonucleotide
  Sense strand starting at position 3226 of SEQ ID NO: 586713
uuuauugacucucgauuau

SEQ ID NO: 738725 - RNA, 19 nt, Artificial Sequence
  Description of Artificial Sequence: Synthetic oligonucleotide
  Antisense strand to SEQ ID NO: 738724
auaaucgagagucaauaaa

SEQ ID NO: 738726 - RNA, 19 nt, Artificial Sequence
  Description of Artificial Sequence: Synthetic oligonucleotide
  Sense strand starting at position 3232 of SEQ ID NO: 586713
gacucucgauuauggcaau

SEQ ID NO: 738727 - RNA, 19 nt, Artificial Sequence
  Description of Artificial Sequence: Synthetic oligonucleotide
  Antisense strand to SEQ ID NO: 738726
auugccauaaucgagaguc

SEQ ID NO: 738728 - RNA, 19 nt, Artificial Sequence
  Description of Artificial Sequence: Synthetic oligonucleotide
  Sense strand starting at position 3302 of SEQ ID NO: 586713
auggaauagucacccuaca

SEQ ID NO: 738729 - RNA, 19 nt, Artificial Sequence
  Description of Artificial Sequence: Synthetic oligonucleotide
  Antisense strand to SEQ ID NO: 738728
uguagggugacuauuccau

SEQ ID NO: 738730 - RNA, 19 nt, Artificial Sequence
  Description of Artificial Sequence: Synthetic oligonucleotide
  Sense strand starting at position 3569 of SEQ ID NO: 586713
uccaaagagucaugaucga

SEQ ID NO: 738731 - RNA, 19 nt, Artificial Sequence
  Description of Artificial Sequence: Synthetic oligonucleotide
  Antisense strand to SEQ ID NO: 738730
ucgaucaugacucuuugga

SEQ ID NO: 738732 - RNA, 19 nt, Artificial Sequence
  Description of Artificial Sequence: Synthetic oligonucleotide
  Sense strand starting at position 3796 of SEQ ID NO: 586713
agauuagccgggcaugaua

SEQ ID NO: 738733 - RNA, 19 nt, Artificial Sequence
  Description of Artificial Sequence: Synthetic oligonucleotide
  Antisense strand to SEQ ID NO: 738732
uaucaugcccggcuaaucu

SEQ ID NO: 738734 - RNA, 19 nt, Artificial Sequence
  Description of Artificial Sequence: Synthetic oligonucleotide
  Sense strand starting at position 3876 of SEQ ID NO: 586713
gggugaggguuguaguaag

SEQ ID NO: 738735 - RNA, 19 nt, Artificial Sequence
  Description of Artificial Sequence: Synthetic oligonucleotide
  Antisense strand to SEQ ID NO: 738734
cuuacuacaacccucaccc

SEQ ID NO: 738736 - RNA, 19 nt, Artificial Sequence
  Description of Artificial Sequence: Synthetic oligonucleotide
  Sense strand starting at position 190 of SEQ ID NO: 586714
uggagagcucccugaagcu

SEQ ID NO: 738737 - RNA, 19 nt, Artificial Sequence
  Description of Artificial Sequence: Synthetic oligonucleotide
  Antisense strand to SEQ ID NO: 738736
agcuucagggagcucucca

SEQ ID NO: 738738 - RNA, 19 nt, Artificial Sequence
  Description of Artificial Sequence: Synthetic oligonucleotide
  Sense strand starting at position 287 of SEQ ID NO: 586714
uguggaaggugauccauga

SEQ ID NO: 738739 - RNA, 19 nt, Artificial Sequence
  Description of Artificial Sequence: Synthetic oligonucleotide
  Antisense strand to SEQ ID NO: 738738
ucauggaucaccuuccaca

SEQ ID NO: 738740 - RNA, 19 nt, Artificial Sequence
  Description of Artificial Sequence: Synthetic oligonucleotide
  Sense strand starting at position 367 of SEQ ID NO: 586714
gggaauccgugggcaaaua

SEQ ID NO: 738741 - RNA, 19 nt, Artificial Sequence
  Description of Artificial Sequence: Synthetic oligonucleotide
  Antisense strand to SEQ ID NO: 738740
uauuugcccacggauuccc

SEQ ID NO: 738742 - RNA, 19 nt, Artificial Sequence
  Description of Artificial Sequence: Synthetic oligonucleotide
  Sense strand starting at position 665 of SEQ ID NO: 586714
ucagccaucucauaggaau

SEQ ID NO: 738743 - RNA, 19 nt, Artificial Sequence
  Description of Artificial Sequence: Synthetic oligonucleotide
  Antisense strand to SEQ ID NO: 738742
auuccuaugagauggcuga

SEQ ID NO: 738744 - RNA, 19 nt, Artificial Sequence
  Description of Artificial Sequence: Synthetic oligonucleotide
  Sense strand starting at position 706 of SEQ ID NO: 586714
cggucugcuuauggagaga

SEQ ID NO: 738745 - RNA, 19 nt, Artificial Sequence
  Description of Artificial Sequence: Synthetic oligonucleotide
  Antisense strand to SEQ ID NO: 738744
ucucuccauaagcagaccg

SEQ ID NO: 738746 - RNA, 19 nt, Artificial Sequence
  Description of Artificial Sequence: Synthetic oligonucleotide
  Sense strand starting at position 709 of SEQ ID NO: 586714
ucugcuuauggagagaguu

SEQ ID NO: 738747 - RNA, 19 nt, Artificial Sequence
  Description of Artificial Sequence: Synthetic oligonucleotide
  Antisense strand to SEQ ID NO: 738746
aacucucuccauaagcaga

SEQ ID NO: 738748 - RNA, 19 nt, Artificial Sequence
  Description of Artificial Sequence: Synthetic oligonucleotide
  Sense strand starting at position 774 of SEQ ID NO: 586714
uuaucaggguguccauuaa

SEQ ID NO: 738749 - RNA, 19 nt, Artificial Sequence
  Description of Artificial Sequence: Synthetic oligonucleotide
  Antisense strand to SEQ ID NO: 738748
uuaauggacacccugauaa

SEQ ID NO: 738750 - RNA, 19 nt, Artificial Sequence
  Description of Artificial Sequence: Synthetic oligonucleotide
  Sense strand starting at position 1186 of SEQ ID NO: 586714
aggugacucugaugaggaa

SEQ ID NO: 738751 - RNA, 19 nt, Artificial Sequence
  Description of Artificial Sequence: Synthetic oligonucleotide
  Antisense strand to SEQ ID NO: 738750
uuccucaucagagucaccu

SEQ ID NO: 738752 - RNA, 19 nt, Artificial Sequence
  Description of Artificial Sequence: Synthetic oligonucleotide
  Sense strand starting at position 1277 of SEQ ID NO: 586714
gcccaagaauucucuagua

SEQ ID NO: 738753 - RNA, 19 nt, Artificial Sequence
  Description of Artificial Sequence: Synthetic oligonucleotide
  Antisense strand to SEQ ID NO: 738752
uacuagagaauucuugggc

SEQ ID NO: 738754 - RNA, 19 nt, Artificial Sequence
  Description of Artificial Sequence: Synthetic oligonucleotide
  Sense strand starting at position 1282 of SEQ ID NO: 586714
agaauucucuaguagaucu

SEQ ID NO: 738755 - RNA, 19 nt, Artificial Sequence
  Description of Artificial Sequence: Synthetic oligonucleotide
  Antisense strand to SEQ ID NO: 738754
agaucuacuagagaauucu

SEQ ID NO: 738756 - RNA, 19 nt, Artificial Sequence
  Description of Artificial Sequence: Synthetic oligonucleotide
  Sense strand starting at position 1479 of SEQ ID NO: 586714
gagcuuaacugucccugga

SEQ ID NO: 738757 - RNA, 19 nt, Artificial Sequence
  Description of Artificial Sequence: Synthetic oligonucleotide
  Antisense strand to SEQ ID NO: 738756
uccagggacaguuaagcuc

SEQ ID NO: 738758 - RNA, 19 nt, Artificial Sequence
  Description of Artificial Sequence: Synthetic oligonucleotide
  Sense strand starting at position 1598 of SEQ ID NO: 586714
aaggucaggccaugucuua

SEQ ID NO: 738759 - RNA, 19 nt, Artificial Sequence
  Description of Artificial Sequence: Synthetic oligonucleotide
  Antisense strand to SEQ ID NO: 738758
uaagacauggccugaccuu

SEQ ID NO: 738760 - RNA, 19 nt, Artificial Sequence
  Description of Artificial Sequence: Synthetic oligonucleotide
  Sense strand starting at position 1873 of SEQ ID NO: 586714
aggcauaguggugaaguga

SEQ ID NO: 738761 - RNA, 19 nt, Artificial Sequence
  Description of Artificial Sequence: Synthetic oligonucleotide
  Antisense strand to SEQ ID NO: 738760
ucacuucaccacuaugccu

SEQ ID NO: 738762 - RNA, 19 nt, Artificial Sequence
  Description of Artificial Sequence: Synthetic oligonucleotide
  Sense strand starting at position 2098 of SEQ ID NO: 586714
guagguggcuuguguucau

SEQ ID NO: 738763 - RNA, 19 nt, Artificial Sequence
  Description of Artificial Sequence: Synthetic oligonucleotide
  Antisense strand to SEQ ID NO: 738762
augaacacaagccaccuac

SEQ ID NO: 738764 - RNA, 19 nt, Artificial Sequence
  Description of Artificial Sequence: Synthetic oligonucleotide
  Sense strand starting at position 2375 of SEQ ID NO: 586714
gggcauuuguguuauucag

SEQ ID NO: 738765 - RNA, 19 nt, Artificial Sequence
  Description of Artificial Sequence: Synthetic oligonucleotide
  Antisense strand to SEQ ID NO: 738764
cugaauaacacaaaugccc

SEQ ID NO: 738766 - RNA, 19 nt, Artificial Sequence
  Description of Artificial Sequence: Synthetic oligonucleotide
  Sense strand starting at position 2427 of SEQ ID NO: 586714
gucggugugcucuuccgau

SEQ ID NO: 738767 - RNA, 19 nt, Artificial Sequence
  Description of Artificial Sequence: Synthetic oligonucleotide
  Antisense strand to SEQ ID NO: 738766
aucggaagagcacaccgac

SEQ ID NO: 738768 - RNA, 19 nt, Artificial Sequence
  Description of Artificial Sequence: Synthetic oligonucleotide
  Sense strand starting at position 2565 of SEQ ID NO: 586714
augugacauuugggcauau

SEQ ID NO: 738769 - RNA, 19 nt, Artificial Sequence
  Description of Artificial Sequence: Synthetic oligonucleotide
  Antisense strand to SEQ ID NO: 738768
auaugcccaaaugucacau

SEQ ID NO: 738770 - RNA, 19 nt, Artificial Sequence
  Description of Artificial Sequence: Synthetic oligonucleotide
  Sense strand starting at position 2816 of SEQ ID NO: 586714
agaucaaggucucauuucu

SEQ ID NO: 738771 - RNA, 19 nt, Artificial Sequence
  Description of Artificial Sequence: Synthetic oligonucleotide
  Antisense strand to SEQ ID NO: 738770
agaaaugagaccuugaucu

SEQ ID NO: 738772 - RNA, 19 nt, Artificial Sequence
  Description of Artificial Sequence: Synthetic oligonucleotide
  Sense strand starting at position 2896 of SEQ ID NO: 586714
ucuuucuaguguuuccaga

SEQ ID NO: 738773 - RNA, 19 nt, Artificial Sequence
  Description of Artificial Sequence: Synthetic oligonucleotide
  Antisense strand to SEQ ID NO: 738772
ucuggaaacacuagaaaga

SEQ ID NO: 738774 - RNA, 19 nt, Artificial Sequence
  Description of Artificial Sequence: Synthetic oligonucleotide
  Sense strand starting at position 2898 of SEQ ID NO: 586714
uuucuaguguuuccagaag

SEQ ID NO: 738775 - RNA, 19 nt, Artificial Sequence
  Description of Artificial Sequence: Synthetic oligonucleotide
  Antisense strand to SEQ ID NO: 738774
cuucuggaaacacuagaaa

SEQ ID NO: 738776 - RNA, 19 nt, Artificial Sequence
  Description of Artificial Sequence: Synthetic oligonucleotide
  Sense strand starting at position 2969 of SEQ ID NO: 586714
cccagucaucccugacuac

SEQ ID NO: 738777 - RNA, 19 nt, Artificial Sequence
  Description of Artificial Sequence: Synthetic oligonucleotide
  Antisense strand to SEQ ID NO: 738776
guagucagggaugacuggg

SEQ ID NO: 738778 - RNA, 19 nt, Artificial Sequence
  Description of Artificial Sequence: Synthetic oligonucleotide
  Sense strand starting at position 2970 of SEQ ID NO: 586714
ccagucaucccugacuaca

SEQ ID NO: 738779 - RNA, 19 nt, Artificial Sequence
  Description of Artificial Sequence: Synthetic oligonucleotide
  Antisense strand to SEQ ID NO: 738778
uguagucagggaugacugg

SEQ ID NO: 738780 - RNA, 19 nt, Artificial Sequence
  Description of Artificial Sequence: Synthetic oligonucleotide
  Sense strand starting at position 3004 of SEQ ID NO: 586714
ccuaaacuccugugacuga

SEQ ID NO: 738781 - RNA, 19 nt, Artificial Sequence
  Description of Artificial Sequence: Synthetic oligonucleotide
  Antisense strand to SEQ ID NO: 738780
ucagucacaggaguuuagg

SEQ ID NO: 738782 - RNA, 19 nt, Artificial Sequence
  Description of Artificial Sequence: Synthetic oligonucleotide
  Sense strand starting at position 3072 of SEQ ID NO: 586714
cgcuuucugcagcaggaaa

SEQ ID NO: 738783 - RNA, 19 nt, Artificial Sequence
  Description of Artificial Sequence: Synthetic oligonucleotide
  Antisense strand to SEQ ID NO: 738782
uuuccugcugcagaaagcg

SEQ ID NO: 738784 - RNA, 19 nt, Artificial Sequence
  Description of Artificial Sequence: Synthetic oligonucleotide
  Sense strand starting at position 3546 of SEQ ID NO: 586714
gugaaucacaccgggcuua

SEQ ID NO: 738785 - RNA, 19 nt, Artificial Sequence
  Description of Artificial Sequence: Synthetic oligonucleotide
  Antisense strand to SEQ ID NO: 738784
uaagcccggugugauucac

SEQ ID NO: 738786 - RNA, 19 nt, Artificial Sequence
  Description of Artificial Sequence: Synthetic oligonucleotide
  Sense strand starting at position 3561 of SEQ ID NO: 586714
cuuacaaauuagucugagu

SEQ ID NO: 738787 - RNA, 19 nt, Artificial Sequence
  Description of Artificial Sequence: Synthetic oligonucleotide
  Antisense strand to SEQ ID NO: 738786
acucagacuaauuuguaag

SEQ ID NO: 738788 - RNA, 19 nt, Artificial Sequence
  Description of Artificial Sequence: Synthetic oligonucleotide
  Sense strand starting at position 3564 of SEQ ID NO: 586714
acaaauuagucugagugga

SEQ ID NO: 738789 - RNA, 19 nt, Artificial Sequence
  Description of Artificial Sequence: Synthetic oligonucleotide
  Antisense strand to SEQ ID NO: 738788
uccacucagacuaauuugu

SEQ ID NO: 738790 - RNA, 19 nt, Artificial Sequence
  Description of Artificial Sequence: Synthetic oligonucleotide
  Sense strand starting at position 3566 of SEQ ID NO: 586714
aaauuagucugaguggauu

SEQ ID NO: 738791 - RNA, 19 nt, Artificial Sequence
  Description of Artificial Sequence: Synthetic oligonucleotide
  Antisense strand to SEQ ID NO: 738790
aauccacucagacuaauuu

SEQ ID NO: 738792 - RNA, 19 nt, Artificial Sequence
  Description of Artificial Sequence: Synthetic oligonucleotide
  Sense strand starting at position 3630 of SEQ ID NO: 586714
cggugagaaaucugguaga

SEQ ID NO: 738793 - RNA, 19 nt, Artificial Sequence
  Description of Artificial Sequence: Synthetic oligonucleotide
  Antisense strand to SEQ ID NO: 738792
ucuaccagauuucucaccg

SEQ ID NO: 738794 - RNA, 19 nt, Artificial Sequence
  Description of Artificial Sequence: Synthetic oligonucleotide
  Sense strand starting at position 3633 of SEQ ID NO: 586714
ugagaaaucugguagagac

SEQ ID NO: 738795 - RNA, 19 nt, Artificial Sequence
  Description of Artificial Sequence: Synthetic oligonucleotide
  Antisense strand to SEQ ID NO: 738794
gucucuaccagauuucuca

SEQ ID NO: 738796 - RNA, 19 nt, Artificial Sequence
  Description of Artificial Sequence: Synthetic oligonucleotide
  Sense strand starting at position 3664 of SEQ ID NO: 586714
gggugagaugguugggaga

SEQ ID NO: 738797 - RNA, 19 nt, Artificial Sequence
  Description of Artificial Sequence: Synthetic oligonucleotide
  Antisense strand to SEQ ID NO: 738796
ucucccaaccaucucaccc

SEQ ID NO: 738798 - RNA, 19 nt, Artificial Sequence
  Description of Artificial Sequence: Synthetic oligonucleotide
  Sense strand starting at position 3665 of SEQ ID NO: 586714
ggugagaugguugggagau

SEQ ID NO: 738799 - RNA, 19 nt, Artificial Sequence
  Description of Artificial Sequence: Synthetic oligonucleotide
  Antisense strand to SEQ ID NO: 738798
aucucccaaccaucucacc

SEQ ID NO: 738800 - RNA, 19 nt, Artificial Sequence
  Description of Artificial Sequence: Synthetic oligonucleotide
  Sense strand starting at position 3666 of SEQ ID NO: 586714
gugagaugguugggagaug

SEQ ID NO: 738801 - RNA, 19 nt, Artificial Sequence
  Description of Artificial Sequence: Synthetic oligonucleotide
  Antisense strand to SEQ ID NO: 738800
caucucccaaccaucucac

SEQ ID NO: 738802 - RNA, 19 nt, Artificial Sequence
  Description of Artificial Sequence: Synthetic oligonucleotide
  Sense strand starting at position 3825 of SEQ ID NO: 586714
cgggaagcuuagugccauu

SEQ ID NO: 738803 - RNA, 19 nt, Artificial Sequence
  Description of Artificial Sequence: Synthetic oligonucleotide
  Antisense strand to SEQ ID NO: 738802
aauggcacuaagcuucccg

SEQ ID NO: 738804 - RNA, 19 nt, Artificial Sequence
  Description of Artificial Sequence: Synthetic oligonucleotide
  Sense strand starting at position 3828 of SEQ ID NO: 586714
gaagcuuagugccauugga

SEQ ID NO: 738805 - RNA, 19 nt, Artificial Sequence
  Description of Artificial Sequence: Synthetic oligonucleotide
  Antisense strand to SEQ ID NO: 738804
uccaauggcacuaagcuuc

SEQ ID NO: 738806 - RNA, 19 nt, Artificial Sequence
  Description of Artificial Sequence: Synthetic oligonucleotide
  Sense strand starting at position 3925 of SEQ ID NO: 586714
uggaguccuugacagaacu

SEQ ID NO: 738807 - RNA, 19 nt, Artificial Sequence
  Description of Artificial Sequence: Synthetic oligonucleotide
  Antisense strand to SEQ ID NO: 738806
aguucugucaaggacucca

SEQ ID NO: 738808 - RNA, 19 nt, Artificial Sequence
  Description of Artificial Sequence: Synthetic oligonucleotide
  Sense strand starting at position 52 of SEQ ID NO: 586715
cccucuaggucucaacaga

SEQ ID NO: 738809 - RNA, 19 nt, Artificial Sequence
  Description of Artificial Sequence: Synthetic oligonucleotide
  Antisense strand to SEQ ID NO: 738808
ucuguugagaccuagaggg

SEQ ID NO: 738810 - RNA, 19 nt, Artificial Sequence
  Description of Artificial Sequence: Synthetic oligonucleotide
  Sense strand starting at position 236 of SEQ ID NO: 586715
ggagaagcugcuugaaccu

SEQ ID NO: 738811 - RNA, 19 nt, Artificial Sequence
  Description of Artificial Sequence: Synthetic oligonucleotide
  Antisense strand to SEQ ID NO: 738810
agguucaagcagcuucucc

SEQ ID NO: 738812 - RNA, 19 nt, Artificial Sequence
  Description of Artificial Sequence: Synthetic oligonucleotide
  Sense strand starting at position 569 of SEQ ID NO: 586715
gcauccaugucuccagcau

SEQ ID NO: 738813 - RNA, 19 nt, Artificial Sequence
  Description of Artificial Sequence: Synthetic oligonucleotide
  Antisense strand to SEQ ID NO: 738812
augcuggagacauggaugc

SEQ ID NO: 738814 - RNA, 19 nt, Artificial Sequence
  Description of Artificial Sequence: Synthetic oligonucleotide
  Sense strand starting at position 822 of SEQ ID NO: 586715
agaggaugugcuuggaaug

SEQ ID NO: 738815 - RNA, 19 nt, Artificial Sequence
  Description of Artificial Sequence: Synthetic oligonucleotide
  Antisense strand to SEQ ID NO: 738814
cauuccaagcacauccucu

SEQ ID NO: 738816 - RNA, 19 nt, Artificial Sequence
  Description of Artificial Sequence: Synthetic oligonucleotide
  Sense strand starting at position 841 of SEQ ID NO: 586715
ggucauggccaggaagagu

SEQ ID NO: 738817 - RNA, 19 nt, Artificial Sequence
  Description of Artificial Sequence: Synthetic oligonucleotide
  Antisense strand to SEQ ID NO: 738816
acucuuccuggccaugacc

SEQ ID NO: 738818 - RNA, 19 nt, Artificial Sequence
  Description of Artificial Sequence: Synthetic oligonucleotide
  Sense strand starting at position 1416 of SEQ ID NO: 586715
ucaggucugccuugcagau

SEQ ID NO: 738819 - RNA, 19 nt, Artificial Sequence
  Description of Artificial Sequence: Synthetic oligonucleotide
  Antisense strand to SEQ ID NO: 738818
aucugcaaggcagaccuga

SEQ ID NO: 738820 - RNA, 19 nt, Artificial Sequence
  Description of Artificial Sequence: Synthetic oligonucleotide
  Sense strand starting at position 1431 of SEQ ID NO: 586715
agaugaugccaucacgauu

SEQ ID NO: 738821 - RNA, 19 nt, Artificial Sequence
  Description of Artificial Sequence: Synthetic oligonucleotide
  Antisense strand to SEQ ID NO: 738820
aaucgugauggcaucaucu

SEQ ID NO: 738822 - RNA, 19 nt, Artificial Sequence
  Description of Artificial Sequence: Synthetic oligonucleotide
  Sense strand starting at position 1442 of SEQ ID NO: 586715
ucacgauucuggucgauac

SEQ ID NO: 738823 - RNA, 19 nt, Artificial Sequence
  Description of Artificial Sequence: Synthetic oligonucleotide
  Antisense strand to SEQ ID NO: 738822
guaucgaccagaaucguga

SEQ ID NO: 738824 - RNA, 19 nt, Artificial Sequence
  Description of Artificial Sequence: Synthetic oligonucleotide
  Sense strand starting at position 1443 of SEQ ID NO: 586715
cacgauucuggucgauaca

SEQ ID NO: 738825 - RNA, 19 nt, Artificial Sequence
  Description of Artificial Sequence: Synthetic oligonucleotide
  Antisense strand to SEQ ID NO: 738824
uguaucgaccagaaucgug

SEQ ID NO: 738826 - RNA, 19 nt, Artificial Sequence
  Description of Artificial Sequence: Synthetic oligonucleotide
  Sense strand starting at position 1825 of SEQ ID NO: 586715
ugcacagucccagagcauu

SEQ ID NO: 738827 - RNA, 19 nt, Artificial Sequence
  Description of Artificial Sequence: Synthetic oligonucleotide
  Antisense strand to SEQ ID NO: 738826
aaugcucugggacugugca

SEQ ID NO: 738828 - RNA, 19 nt, Artificial Sequence
  Description of Artificial Sequence: Synthetic oligonucleotide
  Sense strand starting at position 2037 of SEQ ID NO: 586715
cuuuaugucucagccuuau

SEQ ID NO: 738829 - RNA, 19 nt, Artificial Sequence
  Description of Artificial Sequence: Synthetic oligonucleotide
  Antisense strand to SEQ ID NO: 738828
auaaggcugagacauaaag

SEQ ID NO: 738830 - RNA, 19 nt, Artificial Sequence
  Description of Artificial Sequence: Synthetic oligonucleotide
  Sense strand starting at position 2164 of SEQ ID NO: 586715
ucauguccucaacguguaa

SEQ ID NO: 738831 - RNA, 19 nt, Artificial Sequence
  Description of Artificial Sequence: Synthetic oligonucleotide
  Antisense strand to SEQ ID NO: 738830
uuacacguugaggacauga

SEQ ID NO: 738832 - RNA, 19 nt, Artificial Sequence
  Description of Artificial Sequence: Synthetic oligonucleotide
  Sense strand starting at position 2179 of SEQ ID NO: 586715
guaacauccugcugucuau

SEQ ID NO: 738833 - RNA, 19 nt, Artificial Sequence
  Description of Artificial Sequence: Synthetic oligonucleotide
  Antisense strand to SEQ ID NO: 738832
auagacagcaggauguuac

SEQ ID NO: 738834 - RNA, 19 nt, Artificial Sequence
  Description of Artificial Sequence: Synthetic oligonucleotide
  Sense strand starting at position 2258 of SEQ ID NO: 586715
cacccuagguccugaugaa

SEQ ID NO: 738835 - RNA, 19 nt, Artificial Sequence
  Description of Artificial Sequence: Synthetic oligonucleotide
  Antisense strand to SEQ ID NO: 738834
uucaucaggaccuagggug

SEQ ID NO: 738836 - RNA, 19 nt, Artificial Sequence
  Description of Artificial Sequence: Synthetic oligonucleotide
  Sense strand starting at position 2278 of SEQ ID NO: 586715
ggauccaguuacuccugua

SEQ ID NO: 738837 - RNA, 19 nt, Artificial Sequence
  Description of Artificial Sequence: Synthetic oligonucleotide
  Antisense strand to SEQ ID NO: 738836
uacaggaguaacuggaucc

SEQ ID NO: 738838 - RNA, 19 nt, Artificial Sequence
  Description of Artificial Sequence: Synthetic oligonucleotide
  Sense strand starting at position 2281 of SEQ ID NO: 586715
uccaguuacuccuguaucu

SEQ ID NO: 738839 - RNA, 19 nt, Artificial Sequence
  Description of Artificial Sequence: Synthetic oligonucleotide
  Antisense strand to SEQ ID NO: 738838
agauacaggaguaacugga

SEQ ID NO: 738840 - RNA, 19 nt, Artificial Sequence
  Description of Artificial Sequence: Synthetic oligonucleotide
  Sense strand starting at position 2397 of SEQ ID NO: 586715
guguguaguucugaggaug

SEQ ID NO: 738841 - RNA, 19 nt, Artificial Sequence
  Description of Artificial Sequence: Synthetic oligonucleotide
  Antisense strand to SEQ ID NO: 738840
cauccucagaacuacacac

SEQ ID NO: 738842 - RNA, 19 nt, Artificial Sequence
  Description of Artificial Sequence: Synthetic oligonucleotide
  Sense strand starting at position 2412 of SEQ ID NO: 586715
gauggucuguggccugaga

SEQ ID NO: 738843 - RNA, 19 nt, Artificial Sequence
  Description of Artificial Sequence: Synthetic oligonucleotide
  Antisense strand to SEQ ID NO: 738842
ucucaggccacagaccauc

SEQ ID NO: 738844 - RNA, 19 nt, Artificial Sequence
  Description of Artificial Sequence: Synthetic oligonucleotide
  Sense strand starting at position 2554 of SEQ ID NO: 586715
ggcaauuccagaggguuaa

SEQ ID NO: 738845 - RNA, 19 nt, Artificial Sequence
  Description of Artificial Sequence: Synthetic oligonucleotide
  Antisense strand to SEQ ID NO: 738844
uuaacccucuggaauugcc

SEQ ID NO: 738846 - RNA, 19 nt, Artificial Sequence
  Description of Artificial Sequence: Synthetic oligonucleotide
  Sense strand starting at position 2736 of SEQ ID NO: 586715
guggcugauguguuuguca

SEQ ID NO: 738847 - RNA, 19 nt, Artificial Sequence
  Description of Artificial Sequence: Synthetic oligonucleotide
  Antisense strand to SEQ ID NO: 738846
ugacaaacacaucagccac

SEQ ID NO: 738848 - RNA, 19 nt, Artificial Sequence
  Description of Artificial Sequence: Synthetic oligonucleotide
  Sense strand starting at position 2738 of SEQ ID NO: 586715
ggcugauguguuugucauu

SEQ ID NO: 738849 - RNA, 19 nt, Artificial Sequence
  Description of Artificial Sequence: Synthetic oligonucleotide
  Antisense strand to SEQ ID NO: 738848
aaugacaaacacaucagcc

SEQ ID NO: 738850 - RNA, 19 nt, Artificial Sequence
  Description of Artificial Sequence: Synthetic oligonucleotide
  Sense strand starting at position 2739 of SEQ ID NO: 586715
gcugauguguuugucauuc

SEQ ID NO: 738851 - RNA, 19 nt, Artificial Sequence
  Description of Artificial Sequence: Synthetic oligonucleotide
  Antisense strand to SEQ ID NO: 738850
gaaugacaaacacaucagc

SEQ ID NO: 738852 - RNA, 19 nt, Artificial Sequence
  Description of Artificial Sequence: Synthetic oligonucleotide
  Sense strand starting at position 2741 of SEQ ID NO: 586715
ugauguguuugucauuccu

SEQ ID NO: 738853 - RNA, 19 nt, Artificial Sequence
  Description of Artificial Sequence: Synthetic oligonucleotide
  Antisense strand to SEQ ID NO: 738852
aggaaugacaaacacauca

SEQ ID NO: 738854 - RNA, 19 nt, Artificial Sequence
  Description of Artificial Sequence: Synthetic oligonucleotide
  Sense strand starting at position 2847 of SEQ ID NO: 586715
gcgugaugcuguuccagag

SEQ ID NO: 738855 - RNA, 19 nt, Artificial Sequence
  Description of Artificial Sequence: Synthetic oligonucleotide
  Antisense strand to SEQ ID NO: 738854
cucuggaacagcaucacgc

SEQ ID NO: 738856 - RNA, 19 nt, Artificial Sequence
  Description of Artificial Sequence: Synthetic oligonucleotide
  Sense strand starting at position 2865 of SEQ ID NO: 586715
gaagcagucucgccagcuu

SEQ ID NO: 738857 - RNA, 19 nt, Artificial Sequence
  Description of Artificial Sequence: Synthetic oligonucleotide
  Antisense strand to SEQ ID NO: 738856
aagcuggcgagacugcuuc

SEQ ID NO: 738858 - RNA, 19 nt, Artificial Sequence
  Description of Artificial Sequence: Synthetic oligonucleotide
  Sense strand starting at position 2994 of SEQ ID NO: 586715
cagaccuaugucugucagu

SEQ ID NO: 738859 - RNA, 19 nt, Artificial Sequence
  Description of Artificial Sequence: Synthetic oligonucleotide
  Antisense strand to SEQ ID NO: 738858
acugacagacauaggucug

SEQ ID NO: 738860 - RNA, 19 nt, Artificial Sequence
  Description of Artificial Sequence: Synthetic oligonucleotide
  Sense strand starting at position 2995 of SEQ ID NO: 586715
agaccuaugucugucagua

SEQ ID NO: 738861 - RNA, 19 nt, Artificial Sequence
  Description of Artificial Sequence: Synthetic oligonucleotide
  Antisense strand to SEQ ID NO: 738860
uacugacagacauaggucu

SEQ ID NO: 738862 - RNA, 19 nt, Artificial Sequence
  Description of Artificial Sequence: Synthetic oligonucleotide
  Sense strand starting at position 3032 of SEQ ID NO: 586715
ggagcucuuaucugucaga

SEQ ID NO: 738863 - RNA, 19 nt, Artificial Sequence
  Description of Artificial Sequence: Synthetic oligonucleotide
  Antisense strand to SEQ ID NO: 738862
ucugacagauaagagcucc

SEQ ID NO: 738864 - RNA, 19 nt, Artificial Sequence
  Description of Artificial Sequence: Synthetic oligonucleotide
  Sense strand starting at position 3033 of SEQ ID NO: 586715
gagcucuuaucugucagac

SEQ ID NO: 738865 - RNA, 19 nt, Artificial Sequence
  Description of Artificial Sequence: Synthetic oligonucleotide
  Antisense strand to SEQ ID NO: 738864
gucugacagauaagagcuc

SEQ ID NO: 738866 - RNA, 19 nt, Artificial Sequence
  Description of Artificial Sequence: Synthetic oligonucleotide
  Sense strand starting at position 159 of SEQ ID NO: 586716
cucagagacugucuccauu

SEQ ID NO: 738867 - RNA, 19 nt, Artificial Sequence
  Description of Artificial Sequence: Synthetic oligonucleotide
  Antisense strand to SEQ ID NO: 738866
aauggagacagucucugag

SEQ ID NO: 738868 - RNA, 19 nt, Artificial Sequence
  Description of Artificial Sequence: Synthetic oligonucleotide
  Sense strand starting at position 172 of SEQ ID NO: 586716
uccauugcggcauagaguu

SEQ ID NO: 738869 - RNA, 19 nt, Artificial Sequence
  Description of Artificial Sequence: Synthetic oligonucleotide
  Antisense strand to SEQ ID NO: 738868
aacucuaugccgcaaugga

SEQ ID NO: 738870 - RNA, 19 nt, Artificial Sequence
  Description of Artificial Sequence: Synthetic oligonucleotide
  Sense strand starting at position 472 of SEQ ID NO: 586716
guugaugucguugucuuua

SEQ ID NO: 738871 - RNA, 19 nt, Artificial Sequence
  Description of Artificial Sequence: Synthetic oligonucleotide
  Antisense strand to SEQ ID NO: 738870
uaaagacaacgacaucaac

SEQ ID NO: 738872 - RNA, 19 nt, Artificial Sequence
  Description of Artificial Sequence: Synthetic oligonucleotide
  Sense strand starting at position 922 of SEQ ID NO: 586716
gcacaaagugcuuagcuca

SEQ ID NO: 738873 - RNA, 19 nt, Artificial Sequence
  Description of Artificial Sequence: Synthetic oligonucleotide
  Antisense strand to SEQ ID NO: 738872
ugagcuaagcacuuugugc

SEQ ID NO: 738874 - RNA, 19 nt, Artificial Sequence
  Description of Artificial Sequence: Synthetic oligonucleotide
  Sense strand starting at position 1161 of SEQ ID NO: 586716
gcccuccuugaugguaaau

SEQ ID NO: 738875 - RNA, 19 nt, Artificial Sequence
  Description of Artificial Sequence: Synthetic oligonucleotide
  Antisense strand to SEQ ID NO: 738874
auuuaccaucaaggagggc

SEQ ID NO: 738876 - RNA, 19 nt, Artificial Sequence
  Description of Artificial Sequence: Synthetic oligonucleotide
  Sense strand starting at position 1171 of SEQ ID NO: 586716
augguaaauugggcuccaa

SEQ ID NO: 738877 - RNA, 19 nt, Artificial Sequence
  Description of Artificial Sequence: Synthetic oligonucleotide
  Antisense strand to SEQ ID NO: 738876
uuggagcccaauuuaccau

SEQ ID NO: 738878 - RNA, 19 nt, Artificial Sequence
  Description of Artificial Sequence: Synthetic oligonucleotide
  Sense strand starting at position 1203 of SEQ ID NO: 586716
aacuguguccugugauacu

SEQ ID NO: 738879 - RNA, 19 nt, Artificial Sequence
  Description of Artificial Sequence: Synthetic oligonucleotide
  Antisense strand to SEQ ID NO: 738878
aguaucacaggacacaguu

SEQ ID NO: 738880 - RNA, 19 nt, Artificial Sequence
  Description of Artificial Sequence: Synthetic oligonucleotide
  Sense strand starting at position 1233 of SEQ ID NO: 586716
aggagaaugucaccucaac

SEQ ID NO: 738881 - RNA, 19 nt, Artificial Sequence
  Description of Artificial Sequence: Synthetic oligonucleotide
  Antisense strand to SEQ ID NO: 738880
guugaggugacauucuccu

SEQ ID NO: 738882 - RNA, 19 nt, Artificial Sequence
  Description of Artificial Sequence: Synthetic oligonucleotide
  Sense strand starting at position 1404 of SEQ ID NO: 586716
gaaagauagugccugguau

SEQ ID NO: 738883 - RNA, 19 nt, Artificial Sequence
  Description of Artificial Sequence: Synthetic oligonucleotide
  Antisense strand to SEQ ID NO: 738882
auaccaggcacuaucuuuc

SEQ ID NO: 738884 - RNA, 19 nt, Artificial Sequence
  Description of Artificial Sequence: Synthetic oligonucleotide
  Sense strand starting at position 1405 of SEQ ID NO: 586716
aaagauagugccugguaug

SEQ ID NO: 738885 - RNA, 19 nt, Artificial Sequence
  Description of Artificial Sequence: Synthetic oligonucleotide
  Antisense strand to SEQ ID NO: 738884
cauaccaggcacuaucuuu

SEQ ID NO: 738886 - RNA, 19 nt, Artificial Sequence
  Description of Artificial Sequence: Synthetic oligonucleotide
  Sense strand starting at position 1416 of SEQ ID NO: 586716
cugguauguaucuguccaa

SEQ ID NO: 738887 - RNA, 19 nt, Artificial Sequence
  Description of Artificial Sequence: Synthetic oligonucleotide
  Antisense strand to SEQ ID NO: 738886
uuggacagauacauaccag

SEQ ID NO: 738888 - RNA, 19 nt, Artificial Sequence
  Description of Artificial Sequence: Synthetic oligonucleotide
  Sense strand starting at position 1419 of SEQ ID NO: 586716
guauguaucuguccaagaa

SEQ ID NO: 738889 - RNA, 19 nt, Artificial Sequence
  Description of Artificial Sequence: Synthetic oligonucleotide
  Antisense strand to SEQ ID NO: 738888
uucuuggacagauacauac

SEQ ID NO: 738890 - RNA, 19 nt, Artificial Sequence
  Description of Artificial Sequence: Synthetic oligonucleotide
  Sense strand starting at position 1420 of SEQ ID NO: 586716
uauguaucuguccaagaag

SEQ ID NO: 738891 - RNA, 19 nt, Artificial Sequence
  Description of Artificial Sequence: Synthetic oligonucleotide
  Antisense strand to SEQ ID NO: 738890
cuucuuggacagauacaua

SEQ ID NO: 738892 - RNA, 19 nt, Artificial Sequence
  Description of Artificial Sequence: Synthetic oligonucleotide
  Sense strand starting at position 1423 of SEQ ID NO: 586716
guaucuguccaagaagugu

SEQ ID NO: 738893 - RNA, 19 nt, Artificial Sequence
  Description of Artificial Sequence: Synthetic oligonucleotide
  Antisense strand to SEQ ID NO: 738892
acacuucuuggacagauac

SEQ ID NO: 738894 - RNA, 19 nt, Artificial Sequence
  Description of Artificial Sequence: Synthetic oligonucleotide
  Sense strand starting at position 1791 of SEQ ID NO: 586716
cauggucacuugguccaaa

SEQ ID NO: 738895 - RNA, 19 nt, Artificial Sequence
  Description of Artificial Sequence: Synthetic oligonucleotide
  Antisense strand to SEQ ID NO: 738894
uuuggaccaagugaccaug

SEQ ID NO: 738896 - RNA, 19 nt, Artificial Sequence
  Description of Artificial Sequence: Synthetic oligonucleotide
  Sense strand starting at position 1814 of SEQ ID NO: 586716
caaagucagguuugccaua

SEQ ID NO: 738897 - RNA, 19 nt, Artificial Sequence
  Description of Artificial Sequence: Synthetic oligonucleotide
  Antisense strand to SEQ ID NO: 738896
uauggcaaaccugacuuug

SEQ ID NO: 738898 - RNA, 19 nt, Artificial Sequence
  Description of Artificial Sequence: Synthetic oligonucleotide
  Sense strand starting at position 1816 of SEQ ID NO: 586716
aagucagguuugccauacu

SEQ ID NO: 738899 - RNA, 19 nt, Artificial Sequence
  Description of Artificial Sequence: Synthetic oligonucleotide
  Antisense strand to SEQ ID NO: 738898
aguauggcaaaccugacuu

SEQ ID NO: 738900 - RNA, 19 nt, Artificial Sequence
  Description of Artificial Sequence: Synthetic oligonucleotide
  Sense strand starting at position 2221 of SEQ ID NO: 586716
agacaagacuccguggguu

SEQ ID NO: 738901 - RNA, 19 nt, Artificial Sequence
  Description of Artificial Sequence: Synthetic oligonucleotide
  Antisense strand to SEQ ID NO: 738900
aacccacggagucuugucu

SEQ ID NO: 738902 - RNA, 19 nt, Artificial Sequence
  Description of Artificial Sequence: Synthetic oligonucleotide
  Sense strand starting at position 2261 of SEQ ID NO: 586716
guuagagucacuuguggga

SEQ ID NO: 738903 - RNA, 19 nt, Artificial Sequence
  Description of Artificial Sequence: Synthetic oligonucleotide
  Antisense strand to SEQ ID NO: 738902
ucccacaagugacucuaac

SEQ ID NO: 738904 - RNA, 19 nt, Artificial Sequence
  Description of Artificial Sequence: Synthetic oligonucleotide
  Sense strand starting at position 2265 of SEQ ID NO: 586716
gagucacuugugggacuuu

SEQ ID NO: 738905 - RNA, 19 nt, Artificial Sequence
  Description of Artificial Sequence: Synthetic oligonucleotide
  Antisense strand to SEQ ID NO: 738904
aaagucccacaagugacuc

SEQ ID NO: 738906 - RNA, 19 nt, Artificial Sequence
  Description of Artificial Sequence: Synthetic oligonucleotide
  Sense strand starting at position 2365 of SEQ ID NO: 586716
cuguauguacauuguacau

SEQ ID NO: 738907 - RNA, 19 nt, Artificial Sequence
  Description of Artificial Sequence: Synthetic oligonucleotide
  Antisense strand to SEQ ID NO: 738906
auguacaauguacauacag

SEQ ID NO: 738908 - RNA, 19 nt, Artificial Sequence
  Description of Artificial Sequence: Synthetic oligonucleotide
  Sense strand starting at position 2477 of SEQ ID NO: 586716
cgagcaaagcuucuugugu

SEQ ID NO: 738909 - RNA, 19 nt, Artificial Sequence
  Description of Artificial Sequence: Synthetic oligonucleotide
  Antisense strand to SEQ ID NO: 738908
acacaagaagcuuugcucg

SEQ ID NO: 738910 - RNA, 19 nt, Artificial Sequence
  Description of Artificial Sequence: Synthetic oligonucleotide
  Sense strand starting at position 2718 of SEQ ID NO: 586716
gucccugcacuuugaagau

SEQ ID NO: 738911 - RNA, 19 nt, Artificial Sequence
  Description of Artificial Sequence: Synthetic oligonucleotide
  Antisense strand to SEQ ID NO: 738910
aucuucaaagugcagggac

SEQ ID NO: 738912 - RNA, 19 nt, Artificial Sequence
  Description of Artificial Sequence: Synthetic oligonucleotide
  Sense strand starting at position 2803 of SEQ ID NO: 586716
gacacuuagugcuccugga

SEQ ID NO: 738913 - RNA, 19 nt, Artificial Sequence
  Description of Artificial Sequence: Synthetic oligonucleotide
  Antisense strand to SEQ ID NO: 738912
uccaggagcacuaaguguc

SEQ ID NO: 738914 - RNA, 19 nt, Artificial Sequence
  Description of Artificial Sequence: Synthetic oligonucleotide
  Sense strand starting at position 2834 of SEQ ID NO: 586716
ggugcaguucucuuagcuu

SEQ ID NO: 738915 - RNA, 19 nt, Artificial Sequence
  Description of Artificial Sequence: Synthetic oligonucleotide
  Antisense strand to SEQ ID NO: 738914
aagcuaagagaacugcacc

SEQ ID NO: 738916 - RNA, 19 nt, Artificial Sequence
  Description of Artificial Sequence: Synthetic oligonucleotide
  Sense strand starting at position 2931 of SEQ ID NO: 586716
gcgauucucucaucaaagg

SEQ ID NO: 738917 - RNA, 19 nt, Artificial Sequence
  Description of Artificial Sequence: Synthetic oligonucleotide
  Antisense strand to SEQ ID NO: 738916
ccuuugaugagagaaucgc

SEQ ID NO: 738918 - RNA, 19 nt, Artificial Sequence
  Description of Artificial Sequence: Synthetic oligonucleotide
  Sense strand starting at position 2932 of SEQ ID NO: 586716
cgauucucucaucaaaggu

SEQ ID NO: 738919 - RNA, 19 nt, Artificial Sequence
  Description of Artificial Sequence: Synthetic oligonucleotide
  Antisense strand to SEQ ID NO: 738918
accuuugaugagagaaucg

SEQ ID NO: 738920 - RNA, 19 nt, Artificial Sequence
  Description of Artificial Sequence: Synthetic oligonucleotide
  Sense strand starting at position 3185 of SEQ ID NO: 586716
ucucgaauaccuuaaagca

SEQ ID NO: 738921 - RNA, 19 nt, Artificial Sequence
  Description of Artificial Sequence: Synthetic oligonucleotide
  Antisense strand to SEQ ID NO: 738920
ugcuuuaagguauucgaga

SEQ ID NO: 738922 - RNA, 19 nt, Artificial Sequence
  Description of Artificial Sequence: Synthetic oligonucleotide
  Sense strand starting at position 3201 of SEQ ID NO: 586716
gcaaaugcauuccugauaa

SEQ ID NO: 738923 - RNA, 19 nt, Artificial Sequence
  Description of Artificial Sequence: Synthetic oligonucleotide
  Antisense strand to SEQ ID NO: 738922
uuaucaggaaugcauuugc

SEQ ID NO: 738924 - RNA, 19 nt, Artificial Sequence
  Description of Artificial Sequence: Synthetic oligonucleotide
  Sense strand starting at position 3368 of SEQ ID NO: 586716
caaagucaguccuucggaa

SEQ ID NO: 738925 - RNA, 19 nt, Artificial Sequence
  Description of Artificial Sequence: Synthetic oligonucleotide
  Antisense strand to SEQ ID NO: 738924
uuccgaaggacugacuuug

SEQ ID NO: 738926 - RNA, 19 nt, Artificial Sequence
  Description of Artificial Sequence: Synthetic oligonucleotide
  Sense strand starting at position 3370 of SEQ ID NO: 586716
aagucaguccuucggaacu

SEQ ID NO: 738927 - RNA, 19 nt, Artificial Sequence
  Description of Artificial Sequence: Synthetic oligonucleotide
  Antisense strand to SEQ ID NO: 738926
aguuccgaaggacugacuu

SEQ ID NO: 738928 - RNA, 19 nt, Artificial Sequence
  Description of Artificial Sequence: Synthetic oligonucleotide
  Sense strand starting at position 3457 of SEQ ID NO: 586716
uacacucaagucugggaau

SEQ ID NO: 738929 - RNA, 19 nt, Artificial Sequence
  Description of Artificial Sequence: Synthetic oligonucleotide
  Antisense strand to SEQ ID NO: 738928
auucccagacuugagugua

SEQ ID NO: 738930 - RNA, 19 nt, Artificial Sequence
  Description of Artificial Sequence: Synthetic oligonucleotide
  Sense strand starting at position 3459 of SEQ ID NO: 586716
cacucaagucugggaauuc

SEQ ID NO: 738931 - RNA, 19 nt, Artificial Sequence
  Description of Artificial Sequence: Synthetic oligonucleotide
  Antisense strand to SEQ ID NO: 738930
gaauucccagacuugagug

SEQ ID NO: 738932 - RNA, 19 nt, Artificial Sequence
  Description of Artificial Sequence: Synthetic oligonucleotide
  Sense strand starting at position 3469 of SEQ ID NO: 586716
ugggaauucucacccagac

SEQ ID NO: 738933 - RNA, 19 nt, Artificial Sequence
  Description of Artificial Sequence: Synthetic oligonucleotide
  Antisense strand to SEQ ID NO: 738932
gucugggugagaauuccca

SEQ ID NO: 738934 - RNA, 19 nt, Artificial Sequence
  Description of Artificial Sequence: Synthetic oligonucleotide
  Sense strand starting at position 3558 of SEQ ID NO: 586716
ccaagauggcuguauucca

SEQ ID NO: 738935 - RNA, 19 nt, Artificial Sequence
  Description of Artificial Sequence: Synthetic oligonucleotide
  Antisense strand to SEQ ID NO: 738934
uggaauacagccaucuugg

SEQ ID NO: 738936 - RNA, 19 nt, Artificial Sequence
  Description of Artificial Sequence: Synthetic oligonucleotide
  Sense strand starting at position 3622 of SEQ ID NO: 586716
ucugucacguaaucauacu

SEQ ID NO: 738937 - RNA, 19 nt, Artificial Sequence
  Description of Artificial Sequence: Synthetic oligonucleotide
  Antisense strand to SEQ ID NO: 738936
aguaugauuacgugacaga

SEQ ID NO: 738938 - RNA, 19 nt, Artificial Sequence
  Description of Artificial Sequence: Synthetic oligonucleotide
  Sense strand starting at position 3686 of SEQ ID NO: 586716
ccacucuuagcucagagau

SEQ ID NO: 738939 - RNA, 19 nt, Artificial Sequence
  Description of Artificial Sequence: Synthetic oligonucleotide
  Antisense strand to SEQ ID NO: 738938
aucucugagcuaagagugg

SEQ ID NO: 738940 - RNA, 19 nt, Artificial Sequence
  Description of Artificial Sequence: Synthetic oligonucleotide
  Sense strand starting at position 3688 of SEQ ID NO: 586716
acucuuagcucagagauuu

SEQ ID NO: 738941 - RNA, 19 nt, Artificial Sequence
  Description of Artificial Sequence: Synthetic oligonucleotide
  Antisense strand to SEQ ID NO: 738940
aaaucucugagcuaagagu

SEQ ID NO: 738942 - RNA, 19 nt, Artificial Sequence
  Description of Artificial Sequence: Synthetic oligonucleotide
  Sense strand starting at position 3823 of SEQ ID NO: 586716
augacacauguaggaguua

SEQ ID NO: 738943 - RNA, 19 nt, Artificial Sequence
  Description of Artificial Sequence: Synthetic oligonucleotide
  Antisense strand to SEQ ID NO: 738942
uaacuccuacaugugucau

SEQ ID NO: 738944 - RNA, 19 nt, Artificial Sequence
  Description of Artificial Sequence: Synthetic oligonucleotide
  Sense strand starting at position 3828 of SEQ ID NO: 586716
acauguaggaguuacuguu

SEQ ID NO: 738945 - RNA, 19 nt, Artificial Sequence
  Description of Artificial Sequence: Synthetic oligonucleotide
  Antisense strand to SEQ ID NO: 738944
aacaguaacuccuacaugu

SEQ ID NO: 738946 - RNA, 19 nt, Artificial Sequence
  Description of Artificial Sequence: Synthetic oligonucleotide
  Sense strand starting at position 142 of SEQ ID NO: 586717
aggcucugguacucaguaa

SEQ ID NO: 738947 - RNA, 19 nt, Artificial Sequence
  Description of Artificial Sequence: Synthetic oligonucleotide
  Antisense strand to SEQ ID NO: 738946
uuacugaguaccagagccu

SEQ ID NO: 738948 - RNA, 19 nt, Artificial Sequence
  Description of Artificial Sequence: Synthetic oligonucleotide
  Sense strand starting at position 143 of SEQ ID NO: 586717
ggcucugguacucaguaaa

SEQ ID NO: 738949 - RNA, 19 nt, Artificial Sequence
  Description of Artificial Sequence: Synthetic oligonucleotide
  Antisense strand to SEQ ID NO: 738948
uuuacugaguaccagagcc

SEQ ID NO: 738950 - RNA, 19 nt, Artificial Sequence
  Description of Artificial Sequence: Synthetic oligonucleotide
  Sense strand starting at position 146 of SEQ ID NO: 586717
ucugguacucaguaaacgu

SEQ ID NO: 738951 - RNA, 19 nt, Artificial Sequence
  Description of Artificial Sequence: Synthetic oligonucleotide
  Antisense strand to SEQ ID NO: 738950
acguuuacugaguaccaga

SEQ ID NO: 738952 - RNA, 19 nt, Artificial Sequence
  Description of Artificial Sequence: Synthetic oligonucleotide
  Sense strand starting at position 155 of SEQ ID NO: 586717
caguaaacgucugugagcu

SEQ ID NO: 738953 - RNA, 19 nt, Artificial Sequence
  Description of Artificial Sequence: Synthetic oligonucleotide
  Antisense strand to SEQ ID NO: 738952
agcucacagacguuuacug

SEQ ID NO: 738954 - RNA, 19 nt, Artificial Sequence
  Description of Artificial Sequence: Synthetic oligonucleotide
  Sense strand starting at position 156 of SEQ ID NO: 586717
aguaaacgucugugagcua

SEQ ID NO: 738955 - RNA, 19 nt, Artificial Sequence
  Description of Artificial Sequence: Synthetic oligonucleotide
  Antisense strand to SEQ ID NO: 738954
uagcucacagacguuuacu

SEQ ID NO: 738956 - RNA, 19 nt, Artificial Sequence
  Description of Artificial Sequence: Synthetic oligonucleotide
  Sense strand starting at position 157 of SEQ ID NO: 586717
guaaacgucugugagcuaa

SEQ ID NO: 738957 - RNA, 19 nt, Artificial Sequence
  Description of Artificial Sequence: Synthetic oligonucleotide
  Antisense strand to SEQ ID NO: 738956
uuagcucacagacguuuac

SEQ ID NO: 738958 - RNA, 19 nt, Artificial Sequence
  Description of Artificial Sequence: Synthetic oligonucleotide
  Sense strand starting at position 159 of SEQ ID NO: 586717
aaacgucugugagcuaaca

SEQ ID NO: 738959 - RNA, 19 nt, Artificial Sequence
  Description of Artificial Sequence: Synthetic oligonucleotide
  Antisense strand to SEQ ID NO: 738958
uguuagcucacagacguuu

SEQ ID NO: 738960 - RNA, 19 nt, Artificial Sequence
  Description of Artificial Sequence: Synthetic oligonucleotide
  Sense strand starting at position 161 of SEQ ID NO: 586717
acgucugugagcuaacaca

SEQ ID NO: 738961 - RNA, 19 nt, Artificial Sequence
  Description of Artificial Sequence: Synthetic oligonucleotide
  Antisense strand to SEQ ID NO: 738960
uguguuagcucacagacgu

SEQ ID NO: 738962 - RNA, 19 nt, Artificial Sequence
  Description of Artificial Sequence: Synthetic oligonucleotide
  Sense strand starting at position 214 of SEQ ID NO: 586717
ccucaugggucagaaagga

SEQ ID NO: 738963 - RNA, 19 nt, Artificial Sequence
  Description of Artificial Sequence: Synthetic oligonucleotide
  Antisense strand to SEQ ID NO: 738962
uccuuucugacccaugagg

SEQ ID NO: 738964 - RNA, 19 nt, Artificial Sequence
  Description of Artificial Sequence: Synthetic oligonucleotide
  Sense strand starting at position 311 of SEQ ID NO: 586717
gacucuuacuggccuguau

SEQ ID NO: 738965 - RNA, 19 nt, Artificial Sequence
  Description of Artificial Sequence: Synthetic oligonucleotide
  Antisense strand to SEQ ID NO: 738964
auacaggccaguaagaguc

SEQ ID NO: 738966 - RNA, 19 nt, Artificial Sequence
  Description of Artificial Sequence: Synthetic oligonucleotide
  Sense strand starting at position 313 of SEQ ID NO: 586717
cucuuacuggccuguauuu

SEQ ID NO: 738967 - RNA, 19 nt, Artificial Sequence
  Description of Artificial Sequence: Synthetic oligonucleotide
  Antisense strand to SEQ ID NO: 738966
aaauacaggccaguaagag

SEQ ID NO: 738968 - RNA, 19 nt, Artificial Sequence
  Description of Artificial Sequence: Synthetic oligonucleotide
  Sense strand starting at position 340 of SEQ ID NO: 586717
gcgagaucacauugcacau

SEQ ID NO: 738969 - RNA, 19 nt, Artificial Sequence
  Description of Artificial Sequence: Synthetic oligonucleotide
  Antisense strand to SEQ ID NO: 738968
augugcaaugugaucucgc

SEQ ID NO: 738970 - RNA, 19 nt, Artificial Sequence
  Description of Artificial Sequence: Synthetic oligonucleotide
  Sense strand starting at position 406 of SEQ ID NO: 586717
uuuccugugugcucuaaau

SEQ ID NO: 738971 - RNA, 19 nt, Artificial Sequence
  Description of Artificial Sequence: Synthetic oligonucleotide
  Antisense strand to SEQ ID NO: 738970
auuuagagcacacaggaaa

SEQ ID NO: 738972 - RNA, 19 nt, Artificial Sequence
  Description of Artificial Sequence: Synthetic oligonucleotide
  Sense strand starting at position 485 of SEQ ID NO: 586717
aaaggcaccucuguuugaa

SEQ ID NO: 738973 - RNA, 19 nt, Artificial Sequence
  Description of Artificial Sequence: Synthetic oligonucleotide
  Antisense strand to SEQ ID NO: 738972
uucaaacagaggugccuuu

SEQ ID NO: 738974 - RNA, 19 nt, Artificial Sequence
  Description of Artificial Sequence: Synthetic oligonucleotide
  Sense strand starting at position 489 of SEQ ID NO: 586717
gcaccucuguuugaagcau

SEQ ID NO: 738975 - RNA, 19 nt, Artificial Sequence
  Description of Artificial Sequence: Synthetic oligonucleotide
  Antisense strand to SEQ ID NO: 738974
augcuucaaacagaggugc

SEQ ID NO: 738976 - RNA, 19 nt, Artificial Sequence
  Description of Artificial Sequence: Synthetic oligonucleotide
  Sense strand starting at position 856 of SEQ ID NO: 586717
uggguucuugcaugccuga

SEQ ID NO: 738977 - RNA, 19 nt, Artificial Sequence
  Description of Artificial Sequence: Synthetic oligonucleotide
  Antisense strand to SEQ ID NO: 738976
ucaggcaugcaagaaccca

SEQ ID NO: 738978 - RNA, 19 nt, Artificial Sequence
  Description of Artificial Sequence: Synthetic oligonucleotide
  Sense strand starting at position 1172 of SEQ ID NO: 586717
gucccaucucugggugacu

SEQ ID NO: 738979 - RNA, 19 nt, Artificial Sequence
  Description of Artificial Sequence: Synthetic oligonucleotide
  Antisense strand to SEQ ID NO: 738978
agucacccagagaugggac

SEQ ID NO: 738980 - RNA, 19 nt, Artificial Sequence
  Description of Artificial Sequence: Synthetic oligonucleotide
  Sense strand starting at position 1186 of SEQ ID NO: 586717
ugacuucuugcccacagca

SEQ ID NO: 738981 - RNA, 19 nt, Artificial Sequence
  Description of Artificial Sequence: Synthetic oligonucleotide
  Antisense strand to SEQ ID NO: 738980
ugcugugggcaagaaguca

SEQ ID NO: 738982 - RNA, 19 nt, Artificial Sequence
  Description of Artificial Sequence: Synthetic oligonucleotide
  Sense strand starting at position 2539 of SEQ ID NO: 586717
gcccgaugccuccaugcaa

SEQ ID NO: 738983 - RNA, 19 nt, Artificial Sequence
  Description of Artificial Sequence: Synthetic oligonucleotide
  Antisense strand to SEQ ID NO: 738982
uugcauggaggcaucgggc

SEQ ID NO: 738984 - RNA, 19 nt, Artificial Sequence
  Description of Artificial Sequence: Synthetic oligonucleotide
  Sense strand starting at position 2571 of SEQ ID NO: 586717
gcugcagcucuggagugau

SEQ ID NO: 738985 - RNA, 19 nt, Artificial Sequence
  Description of Artificial Sequence: Synthetic oligonucleotide
  Antisense strand to SEQ ID NO: 738984
aucacuccagagcugcagc

SEQ ID NO: 738986 - RNA, 19 nt, Artificial Sequence
  Description of Artificial Sequence: Synthetic oligonucleotide
  Sense strand starting at position 2583 of SEQ ID NO: 586717
gagugauuggcugguccug

SEQ ID NO: 738987 - RNA, 19 nt, Artificial Sequence
  Description of Artificial Sequence: Synthetic oligonucleotide
  Antisense strand to SEQ ID NO: 738986
caggaccagccaaucacuc

SEQ ID NO: 738988 - RNA, 19 nt, Artificial Sequence
  Description of Artificial Sequence: Synthetic oligonucleotide
  Sense strand starting at position 2722 of SEQ ID NO: 586717
ggugaucuguccuaucauc

SEQ ID NO: 738989 - RNA, 19 nt, Artificial Sequence
  Description of Artificial Sequence: Synthetic oligonucleotide
  Antisense strand to SEQ ID NO: 738988
gaugauaggacagaucacc

SEQ ID NO: 738990 - RNA, 19 nt, Artificial Sequence
  Description of Artificial Sequence: Synthetic oligonucleotide
  Sense strand starting at position 2843 of SEQ ID NO: 586717
ccgugaauuuccugaaaug

SEQ ID NO: 738991 - RNA, 19 nt, Artificial Sequence
  Description of Artificial Sequence: Synthetic oligonucleotide
  Antisense strand to SEQ ID NO: 738990
cauuucaggaaauucacgg

SEQ ID NO: 738992 - RNA, 19 nt, Artificial Sequence
  Description of Artificial Sequence: Synthetic oligonucleotide
  Sense strand starting at position 2984 of SEQ ID NO: 586717
gaaucagaguagccauugu

SEQ ID NO: 738993 - RNA, 19 nt, Artificial Sequence
  Description of Artificial Sequence: Synthetic oligonucleotide
  Antisense strand to SEQ ID NO: 738992
acaauggcuacucugauuc

SEQ ID NO: 738994 - RNA, 19 nt, Artificial Sequence
  Description of Artificial Sequence: Synthetic oligonucleotide
  Sense strand starting at position 2988 of SEQ ID NO: 586717
cagaguagccauugucaca

SEQ ID NO: 738995 - RNA, 19 nt, Artificial Sequence
  Description of Artificial Sequence: Synthetic oligonucleotide
  Antisense strand to SEQ ID NO: 738994
ugugacaauggcuacucug

SEQ ID NO: 738996 - RNA, 19 nt, Artificial Sequence
  Description of Artificial Sequence: Synthetic oligonucleotide
  Sense strand starting at position 3033 of SEQ ID NO: 586717
cagucuucuguggguucua

SEQ ID NO: 738997 - RNA, 19 nt, Artificial Sequence
  Description of Artificial Sequence: Synthetic oligonucleotide
  Antisense strand to SEQ ID NO: 738996
uagaacccacagaagacug

SEQ ID NO: 738998 - RNA, 19 nt, Artificial Sequence
  Description of Artificial Sequence: Synthetic oligonucleotide
  Sense strand starting at position 3034 of SEQ ID NO: 586717
agucuucuguggguucuaa

SEQ ID NO: 738999 - RNA, 19 nt, Artificial Sequence
  Description of Artificial Sequence: Synthetic oligonucleotide
  Antisense strand to SEQ ID NO: 738998
uuagaacccacagaagacu

SEQ ID NO: 739000 - RNA, 19 nt, Artificial Sequence
  Description of Artificial Sequence: Synthetic oligonucleotide
  Sense strand starting at position 3038 of SEQ ID NO: 586717
uucuguggguucuaacuuu

SEQ ID NO: 739001 - RNA, 19 nt, Artificial Sequence
  Description of Artificial Sequence: Synthetic oligonucleotide
  Antisense strand to SEQ ID NO: 739000
aaaguuagaacccacagaa

SEQ ID NO: 739002 - RNA, 19 nt, Artificial Sequence
  Description of Artificial Sequence: Synthetic oligonucleotide
  Sense strand starting at position 3045 of SEQ ID NO: 586717
gguucuaacuuugagcuca

SEQ ID NO: 739003 - RNA, 19 nt, Artificial Sequence
  Description of Artificial Sequence: Synthetic oligonucleotide
  Antisense strand to SEQ ID NO: 739002
ugagcucaaaguuagaacc

SEQ ID NO: 739004 - RNA, 19 nt, Artificial Sequence
  Description of Artificial Sequence: Synthetic oligonucleotide
  Sense strand starting at position 3741 of SEQ ID NO: 586717
uggaauuuauuccacguau

SEQ ID NO: 739005 - RNA, 19 nt, Artificial Sequence
  Description of Artificial Sequence: Synthetic oligonucleotide
  Antisense strand to SEQ ID NO: 739004
auacguggaauaaauucca

SEQ ID NO: 739006 - RNA, 19 nt, Artificial Sequence
  Description of Artificial Sequence: Synthetic oligonucleotide
  Sense strand starting at position 3834 of SEQ ID NO: 586717
gguaucaguugacacagaa

SEQ ID NO: 739007 - RNA, 19 nt, Artificial Sequence
  Description of Artificial Sequence: Synthetic oligonucleotide
  Antisense strand to SEQ ID NO: 739006
uucugugucaacugauacc

SEQ ID NO: 739008 - RNA, 19 nt, Artificial Sequence
  Description of Artificial Sequence: Synthetic oligonucleotide
  Sense strand starting at position 53 of SEQ ID NO: 586718
uuaaguauggcucacuaga

SEQ ID NO: 739009 - RNA, 19 nt, Artificial Sequence
  Description of Artificial Sequence: Synthetic oligonucleotide
  Antisense strand to SEQ ID NO: 739008
ucuagugagccauacuuaa

SEQ ID NO: 739010 - RNA, 19 nt, Artificial Sequence
  Description of Artificial Sequence: Synthetic oligonucleotide
  Sense strand starting at position 55 of SEQ ID NO: 586718
aaguauggcucacuagauu

SEQ ID NO: 739011 - RNA, 19 nt, Artificial Sequence
  Description of Artificial Sequence: Synthetic oligonucleotide
  Antisense strand to SEQ ID NO: 739010
aaucuagugagccauacuu

SEQ ID NO: 739012 - RNA, 19 nt, Artificial Sequence
  Description of Artificial Sequence: Synthetic oligonucleotide
  Sense strand starting at position 233 of SEQ ID NO: 586718
acauuuggcuaacauguaa

SEQ ID NO: 739013 - RNA, 19 nt, Artificial Sequence
  Description of Artificial Sequence: Synthetic oligonucleotide
  Antisense strand to SEQ ID NO: 739012
uuacauguuagccaaaugu

SEQ ID NO: 739014 - RNA, 19 nt, Artificial Sequence
  Description of Artificial Sequence: Synthetic oligonucleotide
  Sense strand starting at position 421 of SEQ ID NO: 586718
ucacguauacuugacaaua

SEQ ID NO: 739015 - RNA, 19 nt, Artificial Sequence
  Description of Artificial Sequence: Synthetic oligonucleotide
  Antisense strand to SEQ ID NO: 739014
uauugucaaguauacguga

SEQ ID NO: 739016 - RNA, 19 nt, Artificial Sequence
  Description of Artificial Sequence: Synthetic oligonucleotide
  Sense strand starting at position 452 of SEQ ID NO: 586718
acuugauaguguucggauu

SEQ ID NO: 739017 - RNA, 19 nt, Artificial Sequence
  Description of Artificial Sequence: Synthetic oligonucleotide
  Antisense strand to SEQ ID NO: 739016
aauccgaacacuaucaagu

SEQ ID NO: 739018 - RNA, 19 nt, Artificial Sequence
  Description of Artificial Sequence: Synthetic oligonucleotide
  Sense strand starting at position 453 of SEQ ID NO: 586718
cuugauaguguucggauuu

SEQ ID NO: 739019 - RNA, 19 nt, Artificial Sequence
  Description of Artificial Sequence: Synthetic oligonucleotide
  Antisense strand to SEQ ID NO: 739018
aaauccgaacacuaucaag

SEQ ID NO: 739020 - RNA, 19 nt, Artificial Sequence
  Description of Artificial Sequence: Synthetic oligonucleotide
  Sense strand starting at position 501 of SEQ ID NO: 586718
caacuuguugauggaucuu

SEQ ID NO: 739021 - RNA, 19 nt, Artificial Sequence
  Description of Artificial Sequence: Synthetic oligonucleotide
  Antisense strand to SEQ ID NO: 739020
aagauccaucaacaaguug

SEQ ID NO: 739022 - RNA, 19 nt, Artificial Sequence
  Description of Artificial Sequence: Synthetic oligonucleotide
  Sense strand starting at position 510 of SEQ ID NO: 586718
gauggaucuuggcucgauu

SEQ ID NO: 739023 - RNA, 19 nt, Artificial Sequence
  Description of Artificial Sequence: Synthetic oligonucleotide
  Antisense strand to SEQ ID NO: 739022
aaucgagccaagauccauc

SEQ ID NO: 739024 - RNA, 19 nt, Artificial Sequence
  Description of Artificial Sequence: Synthetic oligonucleotide
  Sense strand starting at position 805 of SEQ ID NO: 586718
guguucaaugggcauguga

SEQ ID NO: 739025 - RNA, 19 nt, Artificial Sequence
  Description of Artificial Sequence: Synthetic oligonucleotide
  Antisense strand to SEQ ID NO: 739024
ucacaugcccauugaacac

SEQ ID NO: 739026 - RNA, 19 nt, Artificial Sequence
  Description of Artificial Sequence: Synthetic oligonucleotide
  Sense strand starting at position 807 of SEQ ID NO: 586718
guucaaugggcaugugaac

SEQ ID NO: 739027 - RNA, 19 nt, Artificial Sequence
  Description of Artificial Sequence: Synthetic oligonucleotide
  Antisense strand to SEQ ID NO: 739026
guucacaugcccauugaac

SEQ ID NO: 739028 - RNA, 19 nt, Artificial Sequence
  Description of Artificial Sequence: Synthetic oligonucleotide
  Sense strand starting at position 849 of SEQ ID NO: 586718
ccacauguucucuaggguu

SEQ ID NO: 739029 - RNA, 19 nt, Artificial Sequence
  Description of Artificial Sequence: Synthetic oligonucleotide
  Antisense strand to SEQ ID NO: 739028
aacccuagagaacaugugg

SEQ ID NO: 739030 - RNA, 19 nt, Artificial Sequence
  Description of Artificial Sequence: Synthetic oligonucleotide
  Sense strand starting at position 851 of SEQ ID NO: 586718
acauguucucuaggguuaa

SEQ ID NO: 739031 - RNA, 19 nt, Artificial Sequence
  Description of Artificial Sequence: Synthetic oligonucleotide
  Antisense strand to SEQ ID NO: 739030
uuaacccuagagaacaugu

SEQ ID NO: 739032 - RNA, 19 nt, Artificial Sequence
  Description of Artificial Sequence: Synthetic oligonucleotide
  Sense strand starting at position 921 of SEQ ID NO: 586718
cuguaaugacccuaaagca

SEQ ID NO: 739033 - RNA, 19 nt, Artificial Sequence
  Description of Artificial Sequence: Synthetic oligonucleotide
  Antisense strand to SEQ ID NO: 739032
ugcuuuagggucauuacag

SEQ ID NO: 739034 - RNA, 19 nt, Artificial Sequence
  Description of Artificial Sequence: Synthetic oligonucleotide
  Sense strand starting at position 956 of SEQ ID NO: 586718
ccucuacacccagggauaa

SEQ ID NO: 739035 - RNA, 19 nt, Artificial Sequence
  Description of Artificial Sequence: Synthetic oligonucleotide
  Antisense strand to SEQ ID NO: 739034
uuaucccuggguguagagg

SEQ ID NO: 739036 - RNA, 19 nt, Artificial Sequence
  Description of Artificial Sequence: Synthetic oligonucleotide
  Sense strand starting at position 1626 of SEQ ID NO: 586718
cgagcuuuaccuuguagga

SEQ ID NO: 739037 - RNA, 19 nt, Artificial Sequence
  Description of Artificial Sequence: Synthetic oligonucleotide
  Antisense strand to SEQ ID NO: 739036
uccuacaagguaaagcucg

SEQ ID NO: 739038 - RNA, 19 nt, Artificial Sequence
  Description of Artificial Sequence: Synthetic oligonucleotide
  Sense strand starting at position 2416 of SEQ ID NO: 586718
cugacccugucuuuaagau

SEQ ID NO: 739039 - RNA, 19 nt, Artificial Sequence
  Description of Artificial Sequence: Synthetic oligonucleotide
  Antisense strand to SEQ ID NO: 739038
aucuuaaagacagggucag

SEQ ID NO: 739040 - RNA, 19 nt, Artificial Sequence
  Description of Artificial Sequence: Synthetic oligonucleotide
  Sense strand starting at position 2520 of SEQ ID NO: 586718
ggcugagcucuuugauccu

SEQ ID NO: 739041 - RNA, 19 nt, Artificial Sequence
  Description of Artificial Sequence: Synthetic oligonucleotide
  Antisense strand to SEQ ID NO: 739040
aggaucaaagagcucagcc

SEQ ID NO: 739042 - RNA, 19 nt, Artificial Sequence
  Description of Artificial Sequence: Synthetic oligonucleotide
  Sense strand starting at position 2526 of SEQ ID NO: 586718
gcucuuugauccuuugaga

SEQ ID NO: 739043 - RNA, 19 nt, Artificial Sequence
  Description of Artificial Sequence: Synthetic oligonucleotide
  Antisense strand to SEQ ID NO: 739042
ucucaaaggaucaaagagc

SEQ ID NO: 739044 - RNA, 19 nt, Artificial Sequence
  Description of Artificial Sequence: Synthetic oligonucleotide
  Sense strand starting at position 2566 of SEQ ID NO: 586718
caaagagccugcguugaaa

SEQ ID NO: 739045 - RNA, 19 nt, Artificial Sequence
  Description of Artificial Sequence: Synthetic oligonucleotide
  Antisense strand to SEQ ID NO: 739044
uuucaacgcaggcucuuug

SEQ ID NO: 739046 - RNA, 19 nt, Artificial Sequence
  Description of Artificial Sequence: Synthetic oligonucleotide
  Sense strand starting at position 2640 of SEQ ID NO: 586718
cgaguauugccgggaagga

SEQ ID NO: 739047 - RNA, 19 nt, Artificial Sequence
  Description of Artificial Sequence: Synthetic oligonucleotide
  Antisense strand to SEQ ID NO: 739046
uccuucccggcaauacucg

SEQ ID NO: 739048 - RNA, 19 nt, Artificial Sequence
  Description of Artificial Sequence: Synthetic oligonucleotide
  Sense strand starting at position 2641 of SEQ ID NO: 586718
gaguauugccgggaaggaa

SEQ ID NO: 739049 - RNA, 19 nt, Artificial Sequence
  Description of Artificial Sequence: Synthetic oligonucleotide
  Antisense strand to SEQ ID NO: 739048
uuccuucccggcaauacuc

SEQ ID NO: 739050 - RNA, 19 nt, Artificial Sequence
  Description of Artificial Sequence: Synthetic oligonucleotide
  Sense strand starting at position 2708 of SEQ ID NO: 586718
ucguuauagucuuuaaauc

SEQ ID NO: 739051 - RNA, 19 nt, Artificial Sequence
  Description of Artificial Sequence: Synthetic oligonucleotide
  Antisense strand to SEQ ID NO: 739050
gauuuaaagacuauaacga

SEQ ID NO: 739052 - RNA, 19 nt, Artificial Sequence
  Description of Artificial Sequence: Synthetic oligonucleotide
  Sense strand starting at position 2717 of SEQ ID NO: 586718
ucuuuaaauccugggaaac

SEQ ID NO: 739053 - RNA, 19 nt, Artificial Sequence
  Description of Artificial Sequence: Synthetic oligonucleotide
  Antisense strand to SEQ ID NO: 739052
guuucccaggauuuaaaga

SEQ ID NO: 739054 - RNA, 19 nt, Artificial Sequence
  Description of Artificial Sequence: Synthetic oligonucleotide
  Sense strand starting at position 2718 of SEQ ID NO: 586718
cuuuaaauccugggaaacg

SEQ ID NO: 739055 - RNA, 19 nt, Artificial Sequence
  Description of Artificial Sequence: Synthetic oligonucleotide
  Antisense strand to SEQ ID NO: 739054
cguuucccaggauuuaaag

SEQ ID NO: 739056 - RNA, 19 nt, Artificial Sequence
  Description of Artificial Sequence: Synthetic oligonucleotide
  Sense strand starting at position 2762 of SEQ ID NO: 586718
uguaaugacgucugaugac

SEQ ID NO: 739057 - RNA, 19 nt, Artificial Sequence
  Description of Artificial Sequence: Synthetic oligonucleotide
  Antisense strand to SEQ ID NO: 739056
gucaucagacgucauuaca

SEQ ID NO: 739058 - RNA, 19 nt, Artificial Sequence
  Description of Artificial Sequence: Synthetic oligonucleotide
  Sense strand starting at position 2806 of SEQ ID NO: 586718
gaaagacuugcgcaguucu

SEQ ID NO: 739059 - RNA, 19 nt, Artificial Sequence
  Description of Artificial Sequence: Synthetic oligonucleotide
  Antisense strand to SEQ ID NO: 739058
agaacugcgcaagucuuuc

SEQ ID NO: 739060 - RNA, 19 nt, Artificial Sequence
  Description of Artificial Sequence: Synthetic oligonucleotide
  Sense strand starting at position 2951 of SEQ ID NO: 586718
acaggauauuuauagacuu

SEQ ID NO: 739061 - RNA, 19 nt, Artificial Sequence
  Description of Artificial Sequence: Synthetic oligonucleotide
  Antisense strand to SEQ ID NO: 739060
aagucuauaaauauccugu

SEQ ID NO: 739062 - RNA, 19 nt, Artificial Sequence
  Description of Artificial Sequence: Synthetic oligonucleotide
  Sense strand starting at position 3024 of SEQ ID NO: 586718
gguaguggaacuugugaau

SEQ ID NO: 739063 - RNA, 19 nt, Artificial Sequence
  Description of Artificial Sequence: Synthetic oligonucleotide
  Antisense strand to SEQ ID NO: 739062
auucacaaguuccacuacc

SEQ ID NO: 739064 - RNA, 19 nt, Artificial Sequence
  Description of Artificial Sequence: Synthetic oligonucleotide
  Sense strand starting at position 3088 of SEQ ID NO: 586718
ggaggcauggcugagacuu

SEQ ID NO: 739065 - RNA, 19 nt, Artificial Sequence
  Description of Artificial Sequence: Synthetic oligonucleotide
  Antisense strand to SEQ ID NO: 739064
aagucucagccaugccucc

SEQ ID NO: 739066 - RNA, 19 nt, Artificial Sequence
  Description of Artificial Sequence: Synthetic oligonucleotide
  Sense strand starting at position 3099 of SEQ ID NO: 586718
ugagacuucuaauaaagac

SEQ ID NO: 739067 - RNA, 19 nt, Artificial Sequence
  Description of Artificial Sequence: Synthetic oligonucleotide
  Antisense strand to SEQ ID NO: 739066
gucuuuauuagaagucuca

SEQ ID NO: 739068 - RNA, 19 nt, Artificial Sequence
  Description of Artificial Sequence: Synthetic oligonucleotide
  Sense strand starting at position 3129 of SEQ ID NO: 586718
acacuaugucuugaaguca

SEQ ID NO: 739069 - RNA, 19 nt, Artificial Sequence
  Description of Artificial Sequence: Synthetic oligonucleotide
  Antisense strand to SEQ ID NO: 739068
ugacuucaagacauagugu

SEQ ID NO: 739070 - RNA, 19 nt, Artificial Sequence
  Description of Artificial Sequence: Synthetic oligonucleotide
  Sense strand starting at position 3134 of SEQ ID NO: 586718
augucuugaagucaguaua

SEQ ID NO: 739071 - RNA, 19 nt, Artificial Sequence
  Description of Artificial Sequence: Synthetic oligonucleotide
  Antisense strand to SEQ ID NO: 739070
uauacugacuucaagacau

SEQ ID NO: 739072 - RNA, 19 nt, Artificial Sequence
  Description of Artificial Sequence: Synthetic oligonucleotide
  Sense strand starting at position 3137 of SEQ ID NO: 586718
ucuugaagucaguauauau

SEQ ID NO: 739073 - RNA, 19 nt, Artificial Sequence
  Description of Artificial Sequence: Synthetic oligonucleotide
  Antisense strand to SEQ ID NO: 739072
auauauacugacuucaaga

SEQ ID NO: 739074 - RNA, 19 nt, Artificial Sequence
  Description of Artificial Sequence: Synthetic oligonucleotide
  Sense strand starting at position 3227 of SEQ ID NO: 586718
ggcacucaccaauguagua

SEQ ID NO: 739075 - RNA, 19 nt, Artificial Sequence
  Description of Artificial Sequence: Synthetic oligonucleotide
  Antisense strand to SEQ ID NO: 739074
uacuacauuggugagugcc

SEQ ID NO: 739076 - RNA, 19 nt, Artificial Sequence
  Description of Artificial Sequence: Synthetic oligonucleotide
  Sense strand starting at position 3853 of SEQ ID NO: 586718
ucuauaaaugaccguuguu

SEQ ID NO: 739077 - RNA, 19 nt, Artificial Sequence
  Description of Artificial Sequence: Synthetic oligonucleotide
  Antisense strand to SEQ ID NO: 739076
aacaacggucauuuauaga

SEQ ID NO: 739078 - RNA, 19 nt, Artificial Sequence
  Description of Artificial Sequence: Synthetic oligonucleotide
  Sense strand starting at position 3856 of SEQ ID NO: 586718
auaaaugaccguuguucua

SEQ ID NO: 739079 - RNA, 19 nt, Artificial Sequence
  Description of Artificial Sequence: Synthetic oligonucleotide
  Antisense strand to SEQ ID NO: 739078
uagaacaacggucauuuau

SEQ ID NO: 739080 - RNA, 19 nt, Artificial Sequence
  Description of Artificial Sequence: Synthetic oligonucleotide
  Sense strand starting at position 3898 of SEQ ID NO: 586718
guaggauucugauuauaau

SEQ ID NO: 739081 - RNA, 19 nt, Artificial Sequence
  Description of Artificial Sequence: Synthetic oligonucleotide
  Antisense strand to SEQ ID NO: 739080
auuauaaucagaauccuac

SEQ ID NO: 739082 - RNA, 19 nt, Artificial Sequence
  Description of Artificial Sequence: Synthetic oligonucleotide
  Sense strand starting at position 3917 of SEQ ID NO: 586718
gugggcuuuguuuauggua

SEQ ID NO: 739083 - RNA, 19 nt, Artificial Sequence
  Description of Artificial Sequence: Synthetic oligonucleotide
  Antisense strand to SEQ ID NO: 739082
uaccauaaacaaagcccac

SEQ ID NO: 739084 - RNA, 19 nt, Artificial Sequence
  Description of Artificial Sequence: Synthetic oligonucleotide
  Sense strand starting at position 3965 of SEQ ID NO: 586718
ugcaaucuuugaguugaau

SEQ ID NO: 739085 - RNA, 19 nt, Artificial Sequence
  Description of Artificial Sequence: Synthetic oligonucleotide
  Antisense strand to SEQ ID NO: 739084
auucaacucaaagauugca

SEQ ID NO: 739086 - RNA, 19 nt, Artificial Sequence
  Description of Artificial Sequence: Synthetic oligonucleotide
  Sense strand starting at position 3973 of SEQ ID NO: 586718
uugaguugaauuugcaguu

SEQ ID NO: 739087 - RNA, 19 nt, Artificial Sequence
  Description of Artificial Sequence: Synthetic oligonucleotide
  Antisense strand to SEQ ID NO: 739086
aacugcaaauucaacucaa

SEQ ID NO: 739088 - RNA, 19 nt, Artificial Sequence
  Description of Artificial Sequence: Synthetic oligonucleotide
  Sense strand starting at position 58 of SEQ ID NO: 586719
uaguauaggcguuagaaug

SEQ ID NO: 739089 - RNA, 19 nt, Artificial Sequence
  Description of Artificial Sequence: Synthetic oligonucleotide
  Antisense strand to SEQ ID NO: 739088
cauucuaacgccuauacua

SEQ ID NO: 739090 - RNA, 19 nt, Artificial Sequence
  Description of Artificial Sequence: Synthetic oligonucleotide
  Sense strand starting at position 64 of SEQ ID NO: 586719
aggcguuagaaugaaauau

SEQ ID NO: 739091 - RNA, 19 nt, Artificial Sequence
  Description of Artificial Sequence: Synthetic oligonucleotide
  Antisense strand to SEQ ID NO: 739090
auauuucauucuaacgccu

SEQ ID NO: 739092 - RNA, 19 nt, Artificial Sequence
  Description of Artificial Sequence: Synthetic oligonucleotide
  Sense strand starting at position 85 of SEQ ID NO: 586719
cuugaaucuuaugcuggaa

SEQ ID NO: 739093 - RNA, 19 nt, Artificial Sequence
  Description of Artificial Sequence: Synthetic oligonucleotide
  Antisense strand to SEQ ID NO: 739092
uuccagcauaagauucaag

SEQ ID NO: 739094 - RNA, 19 nt, Artificial Sequence
  Description of Artificial Sequence: Synthetic oligonucleotide
  Sense strand starting at position 102 of SEQ ID NO: 586719
aaaucacaugggugauauu

SEQ ID NO: 739095 - RNA, 19 nt, Artificial Sequence
  Description of Artificial Sequence: Synthetic oligonucleotide
  Antisense strand to SEQ ID NO: 739094
aauaucacccaugugauuu

SEQ ID NO: 739096 - RNA, 19 nt, Artificial Sequence
  Description of Artificial Sequence: Synthetic oligonucleotide
  Sense strand starting at position 144 of SEQ ID NO: 586719
cucacuggccuccagaaua

SEQ ID NO: 739097 - RNA, 19 nt, Artificial Sequence
  Description of Artificial Sequence: Synthetic oligonucleotide
  Antisense strand to SEQ ID NO: 739096
uauucuggaggccagugag

SEQ ID NO: 739098 - RNA, 19 nt, Artificial Sequence
  Description of Artificial Sequence: Synthetic oligonucleotide
  Sense strand starting at position 886 of SEQ ID NO: 586719
cacacuauugugggauaua

SEQ ID NO: 739099 - RNA, 19 nt, Artificial Sequence
  Description of Artificial Sequence: Synthetic oligonucleotide
  Antisense strand to SEQ ID NO: 739098
uauaucccacaauagugug

SEQ ID NO: 739100 - RNA, 19 nt, Artificial Sequence
  Description of Artificial Sequence: Synthetic oligonucleotide
  Sense strand starting at position 889 of SEQ ID NO: 586719
acuauugugggauauaggu

SEQ ID NO: 739101 - RNA, 19 nt, Artificial Sequence
  Description of Artificial Sequence: Synthetic oligonucleotide
  Antisense strand to SEQ ID NO: 739100
accuauaucccacaauagu

SEQ ID NO: 739102 - RNA, 19 nt, Artificial Sequence
  Description of Artificial Sequence: Synthetic oligonucleotide
  Sense strand starting at position 895 of SEQ ID NO: 586719
gugggauauagguaaucuu

SEQ ID NO: 739103 - RNA, 19 nt, Artificial Sequence
  Description of Artificial Sequence: Synthetic oligonucleotide
  Antisense strand to SEQ ID NO: 739102
aagauuaccuauaucccac

SEQ ID NO: 739104 - RNA, 19 nt, Artificial Sequence
  Description of Artificial Sequence: Synthetic oligonucleotide
  Sense strand starting at position 898 of SEQ ID NO: 586719
ggauauagguaaucuucuu

SEQ ID NO: 739105 - RNA, 19 nt, Artificial Sequence
  Description of Artificial Sequence: Synthetic oligonucleotide
  Antisense strand to SEQ ID NO: 739104
aagaagauuaccuauaucc

SEQ ID NO: 739106 - RNA, 19 nt, Artificial Sequence
  Description of Artificial Sequence: Synthetic oligonucleotide
  Sense strand starting at position 995 of SEQ ID NO: 586719
auggaaauguuagagauuu

SEQ ID NO: 739107 - RNA, 19 nt, Artificial Sequence
  Description of Artificial Sequence: Synthetic oligonucleotide
  Antisense strand to SEQ ID NO: 739106
aaaucucuaacauuuccau

SEQ ID NO: 739108 - RNA, 19 nt, Artificial Sequence
  Description of Artificial Sequence: Synthetic oligonucleotide
  Sense strand starting at position 1138 of SEQ ID NO: 586719
aggugagucagucauauua

SEQ ID NO: 739109 - RNA, 19 nt, Artificial Sequence
  Description of Artificial Sequence: Synthetic oligonucleotide
  Antisense strand to SEQ ID NO: 739108
uaauaugacugacucaccu

SEQ ID NO: 739110 - RNA, 19 nt, Artificial Sequence
  Description of Artificial Sequence: Synthetic oligonucleotide
  Sense strand starting at position 1253 of SEQ ID NO: 586719
ccagguuuaacugacguau

SEQ ID NO: 739111 - RNA, 19 nt, Artificial Sequence
  Description of Artificial Sequence: Synthetic oligonucleotide
  Antisense strand to SEQ ID NO: 739110
auacgucaguuaaaccugg

SEQ ID NO: 739112 - RNA, 19 nt, Artificial Sequence
  Description of Artificial Sequence: Synthetic oligonucleotide
  Sense strand starting at position 1257 of SEQ ID NO: 586719
guuuaacugacguauaaug

SEQ ID NO: 739113 - RNA, 19 nt, Artificial Sequence
  Description of Artificial Sequence: Synthetic oligonucleotide
  Antisense strand to SEQ ID NO: 739112
cauuauacgucaguuaaac

SEQ ID NO: 739114 - RNA, 19 nt, Artificial Sequence
  Description of Artificial Sequence: Synthetic oligonucleotide
  Sense strand starting at position 1268 of SEQ ID NO: 586719
guauaaugaaugcauguga

SEQ ID NO: 739115 - RNA, 19 nt, Artificial Sequence
  Description of Artificial Sequence: Synthetic oligonucleotide
  Antisense strand to SEQ ID NO: 739114
ucacaugcauucauuauac

SEQ ID NO: 739116 - RNA, 19 nt, Artificial Sequence
  Description of Artificial Sequence: Synthetic oligonucleotide
  Sense strand starting at position 1298 of SEQ ID NO: 586719
auggaagaguaucuaccau

SEQ ID NO: 739117 - RNA, 19 nt, Artificial Sequence
  Description of Artificial Sequence: Synthetic oligonucleotide
  Antisense strand to SEQ ID NO: 739116
augguagauacucuuccau

SEQ ID NO: 739118 - RNA, 19 nt, Artificial Sequence
  Description of Artificial Sequence: Synthetic oligonucleotide
  Sense strand starting at position 1304 of SEQ ID NO: 586719
gaguaucuaccauaucgag

SEQ ID NO: 739119 - RNA, 19 nt, Artificial Sequence
  Description of Artificial Sequence: Synthetic oligonucleotide
  Antisense strand to SEQ ID NO: 739118
cucgauaugguagauacuc

SEQ ID NO: 739120 - RNA, 19 nt, Artificial Sequence
  Description of Artificial Sequence: Synthetic oligonucleotide
  Sense strand starting at position 1388 of SEQ ID NO: 586719
cugaauacguguucugaaa

SEQ ID NO: 739121 - RNA, 19 nt, Artificial Sequence
  Description of Artificial Sequence: Synthetic oligonucleotide
  Antisense strand to SEQ ID NO: 739120
uuucagaacacguauucag

SEQ ID NO: 739122 - RNA, 19 nt, Artificial Sequence
  Description of Artificial Sequence: Synthetic oligonucleotide
  Sense strand starting at position 1622 of SEQ ID NO: 586719
caauaaguugcucggagga

SEQ ID NO: 739123 - RNA, 19 nt, Artificial Sequence
  Description of Artificial Sequence: Synthetic oligonucleotide
  Antisense strand to SEQ ID NO: 739122
uccuccgagcaacuuauug

SEQ ID NO: 739124 - RNA, 19 nt, Artificial Sequence
  Description of Artificial Sequence: Synthetic oligonucleotide
  Sense strand starting at position 1636 of SEQ ID NO: 586719
gaggaaguugucgacccau

SEQ ID NO: 739125 - RNA, 19 nt, Artificial Sequence
  Description of Artificial Sequence: Synthetic oligonucleotide
  Antisense strand to SEQ ID NO: 739124
augggucgacaacuuccuc

SEQ ID NO: 739126 - RNA, 19 nt, Artificial Sequence
  Description of Artificial Sequence: Synthetic oligonucleotide
  Sense strand starting at position 1691 of SEQ ID NO: 586719
guauuccuaucagugaaga

SEQ ID NO: 739127 - RNA, 19 nt, Artificial Sequence
  Description of Artificial Sequence: Synthetic oligonucleotide
  Antisense strand to SEQ ID NO: 739126
ucuucacugauaggaauac

SEQ ID NO: 739128 - RNA, 19 nt, Artificial Sequence
  Description of Artificial Sequence: Synthetic oligonucleotide
  Sense strand starting at position 1877 of SEQ ID NO: 586719
gcggcaucuccgagaugag

SEQ ID NO: 739129 - RNA, 19 nt, Artificial Sequence
  Description of Artificial Sequence: Synthetic oligonucleotide
  Antisense strand to SEQ ID NO: 739128
cucaucucggagaugccgc

SEQ ID NO: 739130 - RNA, 19 nt, Artificial Sequence
  Description of Artificial Sequence: Synthetic oligonucleotide
  Sense strand starting at position 1932 of SEQ ID NO: 586719
cuccacuucgccgaagaau

SEQ ID NO: 739131 - RNA, 19 nt, Artificial Sequence
  Description of Artificial Sequence: Synthetic oligonucleotide
  Antisense strand to SEQ ID NO: 739130
auucuucggcgaaguggag

SEQ ID NO: 739132 - RNA, 19 nt, Artificial Sequence
  Description of Artificial Sequence: Synthetic oligonucleotide
  Sense strand starting at position 2380 of SEQ ID NO: 586719
gggucacucccuuauuaug

SEQ ID NO: 739133 - RNA, 19 nt, Artificial Sequence
  Description of Artificial Sequence: Synthetic oligonucleotide
  Antisense strand to SEQ ID NO: 739132
cauaauaagggagugaccc

SEQ ID NO: 739134 - RNA, 19 nt, Artificial Sequence
  Description of Artificial Sequence: Synthetic oligonucleotide
  Sense strand starting at position 2488 of SEQ ID NO: 586719
cgccgaagccaucuuggua

SEQ ID NO: 739135 - RNA, 19 nt, Artificial Sequence
  Description of Artificial Sequence: Synthetic oligonucleotide
  Antisense strand to SEQ ID NO: 739134
uaccaagauggcuucggcg

SEQ ID NO: 739136 - RNA, 19 nt, Artificial Sequence
  Description of Artificial Sequence: Synthetic oligonucleotide
  Sense strand starting at position 2765 of SEQ ID NO: 586719
gauccugguagcgaagaaa

SEQ ID NO: 739137 - RNA, 19 nt, Artificial Sequence
  Description of Artificial Sequence: Synthetic oligonucleotide
  Antisense strand to SEQ ID NO: 739136
uuucuucgcuaccaggauc

SEQ ID NO: 739138 - RNA, 19 nt, Artificial Sequence
  Description of Artificial Sequence: Synthetic oligonucleotide
  Sense strand starting at position 2804 of SEQ ID NO: 586719
uuguacaguacguauugaa

SEQ ID NO: 739139 - RNA, 19 nt, Artificial Sequence
  Description of Artificial Sequence: Synthetic oligonucleotide
  Antisense strand to SEQ ID NO: 739138
uucaauacguacuguacaa

SEQ ID NO: 739140 - RNA, 19 nt, Artificial Sequence
  Description of Artificial Sequence: Synthetic oligonucleotide
  Sense strand starting at position 2952 of SEQ ID NO: 586719
auacgauugugauucugag

SEQ ID NO: 739141 - RNA, 19 nt, Artificial Sequence
  Description of Artificial Sequence: Synthetic oligonucleotide
  Antisense strand to SEQ ID NO: 739140
cucagaaucacaaucguau

SEQ ID NO: 739142 - RNA, 19 nt, Artificial Sequence
  Description of Artificial Sequence: Synthetic oligonucleotide
  Sense strand starting at position 2998 of SEQ ID NO: 586719
gcagaaugaaauuaguugu

SEQ ID NO: 739143 - RNA, 19 nt, Artificial Sequence
  Description of Artificial Sequence: Synthetic oligonucleotide
  Antisense strand to SEQ ID NO: 739142
acaacuaauuucauucugc

SEQ ID NO: 739144 - RNA, 19 nt, Artificial Sequence
  Description of Artificial Sequence: Synthetic oligonucleotide
  Sense strand starting at position 3001 of SEQ ID NO: 586719
gaaugaaauuaguuguuuc

SEQ ID NO: 739145 - RNA, 19 nt, Artificial Sequence
  Description of Artificial Sequence: Synthetic oligonucleotide
  Antisense strand to SEQ ID NO: 739144
gaaacaacuaauuucauuc

SEQ ID NO: 739146 - RNA, 19 nt, Artificial Sequence
  Description of Artificial Sequence: Synthetic oligonucleotide
  Sense strand starting at position 3180 of SEQ ID NO: 586719
gcagauaagacuggcagaa

SEQ ID NO: 739147 - RNA, 19 nt, Artificial Sequence
  Description of Artificial Sequence: Synthetic oligonucleotide
  Antisense strand to SEQ ID NO: 739146
uucugccagucuuaucugc

SEQ ID NO: 739148 - RNA, 19 nt, Artificial Sequence
  Description of Artificial Sequence: Synthetic oligonucleotide
  Sense strand starting at position 3241 of SEQ ID NO: 586719
cugugugacauuggaggaa

SEQ ID NO: 739149 - RNA, 19 nt, Artificial Sequence
  Description of Artificial Sequence: Synthetic oligonucleotide
  Antisense strand to SEQ ID NO: 739148
uuccuccaaugucacacag

SEQ ID NO: 739150 - RNA, 19 nt, Artificial Sequence
  Description of Artificial Sequence: Synthetic oligonucleotide
  Sense strand starting at position 3243 of SEQ ID NO: 586719
gugugacauuggaggaaug

SEQ ID NO: 739151 - RNA, 19 nt, Artificial Sequence
  Description of Artificial Sequence: Synthetic oligonucleotide
  Antisense strand to SEQ ID NO: 739150
cauuccuccaaugucacac

SEQ ID NO: 739152 - RNA, 19 nt, Artificial Sequence
  Description of Artificial Sequence: Synthetic oligonucleotide
  Sense strand starting at position 3260 of SEQ ID NO: 586719
uguaaagaacuguauguca

SEQ ID NO: 739153 - RNA, 19 nt, Artificial Sequence
  Description of Artificial Sequence: Synthetic oligonucleotide
  Antisense strand to SEQ ID NO: 739152
ugacauacaguucuuuaca

SEQ ID NO: 739154 - RNA, 19 nt, Artificial Sequence
  Description of Artificial Sequence: Synthetic oligonucleotide
  Sense strand starting at position 3262 of SEQ ID NO: 586719
uaaagaacuguaugucaag

SEQ ID NO: 739155 - RNA, 19 nt, Artificial Sequence
  Description of Artificial Sequence: Synthetic oligonucleotide
  Antisense strand to SEQ ID NO: 739154
cuugacauacaguucuuua

SEQ ID NO: 739156 - RNA, 19 nt, Artificial Sequence
  Description of Artificial Sequence: Synthetic oligonucleotide
  Sense strand starting at position 3263 of SEQ ID NO: 586719
aaagaacuguaugucaagu

SEQ ID NO: 739157 - RNA, 19 nt, Artificial Sequence
  Description of Artificial Sequence: Synthetic oligonucleotide
  Antisense strand to SEQ ID NO: 739156
acuugacauacaguucuuu

SEQ ID NO: 739158 - RNA, 19 nt, Artificial Sequence
  Description of Artificial Sequence: Synthetic oligonucleotide
  Sense strand starting at position 3318 of SEQ ID NO: 586719
gcugaacuuaagggugauu

SEQ ID NO: 739159 - RNA, 19 nt, Artificial Sequence
  Description of Artificial Sequence: Synthetic oligonucleotide
  Antisense strand to SEQ ID NO: 739158
aaucacccuuaaguucagc

SEQ ID NO: 739160 - RNA, 19 nt, Artificial Sequence
  Description of Artificial Sequence: Synthetic oligonucleotide
  Sense strand starting at position 3386 of SEQ ID NO: 586719
accuuugugcaacagaaga

SEQ ID NO: 739161 - RNA, 19 nt, Artificial Sequence
  Description of Artificial Sequence: Synthetic oligonucleotide
  Antisense strand to SEQ ID NO: 739160
ucuucuguugcacaaaggu

SEQ ID NO: 739162 - RNA, 19 nt, Artificial Sequence
  Description of Artificial Sequence: Synthetic oligonucleotide
  Sense strand starting at position 3473 of SEQ ID NO: 586719
cauaguguucuugacuaag

SEQ ID NO: 739163 - RNA, 19 nt, Artificial Sequence
  Description of Artificial Sequence: Synthetic oligonucleotide
  Antisense strand to SEQ ID NO: 739162
cuuagucaagaacacuaug

SEQ ID NO: 739164 - RNA, 19 nt, Artificial Sequence
  Description of Artificial Sequence: Synthetic oligonucleotide
  Sense strand starting at position 3476 of SEQ ID NO: 586719
aguguucuugacuaagcaa

SEQ ID NO: 739165 - RNA, 19 nt, Artificial Sequence
  Description of Artificial Sequence: Synthetic oligonucleotide
  Antisense strand to SEQ ID NO: 739164
uugcuuagucaagaacacu

SEQ ID NO: 739166 - RNA, 19 nt, Artificial Sequence
  Description of Artificial Sequence: Synthetic oligonucleotide
  Sense strand starting at position 3529 of SEQ ID NO: 586719
gcaggagaauccuuagagc

SEQ ID NO: 739167 - RNA, 19 nt, Artificial Sequence
  Description of Artificial Sequence: Synthetic oligonucleotide
  Antisense strand to SEQ ID NO: 739166
gcucuaaggauucuccugc

SEQ ID NO: 739168 - RNA, 19 nt, Artificial Sequence
  Description of Artificial Sequence: Synthetic oligonucleotide
  Sense strand starting at position 242 of SEQ ID NO: 586720
agggcacugucagaaaugu

SEQ ID NO: 739169 - RNA, 19 nt, Artificial Sequence
  Description of Artificial Sequence: Synthetic oligonucleotide
  Antisense strand to SEQ ID NO: 739168
acauuucugacagugcccu

SEQ ID NO: 739170 - RNA, 19 nt, Artificial Sequence
  Description of Artificial Sequence: Synthetic oligonucleotide
  Sense strand starting at position 251 of SEQ ID NO: 586720
ucagaaauguaguccaggu

SEQ ID NO: 739171 - RNA, 19 nt, Artificial Sequence
  Description of Artificial Sequence: Synthetic oligonucleotide
  Antisense strand to SEQ ID NO: 739170
accuggacuacauuucuga

SEQ ID NO: 739172 - RNA, 19 nt, Artificial Sequence
  Description of Artificial Sequence: Synthetic oligonucleotide
  Sense strand starting at position 253 of SEQ ID NO: 586720
agaaauguaguccagguau

SEQ ID NO: 739173 - RNA, 19 nt, Artificial Sequence
  Description of Artificial Sequence: Synthetic oligonucleotide
  Antisense strand to SEQ ID NO: 739172
auaccuggacuacauuucu

SEQ ID NO: 739174 - RNA, 19 nt, Artificial Sequence
  Description of Artificial Sequence: Synthetic oligonucleotide
  Sense strand starting at position 255 of SEQ ID NO: 586720
aaauguaguccagguaucu

SEQ ID NO: 739175 - RNA, 19 nt, Artificial Sequence
  Description of Artificial Sequence: Synthetic oligonucleotide
  Antisense strand to SEQ ID NO: 739174
agauaccuggacuacauuu

SEQ ID NO: 739176 - RNA, 19 nt, Artificial Sequence
  Description of Artificial Sequence: Synthetic oligonucleotide
  Sense strand starting at position 264 of SEQ ID NO: 586720
ccagguaucuccuggacca

SEQ ID NO: 739177 - RNA, 19 nt, Artificial Sequence
  Description of Artificial Sequence: Synthetic oligonucleotide
  Antisense strand to SEQ ID NO: 739176
ugguccaggagauaccugg

SEQ ID NO: 739178 - RNA, 19 nt, Artificial Sequence
  Description of Artificial Sequence: Synthetic oligonucleotide
  Sense strand starting at position 265 of SEQ ID NO: 586720
cagguaucuccuggaccaa

SEQ ID NO: 739179 - RNA, 19 nt, Artificial Sequence
  Description of Artificial Sequence: Synthetic oligonucleotide
  Antisense strand to SEQ ID NO: 739178
uugguccaggagauaccug

SEQ ID NO: 739180 - RNA, 19 nt, Artificial Sequence
  Description of Artificial Sequence: Synthetic oligonucleotide
  Sense strand starting at position 726 of SEQ ID NO: 586720
ggugaucagagucauagcu

SEQ ID NO: 739181 - RNA, 19 nt, Artificial Sequence
  Description of Artificial Sequence: Synthetic oligonucleotide
  Antisense strand to SEQ ID NO: 739180
agcuaugacucugaucacc

SEQ ID NO: 739182 - RNA, 19 nt, Artificial Sequence
  Description of Artificial Sequence: Synthetic oligonucleotide
  Sense strand starting at position 734 of SEQ ID NO: 586720
gagucauagcugggcauga

SEQ ID NO: 739183 - RNA, 19 nt, Artificial Sequence
  Description of Artificial Sequence: Synthetic oligonucleotide
  Antisense strand to SEQ ID NO: 739182
ucaugcccagcuaugacuc

SEQ ID NO: 739184 - RNA, 19 nt, Artificial Sequence
  Description of Artificial Sequence: Synthetic oligonucleotide
  Sense strand starting at position 735 of SEQ ID NO: 586720
agucauagcugggcaugau

SEQ ID NO: 739185 - RNA, 19 nt, Artificial Sequence
  Description of Artificial Sequence: Synthetic oligonucleotide
  Antisense strand to SEQ ID NO: 739184
aucaugcccagcuaugacu

SEQ ID NO: 739186 - RNA, 19 nt, Artificial Sequence
  Description of Artificial Sequence: Synthetic oligonucleotide
  Sense strand starting at position 754 of SEQ ID NO: 586720
cggagucagagcugggaau

SEQ ID NO: 739187 - RNA, 19 nt, Artificial Sequence
  Description of Artificial Sequence: Synthetic oligonucleotide
  Antisense strand to SEQ ID NO: 739186
auucccagcucugacuccg

SEQ ID NO: 739188 - RNA, 19 nt, Artificial Sequence
  Description of Artificial Sequence: Synthetic oligonucleotide
  Sense strand starting at position 821 of SEQ ID NO: 586720
cugaaauaucgaugcccuu

SEQ ID NO: 739189 - RNA, 19 nt, Artificial Sequence
  Description of Artificial Sequence: Synthetic oligonucleotide
  Antisense strand to SEQ ID NO: 739188
aagggcaucgauauuucag

SEQ ID NO: 739190 - RNA, 19 nt, Artificial Sequence
  Description of Artificial Sequence: Synthetic oligonucleotide
  Sense strand starting at position 931 of SEQ ID NO: 586720
gcacaaagcgcccaaagau

SEQ ID NO: 739191 - RNA, 19 nt, Artificial Sequence
  Description of Artificial Sequence: Synthetic oligonucleotide
  Antisense strand to SEQ ID NO: 739190
aucuuugggcgcuuugugc

SEQ ID NO: 739192 - RNA, 19 nt, Artificial Sequence
  Description of Artificial Sequence: Synthetic oligonucleotide
  Sense strand starting at position 2256 of SEQ ID NO: 586720
gguguugcuggcuuaguua

SEQ ID NO: 739193 - RNA, 19 nt, Artificial Sequence
  Description of Artificial Sequence: Synthetic oligonucleotide
  Antisense strand to SEQ ID NO: 739192
uaacuaagccagcaacacc

SEQ ID NO: 739194 - RNA, 19 nt, Artificial Sequence
  Description of Artificial Sequence: Synthetic oligonucleotide
  Sense strand starting at position 3290 of SEQ ID NO: 586720
uaaauaaagugagaucaga

SEQ ID NO: 739195 - RNA, 19 nt, Artificial Sequence
  Description of Artificial Sequence: Synthetic oligonucleotide
  Antisense strand to SEQ ID NO: 739194
ucugaucucacuuuauuua

SEQ ID NO: 739196 - RNA, 19 nt, Artificial Sequence
  Description of Artificial Sequence: Synthetic oligonucleotide
  Sense strand starting at position 3336 of SEQ ID NO: 586720
ccaggaaagugauggacaa

SEQ ID NO: 739197 - RNA, 19 nt, Artificial Sequence
  Description of Artificial Sequence: Synthetic oligonucleotide
  Antisense strand to SEQ ID NO: 739196
uuguccaucacuuuccugg

SEQ ID NO: 739198 - RNA, 19 nt, Artificial Sequence
  Description of Artificial Sequence: Synthetic oligonucleotide
  Sense strand starting at position 3369 of SEQ ID NO: 586720
uguaaacugcuuuggagau

SEQ ID NO: 739199 - RNA, 19 nt, Artificial Sequence
  Description of Artificial Sequence: Synthetic oligonucleotide
  Antisense strand to SEQ ID NO: 739198
aucuccaaagcaguuuaca

SEQ ID NO: 739200 - RNA, 19 nt, Artificial Sequence
  Description of Artificial Sequence: Synthetic oligonucleotide
  Sense strand starting at position 3691 of SEQ ID NO: 586720
ggccgaugcagggaauaau

SEQ ID NO: 739201 - RNA, 19 nt, Artificial Sequence
  Description of Artificial Sequence: Synthetic oligonucleotide
  Antisense strand to SEQ ID NO: 739200
auuauucccugcaucggcc

SEQ ID NO: 739202 - RNA, 19 nt, Artificial Sequence
  Description of Artificial Sequence: Synthetic oligonucleotide
  Sense strand starting at position 3831 of SEQ ID NO: 586720
ucuuuacuuuccgagguga

SEQ ID NO: 739203 - RNA, 19 nt, Artificial Sequence
  Description of Artificial Sequence: Synthetic oligonucleotide
  Antisense strand to SEQ ID NO: 739202
ucaccucggaaaguaaaga

SEQ ID NO: 739204 - RNA, 19 nt, Artificial Sequence
  Description of Artificial Sequence: Synthetic oligonucleotide
  Sense strand starting at position 3833 of SEQ ID NO: 586720
uuuacuuuccgaggugaua

SEQ ID NO: 739205 - RNA, 19 nt, Artificial Sequence
  Description of Artificial Sequence: Synthetic oligonucleotide
  Antisense strand to SEQ ID NO: 739204
uaucaccucggaaaguaaa

SEQ ID NO: 739206 - RNA, 19 nt, Artificial Sequence
  Description of Artificial Sequence: Synthetic oligonucleotide
  Sense strand starting at position 3865 of SEQ ID NO: 586720
gcaaacugaucccauugga

SEQ ID NO: 739207 - RNA, 19 nt, Artificial Sequence
  Description of Artificial Sequence: Synthetic oligonucleotide
  Antisense strand to SEQ ID NO: 739206
uccaaugggaucaguuugc

SEQ ID NO: 739208 - RNA, 19 nt, Artificial Sequence
  Description of Artificial Sequence: Synthetic oligonucleotide
  Sense strand starting at position 3868 of SEQ ID NO: 586720
aacugaucccauuggaugu

SEQ ID NO: 739209 - RNA, 19 nt, Artificial Sequence
  Description of Artificial Sequence: Synthetic oligonucleotide
  Antisense strand to SEQ ID NO: 739208
acauccaaugggaucaguu

SEQ ID NO: 739210 - RNA, 19 nt, Artificial Sequence
  Description of Artificial Sequence: Synthetic oligonucleotide
  Sense strand starting at position 3900 of SEQ ID NO: 586720
gaaggaaggucauguuccu

SEQ ID NO: 739211 - RNA, 19 nt, Artificial Sequence
  Description of Artificial Sequence: Synthetic oligonucleotide
  Antisense strand to SEQ ID NO: 739210
aggaacaugaccuuccuuc

SEQ ID NO: 739212 - RNA, 19 nt, Artificial Sequence
  Description of Artificial Sequence: Synthetic oligonucleotide
  Sense strand starting at position 3905 of SEQ ID NO: 586720
aaggucauguuccuggaau

SEQ ID NO: 739213 - RNA, 19 nt, Artificial Sequence
  Description of Artificial Sequence: Synthetic oligonucleotide
  Antisense strand to SEQ ID NO: 739212
auuccaggaacaugaccuu

SEQ ID NO: 739214 - RNA, 19 nt, Artificial Sequence
  Description of Artificial Sequence: Synthetic oligonucleotide
  Sense strand starting at position 3906 of SEQ ID NO: 586720
aggucauguuccuggaauc

SEQ ID NO: 739215 - RNA, 19 nt, Artificial Sequence
  Description of Artificial Sequence: Synthetic oligonucleotide
  Antisense strand to SEQ ID NO: 739214
gauuccaggaacaugaccu

SEQ ID NO: 739216 - RNA, 19 nt, Artificial Sequence
  Description of Artificial Sequence: Synthetic oligonucleotide
  Sense strand starting at position 3937 of SEQ ID NO: 586720
auuccaaccgaggguuaaa

SEQ ID NO: 739217 - RNA, 19 nt, Artificial Sequence
  Description of Artificial Sequence: Synthetic oligonucleotide
  Antisense strand to SEQ ID NO: 739216
uuuaacccucgguuggaau

SEQ ID NO: 739218 - RNA, 19 nt, Artificial Sequence
  Description of Artificial Sequence: Synthetic oligonucleotide
  Sense strand starting at position 3 of SEQ ID NO: 586721
aacagugaagucuggucau

SEQ ID NO: 739219 - RNA, 19 nt, Artificial Sequence
  Description of Artificial Sequence: Synthetic oligonucleotide
  Antisense strand to SEQ ID NO: 739218
augaccagacuucacuguu

SEQ ID NO: 739220 - RNA, 19 nt, Artificial Sequence
  Description of Artificial Sequence: Synthetic oligonucleotide
  Sense strand starting at position 6 of SEQ ID NO: 586721
agugaagucuggucaucuc

SEQ ID NO: 739221 - RNA, 19 nt, Artificial Sequence
  Description of Artificial Sequence: Synthetic oligonucleotide
  Antisense strand to SEQ ID NO: 739220
gagaugaccagacuucacu

SEQ ID NO: 739222 - RNA, 19 nt, Artificial Sequence
  Description of Artificial Sequence: Synthetic oligonucleotide
  Sense strand starting at position 9 of SEQ ID NO: 586721
gaagucuggucaucucauu

SEQ ID NO: 739223 - RNA, 19 nt, Artificial Sequence
  Description of Artificial Sequence: Synthetic oligonucleotide
  Antisense strand to SEQ ID NO: 739222
aaugagaugaccagacuuc

SEQ ID NO: 739224 - RNA, 19 nt, Artificial Sequence
  Description of Artificial Sequence: Synthetic oligonucleotide
  Sense strand starting at position 39 of SEQ ID NO: 586721
auggcugaacuaugaacua

SEQ ID NO: 739225 - RNA, 19 nt, Artificial Sequence
  Description of Artificial Sequence: Synthetic oligonucleotide
  Antisense strand to SEQ ID NO: 739224
uaguucauaguucagccau

SEQ ID NO: 739226 - RNA, 19 nt, Artificial Sequence
  Description of Artificial Sequence: Synthetic oligonucleotide
  Sense strand starting at position 158 of SEQ ID NO: 586721
cuuagauauguuuagcgau

SEQ ID NO: 739227 - RNA, 19 nt, Artificial Sequence
  Description of Artificial Sequence: Synthetic oligonucleotide
  Antisense strand to SEQ ID NO: 739226
aucgcuaaacauaucuaag

SEQ ID NO: 739228 - RNA, 19 nt, Artificial Sequence
  Description of Artificial Sequence: Synthetic oligonucleotide
  Sense strand starting at position 166 of SEQ ID NO: 586721
uguuuagcgaugcaaauac

SEQ ID NO: 739229 - RNA, 19 nt, Artificial Sequence
  Description of Artificial Sequence: Synthetic oligonucleotide
  Antisense strand to SEQ ID NO: 739228
guauuugcaucgcuaaaca

SEQ ID NO: 739230 - RNA, 19 nt, Artificial Sequence
  Description of Artificial Sequence: Synthetic oligonucleotide
  Sense strand starting at position 341 of SEQ ID NO: 586721
gugucucccucuuuaaauc

SEQ ID NO: 739231 - RNA, 19 nt, Artificial Sequence
  Description of Artificial Sequence: Synthetic oligonucleotide
  Antisense strand to SEQ ID NO: 739230
gauuuaaagagggagacac

SEQ ID NO: 739232 - RNA, 19 nt, Artificial Sequence
  Description of Artificial Sequence: Synthetic oligonucleotide
  Sense strand starting at position 563 of SEQ ID NO: 586721
uuucuuguuugcucuauuu

SEQ ID NO: 739233 - RNA, 19 nt, Artificial Sequence
  Description of Artificial Sequence: Synthetic oligonucleotide
  Antisense strand to SEQ ID NO: 739232
aaauagagcaaacaagaaa

SEQ ID NO: 739234 - RNA, 19 nt, Artificial Sequence
  Description of Artificial Sequence: Synthetic oligonucleotide
  Sense strand starting at position 584 of SEQ ID NO: 586721
aaguguaccucuuuggcau

SEQ ID NO: 739235 - RNA, 19 nt, Artificial Sequence
  Description of Artificial Sequence: Synthetic oligonucleotide
  Antisense strand to SEQ ID NO: 739234
augccaaagagguacacuu

SEQ ID NO: 739236 - RNA, 19 nt, Artificial Sequence
  Description of Artificial Sequence: Synthetic oligonucleotide
  Sense strand starting at position 596 of SEQ ID NO: 586721
uuggcauguuaguccaacu

SEQ ID NO: 739237 - RNA, 19 nt, Artificial Sequence
  Description of Artificial Sequence: Synthetic oligonucleotide
  Antisense strand to SEQ ID NO: 739236
aguuggacuaacaugccaa

SEQ ID NO: 739238 - RNA, 19 nt, Artificial Sequence
  Description of Artificial Sequence: Synthetic oligonucleotide
  Sense strand starting at position 730 of SEQ ID NO: 586721
ggcaauauuccauguuucu

SEQ ID NO: 739239 - RNA, 19 nt, Artificial Sequence
  Description of Artificial Sequence: Synthetic oligonucleotide
  Antisense strand to SEQ ID NO: 739238
agaaacauggaauauugcc

SEQ ID NO: 739240 - RNA, 19 nt, Artificial Sequence
  Description of Artificial Sequence: Synthetic oligonucleotide
  Sense strand starting at position 750 of SEQ ID NO: 586721
guaccauaugugcauaaga

SEQ ID NO: 739241 - RNA, 19 nt, Artificial Sequence
  Description of Artificial Sequence: Synthetic oligonucleotide
  Antisense strand to SEQ ID NO: 739240
ucuuaugcacauaugguac

SEQ ID NO: 739242 - RNA, 19 nt, Artificial Sequence
  Description of Artificial Sequence: Synthetic oligonucleotide
  Sense strand starting at position 806 of SEQ ID NO: 586721
ggagucaucucaccaucca

SEQ ID NO: 739243 - RNA, 19 nt, Artificial Sequence
  Description of Artificial Sequence: Synthetic oligonucleotide
  Antisense strand to SEQ ID NO: 739242
uggauggugagaugacucc

SEQ ID NO: 739244 - RNA, 19 nt, Artificial Sequence
  Description of Artificial Sequence: Synthetic oligonucleotide
  Sense strand starting at position 823 of SEQ ID NO: 586721
caguuaucaguccgaagag

SEQ ID NO: 739245 - RNA, 19 nt, Artificial Sequence
  Description of Artificial Sequence: Synthetic oligonucleotide
  Antisense strand to SEQ ID NO: 739244
cucuucggacugauaacug

SEQ ID NO: 739246 - RNA, 19 nt, Artificial Sequence
  Description of Artificial Sequence: Synthetic oligonucleotide
  Sense strand starting at position 895 of SEQ ID NO: 586721
agaagaaaucccuguuacc

SEQ ID NO: 739247 - RNA, 19 nt, Artificial Sequence
  Description of Artificial Sequence: Synthetic oligonucleotide
  Antisense strand to SEQ ID NO: 739246
gguaacagggauuucuucu

SEQ ID NO: 739248 - RNA, 19 nt, Artificial Sequence
  Description of Artificial Sequence: Synthetic oligonucleotide
  Sense strand starting at position 1004 of SEQ ID NO: 586721
gacugaugucucugaggac

SEQ ID NO: 739249 - RNA, 19 nt, Artificial Sequence
  Description of Artificial Sequence: Synthetic oligonucleotide
  Antisense strand to SEQ ID NO: 739248
guccucagagacaucaguc

SEQ ID NO: 739250 - RNA, 19 nt, Artificial Sequence
  Description of Artificial Sequence: Synthetic oligonucleotide
  Sense strand starting at position 2739 of SEQ ID NO: 586721
uaauuugugucagcgaaua

SEQ ID NO: 739251 - RNA, 19 nt, Artificial Sequence
  Description of Artificial Sequence: Synthetic oligonucleotide
  Antisense strand to SEQ ID NO: 739250
uauucgcugacacaaauua

SEQ ID NO: 739252 - RNA, 19 nt, Artificial Sequence
  Description of Artificial Sequence: Synthetic oligonucleotide
  Sense strand starting at position 2878 of SEQ ID NO: 586721
gcuugagaugucuagagug

SEQ ID NO: 739253 - RNA, 19 nt, Artificial Sequence
  Description of Artificial Sequence: Synthetic oligonucleotide
  Antisense strand to SEQ ID NO: 739252
cacucuagacaucucaagc

SEQ ID NO: 739254 - RNA, 19 nt, Artificial Sequence
  Description of Artificial Sequence: Synthetic oligonucleotide
  Sense strand starting at position 2880 of SEQ ID NO: 586721
uugagaugucuagaguggu

SEQ ID NO: 739255 - RNA, 19 nt, Artificial Sequence
  Description of Artificial Sequence: Synthetic oligonucleotide
  Antisense strand to SEQ ID NO: 739254
accacucuagacaucucaa

SEQ ID NO: 739256 - RNA, 19 nt, Artificial Sequence
  Description of Artificial Sequence: Synthetic oligonucleotide
  Sense strand starting at position 2883 of SEQ ID NO: 586721
agaugucuagagugguauc

SEQ ID NO: 739257 - RNA, 19 nt, Artificial Sequence
  Description of Artificial Sequence: Synthetic oligonucleotide
  Antisense strand to SEQ ID NO: 739256
gauaccacucuagacaucu

SEQ ID NO: 739258 - RNA, 19 nt, Artificial Sequence
  Description of Artificial Sequence: Synthetic oligonucleotide
  Sense strand starting at position 2884 of SEQ ID NO: 586721
gaugucuagagugguaucu

SEQ ID NO: 739259 - RNA, 19 nt, Artificial Sequence
  Description of Artificial Sequence: Synthetic oligonucleotide
  Antisense strand to SEQ ID NO: 739258
agauaccacucuagacauc

SEQ ID NO: 739260 - RNA, 19 nt, Artificial Sequence
  Description of Artificial Sequence: Synthetic oligonucleotide
  Sense strand starting at position 2923 of SEQ ID NO: 586721
gccagaggucuuggcgaga

SEQ ID NO: 739261 - RNA, 19 nt, Artificial Sequence
  Description of Artificial Sequence: Synthetic oligonucleotide
  Antisense strand to SEQ ID NO: 739260
ucucgccaagaccucuggc

SEQ ID NO: 739262 - RNA, 19 nt, Artificial Sequence
  Description of Artificial Sequence: Synthetic oligonucleotide
  Sense strand starting at position 2928 of SEQ ID NO: 586721
aggucuuggcgagauugaa

SEQ ID NO: 739263 - RNA, 19 nt, Artificial Sequence
  Description of Artificial Sequence: Synthetic oligonucleotide
  Antisense strand to SEQ ID NO: 739262
uucaaucucgccaagaccu

SEQ ID NO: 739264 - RNA, 19 nt, Artificial Sequence
  Description of Artificial Sequence: Synthetic oligonucleotide
  Sense strand starting at position 3008 of SEQ ID NO: 586721
cuuguaaauuucuagugac

SEQ ID NO: 739265 - RNA, 19 nt, Artificial Sequence
  Description of Artificial Sequence: Synthetic oligonucleotide
  Antisense strand to SEQ ID NO: 739264
gucacuagaaauuuacaag

SEQ ID NO: 739266 - RNA, 19 nt, Artificial Sequence
  Description of Artificial Sequence: Synthetic oligonucleotide
  Sense strand starting at position 3175 of SEQ ID NO: 586721
ggaagcuugcaacagugaa

SEQ ID NO: 739267 - RNA, 19 nt, Artificial Sequence
  Description of Artificial Sequence: Synthetic oligonucleotide
  Antisense strand to SEQ ID NO: 739266
uucacuguugcaagcuucc

SEQ ID NO: 739268 - RNA, 19 nt, Artificial Sequence
  Description of Artificial Sequence: Synthetic oligonucleotide
  Sense strand starting at position 3261 of SEQ ID NO: 586721
acagguggccgauaucuaa

SEQ ID NO: 739269 - RNA, 19 nt, Artificial Sequence
  Description of Artificial Sequence: Synthetic oligonucleotide
  Antisense strand to SEQ ID NO: 739268
uuagauaucggccaccugu

SEQ ID NO: 739270 - RNA, 19 nt, Artificial Sequence
  Description of Artificial Sequence: Synthetic oligonucleotide
  Sense strand starting at position 3265 of SEQ ID NO: 586721
guggccgauaucuaacauu

SEQ ID NO: 739271 - RNA, 19 nt, Artificial Sequence
  Description of Artificial Sequence: Synthetic oligonucleotide
  Antisense strand to SEQ ID NO: 739270
aauguuagauaucggccac

SEQ ID NO: 739272 - RNA, 19 nt, Artificial Sequence
  Description of Artificial Sequence: Synthetic oligonucleotide
  Sense strand starting at position 3462 of SEQ ID NO: 586721
uuugcaagacacgguuauu

SEQ ID NO: 739273 - RNA, 19 nt, Artificial Sequence
  Description of Artificial Sequence: Synthetic oligonucleotide
  Antisense strand to SEQ ID NO: 739272
aauaaccgugucuugcaaa

SEQ ID NO: 739274 - RNA, 19 nt, Artificial Sequence
  Description of Artificial Sequence: Synthetic oligonucleotide
  Sense strand starting at position 3630 of SEQ ID NO: 586721
gguuuccacuuccugagua

SEQ ID NO: 739275 - RNA, 19 nt, Artificial Sequence
  Description of Artificial Sequence: Synthetic oligonucleotide
  Antisense strand to SEQ ID NO: 739274
uacucaggaaguggaaacc

SEQ ID NO: 739276 - RNA, 19 nt, Artificial Sequence
  Description of Artificial Sequence: Synthetic oligonucleotide
  Sense strand starting at position 3634 of SEQ ID NO: 586721
uccacuuccugaguaggaa

SEQ ID NO: 739277 - RNA, 19 nt, Artificial Sequence
  Description of Artificial Sequence: Synthetic oligonucleotide
  Antisense strand to SEQ ID NO: 739276
uuccuacucaggaagugga

SEQ ID NO: 739278 - RNA, 19 nt, Artificial Sequence
  Description of Artificial Sequence: Synthetic oligonucleotide
  Sense strand starting at position 3637 of SEQ ID NO: 586721
acuuccugaguaggaauaa

SEQ ID NO: 739279 - RNA, 19 nt, Artificial Sequence
  Description of Artificial Sequence: Synthetic oligonucleotide
  Antisense strand to SEQ ID NO: 739278
uuauuccuacucaggaagu

SEQ ID NO: 739280 - RNA, 19 nt, Artificial Sequence
  Description of Artificial Sequence: Synthetic oligonucleotide
  Sense strand starting at position 3723 of SEQ ID NO: 586721
gcuggugaccuuugacaag

SEQ ID NO: 739281 - RNA, 19 nt, Artificial Sequence
  Description of Artificial Sequence: Synthetic oligonucleotide
  Antisense strand to SEQ ID NO: 739280
cuugucaaaggucaccagc

SEQ ID NO: 739282 - RNA, 19 nt, Artificial Sequence
  Description of Artificial Sequence: Synthetic oligonucleotide
  Sense strand starting at position 3817 of SEQ ID NO: 586721
uguuaugaggccuaaaugu

SEQ ID NO: 739283 - RNA, 19 nt, Artificial Sequence
  Description of Artificial Sequence: Synthetic oligonucleotide
  Antisense strand to SEQ ID NO: 739282
acauuuaggccucauaaca

SEQ ID NO: 739284 - RNA, 19 nt, Artificial Sequence
  Description of Artificial Sequence: Synthetic oligonucleotide
  Sense strand starting at position 3824 of SEQ ID NO: 586721
aggccuaaaugucuguaua

SEQ ID NO: 739285 - RNA, 19 nt, Artificial Sequence
  Description of Artificial Sequence: Synthetic oligonucleotide
  Antisense strand to SEQ ID NO: 739284
uauacagacauuuaggccu

SEQ ID NO: 739286 - RNA, 19 nt, Artificial Sequence
  Description of Artificial Sequence: Synthetic oligonucleotide
  Sense strand starting at position 3825 of SEQ ID NO: 586721
ggccuaaaugucuguauaa

SEQ ID NO: 739287 - RNA, 19 nt, Artificial Sequence
  Description of Artificial Sequence: Synthetic oligonucleotide
  Antisense strand to SEQ ID NO: 739286
uuauacagacauuuaggcc

SEQ ID NO: 739288 - RNA, 19 nt, Artificial Sequence
  Description of Artificial Sequence: Synthetic oligonucleotide
  Sense strand starting at position 3826 of SEQ ID NO: 586721
gccuaaaugucuguauaau

SEQ ID NO: 739289 - RNA, 19 nt, Artificial Sequence
  Description of Artificial Sequence: Synthetic oligonucleotide
  Antisense strand to SEQ ID NO: 739288
auuauacagacauuuaggc

SEQ ID NO: 739290 - RNA, 19 nt, Artificial Sequence
  Description of Artificial Sequence: Synthetic oligonucleotide
  Sense strand starting at position 3827 of SEQ ID NO: 586721
ccuaaaugucuguauaaug

SEQ ID NO: 739291 - RNA, 19 nt, Artificial Sequence
  Description of Artificial Sequence: Synthetic oligonucleotide
  Antisense strand to SEQ ID NO: 739290
cauuauacagacauuuagg

SEQ ID NO: 739292 - RNA, 19 nt, Artificial Sequence
  Description of Artificial Sequence: Synthetic oligonucleotide
  Sense strand starting at position 3836 of SEQ ID NO: 586721
cuguauaaugcagagcuca

SEQ ID NO: 739293 - RNA, 19 nt, Artificial Sequence
  Description of Artificial Sequence: Synthetic oligonucleotide
  Antisense strand to SEQ ID NO: 739292
ugagcucugcauuauacag

SEQ ID NO: 739294 - RNA, 19 nt, Artificial Sequence
  Description of Artificial Sequence: Synthetic oligonucleotide
  Sense strand starting at position 3878 of SEQ ID NO: 586721
aggccuaaaugucuaugua

SEQ ID NO: 739295 - RNA, 19 nt, Artificial Sequence
  Description of Artificial Sequence: Synthetic oligonucleotide
  Antisense strand to SEQ ID NO: 739294
uacauagacauuuaggccu

SEQ ID NO: 739296 - RNA, 19 nt, Artificial Sequence
  Description of Artificial Sequence: Synthetic oligonucleotide
  Sense strand starting at position 3881 of SEQ ID NO: 586721
ccuaaaugucuauguagug

SEQ ID NO: 739297 - RNA, 19 nt, Artificial Sequence
  Description of Artificial Sequence: Synthetic oligonucleotide
  Antisense strand to SEQ ID NO: 739296
cacuacauagacauuuagg

SEQ ID NO: 739298 - RNA, 19 nt, Artificial Sequence
  Description of Artificial Sequence: Synthetic oligonucleotide
  Sense strand starting at position 325 of SEQ ID NO: 586723
ugccgagaaccaugauuau

SEQ ID NO: 739299 - RNA, 19 nt, Artificial Sequence
  Description of Artificial Sequence: Synthetic oligonucleotide
  Antisense strand to SEQ ID NO: 739298
auaaucaugguucucggca

SEQ ID NO: 739300 - RNA, 19 nt, Artificial Sequence
  Description of Artificial Sequence: Synthetic oligonucleotide
  Sense strand starting at position 496 of SEQ ID NO: 586723
gaacuuauuguaugacugu

SEQ ID NO: 739301 - RNA, 19 nt, Artificial Sequence
  Description of Artificial Sequence: Synthetic oligonucleotide
  Antisense strand to SEQ ID NO: 739300
acagucauacaauaaguuc

SEQ ID NO: 739302 - RNA, 19 nt, Artificial Sequence
  Description of Artificial Sequence: Synthetic oligonucleotide
  Sense strand starting at position 499 of SEQ ID NO: 586723
cuuauuguaugacuguaaa

SEQ ID NO: 739303 - RNA, 19 nt, Artificial Sequence
  Description of Artificial Sequence: Synthetic oligonucleotide
  Antisense strand to SEQ ID NO: 739302
uuuacagucauacaauaag

SEQ ID NO: 739304 - RNA, 19 nt, Artificial Sequence
  Description of Artificial Sequence: Synthetic oligonucleotide
  Sense strand starting at position 502 of SEQ ID NO: 586723
auuguaugacuguaaaugu

SEQ ID NO: 739305 - RNA, 19 nt, Artificial Sequence
  Description of Artificial Sequence: Synthetic oligonucleotide
  Antisense strand to SEQ ID NO: 739304
acauuuacagucauacaau

SEQ ID NO: 739306 - RNA, 19 nt, Artificial Sequence
  Description of Artificial Sequence: Synthetic oligonucleotide
  Sense strand starting at position 542 of SEQ ID NO: 586723
auguuaucgcccuacagag

SEQ ID NO: 739307 - RNA, 19 nt, Artificial Sequence
  Description of Artificial Sequence: Synthetic oligonucleotide
  Antisense strand to SEQ ID NO: 739306
cucuguagggcgauaacau

SEQ ID NO: 739308 - RNA, 19 nt, Artificial Sequence
  Description of Artificial Sequence: Synthetic oligonucleotide
  Sense strand starting at position 635 of SEQ ID NO: 586723
ugaacaaugccagacgcaa

SEQ ID NO: 739309 - RNA, 19 nt, Artificial Sequence
  Description of Artificial Sequence: Synthetic oligonucleotide
  Antisense strand to SEQ ID NO: 739308
uugcgucuggcauuguuca

SEQ ID NO: 739310 - RNA, 19 nt, Artificial Sequence
  Description of Artificial Sequence: Synthetic oligonucleotide
  Sense strand starting at position 849 of SEQ ID NO: 586723
uagaucuuacauugaggua

SEQ ID NO: 739311 - RNA, 19 nt, Artificial Sequence
  Description of Artificial Sequence: Synthetic oligonucleotide
  Antisense strand to SEQ ID NO: 739310
uaccucaauguaagaucua

SEQ ID NO: 739312 - RNA, 19 nt, Artificial Sequence
  Description of Artificial Sequence: Synthetic oligonucleotide
  Sense strand starting at position 875 of SEQ ID NO: 586723
uuauaacuguguucuaaag

SEQ ID NO: 739313 - RNA, 19 nt, Artificial Sequence
  Description of Artificial Sequence: Synthetic oligonucleotide
  Antisense strand to SEQ ID NO: 739312
cuuuagaacacaguuauaa

SEQ ID NO: 739314 - RNA, 19 nt, Artificial Sequence
  Description of Artificial Sequence: Synthetic oligonucleotide
  Sense strand starting at position 919 of SEQ ID NO: 586723
uuaagaugacucugguuua

SEQ ID NO: 739315 - RNA, 19 nt, Artificial Sequence
  Description of Artificial Sequence: Synthetic oligonucleotide
  Antisense strand to SEQ ID NO: 739314
uaaaccagagucaucuuaa

SEQ ID NO: 739316 - RNA, 19 nt, Artificial Sequence
  Description of Artificial Sequence: Synthetic oligonucleotide
  Sense strand starting at position 922 of SEQ ID NO: 586723
agaugacucugguuuaagu

SEQ ID NO: 739317 - RNA, 19 nt, Artificial Sequence
  Description of Artificial Sequence: Synthetic oligonucleotide
  Antisense strand to SEQ ID NO: 739316
acuuaaaccagagucaucu

SEQ ID NO: 739318 - RNA, 19 nt, Artificial Sequence
  Description of Artificial Sequence: Synthetic oligonucleotide
  Sense strand starting at position 950 of SEQ ID NO: 586723
uuuaauguggagcaaauua

SEQ ID NO: 739319 - RNA, 19 nt, Artificial Sequence
  Description of Artificial Sequence: Synthetic oligonucleotide
  Antisense strand to SEQ ID NO: 739318
uaauuugcuccacauuaaa

SEQ ID NO: 739320 - RNA, 19 nt, Artificial Sequence
  Description of Artificial Sequence: Synthetic oligonucleotide
  Sense strand starting at position 960 of SEQ ID NO: 586723
agcaaauuauagguacauu

SEQ ID NO: 739321 - RNA, 19 nt, Artificial Sequence
  Description of Artificial Sequence: Synthetic oligonucleotide
  Antisense strand to SEQ ID NO: 739320
aauguaccuauaauuugcu

SEQ ID NO: 739322 - RNA, 19 nt, Artificial Sequence
  Description of Artificial Sequence: Synthetic oligonucleotide
  Sense strand starting at position 1810 of SEQ ID NO: 586723
gagagcggucacgaacuua

SEQ ID NO: 739323 - RNA, 19 nt, Artificial Sequence
  Description of Artificial Sequence: Synthetic oligonucleotide
  Antisense strand to SEQ ID NO: 739322
uaaguucgugaccgcucuc

SEQ ID NO: 739324 - RNA, 19 nt, Artificial Sequence
  Description of Artificial Sequence: Synthetic oligonucleotide
  Sense strand starting at position 1882 of SEQ ID NO: 586723
gaggucuccgacuggaaag

SEQ ID NO: 739325 - RNA, 19 nt, Artificial Sequence
  Description of Artificial Sequence: Synthetic oligonucleotide
  Antisense strand to SEQ ID NO: 739324
cuuuccagucggagaccuc

SEQ ID NO: 739326 - RNA, 19 nt, Artificial Sequence
  Description of Artificial Sequence: Synthetic oligonucleotide
  Sense strand starting at position 2187 of SEQ ID NO: 586723
ggacucuucgauugaccag

SEQ ID NO: 739327 - RNA, 19 nt, Artificial Sequence
  Description of Artificial Sequence: Synthetic oligonucleotide
  Antisense strand to SEQ ID NO: 739326
cuggucaaucgaagagucc

SEQ ID NO: 739328 - RNA, 19 nt, Artificial Sequence
  Description of Artificial Sequence: Synthetic oligonucleotide
  Sense strand starting at position 2558 of SEQ ID NO: 586723
cuggcaguguauuucugaa

SEQ ID NO: 739329 - RNA, 19 nt, Artificial Sequence
  Description of Artificial Sequence: Synthetic oligonucleotide
  Antisense strand to SEQ ID NO: 739328
uucagaaauacacugccag

SEQ ID NO: 739330 - RNA, 19 nt, Artificial Sequence
  Description of Artificial Sequence: Synthetic oligonucleotide
  Sense strand starting at position 2943 of SEQ ID NO: 586723
uuacacuagcucugaagga

SEQ ID NO: 739331 - RNA, 19 nt, Artificial Sequence
  Description of Artificial Sequence: Synthetic oligonucleotide
  Antisense strand to SEQ ID NO: 739330
uccuucagagcuaguguaa

SEQ ID NO: 739332 - RNA, 19 nt, Artificial Sequence
  Description of Artificial Sequence: Synthetic oligonucleotide
  Sense strand starting at position 3011 of SEQ ID NO: 586723
gagguaauaacacgugaag

SEQ ID NO: 739333 - RNA, 19 nt, Artificial Sequence
  Description of Artificial Sequence: Synthetic oligonucleotide
  Antisense strand to SEQ ID NO: 739332
cuucacguguuauuaccuc

SEQ ID NO: 739334 - RNA, 19 nt, Artificial Sequence
  Description of Artificial Sequence: Synthetic oligonucleotide
  Sense strand starting at position 3182 of SEQ ID NO: 586723
aaaugauugcuuugugaau

SEQ ID NO: 739335 - RNA, 19 nt, Artificial Sequence
  Description of Artificial Sequence: Synthetic oligonucleotide
  Antisense strand to SEQ ID NO: 739334
auucacaaagcaaucauuu

SEQ ID NO: 739336 - RNA, 19 nt, Artificial Sequence
  Description of Artificial Sequence: Synthetic oligonucleotide
  Sense strand starting at position 3183 of SEQ ID NO: 586723
aaugauugcuuugugaaua

SEQ ID NO: 739337 - RNA, 19 nt, Artificial Sequence
  Description of Artificial Sequence: Synthetic oligonucleotide
  Antisense strand to SEQ ID NO: 739336
uauucacaaagcaaucauu

SEQ ID NO: 739338 - RNA, 19 nt, Artificial Sequence
  Description of Artificial Sequence: Synthetic oligonucleotide
  Sense strand starting at position 3188 of SEQ ID NO: 586723
uugcuuugugaauaauuga

SEQ ID NO: 739339 - RNA, 19 nt, Artificial Sequence
  Description of Artificial Sequence: Synthetic oligonucleotide
  Antisense strand to SEQ ID NO: 739338
ucaauuauucacaaagcaa

SEQ ID NO: 739340 - RNA, 19 nt, Artificial Sequence
  Description of Artificial Sequence: Synthetic oligonucleotide
  Sense strand starting at position 3198 of SEQ ID NO: 586723
aauaauugauuagaaggga

SEQ ID NO: 739341 - RNA, 19 nt, Artificial Sequence
  Description of Artificial Sequence: Synthetic oligonucleotide
  Antisense strand to SEQ ID NO: 739340
ucccuucuaaucaauuauu

SEQ ID NO: 739342 - RNA, 19 nt, Artificial Sequence
  Description of Artificial Sequence: Synthetic oligonucleotide
  Sense strand starting at position 3261 of SEQ ID NO: 586723
uccauaaucugugugacag

SEQ ID NO: 739343 - RNA, 19 nt, Artificial Sequence
  Description of Artificial Sequence: Synthetic oligonucleotide
  Antisense strand to SEQ ID NO: 739342
cugucacacagauuaugga

SEQ ID NO: 739344 - RNA, 19 nt, Artificial Sequence
  Description of Artificial Sequence: Synthetic oligonucleotide
  Sense strand starting at position 3262 of SEQ ID NO: 586723
ccauaaucugugugacaga

SEQ ID NO: 739345 - RNA, 19 nt, Artificial Sequence
  Description of Artificial Sequence: Synthetic oligonucleotide
  Antisense strand to SEQ ID NO: 739344
ucugucacacagauuaugg

SEQ ID NO: 739346 - RNA, 19 nt, Artificial Sequence
  Description of Artificial Sequence: Synthetic oligonucleotide
  Sense strand starting at position 3269 of SEQ ID NO: 586723
cugugugacagauaauggu

SEQ ID NO: 739347 - RNA, 19 nt, Artificial Sequence
  Description of Artificial Sequence: Synthetic oligonucleotide
  Antisense strand to SEQ ID NO: 739346
accauuaucugucacacag

SEQ ID NO: 739348 - RNA, 19 nt, Artificial Sequence
  Description of Artificial Sequence: Synthetic oligonucleotide
  Sense strand starting at position 3278 of SEQ ID NO: 586723
agauaaugguagcuugaac

SEQ ID NO: 739349 - RNA, 19 nt, Artificial Sequence
  Description of Artificial Sequence: Synthetic oligonucleotide
  Antisense strand to SEQ ID NO: 739348
guucaagcuaccauuaucu

SEQ ID NO: 739350 - RNA, 19 nt, Artificial Sequence
  Description of Artificial Sequence: Synthetic oligonucleotide
  Sense strand starting at position 3297 of SEQ ID NO: 586723
uaguguagagaauguaaug

SEQ ID NO: 739351 - RNA, 19 nt, Artificial Sequence
  Description of Artificial Sequence: Synthetic oligonucleotide
  Antisense strand to SEQ ID NO: 739350
cauuacauucucuacacua

SEQ ID NO: 739352 - RNA, 19 nt, Artificial Sequence
  Description of Artificial Sequence: Synthetic oligonucleotide
  Sense strand starting at position 3445 of SEQ ID NO: 586723
guugaugccaguuauugaa

SEQ ID NO: 739353 - RNA, 19 nt, Artificial Sequence
  Description of Artificial Sequence: Synthetic oligonucleotide
  Antisense strand to SEQ ID NO: 739352
uucaauaacuggcaucaac

SEQ ID NO: 739354 - RNA, 19 nt, Artificial Sequence
  Description of Artificial Sequence: Synthetic oligonucleotide
  Sense strand starting at position 3447 of SEQ ID NO: 586723
ugaugccaguuauugaaau

SEQ ID NO: 739355 - RNA, 19 nt, Artificial Sequence
  Description of Artificial Sequence: Synthetic oligonucleotide
  Antisense strand to SEQ ID NO: 739354
auuucaauaacuggcauca

SEQ ID NO: 739356 - RNA, 19 nt, Artificial Sequence
  Description of Artificial Sequence: Synthetic oligonucleotide
  Sense strand starting at position 3468 of SEQ ID NO: 586723
gccguagagaaugauguau

SEQ ID NO: 739357 - RNA, 19 nt, Artificial Sequence
  Description of Artificial Sequence: Synthetic oligonucleotide
  Antisense strand to SEQ ID NO: 739356
auacaucauucucuacggc

SEQ ID NO: 739358 - RNA, 19 nt, Artificial Sequence
  Description of Artificial Sequence: Synthetic oligonucleotide
  Sense strand starting at position 3556 of SEQ ID NO: 586723
ggacucaguuuacugauaa

SEQ ID NO: 739359 - RNA, 19 nt, Artificial Sequence
  Description of Artificial Sequence: Synthetic oligonucleotide
  Antisense strand to SEQ ID NO: 739358
uuaucaguaaacugagucc

SEQ ID NO: 739360 - RNA, 19 nt, Artificial Sequence
  Description of Artificial Sequence: Synthetic oligonucleotide
  Sense strand starting at position 3581 of SEQ ID NO: 586723
aacccaugugacugaauga

SEQ ID NO: 739361 - RNA, 19 nt, Artificial Sequence
  Description of Artificial Sequence: Synthetic oligonucleotide
  Antisense strand to SEQ ID NO: 739360
ucauucagucacauggguu

SEQ ID NO: 739362 - RNA, 19 nt, Artificial Sequence
  Description of Artificial Sequence: Synthetic oligonucleotide
  Sense strand starting at position 3616 of SEQ ID NO: 586723
aaaguugacugagaauuua

SEQ ID NO: 739363 - RNA, 19 nt, Artificial Sequence
  Description of Artificial Sequence: Synthetic oligonucleotide
  Antisense strand to SEQ ID NO: 739362
uaaauucucagucaacuuu

SEQ ID NO: 739364 - RNA, 19 nt, Artificial Sequence
  Description of Artificial Sequence: Synthetic oligonucleotide
  Sense strand starting at position 3664 of SEQ ID NO: 586723
acaugcaaugcuuagaaga

SEQ ID NO: 739365 - RNA, 19 nt, Artificial Sequence
  Description of Artificial Sequence: Synthetic oligonucleotide
  Antisense strand to SEQ ID NO: 739364
ucuucuaagcauugcaugu

SEQ ID NO: 739366 - RNA, 19 nt, Artificial Sequence
  Description of Artificial Sequence: Synthetic oligonucleotide
  Sense strand starting at position 3713 of SEQ ID NO: 586723
aauagaugguaacuguuaa

SEQ ID NO: 739367 - RNA, 19 nt, Artificial Sequence
  Description of Artificial Sequence: Synthetic oligonucleotide
  Antisense strand to SEQ ID NO: 739366
uuaacaguuaccaucuauu

SEQ ID NO: 739368 - RNA, 19 nt, Artificial Sequence
  Description of Artificial Sequence: Synthetic oligonucleotide
  Sense strand starting at position 3723 of SEQ ID NO: 586723
aacuguuaaggugauaugu

SEQ ID NO: 739369 - RNA, 19 nt, Artificial Sequence
  Description of Artificial Sequence: Synthetic oligonucleotide
  Antisense strand to SEQ ID NO: 739368
acauaucaccuuaacaguu

SEQ ID NO: 739370 - RNA, 19 nt, Artificial Sequence
  Description of Artificial Sequence: Synthetic oligonucleotide
  Sense strand starting at position 3733 of SEQ ID NO: 586723
gugauaugucaugaagcuu

SEQ ID NO: 739371 - RNA, 19 nt, Artificial Sequence
  Description of Artificial Sequence: Synthetic oligonucleotide
  Antisense strand to SEQ ID NO: 739370
aagcuucaugacauaucac

SEQ ID NO: 739372 - RNA, 19 nt, Artificial Sequence
  Description of Artificial Sequence: Synthetic oligonucleotide
  Sense strand starting at position 3739 of SEQ ID NO: 586723
ugucaugaagcuuaucaag

SEQ ID NO: 739373 - RNA, 19 nt, Artificial Sequence
  Description of Artificial Sequence: Synthetic oligonucleotide
  Antisense strand to SEQ ID NO: 739372
cuugauaagcuucaugaca

SEQ ID NO: 739374 - RNA, 19 nt, Artificial Sequence
  Description of Artificial Sequence: Synthetic oligonucleotide
  Sense strand starting at position 3741 of SEQ ID NO: 586723
ucaugaagcuuaucaagac

SEQ ID NO: 739375 - RNA, 19 nt, Artificial Sequence
  Description of Artificial Sequence: Synthetic oligonucleotide
  Antisense strand to SEQ ID NO: 739374
gucuugauaagcuucauga

SEQ ID NO: 739376 - RNA, 19 nt, Artificial Sequence
  Description of Artificial Sequence: Synthetic oligonucleotide
  Sense strand starting at position 3745 of SEQ ID NO: 586723
gaagcuuaucaagacuggu

SEQ ID NO: 739377 - RNA, 19 nt, Artificial Sequence
  Description of Artificial Sequence: Synthetic oligonucleotide
  Antisense strand to SEQ ID NO: 739376
accagucuugauaagcuuc

SEQ ID NO: 739378 - RNA, 19 nt, Artificial Sequence
  Description of Artificial Sequence: Synthetic oligonucleotide
  Sense strand starting at position 47 of SEQ ID NO: 586724
agcauugagaggcaguuaa

SEQ ID NO: 739379 - RNA, 19 nt, Artificial Sequence
  Description of Artificial Sequence: Synthetic oligonucleotide
  Antisense strand to SEQ ID NO: 739378
uuaacugccucucaaugcu

SEQ ID NO: 739380 - RNA, 19 nt, Artificial Sequence
  Description of Artificial Sequence: Synthetic oligonucleotide
  Sense strand starting at position 62 of SEQ ID NO: 586724
uuaagaagugaaugcaauu

SEQ ID NO: 739381 - RNA, 19 nt, Artificial Sequence
  Description of Artificial Sequence: Synthetic oligonucleotide
  Antisense strand to SEQ ID NO: 739380
aauugcauucacuucuuaa

SEQ ID NO: 739382 - RNA, 19 nt, Artificial Sequence
  Description of Artificial Sequence: Synthetic oligonucleotide
  Sense strand starting at position 196 of SEQ ID NO: 586724
acaaauguggaguguaaga

SEQ ID NO: 739383 - RNA, 19 nt, Artificial Sequence
  Description of Artificial Sequence: Synthetic oligonucleotide
  Antisense strand to SEQ ID NO: 739382
ucuuacacuccacauuugu

SEQ ID NO: 739384 - RNA, 19 nt, Artificial Sequence
  Description of Artificial Sequence: Synthetic oligonucleotide
  Sense strand starting at position 242 of SEQ ID NO: 586724
aguuucugaccugagucaa

SEQ ID NO: 739385 - RNA, 19 nt, Artificial Sequence
  Description of Artificial Sequence: Synthetic oligonucleotide
  Antisense strand to SEQ ID NO: 739384
uugacucaggucagaaacu

SEQ ID NO: 739386 - RNA, 19 nt, Artificial Sequence
  Description of Artificial Sequence: Synthetic oligonucleotide
  Sense strand starting at position 266 of SEQ ID NO: 586724
uugagcugccauuaauuga

SEQ ID NO: 739387 - RNA, 19 nt, Artificial Sequence
  Description of Artificial Sequence: Synthetic oligonucleotide
  Antisense strand to SEQ ID NO: 739386
ucaauuaauggcagcucaa

SEQ ID NO: 739388 - RNA, 19 nt, Artificial Sequence
  Description of Artificial Sequence: Synthetic oligonucleotide
  Sense strand starting at position 383 of SEQ ID NO: 586724
agagaugcccacuaagcaa

SEQ ID NO: 739389 - RNA, 19 nt, Artificial Sequence
  Description of Artificial Sequence: Synthetic oligonucleotide
  Antisense strand to SEQ ID NO: 739388
uugcuuagugggcaucucu

SEQ ID NO: 739390 - RNA, 19 nt, Artificial Sequence
  Description of Artificial Sequence: Synthetic oligonucleotide
  Sense strand starting at position 436 of SEQ ID NO: 586724
agugcuuuacauggaaauc

SEQ ID NO: 739391 - RNA, 19 nt, Artificial Sequence
  Description of Artificial Sequence: Synthetic oligonucleotide
  Antisense strand to SEQ ID NO: 739390
gauuuccauguaaagcacu

SEQ ID NO: 739392 - RNA, 19 nt, Artificial Sequence
  Description of Artificial Sequence: Synthetic oligonucleotide
  Sense strand starting at position 461 of SEQ ID NO: 586724
caguguauaggugguauuu

SEQ ID NO: 739393 - RNA, 19 nt, Artificial Sequence
  Description of Artificial Sequence: Synthetic oligonucleotide
  Antisense strand to SEQ ID NO: 739392
aaauaccaccuauacacug

SEQ ID NO: 739394 - RNA, 19 nt, Artificial Sequence
  Description of Artificial Sequence: Synthetic oligonucleotide
  Sense strand starting at position 483 of SEQ ID NO: 586724
accguucucuauuuggauu

SEQ ID NO: 739395 - RNA, 19 nt, Artificial Sequence
  Description of Artificial Sequence: Synthetic oligonucleotide
  Antisense strand to SEQ ID NO: 739394
aauccaaauagagaacggu

SEQ ID NO: 739396 - RNA, 19 nt, Artificial Sequence
  Description of Artificial Sequence: Synthetic oligonucleotide
  Sense strand starting at position 651 of SEQ ID NO: 586724
aguccugaagcccaguaaa

SEQ ID NO: 739397 - RNA, 19 nt, Artificial Sequence
  Description of Artificial Sequence: Synthetic oligonucleotide
  Antisense strand to SEQ ID NO: 739396
uuuacugggcuucaggacu

SEQ ID NO: 739398 - RNA, 19 nt, Artificial Sequence
  Description of Artificial Sequence: Synthetic oligonucleotide
  Sense strand starting at position 838 of SEQ ID NO: 586724
cugcuauuaggucaaugaa

SEQ ID NO: 739399 - RNA, 19 nt, Artificial Sequence
  Description of Artificial Sequence: Synthetic oligonucleotide
  Antisense strand to SEQ ID NO: 739398
uucauugaccuaauagcag

SEQ ID NO: 739400 - RNA, 19 nt, Artificial Sequence
  Description of Artificial Sequence: Synthetic oligonucleotide
  Sense strand starting at position 841 of SEQ ID NO: 586724
cuauuaggucaaugaaggu

SEQ ID NO: 739401 - RNA, 19 nt, Artificial Sequence
  Description of Artificial Sequence: Synthetic oligonucleotide
  Antisense strand to SEQ ID NO: 739400
accuucauugaccuaauag

SEQ ID NO: 739402 - RNA, 19 nt, Artificial Sequence
  Description of Artificial Sequence: Synthetic oligonucleotide
  Sense strand starting at position 927 of SEQ ID NO: 586724
ggugacugagugcauucaa

SEQ ID NO: 739403 - RNA, 19 nt, Artificial Sequence
  Description of Artificial Sequence: Synthetic oligonucleotide
  Antisense strand to SEQ ID NO: 739402
uugaaugcacucagucacc

SEQ ID NO: 739404 - RNA, 19 nt, Artificial Sequence
  Description of Artificial Sequence: Synthetic oligonucleotide
  Sense strand starting at position 988 of SEQ ID NO: 586724
uugaguuaucuguaaagug

SEQ ID NO: 739405 - RNA, 19 nt, Artificial Sequence
  Description of Artificial Sequence: Synthetic oligonucleotide
  Antisense strand to SEQ ID NO: 739404
cacuuuacagauaacucaa

SEQ ID NO: 739406 - RNA, 19 nt, Artificial Sequence
  Description of Artificial Sequence: Synthetic oligonucleotide
  Sense strand starting at position 1011 of SEQ ID NO: 586724
aaagaaauggugugauuau

SEQ ID NO: 739407 - RNA, 19 nt, Artificial Sequence
  Description of Artificial Sequence: Synthetic oligonucleotide
  Antisense strand to SEQ ID NO: 739406
auaaucacaccauuucuuu

SEQ ID NO: 739408 - RNA, 19 nt, Artificial Sequence
  Description of Artificial Sequence: Synthetic oligonucleotide
  Sense strand starting at position 1292 of SEQ ID NO: 586724
gcuuaauaaagaggucaug

SEQ ID NO: 739409 - RNA, 19 nt, Artificial Sequence
  Description of Artificial Sequence: Synthetic oligonucleotide
  Antisense strand to SEQ ID NO: 739408
caugaccucuuuauuaagc

SEQ ID NO: 739410 - RNA, 19 nt, Artificial Sequence
  Description of Artificial Sequence: Synthetic oligonucleotide
  Sense strand starting at position 1329 of SEQ ID NO: 586724
gugacaucggaucaacgaa

SEQ ID NO: 739411 - RNA, 19 nt, Artificial Sequence
  Description of Artificial Sequence: Synthetic oligonucleotide
  Antisense strand to SEQ ID NO: 739410
uucguugauccgaugucac

SEQ ID NO: 739412 - RNA, 19 nt, Artificial Sequence
  Description of Artificial Sequence: Synthetic oligonucleotide
  Sense strand starting at position 1375 of SEQ ID NO: 586724
agcucacgcggcuuguaau

SEQ ID NO: 739413 - RNA, 19 nt, Artificial Sequence
  Description of Artificial Sequence: Synthetic oligonucleotide
  Antisense strand to SEQ ID NO: 739412
auuacaagccgcgugagcu

SEQ ID NO: 739414 - RNA, 19 nt, Artificial Sequence
  Description of Artificial Sequence: Synthetic oligonucleotide
  Sense strand starting at position 1386 of SEQ ID NO: 586724
cuuguaauuaagggcuuga

SEQ ID NO: 739415 - RNA, 19 nt, Artificial Sequence
  Description of Artificial Sequence: Synthetic oligonucleotide
  Antisense strand to SEQ ID NO: 739414
ucaagcccuuaauuacaag

SEQ ID NO: 739416 - RNA, 19 nt, Artificial Sequence
  Description of Artificial Sequence: Synthetic oligonucleotide
  Sense strand starting at position 1417 of SEQ ID NO: 586724
ccguuaacccugcaauaag

SEQ ID NO: 739417 - RNA, 19 nt, Artificial Sequence
  Description of Artificial Sequence: Synthetic oligonucleotide
  Antisense strand to SEQ ID NO: 739416
cuuauugcaggguuaacgg

SEQ ID NO: 739418 - RNA, 19 nt, Artificial Sequence
  Description of Artificial Sequence: Synthetic oligonucleotide
  Sense strand starting at position 1451 of SEQ ID NO: 586724
uuagucuuccuugggaauu

SEQ ID NO: 739419 - RNA, 19 nt, Artificial Sequence
  Description of Artificial Sequence: Synthetic oligonucleotide
  Antisense strand to SEQ ID NO: 739418
aauucccaaggaagacuaa

SEQ ID NO: 739420 - RNA, 19 nt, Artificial Sequence
  Description of Artificial Sequence: Synthetic oligonucleotide
  Sense strand starting at position 1493 of SEQ ID NO: 586724
uacauaccucgugaggagu

SEQ ID NO: 739421 - RNA, 19 nt, Artificial Sequence
  Description of Artificial Sequence: Synthetic oligonucleotide
  Antisense strand to SEQ ID NO: 739420
acuccucacgagguaugua

SEQ ID NO: 739422 - RNA, 19 nt, Artificial Sequence
  Description of Artificial Sequence: Synthetic oligonucleotide
  Sense strand starting at position 1496 of SEQ ID NO: 586724
auaccucgugaggaguauu

SEQ ID NO: 739423 - RNA, 19 nt, Artificial Sequence
  Description of Artificial Sequence: Synthetic oligonucleotide
  Antisense strand to SEQ ID NO: 739422
aauacuccucacgagguau

SEQ ID NO: 739424 - RNA, 19 nt, Artificial Sequence
  Description of Artificial Sequence: Synthetic oligonucleotide
  Sense strand starting at position 1800 of SEQ ID NO: 586724
gggaaguagggcuaucgga

SEQ ID NO: 739425 - RNA, 19 nt, Artificial Sequence
  Description of Artificial Sequence: Synthetic oligonucleotide
  Antisense strand to SEQ ID NO: 739424
uccgauagcccuacuuccc

SEQ ID NO: 739426 - RNA, 19 nt, Artificial Sequence
  Description of Artificial Sequence: Synthetic oligonucleotide
  Sense strand starting at position 1971 of SEQ ID NO: 586724
cucugucacccuggaaaca

SEQ ID NO: 739427 - RNA, 19 nt, Artificial Sequence
  Description of Artificial Sequence: Synthetic oligonucleotide
  Antisense strand to SEQ ID NO: 739426
uguuuccagggugacagag

SEQ ID NO: 739428 - RNA, 19 nt, Artificial Sequence
  Description of Artificial Sequence: Synthetic oligonucleotide
  Sense strand starting at position 2086 of SEQ ID NO: 586724
gccuaaagcuaagcuagaa

SEQ ID NO: 739429 - RNA, 19 nt, Artificial Sequence
  Description of Artificial Sequence: Synthetic oligonucleotide
  Antisense strand to SEQ ID NO: 739428
uucuagcuuagcuuuaggc

SEQ ID NO: 739430 - RNA, 19 nt, Artificial Sequence
  Description of Artificial Sequence: Synthetic oligonucleotide
  Sense strand starting at position 2265 of SEQ ID NO: 586724
ccuuucucaguuuaguaaa

SEQ ID NO: 739431 - RNA, 19 nt, Artificial Sequence
  Description of Artificial Sequence: Synthetic oligonucleotide
  Antisense strand to SEQ ID NO: 739430
uuuacuaaacugagaaagg

SEQ ID NO: 739432 - RNA, 19 nt, Artificial Sequence
  Description of Artificial Sequence: Synthetic oligonucleotide
  Sense strand starting at position 2286 of SEQ ID NO: 586724
gaaagugauaacggagcuu

SEQ ID NO: 739433 - RNA, 19 nt, Artificial Sequence
  Description of Artificial Sequence: Synthetic oligonucleotide
  Antisense strand to SEQ ID NO: 739432
aagcuccguuaucacuuuc

SEQ ID NO: 739434 - RNA, 19 nt, Artificial Sequence
  Description of Artificial Sequence: Synthetic oligonucleotide
  Sense strand starting at position 2303 of SEQ ID NO: 586724
uugagcauccucugaauug

SEQ ID NO: 739435 - RNA, 19 nt, Artificial Sequence
  Description of Artificial Sequence: Synthetic oligonucleotide
  Antisense strand to SEQ ID NO: 739434
caauucagaggaugcucaa

SEQ ID NO: 739436 - RNA, 19 nt, Artificial Sequence
  Description of Artificial Sequence: Synthetic oligonucleotide
  Sense strand starting at position 2339 of SEQ ID NO: 586724
uaguucuucgcacaaggau

SEQ ID NO: 739437 - RNA, 19 nt, Artificial Sequence
  Description of Artificial Sequence: Synthetic oligonucleotide
  Antisense strand to SEQ ID NO: 739436
auccuugugcgaagaacua

SEQ ID NO: 739438 - RNA, 19 nt, Artificial Sequence
  Description of Artificial Sequence: Synthetic oligonucleotide
  Sense strand starting at position 2587 of SEQ ID NO: 586724
gaagaaggcguguauuaau

SEQ ID NO: 739439 - RNA, 19 nt, Artificial Sequence
  Description of Artificial Sequence: Synthetic oligonucleotide
  Antisense strand to SEQ ID NO: 739438
auuaauacacgccuucuuc

SEQ ID NO: 739440 - RNA, 19 nt, Artificial Sequence
  Description of Artificial Sequence: Synthetic oligonucleotide
  Sense strand starting at position 2794 of SEQ ID NO: 586724
uuggaaagguggguuugau

SEQ ID NO: 739441 - RNA, 19 nt, Artificial Sequence
  Description of Artificial Sequence: Synthetic oligonucleotide
  Antisense strand to SEQ ID NO: 739440
aucaaacccaccuuuccaa

SEQ ID NO: 739442 - RNA, 19 nt, Artificial Sequence
  Description of Artificial Sequence: Synthetic oligonucleotide
  Sense strand starting at position 2817 of SEQ ID NO: 586724
aagguaaacugguuaagau

SEQ ID NO: 739443 - RNA, 19 nt, Artificial Sequence
  Description of Artificial Sequence: Synthetic oligonucleotide
  Antisense strand to SEQ ID NO: 739442
aucuuaaccaguuuaccuu

SEQ ID NO: 739444 - RNA, 19 nt, Artificial Sequence
  Description of Artificial Sequence: Synthetic oligonucleotide
  Sense strand starting at position 2833 of SEQ ID NO: 586724
gauuaugaaagguguuguu

SEQ ID NO: 739445 - RNA, 19 nt, Artificial Sequence
  Description of Artificial Sequence: Synthetic oligonucleotide
  Antisense strand to SEQ ID NO: 739444
aacaacaccuuucauaauc

SEQ ID NO: 739446 - RNA, 19 nt, Artificial Sequence
  Description of Artificial Sequence: Synthetic oligonucleotide
  Sense strand starting at position 2977 of SEQ ID NO: 586724
gagaaugaguuggaagaga

SEQ ID NO: 739447 - RNA, 19 nt, Artificial Sequence
  Description of Artificial Sequence: Synthetic oligonucleotide
  Antisense strand to SEQ ID NO: 739446
ucucuuccaacucauucuc

SEQ ID NO: 739448 - RNA, 19 nt, Artificial Sequence
  Description of Artificial Sequence: Synthetic oligonucleotide
  Sense strand starting at position 3005 of SEQ ID NO: 586724
ucauuagaggcaugagacu

SEQ ID NO: 739449 - RNA, 19 nt, Artificial Sequence
  Description of Artificial Sequence: Synthetic oligonucleotide
  Antisense strand to SEQ ID NO: 739448
agucucaugccucuaauga

SEQ ID NO: 739450 - RNA, 19 nt, Artificial Sequence
  Description of Artificial Sequence: Synthetic oligonucleotide
  Sense strand starting at position 3155 of SEQ ID NO: 586724
uuggcaaaccuuuagugaa

SEQ ID NO: 739451 - RNA, 19 nt, Artificial Sequence
  Description of Artificial Sequence: Synthetic oligonucleotide
  Antisense strand to SEQ ID NO: 739450
uucacuaaagguuugccaa

SEQ ID NO: 739452 - RNA, 19 nt, Artificial Sequence
  Description of Artificial Sequence: Synthetic oligonucleotide
  Sense strand starting at position 3228 of SEQ ID NO: 586724
cuaauagccuugcugaaau

SEQ ID NO: 739453 - RNA, 19 nt, Artificial Sequence
  Description of Artificial Sequence: Synthetic oligonucleotide
  Antisense strand to SEQ ID NO: 739452
auuucagcaaggcuauuag

SEQ ID NO: 739454 - RNA, 19 nt, Artificial Sequence
  Description of Artificial Sequence: Synthetic oligonucleotide
  Sense strand starting at position 3307 of SEQ ID NO: 586724
auggccagauuccuagaaa

SEQ ID NO: 739455 - RNA, 19 nt, Artificial Sequence
  Description of Artificial Sequence: Synthetic oligonucleotide
  Antisense strand to SEQ ID NO: 739454
uuucuaggaaucuggccau

SEQ ID NO: 739456 - RNA, 19 nt, Artificial Sequence
  Description of Artificial Sequence: Synthetic oligonucleotide
  Sense strand starting at position 3619 of SEQ ID NO: 586724
uguggacucugauuccaac

SEQ ID NO: 739457 - RNA, 19 nt, Artificial Sequence
  Description of Artificial Sequence: Synthetic oligonucleotide
  Antisense strand to SEQ ID NO: 739456
guuggaaucagaguccaca

SEQ ID NO: 739458 - RNA, 19 nt, Artificial Sequence
  Description of Artificial Sequence: Synthetic oligonucleotide
  Sense strand starting at position 42 of SEQ ID NO: 586725
guaagaaacuugucuuuau

SEQ ID NO: 739459 - RNA, 19 nt, Artificial Sequence
  Description of Artificial Sequence: Synthetic oligonucleotide
  Antisense strand to SEQ ID NO: 739458
auaaagacaaguuucuuac

SEQ ID NO: 739460 - RNA, 19 nt, Artificial Sequence
  Description of Artificial Sequence: Synthetic oligonucleotide
  Sense strand starting at position 180 of SEQ ID NO: 586725
agcauugagaggcaguuaa

SEQ ID NO: 739461 - RNA, 19 nt, Artificial Sequence
  Description of Artificial Sequence: Synthetic oligonucleotide
  Antisense strand to SEQ ID NO: 739460
uuaacugccucucaaugcu

SEQ ID NO: 739462 - RNA, 19 nt, Artificial Sequence
  Description of Artificial Sequence: Synthetic oligonucleotide
  Sense strand starting at position 195 of SEQ ID NO: 586725
uuaagaagugaaugcaauu

SEQ ID NO: 739463 - RNA, 19 nt, Artificial Sequence
  Description of Artificial Sequence: Synthetic oligonucleotide
  Antisense strand to SEQ ID NO: 739462
aauugcauucacuucuuaa

SEQ ID NO: 739464 - RNA, 19 nt, Artificial Sequence
  Description of Artificial Sequence: Synthetic oligonucleotide
  Sense strand starting at position 329 of SEQ ID NO: 586725
acaaauguggaguguaaga

SEQ ID NO: 739465 - RNA, 19 nt, Artificial Sequence
  Description of Artificial Sequence: Synthetic oligonucleotide
  Antisense strand to SEQ ID NO: 739464
ucuuacacuccacauuugu

SEQ ID NO: 739466 - RNA, 19 nt, Artificial Sequence
  Description of Artificial Sequence: Synthetic oligonucleotide
  Sense strand starting at position 375 of SEQ ID NO: 586725
aguuucugaccugagucaa

SEQ ID NO: 739467 - RNA, 19 nt, Artificial Sequence
  Description of Artificial Sequence: Synthetic oligonucleotide
  Antisense strand to SEQ ID NO: 739466
uugacucaggucagaaacu

SEQ ID NO: 739468 - RNA, 19 nt, Artificial Sequence
  Description of Artificial Sequence: Synthetic oligonucleotide
  Sense strand starting at position 399 of SEQ ID NO: 586725
uugagcugccauuaauuga

SEQ ID NO: 739469 - RNA, 19 nt, Artificial Sequence
  Description of Artificial Sequence: Synthetic oligonucleotide
  Antisense strand to SEQ ID NO: 739468
ucaauuaauggcagcucaa

SEQ ID NO: 739470 - RNA, 19 nt, Artificial Sequence
  Description of Artificial Sequence: Synthetic oligonucleotide
  Sense strand starting at position 516 of SEQ ID NO: 586725
agagaugcccacuaagcaa

SEQ ID NO: 739471 - RNA, 19 nt, Artificial Sequence
  Description of Artificial Sequence: Synthetic oligonucleotide
  Antisense strand to SEQ ID NO: 739470
uugcuuagugggcaucucu

SEQ ID NO: 739472 - RNA, 19 nt, Artificial Sequence
  Description of Artificial Sequence: Synthetic oligonucleotide
  Sense strand starting at position 569 of SEQ ID NO: 586725
agugcuuuacauggaaauc

SEQ ID NO: 739473 - RNA, 19 nt, Artificial Sequence
  Description of Artificial Sequence: Synthetic oligonucleotide
  Antisense strand to SEQ ID NO: 739472
gauuuccauguaaagcacu

SEQ ID NO: 739474 - RNA, 19 nt, Artificial Sequence
  Description of Artificial Sequence: Synthetic oligonucleotide
  Sense strand starting at position 594 of SEQ ID NO: 586725
caguguauaggugguauuu

SEQ ID NO: 739475 - RNA, 19 nt, Artificial Sequence
  Description of Artificial Sequence: Synthetic oligonucleotide
  Antisense strand to SEQ ID NO: 739474
aaauaccaccuauacacug

SEQ ID NO: 739476 - RNA, 19 nt, Artificial Sequence
  Description of Artificial Sequence: Synthetic oligonucleotide
  Sense strand starting at position 616 of SEQ ID NO: 586725
accguucucuauuuggauu

SEQ ID NO: 739477 - RNA, 19 nt, Artificial Sequence
  Description of Artificial Sequence: Synthetic oligonucleotide
  Antisense strand to SEQ ID NO: 739476
aauccaaauagagaacggu

SEQ ID NO: 739478 - RNA, 19 nt, Artificial Sequence
  Description of Artificial Sequence: Synthetic oligonucleotide
  Sense strand starting at position 784 of SEQ ID NO: 586725
aguccugaagcccaguaaa

SEQ ID NO: 739479 - RNA, 19 nt, Artificial Sequence
  Description of Artificial Sequence: Synthetic oligonucleotide
  Antisense strand to SEQ ID NO: 739478
uuuacugggcuucaggacu

SEQ ID NO: 739480 - RNA, 19 nt, Artificial Sequence
  Description of Artificial Sequence: Synthetic oligonucleotide
  Sense strand starting at position 971 of SEQ ID NO: 586725
cugcuauuaggucaaugaa

SEQ ID NO: 739481 - RNA, 19 nt, Artificial Sequence
  Description of Artificial Sequence: Synthetic oligonucleotide
  Antisense strand to SEQ ID NO: 739480
uucauugaccuaauagcag

SEQ ID NO: 739482 - RNA, 19 nt, Artificial Sequence
  Description of Artificial Sequence: Synthetic oligonucleotide
  Sense strand starting at position 974 of SEQ ID NO: 586725
cuauuaggucaaugaaggu

SEQ ID NO: 739483 - RNA, 19 nt, Artificial Sequence
  Description of Artificial Sequence: Synthetic oligonucleotide
  Antisense strand to SEQ ID NO: 739482
accuucauugaccuaauag

SEQ ID NO: 739484 - RNA, 19 nt, Artificial Sequence
  Description of Artificial Sequence: Synthetic oligonucleotide
  Sense strand starting at position 1060 of SEQ ID NO: 586725
ggugacugagugcauucaa

SEQ ID NO: 739485 - RNA, 19 nt, Artificial Sequence
  Description of Artificial Sequence: Synthetic oligonucleotide
  Antisense strand to SEQ ID NO: 739484
uugaaugcacucagucacc

SEQ ID NO: 739486 - RNA, 19 nt, Artificial Sequence
  Description of Artificial Sequence: Synthetic oligonucleotide
  Sense strand starting at position 1121 of SEQ ID NO: 586725
uugaguuaucuguaaagug

SEQ ID NO: 739487 - RNA, 19 nt, Artificial Sequence
  Description of Artificial Sequence: Synthetic oligonucleotide
  Antisense strand to SEQ ID NO: 739486
cacuuuacagauaacucaa

SEQ ID NO: 739488 - RNA, 19 nt, Artificial Sequence
  Description of Artificial Sequence: Synthetic oligonucleotide
  Sense strand starting at position 1144 of SEQ ID NO: 586725
aaagaaauggugugauuau

SEQ ID NO: 739489 - RNA, 19 nt, Artificial Sequence
  Description of Artificial Sequence: Synthetic oligonucleotide
  Antisense strand to SEQ ID NO: 739488
auaaucacaccauuucuuu

SEQ ID NO: 739490 - RNA, 19 nt, Artificial Sequence
  Description of Artificial Sequence: Synthetic oligonucleotide
  Sense strand starting at position 1425 of SEQ ID NO: 586725
gcuuaauaaagaggucaug

SEQ ID NO: 739491 - RNA, 19 nt, Artificial Sequence
  Description of Artificial Sequence: Synthetic oligonucleotide
  Antisense strand to SEQ ID NO: 739490
caugaccucuuuauuaagc

SEQ ID NO: 739492 - RNA, 19 nt, Artificial Sequence
  Description of Artificial Sequence: Synthetic oligonucleotide
  Sense strand starting at position 1462 of SEQ ID NO: 586725
gugacaucggaucaacgaa

SEQ ID NO: 739493 - RNA, 19 nt, Artificial Sequence
  Description of Artificial Sequence: Synthetic oligonucleotide
  Antisense strand to SEQ ID NO: 739492
uucguugauccgaugucac

SEQ ID NO: 739494 - RNA, 19 nt, Artificial Sequence
  Description of Artificial Sequence: Synthetic oligonucleotide
  Sense strand starting at position 1508 of SEQ ID NO: 586725
agcucacgcggcuuguaau

SEQ ID NO: 739495 - RNA, 19 nt, Artificial Sequence
  Description of Artificial Sequence: Synthetic oligonucleotide
  Antisense strand to SEQ ID NO: 739494
auuacaagccgcgugagcu

SEQ ID NO: 739496 - RNA, 19 nt, Artificial Sequence
  Description of Artificial Sequence: Synthetic oligonucleotide
  Sense strand starting at position 1519 of SEQ ID NO: 586725
cuuguaauuaagggcuuga

SEQ ID NO: 739497 - RNA, 19 nt, Artificial Sequence
  Description of Artificial Sequence: Synthetic oligonucleotide
  Antisense strand to SEQ ID NO: 739496
ucaagcccuuaauuacaag

SEQ ID NO: 739498 - RNA, 19 nt, Artificial Sequence
  Description of Artificial Sequence: Synthetic oligonucleotide
  Sense strand starting at position 1550 of SEQ ID NO: 586725
ccguuaacccugcaauaag

SEQ ID NO: 739499 - RNA, 19 nt, Artificial Sequence
  Description of Artificial Sequence: Synthetic oligonucleotide
  Antisense strand to SEQ ID NO: 739498
cuuauugcaggguuaacgg

SEQ ID NO: 739500 - RNA, 19 nt, Artificial Sequence
  Description of Artificial Sequence: Synthetic oligonucleotide
  Sense strand starting at position 1584 of SEQ ID NO: 586725
uuagucuuccuugggaauu

SEQ ID NO: 739501 - RNA, 19 nt, Artificial Sequence
  Description of Artificial Sequence: Synthetic oligonucleotide
  Antisense strand to SEQ ID NO: 739500
aauucccaaggaagacuaa

SEQ ID NO: 739502 - RNA, 19 nt, Artificial Sequence
  Description of Artificial Sequence: Synthetic oligonucleotide
  Sense strand starting at position 1626 of SEQ ID NO: 586725
uacauaccucgugaggagu

SEQ ID NO: 739503 - RNA, 19 nt, Artificial Sequence
  Description of Artificial Sequence: Synthetic oligonucleotide
  Antisense strand to SEQ ID NO: 739502
acuccucacgagguaugua

SEQ ID NO: 739504 - RNA, 19 nt, Artificial Sequence
  Description of Artificial Sequence: Synthetic oligonucleotide
  Sense strand starting at position 1629 of SEQ ID NO: 586725
auaccucgugaggaguauu

SEQ ID NO: 739505 - RNA, 19 nt, Artificial Sequence
  Description of Artificial Sequence: Synthetic oligonucleotide
  Antisense strand to SEQ ID NO: 739504
aauacuccucacgagguau

SEQ ID NO: 739506 - RNA, 19 nt, Artificial Sequence
  Description of Artificial Sequence: Synthetic oligonucleotide
  Sense strand starting at position 1933 of SEQ ID NO: 586725
gggaaguagggcuaucgga

SEQ ID NO: 739507 - RNA, 19 nt, Artificial Sequence
  Description of Artificial Sequence: Synthetic oligonucleotide
  Antisense strand to SEQ ID NO: 739506
uccgauagcccuacuuccc

SEQ ID NO: 739508 - RNA, 19 nt, Artificial Sequence
  Description of Artificial Sequence: Synthetic oligonucleotide
  Sense strand starting at position 2104 of SEQ ID NO: 586725
cucugucacccuggaaaca

SEQ ID NO: 739509 - RNA, 19 nt, Artificial Sequence
  Description of Artificial Sequence: Synthetic oligonucleotide
  Antisense strand to SEQ ID NO: 739508
uguuuccagggugacagag

SEQ ID NO: 739510 - RNA, 19 nt, Artificial Sequence
  Description of Artificial Sequence: Synthetic oligonucleotide
  Sense strand starting at position 2398 of SEQ ID NO: 586725
ccuuucucaguuuaguaaa

SEQ ID NO: 739511 - RNA, 19 nt, Artificial Sequence
  Description of Artificial Sequence: Synthetic oligonucleotide
  Antisense strand to SEQ ID NO: 739510
uuuacuaaacugagaaagg

SEQ ID NO: 739512 - RNA, 19 nt, Artificial Sequence
  Description of Artificial Sequence: Synthetic oligonucleotide
  Sense strand starting at position 2419 of SEQ ID NO: 586725
gaaagugauaacggagcuu

SEQ ID NO: 739513 - RNA, 19 nt, Artificial Sequence
  Description of Artificial Sequence: Synthetic oligonucleotide
  Antisense strand to SEQ ID NO: 739512
aagcuccguuaucacuuuc

SEQ ID NO: 739514 - RNA, 19 nt, Artificial Sequence
  Description of Artificial Sequence: Synthetic oligonucleotide
  Sense strand starting at position 2436 of SEQ ID NO: 586725
uugagcauccucugaauug

SEQ ID NO: 739515 - RNA, 19 nt, Artificial Sequence
  Description of Artificial Sequence: Synthetic oligonucleotide
  Antisense strand to SEQ ID NO: 739514
caauucagaggaugcucaa

SEQ ID NO: 739516 - RNA, 19 nt, Artificial Sequence
  Description of Artificial Sequence: Synthetic oligonucleotide
  Sense strand starting at position 2472 of SEQ ID NO: 586725
uaguucuucgcacaaggau

SEQ ID NO: 739517 - RNA, 19 nt, Artificial Sequence
  Description of Artificial Sequence: Synthetic oligonucleotide
  Antisense strand to SEQ ID NO: 739516
auccuugugcgaagaacua

SEQ ID NO: 739518 - RNA, 19 nt, Artificial Sequence
  Description of Artificial Sequence: Synthetic oligonucleotide
  Sense strand starting at position 2720 of SEQ ID NO: 586725
gaagaaggcguguauuaau

SEQ ID NO: 739519 - RNA, 19 nt, Artificial Sequence
  Description of Artificial Sequence: Synthetic oligonucleotide
  Antisense strand to SEQ ID NO: 739518
auuaauacacgccuucuuc

SEQ ID NO: 739520 - RNA, 19 nt, Artificial Sequence
  Description of Artificial Sequence: Synthetic oligonucleotide
  Sense strand starting at position 2927 of SEQ ID NO: 586725
uuggaaagguggguuugau

SEQ ID NO: 739521 - RNA, 19 nt, Artificial Sequence
  Description of Artificial Sequence: Synthetic oligonucleotide
  Antisense strand to SEQ ID NO: 739520
aucaaacccaccuuuccaa

SEQ ID NO: 739522 - RNA, 19 nt, Artificial Sequence
  Description of Artificial Sequence: Synthetic oligonucleotide
  Sense strand starting at position 2950 of SEQ ID NO: 586725
aagguaaacugguuaagau

SEQ ID NO: 739523 - RNA, 19 nt, Artificial Sequence
  Description of Artificial Sequence: Synthetic oligonucleotide
  Antisense strand to SEQ ID NO: 739522
aucuuaaccaguuuaccuu

SEQ ID NO: 739524 - RNA, 19 nt, Artificial Sequence
  Description of Artificial Sequence: Synthetic oligonucleotide
  Sense strand starting at position 2966 of SEQ ID NO: 586725
gauuaugaaagguguuguu

SEQ ID NO: 739525 - RNA, 19 nt, Artificial Sequence
  Description of Artificial Sequence: Synthetic oligonucleotide
  Antisense strand to SEQ ID NO: 739524
aacaacaccuuucauaauc

SEQ ID NO: 739526 - RNA, 19 nt, Artificial Sequence
  Description of Artificial Sequence: Synthetic oligonucleotide
  Sense strand starting at position 3110 of SEQ ID NO: 586725
gagaaugaguuggaagaga

SEQ ID NO: 739527 - RNA, 19 nt, Artificial Sequence
  Description of Artificial Sequence: Synthetic oligonucleotide
  Antisense strand to SEQ ID NO: 739526
ucucuuccaacucauucuc

SEQ ID NO: 739528 - RNA, 19 nt, Artificial Sequence
  Description of Artificial Sequence: Synthetic oligonucleotide
  Sense strand starting at position 3138 of SEQ ID NO: 586725
ucauuagaggcaugagacu

SEQ ID NO: 739529 - RNA, 19 nt, Artificial Sequence
  Description of Artificial Sequence: Synthetic oligonucleotide
  Antisense strand to SEQ ID NO: 739528
agucucaugccucuaauga

SEQ ID NO: 739530 - RNA, 19 nt, Artificial Sequence
  Description of Artificial Sequence: Synthetic oligonucleotide
  Sense strand starting at position 3288 of SEQ ID NO: 586725
uuggcaaaccuuuagugaa

SEQ ID NO: 739531 - RNA, 19 nt, Artificial Sequence
  Description of Artificial Sequence: Synthetic oligonucleotide
  Antisense strand to SEQ ID NO: 739530
uucacuaaagguuugccaa

SEQ ID NO: 739532 - RNA, 19 nt, Artificial Sequence
  Description of Artificial Sequence: Synthetic oligonucleotide
  Sense strand starting at position 3361 of SEQ ID NO: 586725
cuaauagccuugcugaaau

SEQ ID NO: 739533 - RNA, 19 nt, Artificial Sequence
  Description of Artificial Sequence: Synthetic oligonucleotide
  Antisense strand to SEQ ID NO: 739532
auuucagcaaggcuauuag

SEQ ID NO: 739534 - RNA, 19 nt, Artificial Sequence
  Description of Artificial Sequence: Synthetic oligonucleotide
  Sense strand starting at position 3440 of SEQ ID NO: 586725
auggccagauuccuagaaa

SEQ ID NO: 739535 - RNA, 19 nt, Artificial Sequence
  Description of Artificial Sequence: Synthetic oligonucleotide
  Antisense strand to SEQ ID NO: 739534
uuucuaggaaucuggccau

SEQ ID NO: 739536 - RNA, 19 nt, Artificial Sequence
  Description of Artificial Sequence: Synthetic oligonucleotide
  Sense strand starting at position 3752 of SEQ ID NO: 586725
uguggacucugauuccaac

SEQ ID NO: 739537 - RNA, 19 nt, Artificial Sequence
  Description of Artificial Sequence: Synthetic oligonucleotide
  Antisense strand to SEQ ID NO: 739536
guuggaaucagaguccaca

SEQ ID NO: 739538 - RNA, 19 nt, Artificial Sequence
  Description of Artificial Sequence: Synthetic oligonucleotide
  Sense strand starting at position 159 of SEQ ID NO: 586726
guauaccuuccuuggaaca

SEQ ID NO: 739539 - RNA, 19 nt, Artificial Sequence
  Description of Artificial Sequence: Synthetic oligonucleotide
  Antisense strand to SEQ ID NO: 739538
uguuccaaggaagguauac

SEQ ID NO: 739540 - RNA, 19 nt, Artificial Sequence
  Description of Artificial Sequence: Synthetic oligonucleotide
  Sense strand starting at position 412 of SEQ ID NO: 586726
gugcauagaugacuaacua

SEQ ID NO: 739541 - RNA, 19 nt, Artificial Sequence
  Description of Artificial Sequence: Synthetic oligonucleotide
  Antisense strand to SEQ ID NO: 739540
uaguuagucaucuaugcac

SEQ ID NO: 739542 - RNA, 19 nt, Artificial Sequence
  Description of Artificial Sequence: Synthetic oligonucleotide
  Sense strand starting at position 544 of SEQ ID NO: 586726
agaaacaguaagugguaaa

SEQ ID NO: 739543 - RNA, 19 nt, Artificial Sequence
  Description of Artificial Sequence: Synthetic oligonucleotide
  Antisense strand to SEQ ID NO: 739542
uuuaccacuuacuguuucu

SEQ ID NO: 739544 - RNA, 19 nt, Artificial Sequence
  Description of Artificial Sequence: Synthetic oligonucleotide
  Sense strand starting at position 719 of SEQ ID NO: 586726
gcauaccaucauuaguuua

SEQ ID NO: 739545 - RNA, 19 nt, Artificial Sequence
  Description of Artificial Sequence: Synthetic oligonucleotide
  Antisense strand to SEQ ID NO: 739544
uaaacuaaugaugguaugc

SEQ ID NO: 739546 - RNA, 19 nt, Artificial Sequence
  Description of Artificial Sequence: Synthetic oligonucleotide
  Sense strand starting at position 1039 of SEQ ID NO: 586726
guuugcuuugaagaugacu

SEQ ID NO: 739547 - RNA, 19 nt, Artificial Sequence
  Description of Artificial Sequence: Synthetic oligonucleotide
  Antisense strand to SEQ ID NO: 739546
agucaucuucaaagcaaac

SEQ ID NO: 739548 - RNA, 19 nt, Artificial Sequence
  Description of Artificial Sequence: Synthetic oligonucleotide
  Sense strand starting at position 1227 of SEQ ID NO: 586726
cguguagugcucccaguag

SEQ ID NO: 739549 - RNA, 19 nt, Artificial Sequence
  Description of Artificial Sequence: Synthetic oligonucleotide
  Antisense strand to SEQ ID NO: 739548
cuacugggagcacuacacg

SEQ ID NO: 739550 - RNA, 19 nt, Artificial Sequence
  Description of Artificial Sequence: Synthetic oligonucleotide
  Sense strand starting at position 1245 of SEQ ID NO: 586726
gcuuaagaaguagagaguu

SEQ ID NO: 739551 - RNA, 19 nt, Artificial Sequence
  Description of Artificial Sequence: Synthetic oligonucleotide
  Antisense strand to SEQ ID NO: 739550
aacucucuacuucuuaagc

SEQ ID NO: 739552 - RNA, 19 nt, Artificial Sequence
  Description of Artificial Sequence: Synthetic oligonucleotide
  Sense strand starting at position 1275 of SEQ ID NO: 586726
ggaagaaucacuggcagca

SEQ ID NO: 739553 - RNA, 19 nt, Artificial Sequence
  Description of Artificial Sequence: Synthetic oligonucleotide
  Antisense strand to SEQ ID NO: 739552
ugcugccagugauucuucc

SEQ ID NO: 739554 - RNA, 19 nt, Artificial Sequence
  Description of Artificial Sequence: Synthetic oligonucleotide
  Sense strand starting at position 1342 of SEQ ID NO: 586726
ugaaaugaguuucuaaugu

SEQ ID NO: 739555 - RNA, 19 nt, Artificial Sequence
  Description of Artificial Sequence: Synthetic oligonucleotide
  Antisense strand to SEQ ID NO: 739554
acauuagaaacucauuuca

SEQ ID NO: 739556 - RNA, 19 nt, Artificial Sequence
  Description of Artificial Sequence: Synthetic oligonucleotide
  Sense strand starting at position 1351 of SEQ ID NO: 586726
uuucuaauguaagucagaa

SEQ ID NO: 739557 - RNA, 19 nt, Artificial Sequence
  Description of Artificial Sequence: Synthetic oligonucleotide
  Antisense strand to SEQ ID NO: 739556
uucugacuuacauuagaaa

SEQ ID NO: 739558 - RNA, 19 nt, Artificial Sequence
  Description of Artificial Sequence: Synthetic oligonucleotide
  Sense strand starting at position 1461 of SEQ ID NO: 586726
gaguuaauccaaggauagc

SEQ ID NO: 739559 - RNA, 19 nt, Artificial Sequence
  Description of Artificial Sequence: Synthetic oligonucleotide
  Antisense strand to SEQ ID NO: 739558
gcuauccuuggauuaacuc

SEQ ID NO: 739560 - RNA, 19 nt, Artificial Sequence
  Description of Artificial Sequence: Synthetic oligonucleotide
  Sense strand starting at position 1692 of SEQ ID NO: 586726
gcccuaucuccgucuguau

SEQ ID NO: 739561 - RNA, 19 nt, Artificial Sequence
  Description of Artificial Sequence: Synthetic oligonucleotide
  Antisense strand to SEQ ID NO: 739560
auacagacggagauagggc

SEQ ID NO: 739562 - RNA, 19 nt, Artificial Sequence
  Description of Artificial Sequence: Synthetic oligonucleotide
  Sense strand starting at position 1706 of SEQ ID NO: 586726
uguauaucagacuagcaau

SEQ ID NO: 739563 - RNA, 19 nt, Artificial Sequence
  Description of Artificial Sequence: Synthetic oligonucleotide
  Antisense strand to SEQ ID NO: 739562
auugcuagucugauauaca

SEQ ID NO: 739564 - RNA, 19 nt, Artificial Sequence
  Description of Artificial Sequence: Synthetic oligonucleotide
  Sense strand starting at position 1746 of SEQ ID NO: 586726
agcaaauuaguaugacaag

SEQ ID NO: 739565 - RNA, 19 nt, Artificial Sequence
  Description of Artificial Sequence: Synthetic oligonucleotide
  Antisense strand to SEQ ID NO: 739564
cuugucauacuaauuugcu

SEQ ID NO: 739566 - RNA, 19 nt, Artificial Sequence
  Description of Artificial Sequence: Synthetic oligonucleotide
  Sense strand starting at position 1844 of SEQ ID NO: 586726
uggauuaggcucugacaac

SEQ ID NO: 739567 - RNA, 19 nt, Artificial Sequence
  Description of Artificial Sequence: Synthetic oligonucleotide
  Antisense strand to SEQ ID NO: 739566
guugucagagccuaaucca

SEQ ID NO: 739568 - RNA, 19 nt, Artificial Sequence
  Description of Artificial Sequence: Synthetic oligonucleotide
  Sense strand starting at position 1986 of SEQ ID NO: 586726
ucauaagaguucuuugaac

SEQ ID NO: 739569 - RNA, 19 nt, Artificial Sequence
  Description of Artificial Sequence: Synthetic oligonucleotide
  Antisense strand to SEQ ID NO: 739568
guucaaagaacucuuauga

SEQ ID NO: 739570 - RNA, 19 nt, Artificial Sequence
  Description of Artificial Sequence: Synthetic oligonucleotide
  Sense strand starting at position 1988 of SEQ ID NO: 586726
auaagaguucuuugaacca

SEQ ID NO: 739571 - RNA, 19 nt, Artificial Sequence
  Description of Artificial Sequence: Synthetic oligonucleotide
  Antisense strand to SEQ ID NO: 739570
ugguucaaagaacucuuau

SEQ ID NO: 739572 - RNA, 19 nt, Artificial Sequence
  Description of Artificial Sequence: Synthetic oligonucleotide
  Sense strand starting at position 2067 of SEQ ID NO: 586726
uagagaagucauggguaau

SEQ ID NO: 739573 - RNA, 19 nt, Artificial Sequence
  Description of Artificial Sequence: Synthetic oligonucleotide
  Antisense strand to SEQ ID NO: 739572
auuacccaugacuucucua

SEQ ID NO: 739574 - RNA, 19 nt, Artificial Sequence
  Description of Artificial Sequence: Synthetic oligonucleotide
  Sense strand starting at position 2437 of SEQ ID NO: 586726
gcuagaauuuguuugcuua

SEQ ID NO: 739575 - RNA, 19 nt, Artificial Sequence
  Description of Artificial Sequence: Synthetic oligonucleotide
  Antisense strand to SEQ ID NO: 739574
uaagcaaacaaauucuagc

SEQ ID NO: 739576 - RNA, 19 nt, Artificial Sequence
  Description of Artificial Sequence: Synthetic oligonucleotide
  Sense strand starting at position 2438 of SEQ ID NO: 586726
cuagaauuuguuugcuuau

SEQ ID NO: 739577 - RNA, 19 nt, Artificial Sequence
  Description of Artificial Sequence: Synthetic oligonucleotide
  Antisense strand to SEQ ID NO: 739576
auaagcaaacaaauucuag

SEQ ID NO: 739578 - RNA, 19 nt, Artificial Sequence
  Description of Artificial Sequence: Synthetic oligonucleotide
  Sense strand starting at position 2522 of SEQ ID NO: 586726
gaaugaguauccuuauaga

SEQ ID NO: 739579 - RNA, 19 nt, Artificial Sequence
  Description of Artificial Sequence: Synthetic oligonucleotide
  Antisense strand to SEQ ID NO: 739578
ucuauaaggauacucauuc

SEQ ID NO: 739580 - RNA, 19 nt, Artificial Sequence
  Description of Artificial Sequence: Synthetic oligonucleotide
  Sense strand starting at position 2740 of SEQ ID NO: 586726
cgaauagaauuggaaauuu

SEQ ID NO: 739581 - RNA, 19 nt, Artificial Sequence
  Description of Artificial Sequence: Synthetic oligonucleotide
  Antisense strand to SEQ ID NO: 739580
aaauuuccaauucuauucg

SEQ ID NO: 739582 - RNA, 19 nt, Artificial Sequence
  Description of Artificial Sequence: Synthetic oligonucleotide
  Sense strand starting at position 2781 of SEQ ID NO: 586726
aaucuaaagguuggaaagu

SEQ ID NO: 739583 - RNA, 19 nt, Artificial Sequence
  Description of Artificial Sequence: Synthetic oligonucleotide
  Antisense strand to SEQ ID NO: 739582
acuuuccaaccuuuagauu

SEQ ID NO: 739584 - RNA, 19 nt, Artificial Sequence
  Description of Artificial Sequence: Synthetic oligonucleotide
  Sense strand starting at position 2811 of SEQ ID NO: 586726
aucugauaucgucacucau

SEQ ID NO: 739585 - RNA, 19 nt, Artificial Sequence
  Description of Artificial Sequence: Synthetic oligonucleotide
  Antisense strand to SEQ ID NO: 739584
augagugacgauaucagau

SEQ ID NO: 739586 - RNA, 19 nt, Artificial Sequence
  Description of Artificial Sequence: Synthetic oligonucleotide
  Sense strand starting at position 2859 of SEQ ID NO: 586726
aggagcuuucuauaucuaa

SEQ ID NO: 739587 - RNA, 19 nt, Artificial Sequence
  Description of Artificial Sequence: Synthetic oligonucleotide
  Antisense strand to SEQ ID NO: 739586
uuagauauagaaagcuccu

SEQ ID NO: 739588 - RNA, 19 nt, Artificial Sequence
  Description of Artificial Sequence: Synthetic oligonucleotide
  Sense strand starting at position 2883 of SEQ ID NO: 586726
uuugacuuccacgaaguaa

SEQ ID NO: 739589 - RNA, 19 nt, Artificial Sequence
  Description of Artificial Sequence: Synthetic oligonucleotide
  Antisense strand to SEQ ID NO: 739588
uuacuucguggaagucaaa

SEQ ID NO: 739590 - RNA, 19 nt, Artificial Sequence
  Description of Artificial Sequence: Synthetic oligonucleotide
  Sense strand starting at position 2902 of SEQ ID NO: 586726
agcagugauguggacaaga

SEQ ID NO: 739591 - RNA, 19 nt, Artificial Sequence
  Description of Artificial Sequence: Synthetic oligonucleotide
  Antisense strand to SEQ ID NO: 739590
ucuuguccacaucacugcu

SEQ ID NO: 739592 - RNA, 19 nt, Artificial Sequence
  Description of Artificial Sequence: Synthetic oligonucleotide
  Sense strand starting at position 2938 of SEQ ID NO: 586726
uugugcugagauuauuaau

SEQ ID NO: 739593 - RNA, 19 nt, Artificial Sequence
  Description of Artificial Sequence: Synthetic oligonucleotide
  Antisense strand to SEQ ID NO: 739592
auuaauaaucucagcacaa

SEQ ID NO: 739594 - RNA, 19 nt, Artificial Sequence
  Description of Artificial Sequence: Synthetic oligonucleotide
  Sense strand starting at position 3173 of SEQ ID NO: 586726
cugagucauaguuagagua

SEQ ID NO: 739595 - RNA, 19 nt, Artificial Sequence
  Description of Artificial Sequence: Synthetic oligonucleotide
  Antisense strand to SEQ ID NO: 739594
uacucuaacuaugacucag

SEQ ID NO: 739596 - RNA, 19 nt, Artificial Sequence
  Description of Artificial Sequence: Synthetic oligonucleotide
  Sense strand starting at position 3220 of SEQ ID NO: 586726
gucagaugacugggcuaua

SEQ ID NO: 739597 - RNA, 19 nt, Artificial Sequence
  Description of Artificial Sequence: Synthetic oligonucleotide
  Antisense strand to SEQ ID NO: 739596
uauagcccagucaucugac

SEQ ID NO: 739598 - RNA, 19 nt, Artificial Sequence
  Description of Artificial Sequence: Synthetic oligonucleotide
  Sense strand starting at position 3221 of SEQ ID NO: 586726
ucagaugacugggcuauau

SEQ ID NO: 739599 - RNA, 19 nt, Artificial Sequence
  Description of Artificial Sequence: Synthetic oligonucleotide
  Antisense strand to SEQ ID NO: 739598
auauagcccagucaucuga

SEQ ID NO: 739600 - RNA, 19 nt, Artificial Sequence
  Description of Artificial Sequence: Synthetic oligonucleotide
  Sense strand starting at position 3273 of SEQ ID NO: 586726
uagguaaguuaccuaauga

SEQ ID NO: 739601 - RNA, 19 nt, Artificial Sequence
  Description of Artificial Sequence: Synthetic oligonucleotide
  Antisense strand to SEQ ID NO: 739600
ucauuagguaacuuaccua

SEQ ID NO: 739602 - RNA, 19 nt, Artificial Sequence
  Description of Artificial Sequence: Synthetic oligonucleotide
  Sense strand starting at position 3462 of SEQ ID NO: 586726
augcuaugugcuuuacugu

SEQ ID NO: 739603 - RNA, 19 nt, Artificial Sequence
  Description of Artificial Sequence: Synthetic oligonucleotide
  Antisense strand to SEQ ID NO: 739602
acaguaaagcacauagcau

SEQ ID NO: 739604 - RNA, 19 nt, Artificial Sequence
  Description of Artificial Sequence: Synthetic oligonucleotide
  Sense strand starting at position 3480 of SEQ ID NO: 586726
ugugcuaaaccuuaaagag

SEQ ID NO: 739605 - RNA, 19 nt, Artificial Sequence
  Description of Artificial Sequence: Synthetic oligonucleotide
  Antisense strand to SEQ ID NO: 739604
cucuuuaagguuuagcaca

SEQ ID NO: 739606 - RNA, 19 nt, Artificial Sequence
  Description of Artificial Sequence: Synthetic oligonucleotide
  Sense strand starting at position 3606 of SEQ ID NO: 586726
acaacagacguugaaugua

SEQ ID NO: 739607 - RNA, 19 nt, Artificial Sequence
  Description of Artificial Sequence: Synthetic oligonucleotide
  Antisense strand to SEQ ID NO: 739606
uacauucaacgucuguugu

SEQ ID NO: 739608 - RNA, 19 nt, Artificial Sequence
  Description of Artificial Sequence: Synthetic oligonucleotide
  Sense strand starting at position 3650 of SEQ ID NO: 586726
gucugaacauccuuaggaa

SEQ ID NO: 739609 - RNA, 19 nt, Artificial Sequence
  Description of Artificial Sequence: Synthetic oligonucleotide
  Antisense strand to SEQ ID NO: 739608
uuccuaaggauguucagac

SEQ ID NO: 739610 - RNA, 19 nt, Artificial Sequence
  Description of Artificial Sequence: Synthetic oligonucleotide
  Sense strand starting at position 3680 of SEQ ID NO: 586726
cuaagaauugguggguuaa

SEQ ID NO: 739611 - RNA, 19 nt, Artificial Sequence
  Description of Artificial Sequence: Synthetic oligonucleotide
  Antisense strand to SEQ ID NO: 739610
uuaacccaccaauucuuag

SEQ ID NO: 739612 - RNA, 19 nt, Artificial Sequence
  Description of Artificial Sequence: Synthetic oligonucleotide
  Sense strand starting at position 3681 of SEQ ID NO: 586726
uaagaauugguggguuaau

SEQ ID NO: 739613 - RNA, 19 nt, Artificial Sequence
  Description of Artificial Sequence: Synthetic oligonucleotide
  Antisense strand to SEQ ID NO: 739612
auuaacccaccaauucuua

SEQ ID NO: 739614 - RNA, 19 nt, Artificial Sequence
  Description of Artificial Sequence: Synthetic oligonucleotide
  Sense strand starting at position 3762 of SEQ ID NO: 586726
uuuguauuacaacaaggua

SEQ ID NO: 739615 - RNA, 19 nt, Artificial Sequence
  Description of Artificial Sequence: Synthetic oligonucleotide
  Antisense strand to SEQ ID NO: 739614
uaccuuguuguaauacaaa

SEQ ID NO: 739616 - RNA, 19 nt, Artificial Sequence
  Description of Artificial Sequence: Synthetic oligonucleotide
  Sense strand starting at position 3957 of SEQ ID NO: 586726
ucuuuaucaguggagcuua

SEQ ID NO: 739617 - RNA, 19 nt, Artificial Sequence
  Description of Artificial Sequence: Synthetic oligonucleotide
  Antisense strand to SEQ ID NO: 739616
uaagcuccacugauaaaga

SEQ ID NO: 739618 - RNA, 19 nt, Artificial Sequence
  Description of Artificial Sequence: Synthetic oligonucleotide
  Sense strand starting at position 255 of SEQ ID NO: 586727
ggucucuccucuccagaau

SEQ ID NO: 739619 - RNA, 19 nt, Artificial Sequence
  Description of Artificial Sequence: Synthetic oligonucleotide
  Antisense strand to SEQ ID NO: 739618
auucuggagaggagagacc

SEQ ID NO: 739620 - RNA, 19 nt, Artificial Sequence
  Description of Artificial Sequence: Synthetic oligonucleotide
  Sense strand starting at position 391 of SEQ ID NO: 586727
guguguuacgaacaagcca

SEQ ID NO: 739621 - RNA, 19 nt, Artificial Sequence
  Description of Artificial Sequence: Synthetic oligonucleotide
  Antisense strand to SEQ ID NO: 739620
uggcuuguucguaacacac

SEQ ID NO: 739622 - RNA, 19 nt, Artificial Sequence
  Description of Artificial Sequence: Synthetic oligonucleotide
  Sense strand starting at position 483 of SEQ ID NO: 586727
acugucuuugcccaaguca

SEQ ID NO: 739623 - RNA, 19 nt, Artificial Sequence
  Description of Artificial Sequence: Synthetic oligonucleotide
  Antisense strand to SEQ ID NO: 739622
ugacuugggcaaagacagu

SEQ ID NO: 739624 - RNA, 19 nt, Artificial Sequence
  Description of Artificial Sequence: Synthetic oligonucleotide
  Sense strand starting at position 596 of SEQ ID NO: 586727
gggccucaguuccuuaaua

SEQ ID NO: 739625 - RNA, 19 nt, Artificial Sequence
  Description of Artificial Sequence: Synthetic oligonucleotide
  Antisense strand to SEQ ID NO: 739624
uauuaaggaacugaggccc

SEQ ID NO: 739626 - RNA, 19 nt, Artificial Sequence
  Description of Artificial Sequence: Synthetic oligonucleotide
  Sense strand starting at position 597 of SEQ ID NO: 586727
ggccucaguuccuuaauaa

SEQ ID NO: 739627 - RNA, 19 nt, Artificial Sequence
  Description of Artificial Sequence: Synthetic oligonucleotide
  Antisense strand to SEQ ID NO: 739626
uuauuaaggaacugaggcc

SEQ ID NO: 739628 - RNA, 19 nt, Artificial Sequence
  Description of Artificial Sequence: Synthetic oligonucleotide
  Sense strand starting at position 887 of SEQ ID NO: 586727
acgccaaaugggugaggaa

SEQ ID NO: 739629 - RNA, 19 nt, Artificial Sequence
  Description of Artificial Sequence: Synthetic oligonucleotide
  Antisense strand to SEQ ID NO: 739628
uuccucacccauuuggcgu

SEQ ID NO: 739630 - RNA, 19 nt, Artificial Sequence
  Description of Artificial Sequence: Synthetic oligonucleotide
  Sense strand starting at position 888 of SEQ ID NO: 586727
cgccaaaugggugaggaaa

SEQ ID NO: 739631 - RNA, 19 nt, Artificial Sequence
  Description of Artificial Sequence: Synthetic oligonucleotide
  Antisense strand to SEQ ID NO: 739630
uuuccucacccauuuggcg

SEQ ID NO: 739632 - RNA, 19 nt, Artificial Sequence
  Description of Artificial Sequence: Synthetic oligonucleotide
  Sense strand starting at position 1034 of SEQ ID NO: 586727
gguaaaguguagcugauga

SEQ ID NO: 739633 - RNA, 19 nt, Artificial Sequence
  Description of Artificial Sequence: Synthetic oligonucleotide
  Antisense strand to SEQ ID NO: 739632
ucaucagcuacacuuuacc

SEQ ID NO: 739634 - RNA, 19 nt, Artificial Sequence
  Description of Artificial Sequence: Synthetic oligonucleotide
  Sense strand starting at position 1038 of SEQ ID NO: 586727
aaguguagcugaugaucua

SEQ ID NO: 739635 - RNA, 19 nt, Artificial Sequence
  Description of Artificial Sequence: Synthetic oligonucleotide
  Antisense strand to SEQ ID NO: 739634
uagaucaucagcuacacuu

SEQ ID NO: 739636 - RNA, 19 nt, Artificial Sequence
  Description of Artificial Sequence: Synthetic oligonucleotide
  Sense strand starting at position 1039 of SEQ ID NO: 586727
aguguagcugaugaucuaa

SEQ ID NO: 739637 - RNA, 19 nt, Artificial Sequence
  Description of Artificial Sequence: Synthetic oligonucleotide
  Antisense strand to SEQ ID NO: 739636
uuagaucaucagcuacacu

SEQ ID NO: 739638 - RNA, 19 nt, Artificial Sequence
  Description of Artificial Sequence: Synthetic oligonucleotide
  Sense strand starting at position 1064 of SEQ ID NO: 586727
uggaaucauccaugacucu

SEQ ID NO: 739639 - RNA, 19 nt, Artificial Sequence
  Description of Artificial Sequence: Synthetic oligonucleotide
  Antisense strand to SEQ ID NO: 739638
agagucauggaugauucca

SEQ ID NO: 739640 - RNA, 19 nt, Artificial Sequence
  Description of Artificial Sequence: Synthetic oligonucleotide
  Sense strand starting at position 1087 of SEQ ID NO: 586727
caguccugcucuuacggaa

SEQ ID NO: 739641 - RNA, 19 nt, Artificial Sequence
  Description of Artificial Sequence: Synthetic oligonucleotide
  Antisense strand to SEQ ID NO: 739640
uuccguaagagcaggacug

SEQ ID NO: 739642 - RNA, 19 nt, Artificial Sequence
  Description of Artificial Sequence: Synthetic oligonucleotide
  Sense strand starting at position 1363 of SEQ ID NO: 586727
ccacgugacgucuccgauu

SEQ ID NO: 739643 - RNA, 19 nt, Artificial Sequence
  Description of Artificial Sequence: Synthetic oligonucleotide
  Antisense strand to SEQ ID NO: 739642
aaucggagacgucacgugg

SEQ ID NO: 739644 - RNA, 19 nt, Artificial Sequence
  Description of Artificial Sequence: Synthetic oligonucleotide
  Sense strand starting at position 1365 of SEQ ID NO: 586727
acgugacgucuccgauuaa

SEQ ID NO: 739645 - RNA, 19 nt, Artificial Sequence
  Description of Artificial Sequence: Synthetic oligonucleotide
  Antisense strand to SEQ ID NO: 739644
uuaaucggagacgucacgu

SEQ ID NO: 739646 - RNA, 19 nt, Artificial Sequence
  Description of Artificial Sequence: Synthetic oligonucleotide
  Sense strand starting at position 1366 of SEQ ID NO: 586727
cgugacgucuccgauuaaa

SEQ ID NO: 739647 - RNA, 19 nt, Artificial Sequence
  Description of Artificial Sequence: Synthetic oligonucleotide
  Antisense strand to SEQ ID NO: 739646
uuuaaucggagacgucacg

SEQ ID NO: 739648 - RNA, 19 nt, Artificial Sequence
  Description of Artificial Sequence: Synthetic oligonucleotide
  Sense strand starting at position 2110 of SEQ ID NO: 586727
ccucucucccgagagcaaa

SEQ ID NO: 739649 - RNA, 19 nt, Artificial Sequence
  Description of Artificial Sequence: Synthetic oligonucleotide
  Antisense strand to SEQ ID NO: 739648
uuugcucucgggagagagg

SEQ ID NO: 739650 - RNA, 19 nt, Artificial Sequence
  Description of Artificial Sequence: Synthetic oligonucleotide
  Sense strand starting at position 2235 of SEQ ID NO: 586727
aacugagugguguauaauu

SEQ ID NO: 739651 - RNA, 19 nt, Artificial Sequence
  Description of Artificial Sequence: Synthetic oligonucleotide
  Antisense strand to SEQ ID NO: 739650
aauuauacaccacucaguu

SEQ ID NO: 739652 - RNA, 19 nt, Artificial Sequence
  Description of Artificial Sequence: Synthetic oligonucleotide
  Sense strand starting at position 2237 of SEQ ID NO: 586727
cugagugguguauaauucu

SEQ ID NO: 739653 - RNA, 19 nt, Artificial Sequence
  Description of Artificial Sequence: Synthetic oligonucleotide
  Antisense strand to SEQ ID NO: 739652
agaauuauacaccacucag

SEQ ID NO: 739654 - RNA, 19 nt, Artificial Sequence
  Description of Artificial Sequence: Synthetic oligonucleotide
  Sense strand starting at position 2418 of SEQ ID NO: 586727
uaaguucguacgcagcaau

SEQ ID NO: 739655 - RNA, 19 nt, Artificial Sequence
  Description of Artificial Sequence: Synthetic oligonucleotide
  Antisense strand to SEQ ID NO: 739654
auugcugcguacgaacuua

SEQ ID NO: 739656 - RNA, 19 nt, Artificial Sequence
  Description of Artificial Sequence: Synthetic oligonucleotide
  Sense strand starting at position 2421 of SEQ ID NO: 586727
guucguacgcagcaauaga

SEQ ID NO: 739657 - RNA, 19 nt, Artificial Sequence
  Description of Artificial Sequence: Synthetic oligonucleotide
  Antisense strand to SEQ ID NO: 739656
ucuauugcugcguacgaac

SEQ ID NO: 739658 - RNA, 19 nt, Artificial Sequence
  Description of Artificial Sequence: Synthetic oligonucleotide
  Sense strand starting at position 2446 of SEQ ID NO: 586727
cacaaauggcuugauucga

SEQ ID NO: 739659 - RNA, 19 nt, Artificial Sequence
  Description of Artificial Sequence: Synthetic oligonucleotide
  Antisense strand to SEQ ID NO: 739658
ucgaaucaagccauuugug

SEQ ID NO: 739660 - RNA, 19 nt, Artificial Sequence
  Description of Artificial Sequence: Synthetic oligonucleotide
  Sense strand starting at position 2501 of SEQ ID NO: 586727
ggaagagacugccgucuuu

SEQ ID NO: 739661 - RNA, 19 nt, Artificial Sequence
  Description of Artificial Sequence: Synthetic oligonucleotide
  Antisense strand to SEQ ID NO: 739660
aaagacggcagucucuucc

SEQ ID NO: 739662 - RNA, 19 nt, Artificial Sequence
  Description of Artificial Sequence: Synthetic oligonucleotide
  Sense strand starting at position 2703 of SEQ ID NO: 586727
aggaaucucuguccaccua

SEQ ID NO: 739663 - RNA, 19 nt, Artificial Sequence
  Description of Artificial Sequence: Synthetic oligonucleotide
  Antisense strand to SEQ ID NO: 739662
uagguggacagagauuccu

SEQ ID NO: 739664 - RNA, 19 nt, Artificial Sequence
  Description of Artificial Sequence: Synthetic oligonucleotide
  Sense strand starting at position 2704 of SEQ ID NO: 586727
ggaaucucuguccaccuaa

SEQ ID NO: 739665 - RNA, 19 nt, Artificial Sequence
  Description of Artificial Sequence: Synthetic oligonucleotide
  Antisense strand to SEQ ID NO: 739664
uuagguggacagagauucc

SEQ ID NO: 739666 - RNA, 19 nt, Artificial Sequence
  Description of Artificial Sequence: Synthetic oligonucleotide
  Sense strand starting at position 2753 of SEQ ID NO: 586727
ggaacuuuauccuggagaa

SEQ ID NO: 739667 - RNA, 19 nt, Artificial Sequence
  Description of Artificial Sequence: Synthetic oligonucleotide
  Antisense strand to SEQ ID NO: 739666
uucuccaggauaaaguucc

SEQ ID NO: 739668 - RNA, 19 nt, Artificial Sequence
  Description of Artificial Sequence: Synthetic oligonucleotide
  Sense strand starting at position 2781 of SEQ ID NO: 586727
gggagaaacuaguccugua

SEQ ID NO: 739669 - RNA, 19 nt, Artificial Sequence
  Description of Artificial Sequence: Synthetic oligonucleotide
  Antisense strand to SEQ ID NO: 739668
uacaggacuaguuucuccc

SEQ ID NO: 739670 - RNA, 19 nt, Artificial Sequence
  Description of Artificial Sequence: Synthetic oligonucleotide
  Sense strand starting at position 2786 of SEQ ID NO: 586727
aaacuaguccuguagucag

SEQ ID NO: 739671 - RNA, 19 nt, Artificial Sequence
  Description of Artificial Sequence: Synthetic oligonucleotide
  Antisense strand to SEQ ID NO: 739670
cugacuacaggacuaguuu

SEQ ID NO: 739672 - RNA, 19 nt, Artificial Sequence
  Description of Artificial Sequence: Synthetic oligonucleotide
  Sense strand starting at position 2857 of SEQ ID NO: 586727
cucuaagacgagcaacaua

SEQ ID NO: 739673 - RNA, 19 nt, Artificial Sequence
  Description of Artificial Sequence: Synthetic oligonucleotide
  Antisense strand to SEQ ID NO: 739672
uauguugcucgucuuagag

SEQ ID NO: 739674 - RNA, 19 nt, Artificial Sequence
  Description of Artificial Sequence: Synthetic oligonucleotide
  Sense strand starting at position 2865 of SEQ ID NO: 586727
cgagcaacauaaucuauga

SEQ ID NO: 739675 - RNA, 19 nt, Artificial Sequence
  Description of Artificial Sequence: Synthetic oligonucleotide
  Antisense strand to SEQ ID NO: 739674
ucauagauuauguugcucg

SEQ ID NO: 739676 - RNA, 19 nt, Artificial Sequence
  Description of Artificial Sequence: Synthetic oligonucleotide
  Sense strand starting at position 3002 of SEQ ID NO: 586727
cagcucagcucugagaaga

SEQ ID NO: 739677 - RNA, 19 nt, Artificial Sequence
  Description of Artificial Sequence: Synthetic oligonucleotide
  Antisense strand to SEQ ID NO: 739676
ucuucucagagcugagcug

SEQ ID NO: 739678 - RNA, 19 nt, Artificial Sequence
  Description of Artificial Sequence: Synthetic oligonucleotide
  Sense strand starting at position 3099 of SEQ ID NO: 586727
aggacacacugguuauauu

SEQ ID NO: 739679 - RNA, 19 nt, Artificial Sequence
  Description of Artificial Sequence: Synthetic oligonucleotide
  Antisense strand to SEQ ID NO: 739678
aauauaaccaguguguccu

SEQ ID NO: 739680 - RNA, 19 nt, Artificial Sequence
  Description of Artificial Sequence: Synthetic oligonucleotide
  Sense strand starting at position 3369 of SEQ ID NO: 586727
uugcccuaaguguauauua

SEQ ID NO: 739681 - RNA, 19 nt, Artificial Sequence
  Description of Artificial Sequence: Synthetic oligonucleotide
  Antisense strand to SEQ ID NO: 739680
uaauauacacuuagggcaa

SEQ ID NO: 739682 - RNA, 19 nt, Artificial Sequence
  Description of Artificial Sequence: Synthetic oligonucleotide
  Sense strand starting at position 3371 of SEQ ID NO: 586727
gcccuaaguguauauuaug

SEQ ID NO: 739683 - RNA, 19 nt, Artificial Sequence
  Description of Artificial Sequence: Synthetic oligonucleotide
  Antisense strand to SEQ ID NO: 739682
cauaauauacacuuagggc

SEQ ID NO: 739684 - RNA, 19 nt, Artificial Sequence
  Description of Artificial Sequence: Synthetic oligonucleotide
  Sense strand starting at position 3397 of SEQ ID NO: 586727
guagcaccugcaugauauu

SEQ ID NO: 739685 - RNA, 19 nt, Artificial Sequence
  Description of Artificial Sequence: Synthetic oligonucleotide
  Antisense strand to SEQ ID NO: 739684
aauaucaugcaggugcuac

SEQ ID NO: 739686 - RNA, 19 nt, Artificial Sequence
  Description of Artificial Sequence: Synthetic oligonucleotide
  Sense strand starting at position 3400 of SEQ ID NO: 586727
gcaccugcaugauauuuau

SEQ ID NO: 739687 - RNA, 19 nt, Artificial Sequence
  Description of Artificial Sequence: Synthetic oligonucleotide
  Antisense strand to SEQ ID NO: 739686
auaaauaucaugcaggugc

SEQ ID NO: 739688 - RNA, 19 nt, Artificial Sequence
  Description of Artificial Sequence: Synthetic oligonucleotide
  Sense strand starting at position 3458 of SEQ ID NO: 586727
gccacagaucaguaggacu

SEQ ID NO: 739689 - RNA, 19 nt, Artificial Sequence
  Description of Artificial Sequence: Synthetic oligonucleotide
  Antisense strand to SEQ ID NO: 739688
aguccuacugaucuguggc

SEQ ID NO: 739690 - RNA, 19 nt, Artificial Sequence
  Description of Artificial Sequence: Synthetic oligonucleotide
  Sense strand starting at position 3498 of SEQ ID NO: 586727
auaucaaagucugggaacu

SEQ ID NO: 739691 - RNA, 19 nt, Artificial Sequence
  Description of Artificial Sequence: Synthetic oligonucleotide
  Antisense strand to SEQ ID NO: 739690
aguucccagacuuugauau

SEQ ID NO: 739692 - RNA, 19 nt, Artificial Sequence
  Description of Artificial Sequence: Synthetic oligonucleotide
  Sense strand starting at position 3499 of SEQ ID NO: 586727
uaucaaagucugggaacua

SEQ ID NO: 739693 - RNA, 19 nt, Artificial Sequence
  Description of Artificial Sequence: Synthetic oligonucleotide
  Antisense strand to SEQ ID NO: 739692
uaguucccagacuuugaua

SEQ ID NO: 739694 - RNA, 19 nt, Artificial Sequence
  Description of Artificial Sequence: Synthetic oligonucleotide
  Sense strand starting at position 3528 of SEQ ID NO: 586727
ccaucugaccagggaguau

SEQ ID NO: 739695 - RNA, 19 nt, Artificial Sequence
  Description of Artificial Sequence: Synthetic oligonucleotide
  Antisense strand to SEQ ID NO: 739694
auacucccuggucagaugg

SEQ ID NO: 739696 - RNA, 19 nt, Artificial Sequence
  Description of Artificial Sequence: Synthetic oligonucleotide
  Sense strand starting at position 3542 of SEQ ID NO: 586727
aguauagcgggucaagaaa

SEQ ID NO: 739697 - RNA, 19 nt, Artificial Sequence
  Description of Artificial Sequence: Synthetic oligonucleotide
  Antisense strand to SEQ ID NO: 739696
uuucuugacccgcuauacu

SEQ ID NO: 739698 - RNA, 19 nt, Artificial Sequence
  Description of Artificial Sequence: Synthetic oligonucleotide
  Sense strand starting at position 206 of SEQ ID NO: 586728
ucuuuccucgaaggacaau

SEQ ID NO: 739699 - RNA, 19 nt, Artificial Sequence
  Description of Artificial Sequence: Synthetic oligonucleotide
  Antisense strand to SEQ ID NO: 739698
auuguccuucgaggaaaga

SEQ ID NO: 739700 - RNA, 19 nt, Artificial Sequence
  Description of Artificial Sequence: Synthetic oligonucleotide
  Sense strand starting at position 472 of SEQ ID NO: 586728
gacugauucugggccugau

SEQ ID NO: 739701 - RNA, 19 nt, Artificial Sequence
  Description of Artificial Sequence: Synthetic oligonucleotide
  Antisense strand to SEQ ID NO: 739700
aucaggcccagaaucaguc

SEQ ID NO: 739702 - RNA, 19 nt, Artificial Sequence
  Description of Artificial Sequence: Synthetic oligonucleotide
  Sense strand starting at position 534 of SEQ ID NO: 586728
uuaugaagacauugaugca

SEQ ID NO: 739703 - RNA, 19 nt, Artificial Sequence
  Description of Artificial Sequence: Synthetic oligonucleotide
  Antisense strand to SEQ ID NO: 739702
ugcaucaaugucuucauaa

SEQ ID NO: 739704 - RNA, 19 nt, Artificial Sequence
  Description of Artificial Sequence: Synthetic oligonucleotide
  Sense strand starting at position 615 of SEQ ID NO: 586728
uugugauaucauuaccauc

SEQ ID NO: 739705 - RNA, 19 nt, Artificial Sequence
  Description of Artificial Sequence: Synthetic oligonucleotide
  Antisense strand to SEQ ID NO: 739704
gaugguaaugauaucacaa

SEQ ID NO: 739706 - RNA, 19 nt, Artificial Sequence
  Description of Artificial Sequence: Synthetic oligonucleotide
  Sense strand starting at position 617 of SEQ ID NO: 586728
gugauaucauuaccaucua

SEQ ID NO: 739707 - RNA, 19 nt, Artificial Sequence
  Description of Artificial Sequence: Synthetic oligonucleotide
  Antisense strand to SEQ ID NO: 739706
uagaugguaaugauaucac

SEQ ID NO: 739708 - RNA, 19 nt, Artificial Sequence
  Description of Artificial Sequence: Synthetic oligonucleotide
  Sense strand starting at position 708 of SEQ ID NO: 586728
augaaauugcaaugcagaa

SEQ ID NO: 739709 - RNA, 19 nt, Artificial Sequence
  Description of Artificial Sequence: Synthetic oligonucleotide
  Antisense strand to SEQ ID NO: 739708
uucugcauugcaauuucau

SEQ ID NO: 739710 - RNA, 19 nt, Artificial Sequence
  Description of Artificial Sequence: Synthetic oligonucleotide
  Sense strand starting at position 889 of SEQ ID NO: 586728
uagauaaguggguguggga

SEQ ID NO: 739711 - RNA, 19 nt, Artificial Sequence
  Description of Artificial Sequence: Synthetic oligonucleotide
  Antisense strand to SEQ ID NO: 739710
ucccacacccacuuaucua

SEQ ID NO: 739712 - RNA, 19 nt, Artificial Sequence
  Description of Artificial Sequence: Synthetic oligonucleotide
  Sense strand starting at position 1141 of SEQ ID NO: 586728
auagaauugucuguuuacu

SEQ ID NO: 739713 - RNA, 19 nt, Artificial Sequence
  Description of Artificial Sequence: Synthetic oligonucleotide
  Antisense strand to SEQ ID NO: 739712
aguaaacagacaauucuau

SEQ ID NO: 739714 - RNA, 19 nt, Artificial Sequence
  Description of Artificial Sequence: Synthetic oligonucleotide
  Sense strand starting at position 1204 of SEQ ID NO: 586728
uguucuacgagccauagaa

SEQ ID NO: 739715 - RNA, 19 nt, Artificial Sequence
  Description of Artificial Sequence: Synthetic oligonucleotide
  Antisense strand to SEQ ID NO: 739714
uucuauggcucguagaaca

SEQ ID NO: 739716 - RNA, 19 nt, Artificial Sequence
  Description of Artificial Sequence: Synthetic oligonucleotide
  Sense strand starting at position 1206 of SEQ ID NO: 586728
uucuacgagccauagaagu

SEQ ID NO: 739717 - RNA, 19 nt, Artificial Sequence
  Description of Artificial Sequence: Synthetic oligonucleotide
  Antisense strand to SEQ ID NO: 739716
acuucuauggcucguagaa

SEQ ID NO: 739718 - RNA, 19 nt, Artificial Sequence
  Description of Artificial Sequence: Synthetic oligonucleotide
  Sense strand starting at position 1260 of SEQ ID NO: 586728
ggauucugacugcaauugu

SEQ ID NO: 739719 - RNA, 19 nt, Artificial Sequence
  Description of Artificial Sequence: Synthetic oligonucleotide
  Antisense strand to SEQ ID NO: 739718
acaauugcagucagaaucc

SEQ ID NO: 739720 - RNA, 19 nt, Artificial Sequence
  Description of Artificial Sequence: Synthetic oligonucleotide
  Sense strand starting at position 1271 of SEQ ID NO: 586728
gcaauugugcacguguguu

SEQ ID NO: 739721 - RNA, 19 nt, Artificial Sequence
  Description of Artificial Sequence: Synthetic oligonucleotide
  Antisense strand to SEQ ID NO: 739720
aacacacgugcacaauugc

SEQ ID NO: 739722 - RNA, 19 nt, Artificial Sequence
  Description of Artificial Sequence: Synthetic oligonucleotide
  Sense strand starting at position 1276 of SEQ ID NO: 586728
ugugcacguguguucagaa

SEQ ID NO: 739723 - RNA, 19 nt, Artificial Sequence
  Description of Artificial Sequence: Synthetic oligonucleotide
  Antisense strand to SEQ ID NO: 739722
uucugaacacacgugcaca

SEQ ID NO: 739724 - RNA, 19 nt, Artificial Sequence
  Description of Artificial Sequence: Synthetic oligonucleotide
  Sense strand starting at position 1477 of SEQ ID NO: 586728
cuuaguaauguccacauac

SEQ ID NO: 739725 - RNA, 19 nt, Artificial Sequence
  Description of Artificial Sequence: Synthetic oligonucleotide
  Antisense strand to SEQ ID NO: 739724
guauguggacauuacuaag

SEQ ID NO: 739726 - RNA, 19 nt, Artificial Sequence
  Description of Artificial Sequence: Synthetic oligonucleotide
  Sense strand starting at position 1506 of SEQ ID NO: 586728
acauaauagcagugaaagu

SEQ ID NO: 739727 - RNA, 19 nt, Artificial Sequence
  Description of Artificial Sequence: Synthetic oligonucleotide
  Antisense strand to SEQ ID NO: 739726
acuuucacugcuauuaugu

SEQ ID NO: 739728 - RNA, 19 nt, Artificial Sequence
  Description of Artificial Sequence: Synthetic oligonucleotide
  Sense strand starting at position 1515 of SEQ ID NO: 586728
cagugaaaguaugugauaa

SEQ ID NO: 739729 - RNA, 19 nt, Artificial Sequence
  Description of Artificial Sequence: Synthetic oligonucleotide
  Antisense strand to SEQ ID NO: 739728
uuaucacauacuuucacug

SEQ ID NO: 739730 - RNA, 19 nt, Artificial Sequence
  Description of Artificial Sequence: Synthetic oligonucleotide
  Sense strand starting at position 1516 of SEQ ID NO: 586728
agugaaaguaugugauaau

SEQ ID NO: 739731 - RNA, 19 nt, Artificial Sequence
  Description of Artificial Sequence: Synthetic oligonucleotide
  Antisense strand to SEQ ID NO: 739730
auuaucacauacuuucacu

SEQ ID NO: 739732 - RNA, 19 nt, Artificial Sequence
  Description of Artificial Sequence: Synthetic oligonucleotide
  Sense strand starting at position 1599 of SEQ ID NO: 586728
gugacacuguaucuuuaaa

SEQ ID NO: 739733 - RNA, 19 nt, Artificial Sequence
  Description of Artificial Sequence: Synthetic oligonucleotide
  Antisense strand to SEQ ID NO: 739732
uuuaaagauacagugucac

SEQ ID NO: 739734 - RNA, 19 nt, Artificial Sequence
  Description of Artificial Sequence: Synthetic oligonucleotide
  Sense strand starting at position 1625 of SEQ ID NO: 586728
augcaaagccagcaucaau

SEQ ID NO: 739735 - RNA, 19 nt, Artificial Sequence
  Description of Artificial Sequence: Synthetic oligonucleotide
  Antisense strand to SEQ ID NO: 739734
auugaugcuggcuuugcau

SEQ ID NO: 739736 - RNA, 19 nt, Artificial Sequence
  Description of Artificial Sequence: Synthetic oligonucleotide
  Sense strand starting at position 1757 of SEQ ID NO: 586728
ucuagaucuguguauaucu

SEQ ID NO: 739737 - RNA, 19 nt, Artificial Sequence
  Description of Artificial Sequence: Synthetic oligonucleotide
  Antisense strand to SEQ ID NO: 739736
agauauacacagaucuaga

SEQ ID NO: 739738 - RNA, 19 nt, Artificial Sequence
  Description of Artificial Sequence: Synthetic oligonucleotide
  Sense strand starting at position 1768 of SEQ ID NO: 586728
guauaucugcacuaucuca

SEQ ID NO: 739739 - RNA, 19 nt, Artificial Sequence
  Description of Artificial Sequence: Synthetic oligonucleotide
  Antisense strand to SEQ ID NO: 739738
ugagauagugcagauauac

SEQ ID NO: 739740 - RNA, 19 nt, Artificial Sequence
  Description of Artificial Sequence: Synthetic oligonucleotide
  Sense strand starting at position 2009 of SEQ ID NO: 586728
aggugcauuucuccucgaa

SEQ ID NO: 739741 - RNA, 19 nt, Artificial Sequence
  Description of Artificial Sequence: Synthetic oligonucleotide
  Antisense strand to SEQ ID NO: 739740
uucgaggagaaaugcaccu

SEQ ID NO: 739742 - RNA, 19 nt, Artificial Sequence
  Description of Artificial Sequence: Synthetic oligonucleotide
  Sense strand starting at position 2011 of SEQ ID NO: 586728
gugcauuucuccucgaacu

SEQ ID NO: 739743 - RNA, 19 nt, Artificial Sequence
  Description of Artificial Sequence: Synthetic oligonucleotide
  Antisense strand to SEQ ID NO: 739742
aguucgaggagaaaugcac

SEQ ID NO: 739744 - RNA, 19 nt, Artificial Sequence
  Description of Artificial Sequence: Synthetic oligonucleotide
  Sense strand starting at position 2012 of SEQ ID NO: 586728
ugcauuucuccucgaacug

SEQ ID NO: 739745 - RNA, 19 nt, Artificial Sequence
  Description of Artificial Sequence: Synthetic oligonucleotide
  Antisense strand to SEQ ID NO: 739744
caguucgaggagaaaugca

SEQ ID NO: 739746 - RNA, 19 nt, Artificial Sequence
  Description of Artificial Sequence: Synthetic oligonucleotide
  Sense strand starting at position 2041 of SEQ ID NO: 586728
acuggcaaucuguagaaau

SEQ ID NO: 739747 - RNA, 19 nt, Artificial Sequence
  Description of Artificial Sequence: Synthetic oligonucleotide
  Antisense strand to SEQ ID NO: 739746
auuucuacagauugccagu

SEQ ID NO: 739748 - RNA, 19 nt, Artificial Sequence
  Description of Artificial Sequence: Synthetic oligonucleotide
  Sense strand starting at position 2103 of SEQ ID NO: 586728
uuaggugaucguuaauauu

SEQ ID NO: 739749 - RNA, 19 nt, Artificial Sequence
  Description of Artificial Sequence: Synthetic oligonucleotide
  Antisense strand to SEQ ID NO: 739748
aauauuaacgaucaccuaa

SEQ ID NO: 739750 - RNA, 19 nt, Artificial Sequence
  Description of Artificial Sequence: Synthetic oligonucleotide
  Sense strand starting at position 2227 of SEQ ID NO: 586728
gggaaagaaagccgugaaa

SEQ ID NO: 739751 - RNA, 19 nt, Artificial Sequence
  Description of Artificial Sequence: Synthetic oligonucleotide
  Antisense strand to SEQ ID NO: 739750
uuucacggcuuucuuuccc

SEQ ID NO: 739752 - RNA, 19 nt, Artificial Sequence
  Description of Artificial Sequence: Synthetic oligonucleotide
  Sense strand starting at position 2250 of SEQ ID NO: 586728
gcuggaaacuggucuuaag

SEQ ID NO: 739753 - RNA, 19 nt, Artificial Sequence
  Description of Artificial Sequence: Synthetic oligonucleotide
  Antisense strand to SEQ ID NO: 739752
cuuaagaccaguuuccagc

SEQ ID NO: 739754 - RNA, 19 nt, Artificial Sequence
  Description of Artificial Sequence: Synthetic oligonucleotide
  Sense strand starting at position 2262 of SEQ ID NO: 586728
ucuuaagacguuuaaccaa

SEQ ID NO: 739755 - RNA, 19 nt, Artificial Sequence
  Description of Artificial Sequence: Synthetic oligonucleotide
  Antisense strand to SEQ ID NO: 739754
uugguuaaacgucuuaaga

SEQ ID NO: 739756 - RNA, 19 nt, Artificial Sequence
  Description of Artificial Sequence: Synthetic oligonucleotide
  Sense strand starting at position 2563 of SEQ ID NO: 586728
ugcagaaagucacuaacuu

SEQ ID NO: 739757 - RNA, 19 nt, Artificial Sequence
  Description of Artificial Sequence: Synthetic oligonucleotide
  Antisense strand to SEQ ID NO: 739756
aaguuagugacuuucugca

SEQ ID NO: 739758 - RNA, 19 nt, Artificial Sequence
  Description of Artificial Sequence: Synthetic oligonucleotide
  Sense strand starting at position 2564 of SEQ ID NO: 586728
gcagaaagucacuaacuuc

SEQ ID NO: 739759 - RNA, 19 nt, Artificial Sequence
  Description of Artificial Sequence: Synthetic oligonucleotide
  Antisense strand to SEQ ID NO: 739758
gaaguuagugacuuucugc

SEQ ID NO: 739760 - RNA, 19 nt, Artificial Sequence
  Description of Artificial Sequence: Synthetic oligonucleotide
  Sense strand starting at position 2696 of SEQ ID NO: 586728
ugacauucugcugaguauu

SEQ ID NO: 739761 - RNA, 19 nt, Artificial Sequence
  Description of Artificial Sequence: Synthetic oligonucleotide
  Antisense strand to SEQ ID NO: 739760
aauacucagcagaauguca

SEQ ID NO: 739762 - RNA, 19 nt, Artificial Sequence
  Description of Artificial Sequence: Synthetic oligonucleotide
  Sense strand starting at position 2870 of SEQ ID NO: 586728
uucccugucagguguauuu

SEQ ID NO: 739763 - RNA, 19 nt, Artificial Sequence
  Description of Artificial Sequence: Synthetic oligonucleotide
  Antisense strand to SEQ ID NO: 739762
aaauacaccugacagggaa

SEQ ID NO: 739764 - RNA, 19 nt, Artificial Sequence
  Description of Artificial Sequence: Synthetic oligonucleotide
  Sense strand starting at position 2965 of SEQ ID NO: 586728
cuggcaaagccuuauagau

SEQ ID NO: 739765 - RNA, 19 nt, Artificial Sequence
  Description of Artificial Sequence: Synthetic oligonucleotide
  Antisense strand to SEQ ID NO: 739764
aucuauaaggcuuugccag

SEQ ID NO: 739766 - RNA, 19 nt, Artificial Sequence
  Description of Artificial Sequence: Synthetic oligonucleotide
  Sense strand starting at position 3213 of SEQ ID NO: 586728
uaaaguaaucccugcagag

SEQ ID NO: 739767 - RNA, 19 nt, Artificial Sequence
  Description of Artificial Sequence: Synthetic oligonucleotide
  Antisense strand to SEQ ID NO: 739766
cucugcagggauuacuuua

SEQ ID NO: 739768 - RNA, 19 nt, Artificial Sequence
  Description of Artificial Sequence: Synthetic oligonucleotide
  Sense strand starting at position 3215 of SEQ ID NO: 586728
aaguaaucccugcagagcu

SEQ ID NO: 739769 - RNA, 19 nt, Artificial Sequence
  Description of Artificial Sequence: Synthetic oligonucleotide
  Antisense strand to SEQ ID NO: 739768
agcucugcagggauuacuu

SEQ ID NO: 739770 - RNA, 19 nt, Artificial Sequence
  Description of Artificial Sequence: Synthetic oligonucleotide
  Sense strand starting at position 3487 of SEQ ID NO: 586728
cucuuaauggcccaguaaa

SEQ ID NO: 739771 - RNA, 19 nt, Artificial Sequence
  Description of Artificial Sequence: Synthetic oligonucleotide
  Antisense strand to SEQ ID NO: 739770
uuuacugggccauuaagag

SEQ ID NO: 739772 - RNA, 19 nt, Artificial Sequence
  Description of Artificial Sequence: Synthetic oligonucleotide
  Sense strand starting at position 3748 of SEQ ID NO: 586728
guuggucucccauaugauu

SEQ ID NO: 739773 - RNA, 19 nt, Artificial Sequence
  Description of Artificial Sequence: Synthetic oligonucleotide
  Antisense strand to SEQ ID NO: 739772
aaucauaugggagaccaac

SEQ ID NO: 739774 - RNA, 19 nt, Artificial Sequence
  Description of Artificial Sequence: Synthetic oligonucleotide
  Sense strand starting at position 3839 of SEQ ID NO: 586728
uguauauugcaccauauuc

SEQ ID NO: 739775 - RNA, 19 nt, Artificial Sequence
  Description of Artificial Sequence: Synthetic oligonucleotide
  Antisense strand to SEQ ID NO: 739774
gaauauggugcaauauaca

SEQ ID NO: 739776 - RNA, 19 nt, Artificial Sequence
  Description of Artificial Sequence: Synthetic oligonucleotide
  Sense strand starting at position 3925 of SEQ ID NO: 586728
aggaauagaugacaugaua

SEQ ID NO: 739777 - RNA, 19 nt, Artificial Sequence
  Description of Artificial Sequence: Synthetic oligonucleotide
  Antisense strand to SEQ ID NO: 739776
uaucaugucaucuauuccu

SEQ ID NO: 739778 - RNA, 19 nt, Artificial Sequence
  Description of Artificial Sequence: Synthetic oligonucleotide
  Sense strand starting at position 62 of SEQ ID NO: 586729
ggcucagaucagcauaaca

SEQ ID NO: 739779 - RNA, 19 nt, Artificial Sequence
  Description of Artificial Sequence: Synthetic oligonucleotide
  Antisense strand to SEQ ID NO: 739778
uguuaugcugaucugagcc

SEQ ID NO: 739780 - RNA, 19 nt, Artificial Sequence
  Description of Artificial Sequence: Synthetic oligonucleotide
  Sense strand starting at position 64 of SEQ ID NO: 586729
cucagaucagcauaacagu

SEQ ID NO: 739781 - RNA, 19 nt, Artificial Sequence
  Description of Artificial Sequence: Synthetic oligonucleotide
  Antisense strand to SEQ ID NO: 739780
acuguuaugcugaucugag

SEQ ID NO: 739782 - RNA, 19 nt, Artificial Sequence
  Description of Artificial Sequence: Synthetic oligonucleotide
  Sense strand starting at position 70 of SEQ ID NO: 586729
ucagcauaacagugaauca

SEQ ID NO: 739783 - RNA, 19 nt, Artificial Sequence
  Description of Artificial Sequence: Synthetic oligonucleotide
  Antisense strand to SEQ ID NO: 739782
ugauucacuguuaugcuga

SEQ ID NO: 739784 - RNA, 19 nt, Artificial Sequence
  Description of Artificial Sequence: Synthetic oligonucleotide
  Sense strand starting at position 124 of SEQ ID NO: 586729
uggagaagcuugucuggca

SEQ ID NO: 739785 - RNA, 19 nt, Artificial Sequence
  Description of Artificial Sequence: Synthetic oligonucleotide
  Antisense strand to SEQ ID NO: 739784
ugccagacaagcuucucca

SEQ ID NO: 739786 - RNA, 19 nt, Artificial Sequence
  Description of Artificial Sequence: Synthetic oligonucleotide
  Sense strand starting at position 125 of SEQ ID NO: 586729
ggagaagcuugucuggcaa

SEQ ID NO: 739787 - RNA, 19 nt, Artificial Sequence
  Description of Artificial Sequence: Synthetic oligonucleotide
  Antisense strand to SEQ ID NO: 739786
uugccagacaagcuucucc

SEQ ID NO: 739788 - RNA, 19 nt, Artificial Sequence
  Description of Artificial Sequence: Synthetic oligonucleotide
  Sense strand starting at position 252 of SEQ ID NO: 586729
guugaucaccacugguuga

SEQ ID NO: 739789 - RNA, 19 nt, Artificial Sequence
  Description of Artificial Sequence: Synthetic oligonucleotide
  Antisense strand to SEQ ID NO: 739788
ucaaccaguggugaucaac

SEQ ID NO: 739790 - RNA, 19 nt, Artificial Sequence
  Description of Artificial Sequence: Synthetic oligonucleotide
  Sense strand starting at position 289 of SEQ ID NO: 586729
acuaaaguuugagccaaga

SEQ ID NO: 739791 - RNA, 19 nt, Artificial Sequence
  Description of Artificial Sequence: Synthetic oligonucleotide
  Antisense strand to SEQ ID NO: 739790
ucuuggcucaaacuuuagu

SEQ ID NO: 739792 - RNA, 19 nt, Artificial Sequence
  Description of Artificial Sequence: Synthetic oligonucleotide
  Sense strand starting at position 330 of SEQ ID NO: 586729
aaggaacuuuggguaaagu

SEQ ID NO: 739793 - RNA, 19 nt, Artificial Sequence
  Description of Artificial Sequence: Synthetic oligonucleotide
  Antisense strand to SEQ ID NO: 739792
acuuuacccaaaguuccuu

SEQ ID NO: 739794 - RNA, 19 nt, Artificial Sequence
  Description of Artificial Sequence: Synthetic oligonucleotide
  Sense strand starting at position 367 of SEQ ID NO: 586729
guuaaagugucauuagacu

SEQ ID NO: 739795 - RNA, 19 nt, Artificial Sequence
  Description of Artificial Sequence: Synthetic oligonucleotide
  Antisense strand to SEQ ID NO: 739794
agucuaaugacacuuuaac

SEQ ID NO: 739796 - RNA, 19 nt, Artificial Sequence
  Description of Artificial Sequence: Synthetic oligonucleotide
  Sense strand starting at position 373 of SEQ ID NO: 586729
gugucauuagacugaacuc

SEQ ID NO: 739797 - RNA, 19 nt, Artificial Sequence
  Description of Artificial Sequence: Synthetic oligonucleotide
  Antisense strand to SEQ ID NO: 739796
gaguucagucuaaugacac

SEQ ID NO: 739798 - RNA, 19 nt, Artificial Sequence
  Description of Artificial Sequence: Synthetic oligonucleotide
  Sense strand starting at position 424 of SEQ ID NO: 586729
gcaacagaucuugguaaac

SEQ ID NO: 739799 - RNA, 19 nt, Artificial Sequence
  Description of Artificial Sequence: Synthetic oligonucleotide
  Antisense strand to SEQ ID NO: 739798
guuuaccaagaucuguugc

SEQ ID NO: 739800 - RNA, 19 nt, Artificial Sequence
  Description of Artificial Sequence: Synthetic oligonucleotide
  Sense strand starting at position 496 of SEQ ID NO: 586729
ggaacuuguuagucacuaa

SEQ ID NO: 739801 - RNA, 19 nt, Artificial Sequence
  Description of Artificial Sequence: Synthetic oligonucleotide
  Antisense strand to SEQ ID NO: 739800
uuagugacuaacaaguucc

SEQ ID NO: 739802 - RNA, 19 nt, Artificial Sequence
  Description of Artificial Sequence: Synthetic oligonucleotide
  Sense strand starting at position 500 of SEQ ID NO: 586729
cuuguuagucacuaaguga

SEQ ID NO: 739803 - RNA, 19 nt, Artificial Sequence
  Description of Artificial Sequence: Synthetic oligonucleotide
  Antisense strand to SEQ ID NO: 739802
ucacuuagugacuaacaag

SEQ ID NO: 739804 - RNA, 19 nt, Artificial Sequence
  Description of Artificial Sequence: Synthetic oligonucleotide
  Sense strand starting at position 634 of SEQ ID NO: 586729
cugaauagacccugaccau

SEQ ID NO: 739805 - RNA, 19 nt, Artificial Sequence
  Description of Artificial Sequence: Synthetic oligonucleotide
  Antisense strand to SEQ ID NO: 739804
auggucagggucuauucag

SEQ ID NO: 739806 - RNA, 19 nt, Artificial Sequence
  Description of Artificial Sequence: Synthetic oligonucleotide
  Sense strand starting at position 656 of SEQ ID NO: 586729
uccuuaauccagggaagca

SEQ ID NO: 739807 - RNA, 19 nt, Artificial Sequence
  Description of Artificial Sequence: Synthetic oligonucleotide
  Antisense strand to SEQ ID NO: 739806
ugcuucccuggauuaagga

SEQ ID NO: 739808 - RNA, 19 nt, Artificial Sequence
  Description of Artificial Sequence: Synthetic oligonucleotide
  Sense strand starting at position 909 of SEQ ID NO: 586729
aaggaaagguauucucuau

SEQ ID NO: 739809 - RNA, 19 nt, Artificial Sequence
  Description of Artificial Sequence: Synthetic oligonucleotide
  Antisense strand to SEQ ID NO: 739808
auagagaauaccuuuccuu

SEQ ID NO: 739810 - RNA, 19 nt, Artificial Sequence
  Description of Artificial Sequence: Synthetic oligonucleotide
  Sense strand starting at position 934 of SEQ ID NO: 586729
acggaugauuucguccacu

SEQ ID NO: 739811 - RNA, 19 nt, Artificial Sequence
  Description of Artificial Sequence: Synthetic oligonucleotide
  Antisense strand to SEQ ID NO: 739810
aguggacgaaaucauccgu

SEQ ID NO: 739812 - RNA, 19 nt, Artificial Sequence
  Description of Artificial Sequence: Synthetic oligonucleotide
  Sense strand starting at position 2157 of SEQ ID NO: 586729
gcuuucugggagcagaagu

SEQ ID NO: 739813 - RNA, 19 nt, Artificial Sequence
  Description of Artificial Sequence: Synthetic oligonucleotide
  Antisense strand to SEQ ID NO: 739812
acuucugcucccagaaagc

SEQ ID NO: 739814 - RNA, 19 nt, Artificial Sequence
  Description of Artificial Sequence: Synthetic oligonucleotide
  Sense strand starting at position 2222 of SEQ ID NO: 586729
gggccauccuugcugaaag

SEQ ID NO: 739815 - RNA, 19 nt, Artificial Sequence
  Description of Artificial Sequence: Synthetic oligonucleotide
  Antisense strand to SEQ ID NO: 739814
cuuucagcaaggauggccc

SEQ ID NO: 739816 - RNA, 19 nt, Artificial Sequence
  Description of Artificial Sequence: Synthetic oligonucleotide
  Sense strand starting at position 2446 of SEQ ID NO: 586729
gaucauagagccugucaaa

SEQ ID NO: 739817 - RNA, 19 nt, Artificial Sequence
  Description of Artificial Sequence: Synthetic oligonucleotide
  Antisense strand to SEQ ID NO: 739816
uuugacaggcucuaugauc

SEQ ID NO: 739818 - RNA, 19 nt, Artificial Sequence
  Description of Artificial Sequence: Synthetic oligonucleotide
  Sense strand starting at position 2465 of SEQ ID NO: 586729
cagggauguguugagguca

SEQ ID NO: 739819 - RNA, 19 nt, Artificial Sequence
  Description of Artificial Sequence: Synthetic oligonucleotide
  Antisense strand to SEQ ID NO: 739818
ugaccucaacacaucccug

SEQ ID NO: 739820 - RNA, 19 nt, Artificial Sequence
  Description of Artificial Sequence: Synthetic oligonucleotide
  Sense strand starting at position 2470 of SEQ ID NO: 586729
auguguugaggucagauga

SEQ ID NO: 739821 - RNA, 19 nt, Artificial Sequence
  Description of Artificial Sequence: Synthetic oligonucleotide
  Antisense strand to SEQ ID NO: 739820
ucaucugaccucaacacau

SEQ ID NO: 739822 - RNA, 19 nt, Artificial Sequence
  Description of Artificial Sequence: Synthetic oligonucleotide
  Sense strand starting at position 2534 of SEQ ID NO: 586729
ugccauugggaucagucau

SEQ ID NO: 739823 - RNA, 19 nt, Artificial Sequence
  Description of Artificial Sequence: Synthetic oligonucleotide
  Antisense strand to SEQ ID NO: 739822
augacugaucccaauggca

SEQ ID NO: 739824 - RNA, 19 nt, Artificial Sequence
  Description of Artificial Sequence: Synthetic oligonucleotide
  Sense strand starting at position 2694 of SEQ ID NO: 586729
caguuacccugagugaguu

SEQ ID NO: 739825 - RNA, 19 nt, Artificial Sequence
  Description of Artificial Sequence: Synthetic oligonucleotide
  Antisense strand to SEQ ID NO: 739824
aacucacucaggguaacug

SEQ ID NO: 739826 - RNA, 19 nt, Artificial Sequence
  Description of Artificial Sequence: Synthetic oligonucleotide
  Sense strand starting at position 2908 of SEQ ID NO: 586729
uuguguuacucacccucaa

SEQ ID NO: 739827 - RNA, 19 nt, Artificial Sequence
  Description of Artificial Sequence: Synthetic oligonucleotide
  Antisense strand to SEQ ID NO: 739826
uugagggugaguaacacaa

SEQ ID NO: 739828 - RNA, 19 nt, Artificial Sequence
  Description of Artificial Sequence: Synthetic oligonucleotide
  Sense strand starting at position 2994 of SEQ ID NO: 586729
caccgugauuucuccguuu

SEQ ID NO: 739829 - RNA, 19 nt, Artificial Sequence
  Description of Artificial Sequence: Synthetic oligonucleotide
  Antisense strand to SEQ ID NO: 739828
aaacggagaaaucacggug

SEQ ID NO: 739830 - RNA, 19 nt, Artificial Sequence
  Description of Artificial Sequence: Synthetic oligonucleotide
  Sense strand starting at position 3042 of SEQ ID NO: 586729
cucuguguuguagaugaga

SEQ ID NO: 739831 - RNA, 19 nt, Artificial Sequence
  Description of Artificial Sequence: Synthetic oligonucleotide
  Antisense strand to SEQ ID NO: 739830
ucucaucuacaacacagag

SEQ ID NO: 739832 - RNA, 19 nt, Artificial Sequence
  Description of Artificial Sequence: Synthetic oligonucleotide
  Sense strand starting at position 3044 of SEQ ID NO: 586729
cuguguuguagaugagaau

SEQ ID NO: 739833 - RNA, 19 nt, Artificial Sequence
  Description of Artificial Sequence: Synthetic oligonucleotide
  Antisense strand to SEQ ID NO: 739832
auucucaucuacaacacag

SEQ ID NO: 739834 - RNA, 19 nt, Artificial Sequence
  Description of Artificial Sequence: Synthetic oligonucleotide
  Sense strand starting at position 3045 of SEQ ID NO: 586729
uguguuguagaugagaauc

SEQ ID NO: 739835 - RNA, 19 nt, Artificial Sequence
  Description of Artificial Sequence: Synthetic oligonucleotide
  Antisense strand to SEQ ID NO: 739834
gauucucaucuacaacaca

SEQ ID NO: 739836 - RNA, 19 nt, Artificial Sequence
  Description of Artificial Sequence: Synthetic oligonucleotide
  Sense strand starting at position 3053 of SEQ ID NO: 586729
agaugagaaucggucugau

SEQ ID NO: 739837 - RNA, 19 nt, Artificial Sequence
  Description of Artificial Sequence: Synthetic oligonucleotide
  Antisense strand to SEQ ID NO: 739836
aucagaccgauucucaucu

SEQ ID NO: 739838 - RNA, 19 nt, Artificial Sequence
  Description of Artificial Sequence: Synthetic oligonucleotide
  Sense strand starting at position 3077 of SEQ ID NO: 586729
cauuguaaauucuugagga

SEQ ID NO: 739839 - RNA, 19 nt, Artificial Sequence
  Description of Artificial Sequence: Synthetic oligonucleotide
  Antisense strand to SEQ ID NO: 739838
uccucaagaauuuacaaug

SEQ ID NO: 739840 - RNA, 19 nt, Artificial Sequence
  Description of Artificial Sequence: Synthetic oligonucleotide
  Sense strand starting at position 3363 of SEQ ID NO: 586729
gaggaaaguugcuuccucu

SEQ ID NO: 739841 - RNA, 19 nt, Artificial Sequence
  Description of Artificial Sequence: Synthetic oligonucleotide
  Antisense strand to SEQ ID NO: 739840
agaggaagcaacuuuccuc

SEQ ID NO: 739842 - RNA, 19 nt, Artificial Sequence
  Description of Artificial Sequence: Synthetic oligonucleotide
  Sense strand starting at position 3381 of SEQ ID NO: 586729
uguguuaagccuuggaaga

SEQ ID NO: 739843 - RNA, 19 nt, Artificial Sequence
  Description of Artificial Sequence: Synthetic oligonucleotide
  Antisense strand to SEQ ID NO: 739842
ucuuccaaggcuuaacaca

SEQ ID NO: 739844 - RNA, 19 nt, Artificial Sequence
  Description of Artificial Sequence: Synthetic oligonucleotide
  Sense strand starting at position 3382 of SEQ ID NO: 586729
guguuaagccuuggaagau

SEQ ID NO: 739845 - RNA, 19 nt, Artificial Sequence
  Description of Artificial Sequence: Synthetic oligonucleotide
  Antisense strand to SEQ ID NO: 739844
aucuuccaaggcuuaacac

SEQ ID NO: 739846 - RNA, 19 nt, Artificial Sequence
  Description of Artificial Sequence: Synthetic oligonucleotide
  Sense strand starting at position 3489 of SEQ ID NO: 586729
agagucucagcuuaguaaa

SEQ ID NO: 739847 - RNA, 19 nt, Artificial Sequence
  Description of Artificial Sequence: Synthetic oligonucleotide
  Antisense strand to SEQ ID NO: 739846
uuuacuaagcugagacucu

SEQ ID NO: 739848 - RNA, 19 nt, Artificial Sequence
  Description of Artificial Sequence: Synthetic oligonucleotide
  Sense strand starting at position 3706 of SEQ ID NO: 586729
gguuuauauagggagcucu

SEQ ID NO: 739849 - RNA, 19 nt, Artificial Sequence
  Description of Artificial Sequence: Synthetic oligonucleotide
  Antisense strand to SEQ ID NO: 739848
agagcucccuauauaaacc

SEQ ID NO: 739850 - RNA, 19 nt, Artificial Sequence
  Description of Artificial Sequence: Synthetic oligonucleotide
  Sense strand starting at position 3821 of SEQ ID NO: 586729
ggagguuacacuugagaug

SEQ ID NO: 739851 - RNA, 19 nt, Artificial Sequence
  Description of Artificial Sequence: Synthetic oligonucleotide
  Antisense strand to SEQ ID NO: 739850
caucucaaguguaaccucc

SEQ ID NO: 739852 - RNA, 19 nt, Artificial Sequence
  Description of Artificial Sequence: Synthetic oligonucleotide
  Sense strand starting at position 3822 of SEQ ID NO: 586729
gagguuacacuugagaugu

SEQ ID NO: 739853 - RNA, 19 nt, Artificial Sequence
  Description of Artificial Sequence: Synthetic oligonucleotide
  Antisense strand to SEQ ID NO: 739852
acaucucaaguguaaccuc

SEQ ID NO: 739854 - RNA, 19 nt, Artificial Sequence
  Description of Artificial Sequence: Synthetic oligonucleotide
  Sense strand starting at position 3930 of SEQ ID NO: 586729
caaugugaauugguaauca

SEQ ID NO: 739855 - RNA, 19 nt, Artificial Sequence
  Description of Artificial Sequence: Synthetic oligonucleotide
  Antisense strand to SEQ ID NO: 739854
ugauuaccaauucacauug

SEQ ID NO: 739856 - RNA, 19 nt, Artificial Sequence
  Description of Artificial Sequence: Synthetic oligonucleotide
  Sense strand starting at position 3934 of SEQ ID NO: 586729
gugaauugguaaucauagu

SEQ ID NO: 739857 - RNA, 19 nt, Artificial Sequence
  Description of Artificial Sequence: Synthetic oligonucleotide
  Antisense strand to SEQ ID NO: 739856
acuaugauuaccaauucac

SEQ ID NO: 739858 - RNA, 19 nt, Artificial Sequence
  Description of Artificial Sequence: Synthetic oligonucleotide
  Sense strand starting at position 16 of SEQ ID NO: 586730
ugaauuguaucagcaugua

SEQ ID NO: 739859 - RNA, 19 nt, Artificial Sequence
  Description of Artificial Sequence: Synthetic oligonucleotide
  Antisense strand to SEQ ID NO: 739858
uacaugcugauacaauuca

SEQ ID NO: 739860 - RNA, 19 nt, Artificial Sequence
  Description of Artificial Sequence: Synthetic oligonucleotide
  Sense strand starting at position 503 of SEQ ID NO: 586730
cagacaaugcuagaauugu

SEQ ID NO: 739861 - RNA, 19 nt, Artificial Sequence
  Description of Artificial Sequence: Synthetic oligonucleotide
  Antisense strand to SEQ ID NO: 739860
acaauucuagcauugucug

SEQ ID NO: 739862 - RNA, 19 nt, Artificial Sequence
  Description of Artificial Sequence: Synthetic oligonucleotide
  Sense strand starting at position 553 of SEQ ID NO: 586730
ggauacugcugcuugggaa

SEQ ID NO: 739863 - RNA, 19 nt, Artificial Sequence
  Description of Artificial Sequence: Synthetic oligonucleotide
  Antisense strand to SEQ ID NO: 739862
uucccaagcagcaguaucc

SEQ ID NO: 739864 - RNA, 19 nt, Artificial Sequence
  Description of Artificial Sequence: Synthetic oligonucleotide
  Sense strand starting at position 556 of SEQ ID NO: 586730
uacugcugcuugggaagau

SEQ ID NO: 739865 - RNA, 19 nt, Artificial Sequence
  Description of Artificial Sequence: Synthetic oligonucleotide
  Antisense strand to SEQ ID NO: 739864
aucuucccaagcagcagua

SEQ ID NO: 739866 - RNA, 19 nt, Artificial Sequence
  Description of Artificial Sequence: Synthetic oligonucleotide
  Sense strand starting at position 602 of SEQ ID NO: 586730
gaugaaggcugagaagauc

SEQ ID NO: 739867 - RNA, 19 nt, Artificial Sequence
  Description of Artificial Sequence: Synthetic oligonucleotide
  Antisense strand to SEQ ID NO: 739866
gaucuucucagccuucauc

SEQ ID NO: 739868 - RNA, 19 nt, Artificial Sequence
  Description of Artificial Sequence: Synthetic oligonucleotide
  Sense strand starting at position 617 of SEQ ID NO: 586730
gaucgcagcugagaagaua

SEQ ID NO: 739869 - RNA, 19 nt, Artificial Sequence
  Description of Artificial Sequence: Synthetic oligonucleotide
  Antisense strand to SEQ ID NO: 739868
uaucuucucagcugcgauc

SEQ ID NO: 739870 - RNA, 19 nt, Artificial Sequence
  Description of Artificial Sequence: Synthetic oligonucleotide
  Sense strand starting at position 733 of SEQ ID NO: 586730
gucgaguugggaggagaaa

SEQ ID NO: 739871 - RNA, 19 nt, Artificial Sequence
  Description of Artificial Sequence: Synthetic oligonucleotide
  Antisense strand to SEQ ID NO: 739870
uuucuccucccaacucgac

SEQ ID NO: 739872 - RNA, 19 nt, Artificial Sequence
  Description of Artificial Sequence: Synthetic oligonucleotide
  Sense strand starting at position 745 of SEQ ID NO: 586730
ggagaaaggugaucugggu

SEQ ID NO: 739873 - RNA, 19 nt, Artificial Sequence
  Description of Artificial Sequence: Synthetic oligonucleotide
  Antisense strand to SEQ ID NO: 739872
acccagaucaccuuucucc

SEQ ID NO: 739874 - RNA, 19 nt, Artificial Sequence
  Description of Artificial Sequence: Synthetic oligonucleotide
  Sense strand starting at position 754 of SEQ ID NO: 586730
ugaucuggguggcgagaau

SEQ ID NO: 739875 - RNA, 19 nt, Artificial Sequence
  Description of Artificial Sequence: Synthetic oligonucleotide
  Antisense strand to SEQ ID NO: 739874
auucucgccacccagauca

SEQ ID NO: 739876 - RNA, 19 nt, Artificial Sequence
  Description of Artificial Sequence: Synthetic oligonucleotide
  Sense strand starting at position 816 of SEQ ID NO: 586730
uugugaucugagugcaaac

SEQ ID NO: 739877 - RNA, 19 nt, Artificial Sequence
  Description of Artificial Sequence: Synthetic oligonucleotide
  Antisense strand to SEQ ID NO: 739876
guuugcacucagaucacaa

SEQ ID NO: 739878 - RNA, 19 nt, Artificial Sequence
  Description of Artificial Sequence: Synthetic oligonucleotide
  Sense strand starting at position 918 of SEQ ID NO: 586730
guucuauuugcgggccauu

SEQ ID NO: 739879 - RNA, 19 nt, Artificial Sequence
  Description of Artificial Sequence: Synthetic oligonucleotide
  Antisense strand to SEQ ID NO: 739878
aauggcccgcaaauagaac

SEQ ID NO: 739880 - RNA, 19 nt, Artificial Sequence
  Description of Artificial Sequence: Synthetic oligonucleotide
  Sense strand starting at position 1571 of SEQ ID NO: 586730
ggagccuucuuggaccaau

SEQ ID NO: 739881 - RNA, 19 nt, Artificial Sequence
  Description of Artificial Sequence: Synthetic oligonucleotide
  Antisense strand to SEQ ID NO: 739880
auugguccaagaaggcucc

SEQ ID NO: 739882 - RNA, 19 nt, Artificial Sequence
  Description of Artificial Sequence: Synthetic oligonucleotide
  Sense strand starting at position 2180 of SEQ ID NO: 586730
aggaguuacucauuccuuc

SEQ ID NO: 739883 - RNA, 19 nt, Artificial Sequence
  Description of Artificial Sequence: Synthetic oligonucleotide
  Antisense strand to SEQ ID NO: 739882
gaaggaaugaguaacuccu

SEQ ID NO: 739884 - RNA, 19 nt, Artificial Sequence
  Description of Artificial Sequence: Synthetic oligonucleotide
  Sense strand starting at position 2251 of SEQ ID NO: 586730
aaggaaggcugauaaccau

SEQ ID NO: 739885 - RNA, 19 nt, Artificial Sequence
  Description of Artificial Sequence: Synthetic oligonucleotide
  Antisense strand to SEQ ID NO: 739884
augguuaucagccuuccuu

SEQ ID NO: 739886 - RNA, 19 nt, Artificial Sequence
  Description of Artificial Sequence: Synthetic oligonucleotide
  Sense strand starting at position 2276 of SEQ ID NO: 586730
acucguuacuuccguaagu

SEQ ID NO: 739887 - RNA, 19 nt, Artificial Sequence
  Description of Artificial Sequence: Synthetic oligonucleotide
  Antisense strand to SEQ ID NO: 739886
acuuacggaaguaacgagu

SEQ ID NO: 739888 - RNA, 19 nt, Artificial Sequence
  Description of Artificial Sequence: Synthetic oligonucleotide
  Sense strand starting at position 2332 of SEQ ID NO: 586730
gagaauuugucuuuccgug

SEQ ID NO: 739889 - RNA, 19 nt, Artificial Sequence
  Description of Artificial Sequence: Synthetic oligonucleotide
  Antisense strand to SEQ ID NO: 739888
cacggaaagacaaauucuc

SEQ ID NO: 739890 - RNA, 19 nt, Artificial Sequence
  Description of Artificial Sequence: Synthetic oligonucleotide
  Sense strand starting at position 2337 of SEQ ID NO: 586730
uuugucuuuccgugccuga

SEQ ID NO: 739891 - RNA, 19 nt, Artificial Sequence
  Description of Artificial Sequence: Synthetic oligonucleotide
  Antisense strand to SEQ ID NO: 739890
ucaggcacggaaagacaaa

SEQ ID NO: 739892 - RNA, 19 nt, Artificial Sequence
  Description of Artificial Sequence: Synthetic oligonucleotide
  Sense strand starting at position 2338 of SEQ ID NO: 586730
uugucuuuccgugccugaa

SEQ ID NO: 739893 - RNA, 19 nt, Artificial Sequence
  Description of Artificial Sequence: Synthetic oligonucleotide
  Antisense strand to SEQ ID NO: 739892
uucaggcacggaaagacaa

SEQ ID NO: 739894 - RNA, 19 nt, Artificial Sequence
  Description of Artificial Sequence: Synthetic oligonucleotide
  Sense strand starting at position 2341 of SEQ ID NO: 586730
ucuuuccgugccugaaagu

SEQ ID NO: 739895 - RNA, 19 nt, Artificial Sequence
  Description of Artificial Sequence: Synthetic oligonucleotide
  Antisense strand to SEQ ID NO: 739894
acuuucaggcacggaaaga

SEQ ID NO: 739896 - RNA, 19 nt, Artificial Sequence
  Description of Artificial Sequence: Synthetic oligonucleotide
  Sense strand starting at position 2347 of SEQ ID NO: 586730
cgugccugaaaguguagau

SEQ ID NO: 739897 - RNA, 19 nt, Artificial Sequence
  Description of Artificial Sequence: Synthetic oligonucleotide
  Antisense strand to SEQ ID NO: 739896
aucuacacuuucaggcacg

SEQ ID NO: 739898 - RNA, 19 nt, Artificial Sequence
  Description of Artificial Sequence: Synthetic oligonucleotide
  Sense strand starting at position 2397 of SEQ ID NO: 586730
aauuaugugagguggugau

SEQ ID NO: 739899 - RNA, 19 nt, Artificial Sequence
  Description of Artificial Sequence: Synthetic oligonucleotide
  Antisense strand to SEQ ID NO: 739898
aucaccaccucacauaauu

SEQ ID NO: 739900 - RNA, 19 nt, Artificial Sequence
  Description of Artificial Sequence: Synthetic oligonucleotide
  Sense strand starting at position 2794 of SEQ ID NO: 586730
ucaauagcuucugggauag

SEQ ID NO: 739901 - RNA, 19 nt, Artificial Sequence
  Description of Artificial Sequence: Synthetic oligonucleotide
  Antisense strand to SEQ ID NO: 739900
cuaucccagaagcuauuga

SEQ ID NO: 739902 - RNA, 19 nt, Artificial Sequence
  Description of Artificial Sequence: Synthetic oligonucleotide
  Sense strand starting at position 2796 of SEQ ID NO: 586730
aauagcuucugggauagau

SEQ ID NO: 739903 - RNA, 19 nt, Artificial Sequence
  Description of Artificial Sequence: Synthetic oligonucleotide
  Antisense strand to SEQ ID NO: 739902
aucuaucccagaagcuauu

SEQ ID NO: 739904 - RNA, 19 nt, Artificial Sequence
  Description of Artificial Sequence: Synthetic oligonucleotide
  Sense strand starting at position 2798 of SEQ ID NO: 586730
uagcuucugggauagaugu

SEQ ID NO: 739905 - RNA, 19 nt, Artificial Sequence
  Description of Artificial Sequence: Synthetic oligonucleotide
  Antisense strand to SEQ ID NO: 739904
acaucuaucccagaagcua

SEQ ID NO: 739906 - RNA, 19 nt, Artificial Sequence
  Description of Artificial Sequence: Synthetic oligonucleotide
  Sense strand starting at position 2827 of SEQ ID NO: 586730
uacauugaugaaugguaua

SEQ ID NO: 739907 - RNA, 19 nt, Artificial Sequence
  Description of Artificial Sequence: Synthetic oligonucleotide
  Antisense strand to SEQ ID NO: 739906
uauaccauucaucaaugua

SEQ ID NO: 739908 - RNA, 19 nt, Artificial Sequence
  Description of Artificial Sequence: Synthetic oligonucleotide
  Sense strand starting at position 2832 of SEQ ID NO: 586730
ugaugaaugguauaguggu

SEQ ID NO: 739909 - RNA, 19 nt, Artificial Sequence
  Description of Artificial Sequence: Synthetic oligonucleotide
  Antisense strand to SEQ ID NO: 739908
accacuauaccauucauca

SEQ ID NO: 739910 - RNA, 19 nt, Artificial Sequence
  Description of Artificial Sequence: Synthetic oligonucleotide
  Sense strand starting at position 2839 of SEQ ID NO: 586730
ugguauaguggugaaguca

SEQ ID NO: 739911 - RNA, 19 nt, Artificial Sequence
  Description of Artificial Sequence: Synthetic oligonucleotide
  Antisense strand to SEQ ID NO: 739910
ugacuucaccacuauacca

SEQ ID NO: 739912 - RNA, 19 nt, Artificial Sequence
  Description of Artificial Sequence: Synthetic oligonucleotide
  Sense strand starting at position 2989 of SEQ ID NO: 586730
uuuaacauguuguagaaga

SEQ ID NO: 739913 - RNA, 19 nt, Artificial Sequence
  Description of Artificial Sequence: Synthetic oligonucleotide
  Antisense strand to SEQ ID NO: 739912
ucuucuacaacauguuaaa

SEQ ID NO: 739914 - RNA, 19 nt, Artificial Sequence
  Description of Artificial Sequence: Synthetic oligonucleotide
  Sense strand starting at position 3162 of SEQ ID NO: 586730
gaguguuauuauuaucuag

SEQ ID NO: 739915 - RNA, 19 nt, Artificial Sequence
  Description of Artificial Sequence: Synthetic oligonucleotide
  Antisense strand to SEQ ID NO: 739914
cuagauaauaauaacacuc

SEQ ID NO: 739916 - RNA, 19 nt, Artificial Sequence
  Description of Artificial Sequence: Synthetic oligonucleotide
  Sense strand starting at position 3164 of SEQ ID NO: 586730
guguuauuauuaucuagug

SEQ ID NO: 739917 - RNA, 19 nt, Artificial Sequence
  Description of Artificial Sequence: Synthetic oligonucleotide
  Antisense strand to SEQ ID NO: 739916
cacuagauaauaauaacac

SEQ ID NO: 739918 - RNA, 19 nt, Artificial Sequence
  Description of Artificial Sequence: Synthetic oligonucleotide
  Sense strand starting at position 3188 of SEQ ID NO: 586730
guuccaucuuauuguucua

SEQ ID NO: 739919 - RNA, 19 nt, Artificial Sequence
  Description of Artificial Sequence: Synthetic oligonucleotide
  Antisense strand to SEQ ID NO: 739918
uagaacaauaagauggaac

SEQ ID NO: 739920 - RNA, 19 nt, Artificial Sequence
  Description of Artificial Sequence: Synthetic oligonucleotide
  Sense strand starting at position 3240 of SEQ ID NO: 586730
aguuaauggcuuuacccau

SEQ ID NO: 739921 - RNA, 19 nt, Artificial Sequence
  Description of Artificial Sequence: Synthetic oligonucleotide
  Antisense strand to SEQ ID NO: 739920
auggguaaagccauuaacu

SEQ ID NO: 739922 - RNA, 19 nt, Artificial Sequence
  Description of Artificial Sequence: Synthetic oligonucleotide
  Sense strand starting at position 3319 of SEQ ID NO: 586730
caguguucuuuagaaguuc

SEQ ID NO: 739923 - RNA, 19 nt, Artificial Sequence
  Description of Artificial Sequence: Synthetic oligonucleotide
  Antisense strand to SEQ ID NO: 739922
gaacuucuaaagaacacug

SEQ ID NO: 739924 - RNA, 19 nt, Artificial Sequence
  Description of Artificial Sequence: Synthetic oligonucleotide
  Sense strand starting at position 3336 of SEQ ID NO: 586730
uccuuugugaaggguccau

SEQ ID NO: 739925 - RNA, 19 nt, Artificial Sequence
  Description of Artificial Sequence: Synthetic oligonucleotide
  Antisense strand to SEQ ID NO: 739924
auggacccuucacaaagga

SEQ ID NO: 739926 - RNA, 19 nt, Artificial Sequence
  Description of Artificial Sequence: Synthetic oligonucleotide
  Sense strand starting at position 3377 of SEQ ID NO: 586730
gucucaaagugucuuuaaa

SEQ ID NO: 739927 - RNA, 19 nt, Artificial Sequence
  Description of Artificial Sequence: Synthetic oligonucleotide
  Antisense strand to SEQ ID NO: 739926
uuuaaagacacuuugagac

SEQ ID NO: 739928 - RNA, 19 nt, Artificial Sequence
  Description of Artificial Sequence: Synthetic oligonucleotide
  Sense strand starting at position 3379 of SEQ ID NO: 586730
cucaaagugucuuuaaauu

SEQ ID NO: 739929 - RNA, 19 nt, Artificial Sequence
  Description of Artificial Sequence: Synthetic oligonucleotide
  Antisense strand to SEQ ID NO: 739928
aauuuaaagacacuuugag

SEQ ID NO: 739930 - RNA, 19 nt, Artificial Sequence
  Description of Artificial Sequence: Synthetic oligonucleotide
  Sense strand starting at position 3744 of SEQ ID NO: 586730
aauucuugggcucagguaa

SEQ ID NO: 739931 - RNA, 19 nt, Artificial Sequence
  Description of Artificial Sequence: Synthetic oligonucleotide
  Antisense strand to SEQ ID NO: 739930
uuaccugagcccaagaauu

SEQ ID NO: 739932 - RNA, 19 nt, Artificial Sequence
  Description of Artificial Sequence: Synthetic oligonucleotide
  Sense strand starting at position 4 of SEQ ID NO: 586731
cuaccaaucuaggauagca

SEQ ID NO: 739933 - RNA, 19 nt, Artificial Sequence
  Description of Artificial Sequence: Synthetic oligonucleotide
  Antisense strand to SEQ ID NO: 739932
ugcuauccuagauugguag

SEQ ID NO: 739934 - RNA, 19 nt, Artificial Sequence
  Description of Artificial Sequence: Synthetic oligonucleotide
  Sense strand starting at position 109 of SEQ ID NO: 586731
ggaggagcuccgggucaaa

SEQ ID NO: 739935 - RNA, 19 nt, Artificial Sequence
  Description of Artificial Sequence: Synthetic oligonucleotide
  Antisense strand to SEQ ID NO: 739934
uuugacccggagcuccucc

SEQ ID NO: 739936 - RNA, 19 nt, Artificial Sequence
  Description of Artificial Sequence: Synthetic oligonucleotide
  Sense strand starting at position 209 of SEQ ID NO: 586731
auugaugacugucugcaaa

SEQ ID NO: 739937 - RNA, 19 nt, Artificial Sequence
  Description of Artificial Sequence: Synthetic oligonucleotide
  Antisense strand to SEQ ID NO: 739936
uuugcagacagucaucaau

SEQ ID NO: 739938 - RNA, 19 nt, Artificial Sequence
  Description of Artificial Sequence: Synthetic oligonucleotide
  Sense strand starting at position 211 of SEQ ID NO: 586731
ugaugacugucugcaaagu

SEQ ID NO: 739939 - RNA, 19 nt, Artificial Sequence
  Description of Artificial Sequence: Synthetic oligonucleotide
  Antisense strand to SEQ ID NO: 739938
acuuugcagacagucauca

SEQ ID NO: 739940 - RNA, 19 nt, Artificial Sequence
  Description of Artificial Sequence: Synthetic oligonucleotide
  Sense strand starting at position 255 of SEQ ID NO: 586731
gcacuagugcaccagauaa

SEQ ID NO: 739941 - RNA, 19 nt, Artificial Sequence
  Description of Artificial Sequence: Synthetic oligonucleotide
  Antisense strand to SEQ ID NO: 739940
uuaucuggugcacuagugc

SEQ ID NO: 739942 - RNA, 19 nt, Artificial Sequence
  Description of Artificial Sequence: Synthetic oligonucleotide
  Sense strand starting at position 273 of SEQ ID NO: 586731
aagaauuguugauauguca

SEQ ID NO: 739943 - RNA, 19 nt, Artificial Sequence
  Description of Artificial Sequence: Synthetic oligonucleotide
  Antisense strand to SEQ ID NO: 739942
ugacauaucaacaauucuu

SEQ ID NO: 739944 - RNA, 19 nt, Artificial Sequence
  Description of Artificial Sequence: Synthetic oligonucleotide
  Sense strand starting at position 280 of SEQ ID NO: 586731
guugauaugucagacccac

SEQ ID NO: 739945 - RNA, 19 nt, Artificial Sequence
  Description of Artificial Sequence: Synthetic oligonucleotide
  Antisense strand to SEQ ID NO: 739944
gugggucugacauaucaac

SEQ ID NO: 739946 - RNA, 19 nt, Artificial Sequence
  Description of Artificial Sequence: Synthetic oligonucleotide
  Sense strand starting at position 468 of SEQ ID NO: 586731
guaucucuguauuuaugua

SEQ ID NO: 739947 - RNA, 19 nt, Artificial Sequence
  Description of Artificial Sequence: Synthetic oligonucleotide
  Antisense strand to SEQ ID NO: 739946
uacauaaauacagagauac

SEQ ID NO: 739948 - RNA, 19 nt, Artificial Sequence
  Description of Artificial Sequence: Synthetic oligonucleotide
  Sense strand starting at position 662 of SEQ ID NO: 586731
cagucaccuguuugugcua

SEQ ID NO: 739949 - RNA, 19 nt, Artificial Sequence
  Description of Artificial Sequence: Synthetic oligonucleotide
  Antisense strand to SEQ ID NO: 739948
uagcacaaacaggugacug

SEQ ID NO: 739950 - RNA, 19 nt, Artificial Sequence
  Description of Artificial Sequence: Synthetic oligonucleotide
  Sense strand starting at position 667 of SEQ ID NO: 586731
accuguuugugcuagcaaa

SEQ ID NO: 739951 - RNA, 19 nt, Artificial Sequence
  Description of Artificial Sequence: Synthetic oligonucleotide
  Antisense strand to SEQ ID NO: 739950
uuugcuagcacaaacaggu

SEQ ID NO: 739952 - RNA, 19 nt, Artificial Sequence
  Description of Artificial Sequence: Synthetic oligonucleotide
  Sense strand starting at position 833 of SEQ ID NO: 586731
cagaguaccugugacuaca

SEQ ID NO: 739953 - RNA, 19 nt, Artificial Sequence
  Description of Artificial Sequence: Synthetic oligonucleotide
  Antisense strand to SEQ ID NO: 739952
uguagucacagguacucug

SEQ ID NO: 739954 - RNA, 19 nt, Artificial Sequence
  Description of Artificial Sequence: Synthetic oligonucleotide
  Sense strand starting at position 1015 of SEQ ID NO: 586731
aucuuaauguacuagugaa

SEQ ID NO: 739955 - RNA, 19 nt, Artificial Sequence
  Description of Artificial Sequence: Synthetic oligonucleotide
  Antisense strand to SEQ ID NO: 739954
uucacuaguacauuaagau

SEQ ID NO: 739956 - RNA, 19 nt, Artificial Sequence
  Description of Artificial Sequence: Synthetic oligonucleotide
  Sense strand starting at position 1041 of SEQ ID NO: 586731
cccacuguacauuggauua

SEQ ID NO: 739957 - RNA, 19 nt, Artificial Sequence
  Description of Artificial Sequence: Synthetic oligonucleotide
  Antisense strand to SEQ ID NO: 739956
uaauccaauguacaguggg

SEQ ID NO: 739958 - RNA, 19 nt, Artificial Sequence
  Description of Artificial Sequence: Synthetic oligonucleotide
  Sense strand starting at position 1053 of SEQ ID NO: 586731
uggauuaugcagugucauc

SEQ ID NO: 739959 - RNA, 19 nt, Artificial Sequence
  Description of Artificial Sequence: Synthetic oligonucleotide
  Antisense strand to SEQ ID NO: 739958
gaugacacugcauaaucca

SEQ ID NO: 739960 - RNA, 19 nt, Artificial Sequence
  Description of Artificial Sequence: Synthetic oligonucleotide
  Sense strand starting at position 1086 of SEQ ID NO: 586731
agaagcuaaugucauggaa

SEQ ID NO: 739961 - RNA, 19 nt, Artificial Sequence
  Description of Artificial Sequence: Synthetic oligonucleotide
  Antisense strand to SEQ ID NO: 739960
uuccaugacauuagcuucu

SEQ ID NO: 739962 - RNA, 19 nt, Artificial Sequence
  Description of Artificial Sequence: Synthetic oligonucleotide
  Sense strand starting at position 1089 of SEQ ID NO: 586731
agcuaaugucauggaagga

SEQ ID NO: 739963 - RNA, 19 nt, Artificial Sequence
  Description of Artificial Sequence: Synthetic oligonucleotide
  Antisense strand to SEQ ID NO: 739962
uccuuccaugacauuagcu

SEQ ID NO: 739964 - RNA, 19 nt, Artificial Sequence
  Description of Artificial Sequence: Synthetic oligonucleotide
  Sense strand starting at position 1102 of SEQ ID NO: 586731
gaaggacuauuguaugcua

SEQ ID NO: 739965 - RNA, 19 nt, Artificial Sequence
  Description of Artificial Sequence: Synthetic oligonucleotide
  Antisense strand to SEQ ID NO: 739964
uagcauacaauaguccuuc

SEQ ID NO: 739966 - RNA, 19 nt, Artificial Sequence
  Description of Artificial Sequence: Synthetic oligonucleotide
  Sense strand starting at position 1136 of SEQ ID NO: 586731
gcuuauagcugccacacua

SEQ ID NO: 739967 - RNA, 19 nt, Artificial Sequence
  Description of Artificial Sequence: Synthetic oligonucleotide
  Antisense strand to SEQ ID NO: 739966
uaguguggcagcuauaagc

SEQ ID NO: 739968 - RNA, 19 nt, Artificial Sequence
  Description of Artificial Sequence: Synthetic oligonucleotide
  Sense strand starting at position 1176 of SEQ ID NO: 586731
gaagcaagguaagaauguu

SEQ ID NO: 739969 - RNA, 19 nt, Artificial Sequence
  Description of Artificial Sequence: Synthetic oligonucleotide
  Antisense strand to SEQ ID NO: 739968
aacauucuuaccuugcuuc

SEQ ID NO: 739970 - RNA, 19 nt, Artificial Sequence
  Description of Artificial Sequence: Synthetic oligonucleotide
  Sense strand starting at position 1182 of SEQ ID NO: 586731
agguaagaauguuaggagu

SEQ ID NO: 739971 - RNA, 19 nt, Artificial Sequence
  Description of Artificial Sequence: Synthetic oligonucleotide
  Antisense strand to SEQ ID NO: 739970
acuccuaacauucuuaccu

SEQ ID NO: 739972 - RNA, 19 nt, Artificial Sequence
  Description of Artificial Sequence: Synthetic oligonucleotide
  Sense strand starting at position 1184 of SEQ ID NO: 586731
guaagaauguuaggaguua

SEQ ID NO: 739973 - RNA, 19 nt, Artificial Sequence
  Description of Artificial Sequence: Synthetic oligonucleotide
  Antisense strand to SEQ ID NO: 739972
uaacuccuaacauucuuac

SEQ ID NO: 739974 - RNA, 19 nt, Artificial Sequence
  Description of Artificial Sequence: Synthetic oligonucleotide
  Sense strand starting at position 1236 of SEQ ID NO: 586731
ccugaaauauuagaaagug

SEQ ID NO: 739975 - RNA, 19 nt, Artificial Sequence
  Description of Artificial Sequence: Synthetic oligonucleotide
  Antisense strand to SEQ ID NO: 739974
cacuuucuaauauuucagg

SEQ ID NO: 739976 - RNA, 19 nt, Artificial Sequence
  Description of Artificial Sequence: Synthetic oligonucleotide
  Sense strand starting at position 1244 of SEQ ID NO: 586731
auuagaaaguguuuccuau

SEQ ID NO: 739977 - RNA, 19 nt, Artificial Sequence
  Description of Artificial Sequence: Synthetic oligonucleotide
  Antisense strand to SEQ ID NO: 739976
auaggaaacacuuucuaau

SEQ ID NO: 739978 - RNA, 19 nt, Artificial Sequence
  Description of Artificial Sequence: Synthetic oligonucleotide
  Sense strand starting at position 1496 of SEQ ID NO: 586731
aagacuguauuccaggaaa

SEQ ID NO: 739979 - RNA, 19 nt, Artificial Sequence
  Description of Artificial Sequence: Synthetic oligonucleotide
  Antisense strand to SEQ ID NO: 739978
uuuccuggaauacagucuu

SEQ ID NO: 739980 - RNA, 19 nt, Artificial Sequence
  Description of Artificial Sequence: Synthetic oligonucleotide
  Sense strand starting at position 1766 of SEQ ID NO: 586731
ccugccugucugggaagaa

SEQ ID NO: 739981 - RNA, 19 nt, Artificial Sequence
  Description of Artificial Sequence: Synthetic oligonucleotide
  Antisense strand to SEQ ID NO: 739980
uucuucccagacaggcagg

SEQ ID NO: 739982 - RNA, 19 nt, Artificial Sequence
  Description of Artificial Sequence: Synthetic oligonucleotide
  Sense strand starting at position 1807 of SEQ ID NO: 586731
aacccaucugcccgugaga

SEQ ID NO: 739983 - RNA, 19 nt, Artificial Sequence
  Description of Artificial Sequence: Synthetic oligonucleotide
  Antisense strand to SEQ ID NO: 739982
ucucacgggcagauggguu

SEQ ID NO: 739984 - RNA, 19 nt, Artificial Sequence
  Description of Artificial Sequence: Synthetic oligonucleotide
  Sense strand starting at position 1809 of SEQ ID NO: 586731
cccaucugcccgugagacu

SEQ ID NO: 739985 - RNA, 19 nt, Artificial Sequence
  Description of Artificial Sequence: Synthetic oligonucleotide
  Antisense strand to SEQ ID NO: 739984
agucucacgggcagauggg

SEQ ID NO: 739986 - RNA, 19 nt, Artificial Sequence
  Description of Artificial Sequence: Synthetic oligonucleotide
  Sense strand starting at position 1810 of SEQ ID NO: 586731
ccaucugcccgugagacuu

SEQ ID NO: 739987 - RNA, 19 nt, Artificial Sequence
  Description of Artificial Sequence: Synthetic oligonucleotide
  Antisense strand to SEQ ID NO: 739986
aagucucacgggcagaugg

SEQ ID NO: 739988 - RNA, 19 nt, Artificial Sequence
  Description of Artificial Sequence: Synthetic oligonucleotide
  Sense strand starting at position 2056 of SEQ ID NO: 586731
gcgcuuucccaagugcaga

SEQ ID NO: 739989 - RNA, 19 nt, Artificial Sequence
  Description of Artificial Sequence: Synthetic oligonucleotide
  Antisense strand to SEQ ID NO: 739988
ucugcacuugggaaagcgc

SEQ ID NO: 739990 - RNA, 19 nt, Artificial Sequence
  Description of Artificial Sequence: Synthetic oligonucleotide
  Sense strand starting at position 2057 of SEQ ID NO: 586731
cgcuuucccaagugcagau

SEQ ID NO: 739991 - RNA, 19 nt, Artificial Sequence
  Description of Artificial Sequence: Synthetic oligonucleotide
  Antisense strand to SEQ ID NO: 739990
aucugcacuugggaaagcg

SEQ ID NO: 739992 - RNA, 19 nt, Artificial Sequence
  Description of Artificial Sequence: Synthetic oligonucleotide
  Sense strand starting at position 2066 of SEQ ID NO: 586731
aagugcagauuugaucaua

SEQ ID NO: 739993 - RNA, 19 nt, Artificial Sequence
  Description of Artificial Sequence: Synthetic oligonucleotide
  Antisense strand to SEQ ID NO: 739992
uaugaucaaaucugcacuu

SEQ ID NO: 739994 - RNA, 19 nt, Artificial Sequence
  Description of Artificial Sequence: Synthetic oligonucleotide
  Sense strand starting at position 2097 of SEQ ID NO: 586731
uuugaauccuccugugacu

SEQ ID NO: 739995 - RNA, 19 nt, Artificial Sequence
  Description of Artificial Sequence: Synthetic oligonucleotide
  Antisense strand to SEQ ID NO: 739994
agucacaggaggauucaaa

SEQ ID NO: 739996 - RNA, 19 nt, Artificial Sequence
  Description of Artificial Sequence: Synthetic oligonucleotide
  Sense strand starting at position 3501 of SEQ ID NO: 586731
cuugcagcaucuggaaaua

SEQ ID NO: 739997 - RNA, 19 nt, Artificial Sequence
  Description of Artificial Sequence: Synthetic oligonucleotide
  Antisense strand to SEQ ID NO: 739996
uauuuccagaugcugcaag

SEQ ID NO: 739998 - RNA, 19 nt, Artificial Sequence
  Description of Artificial Sequence: Synthetic oligonucleotide
  Sense strand starting at position 3673 of SEQ ID NO: 586731
aggaucauauccuaucaag

SEQ ID NO: 739999 - RNA, 19 nt, Artificial Sequence
  Description of Artificial Sequence: Synthetic oligonucleotide
  Antisense strand to SEQ ID NO: 739998
cuugauaggauaugauccu

SEQ ID NO: 740000 - RNA, 19 nt, Artificial Sequence
  Description of Artificial Sequence: Synthetic oligonucleotide
  Sense strand starting at position 155 of SEQ ID NO: 586732
uguauauuacaucacugca

SEQ ID NO: 740001 - RNA, 19 nt, Artificial Sequence
  Description of Artificial Sequence: Synthetic oligonucleotide
  Antisense strand to SEQ ID NO: 740000
ugcagugauguaauauaca

SEQ ID NO: 740002 - RNA, 19 nt, Artificial Sequence
  Description of Artificial Sequence: Synthetic oligonucleotide
  Sense strand starting at position 197 of SEQ ID NO: 586732
uuguguauucuccacugga

SEQ ID NO: 740003 - RNA, 19 nt, Artificial Sequence
  Description of Artificial Sequence: Synthetic oligonucleotide
  Antisense strand to SEQ ID NO: 740002
uccaguggagaauacacaa

SEQ ID NO: 740004 - RNA, 19 nt, Artificial Sequence
  Description of Artificial Sequence: Synthetic oligonucleotide
  Sense strand starting at position 200 of SEQ ID NO: 586732
uguauucuccacuggauug

SEQ ID NO: 740005 - RNA, 19 nt, Artificial Sequence
  Description of Artificial Sequence: Synthetic oligonucleotide
  Antisense strand to SEQ ID NO: 740004
caauccaguggagaauaca

SEQ ID NO: 740006 - RNA, 19 nt, Artificial Sequence
  Description of Artificial Sequence: Synthetic oligonucleotide
  Sense strand starting at position 219 of SEQ ID NO: 586732
ggaguucuuagaugguaac

SEQ ID NO: 740007 - RNA, 19 nt, Artificial Sequence
  Description of Artificial Sequence: Synthetic oligonucleotide
  Antisense strand to SEQ ID NO: 740006
guuaccaucuaagaacucc

SEQ ID NO: 740008 - RNA, 19 nt, Artificial Sequence
  Description of Artificial Sequence: Synthetic oligonucleotide
  Sense strand starting at position 354 of SEQ ID NO: 586732
gcauaaagaguuuaauacu

SEQ ID NO: 740009 - RNA, 19 nt, Artificial Sequence
  Description of Artificial Sequence: Synthetic oligonucleotide
  Antisense strand to SEQ ID NO: 740008
aguauuaaacucuuuaugc

SEQ ID NO: 740010 - RNA, 19 nt, Artificial Sequence
  Description of Artificial Sequence: Synthetic oligonucleotide
  Sense strand starting at position 369 of SEQ ID NO: 586732
uacuucuccgaaggugaca

SEQ ID NO: 740011 - RNA, 19 nt, Artificial Sequence
  Description of Artificial Sequence: Synthetic oligonucleotide
  Antisense strand to SEQ ID NO: 740010
ugucaccuucggagaagua

SEQ ID NO: 740012 - RNA, 19 nt, Artificial Sequence
  Description of Artificial Sequence: Synthetic oligonucleotide
  Sense strand starting at position 454 of SEQ ID NO: 586732
cuguuuauuugauuguauc

SEQ ID NO: 740013 - RNA, 19 nt, Artificial Sequence
  Description of Artificial Sequence: Synthetic oligonucleotide
  Antisense strand to SEQ ID NO: 740012
gauacaaucaaauaaacag

SEQ ID NO: 740014 - RNA, 19 nt, Artificial Sequence
  Description of Artificial Sequence: Synthetic oligonucleotide
  Sense strand starting at position 477 of SEQ ID NO: 586732
acuguacuggcauagugaa

SEQ ID NO: 740015 - RNA, 19 nt, Artificial Sequence
  Description of Artificial Sequence: Synthetic oligonucleotide
  Antisense strand to SEQ ID NO: 740014
uucacuaugccaguacagu

SEQ ID NO: 740016 - RNA, 19 nt, Artificial Sequence
  Description of Artificial Sequence: Synthetic oligonucleotide
  Sense strand starting at position 536 of SEQ ID NO: 586732
ugaccauugccaggaguua

SEQ ID NO: 740017 - RNA, 19 nt, Artificial Sequence
  Description of Artificial Sequence: Synthetic oligonucleotide
  Antisense strand to SEQ ID NO: 740016
uaacuccuggcaaugguca

SEQ ID NO: 740018 - RNA, 19 nt, Artificial Sequence
  Description of Artificial Sequence: Synthetic oligonucleotide
  Sense strand starting at position 613 of SEQ ID NO: 586732
uucugaaucuuggcuauag

SEQ ID NO: 740019 - RNA, 19 nt, Artificial Sequence
  Description of Artificial Sequence: Synthetic oligonucleotide
  Antisense strand to SEQ ID NO: 740018
cuauagccaagauucagaa

SEQ ID NO: 740020 - RNA, 19 nt, Artificial Sequence
  Description of Artificial Sequence: Synthetic oligonucleotide
  Sense strand starting at position 875 of SEQ ID NO: 586732
uaguguucugaccacaagu

SEQ ID NO: 740021 - RNA, 19 nt, Artificial Sequence
  Description of Artificial Sequence: Synthetic oligonucleotide
  Antisense strand to SEQ ID NO: 740020
acuuguggucagaacacua

SEQ ID NO: 740022 - RNA, 19 nt, Artificial Sequence
  Description of Artificial Sequence: Synthetic oligonucleotide
  Sense strand starting at position 899 of SEQ ID NO: 586732
ucuccuggacuugguuaaa

SEQ ID NO: 740023 - RNA, 19 nt, Artificial Sequence
  Description of Artificial Sequence: Synthetic oligonucleotide
  Antisense strand to SEQ ID NO: 740022
uuuaaccaaguccaggaga

SEQ ID NO: 740024 - RNA, 19 nt, Artificial Sequence
  Description of Artificial Sequence: Synthetic oligonucleotide
  Sense strand starting at position 1027 of SEQ ID NO: 586732
gugagcaagcaggagaauu

SEQ ID NO: 740025 - RNA, 19 nt, Artificial Sequence
  Description of Artificial Sequence: Synthetic oligonucleotide
  Antisense strand to SEQ ID NO: 740024
aauucuccugcuugcucac

SEQ ID NO: 740026 - RNA, 19 nt, Artificial Sequence
  Description of Artificial Sequence: Synthetic oligonucleotide
  Sense strand starting at position 1142 of SEQ ID NO: 586732
ugaagaagaugcuauuucu

SEQ ID NO: 740027 - RNA, 19 nt, Artificial Sequence
  Description of Artificial Sequence: Synthetic oligonucleotide
  Antisense strand to SEQ ID NO: 740026
agaaauagcaucuucuuca

SEQ ID NO: 740028 - RNA, 19 nt, Artificial Sequence
  Description of Artificial Sequence: Synthetic oligonucleotide
  Sense strand starting at position 1169 of SEQ ID NO: 586732
aacaguaucgguuauuaac

SEQ ID NO: 740029 - RNA, 19 nt, Artificial Sequence
  Description of Artificial Sequence: Synthetic oligonucleotide
  Antisense strand to SEQ ID NO: 740028
guuaauaaccgauacuguu

SEQ ID NO: 740030 - RNA, 19 nt, Artificial Sequence
  Description of Artificial Sequence: Synthetic oligonucleotide
  Sense strand starting at position 1354 of SEQ ID NO: 586732
gcaguacuguuauuuaacu

SEQ ID NO: 740031 - RNA, 19 nt, Artificial Sequence
  Description of Artificial Sequence: Synthetic oligonucleotide
  Antisense strand to SEQ ID NO: 740030
aguuaaauaacaguacugc

SEQ ID NO: 740032 - RNA, 19 nt, Artificial Sequence
  Description of Artificial Sequence: Synthetic oligonucleotide
  Sense strand starting at position 1537 of SEQ ID NO: 586732
gucccaaacccaugagaag

SEQ ID NO: 740033 - RNA, 19 nt, Artificial Sequence
  Description of Artificial Sequence: Synthetic oligonucleotide
  Antisense strand to SEQ ID NO: 740032
cuucucauggguuugggac

SEQ ID NO: 740034 - RNA, 19 nt, Artificial Sequence
  Description of Artificial Sequence: Synthetic oligonucleotide
  Sense strand starting at position 1827 of SEQ ID NO: 586732
gaguccucaguguauggga

SEQ ID NO: 740035 - RNA, 19 nt, Artificial Sequence
  Description of Artificial Sequence: Synthetic oligonucleotide
  Antisense strand to SEQ ID NO: 740034
ucccauacacugaggacuc

SEQ ID NO: 740036 - RNA, 19 nt, Artificial Sequence
  Description of Artificial Sequence: Synthetic oligonucleotide
  Sense strand starting at position 1843 of SEQ ID NO: 586732
ggaagacaacucugucuuc

SEQ ID NO: 740037 - RNA, 19 nt, Artificial Sequence
  Description of Artificial Sequence: Synthetic oligonucleotide
  Antisense strand to SEQ ID NO: 740036
gaagacagaguugucuucc

SEQ ID NO: 740038 - RNA, 19 nt, Artificial Sequence
  Description of Artificial Sequence: Synthetic oligonucleotide
  Sense strand starting at position 1988 of SEQ ID NO: 586732
aaaggagagccaugucaug

SEQ ID NO: 740039 - RNA, 19 nt, Artificial Sequence
  Description of Artificial Sequence: Synthetic oligonucleotide
  Antisense strand to SEQ ID NO: 740038
caugacauggcucuccuuu

SEQ ID NO: 740040 - RNA, 19 nt, Artificial Sequence
  Description of Artificial Sequence: Synthetic oligonucleotide
  Sense strand starting at position 2064 of SEQ ID NO: 586732
gugacaauucuagaucugu

SEQ ID NO: 740041 - RNA, 19 nt, Artificial Sequence
  Description of Artificial Sequence: Synthetic oligonucleotide
  Antisense strand to SEQ ID NO: 740040
acagaucuagaauugucac

SEQ ID NO: 740042 - RNA, 19 nt, Artificial Sequence
  Description of Artificial Sequence: Synthetic oligonucleotide
  Sense strand starting at position 2086 of SEQ ID NO: 586732
auugaagauacucgagcuu

SEQ ID NO: 740043 - RNA, 19 nt, Artificial Sequence
  Description of Artificial Sequence: Synthetic oligonucleotide
  Antisense strand to SEQ ID NO: 740042
aagcucgaguaucuucaau

SEQ ID NO: 740044 - RNA, 19 nt, Artificial Sequence
  Description of Artificial Sequence: Synthetic oligonucleotide
  Sense strand starting at position 2140 of SEQ ID NO: 586732
gggcaagaucaguagugug

SEQ ID NO: 740045 - RNA, 19 nt, Artificial Sequence
  Description of Artificial Sequence: Synthetic oligonucleotide
  Antisense strand to SEQ ID NO: 740044
cacacuacugaucuugccc

SEQ ID NO: 740046 - RNA, 19 nt, Artificial Sequence
  Description of Artificial Sequence: Synthetic oligonucleotide
  Sense strand starting at position 2211 of SEQ ID NO: 586732
uuaggcuugcguuuaguga

SEQ ID NO: 740047 - RNA, 19 nt, Artificial Sequence
  Description of Artificial Sequence: Synthetic oligonucleotide
  Antisense strand to SEQ ID NO: 740046
ucacuaaacgcaagccuaa

SEQ ID NO: 740048 - RNA, 19 nt, Artificial Sequence
  Description of Artificial Sequence: Synthetic oligonucleotide
  Sense strand starting at position 2219 of SEQ ID NO: 586732
gcguuuagugaggcguaga

SEQ ID NO: 740049 - RNA, 19 nt, Artificial Sequence
  Description of Artificial Sequence: Synthetic oligonucleotide
  Antisense strand to SEQ ID NO: 740048
ucuacgccucacuaaacgc

SEQ ID NO: 740050 - RNA, 19 nt, Artificial Sequence
  Description of Artificial Sequence: Synthetic oligonucleotide
  Sense strand starting at position 2222 of SEQ ID NO: 586732
uuuagugaggcguagagau

SEQ ID NO: 740051 - RNA, 19 nt, Artificial Sequence
  Description of Artificial Sequence: Synthetic oligonucleotide
  Antisense strand to SEQ ID NO: 740050
aucucuacgccucacuaaa

SEQ ID NO: 740052 - RNA, 19 nt, Artificial Sequence
  Description of Artificial Sequence: Synthetic oligonucleotide
  Sense strand starting at position 2224 of SEQ ID NO: 586732
uagugaggcguagagauua

SEQ ID NO: 740053 - RNA, 19 nt, Artificial Sequence
  Description of Artificial Sequence: Synthetic oligonucleotide
  Antisense strand to SEQ ID NO: 740052
uaaucucuacgccucacua

SEQ ID NO: 740054 - RNA, 19 nt, Artificial Sequence
  Description of Artificial Sequence: Synthetic oligonucleotide
  Sense strand starting at position 2331 of SEQ ID NO: 586732
cuggauaggcuaugagauc

SEQ ID NO: 740055 - RNA, 19 nt, Artificial Sequence
  Description of Artificial Sequence: Synthetic oligonucleotide
  Antisense strand to SEQ ID NO: 740054
gaucucauagccuauccag

SEQ ID NO: 740056 - RNA, 19 nt, Artificial Sequence
  Description of Artificial Sequence: Synthetic oligonucleotide
  Sense strand starting at position 2338 of SEQ ID NO: 586732
ggcuaugagauccagccuu

SEQ ID NO: 740057 - RNA, 19 nt, Artificial Sequence
  Description of Artificial Sequence: Synthetic oligonucleotide
  Antisense strand to SEQ ID NO: 740056
aaggcuggaucucauagcc

SEQ ID NO: 740058 - RNA, 19 nt, Artificial Sequence
  Description of Artificial Sequence: Synthetic oligonucleotide
  Sense strand starting at position 2366 of SEQ ID NO: 586732
aagggauucugaucguuuc

SEQ ID NO: 740059 - RNA, 19 nt, Artificial Sequence
  Description of Artificial Sequence: Synthetic oligonucleotide
  Antisense strand to SEQ ID NO: 740058
gaaacgaucagaaucccuu

SEQ ID NO: 740060 - RNA, 19 nt, Artificial Sequence
  Description of Artificial Sequence: Synthetic oligonucleotide
  Sense strand starting at position 2574 of SEQ ID NO: 586732
augcauucuugagucagga

SEQ ID NO: 740061 - RNA, 19 nt, Artificial Sequence
  Description of Artificial Sequence: Synthetic oligonucleotide
  Antisense strand to SEQ ID NO: 740060
uccugacucaagaaugcau

SEQ ID NO: 740062 - RNA, 19 nt, Artificial Sequence
  Description of Artificial Sequence: Synthetic oligonucleotide
  Sense strand starting at position 2576 of SEQ ID NO: 586732
gcauucuugagucaggaga

SEQ ID NO: 740063 - RNA, 19 nt, Artificial Sequence
  Description of Artificial Sequence: Synthetic oligonucleotide
  Antisense strand to SEQ ID NO: 740062
ucuccugacucaagaaugc

SEQ ID NO: 740064 - RNA, 19 nt, Artificial Sequence
  Description of Artificial Sequence: Synthetic oligonucleotide
  Sense strand starting at position 3310 of SEQ ID NO: 586732
ugcugugguccugugugau

SEQ ID NO: 740065 - RNA, 19 nt, Artificial Sequence
  Description of Artificial Sequence: Synthetic oligonucleotide
  Antisense strand to SEQ ID NO: 740064
aucacacaggaccacagca

SEQ ID NO: 740066 - RNA, 19 nt, Artificial Sequence
  Description of Artificial Sequence: Synthetic oligonucleotide
  Sense strand starting at position 3322 of SEQ ID NO: 586732
gugugauccggcuccgguu

SEQ ID NO: 740067 - RNA, 19 nt, Artificial Sequence
  Description of Artificial Sequence: Synthetic oligonucleotide
  Antisense strand to SEQ ID NO: 740066
aaccggagccggaucacac

SEQ ID NO: 740068 - RNA, 19 nt, Artificial Sequence
  Description of Artificial Sequence: Synthetic oligonucleotide
  Sense strand starting at position 3359 of SEQ ID NO: 586732
ucaggugacucuucugauc

SEQ ID NO: 740069 - RNA, 19 nt, Artificial Sequence
  Description of Artificial Sequence: Synthetic oligonucleotide
  Antisense strand to SEQ ID NO: 740068
gaucagaagagucaccuga

SEQ ID NO: 740070 - RNA, 19 nt, Artificial Sequence
  Description of Artificial Sequence: Synthetic oligonucleotide
  Sense strand starting at position 3476 of SEQ ID NO: 586732
guucauagucaggauugag

SEQ ID NO: 740071 - RNA, 19 nt, Artificial Sequence
  Description of Artificial Sequence: Synthetic oligonucleotide
  Antisense strand to SEQ ID NO: 740070
cucaauccugacuaugaac

SEQ ID NO: 740072 - RNA, 19 nt, Artificial Sequence
  Description of Artificial Sequence: Synthetic oligonucleotide
  Sense strand starting at position 3479 of SEQ ID NO: 586732
cauagucaggauugaguuu

SEQ ID NO: 740073 - RNA, 19 nt, Artificial Sequence
  Description of Artificial Sequence: Synthetic oligonucleotide
  Antisense strand to SEQ ID NO: 740072
aaacucaauccugacuaug

SEQ ID NO: 740074 - RNA, 19 nt, Artificial Sequence
  Description of Artificial Sequence: Synthetic oligonucleotide
  Sense strand starting at position 3686 of SEQ ID NO: 586732
uguauaccuguguauagga

SEQ ID NO: 740075 - RNA, 19 nt, Artificial Sequence
  Description of Artificial Sequence: Synthetic oligonucleotide
  Antisense strand to SEQ ID NO: 740074
uccuauacacagguauaca

SEQ ID NO: 740076 - RNA, 19 nt, Artificial Sequence
  Description of Artificial Sequence: Synthetic oligonucleotide
  Sense strand starting at position 3805 of SEQ ID NO: 586732
ucagauuuauggcacaaau

SEQ ID NO: 740077 - RNA, 19 nt, Artificial Sequence
  Description of Artificial Sequence: Synthetic oligonucleotide
  Antisense strand to SEQ ID NO: 740076
auuugugccauaaaucuga

SEQ ID NO: 740078 - RNA, 19 nt, Artificial Sequence
  Description of Artificial Sequence: Synthetic oligonucleotide
  Sense strand starting at position 3866 of SEQ ID NO: 586732
ugguaagcagauuaaguua

SEQ ID NO: 740079 - RNA, 19 nt, Artificial Sequence
  Description of Artificial Sequence: Synthetic oligonucleotide
  Antisense strand to SEQ ID NO: 740078
uaacuuaaucugcuuacca

SEQ ID NO: 740080 - RNA, 19 nt, Artificial Sequence
  Description of Artificial Sequence: Synthetic oligonucleotide
  Sense strand starting at position 67 of SEQ ID NO: 586733
gaaggaauggagcguugaa

SEQ ID NO: 740081 - RNA, 19 nt, Artificial Sequence
  Description of Artificial Sequence: Synthetic oligonucleotide
  Antisense strand to SEQ ID NO: 740080
uucaacgcuccauuccuuc

SEQ ID NO: 740082 - RNA, 19 nt, Artificial Sequence
  Description of Artificial Sequence: Synthetic oligonucleotide
  Sense strand starting at position 76 of SEQ ID NO: 586733
gagcguugaagggaacauu

SEQ ID NO: 740083 - RNA, 19 nt, Artificial Sequence
  Description of Artificial Sequence: Synthetic oligonucleotide
  Antisense strand to SEQ ID NO: 740082
aauguucccuucaacgcuc

SEQ ID NO: 740084 - RNA, 19 nt, Artificial Sequence
  Description of Artificial Sequence: Synthetic oligonucleotide
  Sense strand starting at position 214 of SEQ ID NO: 586733
gugugugaugcacaucauc

SEQ ID NO: 740085 - RNA, 19 nt, Artificial Sequence
  Description of Artificial Sequence: Synthetic oligonucleotide
  Antisense strand to SEQ ID NO: 740084
gaugaugugcaucacacac

SEQ ID NO: 740086 - RNA, 19 nt, Artificial Sequence
  Description of Artificial Sequence: Synthetic oligonucleotide
  Sense strand starting at position 225 of SEQ ID NO: 586733
acaucaucucgcugaacua

SEQ ID NO: 740087 - RNA, 19 nt, Artificial Sequence
  Description of Artificial Sequence: Synthetic oligonucleotide
  Antisense strand to SEQ ID NO: 740086
uaguucagcgagaugaugu

SEQ ID NO: 740088 - RNA, 19 nt, Artificial Sequence
  Description of Artificial Sequence: Synthetic oligonucleotide
  Sense strand starting at position 241 of SEQ ID NO: 586733
cuaugcuagccucaggaga

SEQ ID NO: 740089 - RNA, 19 nt, Artificial Sequence
  Description of Artificial Sequence: Synthetic oligonucleotide
  Antisense strand to SEQ ID NO: 740088
ucuccugaggcuagcauag

SEQ ID NO: 740090 - RNA, 19 nt, Artificial Sequence
  Description of Artificial Sequence: Synthetic oligonucleotide
  Sense strand starting at position 254 of SEQ ID NO: 586733
aggagaggguugcucuuua

SEQ ID NO: 740091 - RNA, 19 nt, Artificial Sequence
  Description of Artificial Sequence: Synthetic oligonucleotide
  Antisense strand to SEQ ID NO: 740090
uaaagagcaacccucuccu

SEQ ID NO: 740092 - RNA, 19 nt, Artificial Sequence
  Description of Artificial Sequence: Synthetic oligonucleotide
  Sense strand starting at position 327 of SEQ ID NO: 586733
acagcauagaagugacaga

SEQ ID NO: 740093 - RNA, 19 nt, Artificial Sequence
  Description of Artificial Sequence: Synthetic oligonucleotide
  Antisense strand to SEQ ID NO: 740092
ucugucacuucuaugcugu

SEQ ID NO: 740094 - RNA, 19 nt, Artificial Sequence
  Description of Artificial Sequence: Synthetic oligonucleotide
  Sense strand starting at position 373 of SEQ ID NO: 586733
guuccaaagcgugaacuua

SEQ ID NO: 740095 - RNA, 19 nt, Artificial Sequence
  Description of Artificial Sequence: Synthetic oligonucleotide
  Antisense strand to SEQ ID NO: 740094
uaaguucacgcuuuggaac

SEQ ID NO: 740096 - RNA, 19 nt, Artificial Sequence
  Description of Artificial Sequence: Synthetic oligonucleotide
  Sense strand starting at position 381 of SEQ ID NO: 586733
gcgugaacuuauuucucca

SEQ ID NO: 740097 - RNA, 19 nt, Artificial Sequence
  Description of Artificial Sequence: Synthetic oligonucleotide
  Antisense strand to SEQ ID NO: 740096
uggagaaauaaguucacgc

SEQ ID NO: 740098 - RNA, 19 nt, Artificial Sequence
  Description of Artificial Sequence: Synthetic oligonucleotide
  Sense strand starting at position 494 of SEQ ID NO: 586733
cuggcauauucgguagaag

SEQ ID NO: 740099 - RNA, 19 nt, Artificial Sequence
  Description of Artificial Sequence: Synthetic oligonucleotide
  Antisense strand to SEQ ID NO: 740098
cuucuaccgaauaugccag

SEQ ID NO: 740100 - RNA, 19 nt, Artificial Sequence
  Description of Artificial Sequence: Synthetic oligonucleotide
  Sense strand starting at position 495 of SEQ ID NO: 586733
uggcauauucgguagaagu

SEQ ID NO: 740101 - RNA, 19 nt, Artificial Sequence
  Description of Artificial Sequence: Synthetic oligonucleotide
  Antisense strand to SEQ ID NO: 740100
acuucuaccgaauaugcca

SEQ ID NO: 740102 - RNA, 19 nt, Artificial Sequence
  Description of Artificial Sequence: Synthetic oligonucleotide
  Sense strand starting at position 497 of SEQ ID NO: 586733
gcauauucgguagaagucu

SEQ ID NO: 740103 - RNA, 19 nt, Artificial Sequence
  Description of Artificial Sequence: Synthetic oligonucleotide
  Antisense strand to SEQ ID NO: 740102
agacuucuaccgaauaugc

SEQ ID NO: 740104 - RNA, 19 nt, Artificial Sequence
  Description of Artificial Sequence: Synthetic oligonucleotide
  Sense strand starting at position 505 of SEQ ID NO: 586733
gguagaagucuguacuuug

SEQ ID NO: 740105 - RNA, 19 nt, Artificial Sequence
  Description of Artificial Sequence: Synthetic oligonucleotide
  Antisense strand to SEQ ID NO: 740104
caaaguacagacuucuacc

SEQ ID NO: 740106 - RNA, 19 nt, Artificial Sequence
  Description of Artificial Sequence: Synthetic oligonucleotide
  Sense strand starting at position 508 of SEQ ID NO: 586733
agaagucuguacuuuguca

SEQ ID NO: 740107 - RNA, 19 nt, Artificial Sequence
  Description of Artificial Sequence: Synthetic oligonucleotide
  Antisense strand to SEQ ID NO: 740106
ugacaaaguacagacuucu

SEQ ID NO: 740108 - RNA, 19 nt, Artificial Sequence
  Description of Artificial Sequence: Synthetic oligonucleotide
  Sense strand starting at position 566 of SEQ ID NO: 586733
caucuaagccugggugaga

SEQ ID NO: 740109 - RNA, 19 nt, Artificial Sequence
  Description of Artificial Sequence: Synthetic oligonucleotide
  Antisense strand to SEQ ID NO: 740108
ucucacccaggcuuagaug

SEQ ID NO: 740110 - RNA, 19 nt, Artificial Sequence
  Description of Artificial Sequence: Synthetic oligonucleotide
  Sense strand starting at position 567 of SEQ ID NO: 586733
aucuaagccugggugagaa

SEQ ID NO: 740111 - RNA, 19 nt, Artificial Sequence
  Description of Artificial Sequence: Synthetic oligonucleotide
  Antisense strand to SEQ ID NO: 740110
uucucacccaggcuuagau

SEQ ID NO: 740112 - RNA, 19 nt, Artificial Sequence
  Description of Artificial Sequence: Synthetic oligonucleotide
  Sense strand starting at position 630 of SEQ ID NO: 586733
uuacucuucccugaaagug

SEQ ID NO: 740113 - RNA, 19 nt, Artificial Sequence
  Description of Artificial Sequence: Synthetic oligonucleotide
  Antisense strand to SEQ ID NO: 740112
cacuuucagggaagaguaa

SEQ ID NO: 740114 - RNA, 19 nt, Artificial Sequence
  Description of Artificial Sequence: Synthetic oligonucleotide
  Sense strand starting at position 1136 of SEQ ID NO: 586733
accgaaauguuuccuagaa

SEQ ID NO: 740115 - RNA, 19 nt, Artificial Sequence
  Description of Artificial Sequence: Synthetic oligonucleotide
  Antisense strand to SEQ ID NO: 740114
uucuaggaaacauuucggu

SEQ ID NO: 740116 - RNA, 19 nt, Artificial Sequence
  Description of Artificial Sequence: Synthetic oligonucleotide
  Sense strand starting at position 1137 of SEQ ID NO: 586733
ccgaaauguuuccuagaau

SEQ ID NO: 740117 - RNA, 19 nt, Artificial Sequence
  Description of Artificial Sequence: Synthetic oligonucleotide
  Antisense strand to SEQ ID NO: 740116
auucuaggaaacauuucgg

SEQ ID NO: 740118 - RNA, 19 nt, Artificial Sequence
  Description of Artificial Sequence: Synthetic oligonucleotide
  Sense strand starting at position 1155 of SEQ ID NO: 586733
ugcagagcuaaugagacau

SEQ ID NO: 740119 - RNA, 19 nt, Artificial Sequence
  Description of Artificial Sequence: Synthetic oligonucleotide
  Antisense strand to SEQ ID NO: 740118
augucucauuagcucugca

SEQ ID NO: 740120 - RNA, 19 nt, Artificial Sequence
  Description of Artificial Sequence: Synthetic oligonucleotide
  Sense strand starting at position 1178 of SEQ ID NO: 586733
cucugucauuuccuauguu

SEQ ID NO: 740121 - RNA, 19 nt, Artificial Sequence
  Description of Artificial Sequence: Synthetic oligonucleotide
  Antisense strand to SEQ ID NO: 740120
aacauaggaaaugacagag

SEQ ID NO: 740122 - RNA, 19 nt, Artificial Sequence
  Description of Artificial Sequence: Synthetic oligonucleotide
  Sense strand starting at position 1286 of SEQ ID NO: 586733
uacuuuguggagcaugaaa

SEQ ID NO: 740123 - RNA, 19 nt, Artificial Sequence
  Description of Artificial Sequence: Synthetic oligonucleotide
  Antisense strand to SEQ ID NO: 740122
uuucaugcuccacaaagua

SEQ ID NO: 740124 - RNA, 19 nt, Artificial Sequence
  Description of Artificial Sequence: Synthetic oligonucleotide
  Sense strand starting at position 1482 of SEQ ID NO: 586733
ugggucugacuccgugaga

SEQ ID NO: 740125 - RNA, 19 nt, Artificial Sequence
  Description of Artificial Sequence: Synthetic oligonucleotide
  Antisense strand to SEQ ID NO: 740124
ucucacggagucagaccca

SEQ ID NO: 740126 - RNA, 19 nt, Artificial Sequence
  Description of Artificial Sequence: Synthetic oligonucleotide
  Sense strand starting at position 1483 of SEQ ID NO: 586733
gggucugacuccgugagau

SEQ ID NO: 740127 - RNA, 19 nt, Artificial Sequence
  Description of Artificial Sequence: Synthetic oligonucleotide
  Antisense strand to SEQ ID NO: 740126
aucucacggagucagaccc

SEQ ID NO: 740128 - RNA, 19 nt, Artificial Sequence
  Description of Artificial Sequence: Synthetic oligonucleotide
  Sense strand starting at position 1485 of SEQ ID NO: 586733
gucugacuccgugagauuc

SEQ ID NO: 740129 - RNA, 19 nt, Artificial Sequence
  Description of Artificial Sequence: Synthetic oligonucleotide
  Antisense strand to SEQ ID NO: 740128
gaaucucacggagucagac

SEQ ID NO: 740130 - RNA, 19 nt, Artificial Sequence
  Description of Artificial Sequence: Synthetic oligonucleotide
  Sense strand starting at position 1508 of SEQ ID NO: 586733
ggaauugaucuagggugca

SEQ ID NO: 740131 - RNA, 19 nt, Artificial Sequence
  Description of Artificial Sequence: Synthetic oligonucleotide
  Antisense strand to SEQ ID NO: 740130
ugcacccuagaucaauucc

SEQ ID NO: 740132 - RNA, 19 nt, Artificial Sequence
  Description of Artificial Sequence: Synthetic oligonucleotide
  Sense strand starting at position 1596 of SEQ ID NO: 586733
guucgaccacagugggaua

SEQ ID NO: 740133 - RNA, 19 nt, Artificial Sequence
  Description of Artificial Sequence: Synthetic oligonucleotide
  Antisense strand to SEQ ID NO: 740132
uaucccacuguggucgaac

SEQ ID NO: 740134 - RNA, 19 nt, Artificial Sequence
  Description of Artificial Sequence: Synthetic oligonucleotide
  Sense strand starting at position 1856 of SEQ ID NO: 586733
gccgcugagagcuagagaa

SEQ ID NO: 740135 - RNA, 19 nt, Artificial Sequence
  Description of Artificial Sequence: Synthetic oligonucleotide
  Antisense strand to SEQ ID NO: 740134
uucucuagcucucagcggc

SEQ ID NO: 740136 - RNA, 19 nt, Artificial Sequence
  Description of Artificial Sequence: Synthetic oligonucleotide
  Sense strand starting at position 1858 of SEQ ID NO: 586733
cgcugagagcuagagaaga

SEQ ID NO: 740137 - RNA, 19 nt, Artificial Sequence
  Description of Artificial Sequence: Synthetic oligonucleotide
  Antisense strand to SEQ ID NO: 740136
ucuucucuagcucucagcg

SEQ ID NO: 740138 - RNA, 19 nt, Artificial Sequence
  Description of Artificial Sequence: Synthetic oligonucleotide
  Sense strand starting at position 2244 of SEQ ID NO: 586733
ggugacacacuugggaauu

SEQ ID NO: 740139 - RNA, 19 nt, Artificial Sequence
  Description of Artificial Sequence: Synthetic oligonucleotide
  Antisense strand to SEQ ID NO: 740138
aauucccaagugugucacc

SEQ ID NO: 740140 - RNA, 19 nt, Artificial Sequence
  Description of Artificial Sequence: Synthetic oligonucleotide
  Sense strand starting at position 2245 of SEQ ID NO: 586733
gugacacacuugggaauuu

SEQ ID NO: 740141 - RNA, 19 nt, Artificial Sequence
  Description of Artificial Sequence: Synthetic oligonucleotide
  Antisense strand to SEQ ID NO: 740140
aaauucccaagugugucac

SEQ ID NO: 740142 - RNA, 19 nt, Artificial Sequence
  Description of Artificial Sequence: Synthetic oligonucleotide
  Sense strand starting at position 2366 of SEQ ID NO: 586733
acacgugguccugaugaaa

SEQ ID NO: 740143 - RNA, 19 nt, Artificial Sequence
  Description of Artificial Sequence: Synthetic oligonucleotide
  Antisense strand to SEQ ID NO: 740142
uuucaucaggaccacgugu

SEQ ID NO: 740144 - RNA, 19 nt, Artificial Sequence
  Description of Artificial Sequence: Synthetic oligonucleotide
  Sense strand starting at position 2380 of SEQ ID NO: 586733
ugaaauggagguuaacgua

SEQ ID NO: 740145 - RNA, 19 nt, Artificial Sequence
  Description of Artificial Sequence: Synthetic oligonucleotide
  Antisense strand to SEQ ID NO: 740144
uacguuaaccuccauuuca

SEQ ID NO: 740146 - RNA, 19 nt, Artificial Sequence
  Description of Artificial Sequence: Synthetic oligonucleotide
  Sense strand starting at position 2388 of SEQ ID NO: 586733
agguuaacguaaucaaauu

SEQ ID NO: 740147 - RNA, 19 nt, Artificial Sequence
  Description of Artificial Sequence: Synthetic oligonucleotide
  Antisense strand to SEQ ID NO: 740146
aauuugauuacguuaaccu

SEQ ID NO: 740148 - RNA, 19 nt, Artificial Sequence
  Description of Artificial Sequence: Synthetic oligonucleotide
  Sense strand starting at position 2512 of SEQ ID NO: 586733
augcucuaauagguuguaa

SEQ ID NO: 740149 - RNA, 19 nt, Artificial Sequence
  Description of Artificial Sequence: Synthetic oligonucleotide
  Antisense strand to SEQ ID NO: 740148
uuacaaccuauuagagcau

SEQ ID NO: 740150 - RNA, 19 nt, Artificial Sequence
  Description of Artificial Sequence: Synthetic oligonucleotide
  Sense strand starting at position 2673 of SEQ ID NO: 586733
ugaugcuugugaguauuaa

SEQ ID NO: 740151 - RNA, 19 nt, Artificial Sequence
  Description of Artificial Sequence: Synthetic oligonucleotide
  Antisense strand to SEQ ID NO: 740150
uuaauacucacaagcauca

SEQ ID NO: 740152 - RNA, 19 nt, Artificial Sequence
  Description of Artificial Sequence: Synthetic oligonucleotide
  Sense strand starting at position 2674 of SEQ ID NO: 586733
gaugcuugugaguauuaaa

SEQ ID NO: 740153 - RNA, 19 nt, Artificial Sequence
  Description of Artificial Sequence: Synthetic oligonucleotide
  Antisense strand to SEQ ID NO: 740152
uuuaauacucacaagcauc

SEQ ID NO: 740154 - RNA, 19 nt, Artificial Sequence
  Description of Artificial Sequence: Synthetic oligonucleotide
  Sense strand starting at position 2703 of SEQ ID NO: 586733
gaggcugcccucugagaaa

SEQ ID NO: 740155 - RNA, 19 nt, Artificial Sequence
  Description of Artificial Sequence: Synthetic oligonucleotide
  Antisense strand to SEQ ID NO: 740154
uuucucagagggcagccuc

SEQ ID NO: 740156 - RNA, 19 nt, Artificial Sequence
  Description of Artificial Sequence: Synthetic oligonucleotide
  Sense strand starting at position 2761 of SEQ ID NO: 586733
uaaaguugauaggaucaaa

SEQ ID NO: 740157 - RNA, 19 nt, Artificial Sequence
  Description of Artificial Sequence: Synthetic oligonucleotide
  Antisense strand to SEQ ID NO: 740156
uuugauccuaucaacuuua

SEQ ID NO: 740158 - RNA, 19 nt, Artificial Sequence
  Description of Artificial Sequence: Synthetic oligonucleotide
  Sense strand starting at position 3393 of SEQ ID NO: 586733
cuuucuccucucuaguaga

SEQ ID NO: 740159 - RNA, 19 nt, Artificial Sequence
  Description of Artificial Sequence: Synthetic oligonucleotide
  Antisense strand to SEQ ID NO: 740158
ucuacuagagaggagaaag

SEQ ID NO: 740160 - RNA, 19 nt, Artificial Sequence
  Description of Artificial Sequence: Synthetic oligonucleotide
  Sense strand starting at position 60 of SEQ ID NO: 586734
guuugcaaaucauuaagga

SEQ ID NO: 740161 - RNA, 19 nt, Artificial Sequence
  Description of Artificial Sequence: Synthetic oligonucleotide
  Antisense strand to SEQ ID NO: 740160
uccuuaaugauuugcaaac

SEQ ID NO: 740162 - RNA, 19 nt, Artificial Sequence
  Description of Artificial Sequence: Synthetic oligonucleotide
  Sense strand starting at position 198 of SEQ ID NO: 586734
gaaggaaaugcaggcaauu

SEQ ID NO: 740163 - RNA, 19 nt, Artificial Sequence
  Description of Artificial Sequence: Synthetic oligonucleotide
  Antisense strand to SEQ ID NO: 740162
aauugccugcauuuccuuc

SEQ ID NO: 740164 - RNA, 19 nt, Artificial Sequence
  Description of Artificial Sequence: Synthetic oligonucleotide
  Sense strand starting at position 284 of SEQ ID NO: 586734
gcccaugaaugccuugauu

SEQ ID NO: 740165 - RNA, 19 nt, Artificial Sequence
  Description of Artificial Sequence: Synthetic oligonucleotide
  Antisense strand to SEQ ID NO: 740164
aaucaaggcauucaugggc

SEQ ID NO: 740166 - RNA, 19 nt, Artificial Sequence
  Description of Artificial Sequence: Synthetic oligonucleotide
  Sense strand starting at position 592 of SEQ ID NO: 586734
uaucuaagggagugcugua

SEQ ID NO: 740167 - RNA, 19 nt, Artificial Sequence
  Description of Artificial Sequence: Synthetic oligonucleotide
  Antisense strand to SEQ ID NO: 740166
uacagcacucccuuagaua

SEQ ID NO: 740168 - RNA, 19 nt, Artificial Sequence
  Description of Artificial Sequence: Synthetic oligonucleotide
  Sense strand starting at position 597 of SEQ ID NO: 586734
aagggagugcuguaaauua

SEQ ID NO: 740169 - RNA, 19 nt, Artificial Sequence
  Description of Artificial Sequence: Synthetic oligonucleotide
  Antisense strand to SEQ ID NO: 740168
uaauuuacagcacucccuu

SEQ ID NO: 740170 - RNA, 19 nt, Artificial Sequence
  Description of Artificial Sequence: Synthetic oligonucleotide
  Sense strand starting at position 655 of SEQ ID NO: 586734
ggcagauguccucggauac

SEQ ID NO: 740171 - RNA, 19 nt, Artificial Sequence
  Description of Artificial Sequence: Synthetic oligonucleotide
  Antisense strand to SEQ ID NO: 740170
guauccgaggacaucugcc

SEQ ID NO: 740172 - RNA, 19 nt, Artificial Sequence
  Description of Artificial Sequence: Synthetic oligonucleotide
  Sense strand starting at position 656 of SEQ ID NO: 586734
gcagauguccucggauacu

SEQ ID NO: 740173 - RNA, 19 nt, Artificial Sequence
  Description of Artificial Sequence: Synthetic oligonucleotide
  Antisense strand to SEQ ID NO: 740172
aguauccgaggacaucugc

SEQ ID NO: 740174 - RNA, 19 nt, Artificial Sequence
  Description of Artificial Sequence: Synthetic oligonucleotide
  Sense strand starting at position 682 of SEQ ID NO: 586734
ggccuuaacagaugaggua

SEQ ID NO: 740175 - RNA, 19 nt, Artificial Sequence
  Description of Artificial Sequence: Synthetic oligonucleotide
  Antisense strand to SEQ ID NO: 740174
uaccucaucuguuaaggcc

SEQ ID NO: 740176 - RNA, 19 nt, Artificial Sequence
  Description of Artificial Sequence: Synthetic oligonucleotide
  Sense strand starting at position 689 of SEQ ID NO: 586734
acagaugagguaggguuaa

SEQ ID NO: 740177 - RNA, 19 nt, Artificial Sequence
  Description of Artificial Sequence: Synthetic oligonucleotide
  Antisense strand to SEQ ID NO: 740176
uuaacccuaccucaucugu

SEQ ID NO: 740178 - RNA, 19 nt, Artificial Sequence
  Description of Artificial Sequence: Synthetic oligonucleotide
  Sense strand starting at position 745 of SEQ ID NO: 586734
gaugcugcacuguggaaau

SEQ ID NO: 740179 - RNA, 19 nt, Artificial Sequence
  Description of Artificial Sequence: Synthetic oligonucleotide
  Antisense strand to SEQ ID NO: 740178
auuuccacagugcagcauc

SEQ ID NO: 740180 - RNA, 19 nt, Artificial Sequence
  Description of Artificial Sequence: Synthetic oligonucleotide
  Sense strand starting at position 849 of SEQ ID NO: 586734
gaccgaauagaguaacgua

SEQ ID NO: 740181 - RNA, 19 nt, Artificial Sequence
  Description of Artificial Sequence: Synthetic oligonucleotide
  Antisense strand to SEQ ID NO: 740180
uacguuacucuauucgguc

SEQ ID NO: 740182 - RNA, 19 nt, Artificial Sequence
  Description of Artificial Sequence: Synthetic oligonucleotide
  Sense strand starting at position 857 of SEQ ID NO: 586734
agaguaacguacucgauuu

SEQ ID NO: 740183 - RNA, 19 nt, Artificial Sequence
  Description of Artificial Sequence: Synthetic oligonucleotide
  Antisense strand to SEQ ID NO: 740182
aaaucgaguacguuacucu

SEQ ID NO: 740184 - RNA, 19 nt, Artificial Sequence
  Description of Artificial Sequence: Synthetic oligonucleotide
  Sense strand starting at position 858 of SEQ ID NO: 586734
gaguaacguacucgauuua

SEQ ID NO: 740185 - RNA, 19 nt, Artificial Sequence
  Description of Artificial Sequence: Synthetic oligonucleotide
  Antisense strand to SEQ ID NO: 740184
uaaaucgaguacguuacuc

SEQ ID NO: 740186 - RNA, 19 nt, Artificial Sequence
  Description of Artificial Sequence: Synthetic oligonucleotide
  Sense strand starting at position 905 of SEQ ID NO: 586734
acaccaagucugugucauu

SEQ ID NO: 740187 - RNA, 19 nt, Artificial Sequence
  Description of Artificial Sequence: Synthetic oligonucleotide
  Antisense strand to SEQ ID NO: 740186
aaugacacagacuuggugu

SEQ ID NO: 740188 - RNA, 19 nt, Artificial Sequence
  Description of Artificial Sequence: Synthetic oligonucleotide
  Sense strand starting at position 992 of SEQ ID NO: 586734
cacgauaccuuauccguua

SEQ ID NO: 740189 - RNA, 19 nt, Artificial Sequence
  Description of Artificial Sequence: Synthetic oligonucleotide
  Antisense strand to SEQ ID NO: 740188
uaacggauaagguaucgug

SEQ ID NO: 740190 - RNA, 19 nt, Artificial Sequence
  Description of Artificial Sequence: Synthetic oligonucleotide
  Sense strand starting at position 993 of SEQ ID NO: 586734
acgauaccuuauccguuau

SEQ ID NO: 740191 - RNA, 19 nt, Artificial Sequence
  Description of Artificial Sequence: Synthetic oligonucleotide
  Antisense strand to SEQ ID NO: 740190
auaacggauaagguaucgu

SEQ ID NO: 740192 - RNA, 19 nt, Artificial Sequence
  Description of Artificial Sequence: Synthetic oligonucleotide
  Sense strand starting at position 995 of SEQ ID NO: 586734
gauaccuuauccguuaugu

SEQ ID NO: 740193 - RNA, 19 nt, Artificial Sequence
  Description of Artificial Sequence: Synthetic oligonucleotide
  Antisense strand to SEQ ID NO: 740192
acauaacggauaagguauc

SEQ ID NO: 740194 - RNA, 19 nt, Artificial Sequence
  Description of Artificial Sequence: Synthetic oligonucleotide
  Sense strand starting at position 2507 of SEQ ID NO: 586734
aagggaaauccucgcguau

SEQ ID NO: 740195 - RNA, 19 nt, Artificial Sequence
  Description of Artificial Sequence: Synthetic oligonucleotide
  Antisense strand to SEQ ID NO: 740194
auacgcgaggauuucccuu

SEQ ID NO: 740196 - RNA, 19 nt, Artificial Sequence
  Description of Artificial Sequence: Synthetic oligonucleotide
  Sense strand starting at position 2511 of SEQ ID NO: 586734
gaaauccucgcguaugaug

SEQ ID NO: 740197 - RNA, 19 nt, Artificial Sequence
  Description of Artificial Sequence: Synthetic oligonucleotide
  Antisense strand to SEQ ID NO: 740196
caucauacgcgaggauuuc

SEQ ID NO: 740198 - RNA, 19 nt, Artificial Sequence
  Description of Artificial Sequence: Synthetic oligonucleotide
  Sense strand starting at position 2660 of SEQ ID NO: 586734
gcagauguggucgagagga

SEQ ID NO: 740199 - RNA, 19 nt, Artificial Sequence
  Description of Artificial Sequence: Synthetic oligonucleotide
  Antisense strand to SEQ ID NO: 740198
uccucucgaccacaucugc

SEQ ID NO: 740200 - RNA, 19 nt, Artificial Sequence
  Description of Artificial Sequence: Synthetic oligonucleotide
  Sense strand starting at position 2709 of SEQ ID NO: 586734
cagcguucuccugagaagc

SEQ ID NO: 740201 - RNA, 19 nt, Artificial Sequence
  Description of Artificial Sequence: Synthetic oligonucleotide
  Antisense strand to SEQ ID NO: 740200
gcuucucaggagaacgcug

SEQ ID NO: 740202 - RNA, 19 nt, Artificial Sequence
  Description of Artificial Sequence: Synthetic oligonucleotide
  Sense strand starting at position 2839 of SEQ ID NO: 586734
guuugagguuccucuuuac

SEQ ID NO: 740203 - RNA, 19 nt, Artificial Sequence
  Description of Artificial Sequence: Synthetic oligonucleotide
  Antisense strand to SEQ ID NO: 740202
guaaagaggaaccucaaac

SEQ ID NO: 740204 - RNA, 19 nt, Artificial Sequence
  Description of Artificial Sequence: Synthetic oligonucleotide
  Sense strand starting at position 2848 of SEQ ID NO: 586734
uccucuuuacuggguaacu

SEQ ID NO: 740205 - RNA, 19 nt, Artificial Sequence
  Description of Artificial Sequence: Synthetic oligonucleotide
  Antisense strand to SEQ ID NO: 740204
aguuacccaguaaagagga

SEQ ID NO: 740206 - RNA, 19 nt, Artificial Sequence
  Description of Artificial Sequence: Synthetic oligonucleotide
  Sense strand starting at position 2849 of SEQ ID NO: 586734
ccucuuuacuggguaacuu

SEQ ID NO: 740207 - RNA, 19 nt, Artificial Sequence
  Description of Artificial Sequence: Synthetic oligonucleotide
  Antisense strand to SEQ ID NO: 740206
aaguuacccaguaaagagg

SEQ ID NO: 740208 - RNA, 19 nt, Artificial Sequence
  Description of Artificial Sequence: Synthetic oligonucleotide
  Sense strand starting at position 2893 of SEQ ID NO: 586734
gcgcaguuugcgucuggau

SEQ ID NO: 740209 - RNA, 19 nt, Artificial Sequence
  Description of Artificial Sequence: Synthetic oligonucleotide
  Antisense strand to SEQ ID NO: 740208
auccagacgcaaacugcgc

SEQ ID NO: 740210 - RNA, 19 nt, Artificial Sequence
  Description of Artificial Sequence: Synthetic oligonucleotide
  Sense strand starting at position 2894 of SEQ ID NO: 586734
cgcaguuugcgucuggauu

SEQ ID NO: 740211 - RNA, 19 nt, Artificial Sequence
  Description of Artificial Sequence: Synthetic oligonucleotide
  Antisense strand to SEQ ID NO: 740210
aauccagacgcaaacugcg

SEQ ID NO: 740212 - RNA, 19 nt, Artificial Sequence
  Description of Artificial Sequence: Synthetic oligonucleotide
  Sense strand starting at position 2895 of SEQ ID NO: 586734
gcaguuugcgucuggauuu

SEQ ID NO: 740213 - RNA, 19 nt, Artificial Sequence
  Description of Artificial Sequence: Synthetic oligonucleotide
  Antisense strand to SEQ ID NO: 740212
aaauccagacgcaaacugc

SEQ ID NO: 740214 - RNA, 19 nt, Artificial Sequence
  Description of Artificial Sequence: Synthetic oligonucleotide
  Sense strand starting at position 3190 of SEQ ID NO: 586734
gcccguccuugacuuuaaa

SEQ ID NO: 740215 - RNA, 19 nt, Artificial Sequence
  Description of Artificial Sequence: Synthetic oligonucleotide
  Antisense strand to SEQ ID NO: 740214
uuuaaagucaaggacgggc

SEQ ID NO: 740216 - RNA, 19 nt, Artificial Sequence
  Description of Artificial Sequence: Synthetic oligonucleotide
  Sense strand starting at position 3223 of SEQ ID NO: 586734
gucaacuugucagcucaaa

SEQ ID NO: 740217 - RNA, 19 nt, Artificial Sequence
  Description of Artificial Sequence: Synthetic oligonucleotide
  Antisense strand to SEQ ID NO: 740216
uuugagcugacaaguugac

SEQ ID NO: 740218 - RNA, 19 nt, Artificial Sequence
  Description of Artificial Sequence: Synthetic oligonucleotide
  Sense strand starting at position 3244 of SEQ ID NO: 586734
ggcaucuugucauuuaguu

SEQ ID NO: 740219 - RNA, 19 nt, Artificial Sequence
  Description of Artificial Sequence: Synthetic oligonucleotide
  Antisense strand to SEQ ID NO: 740218
aacuaaaugacaagaugcc

SEQ ID NO: 740220 - RNA, 19 nt, Artificial Sequence
  Description of Artificial Sequence: Synthetic oligonucleotide
  Sense strand starting at position 3249 of SEQ ID NO: 586734
cuugucauuuaguuccuga

SEQ ID NO: 740221 - RNA, 19 nt, Artificial Sequence
  Description of Artificial Sequence: Synthetic oligonucleotide
  Antisense strand to SEQ ID NO: 740220
ucaggaacuaaaugacaag

SEQ ID NO: 740222 - RNA, 19 nt, Artificial Sequence
  Description of Artificial Sequence: Synthetic oligonucleotide
  Sense strand starting at position 3269 of SEQ ID NO: 586734
gagagugggugucuuuguu

SEQ ID NO: 740223 - RNA, 19 nt, Artificial Sequence
  Description of Artificial Sequence: Synthetic oligonucleotide
  Antisense strand to SEQ ID NO: 740222
aacaaagacacccacucuc

SEQ ID NO: 740224 - RNA, 19 nt, Artificial Sequence
  Description of Artificial Sequence: Synthetic oligonucleotide
  Sense strand starting at position 3529 of SEQ ID NO: 586734
cuguaucuccuaugugcaa

SEQ ID NO: 740225 - RNA, 19 nt, Artificial Sequence
  Description of Artificial Sequence: Synthetic oligonucleotide
  Antisense strand to SEQ ID NO: 740224
uugcacauaggagauacag

SEQ ID NO: 740226 - RNA, 19 nt, Artificial Sequence
  Description of Artificial Sequence: Synthetic oligonucleotide
  Sense strand starting at position 3530 of SEQ ID NO: 586734
uguaucuccuaugugcaaa

SEQ ID NO: 740227 - RNA, 19 nt, Artificial Sequence
  Description of Artificial Sequence: Synthetic oligonucleotide
  Antisense strand to SEQ ID NO: 740226
uuugcacauaggagauaca

SEQ ID NO: 740228 - RNA, 19 nt, Artificial Sequence
  Description of Artificial Sequence: Synthetic oligonucleotide
  Sense strand starting at position 3670 of SEQ ID NO: 586734
ggucaauuucugugcugug

SEQ ID NO: 740229 - RNA, 19 nt, Artificial Sequence
  Description of Artificial Sequence: Synthetic oligonucleotide
  Antisense strand to SEQ ID NO: 740228
cacagcacagaaauugacc

SEQ ID NO: 740230 - RNA, 19 nt, Artificial Sequence
  Description of Artificial Sequence: Synthetic oligonucleotide
  Sense strand starting at position 3708 of SEQ ID NO: 586734
guucuccuuccaugaagca

SEQ ID NO: 740231 - RNA, 19 nt, Artificial Sequence
  Description of Artificial Sequence: Synthetic oligonucleotide
  Antisense strand to SEQ ID NO: 740230
ugcuucauggaaggagaac

SEQ ID NO: 740232 - RNA, 19 nt, Artificial Sequence
  Description of Artificial Sequence: Synthetic oligonucleotide
  Sense strand starting at position 3917 of SEQ ID NO: 586734
caucauagcugccuggauu

SEQ ID NO: 740233 - RNA, 19 nt, Artificial Sequence
  Description of Artificial Sequence: Synthetic oligonucleotide
  Antisense strand to SEQ ID NO: 740232
aauccaggcagcuaugaug

SEQ ID NO: 740234 - RNA, 19 nt, Artificial Sequence
  Description of Artificial Sequence: Synthetic oligonucleotide
  Sense strand starting at position 3918 of SEQ ID NO: 586734
aucauagcugccuggauua

SEQ ID NO: 740235 - RNA, 19 nt, Artificial Sequence
  Description of Artificial Sequence: Synthetic oligonucleotide
  Antisense strand to SEQ ID NO: 740234
uaauccaggcagcuaugau

SEQ ID NO: 740236 - RNA, 19 nt, Artificial Sequence
  Description of Artificial Sequence: Synthetic oligonucleotide
  Sense strand starting at position 3920 of SEQ ID NO: 586734
cauagcugccuggauuauu

SEQ ID NO: 740237 - RNA, 19 nt, Artificial Sequence
  Description of Artificial Sequence: Synthetic oligonucleotide
  Antisense strand to SEQ ID NO: 740236
aauaauccaggcagcuaug

SEQ ID NO: 740238 - RNA, 19 nt, Artificial Sequence
  Description of Artificial Sequence: Synthetic oligonucleotide
  Sense strand starting at position 3925 of SEQ ID NO: 586734
cugccuggauuauugcaaa

SEQ ID NO: 740239 - RNA, 19 nt, Artificial Sequence
  Description of Artificial Sequence: Synthetic oligonucleotide
  Antisense strand to SEQ ID NO: 740238
uuugcaauaauccaggcag

SEQ ID NO: 740240 - RNA, 19 nt, Artificial Sequence
  Description of Artificial Sequence: Synthetic oligonucleotide
  Sense strand starting at position 78 of SEQ ID NO: 586735
gcuugaugcccugguggga

SEQ ID NO: 740241 - RNA, 19 nt, Artificial Sequence
  Description of Artificial Sequence: Synthetic oligonucleotide
  Antisense strand to SEQ ID NO: 740240
ucccaccagggcaucaagc

SEQ ID NO: 740242 - RNA, 19 nt, Artificial Sequence
  Description of Artificial Sequence: Synthetic oligonucleotide
  Sense strand starting at position 289 of SEQ ID NO: 586735
gagaaaguuuaagaaagaa

SEQ ID NO: 740243 - RNA, 19 nt, Artificial Sequence
  Description of Artificial Sequence: Synthetic oligonucleotide
  Antisense strand to SEQ ID NO: 740242
uucuuucuuaaacuuucuc

SEQ ID NO: 740244 - RNA, 19 nt, Artificial Sequence
  Description of Artificial Sequence: Synthetic oligonucleotide
  Sense strand starting at position 374 of SEQ ID NO: 586735
ggauuuguguuggccagac

SEQ ID NO: 740245 - RNA, 19 nt, Artificial Sequence
  Description of Artificial Sequence: Synthetic oligonucleotide
  Antisense strand to SEQ ID NO: 740244
gucuggccaacacaaaucc

SEQ ID NO: 740246 - RNA, 19 nt, Artificial Sequence
  Description of Artificial Sequence: Synthetic oligonucleotide
  Sense strand starting at position 384 of SEQ ID NO: 586735
uggccagacuccucugaaa

SEQ ID NO: 740247 - RNA, 19 nt, Artificial Sequence
  Description of Artificial Sequence: Synthetic oligonucleotide
  Antisense strand to SEQ ID NO: 740246
uuucagaggagucuggcca

SEQ ID NO: 740248 - RNA, 19 nt, Artificial Sequence
  Description of Artificial Sequence: Synthetic oligonucleotide
  Sense strand starting at position 780 of SEQ ID NO: 586735
uugaaaugugcaugaccaa

SEQ ID NO: 740249 - RNA, 19 nt, Artificial Sequence
  Description of Artificial Sequence: Synthetic oligonucleotide
  Antisense strand to SEQ ID NO: 740248
uuggucaugcacauuucaa

SEQ ID NO: 740250 - RNA, 19 nt, Artificial Sequence
  Description of Artificial Sequence: Synthetic oligonucleotide
  Sense strand starting at position 823 of SEQ ID NO: 586735
aguuaauggagcugugacu

SEQ ID NO: 740251 - RNA, 19 nt, Artificial Sequence
  Description of Artificial Sequence: Synthetic oligonucleotide
  Antisense strand to SEQ ID NO: 740250
agucacagcuccauuaacu

SEQ ID NO: 740252 - RNA, 19 nt, Artificial Sequence
  Description of Artificial Sequence: Synthetic oligonucleotide
  Sense strand starting at position 1425 of SEQ ID NO: 586735
gcuccacacucugcuagau

SEQ ID NO: 740253 - RNA, 19 nt, Artificial Sequence
  Description of Artificial Sequence: Synthetic oligonucleotide
  Antisense strand to SEQ ID NO: 740252
aucuagcagaguguggagc

SEQ ID NO: 740254 - RNA, 19 nt, Artificial Sequence
  Description of Artificial Sequence: Synthetic oligonucleotide
  Sense strand starting at position 1553 of SEQ ID NO: 586735
gcuugaauccucuguucua

SEQ ID NO: 740255 - RNA, 19 nt, Artificial Sequence
  Description of Artificial Sequence: Synthetic oligonucleotide
  Antisense strand to SEQ ID NO: 740254
uagaacagaggauucaagc

SEQ ID NO: 740256 - RNA, 19 nt, Artificial Sequence
  Description of Artificial Sequence: Synthetic oligonucleotide
  Sense strand starting at position 1554 of SEQ ID NO: 586735
cuugaauccucuguucuag

SEQ ID NO: 740257 - RNA, 19 nt, Artificial Sequence
  Description of Artificial Sequence: Synthetic oligonucleotide
  Antisense strand to SEQ ID NO: 740256
cuagaacagaggauucaag

SEQ ID NO: 740258 - RNA, 19 nt, Artificial Sequence
  Description of Artificial Sequence: Synthetic oligonucleotide
  Sense strand starting at position 1556 of SEQ ID NO: 586735
ugaauccucuguucuagac

SEQ ID NO: 740259 - RNA, 19 nt, Artificial Sequence
  Description of Artificial Sequence: Synthetic oligonucleotide
  Antisense strand to SEQ ID NO: 740258
gucuagaacagaggauuca

SEQ ID NO: 740260 - RNA, 19 nt, Artificial Sequence
  Description of Artificial Sequence: Synthetic oligonucleotide
  Sense strand starting at position 1566 of SEQ ID NO: 586735
guucuagacaaaugggcuu

SEQ ID NO: 740261 - RNA, 19 nt, Artificial Sequence
  Description of Artificial Sequence: Synthetic oligonucleotide
  Antisense strand to SEQ ID NO: 740260
aagcccauuugucuagaac

SEQ ID NO: 740262 - RNA, 19 nt, Artificial Sequence
  Description of Artificial Sequence: Synthetic oligonucleotide
  Sense strand starting at position 2079 of SEQ ID NO: 586735
ugagucaccuguucuguga

SEQ ID NO: 740263 - RNA, 19 nt, Artificial Sequence
  Description of Artificial Sequence: Synthetic oligonucleotide
  Antisense strand to SEQ ID NO: 740262
ucacagaacaggugacuca

SEQ ID NO: 740264 - RNA, 19 nt, Artificial Sequence
  Description of Artificial Sequence: Synthetic oligonucleotide
  Sense strand starting at position 2338 of SEQ ID NO: 586735
ugggaacauuuauaucuga

SEQ ID NO: 740265 - RNA, 19 nt, Artificial Sequence
  Description of Artificial Sequence: Synthetic oligonucleotide
  Antisense strand to SEQ ID NO: 740264
ucagauauaaauguuccca

SEQ ID NO: 740266 - RNA, 19 nt, Artificial Sequence
  Description of Artificial Sequence: Synthetic oligonucleotide
  Sense strand starting at position 2343 of SEQ ID NO: 586735
acauuuauaucugagugcu

SEQ ID NO: 740267 - RNA, 19 nt, Artificial Sequence
  Description of Artificial Sequence: Synthetic oligonucleotide
  Antisense strand to SEQ ID NO: 740266
agcacucagauauaaaugu

SEQ ID NO: 740268 - RNA, 19 nt, Artificial Sequence
  Description of Artificial Sequence: Synthetic oligonucleotide
  Sense strand starting at position 2421 of SEQ ID NO: 586735
gcgucugugggcguaacau

SEQ ID NO: 740269 - RNA, 19 nt, Artificial Sequence
  Description of Artificial Sequence: Synthetic oligonucleotide
  Antisense strand to SEQ ID NO: 740268
auguuacgcccacagacgc

SEQ ID NO: 740270 - RNA, 19 nt, Artificial Sequence
  Description of Artificial Sequence: Synthetic oligonucleotide
  Sense strand starting at position 2551 of SEQ ID NO: 586735
cuguuaucuuucucaggca

SEQ ID NO: 740271 - RNA, 19 nt, Artificial Sequence
  Description of Artificial Sequence: Synthetic oligonucleotide
  Antisense strand to SEQ ID NO: 740270
ugccugagaaagauaacag

SEQ ID NO: 740272 - RNA, 19 nt, Artificial Sequence
  Description of Artificial Sequence: Synthetic oligonucleotide
  Sense strand starting at position 2564 of SEQ ID NO: 586735
caggcauugcccgcaguau

SEQ ID NO: 740273 - RNA, 19 nt, Artificial Sequence
  Description of Artificial Sequence: Synthetic oligonucleotide
  Antisense strand to SEQ ID NO: 740272
auacugcgggcaaugccug

SEQ ID NO: 740274 - RNA, 19 nt, Artificial Sequence
  Description of Artificial Sequence: Synthetic oligonucleotide
  Sense strand starting at position 2565 of SEQ ID NO: 586735
aggcauugcccgcaguauu

SEQ ID NO: 740275 - RNA, 19 nt, Artificial Sequence
  Description of Artificial Sequence: Synthetic oligonucleotide
  Antisense strand to SEQ ID NO: 740274
aauacugcgggcaaugccu

SEQ ID NO: 740276 - RNA, 19 nt, Artificial Sequence
  Description of Artificial Sequence: Synthetic oligonucleotide
  Sense strand starting at position 2643 of SEQ ID NO: 586735
caggaugacuccucuguga

SEQ ID NO: 740277 - RNA, 19 nt, Artificial Sequence
  Description of Artificial Sequence: Synthetic oligonucleotide
  Antisense strand to SEQ ID NO: 740276
ucacagaggagucauccug

SEQ ID NO: 740278 - RNA, 19 nt, Artificial Sequence
  Description of Artificial Sequence: Synthetic oligonucleotide
  Sense strand starting at position 2645 of SEQ ID NO: 586735
ggaugacuccucugugagg

SEQ ID NO: 740279 - RNA, 19 nt, Artificial Sequence
  Description of Artificial Sequence: Synthetic oligonucleotide
  Antisense strand to SEQ ID NO: 740278
ccucacagaggagucaucc

SEQ ID NO: 740280 - RNA, 19 nt, Artificial Sequence
  Description of Artificial Sequence: Synthetic oligonucleotide
  Sense strand starting at position 2646 of SEQ ID NO: 586735
gaugacuccucugugaggu

SEQ ID NO: 740281 - RNA, 19 nt, Artificial Sequence
  Description of Artificial Sequence: Synthetic oligonucleotide
  Antisense strand to SEQ ID NO: 740280
accucacagaggagucauc

SEQ ID NO: 740282 - RNA, 19 nt, Artificial Sequence
  Description of Artificial Sequence: Synthetic oligonucleotide
  Sense strand starting at position 2684 of SEQ ID NO: 586735
ccaugaucucuggguggcu

SEQ ID NO: 740283 - RNA, 19 nt, Artificial Sequence
  Description of Artificial Sequence: Synthetic oligonucleotide
  Antisense strand to SEQ ID NO: 740282
agccacccagagaucaugg

SEQ ID NO: 740284 - RNA, 19 nt, Artificial Sequence
  Description of Artificial Sequence: Synthetic oligonucleotide
  Sense strand starting at position 2782 of SEQ ID NO: 586735
aaguguggguucucacuua

SEQ ID NO: 740285 - RNA, 19 nt, Artificial Sequence
  Description of Artificial Sequence: Synthetic oligonucleotide
  Antisense strand to SEQ ID NO: 740284
uaagugagaacccacacuu

SEQ ID NO: 740286 - RNA, 19 nt, Artificial Sequence
  Description of Artificial Sequence: Synthetic oligonucleotide
  Sense strand starting at position 2804 of SEQ ID NO: 586735
gaaccugugugcucugaac

SEQ ID NO: 740287 - RNA, 19 nt, Artificial Sequence
  Description of Artificial Sequence: Synthetic oligonucleotide
  Antisense strand to SEQ ID NO: 740286
guucagagcacacagguuc

SEQ ID NO: 740288 - RNA, 19 nt, Artificial Sequence
  Description of Artificial Sequence: Synthetic oligonucleotide
  Sense strand starting at position 2819 of SEQ ID NO: 586735
gaaccugugugcucuggaa

SEQ ID NO: 740289 - RNA, 19 nt, Artificial Sequence
  Description of Artificial Sequence: Synthetic oligonucleotide
  Antisense strand to SEQ ID NO: 740288
uuccagagcacacagguuc

SEQ ID NO: 740290 - RNA, 19 nt, Artificial Sequence
  Description of Artificial Sequence: Synthetic oligonucleotide
  Sense strand starting at position 2821 of SEQ ID NO: 586735
accugugugcucuggaaga

SEQ ID NO: 740291 - RNA, 19 nt, Artificial Sequence
  Description of Artificial Sequence: Synthetic oligonucleotide
  Antisense strand to SEQ ID NO: 740290
ucuuccagagcacacaggu

SEQ ID NO: 740292 - RNA, 19 nt, Artificial Sequence
  Description of Artificial Sequence: Synthetic oligonucleotide
  Sense strand starting at position 2823 of SEQ ID NO: 586735
cugugugcucuggaagaca

SEQ ID NO: 740293 - RNA, 19 nt, Artificial Sequence
  Description of Artificial Sequence: Synthetic oligonucleotide
  Antisense strand to SEQ ID NO: 740292
ugucuuccagagcacacag

SEQ ID NO: 740294 - RNA, 19 nt, Artificial Sequence
  Description of Artificial Sequence: Synthetic oligonucleotide
  Sense strand starting at position 2958 of SEQ ID NO: 586735
agcugugcucuggaggcaa

SEQ ID NO: 740295 - RNA, 19 nt, Artificial Sequence
  Description of Artificial Sequence: Synthetic oligonucleotide
  Antisense strand to SEQ ID NO: 740294
uugccuccagagcacagcu

SEQ ID NO: 740296 - RNA, 19 nt, Artificial Sequence
  Description of Artificial Sequence: Synthetic oligonucleotide
  Sense strand starting at position 2996 of SEQ ID NO: 586735
agggaauuggcugaggcua

SEQ ID NO: 740297 - RNA, 19 nt, Artificial Sequence
  Description of Artificial Sequence: Synthetic oligonucleotide
  Antisense strand to SEQ ID NO: 740296
uagccucagccaauucccu

SEQ ID NO: 740298 - RNA, 19 nt, Artificial Sequence
  Description of Artificial Sequence: Synthetic oligonucleotide
  Sense strand starting at position 3018 of SEQ ID NO: 586735
gggucugugugggcagaaa

SEQ ID NO: 740299 - RNA, 19 nt, Artificial Sequence
  Description of Artificial Sequence: Synthetic oligonucleotide
  Antisense strand to SEQ ID NO: 740298
uuucugcccacacagaccc

SEQ ID NO: 740300 - RNA, 19 nt, Artificial Sequence
  Description of Artificial Sequence: Synthetic oligonucleotide
  Sense strand starting at position 3030 of SEQ ID NO: 586735
gcagaaagaagucagucua

SEQ ID NO: 740301 - RNA, 19 nt, Artificial Sequence
  Description of Artificial Sequence: Synthetic oligonucleotide
  Antisense strand to SEQ ID NO: 740300
uagacugacuucuuucugc

SEQ ID NO: 740302 - RNA, 19 nt, Artificial Sequence
  Description of Artificial Sequence: Synthetic oligonucleotide
  Sense strand starting at position 3293 of SEQ ID NO: 586735
gaugaaugcucucuggaca

SEQ ID NO: 740303 - RNA, 19 nt, Artificial Sequence
  Description of Artificial Sequence: Synthetic oligonucleotide
  Antisense strand to SEQ ID NO: 740302
uguccagagagcauucauc

SEQ ID NO: 740304 - RNA, 19 nt, Artificial Sequence
  Description of Artificial Sequence: Synthetic oligonucleotide
  Sense strand starting at position 3379 of SEQ ID NO: 586735
gggugcucugaugagaaca

SEQ ID NO: 740305 - RNA, 19 nt, Artificial Sequence
  Description of Artificial Sequence: Synthetic oligonucleotide
  Antisense strand to SEQ ID NO: 740304
uguucucaucagagcaccc

SEQ ID NO: 740306 - RNA, 19 nt, Artificial Sequence
  Description of Artificial Sequence: Synthetic oligonucleotide
  Sense strand starting at position 3505 of SEQ ID NO: 586735
guggcugacugcucauauu

SEQ ID NO: 740307 - RNA, 19 nt, Artificial Sequence
  Description of Artificial Sequence: Synthetic oligonucleotide
  Antisense strand to SEQ ID NO: 740306
aauaugagcagucagccac

SEQ ID NO: 740308 - RNA, 19 nt, Artificial Sequence
  Description of Artificial Sequence: Synthetic oligonucleotide
  Sense strand starting at position 3580 of SEQ ID NO: 586735
ugguguucggcugaaagaa

SEQ ID NO: 740309 - RNA, 19 nt, Artificial Sequence
  Description of Artificial Sequence: Synthetic oligonucleotide
  Antisense strand to SEQ ID NO: 740308
uucuuucagccgaacacca

SEQ ID NO: 740310 - RNA, 19 nt, Artificial Sequence
  Description of Artificial Sequence: Synthetic oligonucleotide
  Sense strand starting at position 3627 of SEQ ID NO: 586735
cugaaugggcuuuggagau

SEQ ID NO: 740311 - RNA, 19 nt, Artificial Sequence
  Description of Artificial Sequence: Synthetic oligonucleotide
  Antisense strand to SEQ ID NO: 740310
aucuccaaagcccauucag

SEQ ID NO: 740312 - RNA, 19 nt, Artificial Sequence
  Description of Artificial Sequence: Synthetic oligonucleotide
  Sense strand starting at position 3642 of SEQ ID NO: 586735
agaugaucugguugggaac

SEQ ID NO: 740313 - RNA, 19 nt, Artificial Sequence
  Description of Artificial Sequence: Synthetic oligonucleotide
  Antisense strand to SEQ ID NO: 740312
guucccaaccagaucaucu

SEQ ID NO: 740314 - RNA, 19 nt, Artificial Sequence
  Description of Artificial Sequence: Synthetic oligonucleotide
  Sense strand starting at position 3737 of SEQ ID NO: 586735
agccuucugugggugagua

SEQ ID NO: 740315 - RNA, 19 nt, Artificial Sequence
  Description of Artificial Sequence: Synthetic oligonucleotide
  Antisense strand to SEQ ID NO: 740314
uacucacccacagaaggcu

SEQ ID NO: 740316 - RNA, 19 nt, Artificial Sequence
  Description of Artificial Sequence: Synthetic oligonucleotide
  Sense strand starting at position 3974 of SEQ ID NO: 586735
gcggaagucccugacucuu

SEQ ID NO: 740317 - RNA, 19 nt, Artificial Sequence
  Description of Artificial Sequence: Synthetic oligonucleotide
  Antisense strand to SEQ ID NO: 740316
aagagucagggacuuccgc

SEQ ID NO: 740318 - RNA, 19 nt, Artificial Sequence
  Description of Artificial Sequence: Synthetic oligonucleotide
  Sense strand starting at position 3976 of SEQ ID NO: 586735
ggaagucccugacucuuua

SEQ ID NO: 740319 - RNA, 19 nt, Artificial Sequence
  Description of Artificial Sequence: Synthetic oligonucleotide
  Antisense strand to SEQ ID NO: 740318
uaaagagucagggacuucc

SEQ ID NO: 740320 - RNA, 19 nt, Artificial Sequence
  Description of Artificial Sequence: Synthetic oligonucleotide
  Sense strand starting at position 271 of SEQ ID NO: 586736
gagaguuugagccaggguu

SEQ ID NO: 740321 - RNA, 19 nt, Artificial Sequence
  Description of Artificial Sequence: Synthetic oligonucleotide
  Antisense strand to SEQ ID NO: 740320
aacccuggcucaaacucuc

SEQ ID NO: 740322 - RNA, 19 nt, Artificial Sequence
  Description of Artificial Sequence: Synthetic oligonucleotide
  Sense strand starting at position 649 of SEQ ID NO: 586736
ucagccuucccagauguca

SEQ ID NO: 740323 - RNA, 19 nt, Artificial Sequence
  Description of Artificial Sequence: Synthetic oligonucleotide
  Antisense strand to SEQ ID NO: 740322
ugacaucugggaaggcuga

SEQ ID NO: 740324 - RNA, 19 nt, Artificial Sequence
  Description of Artificial Sequence: Synthetic oligonucleotide
  Sense strand starting at position 755 of SEQ ID NO: 586736
cgagcugugccuccguuua

SEQ ID NO: 740325 - RNA, 19 nt, Artificial Sequence
  Description of Artificial Sequence: Synthetic oligonucleotide
  Antisense strand to SEQ ID NO: 740324
uaaacggaggcacagcucg

SEQ ID NO: 740326 - RNA, 19 nt, Artificial Sequence
  Description of Artificial Sequence: Synthetic oligonucleotide
  Sense strand starting at position 757 of SEQ ID NO: 586736
agcugugccuccguuuaua

SEQ ID NO: 740327 - RNA, 19 nt, Artificial Sequence
  Description of Artificial Sequence: Synthetic oligonucleotide
  Antisense strand to SEQ ID NO: 740326
uauaaacggaggcacagcu

SEQ ID NO: 740328 - RNA, 19 nt, Artificial Sequence
  Description of Artificial Sequence: Synthetic oligonucleotide
  Sense strand starting at position 1239 of SEQ ID NO: 586736
ggaggacucuugugggaac

SEQ ID NO: 740329 - RNA, 19 nt, Artificial Sequence
  Description of Artificial Sequence: Synthetic oligonucleotide
  Antisense strand to SEQ ID NO: 740328
guucccacaagaguccucc

SEQ ID NO: 740330 - RNA, 19 nt, Artificial Sequence
  Description of Artificial Sequence: Synthetic oligonucleotide
  Sense strand starting at position 1240 of SEQ ID NO: 586736
gaggacucuugugggaacu

SEQ ID NO: 740331 - RNA, 19 nt, Artificial Sequence
  Description of Artificial Sequence: Synthetic oligonucleotide
  Antisense strand to SEQ ID NO: 740330
aguucccacaagaguccuc

SEQ ID NO: 740332 - RNA, 19 nt, Artificial Sequence
  Description of Artificial Sequence: Synthetic oligonucleotide
  Sense strand starting at position 1357 of SEQ ID NO: 586736
gcccgaguuuccugcccaa

SEQ ID NO: 740333 - RNA, 19 nt, Artificial Sequence
  Description of Artificial Sequence: Synthetic oligonucleotide
  Antisense strand to SEQ ID NO: 740332
uugggcaggaaacucgggc

SEQ ID NO: 740334 - RNA, 19 nt, Artificial Sequence
  Description of Artificial Sequence: Synthetic oligonucleotide
  Sense strand starting at position 1454 of SEQ ID NO: 586736
aaucaucgcugcuguugaa

SEQ ID NO: 740335 - RNA, 19 nt, Artificial Sequence
  Description of Artificial Sequence: Synthetic oligonucleotide
  Antisense strand to SEQ ID NO: 740334
uucaacagcagcgaugauu

SEQ ID NO: 740336 - RNA, 19 nt, Artificial Sequence
  Description of Artificial Sequence: Synthetic oligonucleotide
  Sense strand starting at position 1470 of SEQ ID NO: 586736
gaaggcuugcugugagcua

SEQ ID NO: 740337 - RNA, 19 nt, Artificial Sequence
  Description of Artificial Sequence: Synthetic oligonucleotide
  Antisense strand to SEQ ID NO: 740336
uagcucacagcaagccuuc

SEQ ID NO: 740338 - RNA, 19 nt, Artificial Sequence
  Description of Artificial Sequence: Synthetic oligonucleotide
  Sense strand starting at position 1475 of SEQ ID NO: 586736
cuugcugugagcuagaaac

SEQ ID NO: 740339 - RNA, 19 nt, Artificial Sequence
  Description of Artificial Sequence: Synthetic oligonucleotide
  Antisense strand to SEQ ID NO: 740338
guuucuagcucacagcaag

SEQ ID NO: 740340 - RNA, 19 nt, Artificial Sequence
  Description of Artificial Sequence: Synthetic oligonucleotide
  Sense strand starting at position 1477 of SEQ ID NO: 586736
ugcugugagcuagaaacuu

SEQ ID NO: 740341 - RNA, 19 nt, Artificial Sequence
  Description of Artificial Sequence: Synthetic oligonucleotide
  Antisense strand to SEQ ID NO: 740340
aaguuucuagcucacagca

SEQ ID NO: 740342 - RNA, 19 nt, Artificial Sequence
  Description of Artificial Sequence: Synthetic oligonucleotide
  Sense strand starting at position 1505 of SEQ ID NO: 586736
uggaguaaguauugccaua

SEQ ID NO: 740343 - RNA, 19 nt, Artificial Sequence
  Description of Artificial Sequence: Synthetic oligonucleotide
  Antisense strand to SEQ ID NO: 740342
uauggcaauacuuacucca

SEQ ID NO: 740344 - RNA, 19 nt, Artificial Sequence
  Description of Artificial Sequence: Synthetic oligonucleotide
  Sense strand starting at position 1507 of SEQ ID NO: 586736
gaguaaguauugccauauc

SEQ ID NO: 740345 - RNA, 19 nt, Artificial Sequence
  Description of Artificial Sequence: Synthetic oligonucleotide
  Antisense strand to SEQ ID NO: 740344
gauauggcaauacuuacuc

SEQ ID NO: 740346 - RNA, 19 nt, Artificial Sequence
  Description of Artificial Sequence: Synthetic oligonucleotide
  Sense strand starting at position 1689 of SEQ ID NO: 586736
cccagacuguccuguucua

SEQ ID NO: 740347 - RNA, 19 nt, Artificial Sequence
  Description of Artificial Sequence: Synthetic oligonucleotide
  Antisense strand to SEQ ID NO: 740346
uagaacaggacagucuggg

SEQ ID NO: 740348 - RNA, 19 nt, Artificial Sequence
  Description of Artificial Sequence: Synthetic oligonucleotide
  Sense strand starting at position 1696 of SEQ ID NO: 586736
uguccuguucuaugcacau

SEQ ID NO: 740349 - RNA, 19 nt, Artificial Sequence
  Description of Artificial Sequence: Synthetic oligonucleotide
  Antisense strand to SEQ ID NO: 740348
augugcauagaacaggaca

SEQ ID NO: 740350 - RNA, 19 nt, Artificial Sequence
  Description of Artificial Sequence: Synthetic oligonucleotide
  Sense strand starting at position 2350 of SEQ ID NO: 586736
guccuucugugauguggca

SEQ ID NO: 740351 - RNA, 19 nt, Artificial Sequence
  Description of Artificial Sequence: Synthetic oligonucleotide
  Antisense strand to SEQ ID NO: 740350
ugccacaucacagaaggac

SEQ ID NO: 740352 - RNA, 19 nt, Artificial Sequence
  Description of Artificial Sequence: Synthetic oligonucleotide
  Sense strand starting at position 2611 of SEQ ID NO: 586736
uguccuugagucugacauu

SEQ ID NO: 740353 - RNA, 19 nt, Artificial Sequence
  Description of Artificial Sequence: Synthetic oligonucleotide
  Antisense strand to SEQ ID NO: 740352
aaugucagacucaaggaca

SEQ ID NO: 740354 - RNA, 19 nt, Artificial Sequence
  Description of Artificial Sequence: Synthetic oligonucleotide
  Sense strand starting at position 2612 of SEQ ID NO: 586736
guccuugagucugacauua

SEQ ID NO: 740355 - RNA, 19 nt, Artificial Sequence
  Description of Artificial Sequence: Synthetic oligonucleotide
  Antisense strand to SEQ ID NO: 740354
uaaugucagacucaaggac

SEQ ID NO: 740356 - RNA, 19 nt, Artificial Sequence
  Description of Artificial Sequence: Synthetic oligonucleotide
  Sense strand starting at position 2617 of SEQ ID NO: 586736
ugagucugacauuagggua

SEQ ID NO: 740357 - RNA, 19 nt, Artificial Sequence
  Description of Artificial Sequence: Synthetic oligonucleotide
  Antisense strand to SEQ ID NO: 740356
uacccuaaugucagacuca

SEQ ID NO: 740358 - RNA, 19 nt, Artificial Sequence
  Description of Artificial Sequence: Synthetic oligonucleotide
  Sense strand starting at position 2826 of SEQ ID NO: 586736
gcuugaugcccugguggga

SEQ ID NO: 740359 - RNA, 19 nt, Artificial Sequence
  Description of Artificial Sequence: Synthetic oligonucleotide
  Antisense strand to SEQ ID NO: 740358
ucccaccagggcaucaagc

SEQ ID NO: 740360 - RNA, 19 nt, Artificial Sequence
  Description of Artificial Sequence: Synthetic oligonucleotide
  Sense strand starting at position 2935 of SEQ ID NO: 586736
guuuguaguucugugccau

SEQ ID NO: 740361 - RNA, 19 nt, Artificial Sequence
  Description of Artificial Sequence: Synthetic oligonucleotide
  Antisense strand to SEQ ID NO: 740360
auggcacagaacuacaaac

SEQ ID NO: 740362 - RNA, 19 nt, Artificial Sequence
  Description of Artificial Sequence: Synthetic oligonucleotide
  Sense strand starting at position 2939 of SEQ ID NO: 586736
guaguucugugccaucuga

SEQ ID NO: 740363 - RNA, 19 nt, Artificial Sequence
  Description of Artificial Sequence: Synthetic oligonucleotide
  Antisense strand to SEQ ID NO: 740362
ucagauggcacagaacuac

SEQ ID NO: 740364 - RNA, 19 nt, Artificial Sequence
  Description of Artificial Sequence: Synthetic oligonucleotide
  Sense strand starting at position 2999 of SEQ ID NO: 586736
gggucgaagccucgugauu

SEQ ID NO: 740365 - RNA, 19 nt, Artificial Sequence
  Description of Artificial Sequence: Synthetic oligonucleotide
  Antisense strand to SEQ ID NO: 740364
aaucacgaggcuucgaccc

SEQ ID NO: 740366 - RNA, 19 nt, Artificial Sequence
  Description of Artificial Sequence: Synthetic oligonucleotide
  Sense strand starting at position 3001 of SEQ ID NO: 586736
gucgaagccucgugauuuc

SEQ ID NO: 740367 - RNA, 19 nt, Artificial Sequence
  Description of Artificial Sequence: Synthetic oligonucleotide
  Antisense strand to SEQ ID NO: 740366
gaaaucacgaggcuucgac

SEQ ID NO: 740368 - RNA, 19 nt, Artificial Sequence
  Description of Artificial Sequence: Synthetic oligonucleotide
  Sense strand starting at position 3008 of SEQ ID NO: 586736
ccucgugauuucgagaccu

SEQ ID NO: 740369 - RNA, 19 nt, Artificial Sequence
  Description of Artificial Sequence: Synthetic oligonucleotide
  Antisense strand to SEQ ID NO: 740368
aggucucgaaaucacgagg

SEQ ID NO: 740370 - RNA, 19 nt, Artificial Sequence
  Description of Artificial Sequence: Synthetic oligonucleotide
  Sense strand starting at position 3037 of SEQ ID NO: 586736
gagaaaguuuaagaaagaa

SEQ ID NO: 740371 - RNA, 19 nt, Artificial Sequence
  Description of Artificial Sequence: Synthetic oligonucleotide
  Antisense strand to SEQ ID NO: 740370
uucuuucuuaaacuuucuc

SEQ ID NO: 740372 - RNA, 19 nt, Artificial Sequence
  Description of Artificial Sequence: Synthetic oligonucleotide
  Sense strand starting at position 3120 of SEQ ID NO: 586736
gaggauuuguguuggccag

SEQ ID NO: 740373 - RNA, 19 nt, Artificial Sequence
  Description of Artificial Sequence: Synthetic oligonucleotide
  Antisense strand to SEQ ID NO: 740372
cuggccaacacaaauccuc

SEQ ID NO: 740374 - RNA, 19 nt, Artificial Sequence
  Description of Artificial Sequence: Synthetic oligonucleotide
  Sense strand starting at position 3122 of SEQ ID NO: 586736
ggauuuguguuggccagac

SEQ ID NO: 740375 - RNA, 19 nt, Artificial Sequence
  Description of Artificial Sequence: Synthetic oligonucleotide
  Antisense strand to SEQ ID NO: 740374
gucuggccaacacaaaucc

SEQ ID NO: 740376 - RNA, 19 nt, Artificial Sequence
  Description of Artificial Sequence: Synthetic oligonucleotide
  Sense strand starting at position 3132 of SEQ ID NO: 586736
uggccagacuccucugaaa

SEQ ID NO: 740377 - RNA, 19 nt, Artificial Sequence
  Description of Artificial Sequence: Synthetic oligonucleotide
  Antisense strand to SEQ ID NO: 740376
uuucagaggagucuggcca

SEQ ID NO: 740378 - RNA, 19 nt, Artificial Sequence
  Description of Artificial Sequence: Synthetic oligonucleotide
  Sense strand starting at position 3528 of SEQ ID NO: 586736
uugaaaugugcaugaccaa

SEQ ID NO: 740379 - RNA, 19 nt, Artificial Sequence
  Description of Artificial Sequence: Synthetic oligonucleotide
  Antisense strand to SEQ ID NO: 740378
uuggucaugcacauuucaa

SEQ ID NO: 740380 - RNA, 19 nt, Artificial Sequence
  Description of Artificial Sequence: Synthetic oligonucleotide
  Sense strand starting at position 3558 of SEQ ID NO: 586736
uuuccuaggucccaguuaa

SEQ ID NO: 740381 - RNA, 19 nt, Artificial Sequence
  Description of Artificial Sequence: Synthetic oligonucleotide
  Antisense strand to SEQ ID NO: 740380
uuaacugggaccuaggaaa

SEQ ID NO: 740382 - RNA, 19 nt, Artificial Sequence
  Description of Artificial Sequence: Synthetic oligonucleotide
  Sense strand starting at position 3571 of SEQ ID NO: 586736
aguuaauggagcugugacu

SEQ ID NO: 740383 - RNA, 19 nt, Artificial Sequence
  Description of Artificial Sequence: Synthetic oligonucleotide
  Antisense strand to SEQ ID NO: 740382
agucacagcuccauuaacu

SEQ ID NO: 740384 - RNA, 19 nt, Artificial Sequence
  Description of Artificial Sequence: Synthetic oligonucleotide
  Sense strand starting at position 3731 of SEQ ID NO: 586736
cggagugauucucaugccu

SEQ ID NO: 740385 - RNA, 19 nt, Artificial Sequence
  Description of Artificial Sequence: Synthetic oligonucleotide
  Antisense strand to SEQ ID NO: 740384
aggcaugagaaucacuccg

SEQ ID NO: 740386 - RNA, 19 nt, Artificial Sequence
  Description of Artificial Sequence: Synthetic oligonucleotide
  Sense strand starting at position 88 of SEQ ID NO: 586737
agaagcugagcuugucaga

SEQ ID NO: 740387 - RNA, 19 nt, Artificial Sequence
  Description of Artificial Sequence: Synthetic oligonucleotide
  Antisense strand to SEQ ID NO: 740386
ucugacaagcucagcuucu

SEQ ID NO: 740388 - RNA, 19 nt, Artificial Sequence
  Description of Artificial Sequence: Synthetic oligonucleotide
  Sense strand starting at position 238 of SEQ ID NO: 586737
gcaucuggcccagguagaa

SEQ ID NO: 740389 - RNA, 19 nt, Artificial Sequence
  Description of Artificial Sequence: Synthetic oligonucleotide
  Antisense strand to SEQ ID NO: 740388
uucuaccugggccagaugc

SEQ ID NO: 740390 - RNA, 19 nt, Artificial Sequence
  Description of Artificial Sequence: Synthetic oligonucleotide
  Sense strand starting at position 345 of SEQ ID NO: 586737
gacucauugcaacgugcaa

SEQ ID NO: 740391 - RNA, 19 nt, Artificial Sequence
  Description of Artificial Sequence: Synthetic oligonucleotide
  Antisense strand to SEQ ID NO: 740390
uugcacguugcaaugaguc

SEQ ID NO: 740392 - RNA, 19 nt, Artificial Sequence
  Description of Artificial Sequence: Synthetic oligonucleotide
  Sense strand starting at position 454 of SEQ ID NO: 586737
cugugucucccuggaaguu

SEQ ID NO: 740393 - RNA, 19 nt, Artificial Sequence
  Description of Artificial Sequence: Synthetic oligonucleotide
  Antisense strand to SEQ ID NO: 740392
aacuuccagggagacacag

SEQ ID NO: 740394 - RNA, 19 nt, Artificial Sequence
  Description of Artificial Sequence: Synthetic oligonucleotide
  Sense strand starting at position 589 of SEQ ID NO: 586737
caaagcuaugcugguagaa

SEQ ID NO: 740395 - RNA, 19 nt, Artificial Sequence
  Description of Artificial Sequence: Synthetic oligonucleotide
  Antisense strand to SEQ ID NO: 740394
uucuaccagcauagcuuug

SEQ ID NO: 740396 - RNA, 19 nt, Artificial Sequence
  Description of Artificial Sequence: Synthetic oligonucleotide
  Sense strand starting at position 659 of SEQ ID NO: 586737
gcgggucacauugaugaag

SEQ ID NO: 740397 - RNA, 19 nt, Artificial Sequence
  Description of Artificial Sequence: Synthetic oligonucleotide
  Antisense strand to SEQ ID NO: 740396
cuucaucaaugugacccgc

SEQ ID NO: 740398 - RNA, 19 nt, Artificial Sequence
  Description of Artificial Sequence: Synthetic oligonucleotide
  Sense strand starting at position 751 of SEQ ID NO: 586737
ugaggagggccuuggugau

SEQ ID NO: 740399 - RNA, 19 nt, Artificial Sequence
  Description of Artificial Sequence: Synthetic oligonucleotide
  Antisense strand to SEQ ID NO: 740398
aucaccaaggcccuccuca

SEQ ID NO: 740400 - RNA, 19 nt, Artificial Sequence
  Description of Artificial Sequence: Synthetic oligonucleotide
  Sense strand starting at position 758 of SEQ ID NO: 586737
ggccuuggugaucgacaga

SEQ ID NO: 740401 - RNA, 19 nt, Artificial Sequence
  Description of Artificial Sequence: Synthetic oligonucleotide
  Antisense strand to SEQ ID NO: 740400
ucugucgaucaccaaggcc

SEQ ID NO: 740402 - RNA, 19 nt, Artificial Sequence
  Description of Artificial Sequence: Synthetic oligonucleotide
  Sense strand starting at position 847 of SEQ ID NO: 586737
ggcagaucuucuguaauag

SEQ ID NO: 740403 - RNA, 19 nt, Artificial Sequence
  Description of Artificial Sequence: Synthetic oligonucleotide
  Antisense strand to SEQ ID NO: 740402
cuauuacagaagaucugcc

SEQ ID NO: 740404 - RNA, 19 nt, Artificial Sequence
  Description of Artificial Sequence: Synthetic oligonucleotide
  Sense strand starting at position 848 of SEQ ID NO: 586737
gcagaucuucuguaauagg

SEQ ID NO: 740405 - RNA, 19 nt, Artificial Sequence
  Description of Artificial Sequence: Synthetic oligonucleotide
  Antisense strand to SEQ ID NO: 740404
ccuauuacagaagaucugc

SEQ ID NO: 740406 - RNA, 19 nt, Artificial Sequence
  Description of Artificial Sequence: Synthetic oligonucleotide
  Sense strand starting at position 871 of SEQ ID NO: 586737
ggugaucaccugugaucuu

SEQ ID NO: 740407 - RNA, 19 nt, Artificial Sequence
  Description of Artificial Sequence: Synthetic oligonucleotide
  Antisense strand to SEQ ID NO: 740406
aagaucacaggugaucacc

SEQ ID NO: 740408 - RNA, 19 nt, Artificial Sequence
  Description of Artificial Sequence: Synthetic oligonucleotide
  Sense strand starting at position 954 of SEQ ID NO: 586737
ggguucuucccacauucgu

SEQ ID NO: 740409 - RNA, 19 nt, Artificial Sequence
  Description of Artificial Sequence: Synthetic oligonucleotide
  Antisense strand to SEQ ID NO: 740408
acgaaugugggaagaaccc

SEQ ID NO: 740410 - RNA, 19 nt, Artificial Sequence
  Description of Artificial Sequence: Synthetic oligonucleotide
  Sense strand starting at position 960 of SEQ ID NO: 586737
uucccacauucgucauaga

SEQ ID NO: 740411 - RNA, 19 nt, Artificial Sequence
  Description of Artificial Sequence: Synthetic oligonucleotide
  Antisense strand to SEQ ID NO: 740410
ucuaugacgaaugugggaa

SEQ ID NO: 740412 - RNA, 19 nt, Artificial Sequence
  Description of Artificial Sequence: Synthetic oligonucleotide
  Sense strand starting at position 961 of SEQ ID NO: 586737
ucccacauucgucauagaa

SEQ ID NO: 740413 - RNA, 19 nt, Artificial Sequence
  Description of Artificial Sequence: Synthetic oligonucleotide
  Antisense strand to SEQ ID NO: 740412
uucuaugacgaauguggga

SEQ ID NO: 740414 - RNA, 19 nt, Artificial Sequence
  Description of Artificial Sequence: Synthetic oligonucleotide
  Sense strand starting at position 1191 of SEQ ID NO: 586737
caguguuggagugacaaca

SEQ ID NO: 740415 - RNA, 19 nt, Artificial Sequence
  Description of Artificial Sequence: Synthetic oligonucleotide
  Antisense strand to SEQ ID NO: 740414
uguugucacuccaacacug

SEQ ID NO: 740416 - RNA, 19 nt, Artificial Sequence
  Description of Artificial Sequence: Synthetic oligonucleotide
  Sense strand starting at position 1234 of SEQ ID NO: 586737
cugauagaccugcagcuua

SEQ ID NO: 740417 - RNA, 19 nt, Artificial Sequence
  Description of Artificial Sequence: Synthetic oligonucleotide
  Antisense strand to SEQ ID NO: 740416
uaagcugcaggucuaucag

SEQ ID NO: 740418 - RNA, 19 nt, Artificial Sequence
  Description of Artificial Sequence: Synthetic oligonucleotide
  Sense strand starting at position 1313 of SEQ ID NO: 586737
gggcucugcccacgucaaa

SEQ ID NO: 740419 - RNA, 19 nt, Artificial Sequence
  Description of Artificial Sequence: Synthetic oligonucleotide
  Antisense strand to SEQ ID NO: 740418
uuugacgugggcagagccc

SEQ ID NO: 740420 - RNA, 19 nt, Artificial Sequence
  Description of Artificial Sequence: Synthetic oligonucleotide
  Sense strand starting at position 1373 of SEQ ID NO: 586737
agggucucucauggagagu

SEQ ID NO: 740421 - RNA, 19 nt, Artificial Sequence
  Description of Artificial Sequence: Synthetic oligonucleotide
  Antisense strand to SEQ ID NO: 740420
acucuccaugagagacccu

SEQ ID NO: 740422 - RNA, 19 nt, Artificial Sequence
  Description of Artificial Sequence: Synthetic oligonucleotide
  Sense strand starting at position 1384 of SEQ ID NO: 586737
uggagagucuguucaggag

SEQ ID NO: 740423 - RNA, 19 nt, Artificial Sequence
  Description of Artificial Sequence: Synthetic oligonucleotide
  Antisense strand to SEQ ID NO: 740422
cuccugaacagacucucca

SEQ ID NO: 740424 - RNA, 19 nt, Artificial Sequence
  Description of Artificial Sequence: Synthetic oligonucleotide
  Sense strand starting at position 1472 of SEQ ID NO: 586737
caaaguaagcgaggaacuu

SEQ ID NO: 740425 - RNA, 19 nt, Artificial Sequence
  Description of Artificial Sequence: Synthetic oligonucleotide
  Antisense strand to SEQ ID NO: 740424
aaguuccucgcuuacuuug

SEQ ID NO: 740426 - RNA, 19 nt, Artificial Sequence
  Description of Artificial Sequence: Synthetic oligonucleotide
  Sense strand starting at position 1532 of SEQ ID NO: 586737
cucaguccucccuagguga

SEQ ID NO: 740427 - RNA, 19 nt, Artificial Sequence
  Description of Artificial Sequence: Synthetic oligonucleotide
  Antisense strand to SEQ ID NO: 740426
ucaccuagggaggacugag

SEQ ID NO: 740428 - RNA, 19 nt, Artificial Sequence
  Description of Artificial Sequence: Synthetic oligonucleotide
  Sense strand starting at position 1545 of SEQ ID NO: 586737
aggugaugcucaccaggua

SEQ ID NO: 740429 - RNA, 19 nt, Artificial Sequence
  Description of Artificial Sequence: Synthetic oligonucleotide
  Antisense strand to SEQ ID NO: 740428
uaccuggugagcaucaccu

SEQ ID NO: 740430 - RNA, 19 nt, Artificial Sequence
  Description of Artificial Sequence: Synthetic oligonucleotide
  Sense strand starting at position 1546 of SEQ ID NO: 586737
ggugaugcucaccagguaa

SEQ ID NO: 740431 - RNA, 19 nt, Artificial Sequence
  Description of Artificial Sequence: Synthetic oligonucleotide
  Antisense strand to SEQ ID NO: 740430
uuaccuggugagcaucacc

SEQ ID NO: 740432 - RNA, 19 nt, Artificial Sequence
  Description of Artificial Sequence: Synthetic oligonucleotide
  Sense strand starting at position 1746 of SEQ ID NO: 586737
ucccucauguguccagaga

SEQ ID NO: 740433 - RNA, 19 nt, Artificial Sequence
  Description of Artificial Sequence: Synthetic oligonucleotide
  Antisense strand to SEQ ID NO: 740432
ucucuggacacaugaggga

SEQ ID NO: 740434 - RNA, 19 nt, Artificial Sequence
  Description of Artificial Sequence: Synthetic oligonucleotide
  Sense strand starting at position 2078 of SEQ ID NO: 586737
gagcccugcugguuaauga

SEQ ID NO: 740435 - RNA, 19 nt, Artificial Sequence
  Description of Artificial Sequence: Synthetic oligonucleotide
  Antisense strand to SEQ ID NO: 740434
ucauuaaccagcagggcuc

SEQ ID NO: 740436 - RNA, 19 nt, Artificial Sequence
  Description of Artificial Sequence: Synthetic oligonucleotide
  Sense strand starting at position 2079 of SEQ ID NO: 586737
agcccugcugguuaaugau

SEQ ID NO: 740437 - RNA, 19 nt, Artificial Sequence
  Description of Artificial Sequence: Synthetic oligonucleotide
  Antisense strand to SEQ ID NO: 740436
aucauuaaccagcagggcu

SEQ ID NO: 740438 - RNA, 19 nt, Artificial Sequence
  Description of Artificial Sequence: Synthetic oligonucleotide
  Sense strand starting at position 2085 of SEQ ID NO: 586737
gcugguuaaugauccacca

SEQ ID NO: 740439 - RNA, 19 nt, Artificial Sequence
  Description of Artificial Sequence: Synthetic oligonucleotide
  Antisense strand to SEQ ID NO: 740438
ugguggaucauuaaccagc

SEQ ID NO: 740440 - RNA, 19 nt, Artificial Sequence
  Description of Artificial Sequence: Synthetic oligonucleotide
  Sense strand starting at position 2562 of SEQ ID NO: 586737
gggccugacaguugacaga

SEQ ID NO: 740441 - RNA, 19 nt, Artificial Sequence
  Description of Artificial Sequence: Synthetic oligonucleotide
  Antisense strand to SEQ ID NO: 740440
ucugucaacugucaggccc

SEQ ID NO: 740442 - RNA, 19 nt, Artificial Sequence
  Description of Artificial Sequence: Synthetic oligonucleotide
  Sense strand starting at position 2594 of SEQ ID NO: 586737
ggaagacucuccuuugcuc

SEQ ID NO: 740443 - RNA, 19 nt, Artificial Sequence
  Description of Artificial Sequence: Synthetic oligonucleotide
  Antisense strand to SEQ ID NO: 740442
gagcaaaggagagucuucc

SEQ ID NO: 740444 - RNA, 19 nt, Artificial Sequence
  Description of Artificial Sequence: Synthetic oligonucleotide
  Sense strand starting at position 2948 of SEQ ID NO: 586737
gggaccugucucuaguguu

SEQ ID NO: 740445 - RNA, 19 nt, Artificial Sequence
  Description of Artificial Sequence: Synthetic oligonucleotide
  Antisense strand to SEQ ID NO: 740444
aacacuagagacagguccc

SEQ ID NO: 740446 - RNA, 19 nt, Artificial Sequence
  Description of Artificial Sequence: Synthetic oligonucleotide
  Sense strand starting at position 3236 of SEQ ID NO: 586737
cgguguugucaucuaguuc

SEQ ID NO: 740447 - RNA, 19 nt, Artificial Sequence
  Description of Artificial Sequence: Synthetic oligonucleotide
  Antisense strand to SEQ ID NO: 740446
gaacuagaugacaacaccg

SEQ ID NO: 740448 - RNA, 19 nt, Artificial Sequence
  Description of Artificial Sequence: Synthetic oligonucleotide
  Sense strand starting at position 3243 of SEQ ID NO: 586737
gucaucuaguuccuccaga

SEQ ID NO: 740449 - RNA, 19 nt, Artificial Sequence
  Description of Artificial Sequence: Synthetic oligonucleotide
  Antisense strand to SEQ ID NO: 740448
ucuggaggaacuagaugac

SEQ ID NO: 740450 - RNA, 19 nt, Artificial Sequence
  Description of Artificial Sequence: Synthetic oligonucleotide
  Sense strand starting at position 3276 of SEQ ID NO: 586737
caaggaucccagugcaaag

SEQ ID NO: 740451 - RNA, 19 nt, Artificial Sequence
  Description of Artificial Sequence: Synthetic oligonucleotide
  Antisense strand to SEQ ID NO: 740450
cuuugcacugggauccuug

SEQ ID NO: 740452 - RNA, 19 nt, Artificial Sequence
  Description of Artificial Sequence: Synthetic oligonucleotide
  Sense strand starting at position 3319 of SEQ ID NO: 586737
augacagcagucggugaau

SEQ ID NO: 740453 - RNA, 19 nt, Artificial Sequence
  Description of Artificial Sequence: Synthetic oligonucleotide
  Antisense strand to SEQ ID NO: 740452
auucaccgacugcugucau

SEQ ID NO: 740454 - RNA, 19 nt, Artificial Sequence
  Description of Artificial Sequence: Synthetic oligonucleotide
  Sense strand starting at position 3484 of SEQ ID NO: 586737
ucaucugucacugguagag

SEQ ID NO: 740455 - RNA, 19 nt, Artificial Sequence
  Description of Artificial Sequence: Synthetic oligonucleotide
  Antisense strand to SEQ ID NO: 740454
cucuaccagugacagauga

SEQ ID NO: 740456 - RNA, 19 nt, Artificial Sequence
  Description of Artificial Sequence: Synthetic oligonucleotide
  Sense strand starting at position 3499 of SEQ ID NO: 586737
agaggacauuccuggaaga

SEQ ID NO: 740457 - RNA, 19 nt, Artificial Sequence
  Description of Artificial Sequence: Synthetic oligonucleotide
  Antisense strand to SEQ ID NO: 740456
ucuuccaggaauguccucu

SEQ ID NO: 740458 - RNA, 19 nt, Artificial Sequence
  Description of Artificial Sequence: Synthetic oligonucleotide
  Sense strand starting at position 3606 of SEQ ID NO: 586737
ugcacagagcugugucaga

SEQ ID NO: 740459 - RNA, 19 nt, Artificial Sequence
  Description of Artificial Sequence: Synthetic oligonucleotide
  Antisense strand to SEQ ID NO: 740458
ucugacacagcucugugca

SEQ ID NO: 740460 - RNA, 19 nt, Artificial Sequence
  Description of Artificial Sequence: Synthetic oligonucleotide
  Sense strand starting at position 3654 of SEQ ID NO: 586737
ucauauguuucuucccaug

SEQ ID NO: 740461 - RNA, 19 nt, Artificial Sequence
  Description of Artificial Sequence: Synthetic oligonucleotide
  Antisense strand to SEQ ID NO: 740460
caugggaagaaacauauga

SEQ ID NO: 740462 - RNA, 19 nt, Artificial Sequence
  Description of Artificial Sequence: Synthetic oligonucleotide
  Sense strand starting at position 3872 of SEQ ID NO: 586737
ccgagcuguaaccauauga

SEQ ID NO: 740463 - RNA, 19 nt, Artificial Sequence
  Description of Artificial Sequence: Synthetic oligonucleotide
  Antisense strand to SEQ ID NO: 740462
ucauaugguuacagcucgg

SEQ ID NO: 740464 - RNA, 19 nt, Artificial Sequence
  Description of Artificial Sequence: Synthetic oligonucleotide
  Sense strand starting at position 3885 of SEQ ID NO: 586737
auaugauauguacaugcau

SEQ ID NO: 740465 - RNA, 19 nt, Artificial Sequence
  Description of Artificial Sequence: Synthetic oligonucleotide
  Antisense strand to SEQ ID NO: 740464
augcauguacauaucauau

SEQ ID NO: 740466 - RNA, 19 nt, Artificial Sequence
  Description of Artificial Sequence: Synthetic oligonucleotide
  Sense strand starting at position 357 of SEQ ID NO: 586738
cagcaauacugaguggagu

SEQ ID NO: 740467 - RNA, 19 nt, Artificial Sequence
  Description of Artificial Sequence: Synthetic oligonucleotide
  Antisense strand to SEQ ID NO: 740466
acuccacucaguauugcug

SEQ ID NO: 740468 - RNA, 19 nt, Artificial Sequence
  Description of Artificial Sequence: Synthetic oligonucleotide
  Sense strand starting at position 537 of SEQ ID NO: 586738
uaugcauuaggaggugauu

SEQ ID NO: 740469 - RNA, 19 nt, Artificial Sequence
  Description of Artificial Sequence: Synthetic oligonucleotide
  Antisense strand to SEQ ID NO: 740468
aaucaccuccuaaugcaua

SEQ ID NO: 740470 - RNA, 19 nt, Artificial Sequence
  Description of Artificial Sequence: Synthetic oligonucleotide
  Sense strand starting at position 871 of SEQ ID NO: 586738
guuugagaccugugaauua

SEQ ID NO: 740471 - RNA, 19 nt, Artificial Sequence
  Description of Artificial Sequence: Synthetic oligonucleotide
  Antisense strand to SEQ ID NO: 740470
uaauucacaggucucaaac

SEQ ID NO: 740472 - RNA, 19 nt, Artificial Sequence
  Description of Artificial Sequence: Synthetic oligonucleotide
  Sense strand starting at position 878 of SEQ ID NO: 586738
accugugaauuauugcaau

SEQ ID NO: 740473 - RNA, 19 nt, Artificial Sequence
  Description of Artificial Sequence: Synthetic oligonucleotide
  Antisense strand to SEQ ID NO: 740472
auugcaauaauucacaggu

SEQ ID NO: 740474 - RNA, 19 nt, Artificial Sequence
  Description of Artificial Sequence: Synthetic oligonucleotide
  Sense strand starting at position 899 of SEQ ID NO: 586738
cuaaacauaucguuagaca

SEQ ID NO: 740475 - RNA, 19 nt, Artificial Sequence
  Description of Artificial Sequence: Synthetic oligonucleotide
  Antisense strand to SEQ ID NO: 740474
ugucuaacgauauguuuag

SEQ ID NO: 740476 - RNA, 19 nt, Artificial Sequence
  Description of Artificial Sequence: Synthetic oligonucleotide
  Sense strand starting at position 910 of SEQ ID NO: 586738
guuagacaggugugaaaua

SEQ ID NO: 740477 - RNA, 19 nt, Artificial Sequence
  Description of Artificial Sequence: Synthetic oligonucleotide
  Antisense strand to SEQ ID NO: 740476
uauuucacaccugucuaac

SEQ ID NO: 740478 - RNA, 19 nt, Artificial Sequence
  Description of Artificial Sequence: Synthetic oligonucleotide
  Sense strand starting at position 1007 of SEQ ID NO: 586738
gaucuuguugcggaauaag

SEQ ID NO: 740479 - RNA, 19 nt, Artificial Sequence
  Description of Artificial Sequence: Synthetic oligonucleotide
  Antisense strand to SEQ ID NO: 740478
cuuauuccgcaacaagauc

SEQ ID NO: 740480 - RNA, 19 nt, Artificial Sequence
  Description of Artificial Sequence: Synthetic oligonucleotide
  Sense strand starting at position 1010 of SEQ ID NO: 586738
cuuguugcggaauaagaaa

SEQ ID NO: 740481 - RNA, 19 nt, Artificial Sequence
  Description of Artificial Sequence: Synthetic oligonucleotide
  Antisense strand to SEQ ID NO: 740480
uuucuuauuccgcaacaag

SEQ ID NO: 740482 - RNA, 19 nt, Artificial Sequence
  Description of Artificial Sequence: Synthetic oligonucleotide
  Sense strand starting at position 1033 of SEQ ID NO: 586738
acaguauuagcuuaaugaa

SEQ ID NO: 740483 - RNA, 19 nt, Artificial Sequence
  Description of Artificial Sequence: Synthetic oligonucleotide
  Antisense strand to SEQ ID NO: 740482
uucauuaagcuaauacugu

SEQ ID NO: 740484 - RNA, 19 nt, Artificial Sequence
  Description of Artificial Sequence: Synthetic oligonucleotide
  Sense strand starting at position 1181 of SEQ ID NO: 586738
ccucacugauguuuaauga

SEQ ID NO: 740485 - RNA, 19 nt, Artificial Sequence
  Description of Artificial Sequence: Synthetic oligonucleotide
  Antisense strand to SEQ ID NO: 740484
ucauuaaacaucagugagg

SEQ ID NO: 740486 - RNA, 19 nt, Artificial Sequence
  Description of Artificial Sequence: Synthetic oligonucleotide
  Sense strand starting at position 1244 of SEQ ID NO: 586738
guuguuucucaucauauca

SEQ ID NO: 740487 - RNA, 19 nt, Artificial Sequence
  Description of Artificial Sequence: Synthetic oligonucleotide
  Antisense strand to SEQ ID NO: 740486
ugauaugaugagaaacaac

SEQ ID NO: 740488 - RNA, 19 nt, Artificial Sequence
  Description of Artificial Sequence: Synthetic oligonucleotide
  Sense strand starting at position 1353 of SEQ ID NO: 586738
caaguacugcuauaggauu

SEQ ID NO: 740489 - RNA, 19 nt, Artificial Sequence
  Description of Artificial Sequence: Synthetic oligonucleotide
  Antisense strand to SEQ ID NO: 740488
aauccuauagcaguacuug

SEQ ID NO: 740490 - RNA, 19 nt, Artificial Sequence
  Description of Artificial Sequence: Synthetic oligonucleotide
  Sense strand starting at position 1422 of SEQ ID NO: 586738
ucauaaauguuacucacga

SEQ ID NO: 740491 - RNA, 19 nt, Artificial Sequence
  Description of Artificial Sequence: Synthetic oligonucleotide
  Antisense strand to SEQ ID NO: 740490
ucgugaguaacauuuauga

SEQ ID NO: 740492 - RNA, 19 nt, Artificial Sequence
  Description of Artificial Sequence: Synthetic oligonucleotide
  Sense strand starting at position 1585 of SEQ ID NO: 586738
ucacaauacuggcuaugau

SEQ ID NO: 740493 - RNA, 19 nt, Artificial Sequence
  Description of Artificial Sequence: Synthetic oligonucleotide
  Antisense strand to SEQ ID NO: 740492
aucauagccaguauuguga

SEQ ID NO: 740494 - RNA, 19 nt, Artificial Sequence
  Description of Artificial Sequence: Synthetic oligonucleotide
  Sense strand starting at position 1657 of SEQ ID NO: 586738
cagagucgcaggcaagaaa

SEQ ID NO: 740495 - RNA, 19 nt, Artificial Sequence
  Description of Artificial Sequence: Synthetic oligonucleotide
  Antisense strand to SEQ ID NO: 740494
uuucuugccugcgacucug

SEQ ID NO: 740496 - RNA, 19 nt, Artificial Sequence
  Description of Artificial Sequence: Synthetic oligonucleotide
  Sense strand starting at position 2122 of SEQ ID NO: 586738
cauggcucccuggaugaga

SEQ ID NO: 740497 - RNA, 19 nt, Artificial Sequence
  Description of Artificial Sequence: Synthetic oligonucleotide
  Antisense strand to SEQ ID NO: 740496
ucucauccagggagccaug

SEQ ID NO: 740498 - RNA, 19 nt, Artificial Sequence
  Description of Artificial Sequence: Synthetic oligonucleotide
  Sense strand starting at position 2236 of SEQ ID NO: 586738
augaauucgggucauguuu

SEQ ID NO: 740499 - RNA, 19 nt, Artificial Sequence
  Description of Artificial Sequence: Synthetic oligonucleotide
  Antisense strand to SEQ ID NO: 740498
aaacaugacccgaauucau

SEQ ID NO: 740500 - RNA, 19 nt, Artificial Sequence
  Description of Artificial Sequence: Synthetic oligonucleotide
  Sense strand starting at position 2336 of SEQ ID NO: 586738
cugugucaugugcucuuau

SEQ ID NO: 740501 - RNA, 19 nt, Artificial Sequence
  Description of Artificial Sequence: Synthetic oligonucleotide
  Antisense strand to SEQ ID NO: 740500
auaagagcacaugacacag

SEQ ID NO: 740502 - RNA, 19 nt, Artificial Sequence
  Description of Artificial Sequence: Synthetic oligonucleotide
  Sense strand starting at position 2347 of SEQ ID NO: 586738
gcucuuauuuccguaagug

SEQ ID NO: 740503 - RNA, 19 nt, Artificial Sequence
  Description of Artificial Sequence: Synthetic oligonucleotide
  Antisense strand to SEQ ID NO: 740502
cacuuacggaaauaagagc

SEQ ID NO: 740504 - RNA, 19 nt, Artificial Sequence
  Description of Artificial Sequence: Synthetic oligonucleotide
  Sense strand starting at position 2348 of SEQ ID NO: 586738
cucuuauuuccguaagugu

SEQ ID NO: 740505 - RNA, 19 nt, Artificial Sequence
  Description of Artificial Sequence: Synthetic oligonucleotide
  Antisense strand to SEQ ID NO: 740504
acacuuacggaaauaagag

SEQ ID NO: 740506 - RNA, 19 nt, Artificial Sequence
  Description of Artificial Sequence: Synthetic oligonucleotide
  Sense strand starting at position 2422 of SEQ ID NO: 586738
gcgguucucagagaaacau

SEQ ID NO: 740507 - RNA, 19 nt, Artificial Sequence
  Description of Artificial Sequence: Synthetic oligonucleotide
  Antisense strand to SEQ ID NO: 740506
auguuucucugagaaccgc

SEQ ID NO: 740508 - RNA, 19 nt, Artificial Sequence
  Description of Artificial Sequence: Synthetic oligonucleotide
  Sense strand starting at position 2499 of SEQ ID NO: 586738
ugaagauucuuacugcuuu

SEQ ID NO: 740509 - RNA, 19 nt, Artificial Sequence
  Description of Artificial Sequence: Synthetic oligonucleotide
  Antisense strand to SEQ ID NO: 740508
aaagcaguaagaaucuuca

SEQ ID NO: 740510 - RNA, 19 nt, Artificial Sequence
  Description of Artificial Sequence: Synthetic oligonucleotide
  Sense strand starting at position 2687 of SEQ ID NO: 586738
cccaaacaaccuugugaga

SEQ ID NO: 740511 - RNA, 19 nt, Artificial Sequence
  Description of Artificial Sequence: Synthetic oligonucleotide
  Antisense strand to SEQ ID NO: 740510
ucucacaagguuguuuggg

SEQ ID NO: 740512 - RNA, 19 nt, Artificial Sequence
  Description of Artificial Sequence: Synthetic oligonucleotide
  Sense strand starting at position 2710 of SEQ ID NO: 586738
cagggaagguaucuuuaug

SEQ ID NO: 740513 - RNA, 19 nt, Artificial Sequence
  Description of Artificial Sequence: Synthetic oligonucleotide
  Antisense strand to SEQ ID NO: 740512
cauaaagauaccuucccug

SEQ ID NO: 740514 - RNA, 19 nt, Artificial Sequence
  Description of Artificial Sequence: Synthetic oligonucleotide
  Sense strand starting at position 2796 of SEQ ID NO: 586738
ugauguaaaugagcugaua

SEQ ID NO: 740515 - RNA, 19 nt, Artificial Sequence
  Description of Artificial Sequence: Synthetic oligonucleotide
  Antisense strand to SEQ ID NO: 740514
uaucagcucauuuacauca

SEQ ID NO: 740516 - RNA, 19 nt, Artificial Sequence
  Description of Artificial Sequence: Synthetic oligonucleotide
  Sense strand starting at position 2861 of SEQ ID NO: 586738
acugguuugcaucaaaucu

SEQ ID NO: 740517 - RNA, 19 nt, Artificial Sequence
  Description of Artificial Sequence: Synthetic oligonucleotide
  Antisense strand to SEQ ID NO: 740516
agauuugaugcaaaccagu

SEQ ID NO: 740518 - RNA, 19 nt, Artificial Sequence
  Description of Artificial Sequence: Synthetic oligonucleotide
  Sense strand starting at position 2992 of SEQ ID NO: 586738
uugagaacacucugugaac

SEQ ID NO: 740519 - RNA, 19 nt, Artificial Sequence
  Description of Artificial Sequence: Synthetic oligonucleotide
  Antisense strand to SEQ ID NO: 740518
guucacagaguguucucaa

SEQ ID NO: 740520 - RNA, 19 nt, Artificial Sequence
  Description of Artificial Sequence: Synthetic oligonucleotide
  Sense strand starting at position 2994 of SEQ ID NO: 586738
gagaacacucugugaacca

SEQ ID NO: 740521 - RNA, 19 nt, Artificial Sequence
  Description of Artificial Sequence: Synthetic oligonucleotide
  Antisense strand to SEQ ID NO: 740520
ugguucacagaguguucuc

SEQ ID NO: 740522 - RNA, 19 nt, Artificial Sequence
  Description of Artificial Sequence: Synthetic oligonucleotide
  Sense strand starting at position 3030 of SEQ ID NO: 586738
guuuauggcaccuggaaua

SEQ ID NO: 740523 - RNA, 19 nt, Artificial Sequence
  Description of Artificial Sequence: Synthetic oligonucleotide
  Antisense strand to SEQ ID NO: 740522
uauuccaggugccauaaac

SEQ ID NO: 740524 - RNA, 19 nt, Artificial Sequence
  Description of Artificial Sequence: Synthetic oligonucleotide
  Sense strand starting at position 3040 of SEQ ID NO: 586738
ccuggaauaagagguagua

SEQ ID NO: 740525 - RNA, 19 nt, Artificial Sequence
  Description of Artificial Sequence: Synthetic oligonucleotide
  Antisense strand to SEQ ID NO: 740524
uacuaccucuuauuccagg

SEQ ID NO: 740526 - RNA, 19 nt, Artificial Sequence
  Description of Artificial Sequence: Synthetic oligonucleotide
  Sense strand starting at position 3159 of SEQ ID NO: 586738
augagaaggcauugagucu

SEQ ID NO: 740527 - RNA, 19 nt, Artificial Sequence
  Description of Artificial Sequence: Synthetic oligonucleotide
  Antisense strand to SEQ ID NO: 740526
agacucaaugccuucucau

SEQ ID NO: 740528 - RNA, 19 nt, Artificial Sequence
  Description of Artificial Sequence: Synthetic oligonucleotide
  Sense strand starting at position 3165 of SEQ ID NO: 586738
aggcauugagucuauaaug

SEQ ID NO: 740529 - RNA, 19 nt, Artificial Sequence
  Description of Artificial Sequence: Synthetic oligonucleotide
  Antisense strand to SEQ ID NO: 740528
cauuauagacucaaugccu

SEQ ID NO: 740530 - RNA, 19 nt, Artificial Sequence
  Description of Artificial Sequence: Synthetic oligonucleotide
  Sense strand starting at position 3220 of SEQ ID NO: 586738
ggauaagcuguggacucuu

SEQ ID NO: 740531 - RNA, 19 nt, Artificial Sequence
  Description of Artificial Sequence: Synthetic oligonucleotide
  Antisense strand to SEQ ID NO: 740530
aagaguccacagcuuaucc

SEQ ID NO: 740532 - RNA, 19 nt, Artificial Sequence
  Description of Artificial Sequence: Synthetic oligonucleotide
  Sense strand starting at position 3429 of SEQ ID NO: 586738
aagggaaacggguguacau

SEQ ID NO: 740533 - RNA, 19 nt, Artificial Sequence
  Description of Artificial Sequence: Synthetic oligonucleotide
  Antisense strand to SEQ ID NO: 740532
auguacacccguuucccuu

SEQ ID NO: 740534 - RNA, 19 nt, Artificial Sequence
  Description of Artificial Sequence: Synthetic oligonucleotide
  Sense strand starting at position 3449 of SEQ ID NO: 586738
uuuacuucuggugagaguu

SEQ ID NO: 740535 - RNA, 19 nt, Artificial Sequence
  Description of Artificial Sequence: Synthetic oligonucleotide
  Antisense strand to SEQ ID NO: 740534
aacucucaccagaaguaaa

SEQ ID NO: 740536 - RNA, 19 nt, Artificial Sequence
  Description of Artificial Sequence: Synthetic oligonucleotide
  Sense strand starting at position 3455 of SEQ ID NO: 586738
ucuggugagaguuaguuga

SEQ ID NO: 740537 - RNA, 19 nt, Artificial Sequence
  Description of Artificial Sequence: Synthetic oligonucleotide
  Antisense strand to SEQ ID NO: 740536
ucaacuaacucucaccaga

SEQ ID NO: 740538 - RNA, 19 nt, Artificial Sequence
  Description of Artificial Sequence: Synthetic oligonucleotide
  Sense strand starting at position 3457 of SEQ ID NO: 586738
uggugagaguuaguugaug

SEQ ID NO: 740539 - RNA, 19 nt, Artificial Sequence
  Description of Artificial Sequence: Synthetic oligonucleotide
  Antisense strand to SEQ ID NO: 740538
caucaacuaacucucacca

SEQ ID NO: 740540 - RNA, 19 nt, Artificial Sequence
  Description of Artificial Sequence: Synthetic oligonucleotide
  Sense strand starting at position 3506 of SEQ ID NO: 586738
uuuaguaaagcuggaauua

SEQ ID NO: 740541 - RNA, 19 nt, Artificial Sequence
  Description of Artificial Sequence: Synthetic oligonucleotide
  Antisense strand to SEQ ID NO: 740540
uaauuccagcuuuacuaaa

SEQ ID NO: 740542 - RNA, 19 nt, Artificial Sequence
  Description of Artificial Sequence: Synthetic oligonucleotide
  Sense strand starting at position 3576 of SEQ ID NO: 586738
cuaucuggguuacuuacau

SEQ ID NO: 740543 - RNA, 19 nt, Artificial Sequence
  Description of Artificial Sequence: Synthetic oligonucleotide
  Antisense strand to SEQ ID NO: 740542
auguaaguaacccagauag

SEQ ID NO: 740544 - RNA, 19 nt, Artificial Sequence
  Description of Artificial Sequence: Synthetic oligonucleotide
  Sense strand starting at position 3765 of SEQ ID NO: 586738
ggcagaugccauggacaga

SEQ ID NO: 740545 - RNA, 19 nt, Artificial Sequence
  Description of Artificial Sequence: Synthetic oligonucleotide
  Antisense strand to SEQ ID NO: 740544
ucuguccauggcaucugcc

SEQ ID NO: 740546 - RNA, 19 nt, Artificial Sequence
  Description of Artificial Sequence: Synthetic oligonucleotide
  Sense strand starting at position 403 of SEQ ID NO: 586739
cagcaauacugaguggagu

SEQ ID NO: 740547 - RNA, 19 nt, Artificial Sequence
  Description of Artificial Sequence: Synthetic oligonucleotide
  Antisense strand to SEQ ID NO: 740546
acuccacucaguauugcug

SEQ ID NO: 740548 - RNA, 19 nt, Artificial Sequence
  Description of Artificial Sequence: Synthetic oligonucleotide
  Sense strand starting at position 583 of SEQ ID NO: 586739
uaugcauuaggaggugauu

SEQ ID NO: 740549 - RNA, 19 nt, Artificial Sequence
  Description of Artificial Sequence: Synthetic oligonucleotide
  Antisense strand to SEQ ID NO: 740548
aaucaccuccuaaugcaua

SEQ ID NO: 740550 - RNA, 19 nt, Artificial Sequence
  Description of Artificial Sequence: Synthetic oligonucleotide
  Sense strand starting at position 917 of SEQ ID NO: 586739
guuugagaccugugaauua

SEQ ID NO: 740551 - RNA, 19 nt, Artificial Sequence
  Description of Artificial Sequence: Synthetic oligonucleotide
  Antisense strand to SEQ ID NO: 740550
uaauucacaggucucaaac

SEQ ID NO: 740552 - RNA, 19 nt, Artificial Sequence
  Description of Artificial Sequence: Synthetic oligonucleotide
  Sense strand starting at position 924 of SEQ ID NO: 586739
accugugaauuauugcaau

SEQ ID NO: 740553 - RNA, 19 nt, Artificial Sequence
  Description of Artificial Sequence: Synthetic oligonucleotide
  Antisense strand to SEQ ID NO: 740552
auugcaauaauucacaggu

SEQ ID NO: 740554 - RNA, 19 nt, Artificial Sequence
  Description of Artificial Sequence: Synthetic oligonucleotide
  Sense strand starting at position 945 of SEQ ID NO: 586739
cuaaacauaucguuagaca

SEQ ID NO: 740555 - RNA, 19 nt, Artificial Sequence
  Description of Artificial Sequence: Synthetic oligonucleotide
  Antisense strand to SEQ ID NO: 740554
ugucuaacgauauguuuag

SEQ ID NO: 740556 - RNA, 19 nt, Artificial Sequence
  Description of Artificial Sequence: Synthetic oligonucleotide
  Sense strand starting at position 956 of SEQ ID NO: 586739
guuagacaggugugaaaua

SEQ ID NO: 740557 - RNA, 19 nt, Artificial Sequence
  Description of Artificial Sequence: Synthetic oligonucleotide
  Antisense strand to SEQ ID NO: 740556
uauuucacaccugucuaac

SEQ ID NO: 740558 - RNA, 19 nt, Artificial Sequence
  Description of Artificial Sequence: Synthetic oligonucleotide
  Sense strand starting at position 1053 of SEQ ID NO: 586739
gaucuuguugcggaauaag

SEQ ID NO: 740559 - RNA, 19 nt, Artificial Sequence
  Description of Artificial Sequence: Synthetic oligonucleotide
  Antisense strand to SEQ ID NO: 740558
cuuauuccgcaacaagauc

SEQ ID NO: 740560 - RNA, 19 nt, Artificial Sequence
  Description of Artificial Sequence: Synthetic oligonucleotide
  Sense strand starting at position 1056 of SEQ ID NO: 586739
cuuguugcggaauaagaaa

SEQ ID NO: 740561 - RNA, 19 nt, Artificial Sequence
  Description of Artificial Sequence: Synthetic oligonucleotide
  Antisense strand to SEQ ID NO: 740560
uuucuuauuccgcaacaag

SEQ ID NO: 740562 - RNA, 19 nt, Artificial Sequence
  Description of Artificial Sequence: Synthetic oligonucleotide
  Sense strand starting at position 1079 of SEQ ID NO: 586739
acaguauuagcuuaaugaa

SEQ ID NO: 740563 - RNA, 19 nt, Artificial Sequence
  Description of Artificial Sequence: Synthetic oligonucleotide
  Antisense strand to SEQ ID NO: 740562
uucauuaagcuaauacugu

SEQ ID NO: 740564 - RNA, 19 nt, Artificial Sequence
  Description of Artificial Sequence: Synthetic oligonucleotide
  Sense strand starting at position 1227 of SEQ ID NO: 586739
ccucacugauguuuaauga

SEQ ID NO: 740565 - RNA, 19 nt, Artificial Sequence
  Description of Artificial Sequence: Synthetic oligonucleotide
  Antisense strand to SEQ ID NO: 740564
ucauuaaacaucagugagg

SEQ ID NO: 740566 - RNA, 19 nt, Artificial Sequence
  Description of Artificial Sequence: Synthetic oligonucleotide
  Sense strand starting at position 1290 of SEQ ID NO: 586739
guuguuucucaucauauca

SEQ ID NO: 740567 - RNA, 19 nt, Artificial Sequence
  Description of Artificial Sequence: Synthetic oligonucleotide
  Antisense strand to SEQ ID NO: 740566
ugauaugaugagaaacaac

SEQ ID NO: 740568 - RNA, 19 nt, Artificial Sequence
  Description of Artificial Sequence: Synthetic oligonucleotide
  Sense strand starting at position 1399 of SEQ ID NO: 586739
caaguacugcuauaggauu

SEQ ID NO: 740569 - RNA, 19 nt, Artificial Sequence
  Description of Artificial Sequence: Synthetic oligonucleotide
  Antisense strand to SEQ ID NO: 740568
aauccuauagcaguacuug

SEQ ID NO: 740570 - RNA, 19 nt, Artificial Sequence
  Description of Artificial Sequence: Synthetic oligonucleotide
  Sense strand starting at position 1468 of SEQ ID NO: 586739
ucauaaauguuacucacga

SEQ ID NO: 740571 - RNA, 19 nt, Artificial Sequence
  Description of Artificial Sequence: Synthetic oligonucleotide
  Antisense strand to SEQ ID NO: 740570
ucgugaguaacauuuauga

SEQ ID NO: 740572 - RNA, 19 nt, Artificial Sequence
  Description of Artificial Sequence: Synthetic oligonucleotide
  Sense strand starting at position 1631 of SEQ ID NO: 586739
ucacaauacuggcuaugau

SEQ ID NO: 740573 - RNA, 19 nt, Artificial Sequence
  Description of Artificial Sequence: Synthetic oligonucleotide
  Antisense strand to SEQ ID NO: 740572
aucauagccaguauuguga

SEQ ID NO: 740574 - RNA, 19 nt, Artificial Sequence
  Description of Artificial Sequence: Synthetic oligonucleotide
  Sense strand starting at position 1703 of SEQ ID NO: 586739
cagagucgcaggcaagaaa

SEQ ID NO: 740575 - RNA, 19 nt, Artificial Sequence
  Description of Artificial Sequence: Synthetic oligonucleotide
  Antisense strand to SEQ ID NO: 740574
uuucuugccugcgacucug

SEQ ID NO: 740576 - RNA, 19 nt, Artificial Sequence
  Description of Artificial Sequence: Synthetic oligonucleotide
  Sense strand starting at position 2168 of SEQ ID NO: 586739
cauggcucccuggaugaga

SEQ ID NO: 740577 - RNA, 19 nt, Artificial Sequence
  Description of Artificial Sequence: Synthetic oligonucleotide
  Antisense strand to SEQ ID NO: 740576
ucucauccagggagccaug

SEQ ID NO: 740578 - RNA, 19 nt, Artificial Sequence
  Description of Artificial Sequence: Synthetic oligonucleotide
  Sense strand starting at position 2282 of SEQ ID NO: 586739
augaauucgggucauguuu

SEQ ID NO: 740579 - RNA, 19 nt, Artificial Sequence
  Description of Artificial Sequence: Synthetic oligonucleotide
  Antisense strand to SEQ ID NO: 740578
aaacaugacccgaauucau

SEQ ID NO: 740580 - RNA, 19 nt, Artificial Sequence
  Description of Artificial Sequence: Synthetic oligonucleotide
  Sense strand starting at position 2382 of SEQ ID NO: 586739
cugugucaugugcucuuau

SEQ ID NO: 740581 - RNA, 19 nt, Artificial Sequence
  Description of Artificial Sequence: Synthetic oligonucleotide
  Antisense strand to SEQ ID NO: 740580
auaagagcacaugacacag

SEQ ID NO: 740582 - RNA, 19 nt, Artificial Sequence
  Description of Artificial Sequence: Synthetic oligonucleotide
  Sense strand starting at position 2393 of SEQ ID NO: 586739
gcucuuauuuccguaagug

SEQ ID NO: 740583 - RNA, 19 nt, Artificial Sequence
  Description of Artificial Sequence: Synthetic oligonucleotide
  Antisense strand to SEQ ID NO: 740582
cacuuacggaaauaagagc

SEQ ID NO: 740584 - RNA, 19 nt, Artificial Sequence
  Description of Artificial Sequence: Synthetic oligonucleotide
  Sense strand starting at position 2394 of SEQ ID NO: 586739
cucuuauuuccguaagugu

SEQ ID NO: 740585 - RNA, 19 nt, Artificial Sequence
  Description of Artificial Sequence: Synthetic oligonucleotide
  Antisense strand to SEQ ID NO: 740584
acacuuacggaaauaagag

SEQ ID NO: 740586 - RNA, 19 nt, Artificial Sequence
  Description of Artificial Sequence: Synthetic oligonucleotide
  Sense strand starting at position 2468 of SEQ ID NO: 586739
gcgguucucagagaaacau

SEQ ID NO: 740587 - RNA, 19 nt, Artificial Sequence
  Description of Artificial Sequence: Synthetic oligonucleotide
  Antisense strand to SEQ ID NO: 740586
auguuucucugagaaccgc

SEQ ID NO: 740588 - RNA, 19 nt, Artificial Sequence
  Description of Artificial Sequence: Synthetic oligonucleotide
  Sense strand starting at position 2545 of SEQ ID NO: 586739
ugaagauucuuacugcuuu

SEQ ID NO: 740589 - RNA, 19 nt, Artificial Sequence
  Description of Artificial Sequence: Synthetic oligonucleotide
  Antisense strand to SEQ ID NO: 740588
aaagcaguaagaaucuuca

SEQ ID NO: 740590 - RNA, 19 nt, Artificial Sequence
  Description of Artificial Sequence: Synthetic oligonucleotide
  Sense strand starting at position 2733 of SEQ ID NO: 586739
cccaaacaaccuugugaga

SEQ ID NO: 740591 - RNA, 19 nt, Artificial Sequence
  Description of Artificial Sequence: Synthetic oligonucleotide
  Antisense strand to SEQ ID NO: 740590
ucucacaagguuguuuggg

SEQ ID NO: 740592 - RNA, 19 nt, Artificial Sequence
  Description of Artificial Sequence: Synthetic oligonucleotide
  Sense strand starting at position 2756 of SEQ ID NO: 586739
cagggaagguaucuuuaug

SEQ ID NO: 740593 - RNA, 19 nt, Artificial Sequence
  Description of Artificial Sequence: Synthetic oligonucleotide
  Antisense strand to SEQ ID NO: 740592
cauaaagauaccuucccug

SEQ ID NO: 740594 - RNA, 19 nt, Artificial Sequence
  Description of Artificial Sequence: Synthetic oligonucleotide
  Sense strand starting at position 2842 of SEQ ID NO: 586739
ugauguaaaugagcugaua

SEQ ID NO: 740595 - RNA, 19 nt, Artificial Sequence
  Description of Artificial Sequence: Synthetic oligonucleotide
  Antisense strand to SEQ ID NO: 740594
uaucagcucauuuacauca

SEQ ID NO: 740596 - RNA, 19 nt, Artificial Sequence
  Description of Artificial Sequence: Synthetic oligonucleotide
  Sense strand starting at position 2907 of SEQ ID NO: 586739
acugguuugcaucaaaucu

SEQ ID NO: 740597 - RNA, 19 nt, Artificial Sequence
  Description of Artificial Sequence: Synthetic oligonucleotide
  Antisense strand to SEQ ID NO: 740596
agauuugaugcaaaccagu

SEQ ID NO: 740598 - RNA, 19 nt, Artificial Sequence
  Description of Artificial Sequence: Synthetic oligonucleotide
  Sense strand starting at position 3038 of SEQ ID NO: 586739
uugagaacacucugugaac

SEQ ID NO: 740599 - RNA, 19 nt, Artificial Sequence
  Description of Artificial Sequence: Synthetic oligonucleotide
  Antisense strand to SEQ ID NO: 740598
guucacagaguguucucaa

SEQ ID NO: 740600 - RNA, 19 nt, Artificial Sequence
  Description of Artificial Sequence: Synthetic oligonucleotide
  Sense strand starting at position 3040 of SEQ ID NO: 586739
gagaacacucugugaacca

SEQ ID NO: 740601 - RNA, 19 nt, Artificial Sequence
  Description of Artificial Sequence: Synthetic oligonucleotide
  Antisense strand to SEQ ID NO: 740600
ugguucacagaguguucuc

SEQ ID NO: 740602 - RNA, 19 nt, Artificial Sequence
  Description of Artificial Sequence: Synthetic oligonucleotide
  Sense strand starting at position 3076 of SEQ ID NO: 586739
guuuauggcaccuggaaua

SEQ ID NO: 740603 - RNA, 19 nt, Artificial Sequence
  Description of Artificial Sequence: Synthetic oligonucleotide
  Antisense strand to SEQ ID NO: 740602
uauuccaggugccauaaac

SEQ ID NO: 740604 - RNA, 19 nt, Artificial Sequence
  Description of Artificial Sequence: Synthetic oligonucleotide
  Sense strand starting at position 3086 of SEQ ID NO: 586739
ccuggaauaagagguagua

SEQ ID NO: 740605 - RNA, 19 nt, Artificial Sequence
  Description of Artificial Sequence: Synthetic oligonucleotide
  Antisense strand to SEQ ID NO: 740604
uacuaccucuuauuccagg

SEQ ID NO: 740606 - RNA, 19 nt, Artificial Sequence
  Description of Artificial Sequence: Synthetic oligonucleotide
  Sense strand starting at position 3205 of SEQ ID NO: 586739
augagaaggcauugagucu

SEQ ID NO: 740607 - RNA, 19 nt, Artificial Sequence
  Description of Artificial Sequence: Synthetic oligonucleotide
  Antisense strand to SEQ ID NO: 740606
agacucaaugccuucucau

SEQ ID NO: 740608 - RNA, 19 nt, Artificial Sequence
  Description of Artificial Sequence: Synthetic oligonucleotide
  Sense strand starting at position 3211 of SEQ ID NO: 586739
aggcauugagucuauaaug

SEQ ID NO: 740609 - RNA, 19 nt, Artificial Sequence
  Description of Artificial Sequence: Synthetic oligonucleotide
  Antisense strand to SEQ ID NO: 740608
cauuauagacucaaugccu

SEQ ID NO: 740610 - RNA, 19 nt, Artificial Sequence
  Description of Artificial Sequence: Synthetic oligonucleotide
  Sense strand starting at position 3266 of SEQ ID NO: 586739
ggauaagcuguggacucuu

SEQ ID NO: 740611 - RNA, 19 nt, Artificial Sequence
  Description of Artificial Sequence: Synthetic oligonucleotide
  Antisense strand to SEQ ID NO: 740610
aagaguccacagcuuaucc

SEQ ID NO: 740612 - RNA, 19 nt, Artificial Sequence
  Description of Artificial Sequence: Synthetic oligonucleotide
  Sense strand starting at position 3475 of SEQ ID NO: 586739
aagggaaacggguguacau

SEQ ID NO: 740613 - RNA, 19 nt, Artificial Sequence
  Description of Artificial Sequence: Synthetic oligonucleotide
  Antisense strand to SEQ ID NO: 740612
auguacacccguuucccuu

SEQ ID NO: 740614 - RNA, 19 nt, Artificial Sequence
  Description of Artificial Sequence: Synthetic oligonucleotide
  Sense strand starting at position 3495 of SEQ ID NO: 586739
uuuacuucuggugagaguu

SEQ ID NO: 740615 - RNA, 19 nt, Artificial Sequence
  Description of Artificial Sequence: Synthetic oligonucleotide
  Antisense strand to SEQ ID NO: 740614
aacucucaccagaaguaaa

SEQ ID NO: 740616 - RNA, 19 nt, Artificial Sequence
  Description of Artificial Sequence: Synthetic oligonucleotide
  Sense strand starting at position 3501 of SEQ ID NO: 586739
ucuggugagaguuaguuga

SEQ ID NO: 740617 - RNA, 19 nt, Artificial Sequence
  Description of Artificial Sequence: Synthetic oligonucleotide
  Antisense strand to SEQ ID NO: 740616
ucaacuaacucucaccaga

SEQ ID NO: 740618 - RNA, 19 nt, Artificial Sequence
  Description of Artificial Sequence: Synthetic oligonucleotide
  Sense strand starting at position 3503 of SEQ ID NO: 586739
uggugagaguuaguugaug

SEQ ID NO: 740619 - RNA, 19 nt, Artificial Sequence
  Description of Artificial Sequence: Synthetic oligonucleotide
  Antisense strand to SEQ ID NO: 740618
caucaacuaacucucacca

SEQ ID NO: 740620 - RNA, 19 nt, Artificial Sequence
  Description of Artificial Sequence: Synthetic oligonucleotide
  Sense strand starting at position 3552 of SEQ ID NO: 586739
uuuaguaaagcuggaauua

SEQ ID NO: 740621 - RNA, 19 nt, Artificial Sequence
  Description of Artificial Sequence: Synthetic oligonucleotide
  Antisense strand to SEQ ID NO: 740620
uaauuccagcuuuacuaaa

SEQ ID NO: 740622 - RNA, 19 nt, Artificial Sequence
  Description of Artificial Sequence: Synthetic oligonucleotide
  Sense strand starting at position 3622 of SEQ ID NO: 586739
cuaucuggguuacuuacau

SEQ ID NO: 740623 - RNA, 19 nt, Artificial Sequence
  Description of Artificial Sequence: Synthetic oligonucleotide
  Antisense strand to SEQ ID NO: 740622
auguaaguaacccagauag

SEQ ID NO: 740624 - RNA, 19 nt, Artificial Sequence
  Description of Artificial Sequence: Synthetic oligonucleotide
  Sense strand starting at position 3811 of SEQ ID NO: 586739
ggcagaugccauggacaga

SEQ ID NO: 740625 - RNA, 19 nt, Artificial Sequence
  Description of Artificial Sequence: Synthetic oligonucleotide
  Antisense strand to SEQ ID NO: 740624
ucuguccauggcaucugcc

SEQ ID NO: 740626 - RNA, 19 nt, Artificial Sequence
  Description of Artificial Sequence: Synthetic oligonucleotide
  Sense strand starting at position 73 of SEQ ID NO: 586740
guaaauaacuaugcaugca

SEQ ID NO: 740627 - RNA, 19 nt, Artificial Sequence
  Description of Artificial Sequence: Synthetic oligonucleotide
  Antisense strand to SEQ ID NO: 740626
ugcaugcauaguuauuuac

SEQ ID NO: 740628 - RNA, 19 nt, Artificial Sequence
  Description of Artificial Sequence: Synthetic oligonucleotide
  Sense strand starting at position 120 of SEQ ID NO: 586740
aaacguugcuauucugaac

SEQ ID NO: 740629 - RNA, 19 nt, Artificial Sequence
  Description of Artificial Sequence: Synthetic oligonucleotide
  Antisense strand to SEQ ID NO: 740628
guucagaauagcaacguuu

SEQ ID NO: 740630 - RNA, 19 nt, Artificial Sequence
  Description of Artificial Sequence: Synthetic oligonucleotide
  Sense strand starting at position 272 of SEQ ID NO: 586740
uccacaaaguguuccaaau

SEQ ID NO: 740631 - RNA, 19 nt, Artificial Sequence
  Description of Artificial Sequence: Synthetic oligonucleotide
  Antisense strand to SEQ ID NO: 740630
auuuggaacacuuugugga

SEQ ID NO: 740632 - RNA, 19 nt, Artificial Sequence
  Description of Artificial Sequence: Synthetic oligonucleotide
  Sense strand starting at position 290 of SEQ ID NO: 586740
uugugaaaugcacauaaug

SEQ ID NO: 740633 - RNA, 19 nt, Artificial Sequence
  Description of Artificial Sequence: Synthetic oligonucleotide
  Antisense strand to SEQ ID NO: 740632
cauuaugugcauuucacaa

SEQ ID NO: 740634 - RNA, 19 nt, Artificial Sequence
  Description of Artificial Sequence: Synthetic oligonucleotide
  Sense strand starting at position 352 of SEQ ID NO: 586740
aaaugaugugccugacuca

SEQ ID NO: 740635 - RNA, 19 nt, Artificial Sequence
  Description of Artificial Sequence: Synthetic oligonucleotide
  Antisense strand to SEQ ID NO: 740634
ugagucaggcacaucauuu

SEQ ID NO: 740636 - RNA, 19 nt, Artificial Sequence
  Description of Artificial Sequence: Synthetic oligonucleotide
  Sense strand starting at position 353 of SEQ ID NO: 586740
aaugaugugccugacucau

SEQ ID NO: 740637 - RNA, 19 nt, Artificial Sequence
  Description of Artificial Sequence: Synthetic oligonucleotide
  Antisense strand to SEQ ID NO: 740636
augagucaggcacaucauu

SEQ ID NO: 740638 - RNA, 19 nt, Artificial Sequence
  Description of Artificial Sequence: Synthetic oligonucleotide
  Sense strand starting at position 355 of SEQ ID NO: 586740
ugaugugccugacucauau

SEQ ID NO: 740639 - RNA, 19 nt, Artificial Sequence
  Description of Artificial Sequence: Synthetic oligonucleotide
  Antisense strand to SEQ ID NO: 740638
auaugagucaggcacauca

SEQ ID NO: 740640 - RNA, 19 nt, Artificial Sequence
  Description of Artificial Sequence: Synthetic oligonucleotide
  Sense strand starting at position 359 of SEQ ID NO: 586740
gugccugacucauauuuag

SEQ ID NO: 740641 - RNA, 19 nt, Artificial Sequence
  Description of Artificial Sequence: Synthetic oligonucleotide
  Antisense strand to SEQ ID NO: 740640
cuaaauaugagucaggcac

SEQ ID NO: 740642 - RNA, 19 nt, Artificial Sequence
  Description of Artificial Sequence: Synthetic oligonucleotide
  Sense strand starting at position 373 of SEQ ID NO: 586740
uuuagugcuccagaaaugu

SEQ ID NO: 740643 - RNA, 19 nt, Artificial Sequence
  Description of Artificial Sequence: Synthetic oligonucleotide
  Antisense strand to SEQ ID NO: 740642
acauuucuggagcacuaaa

SEQ ID NO: 740644 - RNA, 19 nt, Artificial Sequence
  Description of Artificial Sequence: Synthetic oligonucleotide
  Sense strand starting at position 419 of SEQ ID NO: 586740
gggauauacagaugcugga

SEQ ID NO: 740645 - RNA, 19 nt, Artificial Sequence
  Description of Artificial Sequence: Synthetic oligonucleotide
  Antisense strand to SEQ ID NO: 740644
uccagcaucuguauauccc

SEQ ID NO: 740646 - RNA, 19 nt, Artificial Sequence
  Description of Artificial Sequence: Synthetic oligonucleotide
  Sense strand starting at position 1022 of SEQ ID NO: 586740
cgcggagauuuggagauuu

SEQ ID NO: 740647 - RNA, 19 nt, Artificial Sequence
  Description of Artificial Sequence: Synthetic oligonucleotide
  Antisense strand to SEQ ID NO: 740646
aaaucuccaaaucuccgcg

SEQ ID NO: 740648 - RNA, 19 nt, Artificial Sequence
  Description of Artificial Sequence: Synthetic oligonucleotide
  Sense strand starting at position 2205 of SEQ ID NO: 586740
cgggcucugccucaggaaa

SEQ ID NO: 740649 - RNA, 19 nt, Artificial Sequence
  Description of Artificial Sequence: Synthetic oligonucleotide
  Antisense strand to SEQ ID NO: 740648
uuuccugaggcagagcccg

SEQ ID NO: 740650 - RNA, 19 nt, Artificial Sequence
  Description of Artificial Sequence: Synthetic oligonucleotide
  Sense strand starting at position 2829 of SEQ ID NO: 586740
ggugacaucuaacuggagu

SEQ ID NO: 740651 - RNA, 19 nt, Artificial Sequence
  Description of Artificial Sequence: Synthetic oligonucleotide
  Antisense strand to SEQ ID NO: 740650
acuccaguuagaugucacc

SEQ ID NO: 740652 - RNA, 19 nt, Artificial Sequence
  Description of Artificial Sequence: Synthetic oligonucleotide
  Sense strand starting at position 2830 of SEQ ID NO: 586740
gugacaucuaacuggaguc

SEQ ID NO: 740653 - RNA, 19 nt, Artificial Sequence
  Description of Artificial Sequence: Synthetic oligonucleotide
  Antisense strand to SEQ ID NO: 740652
gacuccaguuagaugucac

SEQ ID NO: 740654 - RNA, 19 nt, Artificial Sequence
  Description of Artificial Sequence: Synthetic oligonucleotide
  Sense strand starting at position 3071 of SEQ ID NO: 586740
gcugguuuacugcacauuu

SEQ ID NO: 740655 - RNA, 19 nt, Artificial Sequence
  Description of Artificial Sequence: Synthetic oligonucleotide
  Antisense strand to SEQ ID NO: 740654
aaaugugcaguaaaccagc

SEQ ID NO: 740656 - RNA, 19 nt, Artificial Sequence
  Description of Artificial Sequence: Synthetic oligonucleotide
  Sense strand starting at position 3140 of SEQ ID NO: 586740
guugcaaggucauuaauca

SEQ ID NO: 740657 - RNA, 19 nt, Artificial Sequence
  Description of Artificial Sequence: Synthetic oligonucleotide
  Antisense strand to SEQ ID NO: 740656
ugauuaaugaccuugcaac

SEQ ID NO: 740658 - RNA, 19 nt, Artificial Sequence
  Description of Artificial Sequence: Synthetic oligonucleotide
  Sense strand starting at position 3201 of SEQ ID NO: 586740
cgcagaagccgagguugau

SEQ ID NO: 740659 - RNA, 19 nt, Artificial Sequence
  Description of Artificial Sequence: Synthetic oligonucleotide
  Antisense strand to SEQ ID NO: 740658
aucaaccucggcuucugcg

SEQ ID NO: 740660 - RNA, 19 nt, Artificial Sequence
  Description of Artificial Sequence: Synthetic oligonucleotide
  Sense strand starting at position 3207 of SEQ ID NO: 586740
agccgagguugauucugaa

SEQ ID NO: 740661 - RNA, 19 nt, Artificial Sequence
  Description of Artificial Sequence: Synthetic oligonucleotide
  Antisense strand to SEQ ID NO: 740660
uucagaaucaaccucggcu

SEQ ID NO: 740662 - RNA, 19 nt, Artificial Sequence
  Description of Artificial Sequence: Synthetic oligonucleotide
  Sense strand starting at position 3211 of SEQ ID NO: 586740
gagguugauucugaaagca

SEQ ID NO: 740663 - RNA, 19 nt, Artificial Sequence
  Description of Artificial Sequence: Synthetic oligonucleotide
  Antisense strand to SEQ ID NO: 740662
ugcuuucagaaucaaccuc

SEQ ID NO: 740664 - RNA, 19 nt, Artificial Sequence
  Description of Artificial Sequence: Synthetic oligonucleotide
  Sense strand starting at position 3269 of SEQ ID NO: 586740
acuagacugcagugauuaa

SEQ ID NO: 740665 - RNA, 19 nt, Artificial Sequence
  Description of Artificial Sequence: Synthetic oligonucleotide
  Antisense strand to SEQ ID NO: 740664
uuaaucacugcagucuagu

SEQ ID NO: 740666 - RNA, 19 nt, Artificial Sequence
  Description of Artificial Sequence: Synthetic oligonucleotide
  Sense strand starting at position 3365 of SEQ ID NO: 586740
aggacauuauugcuaaauu

SEQ ID NO: 740667 - RNA, 19 nt, Artificial Sequence
  Description of Artificial Sequence: Synthetic oligonucleotide
  Antisense strand to SEQ ID NO: 740666
aauuuagcaauaauguccu

SEQ ID NO: 740668 - RNA, 19 nt, Artificial Sequence
  Description of Artificial Sequence: Synthetic oligonucleotide
  Sense strand starting at position 3366 of SEQ ID NO: 586740
ggacauuauugcuaaauua

SEQ ID NO: 740669 - RNA, 19 nt, Artificial Sequence
  Description of Artificial Sequence: Synthetic oligonucleotide
  Antisense strand to SEQ ID NO: 740668
uaauuuagcaauaaugucc

SEQ ID NO: 740670 - RNA, 19 nt, Artificial Sequence
  Description of Artificial Sequence: Synthetic oligonucleotide
  Sense strand starting at position 3406 of SEQ ID NO: 586740
aaaucucuucguggauaaa

SEQ ID NO: 740671 - RNA, 19 nt, Artificial Sequence
  Description of Artificial Sequence: Synthetic oligonucleotide
  Antisense strand to SEQ ID NO: 740670
uuuauccacgaagagauuu

SEQ ID NO: 740672 - RNA, 19 nt, Artificial Sequence
  Description of Artificial Sequence: Synthetic oligonucleotide
  Sense strand starting at position 3437 of SEQ ID NO: 586740
gaaccuggucugcaaggua

SEQ ID NO: 740673 - RNA, 19 nt, Artificial Sequence
  Description of Artificial Sequence: Synthetic oligonucleotide
  Antisense strand to SEQ ID NO: 740672
uaccuugcagaccagguuc

SEQ ID NO: 740674 - RNA, 19 nt, Artificial Sequence
  Description of Artificial Sequence: Synthetic oligonucleotide
  Sense strand starting at position 3517 of SEQ ID NO: 586740
agguauggaugggagauuu

SEQ ID NO: 740675 - RNA, 19 nt, Artificial Sequence
  Description of Artificial Sequence: Synthetic oligonucleotide
  Antisense strand to SEQ ID NO: 740674
aaaucucccauccauaccu

SEQ ID NO: 740676 - RNA, 19 nt, Artificial Sequence
  Description of Artificial Sequence: Synthetic oligonucleotide
  Sense strand starting at position 3537 of SEQ ID NO: 586740
gggugaguaaugggcucau

SEQ ID NO: 740677 - RNA, 19 nt, Artificial Sequence
  Description of Artificial Sequence: Synthetic oligonucleotide
  Antisense strand to SEQ ID NO: 740676
augagcccauuacucaccc

SEQ ID NO: 740678 - RNA, 19 nt, Artificial Sequence
  Description of Artificial Sequence: Synthetic oligonucleotide
  Sense strand starting at position 3541 of SEQ ID NO: 586740
gaguaaugggcucauguuu

SEQ ID NO: 740679 - RNA, 19 nt, Artificial Sequence
  Description of Artificial Sequence: Synthetic oligonucleotide
  Antisense strand to SEQ ID NO: 740678
aaacaugagcccauuacuc

SEQ ID NO: 740680 - RNA, 19 nt, Artificial Sequence
  Description of Artificial Sequence: Synthetic oligonucleotide
  Sense strand starting at position 3595 of SEQ ID NO: 586740
ccuuguuaaguaugaccuu

SEQ ID NO: 740681 - RNA, 19 nt, Artificial Sequence
  Description of Artificial Sequence: Synthetic oligonucleotide
  Antisense strand to SEQ ID NO: 740680
aaggucauacuuaacaagg

SEQ ID NO: 740682 - RNA, 19 nt, Artificial Sequence
  Description of Artificial Sequence: Synthetic oligonucleotide
  Sense strand starting at position 3723 of SEQ ID NO: 586740
agcacuuuaugccuuguua

SEQ ID NO: 740683 - RNA, 19 nt, Artificial Sequence
  Description of Artificial Sequence: Synthetic oligonucleotide
  Antisense strand to SEQ ID NO: 740682
uaacaaggcauaaagugcu

SEQ ID NO: 740684 - RNA, 19 nt, Artificial Sequence
  Description of Artificial Sequence: Synthetic oligonucleotide
  Sense strand starting at position 3727 of SEQ ID NO: 586740
cuuuaugccuuguuacauu

SEQ ID NO: 740685 - RNA, 19 nt, Artificial Sequence
  Description of Artificial Sequence: Synthetic oligonucleotide
  Antisense strand to SEQ ID NO: 740684
aauguaacaaggcauaaag

SEQ ID NO: 740686 - RNA, 19 nt, Artificial Sequence
  Description of Artificial Sequence: Synthetic oligonucleotide
  Sense strand starting at position 3762 of SEQ ID NO: 586740
gcaccaaauccagacguuu

SEQ ID NO: 740687 - RNA, 19 nt, Artificial Sequence
  Description of Artificial Sequence: Synthetic oligonucleotide
  Antisense strand to SEQ ID NO: 740686
aaacgucuggauuuggugc

SEQ ID NO: 740688 - RNA, 19 nt, Artificial Sequence
  Description of Artificial Sequence: Synthetic oligonucleotide
  Sense strand starting at position 3828 of SEQ ID NO: 586740
cuuugauguuccucuuuac

SEQ ID NO: 740689 - RNA, 19 nt, Artificial Sequence
  Description of Artificial Sequence: Synthetic oligonucleotide
  Antisense strand to SEQ ID NO: 740688
guaaagaggaacaucaaag

SEQ ID NO: 740690 - RNA, 19 nt, Artificial Sequence
  Description of Artificial Sequence: Synthetic oligonucleotide
  Sense strand starting at position 3835 of SEQ ID NO: 586740
guuccucuuuacuuguaga

SEQ ID NO: 740691 - RNA, 19 nt, Artificial Sequence
  Description of Artificial Sequence: Synthetic oligonucleotide
  Antisense strand to SEQ ID NO: 740690
ucuacaaguaaagaggaac

SEQ ID NO: 740692 - RNA, 19 nt, Artificial Sequence
  Description of Artificial Sequence: Synthetic oligonucleotide
  Sense strand starting at position 3863 of SEQ ID NO: 586740
cccuuaauuggaugugaca

SEQ ID NO: 740693 - RNA, 19 nt, Artificial Sequence
  Description of Artificial Sequence: Synthetic oligonucleotide
  Antisense strand to SEQ ID NO: 740692
ugucacauccaauuaaggg

SEQ ID NO: 740694 - RNA, 19 nt, Artificial Sequence
  Description of Artificial Sequence: Synthetic oligonucleotide
  Sense strand starting at position 3866 of SEQ ID NO: 586740
uuaauuggaugugacaaua

SEQ ID NO: 740695 - RNA, 19 nt, Artificial Sequence
  Description of Artificial Sequence: Synthetic oligonucleotide
  Antisense strand to SEQ ID NO: 740694
uauugucacauccaauuaa

SEQ ID NO: 740696 - RNA, 19 nt, Artificial Sequence
  Description of Artificial Sequence: Synthetic oligonucleotide
  Sense strand starting at position 3884 of SEQ ID NO: 586740
agaguauuaucguuccugu

SEQ ID NO: 740697 - RNA, 19 nt, Artificial Sequence
  Description of Artificial Sequence: Synthetic oligonucleotide
  Antisense strand to SEQ ID NO: 740696
acaggaacgauaauacucu

SEQ ID NO: 740698 - RNA, 19 nt, Artificial Sequence
  Description of Artificial Sequence: Synthetic oligonucleotide
  Sense strand starting at position 3887 of SEQ ID NO: 586740
guauuaucguuccuguauu

SEQ ID NO: 740699 - RNA, 19 nt, Artificial Sequence
  Description of Artificial Sequence: Synthetic oligonucleotide
  Antisense strand to SEQ ID NO: 740698
aauacaggaacgauaauac

SEQ ID NO: 740700 - RNA, 19 nt, Artificial Sequence
  Description of Artificial Sequence: Synthetic oligonucleotide
  Sense strand starting at position 3964 of SEQ ID NO: 586740
aguagaagcuuguuccuuu

SEQ ID NO: 740701 - RNA, 19 nt, Artificial Sequence
  Description of Artificial Sequence: Synthetic oligonucleotide
  Antisense strand to SEQ ID NO: 740700
aaaggaacaagcuucuacu

SEQ ID NO: 740702 - RNA, 19 nt, Artificial Sequence
  Description of Artificial Sequence: Synthetic oligonucleotide
  Sense strand starting at position 3965 of SEQ ID NO: 586740
guagaagcuuguuccuuua

SEQ ID NO: 740703 - RNA, 19 nt, Artificial Sequence
  Description of Artificial Sequence: Synthetic oligonucleotide
  Antisense strand to SEQ ID NO: 740702
uaaaggaacaagcuucuac

SEQ ID NO: 740704 - RNA, 19 nt, Artificial Sequence
  Description of Artificial Sequence: Synthetic oligonucleotide
  Sense strand starting at position 3967 of SEQ ID NO: 586740
agaagcuuguuccuuuaau

SEQ ID NO: 740705 - RNA, 19 nt, Artificial Sequence
  Description of Artificial Sequence: Synthetic oligonucleotide
  Antisense strand to SEQ ID NO: 740704
auuaaaggaacaagcuucu

SEQ ID NO: 740706 - RNA, 19 nt, Artificial Sequence
  Description of Artificial Sequence: Synthetic oligonucleotide
  Sense strand starting at position 26 of SEQ ID NO: 586741
cuaggaaacuuacugucuu

SEQ ID NO: 740707 - RNA, 19 nt, Artificial Sequence
  Description of Artificial Sequence: Synthetic oligonucleotide
  Antisense strand to SEQ ID NO: 740706
aagacaguaaguuuccuag

SEQ ID NO: 740708 - RNA, 19 nt, Artificial Sequence
  Description of Artificial Sequence: Synthetic oligonucleotide
  Sense strand starting at position 215 of SEQ ID NO: 586741
ggugaaugcauggauccuu

SEQ ID NO: 740709 - RNA, 19 nt, Artificial Sequence
  Description of Artificial Sequence: Synthetic oligonucleotide
  Antisense strand to SEQ ID NO: 740708
aaggauccaugcauucacc

SEQ ID NO: 740710 - RNA, 19 nt, Artificial Sequence
  Description of Artificial Sequence: Synthetic oligonucleotide
  Sense strand starting at position 525 of SEQ ID NO: 586741
uuggguauccucuaggcua

SEQ ID NO: 740711 - RNA, 19 nt, Artificial Sequence
  Description of Artificial Sequence: Synthetic oligonucleotide
  Antisense strand to SEQ ID NO: 740710
uagccuagaggauacccaa

SEQ ID NO: 740712 - RNA, 19 nt, Artificial Sequence
  Description of Artificial Sequence: Synthetic oligonucleotide
  Sense strand starting at position 619 of SEQ ID NO: 586741
agacuuuaaucugcagaau

SEQ ID NO: 740713 - RNA, 19 nt, Artificial Sequence
  Description of Artificial Sequence: Synthetic oligonucleotide
  Antisense strand to SEQ ID NO: 740712
auucugcagauuaaagucu

SEQ ID NO: 740714 - RNA, 19 nt, Artificial Sequence
  Description of Artificial Sequence: Synthetic oligonucleotide
  Sense strand starting at position 622 of SEQ ID NO: 586741
cuuuaaucugcagaauugu

SEQ ID NO: 740715 - RNA, 19 nt, Artificial Sequence
  Description of Artificial Sequence: Synthetic oligonucleotide
  Antisense strand to SEQ ID NO: 740714
acaauucugcagauuaaag

SEQ ID NO: 740716 - RNA, 19 nt, Artificial Sequence
  Description of Artificial Sequence: Synthetic oligonucleotide
  Sense strand starting at position 719 of SEQ ID NO: 586741
uuucucugucccuagacua

SEQ ID NO: 740717 - RNA, 19 nt, Artificial Sequence
  Description of Artificial Sequence: Synthetic oligonucleotide
  Antisense strand to SEQ ID NO: 740716
uagucuagggacagagaaa

SEQ ID NO: 740718 - RNA, 19 nt, Artificial Sequence
  Description of Artificial Sequence: Synthetic oligonucleotide
  Sense strand starting at position 816 of SEQ ID NO: 586741
aguacugaaauguggcaaa

SEQ ID NO: 740719 - RNA, 19 nt, Artificial Sequence
  Description of Artificial Sequence: Synthetic oligonucleotide
  Antisense strand to SEQ ID NO: 740718
uuugccacauuucaguacu

SEQ ID NO: 740720 - RNA, 19 nt, Artificial Sequence
  Description of Artificial Sequence: Synthetic oligonucleotide
  Sense strand starting at position 1159 of SEQ ID NO: 586741
ggguuacugcaucacaagu

SEQ ID NO: 740721 - RNA, 19 nt, Artificial Sequence
  Description of Artificial Sequence: Synthetic oligonucleotide
  Antisense strand to SEQ ID NO: 740720
acuugugaugcaguaaccc

SEQ ID NO: 740722 - RNA, 19 nt, Artificial Sequence
  Description of Artificial Sequence: Synthetic oligonucleotide
  Sense strand starting at position 1243 of SEQ ID NO: 586741
ggagcuuguccauauggaa

SEQ ID NO: 740723 - RNA, 19 nt, Artificial Sequence
  Description of Artificial Sequence: Synthetic oligonucleotide
  Antisense strand to SEQ ID NO: 740722
uuccauauggacaagcucc

SEQ ID NO: 740724 - RNA, 19 nt, Artificial Sequence
  Description of Artificial Sequence: Synthetic oligonucleotide
  Sense strand starting at position 1281 of SEQ ID NO: 586741
cugauuaucccuugaguaa

SEQ ID NO: 740725 - RNA, 19 nt, Artificial Sequence
  Description of Artificial Sequence: Synthetic oligonucleotide
  Antisense strand to SEQ ID NO: 740724
uuacucaagggauaaucag

SEQ ID NO: 740726 - RNA, 19 nt, Artificial Sequence
  Description of Artificial Sequence: Synthetic oligonucleotide
  Sense strand starting at position 1490 of SEQ ID NO: 586741
gaauguccagcugaaaugu

SEQ ID NO: 740727 - RNA, 19 nt, Artificial Sequence
  Description of Artificial Sequence: Synthetic oligonucleotide
  Antisense strand to SEQ ID NO: 740726
acauuucagcuggacauuc

SEQ ID NO: 740728 - RNA, 19 nt, Artificial Sequence
  Description of Artificial Sequence: Synthetic oligonucleotide
  Sense strand starting at position 1499 of SEQ ID NO: 586741
gcugaaauguacccaaauc

SEQ ID NO: 740729 - RNA, 19 nt, Artificial Sequence
  Description of Artificial Sequence: Synthetic oligonucleotide
  Antisense strand to SEQ ID NO: 740728
gauuuggguacauuucagc

SEQ ID NO: 740730 - RNA, 19 nt, Artificial Sequence
  Description of Artificial Sequence: Synthetic oligonucleotide
  Sense strand starting at position 1579 of SEQ ID NO: 586741
cgcuguaugcuugcuaagu

SEQ ID NO: 740731 - RNA, 19 nt, Artificial Sequence
  Description of Artificial Sequence: Synthetic oligonucleotide
  Antisense strand to SEQ ID NO: 740730
acuuagcaagcauacagcg

SEQ ID NO: 740732 - RNA, 19 nt, Artificial Sequence
  Description of Artificial Sequence: Synthetic oligonucleotide
  Sense strand starting at position 1637 of SEQ ID NO: 586741
cugauugcugucgugcuaa

SEQ ID NO: 740733 - RNA, 19 nt, Artificial Sequence
  Description of Artificial Sequence: Synthetic oligonucleotide
  Antisense strand to SEQ ID NO: 740732
uuagcacgacagcaaucag

SEQ ID NO: 740734 - RNA, 19 nt, Artificial Sequence
  Description of Artificial Sequence: Synthetic oligonucleotide
  Sense strand starting at position 1639 of SEQ ID NO: 586741
gauugcugucgugcuaaau

SEQ ID NO: 740735 - RNA, 19 nt, Artificial Sequence
  Description of Artificial Sequence: Synthetic oligonucleotide
  Antisense strand to SEQ ID NO: 740734
auuuagcacgacagcaauc

SEQ ID NO: 740736 - RNA, 19 nt, Artificial Sequence
  Description of Artificial Sequence: Synthetic oligonucleotide
  Sense strand starting at position 1640 of SEQ ID NO: 586741
auugcugucgugcuaaaua

SEQ ID NO: 740737 - RNA, 19 nt, Artificial Sequence
  Description of Artificial Sequence: Synthetic oligonucleotide
  Antisense strand to SEQ ID NO: 740736
uauuuagcacgacagcaau

SEQ ID NO: 740738 - RNA, 19 nt, Artificial Sequence
  Description of Artificial Sequence: Synthetic oligonucleotide
  Sense strand starting at position 1842 of SEQ ID NO: 586741
ugcugugaagauuggacau

SEQ ID NO: 740739 - RNA, 19 nt, Artificial Sequence
  Description of Artificial Sequence: Synthetic oligonucleotide
  Antisense strand to SEQ ID NO: 740738
auguccaaucuucacagca

SEQ ID NO: 740740 - RNA, 19 nt, Artificial Sequence
  Description of Artificial Sequence: Synthetic oligonucleotide
  Sense strand starting at position 1986 of SEQ ID NO: 586741
cagcccaauguuuaugaga

SEQ ID NO: 740741 - RNA, 19 nt, Artificial Sequence
  Description of Artificial Sequence: Synthetic oligonucleotide
  Antisense strand to SEQ ID NO: 740740
ucucauaaacauugggcug

SEQ ID NO: 740742 - RNA, 19 nt, Artificial Sequence
  Description of Artificial Sequence: Synthetic oligonucleotide
  Sense strand starting at position 2100 of SEQ ID NO: 586741
uuaauuagaguguacaacu

SEQ ID NO: 740743 - RNA, 19 nt, Artificial Sequence
  Description of Artificial Sequence: Synthetic oligonucleotide
  Antisense strand to SEQ ID NO: 740742
aguuguacacucuaauuaa

SEQ ID NO: 740744 - RNA, 19 nt, Artificial Sequence
  Description of Artificial Sequence: Synthetic oligonucleotide
  Sense strand starting at position 2126 of SEQ ID NO: 586741
gcauguaaggaaugugaau

SEQ ID NO: 740745 - RNA, 19 nt, Artificial Sequence
  Description of Artificial Sequence: Synthetic oligonucleotide
  Antisense strand to SEQ ID NO: 740744
auucacauuccuuacaugc

SEQ ID NO: 740746 - RNA, 19 nt, Artificial Sequence
  Description of Artificial Sequence: Synthetic oligonucleotide
  Sense strand starting at position 2156 of SEQ ID NO: 586741
ggaagacagcaauguuugu

SEQ ID NO: 740747 - RNA, 19 nt, Artificial Sequence
  Description of Artificial Sequence: Synthetic oligonucleotide
  Antisense strand to SEQ ID NO: 740746
acaaacauugcugucuucc

SEQ ID NO: 740748 - RNA, 19 nt, Artificial Sequence
  Description of Artificial Sequence: Synthetic oligonucleotide
  Sense strand starting at position 2219 of SEQ ID NO: 586741
aagagcuucuaauuaggua

SEQ ID NO: 740749 - RNA, 19 nt, Artificial Sequence
  Description of Artificial Sequence: Synthetic oligonucleotide
  Antisense strand to SEQ ID NO: 740748
uaccuaauuagaagcucuu

SEQ ID NO: 740750 - RNA, 19 nt, Artificial Sequence
  Description of Artificial Sequence: Synthetic oligonucleotide
  Sense strand starting at position 2327 of SEQ ID NO: 586741
gugucaauucuugagggaa

SEQ ID NO: 740751 - RNA, 19 nt, Artificial Sequence
  Description of Artificial Sequence: Synthetic oligonucleotide
  Antisense strand to SEQ ID NO: 740750
uucccucaagaauugacac

SEQ ID NO: 740752 - RNA, 19 nt, Artificial Sequence
  Description of Artificial Sequence: Synthetic oligonucleotide
  Sense strand starting at position 2547 of SEQ ID NO: 586741
uaacaugaaggauguguau

SEQ ID NO: 740753 - RNA, 19 nt, Artificial Sequence
  Description of Artificial Sequence: Synthetic oligonucleotide
  Antisense strand to SEQ ID NO: 740752
auacacauccuucauguua

SEQ ID NO: 740754 - RNA, 19 nt, Artificial Sequence
  Description of Artificial Sequence: Synthetic oligonucleotide
  Sense strand starting at position 2549 of SEQ ID NO: 586741
acaugaaggauguguauau

SEQ ID NO: 740755 - RNA, 19 nt, Artificial Sequence
  Description of Artificial Sequence: Synthetic oligonucleotide
  Antisense strand to SEQ ID NO: 740754
auauacacauccuucaugu

SEQ ID NO: 740756 - RNA, 19 nt, Artificial Sequence
  Description of Artificial Sequence: Synthetic oligonucleotide
  Sense strand starting at position 2558 of SEQ ID NO: 586741
auguguauaugagcaaaua

SEQ ID NO: 740757 - RNA, 19 nt, Artificial Sequence
  Description of Artificial Sequence: Synthetic oligonucleotide
  Antisense strand to SEQ ID NO: 740756
uauuugcucauauacacau

SEQ ID NO: 740758 - RNA, 19 nt, Artificial Sequence
  Description of Artificial Sequence: Synthetic oligonucleotide
  Sense strand starting at position 2559 of SEQ ID NO: 586741
uguguauaugagcaaauac

SEQ ID NO: 740759 - RNA, 19 nt, Artificial Sequence
  Description of Artificial Sequence: Synthetic oligonucleotide
  Antisense strand to SEQ ID NO: 740758
guauuugcucauauacaca

SEQ ID NO: 740760 - RNA, 19 nt, Artificial Sequence
  Description of Artificial Sequence: Synthetic oligonucleotide
  Sense strand starting at position 2635 of SEQ ID NO: 586741
cuguauuugcucuaugggu

SEQ ID NO: 740761 - RNA, 19 nt, Artificial Sequence
  Description of Artificial Sequence: Synthetic oligonucleotide
  Antisense strand to SEQ ID NO: 740760
acccauagagcaaauacag

SEQ ID NO: 740762 - RNA, 19 nt, Artificial Sequence
  Description of Artificial Sequence: Synthetic oligonucleotide
  Sense strand starting at position 2717 of SEQ ID NO: 586741
cucucaaaguccuuaggga

SEQ ID NO: 740763 - RNA, 19 nt, Artificial Sequence
  Description of Artificial Sequence: Synthetic oligonucleotide
  Antisense strand to SEQ ID NO: 740762
ucccuaaggacuuugagag

SEQ ID NO: 740764 - RNA, 19 nt, Artificial Sequence
  Description of Artificial Sequence: Synthetic oligonucleotide
  Sense strand starting at position 2779 of SEQ ID NO: 586741
ggucccaggacgcauauua

SEQ ID NO: 740765 - RNA, 19 nt, Artificial Sequence
  Description of Artificial Sequence: Synthetic oligonucleotide
  Antisense strand to SEQ ID NO: 740764
uaauaugcguccugggacc

SEQ ID NO: 740766 - RNA, 19 nt, Artificial Sequence
  Description of Artificial Sequence: Synthetic oligonucleotide
  Sense strand starting at position 2795 of SEQ ID NO: 586741
uuauuuagguaaucgcgua

SEQ ID NO: 740767 - RNA, 19 nt, Artificial Sequence
  Description of Artificial Sequence: Synthetic oligonucleotide
  Antisense strand to SEQ ID NO: 740766
uacgcgauuaccuaaauaa

SEQ ID NO: 740768 - RNA, 19 nt, Artificial Sequence
  Description of Artificial Sequence: Synthetic oligonucleotide
  Sense strand starting at position 2796 of SEQ ID NO: 586741
uauuuagguaaucgcguau

SEQ ID NO: 740769 - RNA, 19 nt, Artificial Sequence
  Description of Artificial Sequence: Synthetic oligonucleotide
  Antisense strand to SEQ ID NO: 740768
auacgcgauuaccuaaaua

SEQ ID NO: 740770 - RNA, 19 nt, Artificial Sequence
  Description of Artificial Sequence: Synthetic oligonucleotide
  Sense strand starting at position 2802 of SEQ ID NO: 586741
gguaaucgcguauugccaa

SEQ ID NO: 740771 - RNA, 19 nt, Artificial Sequence
  Description of Artificial Sequence: Synthetic oligonucleotide
  Antisense strand to SEQ ID NO: 740770
uuggcaauacgcgauuacc

SEQ ID NO: 740772 - RNA, 19 nt, Artificial Sequence
  Description of Artificial Sequence: Synthetic oligonucleotide
  Sense strand starting at position 2808 of SEQ ID NO: 586741
cgcguauugccaaaggugu

SEQ ID NO: 740773 - RNA, 19 nt, Artificial Sequence
  Description of Artificial Sequence: Synthetic oligonucleotide
  Antisense strand to SEQ ID NO: 740772
acaccuuuggcaauacgcg

SEQ ID NO: 740774 - RNA, 19 nt, Artificial Sequence
  Description of Artificial Sequence: Synthetic oligonucleotide
  Sense strand starting at position 2826 of SEQ ID NO: 586741
ugcugucaucaugacauua

SEQ ID NO: 740775 - RNA, 19 nt, Artificial Sequence
  Description of Artificial Sequence: Synthetic oligonucleotide
  Antisense strand to SEQ ID NO: 740774
uaaugucaugaugacagca

SEQ ID NO: 740776 - RNA, 19 nt, Artificial Sequence
  Description of Artificial Sequence: Synthetic oligonucleotide
  Sense strand starting at position 2908 of SEQ ID NO: 586741
agcugacuguucuuaaaua

SEQ ID NO: 740777 - RNA, 19 nt, Artificial Sequence
  Description of Artificial Sequence: Synthetic oligonucleotide
  Antisense strand to SEQ ID NO: 740776
uauuuaagaacagucagcu

SEQ ID NO: 740778 - RNA, 19 nt, Artificial Sequence
  Description of Artificial Sequence: Synthetic oligonucleotide
  Sense strand starting at position 3304 of SEQ ID NO: 586741
guuuguaguagccaagaac

SEQ ID NO: 740779 - RNA, 19 nt, Artificial Sequence
  Description of Artificial Sequence: Synthetic oligonucleotide
  Antisense strand to SEQ ID NO: 740778
guucuuggcuacuacaaac

SEQ ID NO: 740780 - RNA, 19 nt, Artificial Sequence
  Description of Artificial Sequence: Synthetic oligonucleotide
  Sense strand starting at position 3369 of SEQ ID NO: 586741
uuguaaugccauuauugga

SEQ ID NO: 740781 - RNA, 19 nt, Artificial Sequence
  Description of Artificial Sequence: Synthetic oligonucleotide
  Antisense strand to SEQ ID NO: 740780
uccaauaauggcauuacaa

SEQ ID NO: 740782 - RNA, 19 nt, Artificial Sequence
  Description of Artificial Sequence: Synthetic oligonucleotide
  Sense strand starting at position 3444 of SEQ ID NO: 586741
uugcaaacugcugauggaa

SEQ ID NO: 740783 - RNA, 19 nt, Artificial Sequence
  Description of Artificial Sequence: Synthetic oligonucleotide
  Antisense strand to SEQ ID NO: 740782
uuccaucagcaguuugcaa

SEQ ID NO: 740784 - RNA, 19 nt, Artificial Sequence
  Description of Artificial Sequence: Synthetic oligonucleotide
  Sense strand starting at position 3457 of SEQ ID NO: 586741
auggaauuucuuugugugu

SEQ ID NO: 740785 - RNA, 19 nt, Artificial Sequence
  Description of Artificial Sequence: Synthetic oligonucleotide
  Antisense strand to SEQ ID NO: 740784
acacacaaagaaauuccau

SEQ ID NO: 740786 - RNA, 19 nt, Artificial Sequence
  Description of Artificial Sequence: Synthetic oligonucleotide
  Sense strand starting at position 46 of SEQ ID NO: 586742
acguaaguuucuucuuaau

SEQ ID NO: 740787 - RNA, 19 nt, Artificial Sequence
  Description of Artificial Sequence: Synthetic oligonucleotide
  Antisense strand to SEQ ID NO: 740786
auuaagaagaaacuuacgu

SEQ ID NO: 740788 - RNA, 19 nt, Artificial Sequence
  Description of Artificial Sequence: Synthetic oligonucleotide
  Sense strand starting at position 48 of SEQ ID NO: 586742
guaaguuucuucuuaauga

SEQ ID NO: 740789 - RNA, 19 nt, Artificial Sequence
  Description of Artificial Sequence: Synthetic oligonucleotide
  Antisense strand to SEQ ID NO: 740788
ucauuaagaagaaacuuac

SEQ ID NO: 740790 - RNA, 19 nt, Artificial Sequence
  Description of Artificial Sequence: Synthetic oligonucleotide
  Sense strand starting at position 293 of SEQ ID NO: 586742
cugacaaugucuguggcaa

SEQ ID NO: 740791 - RNA, 19 nt, Artificial Sequence
  Description of Artificial Sequence: Synthetic oligonucleotide
  Antisense strand to SEQ ID NO: 740790
uugccacagacauugucag

SEQ ID NO: 740792 - RNA, 19 nt, Artificial Sequence
  Description of Artificial Sequence: Synthetic oligonucleotide
  Sense strand starting at position 294 of SEQ ID NO: 586742
ugacaaugucuguggcaac

SEQ ID NO: 740793 - RNA, 19 nt, Artificial Sequence
  Description of Artificial Sequence: Synthetic oligonucleotide
  Antisense strand to SEQ ID NO: 740792
guugccacagacauuguca

SEQ ID NO: 740794 - RNA, 19 nt, Artificial Sequence
  Description of Artificial Sequence: Synthetic oligonucleotide
  Sense strand starting at position 348 of SEQ ID NO: 586742
ggucguucuguuucuccua

SEQ ID NO: 740795 - RNA, 19 nt, Artificial Sequence
  Description of Artificial Sequence: Synthetic oligonucleotide
  Antisense strand to SEQ ID NO: 740794
uaggagaaacagaacgacc

SEQ ID NO: 740796 - RNA, 19 nt, Artificial Sequence
  Description of Artificial Sequence: Synthetic oligonucleotide
  Sense strand starting at position 540 of SEQ ID NO: 586742
ggaucacgacucugugacu

SEQ ID NO: 740797 - RNA, 19 nt, Artificial Sequence
  Description of Artificial Sequence: Synthetic oligonucleotide
  Antisense strand to SEQ ID NO: 740796
agucacagagucgugaucc

SEQ ID NO: 740798 - RNA, 19 nt, Artificial Sequence
  Description of Artificial Sequence: Synthetic oligonucleotide
  Sense strand starting at position 595 of SEQ ID NO: 586742
gagugugcccuguacaaac

SEQ ID NO: 740799 - RNA, 19 nt, Artificial Sequence
  Description of Artificial Sequence: Synthetic oligonucleotide
  Antisense strand to SEQ ID NO: 740798
guuuguacagggcacacuc

SEQ ID NO: 740800 - RNA, 19 nt, Artificial Sequence
  Description of Artificial Sequence: Synthetic oligonucleotide
  Sense strand starting at position 627 of SEQ ID NO: 586742
ugacuaagugccugauacu

SEQ ID NO: 740801 - RNA, 19 nt, Artificial Sequence
  Description of Artificial Sequence: Synthetic oligonucleotide
  Antisense strand to SEQ ID NO: 740800
aguaucaggcacuuaguca

SEQ ID NO: 740802 - RNA, 19 nt, Artificial Sequence
  Description of Artificial Sequence: Synthetic oligonucleotide
  Sense strand starting at position 628 of SEQ ID NO: 586742
gacuaagugccugauacug

SEQ ID NO: 740803 - RNA, 19 nt, Artificial Sequence
  Description of Artificial Sequence: Synthetic oligonucleotide
  Antisense strand to SEQ ID NO: 740802
caguaucaggcacuuaguc

SEQ ID NO: 740804 - RNA, 19 nt, Artificial Sequence
  Description of Artificial Sequence: Synthetic oligonucleotide
  Sense strand starting at position 643 of SEQ ID NO: 586742
acuguccugcccugggaua

SEQ ID NO: 740805 - RNA, 19 nt, Artificial Sequence
  Description of Artificial Sequence: Synthetic oligonucleotide
  Antisense strand to SEQ ID NO: 740804
uaucccagggcaggacagu

SEQ ID NO: 740806 - RNA, 19 nt, Artificial Sequence
  Description of Artificial Sequence: Synthetic oligonucleotide
  Sense strand starting at position 645 of SEQ ID NO: 586742
uguccugcccugggauaga

SEQ ID NO: 740807 - RNA, 19 nt, Artificial Sequence
  Description of Artificial Sequence: Synthetic oligonucleotide
  Antisense strand to SEQ ID NO: 740806
ucuaucccagggcaggaca

SEQ ID NO: 740808 - RNA, 19 nt, Artificial Sequence
  Description of Artificial Sequence: Synthetic oligonucleotide
  Sense strand starting at position 1173 of SEQ ID NO: 586742
gcgcaacuucguucgaagu

SEQ ID NO: 740809 - RNA, 19 nt, Artificial Sequence
  Description of Artificial Sequence: Synthetic oligonucleotide
  Antisense strand to SEQ ID NO: 740808
acuucgaacgaaguugcgc

SEQ ID NO: 740810 - RNA, 19 nt, Artificial Sequence
  Description of Artificial Sequence: Synthetic oligonucleotide
  Sense strand starting at position 1303 of SEQ ID NO: 586742
ccaaacucuugucugggaa

SEQ ID NO: 740811 - RNA, 19 nt, Artificial Sequence
  Description of Artificial Sequence: Synthetic oligonucleotide
  Antisense strand to SEQ ID NO: 740810
uucccagacaagaguuugg

SEQ ID NO: 740812 - RNA, 19 nt, Artificial Sequence
  Description of Artificial Sequence: Synthetic oligonucleotide
  Sense strand starting at position 1306 of SEQ ID NO: 586742
aacucuugucugggaagaa

SEQ ID NO: 740813 - RNA, 19 nt, Artificial Sequence
  Description of Artificial Sequence: Synthetic oligonucleotide
  Antisense strand to SEQ ID NO: 740812
uucuucccagacaagaguu

SEQ ID NO: 740814 - RNA, 19 nt, Artificial Sequence
  Description of Artificial Sequence: Synthetic oligonucleotide
  Sense strand starting at position 1438 of SEQ ID NO: 586742
gggccagaauugcuccaaa

SEQ ID NO: 740815 - RNA, 19 nt, Artificial Sequence
  Description of Artificial Sequence: Synthetic oligonucleotide
  Antisense strand to SEQ ID NO: 740814
uuuggagcaauucuggccc

SEQ ID NO: 740816 - RNA, 19 nt, Artificial Sequence
  Description of Artificial Sequence: Synthetic oligonucleotide
  Sense strand starting at position 1500 of SEQ ID NO: 586742
gcucuagagcuccagggau

SEQ ID NO: 740817 - RNA, 19 nt, Artificial Sequence
  Description of Artificial Sequence: Synthetic oligonucleotide
  Antisense strand to SEQ ID NO: 740816
aucccuggagcucuagagc

SEQ ID NO: 740818 - RNA, 19 nt, Artificial Sequence
  Description of Artificial Sequence: Synthetic oligonucleotide
  Sense strand starting at position 1513 of SEQ ID NO: 586742
agggauuccucacucgaug

SEQ ID NO: 740819 - RNA, 19 nt, Artificial Sequence
  Description of Artificial Sequence: Synthetic oligonucleotide
  Antisense strand to SEQ ID NO: 740818
caucgagugaggaaucccu

SEQ ID NO: 740820 - RNA, 19 nt, Artificial Sequence
  Description of Artificial Sequence: Synthetic oligonucleotide
  Sense strand starting at position 1628 of SEQ ID NO: 586742
ggguucucccuccauaucu

SEQ ID NO: 740821 - RNA, 19 nt, Artificial Sequence
  Description of Artificial Sequence: Synthetic oligonucleotide
  Antisense strand to SEQ ID NO: 740820
agauauggagggagaaccc

SEQ ID NO: 740822 - RNA, 19 nt, Artificial Sequence
  Description of Artificial Sequence: Synthetic oligonucleotide
  Sense strand starting at position 1730 of SEQ ID NO: 586742
aguggaauuuagccgccaa

SEQ ID NO: 740823 - RNA, 19 nt, Artificial Sequence
  Description of Artificial Sequence: Synthetic oligonucleotide
  Antisense strand to SEQ ID NO: 740822
uuggcggcuaaauuccacu

SEQ ID NO: 740824 - RNA, 19 nt, Artificial Sequence
  Description of Artificial Sequence: Synthetic oligonucleotide
  Sense strand starting at position 2425 of SEQ ID NO: 586742
ccugaauccucuuuguggu

SEQ ID NO: 740825 - RNA, 19 nt, Artificial Sequence
  Description of Artificial Sequence: Synthetic oligonucleotide
  Antisense strand to SEQ ID NO: 740824
accacaaagaggauucagg

SEQ ID NO: 740826 - RNA, 19 nt, Artificial Sequence
  Description of Artificial Sequence: Synthetic oligonucleotide
  Sense strand starting at position 2657 of SEQ ID NO: 586742
agaucagccuuccucaagu

SEQ ID NO: 740827 - RNA, 19 nt, Artificial Sequence
  Description of Artificial Sequence: Synthetic oligonucleotide
  Antisense strand to SEQ ID NO: 740826
acuugaggaaggcugaucu

SEQ ID NO: 740828 - RNA, 19 nt, Artificial Sequence
  Description of Artificial Sequence: Synthetic oligonucleotide
  Sense strand starting at position 2855 of SEQ ID NO: 586742
caaagugacggugguuaaa

SEQ ID NO: 740829 - RNA, 19 nt, Artificial Sequence
  Description of Artificial Sequence: Synthetic oligonucleotide
  Antisense strand to SEQ ID NO: 740828
uuuaaccaccgucacuuug

SEQ ID NO: 740830 - RNA, 19 nt, Artificial Sequence
  Description of Artificial Sequence: Synthetic oligonucleotide
  Sense strand starting at position 2857 of SEQ ID NO: 586742
aagugacggugguuaaaug

SEQ ID NO: 740831 - RNA, 19 nt, Artificial Sequence
  Description of Artificial Sequence: Synthetic oligonucleotide
  Antisense strand to SEQ ID NO: 740830
cauuuaaccaccgucacuu

SEQ ID NO: 740832 - RNA, 19 nt, Artificial Sequence
  Description of Artificial Sequence: Synthetic oligonucleotide
  Sense strand starting at position 2877 of SEQ ID NO: 586742
acaacaguuucugucuuau

SEQ ID NO: 740833 - RNA, 19 nt, Artificial Sequence
  Description of Artificial Sequence: Synthetic oligonucleotide
  Antisense strand to SEQ ID NO: 740832
auaagacagaaacuguugu

SEQ ID NO: 740834 - RNA, 19 nt, Artificial Sequence
  Description of Artificial Sequence: Synthetic oligonucleotide
  Sense strand starting at position 2883 of SEQ ID NO: 586742
guuucugucuuauuuacua

SEQ ID NO: 740835 - RNA, 19 nt, Artificial Sequence
  Description of Artificial Sequence: Synthetic oligonucleotide
  Antisense strand to SEQ ID NO: 740834
uaguaaauaagacagaaac

SEQ ID NO: 740836 - RNA, 19 nt, Artificial Sequence
  Description of Artificial Sequence: Synthetic oligonucleotide
  Sense strand starting at position 2944 of SEQ ID NO: 586742
guggguucugauuaagaug

SEQ ID NO: 740837 - RNA, 19 nt, Artificial Sequence
  Description of Artificial Sequence: Synthetic oligonucleotide
  Antisense strand to SEQ ID NO: 740836
caucuuaaucagaacccac

SEQ ID NO: 740838 - RNA, 19 nt, Artificial Sequence
  Description of Artificial Sequence: Synthetic oligonucleotide
  Sense strand starting at position 2987 of SEQ ID NO: 586742
uaauuugcucaucgcguua

SEQ ID NO: 740839 - RNA, 19 nt, Artificial Sequence
  Description of Artificial Sequence: Synthetic oligonucleotide
  Antisense strand to SEQ ID NO: 740838
uaacgcgaugagcaaauua

SEQ ID NO: 740840 - RNA, 19 nt, Artificial Sequence
  Description of Artificial Sequence: Synthetic oligonucleotide
  Sense strand starting at position 2990 of SEQ ID NO: 586742
uuugcucaucgcguuaaac

SEQ ID NO: 740841 - RNA, 19 nt, Artificial Sequence
  Description of Artificial Sequence: Synthetic oligonucleotide
  Antisense strand to SEQ ID NO: 740840
guuuaacgcgaugagcaaa

SEQ ID NO: 740842 - RNA, 19 nt, Artificial Sequence
  Description of Artificial Sequence: Synthetic oligonucleotide
  Sense strand starting at position 3011 of SEQ ID NO: 586742
guugaaugaauaugcaaga

SEQ ID NO: 740843 - RNA, 19 nt, Artificial Sequence
  Description of Artificial Sequence: Synthetic oligonucleotide
  Antisense strand to SEQ ID NO: 740842
ucuugcauauucauucaac

SEQ ID NO: 740844 - RNA, 19 nt, Artificial Sequence
  Description of Artificial Sequence: Synthetic oligonucleotide
  Sense strand starting at position 3078 of SEQ ID NO: 586742
ucugaaaguuccgugaaug

SEQ ID NO: 740845 - RNA, 19 nt, Artificial Sequence
  Description of Artificial Sequence: Synthetic oligonucleotide
  Antisense strand to SEQ ID NO: 740844
cauucacggaacuuucaga

SEQ ID NO: 740846 - RNA, 19 nt, Artificial Sequence
  Description of Artificial Sequence: Synthetic oligonucleotide
  Sense strand starting at position 3079 of SEQ ID NO: 586742
cugaaaguuccgugaauga

SEQ ID NO: 740847 - RNA, 19 nt, Artificial Sequence
  Description of Artificial Sequence: Synthetic oligonucleotide
  Antisense strand to SEQ ID NO: 740846
ucauucacggaacuuucag

SEQ ID NO: 740848 - RNA, 19 nt, Artificial Sequence
  Description of Artificial Sequence: Synthetic oligonucleotide
  Sense strand starting at position 3090 of SEQ ID NO: 586742
gugaaugaaugcuccugua

SEQ ID NO: 740849 - RNA, 19 nt, Artificial Sequence
  Description of Artificial Sequence: Synthetic oligonucleotide
  Antisense strand to SEQ ID NO: 740848
uacaggagcauucauucac

SEQ ID NO: 740850 - RNA, 19 nt, Artificial Sequence
  Description of Artificial Sequence: Synthetic oligonucleotide
  Sense strand starting at position 3228 of SEQ ID NO: 586742
acaagugauucuguuaaac

SEQ ID NO: 740851 - RNA, 19 nt, Artificial Sequence
  Description of Artificial Sequence: Synthetic oligonucleotide
  Antisense strand to SEQ ID NO: 740850
guuuaacagaaucacuugu

SEQ ID NO: 740852 - RNA, 19 nt, Artificial Sequence
  Description of Artificial Sequence: Synthetic oligonucleotide
  Sense strand starting at position 3471 of SEQ ID NO: 586742
agacacagccuucgguaaa

SEQ ID NO: 740853 - RNA, 19 nt, Artificial Sequence
  Description of Artificial Sequence: Synthetic oligonucleotide
  Antisense strand to SEQ ID NO: 740852
uuuaccgaaggcugugucu

SEQ ID NO: 740854 - RNA, 19 nt, Artificial Sequence
  Description of Artificial Sequence: Synthetic oligonucleotide
  Sense strand starting at position 3708 of SEQ ID NO: 586742
agauaaugucauugauucu

SEQ ID NO: 740855 - RNA, 19 nt, Artificial Sequence
  Description of Artificial Sequence: Synthetic oligonucleotide
  Antisense strand to SEQ ID NO: 740854
agaaucaaugacauuaucu

SEQ ID NO: 740856 - RNA, 19 nt, Artificial Sequence
  Description of Artificial Sequence: Synthetic oligonucleotide
  Sense strand starting at position 3714 of SEQ ID NO: 586742
ugucauugauucucaagaa

SEQ ID NO: 740857 - RNA, 19 nt, Artificial Sequence
  Description of Artificial Sequence: Synthetic oligonucleotide
  Antisense strand to SEQ ID NO: 740856
uucuugagaaucaaugaca

SEQ ID NO: 740858 - RNA, 19 nt, Artificial Sequence
  Description of Artificial Sequence: Synthetic oligonucleotide
  Sense strand starting at position 3738 of SEQ ID NO: 586742
acuuauucugaggguuaag

SEQ ID NO: 740859 - RNA, 19 nt, Artificial Sequence
  Description of Artificial Sequence: Synthetic oligonucleotide
  Antisense strand to SEQ ID NO: 740858
cuuaacccucagaauaagu

SEQ ID NO: 740860 - RNA, 19 nt, Artificial Sequence
  Description of Artificial Sequence: Synthetic oligonucleotide
  Sense strand starting at position 3780 of SEQ ID NO: 586742
ggugauaugcccuacaugu

SEQ ID NO: 740861 - RNA, 19 nt, Artificial Sequence
  Description of Artificial Sequence: Synthetic oligonucleotide
  Antisense strand to SEQ ID NO: 740860
acauguagggcauaucacc

SEQ ID NO: 740862 - RNA, 19 nt, Artificial Sequence
  Description of Artificial Sequence: Synthetic oligonucleotide
  Sense strand starting at position 3947 of SEQ ID NO: 586742
ucuaacagcuuuguuaaga

SEQ ID NO: 740863 - RNA, 19 nt, Artificial Sequence
  Description of Artificial Sequence: Synthetic oligonucleotide
  Antisense strand to SEQ ID NO: 740862
ucuuaacaaagcuguuaga

SEQ ID NO: 740864 - RNA, 19 nt, Artificial Sequence
  Description of Artificial Sequence: Synthetic oligonucleotide
  Sense strand starting at position 3948 of SEQ ID NO: 586742
cuaacagcuuuguuaagau

SEQ ID NO: 740865 - RNA, 19 nt, Artificial Sequence
  Description of Artificial Sequence: Synthetic oligonucleotide
  Antisense strand to SEQ ID NO: 740864
aucuuaacaaagcuguuag

SEQ ID NO: 740866 - RNA, 19 nt, Artificial Sequence
  Description of Artificial Sequence: Synthetic oligonucleotide
  Sense strand starting at position 37 of SEQ ID NO: 586743
gggacauugcuacagugau

SEQ ID NO: 740867 - RNA, 19 nt, Artificial Sequence
  Description of Artificial Sequence: Synthetic oligonucleotide
  Antisense strand to SEQ ID NO: 740866
aucacuguagcaauguccc

SEQ ID NO: 740868 - RNA, 19 nt, Artificial Sequence
  Description of Artificial Sequence: Synthetic oligonucleotide
  Sense strand starting at position 51 of SEQ ID NO: 586743
gugauaaugcuccaugcaa

SEQ ID NO: 740869 - RNA, 19 nt, Artificial Sequence
  Description of Artificial Sequence: Synthetic oligonucleotide
  Antisense strand to SEQ ID NO: 740868
uugcauggagcauuaucac

SEQ ID NO: 740870 - RNA, 19 nt, Artificial Sequence
  Description of Artificial Sequence: Synthetic oligonucleotide
  Sense strand starting at position 107 of SEQ ID NO: 586743
augguuaaucuccaaaguc

SEQ ID NO: 740871 - RNA, 19 nt, Artificial Sequence
  Description of Artificial Sequence: Synthetic oligonucleotide
  Antisense strand to SEQ ID NO: 740870
gacuuuggagauuaaccau

SEQ ID NO: 740872 - RNA, 19 nt, Artificial Sequence
  Description of Artificial Sequence: Synthetic oligonucleotide
  Sense strand starting at position 220 of SEQ ID NO: 586743
guaguagagaaacgaugua

SEQ ID NO: 740873 - RNA, 19 nt, Artificial Sequence
  Description of Artificial Sequence: Synthetic oligonucleotide
  Antisense strand to SEQ ID NO: 740872
uacaucguuucucuacuac

SEQ ID NO: 740874 - RNA, 19 nt, Artificial Sequence
  Description of Artificial Sequence: Synthetic oligonucleotide
  Sense strand starting at position 311 of SEQ ID NO: 586743
acuugcaaagguuaauaua

SEQ ID NO: 740875 - RNA, 19 nt, Artificial Sequence
  Description of Artificial Sequence: Synthetic oligonucleotide
  Antisense strand to SEQ ID NO: 740874
uauauuaaccuuugcaagu

SEQ ID NO: 740876 - RNA, 19 nt, Artificial Sequence
  Description of Artificial Sequence: Synthetic oligonucleotide
  Sense strand starting at position 399 of SEQ ID NO: 586743
uugaguuagccauagguga

SEQ ID NO: 740877 - RNA, 19 nt, Artificial Sequence
  Description of Artificial Sequence: Synthetic oligonucleotide
  Antisense strand to SEQ ID NO: 740876
ucaccuauggcuaacucaa

SEQ ID NO: 740878 - RNA, 19 nt, Artificial Sequence
  Description of Artificial Sequence: Synthetic oligonucleotide
  Sense strand starting at position 422 of SEQ ID NO: 586743
uucccucugcuugacagau

SEQ ID NO: 740879 - RNA, 19 nt, Artificial Sequence
  Description of Artificial Sequence: Synthetic oligonucleotide
  Antisense strand to SEQ ID NO: 740878
aucugucaagcagagggaa

SEQ ID NO: 740880 - RNA, 19 nt, Artificial Sequence
  Description of Artificial Sequence: Synthetic oligonucleotide
  Sense strand starting at position 430 of SEQ ID NO: 586743
gcuugacagauugaacagu

SEQ ID NO: 740881 - RNA, 19 nt, Artificial Sequence
  Description of Artificial Sequence: Synthetic oligonucleotide
  Antisense strand to SEQ ID NO: 740880
acuguucaaucugucaagc

SEQ ID NO: 740882 - RNA, 19 nt, Artificial Sequence
  Description of Artificial Sequence: Synthetic oligonucleotide
  Sense strand starting at position 840 of SEQ ID NO: 586743
uuggaaagcuugccaaaca

SEQ ID NO: 740883 - RNA, 19 nt, Artificial Sequence
  Description of Artificial Sequence: Synthetic oligonucleotide
  Antisense strand to SEQ ID NO: 740882
uguuuggcaagcuuuccaa

SEQ ID NO: 740884 - RNA, 19 nt, Artificial Sequence
  Description of Artificial Sequence: Synthetic oligonucleotide
  Sense strand starting at position 922 of SEQ ID NO: 586743
ucgauucugaaguacagua

SEQ ID NO: 740885 - RNA, 19 nt, Artificial Sequence
  Description of Artificial Sequence: Synthetic oligonucleotide
  Antisense strand to SEQ ID NO: 740884
uacuguacuucagaaucga

SEQ ID NO: 740886 - RNA, 19 nt, Artificial Sequence
  Description of Artificial Sequence: Synthetic oligonucleotide
  Sense strand starting at position 992 of SEQ ID NO: 586743
ggaaccuagcauuaucuuu

SEQ ID NO: 740887 - RNA, 19 nt, Artificial Sequence
  Description of Artificial Sequence: Synthetic oligonucleotide
  Antisense strand to SEQ ID NO: 740886
aaagauaaugcuagguucc

SEQ ID NO: 740888 - RNA, 19 nt, Artificial Sequence
  Description of Artificial Sequence: Synthetic oligonucleotide
  Sense strand starting at position 1188 of SEQ ID NO: 586743
uuuguuaggcucuagauaa

SEQ ID NO: 740889 - RNA, 19 nt, Artificial Sequence
  Description of Artificial Sequence: Synthetic oligonucleotide
  Antisense strand to SEQ ID NO: 740888
uuaucuagagccuaacaaa

SEQ ID NO: 740890 - RNA, 19 nt, Artificial Sequence
  Description of Artificial Sequence: Synthetic oligonucleotide
  Sense strand starting at position 1214 of SEQ ID NO: 586743
uuccuaguucuagacuuau

SEQ ID NO: 740891 - RNA, 19 nt, Artificial Sequence
  Description of Artificial Sequence: Synthetic oligonucleotide
  Antisense strand to SEQ ID NO: 740890
auaagucuagaacuaggaa

SEQ ID NO: 740892 - RNA, 19 nt, Artificial Sequence
  Description of Artificial Sequence: Synthetic oligonucleotide
  Sense strand starting at position 1366 of SEQ ID NO: 586743
cagcauaugacgggaaaga

SEQ ID NO: 740893 - RNA, 19 nt, Artificial Sequence
  Description of Artificial Sequence: Synthetic oligonucleotide
  Antisense strand to SEQ ID NO: 740892
ucuuucccgucauaugcug

SEQ ID NO: 740894 - RNA, 19 nt, Artificial Sequence
  Description of Artificial Sequence: Synthetic oligonucleotide
  Sense strand starting at position 1379 of SEQ ID NO: 586743
gaaagaguaaaguggugaa

SEQ ID NO: 740895 - RNA, 19 nt, Artificial Sequence
  Description of Artificial Sequence: Synthetic oligonucleotide
  Antisense strand to SEQ ID NO: 740894
uucaccacuuuacucuuuc

SEQ ID NO: 740896 - RNA, 19 nt, Artificial Sequence
  Description of Artificial Sequence: Synthetic oligonucleotide
  Sense strand starting at position 1455 of SEQ ID NO: 586743
aggacugcuucucuaaaga

SEQ ID NO: 740897 - RNA, 19 nt, Artificial Sequence
  Description of Artificial Sequence: Synthetic oligonucleotide
  Antisense strand to SEQ ID NO: 740896
ucuuuagagaagcaguccu

SEQ ID NO: 740898 - RNA, 19 nt, Artificial Sequence
  Description of Artificial Sequence: Synthetic oligonucleotide
  Sense strand starting at position 1581 of SEQ ID NO: 586743
agggaauugugagucugac

SEQ ID NO: 740899 - RNA, 19 nt, Artificial Sequence
  Description of Artificial Sequence: Synthetic oligonucleotide
  Antisense strand to SEQ ID NO: 740898
gucagacucacaauucccu

SEQ ID NO: 740900 - RNA, 19 nt, Artificial Sequence
  Description of Artificial Sequence: Synthetic oligonucleotide
  Sense strand starting at position 1785 of SEQ ID NO: 586743
uuacgaucaagagguacuu

SEQ ID NO: 740901 - RNA, 19 nt, Artificial Sequence
  Description of Artificial Sequence: Synthetic oligonucleotide
  Antisense strand to SEQ ID NO: 740900
aaguaccucuugaucguaa

SEQ ID NO: 740902 - RNA, 19 nt, Artificial Sequence
  Description of Artificial Sequence: Synthetic oligonucleotide
  Sense strand starting at position 1853 of SEQ ID NO: 586743
cgcagauaagcgcuucuuu

SEQ ID NO: 740903 - RNA, 19 nt, Artificial Sequence
  Description of Artificial Sequence: Synthetic oligonucleotide
  Antisense strand to SEQ ID NO: 740902
aaagaagcgcuuaucugcg

SEQ ID NO: 740904 - RNA, 19 nt, Artificial Sequence
  Description of Artificial Sequence: Synthetic oligonucleotide
  Sense strand starting at position 1955 of SEQ ID NO: 586743
uugugaaacguugugugca

SEQ ID NO: 740905 - RNA, 19 nt, Artificial Sequence
  Description of Artificial Sequence: Synthetic oligonucleotide
  Antisense strand to SEQ ID NO: 740904
ugcacacaacguuucacaa

SEQ ID NO: 740906 - RNA, 19 nt, Artificial Sequence
  Description of Artificial Sequence: Synthetic oligonucleotide
  Sense strand starting at position 1965 of SEQ ID NO: 586743
uugugugcaacguuuaagu

SEQ ID NO: 740907 - RNA, 19 nt, Artificial Sequence
  Description of Artificial Sequence: Synthetic oligonucleotide
  Antisense strand to SEQ ID NO: 740906
acuuaaacguugcacacaa

SEQ ID NO: 740908 - RNA, 19 nt, Artificial Sequence
  Description of Artificial Sequence: Synthetic oligonucleotide
  Sense strand starting at position 1970 of SEQ ID NO: 586743
ugcaacguuuaaguaauuu

SEQ ID NO: 740909 - RNA, 19 nt, Artificial Sequence
  Description of Artificial Sequence: Synthetic oligonucleotide
  Antisense strand to SEQ ID NO: 740908
aaauuacuuaaacguugca

SEQ ID NO: 740910 - RNA, 19 nt, Artificial Sequence
  Description of Artificial Sequence: Synthetic oligonucleotide
  Sense strand starting at position 2219 of SEQ ID NO: 586743
gucuaccauccuuaugauu

SEQ ID NO: 740911 - RNA, 19 nt, Artificial Sequence
  Description of Artificial Sequence: Synthetic oligonucleotide
  Antisense strand to SEQ ID NO: 740910
aaucauaaggaugguagac

SEQ ID NO: 740912 - RNA, 19 nt, Artificial Sequence
  Description of Artificial Sequence: Synthetic oligonucleotide
  Sense strand starting at position 2337 of SEQ ID NO: 586743
aucacuuugugacuuuaga

SEQ ID NO: 740913 - RNA, 19 nt, Artificial Sequence
  Description of Artificial Sequence: Synthetic oligonucleotide
  Antisense strand to SEQ ID NO: 740912
ucuaaagucacaaagugau

SEQ ID NO: 740914 - RNA, 19 nt, Artificial Sequence
  Description of Artificial Sequence: Synthetic oligonucleotide
  Sense strand starting at position 2385 of SEQ ID NO: 586743
agauuaucucugggaaagu

SEQ ID NO: 740915 - RNA, 19 nt, Artificial Sequence
  Description of Artificial Sequence: Synthetic oligonucleotide
  Antisense strand to SEQ ID NO: 740914
acuuucccagagauaaucu

SEQ ID NO: 740916 - RNA, 19 nt, Artificial Sequence
  Description of Artificial Sequence: Synthetic oligonucleotide
  Sense strand starting at position 2450 of SEQ ID NO: 586743
ccagaugagcacugacuau

SEQ ID NO: 740917 - RNA, 19 nt, Artificial Sequence
  Description of Artificial Sequence: Synthetic oligonucleotide
  Antisense strand to SEQ ID NO: 740916
auagucagugcucaucugg

SEQ ID NO: 740918 - RNA, 19 nt, Artificial Sequence
  Description of Artificial Sequence: Synthetic oligonucleotide
  Sense strand starting at position 2594 of SEQ ID NO: 586743
ugguuaaauauugggagua

SEQ ID NO: 740919 - RNA, 19 nt, Artificial Sequence
  Description of Artificial Sequence: Synthetic oligonucleotide
  Antisense strand to SEQ ID NO: 740918
uacucccaauauuuaacca

SEQ ID NO: 740920 - RNA, 19 nt, Artificial Sequence
  Description of Artificial Sequence: Synthetic oligonucleotide
  Sense strand starting at position 2636 of SEQ ID NO: 586743
aguccaauguaucuuuaaa

SEQ ID NO: 740921 - RNA, 19 nt, Artificial Sequence
  Description of Artificial Sequence: Synthetic oligonucleotide
  Antisense strand to SEQ ID NO: 740920
uuuaaagauacauuggacu

SEQ ID NO: 740922 - RNA, 19 nt, Artificial Sequence
  Description of Artificial Sequence: Synthetic oligonucleotide
  Sense strand starting at position 2873 of SEQ ID NO: 586743
uuucuuauggaucaguuaa

SEQ ID NO: 740923 - RNA, 19 nt, Artificial Sequence
  Description of Artificial Sequence: Synthetic oligonucleotide
  Antisense strand to SEQ ID NO: 740922
uuaacugauccauaagaaa

SEQ ID NO: 740924 - RNA, 19 nt, Artificial Sequence
  Description of Artificial Sequence: Synthetic oligonucleotide
  Sense strand starting at position 2875 of SEQ ID NO: 586743
ucuuauggaucaguuaaac

SEQ ID NO: 740925 - RNA, 19 nt, Artificial Sequence
  Description of Artificial Sequence: Synthetic oligonucleotide
  Antisense strand to SEQ ID NO: 740924
guuuaacugauccauaaga

SEQ ID NO: 740926 - RNA, 19 nt, Artificial Sequence
  Description of Artificial Sequence: Synthetic oligonucleotide
  Sense strand starting at position 2962 of SEQ ID NO: 586743
ugaaauuccuuguuguaaa

SEQ ID NO: 740927 - RNA, 19 nt, Artificial Sequence
  Description of Artificial Sequence: Synthetic oligonucleotide
  Antisense strand to SEQ ID NO: 740926
uuuacaacaaggaauuuca

SEQ ID NO: 740928 - RNA, 19 nt, Artificial Sequence
  Description of Artificial Sequence: Synthetic oligonucleotide
  Sense strand starting at position 3010 of SEQ ID NO: 586743
uaaauagacuguguguaua

SEQ ID NO: 740929 - RNA, 19 nt, Artificial Sequence
  Description of Artificial Sequence: Synthetic oligonucleotide
  Antisense strand to SEQ ID NO: 740928
uauacacacagucuauuua

SEQ ID NO: 740930 - RNA, 19 nt, Artificial Sequence
  Description of Artificial Sequence: Synthetic oligonucleotide
  Sense strand starting at position 3125 of SEQ ID NO: 586743
auuggaaguguccauugca

SEQ ID NO: 740931 - RNA, 19 nt, Artificial Sequence
  Description of Artificial Sequence: Synthetic oligonucleotide
  Antisense strand to SEQ ID NO: 740930
ugcaauggacacuuccaau

SEQ ID NO: 740932 - RNA, 19 nt, Artificial Sequence
  Description of Artificial Sequence: Synthetic oligonucleotide
  Sense strand starting at position 3210 of SEQ ID NO: 586743
cugaaaugauagguuuaau

SEQ ID NO: 740933 - RNA, 19 nt, Artificial Sequence
  Description of Artificial Sequence: Synthetic oligonucleotide
  Antisense strand to SEQ ID NO: 740932
auuaaaccuaucauuucag

SEQ ID NO: 740934 - RNA, 19 nt, Artificial Sequence
  Description of Artificial Sequence: Synthetic oligonucleotide
  Sense strand starting at position 3281 of SEQ ID NO: 586743
aggugggagggauguuauu

SEQ ID NO: 740935 - RNA, 19 nt, Artificial Sequence
  Description of Artificial Sequence: Synthetic oligonucleotide
  Antisense strand to SEQ ID NO: 740934
aauaacaucccucccaccu

SEQ ID NO: 740936 - RNA, 19 nt, Artificial Sequence
  Description of Artificial Sequence: Synthetic oligonucleotide
  Sense strand starting at position 3477 of SEQ ID NO: 586743
gcacaugguagguaguaaa

SEQ ID NO: 740937 - RNA, 19 nt, Artificial Sequence
  Description of Artificial Sequence: Synthetic oligonucleotide
  Antisense strand to SEQ ID NO: 740936
uuuacuaccuaccaugugc

SEQ ID NO: 740938 - RNA, 19 nt, Artificial Sequence
  Description of Artificial Sequence: Synthetic oligonucleotide
  Sense strand starting at position 3576 of SEQ ID NO: 586743
uggauaguuugacuaugau

SEQ ID NO: 740939 - RNA, 19 nt, Artificial Sequence
  Description of Artificial Sequence: Synthetic oligonucleotide
  Antisense strand to SEQ ID NO: 740938
aucauagucaaacuaucca

SEQ ID NO: 740940 - RNA, 19 nt, Artificial Sequence
  Description of Artificial Sequence: Synthetic oligonucleotide
  Sense strand starting at position 3579 of SEQ ID NO: 586743
auaguuugacuaugaucua

SEQ ID NO: 740941 - RNA, 19 nt, Artificial Sequence
  Description of Artificial Sequence: Synthetic oligonucleotide
  Antisense strand to SEQ ID NO: 740940
uagaucauagucaaacuau

SEQ ID NO: 740942 - RNA, 19 nt, Artificial Sequence
  Description of Artificial Sequence: Synthetic oligonucleotide
  Sense strand starting at position 3615 of SEQ ID NO: 586743
auuuauacugcuugguuua

SEQ ID NO: 740943 - RNA, 19 nt, Artificial Sequence
  Description of Artificial Sequence: Synthetic oligonucleotide
  Antisense strand to SEQ ID NO: 740942
uaaaccaagcaguauaaau

SEQ ID NO: 740944 - RNA, 19 nt, Artificial Sequence
  Description of Artificial Sequence: Synthetic oligonucleotide
  Sense strand starting at position 3784 of SEQ ID NO: 586743
guaggacacuucuugcaaa

SEQ ID NO: 740945 - RNA, 19 nt, Artificial Sequence
  Description of Artificial Sequence: Synthetic oligonucleotide
  Antisense strand to SEQ ID NO: 740944
uuugcaagaaguguccuac

SEQ ID NO: 740946 - RNA, 19 nt, Artificial Sequence
  Description of Artificial Sequence: Synthetic oligonucleotide
  Sense strand starting at position 19 of SEQ ID NO: 586744
gaaaguuacuugguuucuc

SEQ ID NO: 740947 - RNA, 19 nt, Artificial Sequence
  Description of Artificial Sequence: Synthetic oligonucleotide
  Antisense strand to SEQ ID NO: 740946
gagaaaccaaguaacuuuc

SEQ ID NO: 740948 - RNA, 19 nt, Artificial Sequence
  Description of Artificial Sequence: Synthetic oligonucleotide
  Sense strand starting at position 143 of SEQ ID NO: 586744
guuggcuaucguuaccauu

SEQ ID NO: 740949 - RNA, 19 nt, Artificial Sequence
  Description of Artificial Sequence: Synthetic oligonucleotide
  Antisense strand to SEQ ID NO: 740948
aaugguaacgauagccaac

SEQ ID NO: 740950 - RNA, 19 nt, Artificial Sequence
  Description of Artificial Sequence: Synthetic oligonucleotide
  Sense strand starting at position 145 of SEQ ID NO: 586744
uggcuaucguuaccauuaa

SEQ ID NO: 740951 - RNA, 19 nt, Artificial Sequence
  Description of Artificial Sequence: Synthetic oligonucleotide
  Antisense strand to SEQ ID NO: 740950
uuaaugguaacgauagcca

SEQ ID NO: 740952 - RNA, 19 nt, Artificial Sequence
  Description of Artificial Sequence: Synthetic oligonucleotide
  Sense strand starting at position 157 of SEQ ID NO: 586744
ccauuaaagcagcaaguau

SEQ ID NO: 740953 - RNA, 19 nt, Artificial Sequence
  Description of Artificial Sequence: Synthetic oligonucleotide
  Antisense strand to SEQ ID NO: 740952
auacuugcugcuuuaaugg

SEQ ID NO: 740954 - RNA, 19 nt, Artificial Sequence
  Description of Artificial Sequence: Synthetic oligonucleotide
  Sense strand starting at position 239 of SEQ ID NO: 586744
agggcaugguuagcacaau

SEQ ID NO: 740955 - RNA, 19 nt, Artificial Sequence
  Description of Artificial Sequence: Synthetic oligonucleotide
  Antisense strand to SEQ ID NO: 740954
auugugcuaaccaugcccu

SEQ ID NO: 740956 - RNA, 19 nt, Artificial Sequence
  Description of Artificial Sequence: Synthetic oligonucleotide
  Sense strand starting at position 284 of SEQ ID NO: 586744
cgagguuuguauucagagg

SEQ ID NO: 740957 - RNA, 19 nt, Artificial Sequence
  Description of Artificial Sequence: Synthetic oligonucleotide
  Antisense strand to SEQ ID NO: 740956
ccucugaauacaaaccucg

SEQ ID NO: 740958 - RNA, 19 nt, Artificial Sequence
  Description of Artificial Sequence: Synthetic oligonucleotide
  Sense strand starting at position 434 of SEQ ID NO: 586744
ccgcacuucugagcguuaa

SEQ ID NO: 740959 - RNA, 19 nt, Artificial Sequence
  Description of Artificial Sequence: Synthetic oligonucleotide
  Antisense strand to SEQ ID NO: 740958
uuaacgcucagaagugcgg

SEQ ID NO: 740960 - RNA, 19 nt, Artificial Sequence
  Description of Artificial Sequence: Synthetic oligonucleotide
  Sense strand starting at position 435 of SEQ ID NO: 586744
cgcacuucugagcguuaac

SEQ ID NO: 740961 - RNA, 19 nt, Artificial Sequence
  Description of Artificial Sequence: Synthetic oligonucleotide
  Antisense strand to SEQ ID NO: 740960
guuaacgcucagaagugcg

SEQ ID NO: 740962 - RNA, 19 nt, Artificial Sequence
  Description of Artificial Sequence: Synthetic oligonucleotide
  Sense strand starting at position 438 of SEQ ID NO: 586744
acuucugagcguuaaccau

SEQ ID NO: 740963 - RNA, 19 nt, Artificial Sequence
  Description of Artificial Sequence: Synthetic oligonucleotide
  Antisense strand to SEQ ID NO: 740962
augguuaacgcucagaagu

SEQ ID NO: 740964 - RNA, 19 nt, Artificial Sequence
  Description of Artificial Sequence: Synthetic oligonucleotide
  Sense strand starting at position 446 of SEQ ID NO: 586744
gcguuaaccaucugggacu

SEQ ID NO: 740965 - RNA, 19 nt, Artificial Sequence
  Description of Artificial Sequence: Synthetic oligonucleotide
  Antisense strand to SEQ ID NO: 740964
agucccagaugguuaacgc

SEQ ID NO: 740966 - RNA, 19 nt, Artificial Sequence
  Description of Artificial Sequence: Synthetic oligonucleotide
  Sense strand starting at position 482 of SEQ ID NO: 586744
cuuucuucucaggacaguu

SEQ ID NO: 740967 - RNA, 19 nt, Artificial Sequence
  Description of Artificial Sequence: Synthetic oligonucleotide
  Antisense strand to SEQ ID NO: 740966
aacuguccugagaagaaag

SEQ ID NO: 740968 - RNA, 19 nt, Artificial Sequence
  Description of Artificial Sequence: Synthetic oligonucleotide
  Sense strand starting at position 967 of SEQ ID NO: 586744
guaaucacuccuggcucaa

SEQ ID NO: 740969 - RNA, 19 nt, Artificial Sequence
  Description of Artificial Sequence: Synthetic oligonucleotide
  Antisense strand to SEQ ID NO: 740968
uugagccaggagugauuac

SEQ ID NO: 740970 - RNA, 19 nt, Artificial Sequence
  Description of Artificial Sequence: Synthetic oligonucleotide
  Sense strand starting at position 2455 of SEQ ID NO: 586744
ggaggucuguggucuucua

SEQ ID NO: 740971 - RNA, 19 nt, Artificial Sequence
  Description of Artificial Sequence: Synthetic oligonucleotide
  Antisense strand to SEQ ID NO: 740970
uagaagaccacagaccucc

SEQ ID NO: 740972 - RNA, 19 nt, Artificial Sequence
  Description of Artificial Sequence: Synthetic oligonucleotide
  Sense strand starting at position 2520 of SEQ ID NO: 586744
ggugguugagauuggguga

SEQ ID NO: 740973 - RNA, 19 nt, Artificial Sequence
  Description of Artificial Sequence: Synthetic oligonucleotide
  Antisense strand to SEQ ID NO: 740972
ucacccaaucucaaccacc

SEQ ID NO: 740974 - RNA, 19 nt, Artificial Sequence
  Description of Artificial Sequence: Synthetic oligonucleotide
  Sense strand starting at position 2641 of SEQ ID NO: 586744
gcuaucuauccgcgguaga

SEQ ID NO: 740975 - RNA, 19 nt, Artificial Sequence
  Description of Artificial Sequence: Synthetic oligonucleotide
  Antisense strand to SEQ ID NO: 740974
ucuaccgcggauagauagc

SEQ ID NO: 740976 - RNA, 19 nt, Artificial Sequence
  Description of Artificial Sequence: Synthetic oligonucleotide
  Sense strand starting at position 2642 of SEQ ID NO: 586744
cuaucuauccgcgguagaa

SEQ ID NO: 740977 - RNA, 19 nt, Artificial Sequence
  Description of Artificial Sequence: Synthetic oligonucleotide
  Antisense strand to SEQ ID NO: 740976
uucuaccgcggauagauag

SEQ ID NO: 740978 - RNA, 19 nt, Artificial Sequence
  Description of Artificial Sequence: Synthetic oligonucleotide
  Sense strand starting at position 2654 of SEQ ID NO: 586744
gguagaaacugggucuucu

SEQ ID NO: 740979 - RNA, 19 nt, Artificial Sequence
  Description of Artificial Sequence: Synthetic oligonucleotide
  Antisense strand to SEQ ID NO: 740978
agaagacccaguuucuacc

SEQ ID NO: 740980 - RNA, 19 nt, Artificial Sequence
  Description of Artificial Sequence: Synthetic oligonucleotide
  Sense strand starting at position 2753 of SEQ ID NO: 586744
ggcaauguaaaucgagaau

SEQ ID NO: 740981 - RNA, 19 nt, Artificial Sequence
  Description of Artificial Sequence: Synthetic oligonucleotide
  Antisense strand to SEQ ID NO: 740980
auucucgauuuacauugcc

SEQ ID NO: 740982 - RNA, 19 nt, Artificial Sequence
  Description of Artificial Sequence: Synthetic oligonucleotide
  Sense strand starting at position 2778 of SEQ ID NO: 586744
uuuccaacuguauaguauu

SEQ ID NO: 740983 - RNA, 19 nt, Artificial Sequence
  Description of Artificial Sequence: Synthetic oligonucleotide
  Antisense strand to SEQ ID NO: 740982
aauacuauacaguuggaaa

SEQ ID NO: 740984 - RNA, 19 nt, Artificial Sequence
  Description of Artificial Sequence: Synthetic oligonucleotide
  Sense strand starting at position 2856 of SEQ ID NO: 586744
cguggaugguguucaggau

SEQ ID NO: 740985 - RNA, 19 nt, Artificial Sequence
  Description of Artificial Sequence: Synthetic oligonucleotide
  Antisense strand to SEQ ID NO: 740984
auccugaacaccauccacg

SEQ ID NO: 740986 - RNA, 19 nt, Artificial Sequence
  Description of Artificial Sequence: Synthetic oligonucleotide
  Sense strand starting at position 2889 of SEQ ID NO: 586744
uuggguccuccguaaucua

SEQ ID NO: 740987 - RNA, 19 nt, Artificial Sequence
  Description of Artificial Sequence: Synthetic oligonucleotide
  Antisense strand to SEQ ID NO: 740986
uagauuacggaggacccaa

SEQ ID NO: 740988 - RNA, 19 nt, Artificial Sequence
  Description of Artificial Sequence: Synthetic oligonucleotide
  Sense strand starting at position 2928 of SEQ ID NO: 586744
acuugucugcuggguauca

SEQ ID NO: 740989 - RNA, 19 nt, Artificial Sequence
  Description of Artificial Sequence: Synthetic oligonucleotide
  Antisense strand to SEQ ID NO: 740988
ugauacccagcagacaagu

SEQ ID NO: 740990 - RNA, 19 nt, Artificial Sequence
  Description of Artificial Sequence: Synthetic oligonucleotide
  Sense strand starting at position 2938 of SEQ ID NO: 586744
uggguaucacccgacuuga

SEQ ID NO: 740991 - RNA, 19 nt, Artificial Sequence
  Description of Artificial Sequence: Synthetic oligonucleotide
  Antisense strand to SEQ ID NO: 740990
ucaagucgggugauaccca

SEQ ID NO: 740992 - RNA, 19 nt, Artificial Sequence
  Description of Artificial Sequence: Synthetic oligonucleotide
  Sense strand starting at position 3100 of SEQ ID NO: 586744
gggcaagauucaggaauga

SEQ ID NO: 740993 - RNA, 19 nt, Artificial Sequence
  Description of Artificial Sequence: Synthetic oligonucleotide
  Antisense strand to SEQ ID NO: 740992
ucauuccugaaucuugccc

SEQ ID NO: 740994 - RNA, 19 nt, Artificial Sequence
  Description of Artificial Sequence: Synthetic oligonucleotide
  Sense strand starting at position 3310 of SEQ ID NO: 586744
ccugaaccagcaugauauc

SEQ ID NO: 740995 - RNA, 19 nt, Artificial Sequence
  Description of Artificial Sequence: Synthetic oligonucleotide
  Antisense strand to SEQ ID NO: 740994
gauaucaugcugguucagg

SEQ ID NO: 740996 - RNA, 19 nt, Artificial Sequence
  Description of Artificial Sequence: Synthetic oligonucleotide
  Sense strand starting at position 3344 of SEQ ID NO: 586744
ugcacaaguuguuuccaca

SEQ ID NO: 740997 - RNA, 19 nt, Artificial Sequence
  Description of Artificial Sequence: Synthetic oligonucleotide
  Antisense strand to SEQ ID NO: 740996
uguggaaacaacuugugca

SEQ ID NO: 740998 - RNA, 19 nt, Artificial Sequence
  Description of Artificial Sequence: Synthetic oligonucleotide
  Sense strand starting at position 3368 of SEQ ID NO: 586744
aucagugguucuucugacu

SEQ ID NO: 740999 - RNA, 19 nt, Artificial Sequence
  Description of Artificial Sequence: Synthetic oligonucleotide
  Antisense strand to SEQ ID NO: 740998
agucagaagaaccacugau

SEQ ID NO: 741000 - RNA, 19 nt, Artificial Sequence
  Description of Artificial Sequence: Synthetic oligonucleotide
  Sense strand starting at position 3526 of SEQ ID NO: 586744
gguucucuauugccuacaa

SEQ ID NO: 741001 - RNA, 19 nt, Artificial Sequence
  Description of Artificial Sequence: Synthetic oligonucleotide
  Antisense strand to SEQ ID NO: 741000
uuguaggcaauagagaacc

SEQ ID NO: 741002 - RNA, 19 nt, Artificial Sequence
  Description of Artificial Sequence: Synthetic oligonucleotide
  Sense strand starting at position 3563 of SEQ ID NO: 586744
uggugugccucuuuacaau

SEQ ID NO: 741003 - RNA, 19 nt, Artificial Sequence
  Description of Artificial Sequence: Synthetic oligonucleotide
  Antisense strand to SEQ ID NO: 741002
auuguaaagaggcacacca

SEQ ID NO: 741004 - RNA, 19 nt, Artificial Sequence
  Description of Artificial Sequence: Synthetic oligonucleotide
  Sense strand starting at position 3634 of SEQ ID NO: 586744
gguuccuccuagcuagaau

SEQ ID NO: 741005 - RNA, 19 nt, Artificial Sequence
  Description of Artificial Sequence: Synthetic oligonucleotide
  Antisense strand to SEQ ID NO: 741004
auucuagcuaggaggaacc

SEQ ID NO: 741006 - RNA, 19 nt, Artificial Sequence
  Description of Artificial Sequence: Synthetic oligonucleotide
  Sense strand starting at position 3645 of SEQ ID NO: 586744
gcuagaauauugguccauc

SEQ ID NO: 741007 - RNA, 19 nt, Artificial Sequence
  Description of Artificial Sequence: Synthetic oligonucleotide
  Antisense strand to SEQ ID NO: 741006
gauggaccaauauucuagc

SEQ ID NO: 741008 - RNA, 19 nt, Artificial Sequence
  Description of Artificial Sequence: Synthetic oligonucleotide
  Sense strand starting at position 3646 of SEQ ID NO: 586744
cuagaauauugguccaucu

SEQ ID NO: 741009 - RNA, 19 nt, Artificial Sequence
  Description of Artificial Sequence: Synthetic oligonucleotide
  Antisense strand to SEQ ID NO: 741008
agauggaccaauauucuag

SEQ ID NO: 741010 - RNA, 19 nt, Artificial Sequence
  Description of Artificial Sequence: Synthetic oligonucleotide
  Sense strand starting at position 3648 of SEQ ID NO: 586744
agaauauugguccaucucu

SEQ ID NO: 741011 - RNA, 19 nt, Artificial Sequence
  Description of Artificial Sequence: Synthetic oligonucleotide
  Antisense strand to SEQ ID NO: 741010
agagauggaccaauauucu

SEQ ID NO: 741012 - RNA, 19 nt, Artificial Sequence
  Description of Artificial Sequence: Synthetic oligonucleotide
  Sense strand starting at position 3699 of SEQ ID NO: 586744
gagccuuacuugguuguua

SEQ ID NO: 741013 - RNA, 19 nt, Artificial Sequence
  Description of Artificial Sequence: Synthetic oligonucleotide
  Antisense strand to SEQ ID NO: 741012
uaacaaccaaguaaggcuc

SEQ ID NO: 741014 - RNA, 19 nt, Artificial Sequence
  Description of Artificial Sequence: Synthetic oligonucleotide
  Sense strand starting at position 3711 of SEQ ID NO: 586744
guuguuaccuccucuguaa

SEQ ID NO: 741015 - RNA, 19 nt, Artificial Sequence
  Description of Artificial Sequence: Synthetic oligonucleotide
  Antisense strand to SEQ ID NO: 741014
uuacagaggagguaacaac

SEQ ID NO: 741016 - RNA, 19 nt, Artificial Sequence
  Description of Artificial Sequence: Synthetic oligonucleotide
  Sense strand starting at position 3714 of SEQ ID NO: 586744
guuaccuccucuguaagga

SEQ ID NO: 741017 - RNA, 19 nt, Artificial Sequence
  Description of Artificial Sequence: Synthetic oligonucleotide
  Antisense strand to SEQ ID NO: 741016
uccuuacagaggagguaac

SEQ ID NO: 741018 - RNA, 19 nt, Artificial Sequence
  Description of Artificial Sequence: Synthetic oligonucleotide
  Sense strand starting at position 3759 of SEQ ID NO: 586744
uaaugaucuguuugcaugu

SEQ ID NO: 741019 - RNA, 19 nt, Artificial Sequence
  Description of Artificial Sequence: Synthetic oligonucleotide
  Antisense strand to SEQ ID NO: 741018
acaugcaaacagaucauua

SEQ ID NO: 741020 - RNA, 19 nt, Artificial Sequence
  Description of Artificial Sequence: Synthetic oligonucleotide
  Sense strand starting at position 3770 of SEQ ID NO: 586744
uugcaugucugacuccaua

SEQ ID NO: 741021 - RNA, 19 nt, Artificial Sequence
  Description of Artificial Sequence: Synthetic oligonucleotide
  Antisense strand to SEQ ID NO: 741020
uauggagucagacaugcaa

SEQ ID NO: 741022 - RNA, 19 nt, Artificial Sequence
  Description of Artificial Sequence: Synthetic oligonucleotide
  Sense strand starting at position 3794 of SEQ ID NO: 586744
ucacuucuuugaggacaau

SEQ ID NO: 741023 - RNA, 19 nt, Artificial Sequence
  Description of Artificial Sequence: Synthetic oligonucleotide
  Antisense strand to SEQ ID NO: 741022
auuguccucaaagaaguga

SEQ ID NO: 741024 - RNA, 19 nt, Artificial Sequence
  Description of Artificial Sequence: Synthetic oligonucleotide
  Sense strand starting at position 3947 of SEQ ID NO: 586744
gcaguaauugcugagaauc

SEQ ID NO: 741025 - RNA, 19 nt, Artificial Sequence
  Description of Artificial Sequence: Synthetic oligonucleotide
  Antisense strand to SEQ ID NO: 741024
gauucucagcaauuacugc

SEQ ID NO: 741026 - RNA, 19 nt, Artificial Sequence
  Description of Artificial Sequence: Synthetic oligonucleotide
  Sense strand starting at position 164 of SEQ ID NO: 586745
aucugaaauccguguucca

SEQ ID NO: 741027 - RNA, 19 nt, Artificial Sequence
  Description of Artificial Sequence: Synthetic oligonucleotide
  Antisense strand to SEQ ID NO: 741026
uggaacacggauuucagau

SEQ ID NO: 741028 - RNA, 19 nt, Artificial Sequence
  Description of Artificial Sequence: Synthetic oligonucleotide
  Sense strand starting at position 367 of SEQ ID NO: 586745
gaauuaauuucugacuggu

SEQ ID NO: 741029 - RNA, 19 nt, Artificial Sequence
  Description of Artificial Sequence: Synthetic oligonucleotide
  Antisense strand to SEQ ID NO: 741028
accagucagaaauuaauuc

SEQ ID NO: 741030 - RNA, 19 nt, Artificial Sequence
  Description of Artificial Sequence: Synthetic oligonucleotide
  Sense strand starting at position 382 of SEQ ID NO: 586745
ugguauuucccagguuggu

SEQ ID NO: 741031 - RNA, 19 nt, Artificial Sequence
  Description of Artificial Sequence: Synthetic oligonucleotide
  Antisense strand to SEQ ID NO: 741030
accaaccugggaaauacca

SEQ ID NO: 741032 - RNA, 19 nt, Artificial Sequence
  Description of Artificial Sequence: Synthetic oligonucleotide
  Sense strand starting at position 481 of SEQ ID NO: 586745
ugaauaggcuucucccuga

SEQ ID NO: 741033 - RNA, 19 nt, Artificial Sequence
  Description of Artificial Sequence: Synthetic oligonucleotide
  Antisense strand to SEQ ID NO: 741032
ucagggagaagccuauuca

SEQ ID NO: 741034 - RNA, 19 nt, Artificial Sequence
  Description of Artificial Sequence: Synthetic oligonucleotide
  Sense strand starting at position 566 of SEQ ID NO: 586745
gggagaacugauugagcua

SEQ ID NO: 741035 - RNA, 19 nt, Artificial Sequence
  Description of Artificial Sequence: Synthetic oligonucleotide
  Antisense strand to SEQ ID NO: 741034
uagcucaaucaguucuccc

SEQ ID NO: 741036 - RNA, 19 nt, Artificial Sequence
  Description of Artificial Sequence: Synthetic oligonucleotide
  Sense strand starting at position 615 of SEQ ID NO: 586745
gagaccucguuucuagaaa

SEQ ID NO: 741037 - RNA, 19 nt, Artificial Sequence
  Description of Artificial Sequence: Synthetic oligonucleotide
  Antisense strand to SEQ ID NO: 741036
uuucuagaaacgaggucuc

SEQ ID NO: 741038 - RNA, 19 nt, Artificial Sequence
  Description of Artificial Sequence: Synthetic oligonucleotide
  Sense strand starting at position 886 of SEQ ID NO: 586745
uuaagaugucccugggucu

SEQ ID NO: 741039 - RNA, 19 nt, Artificial Sequence
  Description of Artificial Sequence: Synthetic oligonucleotide
  Antisense strand to SEQ ID NO: 741038
agacccagggacaucuuaa

SEQ ID NO: 741040 - RNA, 19 nt, Artificial Sequence
  Description of Artificial Sequence: Synthetic oligonucleotide
  Sense strand starting at position 916 of SEQ ID NO: 586745
cucgcucaacucuaugaaa

SEQ ID NO: 741041 - RNA, 19 nt, Artificial Sequence
  Description of Artificial Sequence: Synthetic oligonucleotide
  Antisense strand to SEQ ID NO: 741040
uuucauagaguugagcgag

SEQ ID NO: 741042 - RNA, 19 nt, Artificial Sequence
  Description of Artificial Sequence: Synthetic oligonucleotide
  Sense strand starting at position 987 of SEQ ID NO: 586745
gcagaaacuuuggcucaag

SEQ ID NO: 741043 - RNA, 19 nt, Artificial Sequence
  Description of Artificial Sequence: Synthetic oligonucleotide
  Antisense strand to SEQ ID NO: 741042
cuugagccaaaguuucugc

SEQ ID NO: 741044 - RNA, 19 nt, Artificial Sequence
  Description of Artificial Sequence: Synthetic oligonucleotide
  Sense strand starting at position 988 of SEQ ID NO: 586745
cagaaacuuuggcucaagu

SEQ ID NO: 741045 - RNA, 19 nt, Artificial Sequence
  Description of Artificial Sequence: Synthetic oligonucleotide
  Antisense strand to SEQ ID NO: 741044
acuugagccaaaguuucug

SEQ ID NO: 741046 - RNA, 19 nt, Artificial Sequence
  Description of Artificial Sequence: Synthetic oligonucleotide
  Sense strand starting at position 990 of SEQ ID NO: 586745
gaaacuuuggcucaaguau

SEQ ID NO: 741047 - RNA, 19 nt, Artificial Sequence
  Description of Artificial Sequence: Synthetic oligonucleotide
  Antisense strand to SEQ ID NO: 741046
auacuugagccaaaguuuc

SEQ ID NO: 741048 - RNA, 19 nt, Artificial Sequence
  Description of Artificial Sequence: Synthetic oligonucleotide
  Sense strand starting at position 1084 of SEQ ID NO: 586745
auuuacugguccucagcau

SEQ ID NO: 741049 - RNA, 19 nt, Artificial Sequence
  Description of Artificial Sequence: Synthetic oligonucleotide
  Antisense strand to SEQ ID NO: 741048
augcugaggaccaguaaau

SEQ ID NO: 741050 - RNA, 19 nt, Artificial Sequence
  Description of Artificial Sequence: Synthetic oligonucleotide
  Sense strand starting at position 1085 of SEQ ID NO: 586745
uuuacugguccucagcauu

SEQ ID NO: 741051 - RNA, 19 nt, Artificial Sequence
  Description of Artificial Sequence: Synthetic oligonucleotide
  Antisense strand to SEQ ID NO: 741050
aaugcugaggaccaguaaa

SEQ ID NO: 741052 - RNA, 19 nt, Artificial Sequence
  Description of Artificial Sequence: Synthetic oligonucleotide
  Sense strand starting at position 1095 of SEQ ID NO: 586745
cucagcauuugauacugau

SEQ ID NO: 741053 - RNA, 19 nt, Artificial Sequence
  Description of Artificial Sequence: Synthetic oligonucleotide
  Antisense strand to SEQ ID NO: 741052
aucaguaucaaaugcugag

SEQ ID NO: 741054 - RNA, 19 nt, Artificial Sequence
  Description of Artificial Sequence: Synthetic oligonucleotide
  Sense strand starting at position 1098 of SEQ ID NO: 586745
agcauuugauacugauuua

SEQ ID NO: 741055 - RNA, 19 nt, Artificial Sequence
  Description of Artificial Sequence: Synthetic oligonucleotide
  Antisense strand to SEQ ID NO: 741054
uaaaucaguaucaaaugcu

SEQ ID NO: 741056 - RNA, 19 nt, Artificial Sequence
  Description of Artificial Sequence: Synthetic oligonucleotide
  Sense strand starting at position 1138 of SEQ ID NO: 586745
gaggucaaacuucgaaaug

SEQ ID NO: 741057 - RNA, 19 nt, Artificial Sequence
  Description of Artificial Sequence: Synthetic oligonucleotide
  Antisense strand to SEQ ID NO: 741056
cauuucgaaguuugaccuc

SEQ ID NO: 741058 - RNA, 19 nt, Artificial Sequence
  Description of Artificial Sequence: Synthetic oligonucleotide
  Sense strand starting at position 1301 of SEQ ID NO: 586745
acuuuaacuucugugagga

SEQ ID NO: 741059 - RNA, 19 nt, Artificial Sequence
  Description of Artificial Sequence: Synthetic oligonucleotide
  Antisense strand to SEQ ID NO: 741058
uccucacagaaguuaaagu

SEQ ID NO: 741060 - RNA, 19 nt, Artificial Sequence
  Description of Artificial Sequence: Synthetic oligonucleotide
  Sense strand starting at position 1302 of SEQ ID NO: 586745
cuuuaacuucugugaggac

SEQ ID NO: 741061 - RNA, 19 nt, Artificial Sequence
  Description of Artificial Sequence: Synthetic oligonucleotide
  Antisense strand to SEQ ID NO: 741060
guccucacagaaguuaaag

SEQ ID NO: 741062 - RNA, 19 nt, Artificial Sequence
  Description of Artificial Sequence: Synthetic oligonucleotide
  Sense strand starting at position 1349 of SEQ ID NO: 586745
gucagacucuuucuuauuc

SEQ ID NO: 741063 - RNA, 19 nt, Artificial Sequence
  Description of Artificial Sequence: Synthetic oligonucleotide
  Antisense strand to SEQ ID NO: 741062
gaauaagaaagagucugac

SEQ ID NO: 741064 - RNA, 19 nt, Artificial Sequence
  Description of Artificial Sequence: Synthetic oligonucleotide
  Sense strand starting at position 1387 of SEQ ID NO: 586745
uccaaagaauaucaggauu

SEQ ID NO: 741065 - RNA, 19 nt, Artificial Sequence
  Description of Artificial Sequence: Synthetic oligonucleotide
  Antisense strand to SEQ ID NO: 741064
aauccugauauucuuugga

SEQ ID NO: 741066 - RNA, 19 nt, Artificial Sequence
  Description of Artificial Sequence: Synthetic oligonucleotide
  Sense strand starting at position 1416 of SEQ ID NO: 586745
aaagguuuccucggacuau

SEQ ID NO: 741067 - RNA, 19 nt, Artificial Sequence
  Description of Artificial Sequence: Synthetic oligonucleotide
  Antisense strand to SEQ ID NO: 741066
auaguccgaggaaaccuuu

SEQ ID NO: 741068 - RNA, 19 nt, Artificial Sequence
  Description of Artificial Sequence: Synthetic oligonucleotide
  Sense strand starting at position 1645 of SEQ ID NO: 586745
gauccauccuaguugagga

SEQ ID NO: 741069 - RNA, 19 nt, Artificial Sequence
  Description of Artificial Sequence: Synthetic oligonucleotide
  Antisense strand to SEQ ID NO: 741068
uccucaacuaggauggauc

SEQ ID NO: 741070 - RNA, 19 nt, Artificial Sequence
  Description of Artificial Sequence: Synthetic oligonucleotide
  Sense strand starting at position 1846 of SEQ ID NO: 586745
cucacaaacgucuauggaa

SEQ ID NO: 741071 - RNA, 19 nt, Artificial Sequence
  Description of Artificial Sequence: Synthetic oligonucleotide
  Antisense strand to SEQ ID NO: 741070
uuccauagacguuugugag

SEQ ID NO: 741072 - RNA, 19 nt, Artificial Sequence
  Description of Artificial Sequence: Synthetic oligonucleotide
  Sense strand starting at position 1880 of SEQ ID NO: 586745
augggagacugccuacauu

SEQ ID NO: 741073 - RNA, 19 nt, Artificial Sequence
  Description of Artificial Sequence: Synthetic oligonucleotide
  Antisense strand to SEQ ID NO: 741072
aauguaggcagucucccau

SEQ ID NO: 741074 - RNA, 19 nt, Artificial Sequence
  Description of Artificial Sequence: Synthetic oligonucleotide
  Sense strand starting at position 2018 of SEQ ID NO: 586745
ggaugauuaguucgacccu

SEQ ID NO: 741075 - RNA, 19 nt, Artificial Sequence
  Description of Artificial Sequence: Synthetic oligonucleotide
  Antisense strand to SEQ ID NO: 741074
agggucgaacuaaucaucc

SEQ ID NO: 741076 - RNA, 19 nt, Artificial Sequence
  Description of Artificial Sequence: Synthetic oligonucleotide
  Sense strand starting at position 2252 of SEQ ID NO: 586745
acuaguagccauuauaucu

SEQ ID NO: 741077 - RNA, 19 nt, Artificial Sequence
  Description of Artificial Sequence: Synthetic oligonucleotide
  Antisense strand to SEQ ID NO: 741076
agauauaauggcuacuagu

SEQ ID NO: 741078 - RNA, 19 nt, Artificial Sequence
  Description of Artificial Sequence: Synthetic oligonucleotide
  Sense strand starting at position 2320 of SEQ ID NO: 586745
uaagaaugugcuugaugag

SEQ ID NO: 741079 - RNA, 19 nt, Artificial Sequence
  Description of Artificial Sequence: Synthetic oligonucleotide
  Antisense strand to SEQ ID NO: 741078
cucaucaagcacauucuua

SEQ ID NO: 741080 - RNA, 19 nt, Artificial Sequence
  Description of Artificial Sequence: Synthetic oligonucleotide
  Sense strand starting at position 2374 of SEQ ID NO: 586745
agaguuaugucuuucuacu

SEQ ID NO: 741081 - RNA, 19 nt, Artificial Sequence
  Description of Artificial Sequence: Synthetic oligonucleotide
  Antisense strand to SEQ ID NO: 741080
aguagaaagacauaacucu

SEQ ID NO: 741082 - RNA, 19 nt, Artificial Sequence
  Description of Artificial Sequence: Synthetic oligonucleotide
  Sense strand starting at position 2376 of SEQ ID NO: 586745
aguuaugucuuucuacuau

SEQ ID NO: 741083 - RNA, 19 nt, Artificial Sequence
  Description of Artificial Sequence: Synthetic oligonucleotide
  Antisense strand to SEQ ID NO: 741082
auaguagaaagacauaacu

SEQ ID NO: 741084 - RNA, 19 nt, Artificial Sequence
  Description of Artificial Sequence: Synthetic oligonucleotide
  Sense strand starting at position 2398 of SEQ ID NO: 586745
gcguaacaaauggaaagua

SEQ ID NO: 741085 - RNA, 19 nt, Artificial Sequence
  Description of Artificial Sequence: Synthetic oligonucleotide
  Antisense strand to SEQ ID NO: 741084
uacuuuccauuuguuacgc

SEQ ID NO: 741086 - RNA, 19 nt, Artificial Sequence
  Description of Artificial Sequence: Synthetic oligonucleotide
  Sense strand starting at position 2913 of SEQ ID NO: 586745
cucgguauuugacagacau

SEQ ID NO: 741087 - RNA, 19 nt, Artificial Sequence
  Description of Artificial Sequence: Synthetic oligonucleotide
  Antisense strand to SEQ ID NO: 741086
augucugucaaauaccgag

SEQ ID NO: 741088 - RNA, 19 nt, Artificial Sequence
  Description of Artificial Sequence: Synthetic oligonucleotide
  Sense strand starting at position 2988 of SEQ ID NO: 586745
uuugccaaugauggaaauu

SEQ ID NO: 741089 - RNA, 19 nt, Artificial Sequence
  Description of Artificial Sequence: Synthetic oligonucleotide
  Antisense strand to SEQ ID NO: 741088
aauuuccaucauuggcaaa

SEQ ID NO: 741090 - RNA, 19 nt, Artificial Sequence
  Description of Artificial Sequence: Synthetic oligonucleotide
  Sense strand starting at position 3048 of SEQ ID NO: 586745
cugcuacagugagucuaau

SEQ ID NO: 741091 - RNA, 19 nt, Artificial Sequence
  Description of Artificial Sequence: Synthetic oligonucleotide
  Antisense strand to SEQ ID NO: 741090
auuagacucacuguagcag

SEQ ID NO: 741092 - RNA, 19 nt, Artificial Sequence
  Description of Artificial Sequence: Synthetic oligonucleotide
  Sense strand starting at position 3098 of SEQ ID NO: 586745
gagacugguggugauguua

SEQ ID NO: 741093 - RNA, 19 nt, Artificial Sequence
  Description of Artificial Sequence: Synthetic oligonucleotide
  Antisense strand to SEQ ID NO: 741092
uaacaucaccaccagucuc

SEQ ID NO: 741094 - RNA, 19 nt, Artificial Sequence
  Description of Artificial Sequence: Synthetic oligonucleotide
  Sense strand starting at position 3110 of SEQ ID NO: 586745
gauguuaaagaaugugauu

SEQ ID NO: 741095 - RNA, 19 nt, Artificial Sequence
  Description of Artificial Sequence: Synthetic oligonucleotide
  Antisense strand to SEQ ID NO: 741094
aaucacauucuuuaacauc

SEQ ID NO: 741096 - RNA, 19 nt, Artificial Sequence
  Description of Artificial Sequence: Synthetic oligonucleotide
  Sense strand starting at position 3262 of SEQ ID NO: 586745
auguaagaguaguuaccau

SEQ ID NO: 741097 - RNA, 19 nt, Artificial Sequence
  Description of Artificial Sequence: Synthetic oligonucleotide
  Antisense strand to SEQ ID NO: 741096
augguaacuacucuuacau

SEQ ID NO: 741098 - RNA, 19 nt, Artificial Sequence
  Description of Artificial Sequence: Synthetic oligonucleotide
  Sense strand starting at position 3389 of SEQ ID NO: 586745
ccacauauuugguaugaga

SEQ ID NO: 741099 - RNA, 19 nt, Artificial Sequence
  Description of Artificial Sequence: Synthetic oligonucleotide
  Antisense strand to SEQ ID NO: 741098
ucucauaccaaauaugugg

SEQ ID NO: 741100 - RNA, 19 nt, Artificial Sequence
  Description of Artificial Sequence: Synthetic oligonucleotide
  Sense strand starting at position 3392 of SEQ ID NO: 586745
cauauuugguaugagacca

SEQ ID NO: 741101 - RNA, 19 nt, Artificial Sequence
  Description of Artificial Sequence: Synthetic oligonucleotide
  Antisense strand to SEQ ID NO: 741100
uggucucauaccaaauaug

SEQ ID NO: 741102 - RNA, 19 nt, Artificial Sequence
  Description of Artificial Sequence: Synthetic oligonucleotide
  Sense strand starting at position 3613 of SEQ ID NO: 586745
uaacauguacaggguuauu

SEQ ID NO: 741103 - RNA, 19 nt, Artificial Sequence
  Description of Artificial Sequence: Synthetic oligonucleotide
  Antisense strand to SEQ ID NO: 741102
aauaacccuguacauguua

SEQ ID NO: 741104 - RNA, 19 nt, Artificial Sequence
  Description of Artificial Sequence: Synthetic oligonucleotide
  Sense strand starting at position 3712 of SEQ ID NO: 586745
cuauuauauuuggaguccu

SEQ ID NO: 741105 - RNA, 19 nt, Artificial Sequence
  Description of Artificial Sequence: Synthetic oligonucleotide
  Antisense strand to SEQ ID NO: 741104
aggacuccaaauauaauag

SEQ ID NO: 741106 - RNA, 19 nt, Artificial Sequence
  Description of Artificial Sequence: Synthetic oligonucleotide
  Sense strand starting at position 124 of SEQ ID NO: 586746
ggucaugggcccuguugaa

SEQ ID NO: 741107 - RNA, 19 nt, Artificial Sequence
  Description of Artificial Sequence: Synthetic oligonucleotide
  Antisense strand to SEQ ID NO: 741106
uucaacagggcccaugacc

SEQ ID NO: 741108 - RNA, 19 nt, Artificial Sequence
  Description of Artificial Sequence: Synthetic oligonucleotide
  Sense strand starting at position 230 of SEQ ID NO: 586746
uucuacauugcaugugaua

SEQ ID NO: 741109 - RNA, 19 nt, Artificial Sequence
  Description of Artificial Sequence: Synthetic oligonucleotide
  Antisense strand to SEQ ID NO: 741108
uaucacaugcaauguagaa

SEQ ID NO: 741110 - RNA, 19 nt, Artificial Sequence
  Description of Artificial Sequence: Synthetic oligonucleotide
  Sense strand starting at position 244 of SEQ ID NO: 586746
ugauaauuaugucugcuuu

SEQ ID NO: 741111 - RNA, 19 nt, Artificial Sequence
  Description of Artificial Sequence: Synthetic oligonucleotide
  Antisense strand to SEQ ID NO: 741110
aaagcagacauaauuauca

SEQ ID NO: 741112 - RNA, 19 nt, Artificial Sequence
  Description of Artificial Sequence: Synthetic oligonucleotide
  Sense strand starting at position 248 of SEQ ID NO: 586746
aauuaugucugcuuucgga

SEQ ID NO: 741113 - RNA, 19 nt, Artificial Sequence
  Description of Artificial Sequence: Synthetic oligonucleotide
  Antisense strand to SEQ ID NO: 741112
uccgaaagcagacauaauu

SEQ ID NO: 741114 - RNA, 19 nt, Artificial Sequence
  Description of Artificial Sequence: Synthetic oligonucleotide
  Sense strand starting at position 335 of SEQ ID NO: 586746
guaaccugucaagaacugu

SEQ ID NO: 741115 - RNA, 19 nt, Artificial Sequence
  Description of Artificial Sequence: Synthetic oligonucleotide
  Antisense strand to SEQ ID NO: 741114
acaguucuugacagguuac

SEQ ID NO: 741116 - RNA, 19 nt, Artificial Sequence
  Description of Artificial Sequence: Synthetic oligonucleotide
  Sense strand starting at position 517 of SEQ ID NO: 586746
ggaucacugugagcacaga

SEQ ID NO: 741117 - RNA, 19 nt, Artificial Sequence
  Description of Artificial Sequence: Synthetic oligonucleotide
  Antisense strand to SEQ ID NO: 741116
ucugugcucacagugaucc

SEQ ID NO: 741118 - RNA, 19 nt, Artificial Sequence
  Description of Artificial Sequence: Synthetic oligonucleotide
  Sense strand starting at position 518 of SEQ ID NO: 586746
gaucacugugagcacagau

SEQ ID NO: 741119 - RNA, 19 nt, Artificial Sequence
  Description of Artificial Sequence: Synthetic oligonucleotide
  Antisense strand to SEQ ID NO: 741118
aucugugcucacagugauc

SEQ ID NO: 741120 - RNA, 19 nt, Artificial Sequence
  Description of Artificial Sequence: Synthetic oligonucleotide
  Sense strand starting at position 533 of SEQ ID NO: 586746
agaugaugucccgggacaa

SEQ ID NO: 741121 - RNA, 19 nt, Artificial Sequence
  Description of Artificial Sequence: Synthetic oligonucleotide
  Antisense strand to SEQ ID NO: 741120
uugucccgggacaucaucu

SEQ ID NO: 741122 - RNA, 19 nt, Artificial Sequence
  Description of Artificial Sequence: Synthetic oligonucleotide
  Sense strand starting at position 534 of SEQ ID NO: 586746
gaugaugucccgggacaaa

SEQ ID NO: 741123 - RNA, 19 nt, Artificial Sequence
  Description of Artificial Sequence: Synthetic oligonucleotide
  Antisense strand to SEQ ID NO: 741122
uuugucccgggacaucauc

SEQ ID NO: 741124 - RNA, 19 nt, Artificial Sequence
  Description of Artificial Sequence: Synthetic oligonucleotide
  Sense strand starting at position 624 of SEQ ID NO: 586746
gcagucucugaacacuuaa

SEQ ID NO: 741125 - RNA, 19 nt, Artificial Sequence
  Description of Artificial Sequence: Synthetic oligonucleotide
  Antisense strand to SEQ ID NO: 741124
uuaaguguucagagacugc

SEQ ID NO: 741126 - RNA, 19 nt, Artificial Sequence
  Description of Artificial Sequence: Synthetic oligonucleotide
  Sense strand starting at position 672 of SEQ ID NO: 586746
aagaaaucagcacgauuga

SEQ ID NO: 741127 - RNA, 19 nt, Artificial Sequence
  Description of Artificial Sequence: Synthetic oligonucleotide
  Antisense strand to SEQ ID NO: 741126
ucaaucgugcugauuucuu

SEQ ID NO: 741128 - RNA, 19 nt, Artificial Sequence
  Description of Artificial Sequence: Synthetic oligonucleotide
  Sense strand starting at position 826 of SEQ ID NO: 586746
ucaaguucuggugggcaca

SEQ ID NO: 741129 - RNA, 19 nt, Artificial Sequence
  Description of Artificial Sequence: Synthetic oligonucleotide
  Antisense strand to SEQ ID NO: 741128
ugugcccaccagaacuuga

SEQ ID NO: 741130 - RNA, 19 nt, Artificial Sequence
  Description of Artificial Sequence: Synthetic oligonucleotide
  Sense strand starting at position 908 of SEQ ID NO: 586746
gacaucauugcacgaugga

SEQ ID NO: 741131 - RNA, 19 nt, Artificial Sequence
  Description of Artificial Sequence: Synthetic oligonucleotide
  Antisense strand to SEQ ID NO: 741130
uccaucgugcaaugauguc

SEQ ID NO: 741132 - RNA, 19 nt, Artificial Sequence
  Description of Artificial Sequence: Synthetic oligonucleotide
  Sense strand starting at position 1005 of SEQ ID NO: 586746
cugucuuuccaguggcaaa

SEQ ID NO: 741133 - RNA, 19 nt, Artificial Sequence
  Description of Artificial Sequence: Synthetic oligonucleotide
  Antisense strand to SEQ ID NO: 741132
uuugccacuggaaagacag

SEQ ID NO: 741134 - RNA, 19 nt, Artificial Sequence
  Description of Artificial Sequence: Synthetic oligonucleotide
  Sense strand starting at position 1153 of SEQ ID NO: 586746
cuccuuauuucugcguaca

SEQ ID NO: 741135 - RNA, 19 nt, Artificial Sequence
  Description of Artificial Sequence: Synthetic oligonucleotide
  Antisense strand to SEQ ID NO: 741134
uguacgcagaaauaaggag

SEQ ID NO: 741136 - RNA, 19 nt, Artificial Sequence
  Description of Artificial Sequence: Synthetic oligonucleotide
  Sense strand starting at position 1154 of SEQ ID NO: 586746
uccuuauuucugcguacaa

SEQ ID NO: 741137 - RNA, 19 nt, Artificial Sequence
  Description of Artificial Sequence: Synthetic oligonucleotide
  Antisense strand to SEQ ID NO: 741136
uuguacgcagaaauaagga

SEQ ID NO: 741138 - RNA, 19 nt, Artificial Sequence
  Description of Artificial Sequence: Synthetic oligonucleotide
  Sense strand starting at position 1155 of SEQ ID NO: 586746
ccuuauuucugcguacaaa

SEQ ID NO: 741139 - RNA, 19 nt, Artificial Sequence
  Description of Artificial Sequence: Synthetic oligonucleotide
  Antisense strand to SEQ ID NO: 741138
uuuguacgcagaaauaagg

SEQ ID NO: 741140 - RNA, 19 nt, Artificial Sequence
  Description of Artificial Sequence: Synthetic oligonucleotide
  Sense strand starting at position 1262 of SEQ ID NO: 586746
ccagucuaccuggguaaca

SEQ ID NO: 741141 - RNA, 19 nt, Artificial Sequence
  Description of Artificial Sequence: Synthetic oligonucleotide
  Antisense strand to SEQ ID NO: 741140
uguuacccagguagacugg

SEQ ID NO: 741142 - RNA, 19 nt, Artificial Sequence
  Description of Artificial Sequence: Synthetic oligonucleotide
  Sense strand starting at position 1263 of SEQ ID NO: 586746
cagucuaccuggguaacaa

SEQ ID NO: 741143 - RNA, 19 nt, Artificial Sequence
  Description of Artificial Sequence: Synthetic oligonucleotide
  Antisense strand to SEQ ID NO: 741142
uuguuacccagguagacug

SEQ ID NO: 741144 - RNA, 19 nt, Artificial Sequence
  Description of Artificial Sequence: Synthetic oligonucleotide
  Sense strand starting at position 1841 of SEQ ID NO: 586746
ggcugaaauagcuggagau

SEQ ID NO: 741145 - RNA, 19 nt, Artificial Sequence
  Description of Artificial Sequence: Synthetic oligonucleotide
  Antisense strand to SEQ ID NO: 741144
aucuccagcuauuucagcc

SEQ ID NO: 741146 - RNA, 19 nt, Artificial Sequence
  Description of Artificial Sequence: Synthetic oligonucleotide
  Sense strand starting at position 1842 of SEQ ID NO: 586746
gcugaaauagcuggagauu

SEQ ID NO: 741147 - RNA, 19 nt, Artificial Sequence
  Description of Artificial Sequence: Synthetic oligonucleotide
  Antisense strand to SEQ ID NO: 741146
aaucuccagcuauuucagc

SEQ ID NO: 741148 - RNA, 19 nt, Artificial Sequence
  Description of Artificial Sequence: Synthetic oligonucleotide
  Sense strand starting at position 2406 of SEQ ID NO: 586746
ugaaaugaccucugcuuuc

SEQ ID NO: 741149 - RNA, 19 nt, Artificial Sequence
  Description of Artificial Sequence: Synthetic oligonucleotide
  Antisense strand to SEQ ID NO: 741148
gaaagcagaggucauuuca

SEQ ID NO: 741150 - RNA, 19 nt, Artificial Sequence
  Description of Artificial Sequence: Synthetic oligonucleotide
  Sense strand starting at position 2472 of SEQ ID NO: 586746
gcaacauaugaauguauuc

SEQ ID NO: 741151 - RNA, 19 nt, Artificial Sequence
  Description of Artificial Sequence: Synthetic oligonucleotide
  Antisense strand to SEQ ID NO: 741150
gaauacauucauauguugc

SEQ ID NO: 741152 - RNA, 19 nt, Artificial Sequence
  Description of Artificial Sequence: Synthetic oligonucleotide
  Sense strand starting at position 2509 of SEQ ID NO: 586746
cgaacauuucuaggugucu

SEQ ID NO: 741153 - RNA, 19 nt, Artificial Sequence
  Description of Artificial Sequence: Synthetic oligonucleotide
  Antisense strand to SEQ ID NO: 741152
agacaccuagaaauguucg

SEQ ID NO: 741154 - RNA, 19 nt, Artificial Sequence
  Description of Artificial Sequence: Synthetic oligonucleotide
  Sense strand starting at position 2525 of SEQ ID NO: 586746
ucucgugcugugccagaua

SEQ ID NO: 741155 - RNA, 19 nt, Artificial Sequence
  Description of Artificial Sequence: Synthetic oligonucleotide
  Antisense strand to SEQ ID NO: 741154
uaucuggcacagcacgaga

SEQ ID NO: 741156 - RNA, 19 nt, Artificial Sequence
  Description of Artificial Sequence: Synthetic oligonucleotide
  Sense strand starting at position 2536 of SEQ ID NO: 586746
gccagauauuguucugagu

SEQ ID NO: 741157 - RNA, 19 nt, Artificial Sequence
  Description of Artificial Sequence: Synthetic oligonucleotide
  Antisense strand to SEQ ID NO: 741156
acucagaacaauaucuggc

SEQ ID NO: 741158 - RNA, 19 nt, Artificial Sequence
  Description of Artificial Sequence: Synthetic oligonucleotide
  Sense strand starting at position 2920 of SEQ ID NO: 586746
cccaguugguauccagaau

SEQ ID NO: 741159 - RNA, 19 nt, Artificial Sequence
  Description of Artificial Sequence: Synthetic oligonucleotide
  Antisense strand to SEQ ID NO: 741158
auucuggauaccaacuggg

SEQ ID NO: 741160 - RNA, 19 nt, Artificial Sequence
  Description of Artificial Sequence: Synthetic oligonucleotide
  Sense strand starting at position 2931 of SEQ ID NO: 586746
uccagaaucuuggcuuguu

SEQ ID NO: 741161 - RNA, 19 nt, Artificial Sequence
  Description of Artificial Sequence: Synthetic oligonucleotide
  Antisense strand to SEQ ID NO: 741160
aacaagccaagauucugga

SEQ ID NO: 741162 - RNA, 19 nt, Artificial Sequence
  Description of Artificial Sequence: Synthetic oligonucleotide
  Sense strand starting at position 2932 of SEQ ID NO: 586746
ccagaaucuuggcuuguuu

SEQ ID NO: 741163 - RNA, 19 nt, Artificial Sequence
  Description of Artificial Sequence: Synthetic oligonucleotide
  Antisense strand to SEQ ID NO: 741162
aaacaagccaagauucugg

SEQ ID NO: 741164 - RNA, 19 nt, Artificial Sequence
  Description of Artificial Sequence: Synthetic oligonucleotide
  Sense strand starting at position 2941 of SEQ ID NO: 586746
uggcuuguuugccuaggaa

SEQ ID NO: 741165 - RNA, 19 nt, Artificial Sequence
  Description of Artificial Sequence: Synthetic oligonucleotide
  Antisense strand to SEQ ID NO: 741164
uuccuaggcaaacaagcca

SEQ ID NO: 741166 - RNA, 19 nt, Artificial Sequence
  Description of Artificial Sequence: Synthetic oligonucleotide
  Sense strand starting at position 2993 of SEQ ID NO: 586746
ggugauucuuaugcauaua

SEQ ID NO: 741167 - RNA, 19 nt, Artificial Sequence
  Description of Artificial Sequence: Synthetic oligonucleotide
  Antisense strand to SEQ ID NO: 741166
uauaugcauaagaaucacc

SEQ ID NO: 741168 - RNA, 19 nt, Artificial Sequence
  Description of Artificial Sequence: Synthetic oligonucleotide
  Sense strand starting at position 3039 of SEQ ID NO: 586746
auugcuaaagggugucaga

SEQ ID NO: 741169 - RNA, 19 nt, Artificial Sequence
  Description of Artificial Sequence: Synthetic oligonucleotide
  Antisense strand to SEQ ID NO: 741168
ucugacacccuuuagcaau

SEQ ID NO: 741170 - RNA, 19 nt, Artificial Sequence
  Description of Artificial Sequence: Synthetic oligonucleotide
  Sense strand starting at position 3256 of SEQ ID NO: 586746
agauguguuuguuugugag

SEQ ID NO: 741171 - RNA, 19 nt, Artificial Sequence
  Description of Artificial Sequence: Synthetic oligonucleotide
  Antisense strand to SEQ ID NO: 741170
cucacaaacaaacacaucu

SEQ ID NO: 741172 - RNA, 19 nt, Artificial Sequence
  Description of Artificial Sequence: Synthetic oligonucleotide
  Sense strand starting at position 3264 of SEQ ID NO: 586746
uuguuugugagacagauuc

SEQ ID NO: 741173 - RNA, 19 nt, Artificial Sequence
  Description of Artificial Sequence: Synthetic oligonucleotide
  Antisense strand to SEQ ID NO: 741172
gaaucugucucacaaacaa

SEQ ID NO: 741174 - RNA, 19 nt, Artificial Sequence
  Description of Artificial Sequence: Synthetic oligonucleotide
  Sense strand starting at position 3610 of SEQ ID NO: 586746
acugucaucucuccuagag

SEQ ID NO: 741175 - RNA, 19 nt, Artificial Sequence
  Description of Artificial Sequence: Synthetic oligonucleotide
  Antisense strand to SEQ ID NO: 741174
cucuaggagagaugacagu

SEQ ID NO: 741176 - RNA, 19 nt, Artificial Sequence
  Description of Artificial Sequence: Synthetic oligonucleotide
  Sense strand starting at position 3753 of SEQ ID NO: 586746
aucugauuaacacguagga

SEQ ID NO: 741177 - RNA, 19 nt, Artificial Sequence
  Description of Artificial Sequence: Synthetic oligonucleotide
  Antisense strand to SEQ ID NO: 741176
uccuacguguuaaucagau

SEQ ID NO: 741178 - RNA, 19 nt, Artificial Sequence
  Description of Artificial Sequence: Synthetic oligonucleotide
  Sense strand starting at position 3757 of SEQ ID NO: 586746
gauuaacacguaggauaaa

SEQ ID NO: 741179 - RNA, 19 nt, Artificial Sequence
  Description of Artificial Sequence: Synthetic oligonucleotide
  Antisense strand to SEQ ID NO: 741178
uuuauccuacguguuaauc

SEQ ID NO: 741180 - RNA, 19 nt, Artificial Sequence
  Description of Artificial Sequence: Synthetic oligonucleotide
  Sense strand starting at position 3803 of SEQ ID NO: 586746
ggccauuggugaucucauc

SEQ ID NO: 741181 - RNA, 19 nt, Artificial Sequence
  Description of Artificial Sequence: Synthetic oligonucleotide
  Antisense strand to SEQ ID NO: 741180
gaugagaucaccaauggcc

SEQ ID NO: 741182 - RNA, 19 nt, Artificial Sequence
  Description of Artificial Sequence: Synthetic oligonucleotide
  Sense strand starting at position 3850 of SEQ ID NO: 586746
acagauauuucucaggcua

SEQ ID NO: 741183 - RNA, 19 nt, Artificial Sequence
  Description of Artificial Sequence: Synthetic oligonucleotide
  Antisense strand to SEQ ID NO: 741182
uagccugagaaauaucugu

SEQ ID NO: 741184 - RNA, 19 nt, Artificial Sequence
  Description of Artificial Sequence: Synthetic oligonucleotide
  Sense strand starting at position 3852 of SEQ ID NO: 586746
agauauuucucaggcuaca

SEQ ID NO: 741185 - RNA, 19 nt, Artificial Sequence
  Description of Artificial Sequence: Synthetic oligonucleotide
  Antisense strand to SEQ ID NO: 741184
uguagccugagaaauaucu

SEQ ID NO: 741186 - RNA, 19 nt, Artificial Sequence
  Description of Artificial Sequence: Synthetic oligonucleotide
  Sense strand starting at position 99 of SEQ ID NO: 586747
caguuucuggcuugaccaa

SEQ ID NO: 741187 - RNA, 19 nt, Artificial Sequence
  Description of Artificial Sequence: Synthetic oligonucleotide
  Antisense strand to SEQ ID NO: 741186
uuggucaagccagaaacug

SEQ ID NO: 741188 - RNA, 19 nt, Artificial Sequence
  Description of Artificial Sequence: Synthetic oligonucleotide
  Sense strand starting at position 100 of SEQ ID NO: 586747
aguuucuggcuugaccaaa

SEQ ID NO: 741189 - RNA, 19 nt, Artificial Sequence
  Description of Artificial Sequence: Synthetic oligonucleotide
  Antisense strand to SEQ ID NO: 741188
uuuggucaagccagaaacu

SEQ ID NO: 741190 - RNA, 19 nt, Artificial Sequence
  Description of Artificial Sequence: Synthetic oligonucleotide
  Sense strand starting at position 124 of SEQ ID NO: 586747
ggaagauggugacaucugu

SEQ ID NO: 741191 - RNA, 19 nt, Artificial Sequence
  Description of Artificial Sequence: Synthetic oligonucleotide
  Antisense strand to SEQ ID NO: 741190
acagaugucaccaucuucc

SEQ ID NO: 741192 - RNA, 19 nt, Artificial Sequence
  Description of Artificial Sequence: Synthetic oligonucleotide
  Sense strand starting at position 128 of SEQ ID NO: 586747
gauggugacaucuguuaga

SEQ ID NO: 741193 - RNA, 19 nt, Artificial Sequence
  Description of Artificial Sequence: Synthetic oligonucleotide
  Antisense strand to SEQ ID NO: 741192
ucuaacagaugucaccauc

SEQ ID NO: 741194 - RNA, 19 nt, Artificial Sequence
  Description of Artificial Sequence: Synthetic oligonucleotide
  Sense strand starting at position 131 of SEQ ID NO: 586747
ggugacaucuguuagauuu

SEQ ID NO: 741195 - RNA, 19 nt, Artificial Sequence
  Description of Artificial Sequence: Synthetic oligonucleotide
  Antisense strand to SEQ ID NO: 741194
aaaucuaacagaugucacc

SEQ ID NO: 741196 - RNA, 19 nt, Artificial Sequence
  Description of Artificial Sequence: Synthetic oligonucleotide
  Sense strand starting at position 133 of SEQ ID NO: 586747
ugacaucuguuagauuuaa

SEQ ID NO: 741197 - RNA, 19 nt, Artificial Sequence
  Description of Artificial Sequence: Synthetic oligonucleotide
  Antisense strand to SEQ ID NO: 741196
uuaaaucuaacagauguca

SEQ ID NO: 741198 - RNA, 19 nt, Artificial Sequence
  Description of Artificial Sequence: Synthetic oligonucleotide
  Sense strand starting at position 156 of SEQ ID NO: 586747
ggauguacuagguguaaag

SEQ ID NO: 741199 - RNA, 19 nt, Artificial Sequence
  Description of Artificial Sequence: Synthetic oligonucleotide
  Antisense strand to SEQ ID NO: 741198
cuuuacaccuaguacaucc

SEQ ID NO: 741200 - RNA, 19 nt, Artificial Sequence
  Description of Artificial Sequence: Synthetic oligonucleotide
  Sense strand starting at position 166 of SEQ ID NO: 586747
gguguaaagucugagagga

SEQ ID NO: 741201 - RNA, 19 nt, Artificial Sequence
  Description of Artificial Sequence: Synthetic oligonucleotide
  Antisense strand to SEQ ID NO: 741200
uccucucagacuuuacacc

SEQ ID NO: 741202 - RNA, 19 nt, Artificial Sequence
  Description of Artificial Sequence: Synthetic oligonucleotide
  Sense strand starting at position 212 of SEQ ID NO: 586747
aucuguggugcguucauau

SEQ ID NO: 741203 - RNA, 19 nt, Artificial Sequence
  Description of Artificial Sequence: Synthetic oligonucleotide
  Antisense strand to SEQ ID NO: 741202
auaugaacgcaccacagau

SEQ ID NO: 741204 - RNA, 19 nt, Artificial Sequence
  Description of Artificial Sequence: Synthetic oligonucleotide
  Sense strand starting at position 265 of SEQ ID NO: 586747
uacacuggguggugagaau

SEQ ID NO: 741205 - RNA, 19 nt, Artificial Sequence
  Description of Artificial Sequence: Synthetic oligonucleotide
  Antisense strand to SEQ ID NO: 741204
auucucaccacccagugua

SEQ ID NO: 741206 - RNA, 19 nt, Artificial Sequence
  Description of Artificial Sequence: Synthetic oligonucleotide
  Sense strand starting at position 344 of SEQ ID NO: 586747
ggaugaggcuccuaggagu

SEQ ID NO: 741207 - RNA, 19 nt, Artificial Sequence
  Description of Artificial Sequence: Synthetic oligonucleotide
  Antisense strand to SEQ ID NO: 741206
acuccuaggagccucaucc

SEQ ID NO: 741208 - RNA, 19 nt, Artificial Sequence
  Description of Artificial Sequence: Synthetic oligonucleotide
  Sense strand starting at position 364 of SEQ ID NO: 586747
cgauguuuaagggauggca

SEQ ID NO: 741209 - RNA, 19 nt, Artificial Sequence
  Description of Artificial Sequence: Synthetic oligonucleotide
  Antisense strand to SEQ ID NO: 741208
ugccaucccuuaaacaucg

SEQ ID NO: 741210 - RNA, 19 nt, Artificial Sequence
  Description of Artificial Sequence: Synthetic oligonucleotide
  Sense strand starting at position 402 of SEQ ID NO: 586747
uggauaaacugcuggaaag

SEQ ID NO: 741211 - RNA, 19 nt, Artificial Sequence
  Description of Artificial Sequence: Synthetic oligonucleotide
  Antisense strand to SEQ ID NO: 741210
cuuuccagcaguuuaucca

SEQ ID NO: 741212 - RNA, 19 nt, Artificial Sequence
  Description of Artificial Sequence: Synthetic oligonucleotide
  Sense strand starting at position 939 of SEQ ID NO: 586747
gcaugaaugccuuagaacu

SEQ ID NO: 741213 - RNA, 19 nt, Artificial Sequence
  Description of Artificial Sequence: Synthetic oligonucleotide
  Antisense strand to SEQ ID NO: 741212
aguucuaaggcauucaugc

SEQ ID NO: 741214 - RNA, 19 nt, Artificial Sequence
  Description of Artificial Sequence: Synthetic oligonucleotide
  Sense strand starting at position 1354 of SEQ ID NO: 586747
cacuuuguacuucgguuau

SEQ ID NO: 741215 - RNA, 19 nt, Artificial Sequence
  Description of Artificial Sequence: Synthetic oligonucleotide
  Antisense strand to SEQ ID NO: 741214
auaaccgaaguacaaagug

SEQ ID NO: 741216 - RNA, 19 nt, Artificial Sequence
  Description of Artificial Sequence: Synthetic oligonucleotide
  Sense strand starting at position 1430 of SEQ ID NO: 586747
cagggaaggucggcucaua

SEQ ID NO: 741217 - RNA, 19 nt, Artificial Sequence
  Description of Artificial Sequence: Synthetic oligonucleotide
  Antisense strand to SEQ ID NO: 741216
uaugagccgaccuucccug

SEQ ID NO: 741218 - RNA, 19 nt, Artificial Sequence
  Description of Artificial Sequence: Synthetic oligonucleotide
  Sense strand starting at position 2110 of SEQ ID NO: 586747
cuucucuaguucuuaaguu

SEQ ID NO: 741219 - RNA, 19 nt, Artificial Sequence
  Description of Artificial Sequence: Synthetic oligonucleotide
  Antisense strand to SEQ ID NO: 741218
aacuuaagaacuagagaag

SEQ ID NO: 741220 - RNA, 19 nt, Artificial Sequence
  Description of Artificial Sequence: Synthetic oligonucleotide
  Sense strand starting at position 2133 of SEQ ID NO: 586747
ccaaucugaugggcaaaua

SEQ ID NO: 741221 - RNA, 19 nt, Artificial Sequence
  Description of Artificial Sequence: Synthetic oligonucleotide
  Antisense strand to SEQ ID NO: 741220
uauuugcccaucagauugg

SEQ ID NO: 741222 - RNA, 19 nt, Artificial Sequence
  Description of Artificial Sequence: Synthetic oligonucleotide
  Sense strand starting at position 2175 of SEQ ID NO: 586747
ugaaguuacugagguuaaa

SEQ ID NO: 741223 - RNA, 19 nt, Artificial Sequence
  Description of Artificial Sequence: Synthetic oligonucleotide
  Antisense strand to SEQ ID NO: 741222
uuuaaccucaguaacuuca

SEQ ID NO: 741224 - RNA, 19 nt, Artificial Sequence
  Description of Artificial Sequence: Synthetic oligonucleotide
  Sense strand starting at position 2201 of SEQ ID NO: 586747
acauguguauuagucauua

SEQ ID NO: 741225 - RNA, 19 nt, Artificial Sequence
  Description of Artificial Sequence: Synthetic oligonucleotide
  Antisense strand to SEQ ID NO: 741224
uaaugacuaauacacaugu

SEQ ID NO: 741226 - RNA, 19 nt, Artificial Sequence
  Description of Artificial Sequence: Synthetic oligonucleotide
  Sense strand starting at position 2558 of SEQ ID NO: 586747
ugccaugugucauccaaug

SEQ ID NO: 741227 - RNA, 19 nt, Artificial Sequence
  Description of Artificial Sequence: Synthetic oligonucleotide
  Antisense strand to SEQ ID NO: 741226
cauuggaugacacauggca

SEQ ID NO: 741228 - RNA, 19 nt, Artificial Sequence
  Description of Artificial Sequence: Synthetic oligonucleotide
  Sense strand starting at position 2578 of SEQ ID NO: 586747
cuguguucucagggaggcu

SEQ ID NO: 741229 - RNA, 19 nt, Artificial Sequence
  Description of Artificial Sequence: Synthetic oligonucleotide
  Antisense strand to SEQ ID NO: 741228
agccucccugagaacacag

SEQ ID NO: 741230 - RNA, 19 nt, Artificial Sequence
  Description of Artificial Sequence: Synthetic oligonucleotide
  Sense strand starting at position 2579 of SEQ ID NO: 586747
uguguucucagggaggcuu

SEQ ID NO: 741231 - RNA, 19 nt, Artificial Sequence
  Description of Artificial Sequence: Synthetic oligonucleotide
  Antisense strand to SEQ ID NO: 741230
aagccucccugagaacaca

SEQ ID NO: 741232 - RNA, 19 nt, Artificial Sequence
  Description of Artificial Sequence: Synthetic oligonucleotide
  Sense strand starting at position 2634 of SEQ ID NO: 586747
uccacaaugugguuuacaa

SEQ ID NO: 741233 - RNA, 19 nt, Artificial Sequence
  Description of Artificial Sequence: Synthetic oligonucleotide
  Antisense strand to SEQ ID NO: 741232
uuguaaaccacauugugga

SEQ ID NO: 741234 - RNA, 19 nt, Artificial Sequence
  Description of Artificial Sequence: Synthetic oligonucleotide
  Sense strand starting at position 2747 of SEQ ID NO: 586747
ggccaaauuaagugaugua

SEQ ID NO: 741235 - RNA, 19 nt, Artificial Sequence
  Description of Artificial Sequence: Synthetic oligonucleotide
  Antisense strand to SEQ ID NO: 741234
uacaucacuuaauuuggcc

SEQ ID NO: 741236 - RNA, 19 nt, Artificial Sequence
  Description of Artificial Sequence: Synthetic oligonucleotide
  Sense strand starting at position 2748 of SEQ ID NO: 586747
gccaaauuaagugauguag

SEQ ID NO: 741237 - RNA, 19 nt, Artificial Sequence
  Description of Artificial Sequence: Synthetic oligonucleotide
  Antisense strand to SEQ ID NO: 741236
cuacaucacuuaauuuggc

SEQ ID NO: 741238 - RNA, 19 nt, Artificial Sequence
  Description of Artificial Sequence: Synthetic oligonucleotide
  Sense strand starting at position 2754 of SEQ ID NO: 586747
uuaagugauguagguauga

SEQ ID NO: 741239 - RNA, 19 nt, Artificial Sequence
  Description of Artificial Sequence: Synthetic oligonucleotide
  Antisense strand to SEQ ID NO: 741238
ucauaccuacaucacuuaa

SEQ ID NO: 741240 - RNA, 19 nt, Artificial Sequence
  Description of Artificial Sequence: Synthetic oligonucleotide
  Sense strand starting at position 2756 of SEQ ID NO: 586747
aagugauguagguaugauc

SEQ ID NO: 741241 - RNA, 19 nt, Artificial Sequence
  Description of Artificial Sequence: Synthetic oligonucleotide
  Antisense strand to SEQ ID NO: 741240
gaucauaccuacaucacuu

SEQ ID NO: 741242 - RNA, 19 nt, Artificial Sequence
  Description of Artificial Sequence: Synthetic oligonucleotide
  Sense strand starting at position 2765 of SEQ ID NO: 586747
agguaugauccaggccuca

SEQ ID NO: 741243 - RNA, 19 nt, Artificial Sequence
  Description of Artificial Sequence: Synthetic oligonucleotide
  Antisense strand to SEQ ID NO: 741242
ugaggccuggaucauaccu

SEQ ID NO: 741244 - RNA, 19 nt, Artificial Sequence
  Description of Artificial Sequence: Synthetic oligonucleotide
  Sense strand starting at position 3107 of SEQ ID NO: 586747
ucuugaaagaaaugguagu

SEQ ID NO: 741245 - RNA, 19 nt, Artificial Sequence
  Description of Artificial Sequence: Synthetic oligonucleotide
  Antisense strand to SEQ ID NO: 741244
acuaccauuucuuucaaga

SEQ ID NO: 741246 - RNA, 19 nt, Artificial Sequence
  Description of Artificial Sequence: Synthetic oligonucleotide
  Sense strand starting at position 3113 of SEQ ID NO: 586747
aagaaaugguaguccucuu

SEQ ID NO: 741247 - RNA, 19 nt, Artificial Sequence
  Description of Artificial Sequence: Synthetic oligonucleotide
  Antisense strand to SEQ ID NO: 741246
aagaggacuaccauuucuu

SEQ ID NO: 741248 - RNA, 19 nt, Artificial Sequence
  Description of Artificial Sequence: Synthetic oligonucleotide
  Sense strand starting at position 3145 of SEQ ID NO: 586747
cauggagugcugugcuaac

SEQ ID NO: 741249 - RNA, 19 nt, Artificial Sequence
  Description of Artificial Sequence: Synthetic oligonucleotide
  Antisense strand to SEQ ID NO: 741248
guuagcacagcacuccaug

SEQ ID NO: 741250 - RNA, 19 nt, Artificial Sequence
  Description of Artificial Sequence: Synthetic oligonucleotide
  Sense strand starting at position 3553 of SEQ ID NO: 586747
ggucaugggagucaccuaa

SEQ ID NO: 741251 - RNA, 19 nt, Artificial Sequence
  Description of Artificial Sequence: Synthetic oligonucleotide
  Antisense strand to SEQ ID NO: 741250
uuaggugacucccaugacc

SEQ ID NO: 741252 - RNA, 19 nt, Artificial Sequence
  Description of Artificial Sequence: Synthetic oligonucleotide
  Sense strand starting at position 3679 of SEQ ID NO: 586747
ucgagaauaacucguaggu

SEQ ID NO: 741253 - RNA, 19 nt, Artificial Sequence
  Description of Artificial Sequence: Synthetic oligonucleotide
  Antisense strand to SEQ ID NO: 741252
accuacgaguuauucucga

SEQ ID NO: 741254 - RNA, 19 nt, Artificial Sequence
  Description of Artificial Sequence: Synthetic oligonucleotide
  Sense strand starting at position 3681 of SEQ ID NO: 586747
gagaauaacucguagguuu

SEQ ID NO: 741255 - RNA, 19 nt, Artificial Sequence
  Description of Artificial Sequence: Synthetic oligonucleotide
  Antisense strand to SEQ ID NO: 741254
aaaccuacgaguuauucuc

SEQ ID NO: 741256 - RNA, 19 nt, Artificial Sequence
  Description of Artificial Sequence: Synthetic oligonucleotide
  Sense strand starting at position 3835 of SEQ ID NO: 586747
agagaucuguaggaaugau

SEQ ID NO: 741257 - RNA, 19 nt, Artificial Sequence
  Description of Artificial Sequence: Synthetic oligonucleotide
  Antisense strand to SEQ ID NO: 741256
aucauuccuacagaucucu

SEQ ID NO: 741258 - RNA, 19 nt, Artificial Sequence
  Description of Artificial Sequence: Synthetic oligonucleotide
  Sense strand starting at position 3869 of SEQ ID NO: 586747
gagagaagguuauccucga

SEQ ID NO: 741259 - RNA, 19 nt, Artificial Sequence
  Description of Artificial Sequence: Synthetic oligonucleotide
  Antisense strand to SEQ ID NO: 741258
ucgaggauaaccuucucuc

SEQ ID NO: 741260 - RNA, 19 nt, Artificial Sequence
  Description of Artificial Sequence: Synthetic oligonucleotide
  Sense strand starting at position 3870 of SEQ ID NO: 586747
agagaagguuauccucgau

SEQ ID NO: 741261 - RNA, 19 nt, Artificial Sequence
  Description of Artificial Sequence: Synthetic oligonucleotide
  Antisense strand to SEQ ID NO: 741260
aucgaggauaaccuucucu

SEQ ID NO: 741262 - RNA, 19 nt, Artificial Sequence
  Description of Artificial Sequence: Synthetic oligonucleotide
  Sense strand starting at position 3873 of SEQ ID NO: 586747
gaagguuauccucgauuau

SEQ ID NO: 741263 - RNA, 19 nt, Artificial Sequence
  Description of Artificial Sequence: Synthetic oligonucleotide
  Antisense strand to SEQ ID NO: 741262
auaaucgaggauaaccuuc

SEQ ID NO: 741264 - RNA, 19 nt, Artificial Sequence
  Description of Artificial Sequence: Synthetic oligonucleotide
  Sense strand starting at position 3874 of SEQ ID NO: 586747
aagguuauccucgauuauc

SEQ ID NO: 741265 - RNA, 19 nt, Artificial Sequence
  Description of Artificial Sequence: Synthetic oligonucleotide
  Antisense strand to SEQ ID NO: 741264
gauaaucgaggauaaccuu

SEQ ID NO: 741266 - RNA, 19 nt, Artificial Sequence
  Description of Artificial Sequence: Synthetic oligonucleotide
  Sense strand starting at position 185 of SEQ ID NO: 586748
auaaguugguauucuagau

SEQ ID NO: 741267 - RNA, 19 nt, Artificial Sequence
  Description of Artificial Sequence: Synthetic oligonucleotide
  Antisense strand to SEQ ID NO: 741266
aucuagaauaccaacuuau

SEQ ID NO: 741268 - RNA, 19 nt, Artificial Sequence
  Description of Artificial Sequence: Synthetic oligonucleotide
  Sense strand starting at position 189 of SEQ ID NO: 586748
guugguauucuagauaggu

SEQ ID NO: 741269 - RNA, 19 nt, Artificial Sequence
  Description of Artificial Sequence: Synthetic oligonucleotide
  Antisense strand to SEQ ID NO: 741268
accuaucuagaauaccaac

SEQ ID NO: 741270 - RNA, 19 nt, Artificial Sequence
  Description of Artificial Sequence: Synthetic oligonucleotide
  Sense strand starting at position 191 of SEQ ID NO: 586748
ugguauucuagauaggucu

SEQ ID NO: 741271 - RNA, 19 nt, Artificial Sequence
  Description of Artificial Sequence: Synthetic oligonucleotide
  Antisense strand to SEQ ID NO: 741270
agaccuaucuagaauacca

SEQ ID NO: 741272 - RNA, 19 nt, Artificial Sequence
  Description of Artificial Sequence: Synthetic oligonucleotide
  Sense strand starting at position 230 of SEQ ID NO: 586748
agcaaacuguuccuaugau

SEQ ID NO: 741273 - RNA, 19 nt, Artificial Sequence
  Description of Artificial Sequence: Synthetic oligonucleotide
  Antisense strand to SEQ ID NO: 741272
aucauaggaacaguuugcu

SEQ ID NO: 741274 - RNA, 19 nt, Artificial Sequence
  Description of Artificial Sequence: Synthetic oligonucleotide
  Sense strand starting at position 288 of SEQ ID NO: 586748
ccuuacuuggcuuagauaa

SEQ ID NO: 741275 - RNA, 19 nt, Artificial Sequence
  Description of Artificial Sequence: Synthetic oligonucleotide
  Antisense strand to SEQ ID NO: 741274
uuaucuaagccaaguaagg

SEQ ID NO: 741276 - RNA, 19 nt, Artificial Sequence
  Description of Artificial Sequence: Synthetic oligonucleotide
  Sense strand starting at position 382 of SEQ ID NO: 586748
auuauuaaccuugggcaaa

SEQ ID NO: 741277 - RNA, 19 nt, Artificial Sequence
  Description of Artificial Sequence: Synthetic oligonucleotide
  Antisense strand to SEQ ID NO: 741276
uuugcccaagguuaauaau

SEQ ID NO: 741278 - RNA, 19 nt, Artificial Sequence
  Description of Artificial Sequence: Synthetic oligonucleotide
  Sense strand starting at position 652 of SEQ ID NO: 586748
uauccacaggugugauuau

SEQ ID NO: 741279 - RNA, 19 nt, Artificial Sequence
  Description of Artificial Sequence: Synthetic oligonucleotide
  Antisense strand to SEQ ID NO: 741278
auaaucacaccuguggaua

SEQ ID NO: 741280 - RNA, 19 nt, Artificial Sequence
  Description of Artificial Sequence: Synthetic oligonucleotide
  Sense strand starting at position 661 of SEQ ID NO: 586748
gugugauuauaaccuugaa

SEQ ID NO: 741281 - RNA, 19 nt, Artificial Sequence
  Description of Artificial Sequence: Synthetic oligonucleotide
  Antisense strand to SEQ ID NO: 741280
uucaagguuauaaucacac

SEQ ID NO: 741282 - RNA, 19 nt, Artificial Sequence
  Description of Artificial Sequence: Synthetic oligonucleotide
  Sense strand starting at position 682 of SEQ ID NO: 586748
cccagacuccagugaucuu

SEQ ID NO: 741283 - RNA, 19 nt, Artificial Sequence
  Description of Artificial Sequence: Synthetic oligonucleotide
  Antisense strand to SEQ ID NO: 741282
aagaucacuggagucuggg

SEQ ID NO: 741284 - RNA, 19 nt, Artificial Sequence
  Description of Artificial Sequence: Synthetic oligonucleotide
  Sense strand starting at position 798 of SEQ ID NO: 586748
gugucuuucgucaguugga

SEQ ID NO: 741285 - RNA, 19 nt, Artificial Sequence
  Description of Artificial Sequence: Synthetic oligonucleotide
  Antisense strand to SEQ ID NO: 741284
uccaacugacgaaagacac

SEQ ID NO: 741286 - RNA, 19 nt, Artificial Sequence
  Description of Artificial Sequence: Synthetic oligonucleotide
  Sense strand starting at position 821 of SEQ ID NO: 586748
auugcaggugcucagaaau

SEQ ID NO: 741287 - RNA, 19 nt, Artificial Sequence
  Description of Artificial Sequence: Synthetic oligonucleotide
  Antisense strand to SEQ ID NO: 741286
auuucugagcaccugcaau

SEQ ID NO: 741288 - RNA, 19 nt, Artificial Sequence
  Description of Artificial Sequence: Synthetic oligonucleotide
  Sense strand starting at position 945 of SEQ ID NO: 586748
gcguauacccaggauuaug

SEQ ID NO: 741289 - RNA, 19 nt, Artificial Sequence
  Description of Artificial Sequence: Synthetic oligonucleotide
  Antisense strand to SEQ ID NO: 741288
cauaauccuggguauacgc

SEQ ID NO: 741290 - RNA, 19 nt, Artificial Sequence
  Description of Artificial Sequence: Synthetic oligonucleotide
  Sense strand starting at position 989 of SEQ ID NO: 586748
aaguuugugcaagaauugu

SEQ ID NO: 741291 - RNA, 19 nt, Artificial Sequence
  Description of Artificial Sequence: Synthetic oligonucleotide
  Antisense strand to SEQ ID NO: 741290
acaauucuugcacaaacuu

SEQ ID NO: 741292 - RNA, 19 nt, Artificial Sequence
  Description of Artificial Sequence: Synthetic oligonucleotide
  Sense strand starting at position 998 of SEQ ID NO: 586748
caagaauugucuuccugag

SEQ ID NO: 741293 - RNA, 19 nt, Artificial Sequence
  Description of Artificial Sequence: Synthetic oligonucleotide
  Antisense strand to SEQ ID NO: 741292
cucaggaagacaauucuug

SEQ ID NO: 741294 - RNA, 19 nt, Artificial Sequence
  Description of Artificial Sequence: Synthetic oligonucleotide
  Sense strand starting at position 1000 of SEQ ID NO: 586748
agaauugucuuccugagug

SEQ ID NO: 741295 - RNA, 19 nt, Artificial Sequence
  Description of Artificial Sequence: Synthetic oligonucleotide
  Antisense strand to SEQ ID NO: 741294
cacucaggaagacaauucu

SEQ ID NO: 741296 - RNA, 19 nt, Artificial Sequence
  Description of Artificial Sequence: Synthetic oligonucleotide
  Sense strand starting at position 1140 of SEQ ID NO: 586748
auacaagagcuuugggagu

SEQ ID NO: 741297 - RNA, 19 nt, Artificial Sequence
  Description of Artificial Sequence: Synthetic oligonucleotide
  Antisense strand to SEQ ID NO: 741296
acucccaaagcucuuguau

SEQ ID NO: 741298 - RNA, 19 nt, Artificial Sequence
  Description of Artificial Sequence: Synthetic oligonucleotide
  Sense strand starting at position 1147 of SEQ ID NO: 586748
agcuuugggaguuaagaug

SEQ ID NO: 741299 - RNA, 19 nt, Artificial Sequence
  Description of Artificial Sequence: Synthetic oligonucleotide
  Antisense strand to SEQ ID NO: 741298
caucuuaacucccaaagcu

SEQ ID NO: 741300 - RNA, 19 nt, Artificial Sequence
  Description of Artificial Sequence: Synthetic oligonucleotide
  Sense strand starting at position 1427 of SEQ ID NO: 586748
gcagcuuaucucuagagaa

SEQ ID NO: 741301 - RNA, 19 nt, Artificial Sequence
  Description of Artificial Sequence: Synthetic oligonucleotide
  Antisense strand to SEQ ID NO: 741300
uucucuagagauaagcugc

SEQ ID NO: 741302 - RNA, 19 nt, Artificial Sequence
  Description of Artificial Sequence: Synthetic oligonucleotide
  Sense strand starting at position 2764 of SEQ ID NO: 586748
aggucauuuggcuggucua

SEQ ID NO: 741303 - RNA, 19 nt, Artificial Sequence
  Description of Artificial Sequence: Synthetic oligonucleotide
  Antisense strand to SEQ ID NO: 741302
uagaccagccaaaugaccu

SEQ ID NO: 741304 - RNA, 19 nt, Artificial Sequence
  Description of Artificial Sequence: Synthetic oligonucleotide
  Sense strand starting at position 2822 of SEQ ID NO: 586748
cgauuugucgaccgaaagg

SEQ ID NO: 741305 - RNA, 19 nt, Artificial Sequence
  Description of Artificial Sequence: Synthetic oligonucleotide
  Antisense strand to SEQ ID NO: 741304
ccuuucggucgacaaaucg

SEQ ID NO: 741306 - RNA, 19 nt, Artificial Sequence
  Description of Artificial Sequence: Synthetic oligonucleotide
  Sense strand starting at position 2829 of SEQ ID NO: 586748
ucgaccgaaaggugaaaua

SEQ ID NO: 741307 - RNA, 19 nt, Artificial Sequence
  Description of Artificial Sequence: Synthetic oligonucleotide
  Antisense strand to SEQ ID NO: 741306
uauuucaccuuucggucga

SEQ ID NO: 741308 - RNA, 19 nt, Artificial Sequence
  Description of Artificial Sequence: Synthetic oligonucleotide
  Sense strand starting at position 2839 of SEQ ID NO: 586748
ggugaaauaacagguacua

SEQ ID NO: 741309 - RNA, 19 nt, Artificial Sequence
  Description of Artificial Sequence: Synthetic oligonucleotide
  Antisense strand to SEQ ID NO: 741308
uaguaccuguuauuucacc

SEQ ID NO: 741310 - RNA, 19 nt, Artificial Sequence
  Description of Artificial Sequence: Synthetic oligonucleotide
  Sense strand starting at position 2863 of SEQ ID NO: 586748
uaaagaaaucaugguuagu

SEQ ID NO: 741311 - RNA, 19 nt, Artificial Sequence
  Description of Artificial Sequence: Synthetic oligonucleotide
  Antisense strand to SEQ ID NO: 741310
acuaaccaugauuucuuua

SEQ ID NO: 741312 - RNA, 19 nt, Artificial Sequence
  Description of Artificial Sequence: Synthetic oligonucleotide
  Sense strand starting at position 2865 of SEQ ID NO: 586748
aagaaaucaugguuaguuu

SEQ ID NO: 741313 - RNA, 19 nt, Artificial Sequence
  Description of Artificial Sequence: Synthetic oligonucleotide
  Antisense strand to SEQ ID NO: 741312
aaacuaaccaugauuucuu

SEQ ID NO: 741314 - RNA, 19 nt, Artificial Sequence
  Description of Artificial Sequence: Synthetic oligonucleotide
  Sense strand starting at position 2904 of SEQ ID NO: 586748
ggacuuaagccugggaaca

SEQ ID NO: 741315 - RNA, 19 nt, Artificial Sequence
  Description of Artificial Sequence: Synthetic oligonucleotide
  Antisense strand to SEQ ID NO: 741314
uguucccaggcuuaagucc

SEQ ID NO: 741316 - RNA, 19 nt, Artificial Sequence
  Description of Artificial Sequence: Synthetic oligonucleotide
  Sense strand starting at position 2905 of SEQ ID NO: 586748
gacuuaagccugggaacac

SEQ ID NO: 741317 - RNA, 19 nt, Artificial Sequence
  Description of Artificial Sequence: Synthetic oligonucleotide
  Antisense strand to SEQ ID NO: 741316
guguucccaggcuuaaguc

SEQ ID NO: 741318 - RNA, 19 nt, Artificial Sequence
  Description of Artificial Sequence: Synthetic oligonucleotide
  Sense strand starting at position 2977 of SEQ ID NO: 586748
ccugaagaagacugaguuu

SEQ ID NO: 741319 - RNA, 19 nt, Artificial Sequence
  Description of Artificial Sequence: Synthetic oligonucleotide
  Antisense strand to SEQ ID NO: 741318
aaacucagucuucuucagg

SEQ ID NO: 741320 - RNA, 19 nt, Artificial Sequence
  Description of Artificial Sequence: Synthetic oligonucleotide
  Sense strand starting at position 3001 of SEQ ID NO: 586748
cccagaauauuugaguauc

SEQ ID NO: 741321 - RNA, 19 nt, Artificial Sequence
  Description of Artificial Sequence: Synthetic oligonucleotide
  Antisense strand to SEQ ID NO: 741320
gauacucaaauauucuggg

SEQ ID NO: 741322 - RNA, 19 nt, Artificial Sequence
  Description of Artificial Sequence: Synthetic oligonucleotide
  Sense strand starting at position 3111 of SEQ ID NO: 586748
gauugugaggccuaagaug

SEQ ID NO: 741323 - RNA, 19 nt, Artificial Sequence
  Description of Artificial Sequence: Synthetic oligonucleotide
  Antisense strand to SEQ ID NO: 741322
caucuuaggccucacaauc

SEQ ID NO: 741324 - RNA, 19 nt, Artificial Sequence
  Description of Artificial Sequence: Synthetic oligonucleotide
  Sense strand starting at position 3343 of SEQ ID NO: 586748
ggaagaauguggguacucu

SEQ ID NO: 741325 - RNA, 19 nt, Artificial Sequence
  Description of Artificial Sequence: Synthetic oligonucleotide
  Antisense strand to SEQ ID NO: 741324
agaguacccacauucuucc

SEQ ID NO: 741326 - RNA, 19 nt, Artificial Sequence
  Description of Artificial Sequence: Synthetic oligonucleotide
  Sense strand starting at position 3347 of SEQ ID NO: 586748
gaauguggguacucugaaa

SEQ ID NO: 741327 - RNA, 19 nt, Artificial Sequence
  Description of Artificial Sequence: Synthetic oligonucleotide
  Antisense strand to SEQ ID NO: 741326
uuucagaguacccacauuc

SEQ ID NO: 741328 - RNA, 19 nt, Artificial Sequence
  Description of Artificial Sequence: Synthetic oligonucleotide
  Sense strand starting at position 3391 of SEQ ID NO: 586748
acuauaucauaggucugau

SEQ ID NO: 741329 - RNA, 19 nt, Artificial Sequence
  Description of Artificial Sequence: Synthetic oligonucleotide
  Antisense strand to SEQ ID NO: 741328
aucagaccuaugauauagu

SEQ ID NO: 741330 - RNA, 19 nt, Artificial Sequence
  Description of Artificial Sequence: Synthetic oligonucleotide
  Sense strand starting at position 3394 of SEQ ID NO: 586748
auaucauaggucugauuau

SEQ ID NO: 741331 - RNA, 19 nt, Artificial Sequence
  Description of Artificial Sequence: Synthetic oligonucleotide
  Antisense strand to SEQ ID NO: 741330
auaaucagaccuaugauau

SEQ ID NO: 741332 - RNA, 19 nt, Artificial Sequence
  Description of Artificial Sequence: Synthetic oligonucleotide
  Sense strand starting at position 3403 of SEQ ID NO: 586748
gucugauuaucaucuauau

SEQ ID NO: 741333 - RNA, 19 nt, Artificial Sequence
  Description of Artificial Sequence: Synthetic oligonucleotide
  Antisense strand to SEQ ID NO: 741332
auauagaugauaaucagac

SEQ ID NO: 741334 - RNA, 19 nt, Artificial Sequence
  Description of Artificial Sequence: Synthetic oligonucleotide
  Sense strand starting at position 3423 of SEQ ID NO: 586748
agauguuaaagcuguagga

SEQ ID NO: 741335 - RNA, 19 nt, Artificial Sequence
  Description of Artificial Sequence: Synthetic oligonucleotide
  Antisense strand to SEQ ID NO: 741334
uccuacagcuuuaacaucu

SEQ ID NO: 741336 - RNA, 19 nt, Artificial Sequence
  Description of Artificial Sequence: Synthetic oligonucleotide
  Sense strand starting at position 3425 of SEQ ID NO: 586748
auguuaaagcuguaggagu

SEQ ID NO: 741337 - RNA, 19 nt, Artificial Sequence
  Description of Artificial Sequence: Synthetic oligonucleotide
  Antisense strand to SEQ ID NO: 741336
acuccuacagcuuuaacau

SEQ ID NO: 741338 - RNA, 19 nt, Artificial Sequence
  Description of Artificial Sequence: Synthetic oligonucleotide
  Sense strand starting at position 3433 of SEQ ID NO: 586748
gcuguaggaguauagucaa

SEQ ID NO: 741339 - RNA, 19 nt, Artificial Sequence
  Description of Artificial Sequence: Synthetic oligonucleotide
  Antisense strand to SEQ ID NO: 741338
uugacuauacuccuacagc

SEQ ID NO: 741340 - RNA, 19 nt, Artificial Sequence
  Description of Artificial Sequence: Synthetic oligonucleotide
  Sense strand starting at position 3436 of SEQ ID NO: 586748
guaggaguauagucaauua

SEQ ID NO: 741341 - RNA, 19 nt, Artificial Sequence
  Description of Artificial Sequence: Synthetic oligonucleotide
  Antisense strand to SEQ ID NO: 741340
uaauugacuauacuccuac

SEQ ID NO: 741342 - RNA, 19 nt, Artificial Sequence
  Description of Artificial Sequence: Synthetic oligonucleotide
  Sense strand starting at position 3456 of SEQ ID NO: 586748
acuacaaacccugguagua

SEQ ID NO: 741343 - RNA, 19 nt, Artificial Sequence
  Description of Artificial Sequence: Synthetic oligonucleotide
  Antisense strand to SEQ ID NO: 741342
uacuaccaggguuuguagu

SEQ ID NO: 741344 - RNA, 19 nt, Artificial Sequence
  Description of Artificial Sequence: Synthetic oligonucleotide
  Sense strand starting at position 3755 of SEQ ID NO: 586748
gugguagugacuuaaguau

SEQ ID NO: 741345 - RNA, 19 nt, Artificial Sequence
  Description of Artificial Sequence: Synthetic oligonucleotide
  Antisense strand to SEQ ID NO: 741344
auacuuaagucacuaccac

SEQ ID NO: 741346 - RNA, 19 nt, Artificial Sequence
  Description of Artificial Sequence: Synthetic oligonucleotide
  Sense strand starting at position 1 of SEQ ID NO: 586749
uucugaugauaguuuacaa

SEQ ID NO: 741347 - RNA, 19 nt, Artificial Sequence
  Description of Artificial Sequence: Synthetic oligonucleotide
  Antisense strand to SEQ ID NO: 741346
uuguaaacuaucaucagaa

SEQ ID NO: 741348 - RNA, 19 nt, Artificial Sequence
  Description of Artificial Sequence: Synthetic oligonucleotide
  Sense strand starting at position 33 of SEQ ID NO: 586749
aauugauugguaugucuac

SEQ ID NO: 741349 - RNA, 19 nt, Artificial Sequence
  Description of Artificial Sequence: Synthetic oligonucleotide
  Antisense strand to SEQ ID NO: 741348
guagacauaccaaucaauu

SEQ ID NO: 741350 - RNA, 19 nt, Artificial Sequence
  Description of Artificial Sequence: Synthetic oligonucleotide
  Sense strand starting at position 39 of SEQ ID NO: 586749
uugguaugucuacaugaaa

SEQ ID NO: 741351 - RNA, 19 nt, Artificial Sequence
  Description of Artificial Sequence: Synthetic oligonucleotide
  Antisense strand to SEQ ID NO: 741350
uuucauguagacauaccaa

SEQ ID NO: 741352 - RNA, 19 nt, Artificial Sequence
  Description of Artificial Sequence: Synthetic oligonucleotide
  Sense strand starting at position 201 of SEQ ID NO: 586749
gugauacucgcagaaacau

SEQ ID NO: 741353 - RNA, 19 nt, Artificial Sequence
  Description of Artificial Sequence: Synthetic oligonucleotide
  Antisense strand to SEQ ID NO: 741352
auguuucugcgaguaucac

SEQ ID NO: 741354 - RNA, 19 nt, Artificial Sequence
  Description of Artificial Sequence: Synthetic oligonucleotide
  Sense strand starting at position 254 of SEQ ID NO: 586749
ugcuaaacuguguauuacu

SEQ ID NO: 741355 - RNA, 19 nt, Artificial Sequence
  Description of Artificial Sequence: Synthetic oligonucleotide
  Antisense strand to SEQ ID NO: 741354
aguaauacacaguuuagca

SEQ ID NO: 741356 - RNA, 19 nt, Artificial Sequence
  Description of Artificial Sequence: Synthetic oligonucleotide
  Sense strand starting at position 428 of SEQ ID NO: 586749
gggugauuagcacaugcaa

SEQ ID NO: 741357 - RNA, 19 nt, Artificial Sequence
  Description of Artificial Sequence: Synthetic oligonucleotide
  Antisense strand to SEQ ID NO: 741356
uugcaugugcuaaucaccc

SEQ ID NO: 741358 - RNA, 19 nt, Artificial Sequence
  Description of Artificial Sequence: Synthetic oligonucleotide
  Sense strand starting at position 470 of SEQ ID NO: 586749
ucuguauggcuguaauaau

SEQ ID NO: 741359 - RNA, 19 nt, Artificial Sequence
  Description of Artificial Sequence: Synthetic oligonucleotide
  Antisense strand to SEQ ID NO: 741358
auuauuacagccauacaga

SEQ ID NO: 741360 - RNA, 19 nt, Artificial Sequence
  Description of Artificial Sequence: Synthetic oligonucleotide
  Sense strand starting at position 1021 of SEQ ID NO: 586749
agaaaugaucugcagcaug

SEQ ID NO: 741361 - RNA, 19 nt, Artificial Sequence
  Description of Artificial Sequence: Synthetic oligonucleotide
  Antisense strand to SEQ ID NO: 741360
caugcugcagaucauuucu

SEQ ID NO: 741362 - RNA, 19 nt, Artificial Sequence
  Description of Artificial Sequence: Synthetic oligonucleotide
  Sense strand starting at position 1421 of SEQ ID NO: 586749
gagacuucugaagguacuu

SEQ ID NO: 741363 - RNA, 19 nt, Artificial Sequence
  Description of Artificial Sequence: Synthetic oligonucleotide
  Antisense strand to SEQ ID NO: 741362
aaguaccuucagaagucuc

SEQ ID NO: 741364 - RNA, 19 nt, Artificial Sequence
  Description of Artificial Sequence: Synthetic oligonucleotide
  Sense strand starting at position 1499 of SEQ ID NO: 586749
uguaauuucugagaccuaa

SEQ ID NO: 741365 - RNA, 19 nt, Artificial Sequence
  Description of Artificial Sequence: Synthetic oligonucleotide
  Antisense strand to SEQ ID NO: 741364
uuaggucucagaaauuaca

SEQ ID NO: 741366 - RNA, 19 nt, Artificial Sequence
  Description of Artificial Sequence: Synthetic oligonucleotide
  Sense strand starting at position 1569 of SEQ ID NO: 586749
ugcauuauacuggaacauu

SEQ ID NO: 741367 - RNA, 19 nt, Artificial Sequence
  Description of Artificial Sequence: Synthetic oligonucleotide
  Antisense strand to SEQ ID NO: 741366
aauguuccaguauaaugca

SEQ ID NO: 741368 - RNA, 19 nt, Artificial Sequence
  Description of Artificial Sequence: Synthetic oligonucleotide
  Sense strand starting at position 1745 of SEQ ID NO: 586749
auucuuccugucugagaag

SEQ ID NO: 741369 - RNA, 19 nt, Artificial Sequence
  Description of Artificial Sequence: Synthetic oligonucleotide
  Antisense strand to SEQ ID NO: 741368
cuucucagacaggaagaau

SEQ ID NO: 741370 - RNA, 19 nt, Artificial Sequence
  Description of Artificial Sequence: Synthetic oligonucleotide
  Sense strand starting at position 1808 of SEQ ID NO: 586749
uugacuaagcccuaugcaa

SEQ ID NO: 741371 - RNA, 19 nt, Artificial Sequence
  Description of Artificial Sequence: Synthetic oligonucleotide
  Antisense strand to SEQ ID NO: 741370
uugcauagggcuuagucaa

SEQ ID NO: 741372 - RNA, 19 nt, Artificial Sequence
  Description of Artificial Sequence: Synthetic oligonucleotide
  Sense strand starting at position 1846 of SEQ ID NO: 586749
ugcacaguacuuuauauau

SEQ ID NO: 741373 - RNA, 19 nt, Artificial Sequence
  Description of Artificial Sequence: Synthetic oligonucleotide
  Antisense strand to SEQ ID NO: 741372
auauauaaaguacugugca

SEQ ID NO: 741374 - RNA, 19 nt, Artificial Sequence
  Description of Artificial Sequence: Synthetic oligonucleotide
  Sense strand starting at position 1926 of SEQ ID NO: 586749
aauugaaguuaugugacga

SEQ ID NO: 741375 - RNA, 19 nt, Artificial Sequence
  Description of Artificial Sequence: Synthetic oligonucleotide
  Antisense strand to SEQ ID NO: 741374
ucgucacauaacuucaauu

SEQ ID NO: 741376 - RNA, 19 nt, Artificial Sequence
  Description of Artificial Sequence: Synthetic oligonucleotide
  Sense strand starting at position 1927 of SEQ ID NO: 586749
auugaaguuaugugacgau

SEQ ID NO: 741377 - RNA, 19 nt, Artificial Sequence
  Description of Artificial Sequence: Synthetic oligonucleotide
  Antisense strand to SEQ ID NO: 741376
aucgucacauaacuucaau

SEQ ID NO: 741378 - RNA, 19 nt, Artificial Sequence
  Description of Artificial Sequence: Synthetic oligonucleotide
  Sense strand starting at position 1931 of SEQ ID NO: 586749
aaguuaugugacgauuaaa

SEQ ID NO: 741379 - RNA, 19 nt, Artificial Sequence
  Description of Artificial Sequence: Synthetic oligonucleotide
  Antisense strand to SEQ ID NO: 741378
uuuaaucgucacauaacuu

SEQ ID NO: 741380 - RNA, 19 nt, Artificial Sequence
  Description of Artificial Sequence: Synthetic oligonucleotide
  Sense strand starting at position 1952 of SEQ ID NO: 586749
gaagguaaaucuguacuau

SEQ ID NO: 741381 - RNA, 19 nt, Artificial Sequence
  Description of Artificial Sequence: Synthetic oligonucleotide
  Antisense strand to SEQ ID NO: 741380
auaguacagauuuaccuuc

SEQ ID NO: 741382 - RNA, 19 nt, Artificial Sequence
  Description of Artificial Sequence: Synthetic oligonucleotide
  Sense strand starting at position 2159 of SEQ ID NO: 586749
gggaauuauugcucaaugg

SEQ ID NO: 741383 - RNA, 19 nt, Artificial Sequence
  Description of Artificial Sequence: Synthetic oligonucleotide
  Antisense strand to SEQ ID NO: 741382
ccauugagcaauaauuccc

SEQ ID NO: 741384 - RNA, 19 nt, Artificial Sequence
  Description of Artificial Sequence: Synthetic oligonucleotide
  Sense strand starting at position 2163 of SEQ ID NO: 586749
auuauugcucaauggauag

SEQ ID NO: 741385 - RNA, 19 nt, Artificial Sequence
  Description of Artificial Sequence: Synthetic oligonucleotide
  Antisense strand to SEQ ID NO: 741384
cuauccauugagcaauaau

SEQ ID NO: 741386 - RNA, 19 nt, Artificial Sequence
  Description of Artificial Sequence: Synthetic oligonucleotide
  Sense strand starting at position 2167 of SEQ ID NO: 586749
uugcucaauggauagaguu

SEQ ID NO: 741387 - RNA, 19 nt, Artificial Sequence
  Description of Artificial Sequence: Synthetic oligonucleotide
  Antisense strand to SEQ ID NO: 741386
aacucuauccauugagcaa

SEQ ID NO: 741388 - RNA, 19 nt, Artificial Sequence
  Description of Artificial Sequence: Synthetic oligonucleotide
  Sense strand starting at position 2649 of SEQ ID NO: 586749
ugugucaggaccugauaga

SEQ ID NO: 741389 - RNA, 19 nt, Artificial Sequence
  Description of Artificial Sequence: Synthetic oligonucleotide
  Antisense strand to SEQ ID NO: 741388
ucuaucagguccugacaca

SEQ ID NO: 741390 - RNA, 19 nt, Artificial Sequence
  Description of Artificial Sequence: Synthetic oligonucleotide
  Sense strand starting at position 2650 of SEQ ID NO: 586749
gugucaggaccugauagau

SEQ ID NO: 741391 - RNA, 19 nt, Artificial Sequence
  Description of Artificial Sequence: Synthetic oligonucleotide
  Antisense strand to SEQ ID NO: 741390
aucuaucagguccugacac

SEQ ID NO: 741392 - RNA, 19 nt, Artificial Sequence
  Description of Artificial Sequence: Synthetic oligonucleotide
  Sense strand starting at position 2757 of SEQ ID NO: 586749
ucucuacuguccucagaga

SEQ ID NO: 741393 - RNA, 19 nt, Artificial Sequence
  Description of Artificial Sequence: Synthetic oligonucleotide
  Antisense strand to SEQ ID NO: 741392
ucucugaggacaguagaga

SEQ ID NO: 741394 - RNA, 19 nt, Artificial Sequence
  Description of Artificial Sequence: Synthetic oligonucleotide
  Sense strand starting at position 2758 of SEQ ID NO: 586749
cucuacuguccucagagaa

SEQ ID NO: 741395 - RNA, 19 nt, Artificial Sequence
  Description of Artificial Sequence: Synthetic oligonucleotide
  Antisense strand to SEQ ID NO: 741394
uucucugaggacaguagag

SEQ ID NO: 741396 - RNA, 19 nt, Artificial Sequence
  Description of Artificial Sequence: Synthetic oligonucleotide
  Sense strand starting at position 2771 of SEQ ID NO: 586749
agagaaaucuagucuagua

SEQ ID NO: 741397 - RNA, 19 nt, Artificial Sequence
  Description of Artificial Sequence: Synthetic oligonucleotide
  Antisense strand to SEQ ID NO: 741396
uacuagacuagauuucucu

SEQ ID NO: 741398 - RNA, 19 nt, Artificial Sequence
  Description of Artificial Sequence: Synthetic oligonucleotide
  Sense strand starting at position 2815 of SEQ ID NO: 586749
aguaucguucucuauuaaa

SEQ ID NO: 741399 - RNA, 19 nt, Artificial Sequence
  Description of Artificial Sequence: Synthetic oligonucleotide
  Antisense strand to SEQ ID NO: 741398
uuuaauagagaacgauacu

SEQ ID NO: 741400 - RNA, 19 nt, Artificial Sequence
  Description of Artificial Sequence: Synthetic oligonucleotide
  Sense strand starting at position 3233 of SEQ ID NO: 586749
acgugaaaccuuugacacu

SEQ ID NO: 741401 - RNA, 19 nt, Artificial Sequence
  Description of Artificial Sequence: Synthetic oligonucleotide
  Antisense strand to SEQ ID NO: 741400
agugucaaagguuucacgu

SEQ ID NO: 741402 - RNA, 19 nt, Artificial Sequence
  Description of Artificial Sequence: Synthetic oligonucleotide
  Sense strand starting at position 3421 of SEQ ID NO: 586749
uagaguugacaaugguaag

SEQ ID NO: 741403 - RNA, 19 nt, Artificial Sequence
  Description of Artificial Sequence: Synthetic oligonucleotide
  Antisense strand to SEQ ID NO: 741402
cuuaccauugucaacucua

SEQ ID NO: 741404 - RNA, 19 nt, Artificial Sequence
  Description of Artificial Sequence: Synthetic oligonucleotide
  Sense strand starting at position 3427 of SEQ ID NO: 586749
ugacaaugguaagaauuua

SEQ ID NO: 741405 - RNA, 19 nt, Artificial Sequence
  Description of Artificial Sequence: Synthetic oligonucleotide
  Antisense strand to SEQ ID NO: 741404
uaaauucuuaccauuguca

SEQ ID NO: 741406 - RNA, 19 nt, Artificial Sequence
  Description of Artificial Sequence: Synthetic oligonucleotide
  Sense strand starting at position 3499 of SEQ ID NO: 586749
uugaaaugauaguucuaca

SEQ ID NO: 741407 - RNA, 19 nt, Artificial Sequence
  Description of Artificial Sequence: Synthetic oligonucleotide
  Antisense strand to SEQ ID NO: 741406
uguagaacuaucauuucaa

SEQ ID NO: 741408 - RNA, 19 nt, Artificial Sequence
  Description of Artificial Sequence: Synthetic oligonucleotide
  Sense strand starting at position 3527 of SEQ ID NO: 586749
gagugcaauuuagaaauac

SEQ ID NO: 741409 - RNA, 19 nt, Artificial Sequence
  Description of Artificial Sequence: Synthetic oligonucleotide
  Antisense strand to SEQ ID NO: 741408
guauuucuaaauugcacuc

SEQ ID NO: 741410 - RNA, 19 nt, Artificial Sequence
  Description of Artificial Sequence: Synthetic oligonucleotide
  Sense strand starting at position 3668 of SEQ ID NO: 586749
uuuauaauucugggaaacu

SEQ ID NO: 741411 - RNA, 19 nt, Artificial Sequence
  Description of Artificial Sequence: Synthetic oligonucleotide
  Antisense strand to SEQ ID NO: 741410
aguuucccagaauuauaaa

SEQ ID NO: 741412 - RNA, 19 nt, Artificial Sequence
  Description of Artificial Sequence: Synthetic oligonucleotide
  Sense strand starting at position 3734 of SEQ ID NO: 586749
aggugaauaagcugugaua

SEQ ID NO: 741413 - RNA, 19 nt, Artificial Sequence
  Description of Artificial Sequence: Synthetic oligonucleotide
  Antisense strand to SEQ ID NO: 741412
uaucacagcuuauucaccu

SEQ ID NO: 741414 - RNA, 19 nt, Artificial Sequence
  Description of Artificial Sequence: Synthetic oligonucleotide
  Sense strand starting at position 3736 of SEQ ID NO: 586749
gugaauaagcugugauaca

SEQ ID NO: 741415 - RNA, 19 nt, Artificial Sequence
  Description of Artificial Sequence: Synthetic oligonucleotide
  Antisense strand to SEQ ID NO: 741414
uguaucacagcuuauucac

SEQ ID NO: 741416 - RNA, 19 nt, Artificial Sequence
  Description of Artificial Sequence: Synthetic oligonucleotide
  Sense strand starting at position 3810 of SEQ ID NO: 586749
auguauuguguuuacuaug

SEQ ID NO: 741417 - RNA, 19 nt, Artificial Sequence
  Description of Artificial Sequence: Synthetic oligonucleotide
  Antisense strand to SEQ ID NO: 741416
cauaguaaacacaauacau

SEQ ID NO: 741418 - RNA, 19 nt, Artificial Sequence
  Description of Artificial Sequence: Synthetic oligonucleotide
  Sense strand starting at position 3850 of SEQ ID NO: 586749
ugacauuccuugucucaua

SEQ ID NO: 741419 - RNA, 19 nt, Artificial Sequence
  Description of Artificial Sequence: Synthetic oligonucleotide
  Antisense strand to SEQ ID NO: 741418
uaugagacaaggaauguca

SEQ ID NO: 741420 - RNA, 19 nt, Artificial Sequence
  Description of Artificial Sequence: Synthetic oligonucleotide
  Sense strand starting at position 3917 of SEQ ID NO: 586749
uuuacuggugggcaaauua

SEQ ID NO: 741421 - RNA, 19 nt, Artificial Sequence
  Description of Artificial Sequence: Synthetic oligonucleotide
  Antisense strand to SEQ ID NO: 741420
uaauuugcccaccaguaaa

SEQ ID NO: 741422 - RNA, 19 nt, Artificial Sequence
  Description of Artificial Sequence: Synthetic oligonucleotide
  Sense strand starting at position 3945 of SEQ ID NO: 586749
cuugauaagcggcagaaau

SEQ ID NO: 741423 - RNA, 19 nt, Artificial Sequence
  Description of Artificial Sequence: Synthetic oligonucleotide
  Antisense strand to SEQ ID NO: 741422
auuucugccgcuuaucaag

SEQ ID NO: 741424 - RNA, 19 nt, Artificial Sequence
  Description of Artificial Sequence: Synthetic oligonucleotide
  Sense strand starting at position 3953 of SEQ ID NO: 586749
gcggcagaaauggauucua

SEQ ID NO: 741425 - RNA, 19 nt, Artificial Sequence
  Description of Artificial Sequence: Synthetic oligonucleotide
  Antisense strand to SEQ ID NO: 741424
uagaauccauuucugccgc

SEQ ID NO: 741426 - RNA, 19 nt, Artificial Sequence
  Description of Artificial Sequence: Synthetic oligonucleotide
  Sense strand starting at position 34 of SEQ ID NO: 586750
gccuguuccagguauguaa

SEQ ID NO: 741427 - RNA, 19 nt, Artificial Sequence
  Description of Artificial Sequence: Synthetic oligonucleotide
  Antisense strand to SEQ ID NO: 741426
uuacauaccuggaacaggc

SEQ ID NO: 741428 - RNA, 19 nt, Artificial Sequence
  Description of Artificial Sequence: Synthetic oligonucleotide
  Sense strand starting at position 82 of SEQ ID NO: 586750
gauggagcugucuacucau

SEQ ID NO: 741429 - RNA, 19 nt, Artificial Sequence
  Description of Artificial Sequence: Synthetic oligonucleotide
  Antisense strand to SEQ ID NO: 741428
augaguagacagcuccauc

SEQ ID NO: 741430 - RNA, 19 nt, Artificial Sequence
  Description of Artificial Sequence: Synthetic oligonucleotide
  Sense strand starting at position 88 of SEQ ID NO: 586750
gcugucuacucaucccaua

SEQ ID NO: 741431 - RNA, 19 nt, Artificial Sequence
  Description of Artificial Sequence: Synthetic oligonucleotide
  Antisense strand to SEQ ID NO: 741430
uaugggaugaguagacagc

SEQ ID NO: 741432 - RNA, 19 nt, Artificial Sequence
  Description of Artificial Sequence: Synthetic oligonucleotide
  Sense strand starting at position 174 of SEQ ID NO: 586750
gcuuuaagguuucccaaau

SEQ ID NO: 741433 - RNA, 19 nt, Artificial Sequence
  Description of Artificial Sequence: Synthetic oligonucleotide
  Antisense strand to SEQ ID NO: 741432
auuugggaaaccuuaaagc

SEQ ID NO: 741434 - RNA, 19 nt, Artificial Sequence
  Description of Artificial Sequence: Synthetic oligonucleotide
  Sense strand starting at position 301 of SEQ ID NO: 586750
ucuauugagggccaguauu

SEQ ID NO: 741435 - RNA, 19 nt, Artificial Sequence
  Description of Artificial Sequence: Synthetic oligonucleotide
  Antisense strand to SEQ ID NO: 741434
aauacuggcccucaauaga

SEQ ID NO: 741436 - RNA, 19 nt, Artificial Sequence
  Description of Artificial Sequence: Synthetic oligonucleotide
  Sense strand starting at position 560 of SEQ ID NO: 586750
ugacaaacggcuuaucaca

SEQ ID NO: 741437 - RNA, 19 nt, Artificial Sequence
  Description of Artificial Sequence: Synthetic oligonucleotide
  Antisense strand to SEQ ID NO: 741436
ugugauaagccguuuguca

SEQ ID NO: 741438 - RNA, 19 nt, Artificial Sequence
  Description of Artificial Sequence: Synthetic oligonucleotide
  Sense strand starting at position 568 of SEQ ID NO: 586750
ggcuuaucacagcaaagca

SEQ ID NO: 741439 - RNA, 19 nt, Artificial Sequence
  Description of Artificial Sequence: Synthetic oligonucleotide
  Antisense strand to SEQ ID NO: 741438
ugcuuugcugugauaagcc

SEQ ID NO: 741440 - RNA, 19 nt, Artificial Sequence
  Description of Artificial Sequence: Synthetic oligonucleotide
  Sense strand starting at position 592 of SEQ ID NO: 586750
guacuuagagcguuagcuu

SEQ ID NO: 741441 - RNA, 19 nt, Artificial Sequence
  Description of Artificial Sequence: Synthetic oligonucleotide
  Antisense strand to SEQ ID NO: 741440
aagcuaacgcucuaaguac

SEQ ID NO: 741442 - RNA, 19 nt, Artificial Sequence
  Description of Artificial Sequence: Synthetic oligonucleotide
  Sense strand starting at position 593 of SEQ ID NO: 586750
uacuuagagcguuagcuuu

SEQ ID NO: 741443 - RNA, 19 nt, Artificial Sequence
  Description of Artificial Sequence: Synthetic oligonucleotide
  Antisense strand to SEQ ID NO: 741442
aaagcuaacgcucuaagua

SEQ ID NO: 741444 - RNA, 19 nt, Artificial Sequence
  Description of Artificial Sequence: Synthetic oligonucleotide
  Sense strand starting at position 761 of SEQ ID NO: 586750
ugaugcgguacucagagau

SEQ ID NO: 741445 - RNA, 19 nt, Artificial Sequence
  Description of Artificial Sequence: Synthetic oligonucleotide
  Antisense strand to SEQ ID NO: 741444
aucucugaguaccgcauca

SEQ ID NO: 741446 - RNA, 19 nt, Artificial Sequence
  Description of Artificial Sequence: Synthetic oligonucleotide
  Sense strand starting at position 1113 of SEQ ID NO: 586750
agaguaaguggcgacauau

SEQ ID NO: 741447 - RNA, 19 nt, Artificial Sequence
  Description of Artificial Sequence: Synthetic oligonucleotide
  Antisense strand to SEQ ID NO: 741446
auaugucgccacuuacucu

SEQ ID NO: 741448 - RNA, 19 nt, Artificial Sequence
  Description of Artificial Sequence: Synthetic oligonucleotide
  Sense strand starting at position 1247 of SEQ ID NO: 586750
auaucacuccgugguccaa

SEQ ID NO: 741449 - RNA, 19 nt, Artificial Sequence
  Description of Artificial Sequence: Synthetic oligonucleotide
  Antisense strand to SEQ ID NO: 741448
uuggaccacggagugauau

SEQ ID NO: 741450 - RNA, 19 nt, Artificial Sequence
  Description of Artificial Sequence: Synthetic oligonucleotide
  Sense strand starting at position 1321 of SEQ ID NO: 586750
ugaaucgaucauugcuaca

SEQ ID NO: 741451 - RNA, 19 nt, Artificial Sequence
  Description of Artificial Sequence: Synthetic oligonucleotide
  Antisense strand to SEQ ID NO: 741450
uguagcaaugaucgauuca

SEQ ID NO: 741452 - RNA, 19 nt, Artificial Sequence
  Description of Artificial Sequence: Synthetic oligonucleotide
  Sense strand starting at position 1460 of SEQ ID NO: 586750
aggugagaaugauagaauc

SEQ ID NO: 741453 - RNA, 19 nt, Artificial Sequence
  Description of Artificial Sequence: Synthetic oligonucleotide
  Antisense strand to SEQ ID NO: 741452
gauucuaucauucucaccu

SEQ ID NO: 741454 - RNA, 19 nt, Artificial Sequence
  Description of Artificial Sequence: Synthetic oligonucleotide
  Sense strand starting at position 1471 of SEQ ID NO: 586750
auagaaucaggucgucaag

SEQ ID NO: 741455 - RNA, 19 nt, Artificial Sequence
  Description of Artificial Sequence: Synthetic oligonucleotide
  Antisense strand to SEQ ID NO: 741454
cuugacgaccugauucuau

SEQ ID NO: 741456 - RNA, 19 nt, Artificial Sequence
  Description of Artificial Sequence: Synthetic oligonucleotide
  Sense strand starting at position 1473 of SEQ ID NO: 586750
agaaucaggucgucaaggu

SEQ ID NO: 741457 - RNA, 19 nt, Artificial Sequence
  Description of Artificial Sequence: Synthetic oligonucleotide
  Antisense strand to SEQ ID NO: 741456
accuugacgaccugauucu

SEQ ID NO: 741458 - RNA, 19 nt, Artificial Sequence
  Description of Artificial Sequence: Synthetic oligonucleotide
  Sense strand starting at position 1474 of SEQ ID NO: 586750
gaaucaggucgucaagguu

SEQ ID NO: 741459 - RNA, 19 nt, Artificial Sequence
  Description of Artificial Sequence: Synthetic oligonucleotide
  Antisense strand to SEQ ID NO: 741458
aaccuugacgaccugauuc

SEQ ID NO: 741460 - RNA, 19 nt, Artificial Sequence
  Description of Artificial Sequence: Synthetic oligonucleotide
  Sense strand starting at position 1481 of SEQ ID NO: 586750
gucgucaagguucgagaaa

SEQ ID NO: 741461 - RNA, 19 nt, Artificial Sequence
  Description of Artificial Sequence: Synthetic oligonucleotide
  Antisense strand to SEQ ID NO: 741460
uuucucgaaccuugacgac

SEQ ID NO: 741462 - RNA, 19 nt, Artificial Sequence
  Description of Artificial Sequence: Synthetic oligonucleotide
  Sense strand starting at position 1501 of SEQ ID NO: 586750
ucaagugucuugucauuaa

SEQ ID NO: 741463 - RNA, 19 nt, Artificial Sequence
  Description of Artificial Sequence: Synthetic oligonucleotide
  Antisense strand to SEQ ID NO: 741462
uuaaugacaagacacuuga

SEQ ID NO: 741464 - RNA, 19 nt, Artificial Sequence
  Description of Artificial Sequence: Synthetic oligonucleotide
  Sense strand starting at position 1505 of SEQ ID NO: 586750
gugucuugucauuaaauag

SEQ ID NO: 741465 - RNA, 19 nt, Artificial Sequence
  Description of Artificial Sequence: Synthetic oligonucleotide
  Antisense strand to SEQ ID NO: 741464
cuauuuaaugacaagacac

SEQ ID NO: 741466 - RNA, 19 nt, Artificial Sequence
  Description of Artificial Sequence: Synthetic oligonucleotide
  Sense strand starting at position 1533 of SEQ ID NO: 586750
ucuggcuuugauugcaaau

SEQ ID NO: 741467 - RNA, 19 nt, Artificial Sequence
  Description of Artificial Sequence: Synthetic oligonucleotide
  Antisense strand to SEQ ID NO: 741466
auuugcaaucaaagccaga

SEQ ID NO: 741468 - RNA, 19 nt, Artificial Sequence
  Description of Artificial Sequence: Synthetic oligonucleotide
  Sense strand starting at position 1560 of SEQ ID NO: 586750
aaugguauacucggagugu

SEQ ID NO: 741469 - RNA, 19 nt, Artificial Sequence
  Description of Artificial Sequence: Synthetic oligonucleotide
  Antisense strand to SEQ ID NO: 741468
acacuccgaguauaccauu

SEQ ID NO: 741470 - RNA, 19 nt, Artificial Sequence
  Description of Artificial Sequence: Synthetic oligonucleotide
  Sense strand starting at position 2286 of SEQ ID NO: 586750
aauggauccuggcuuuguu

SEQ ID NO: 741471 - RNA, 19 nt, Artificial Sequence
  Description of Artificial Sequence: Synthetic oligonucleotide
  Antisense strand to SEQ ID NO: 741470
aacaaagccaggauccauu

SEQ ID NO: 741472 - RNA, 19 nt, Artificial Sequence
  Description of Artificial Sequence: Synthetic oligonucleotide
  Sense strand starting at position 2294 of SEQ ID NO: 586750
cuggcuuuguuucuccaga

SEQ ID NO: 741473 - RNA, 19 nt, Artificial Sequence
  Description of Artificial Sequence: Synthetic oligonucleotide
  Antisense strand to SEQ ID NO: 741472
ucuggagaaacaaagccag

SEQ ID NO: 741474 - RNA, 19 nt, Artificial Sequence
  Description of Artificial Sequence: Synthetic oligonucleotide
  Sense strand starting at position 2295 of SEQ ID NO: 586750
uggcuuuguuucuccagaa

SEQ ID NO: 741475 - RNA, 19 nt, Artificial Sequence
  Description of Artificial Sequence: Synthetic oligonucleotide
  Antisense strand to SEQ ID NO: 741474
uucuggagaaacaaagcca

SEQ ID NO: 741476 - RNA, 19 nt, Artificial Sequence
  Description of Artificial Sequence: Synthetic oligonucleotide
  Sense strand starting at position 2296 of SEQ ID NO: 586750
ggcuuuguuucuccagaau

SEQ ID NO: 741477 - RNA, 19 nt, Artificial Sequence
  Description of Artificial Sequence: Synthetic oligonucleotide
  Antisense strand to SEQ ID NO: 741476
auucuggagaaacaaagcc

SEQ ID NO: 741478 - RNA, 19 nt, Artificial Sequence
  Description of Artificial Sequence: Synthetic oligonucleotide
  Sense strand starting at position 2446 of SEQ ID NO: 586750
gggugaaauuaggcugcuu

SEQ ID NO: 741479 - RNA, 19 nt, Artificial Sequence
  Description of Artificial Sequence: Synthetic oligonucleotide
  Antisense strand to SEQ ID NO: 741478
aagcagccuaauuucaccc

SEQ ID NO: 741480 - RNA, 19 nt, Artificial Sequence
  Description of Artificial Sequence: Synthetic oligonucleotide
  Sense strand starting at position 2799 of SEQ ID NO: 586750
guaaccuugcagugaccaa

SEQ ID NO: 741481 - RNA, 19 nt, Artificial Sequence
  Description of Artificial Sequence: Synthetic oligonucleotide
  Antisense strand to SEQ ID NO: 741480
uuggucacugcaagguuac

SEQ ID NO: 741482 - RNA, 19 nt, Artificial Sequence
  Description of Artificial Sequence: Synthetic oligonucleotide
  Sense strand starting at position 2895 of SEQ ID NO: 586750
ggagcaccguuucuaaauu

SEQ ID NO: 741483 - RNA, 19 nt, Artificial Sequence
  Description of Artificial Sequence: Synthetic oligonucleotide
  Antisense strand to SEQ ID NO: 741482
aauuuagaaacggugcucc

SEQ ID NO: 741484 - RNA, 19 nt, Artificial Sequence
  Description of Artificial Sequence: Synthetic oligonucleotide
  Sense strand starting at position 3158 of SEQ ID NO: 586750
gaaccugagugcucagauc

SEQ ID NO: 741485 - RNA, 19 nt, Artificial Sequence
  Description of Artificial Sequence: Synthetic oligonucleotide
  Antisense strand to SEQ ID NO: 741484
gaucugagcacucagguuc

SEQ ID NO: 741486 - RNA, 19 nt, Artificial Sequence
  Description of Artificial Sequence: Synthetic oligonucleotide
  Sense strand starting at position 3263 of SEQ ID NO: 586750
gguccagucagaugagcau

SEQ ID NO: 741487 - RNA, 19 nt, Artificial Sequence
  Description of Artificial Sequence: Synthetic oligonucleotide
  Antisense strand to SEQ ID NO: 741486
augcucaucugacuggacc

SEQ ID NO: 741488 - RNA, 19 nt, Artificial Sequence
  Description of Artificial Sequence: Synthetic oligonucleotide
  Sense strand starting at position 3321 of SEQ ID NO: 586750
gucauuacccuaugcuuau

SEQ ID NO: 741489 - RNA, 19 nt, Artificial Sequence
  Description of Artificial Sequence: Synthetic oligonucleotide
  Antisense strand to SEQ ID NO: 741488
auaagcauaggguaaugac

SEQ ID NO: 741490 - RNA, 19 nt, Artificial Sequence
  Description of Artificial Sequence: Synthetic oligonucleotide
  Sense strand starting at position 3483 of SEQ ID NO: 586750
uugauugcucaguagcaau

SEQ ID NO: 741491 - RNA, 19 nt, Artificial Sequence
  Description of Artificial Sequence: Synthetic oligonucleotide
  Antisense strand to SEQ ID NO: 741490
auugcuacugagcaaucaa

SEQ ID NO: 741492 - RNA, 19 nt, Artificial Sequence
  Description of Artificial Sequence: Synthetic oligonucleotide
  Sense strand starting at position 3495 of SEQ ID NO: 586750
uagcaauugcagcaaggua

SEQ ID NO: 741493 - RNA, 19 nt, Artificial Sequence
  Description of Artificial Sequence: Synthetic oligonucleotide
  Antisense strand to SEQ ID NO: 741492
uaccuugcugcaauugcua

SEQ ID NO: 741494 - RNA, 19 nt, Artificial Sequence
  Description of Artificial Sequence: Synthetic oligonucleotide
  Sense strand starting at position 3524 of SEQ ID NO: 586750
agaaacuguucugacauuu

SEQ ID NO: 741495 - RNA, 19 nt, Artificial Sequence
  Description of Artificial Sequence: Synthetic oligonucleotide
  Antisense strand to SEQ ID NO: 741494
aaaugucagaacaguuucu

SEQ ID NO: 741496 - RNA, 19 nt, Artificial Sequence
  Description of Artificial Sequence: Synthetic oligonucleotide
  Sense strand starting at position 3549 of SEQ ID NO: 586750
gagggcuuucucugagaug

SEQ ID NO: 741497 - RNA, 19 nt, Artificial Sequence
  Description of Artificial Sequence: Synthetic oligonucleotide
  Antisense strand to SEQ ID NO: 741496
caucucagagaaagcccuc

SEQ ID NO: 741498 - RNA, 19 nt, Artificial Sequence
  Description of Artificial Sequence: Synthetic oligonucleotide
  Sense strand starting at position 3561 of SEQ ID NO: 586750
ugagaugaguaacaaagau

SEQ ID NO: 741499 - RNA, 19 nt, Artificial Sequence
  Description of Artificial Sequence: Synthetic oligonucleotide
  Antisense strand to SEQ ID NO: 741498
aucuuuguuacucaucuca

SEQ ID NO: 741500 - RNA, 19 nt, Artificial Sequence
  Description of Artificial Sequence: Synthetic oligonucleotide
  Sense strand starting at position 3838 of SEQ ID NO: 586750
uugccaguucuggauacaa

SEQ ID NO: 741501 - RNA, 19 nt, Artificial Sequence
  Description of Artificial Sequence: Synthetic oligonucleotide
  Antisense strand to SEQ ID NO: 741500
uuguauccagaacuggcaa

SEQ ID NO: 741502 - RNA, 19 nt, Artificial Sequence
  Description of Artificial Sequence: Synthetic oligonucleotide
  Sense strand starting at position 3854 of SEQ ID NO: 586750
caagcaugaggcugagaau

SEQ ID NO: 741503 - RNA, 19 nt, Artificial Sequence
  Description of Artificial Sequence: Synthetic oligonucleotide
  Antisense strand to SEQ ID NO: 741502
auucucagccucaugcuug

SEQ ID NO: 741504 - RNA, 19 nt, Artificial Sequence
  Description of Artificial Sequence: Synthetic oligonucleotide
  Sense strand starting at position 3857 of SEQ ID NO: 586750
gcaugaggcugagaauuua

SEQ ID NO: 741505 - RNA, 19 nt, Artificial Sequence
  Description of Artificial Sequence: Synthetic oligonucleotide
  Antisense strand to SEQ ID NO: 741504
uaaauucucagccucaugc

SEQ ID NO: 741506 - RNA, 19 nt, Artificial Sequence
  Description of Artificial Sequence: Synthetic oligonucleotide
  Sense strand starting at position 38 of SEQ ID NO: 586751
gguguuaccagguaaauga

SEQ ID NO: 741507 - RNA, 19 nt, Artificial Sequence
  Description of Artificial Sequence: Synthetic oligonucleotide
  Antisense strand to SEQ ID NO: 741506
ucauuuaccugguaacacc

SEQ ID NO: 741508 - RNA, 19 nt, Artificial Sequence
  Description of Artificial Sequence: Synthetic oligonucleotide
  Sense strand starting at position 45 of SEQ ID NO: 586751
ccagguaaaugaguuacca

SEQ ID NO: 741509 - RNA, 19 nt, Artificial Sequence
  Description of Artificial Sequence: Synthetic oligonucleotide
  Antisense strand to SEQ ID NO: 741508
ugguaacucauuuaccugg

SEQ ID NO: 741510 - RNA, 19 nt, Artificial Sequence
  Description of Artificial Sequence: Synthetic oligonucleotide
  Sense strand starting at position 115 of SEQ ID NO: 586751
gguuauauuaaggguuaaa

SEQ ID NO: 741511 - RNA, 19 nt, Artificial Sequence
  Description of Artificial Sequence: Synthetic oligonucleotide
  Antisense strand to SEQ ID NO: 741510
uuuaacccuuaauauaacc

SEQ ID NO: 741512 - RNA, 19 nt, Artificial Sequence
  Description of Artificial Sequence: Synthetic oligonucleotide
  Sense strand starting at position 252 of SEQ ID NO: 586751
ccuacuauggaaugguuaa

SEQ ID NO: 741513 - RNA, 19 nt, Artificial Sequence
  Description of Artificial Sequence: Synthetic oligonucleotide
  Antisense strand to SEQ ID NO: 741512
uuaaccauuccauaguagg

SEQ ID NO: 741514 - RNA, 19 nt, Artificial Sequence
  Description of Artificial Sequence: Synthetic oligonucleotide
  Sense strand starting at position 371 of SEQ ID NO: 586751
ugaauugguacguaaacuu

SEQ ID NO: 741515 - RNA, 19 nt, Artificial Sequence
  Description of Artificial Sequence: Synthetic oligonucleotide
  Antisense strand to SEQ ID NO: 741514
aaguuuacguaccaauuca

SEQ ID NO: 741516 - RNA, 19 nt, Artificial Sequence
  Description of Artificial Sequence: Synthetic oligonucleotide
  Sense strand starting at position 378 of SEQ ID NO: 586751
guacguaaacuugaaacuu

SEQ ID NO: 741517 - RNA, 19 nt, Artificial Sequence
  Description of Artificial Sequence: Synthetic oligonucleotide
  Antisense strand to SEQ ID NO: 741516
aaguuucaaguuuacguac

SEQ ID NO: 741518 - RNA, 19 nt, Artificial Sequence
  Description of Artificial Sequence: Synthetic oligonucleotide
  Sense strand starting at position 523 of SEQ ID NO: 586751
gaggaauagccuuaaguuc

SEQ ID NO: 741519 - RNA, 19 nt, Artificial Sequence
  Description of Artificial Sequence: Synthetic oligonucleotide
  Antisense strand to SEQ ID NO: 741518
gaacuuaaggcuauuccuc

SEQ ID NO: 741520 - RNA, 19 nt, Artificial Sequence
  Description of Artificial Sequence: Synthetic oligonucleotide
  Sense strand starting at position 617 of SEQ ID NO: 586751
uuggcuucugcugaggaaa

SEQ ID NO: 741521 - RNA, 19 nt, Artificial Sequence
  Description of Artificial Sequence: Synthetic oligonucleotide
  Antisense strand to SEQ ID NO: 741520
uuuccucagcagaagccaa

SEQ ID NO: 741522 - RNA, 19 nt, Artificial Sequence
  Description of Artificial Sequence: Synthetic oligonucleotide
  Sense strand starting at position 620 of SEQ ID NO: 586751
gcuucugcugaggaaagua

SEQ ID NO: 741523 - RNA, 19 nt, Artificial Sequence
  Description of Artificial Sequence: Synthetic oligonucleotide
  Antisense strand to SEQ ID NO: 741522
uacuuuccucagcagaagc

SEQ ID NO: 741524 - RNA, 19 nt, Artificial Sequence
  Description of Artificial Sequence: Synthetic oligonucleotide
  Sense strand starting at position 748 of SEQ ID NO: 586751
cuucuuggguuucuacaaa

SEQ ID NO: 741525 - RNA, 19 nt, Artificial Sequence
  Description of Artificial Sequence: Synthetic oligonucleotide
  Antisense strand to SEQ ID NO: 741524
uuuguagaaacccaagaag

SEQ ID NO: 741526 - RNA, 19 nt, Artificial Sequence
  Description of Artificial Sequence: Synthetic oligonucleotide
  Sense strand starting at position 772 of SEQ ID NO: 586751
uuaauacuuggcugaauag

SEQ ID NO: 741527 - RNA, 19 nt, Artificial Sequence
  Description of Artificial Sequence: Synthetic oligonucleotide
  Antisense strand to SEQ ID NO: 741526
cuauucagccaaguauuaa

SEQ ID NO: 741528 - RNA, 19 nt, Artificial Sequence
  Description of Artificial Sequence: Synthetic oligonucleotide
  Sense strand starting at position 773 of SEQ ID NO: 586751
uaauacuuggcugaauagu

SEQ ID NO: 741529 - RNA, 19 nt, Artificial Sequence
  Description of Artificial Sequence: Synthetic oligonucleotide
  Antisense strand to SEQ ID NO: 741528
acuauucagccaaguauua

SEQ ID NO: 741530 - RNA, 19 nt, Artificial Sequence
  Description of Artificial Sequence: Synthetic oligonucleotide
  Sense strand starting at position 1163 of SEQ ID NO: 586751
gacagucuuugaccuggga

SEQ ID NO: 741531 - RNA, 19 nt, Artificial Sequence
  Description of Artificial Sequence: Synthetic oligonucleotide
  Antisense strand to SEQ ID NO: 741530
ucccaggucaaagacuguc

SEQ ID NO: 741532 - RNA, 19 nt, Artificial Sequence
  Description of Artificial Sequence: Synthetic oligonucleotide
  Sense strand starting at position 1274 of SEQ ID NO: 586751
cacguuucuguugcuguaa

SEQ ID NO: 741533 - RNA, 19 nt, Artificial Sequence
  Description of Artificial Sequence: Synthetic oligonucleotide
  Antisense strand to SEQ ID NO: 741532
uuacagcaacagaaacgug

SEQ ID NO: 741534 - RNA, 19 nt, Artificial Sequence
  Description of Artificial Sequence: Synthetic oligonucleotide
  Sense strand starting at position 1320 of SEQ ID NO: 586751
ggauuucgcucccugacua

SEQ ID NO: 741535 - RNA, 19 nt, Artificial Sequence
  Description of Artificial Sequence: Synthetic oligonucleotide
  Antisense strand to SEQ ID NO: 741534
uagucagggagcgaaaucc

SEQ ID NO: 741536 - RNA, 19 nt, Artificial Sequence
  Description of Artificial Sequence: Synthetic oligonucleotide
  Sense strand starting at position 2187 of SEQ ID NO: 586751
uuucuuauuucuguguuga

SEQ ID NO: 741537 - RNA, 19 nt, Artificial Sequence
  Description of Artificial Sequence: Synthetic oligonucleotide
  Antisense strand to SEQ ID NO: 741536
ucaacacagaaauaagaaa

SEQ ID NO: 741538 - RNA, 19 nt, Artificial Sequence
  Description of Artificial Sequence: Synthetic oligonucleotide
  Sense strand starting at position 2189 of SEQ ID NO: 586751
ucuuauuucuguguugaau

SEQ ID NO: 741539 - RNA, 19 nt, Artificial Sequence
  Description of Artificial Sequence: Synthetic oligonucleotide
  Antisense strand to SEQ ID NO: 741538
auucaacacagaaauaaga

SEQ ID NO: 741540 - RNA, 19 nt, Artificial Sequence
  Description of Artificial Sequence: Synthetic oligonucleotide
  Sense strand starting at position 2305 of SEQ ID NO: 586751
auggguuucuuauuaacag

SEQ ID NO: 741541 - RNA, 19 nt, Artificial Sequence
  Description of Artificial Sequence: Synthetic oligonucleotide
  Antisense strand to SEQ ID NO: 741540
cuguuaauaagaaacccau

SEQ ID NO: 741542 - RNA, 19 nt, Artificial Sequence
  Description of Artificial Sequence: Synthetic oligonucleotide
  Sense strand starting at position 2316 of SEQ ID NO: 586751
auuaacagaucugugaguu

SEQ ID NO: 741543 - RNA, 19 nt, Artificial Sequence
  Description of Artificial Sequence: Synthetic oligonucleotide
  Antisense strand to SEQ ID NO: 741542
aacucacagaucuguuaau

SEQ ID NO: 741544 - RNA, 19 nt, Artificial Sequence
  Description of Artificial Sequence: Synthetic oligonucleotide
  Sense strand starting at position 2317 of SEQ ID NO: 586751
uuaacagaucugugaguua

SEQ ID NO: 741545 - RNA, 19 nt, Artificial Sequence
  Description of Artificial Sequence: Synthetic oligonucleotide
  Antisense strand to SEQ ID NO: 741544
uaacucacagaucuguuaa

SEQ ID NO: 741546 - RNA, 19 nt, Artificial Sequence
  Description of Artificial Sequence: Synthetic oligonucleotide
  Sense strand starting at position 2320 of SEQ ID NO: 586751
acagaucugugaguuaaac

SEQ ID NO: 741547 - RNA, 19 nt, Artificial Sequence
  Description of Artificial Sequence: Synthetic oligonucleotide
  Antisense strand to SEQ ID NO: 741546
guuuaacucacagaucugu

SEQ ID NO: 741548 - RNA, 19 nt, Artificial Sequence
  Description of Artificial Sequence: Synthetic oligonucleotide
  Sense strand starting at position 2395 of SEQ ID NO: 586751
aacguauauuaaguggaaa

SEQ ID NO: 741549 - RNA, 19 nt, Artificial Sequence
  Description of Artificial Sequence: Synthetic oligonucleotide
  Antisense strand to SEQ ID NO: 741548
uuuccacuuaauauacguu

SEQ ID NO: 741550 - RNA, 19 nt, Artificial Sequence
  Description of Artificial Sequence: Synthetic oligonucleotide
  Sense strand starting at position 2396 of SEQ ID NO: 586751
acguauauuaaguggaaag

SEQ ID NO: 741551 - RNA, 19 nt, Artificial Sequence
  Description of Artificial Sequence: Synthetic oligonucleotide
  Antisense strand to SEQ ID NO: 741550
cuuuccacuuaauauacgu

SEQ ID NO: 741552 - RNA, 19 nt, Artificial Sequence
  Description of Artificial Sequence: Synthetic oligonucleotide
  Sense strand starting at position 2397 of SEQ ID NO: 586751
cguauauuaaguggaaaga

SEQ ID NO: 741553 - RNA, 19 nt, Artificial Sequence
  Description of Artificial Sequence: Synthetic oligonucleotide
  Antisense strand to SEQ ID NO: 741552
ucuuuccacuuaauauacg

SEQ ID NO: 741554 - RNA, 19 nt, Artificial Sequence
  Description of Artificial Sequence: Synthetic oligonucleotide
  Sense strand starting at position 2437 of SEQ ID NO: 586751
ccguaugccaucguuguga

SEQ ID NO: 741555 - RNA, 19 nt, Artificial Sequence
  Description of Artificial Sequence: Synthetic oligonucleotide
  Antisense strand to SEQ ID NO: 741554
ucacaacgauggcauacgg

SEQ ID NO: 741556 - RNA, 19 nt, Artificial Sequence
  Description of Artificial Sequence: Synthetic oligonucleotide
  Sense strand starting at position 2688 of SEQ ID NO: 586751
gaguaagauuagguuggau

SEQ ID NO: 741557 - RNA, 19 nt, Artificial Sequence
  Description of Artificial Sequence: Synthetic oligonucleotide
  Antisense strand to SEQ ID NO: 741556
auccaaccuaaucuuacuc

SEQ ID NO: 741558 - RNA, 19 nt, Artificial Sequence
  Description of Artificial Sequence: Synthetic oligonucleotide
  Sense strand starting at position 2690 of SEQ ID NO: 586751
guaagauuagguuggauac

SEQ ID NO: 741559 - RNA, 19 nt, Artificial Sequence
  Description of Artificial Sequence: Synthetic oligonucleotide
  Antisense strand to SEQ ID NO: 741558
guauccaaccuaaucuuac

SEQ ID NO: 741560 - RNA, 19 nt, Artificial Sequence
  Description of Artificial Sequence: Synthetic oligonucleotide
  Sense strand starting at position 2821 of SEQ ID NO: 586751
guguauaagcuuuaaugaa

SEQ ID NO: 741561 - RNA, 19 nt, Artificial Sequence
  Description of Artificial Sequence: Synthetic oligonucleotide
  Antisense strand to SEQ ID NO: 741560
uucauuaaagcuuauacac

SEQ ID NO: 741562 - RNA, 19 nt, Artificial Sequence
  Description of Artificial Sequence: Synthetic oligonucleotide
  Sense strand starting at position 2858 of SEQ ID NO: 586751
ucagguaaauugcccuaga

SEQ ID NO: 741563 - RNA, 19 nt, Artificial Sequence
  Description of Artificial Sequence: Synthetic oligonucleotide
  Antisense strand to SEQ ID NO: 741562
ucuagggcaauuuaccuga

SEQ ID NO: 741564 - RNA, 19 nt, Artificial Sequence
  Description of Artificial Sequence: Synthetic oligonucleotide
  Sense strand starting at position 2859 of SEQ ID NO: 586751
cagguaaauugcccuagaa

SEQ ID NO: 741565 - RNA, 19 nt, Artificial Sequence
  Description of Artificial Sequence: Synthetic oligonucleotide
  Antisense strand to SEQ ID NO: 741564
uucuagggcaauuuaccug

SEQ ID NO: 741566 - RNA, 19 nt, Artificial Sequence
  Description of Artificial Sequence: Synthetic oligonucleotide
  Sense strand starting at position 2957 of SEQ ID NO: 586751
auggguuaugcuuaucaau

SEQ ID NO: 741567 - RNA, 19 nt, Artificial Sequence
  Description of Artificial Sequence: Synthetic oligonucleotide
  Antisense strand to SEQ ID NO: 741566
auugauaagcauaacccau

SEQ ID NO: 741568 - RNA, 19 nt, Artificial Sequence
  Description of Artificial Sequence: Synthetic oligonucleotide
  Sense strand starting at position 3138 of SEQ ID NO: 586751
ugcaaaucucuuuaaugag

SEQ ID NO: 741569 - RNA, 19 nt, Artificial Sequence
  Description of Artificial Sequence: Synthetic oligonucleotide
  Antisense strand to SEQ ID NO: 741568
cucauuaaagagauuugca

SEQ ID NO: 741570 - RNA, 19 nt, Artificial Sequence
  Description of Artificial Sequence: Synthetic oligonucleotide
  Sense strand starting at position 3147 of SEQ ID NO: 586751
cuuuaaugagccuacuaga

SEQ ID NO: 741571 - RNA, 19 nt, Artificial Sequence
  Description of Artificial Sequence: Synthetic oligonucleotide
  Antisense strand to SEQ ID NO: 741570
ucuaguaggcucauuaaag

SEQ ID NO: 741572 - RNA, 19 nt, Artificial Sequence
  Description of Artificial Sequence: Synthetic oligonucleotide
  Sense strand starting at position 3171 of SEQ ID NO: 586751
gcaagauuuggccggcaca

SEQ ID NO: 741573 - RNA, 19 nt, Artificial Sequence
  Description of Artificial Sequence: Synthetic oligonucleotide
  Antisense strand to SEQ ID NO: 741572
ugugccggccaaaucuugc

SEQ ID NO: 741574 - RNA, 19 nt, Artificial Sequence
  Description of Artificial Sequence: Synthetic oligonucleotide
  Sense strand starting at position 3599 of SEQ ID NO: 586751
uguggcuauuugucuuuaa

SEQ ID NO: 741575 - RNA, 19 nt, Artificial Sequence
  Description of Artificial Sequence: Synthetic oligonucleotide
  Antisense strand to SEQ ID NO: 741574
uuaaagacaaauagccaca

SEQ ID NO: 741576 - RNA, 19 nt, Artificial Sequence
  Description of Artificial Sequence: Synthetic oligonucleotide
  Sense strand starting at position 3600 of SEQ ID NO: 586751
guggcuauuugucuuuaaa

SEQ ID NO: 741577 - RNA, 19 nt, Artificial Sequence
  Description of Artificial Sequence: Synthetic oligonucleotide
  Antisense strand to SEQ ID NO: 741576
uuuaaagacaaauagccac

SEQ ID NO: 741578 - RNA, 19 nt, Artificial Sequence
  Description of Artificial Sequence: Synthetic oligonucleotide
  Sense strand starting at position 3699 of SEQ ID NO: 586751
cuggaauguaacgauguga

SEQ ID NO: 741579 - RNA, 19 nt, Artificial Sequence
  Description of Artificial Sequence: Synthetic oligonucleotide
  Antisense strand to SEQ ID NO: 741578
ucacaucguuacauuccag

SEQ ID NO: 741580 - RNA, 19 nt, Artificial Sequence
  Description of Artificial Sequence: Synthetic oligonucleotide
  Sense strand starting at position 3707 of SEQ ID NO: 586751
uaacgaugugaucauaacu

SEQ ID NO: 741581 - RNA, 19 nt, Artificial Sequence
  Description of Artificial Sequence: Synthetic oligonucleotide
  Antisense strand to SEQ ID NO: 741580
aguuaugaucacaucguua

SEQ ID NO: 741582 - RNA, 19 nt, Artificial Sequence
  Description of Artificial Sequence: Synthetic oligonucleotide
  Sense strand starting at position 3975 of SEQ ID NO: 586751
aaagguuacuugccauaug

SEQ ID NO: 741583 - RNA, 19 nt, Artificial Sequence
  Description of Artificial Sequence: Synthetic oligonucleotide
  Antisense strand to SEQ ID NO: 741582
cauauggcaaguaaccuuu

SEQ ID NO: 741584 - RNA, 19 nt, Artificial Sequence
  Description of Artificial Sequence: Synthetic oligonucleotide
  Sense strand starting at position 3978 of SEQ ID NO: 586751
gguuacuugccauauggaa

SEQ ID NO: 741585 - RNA, 19 nt, Artificial Sequence
  Description of Artificial Sequence: Synthetic oligonucleotide
  Antisense strand to SEQ ID NO: 741584
uuccauauggcaaguaacc

SEQ ID NO: 741586 - RNA, 19 nt, Artificial Sequence
  Description of Artificial Sequence: Synthetic oligonucleotide
  Sense strand starting at position 41 of SEQ ID NO: 586752
gugccugauuggcaccaaa

SEQ ID NO: 741587 - RNA, 19 nt, Artificial Sequence
  Description of Artificial Sequence: Synthetic oligonucleotide
  Antisense strand to SEQ ID NO: 741586
uuuggugccaaucaggcac

SEQ ID NO: 741588 - RNA, 19 nt, Artificial Sequence
  Description of Artificial Sequence: Synthetic oligonucleotide
  Sense strand starting at position 89 of SEQ ID NO: 586752
aggucaggccuuuggauua

SEQ ID NO: 741589 - RNA, 19 nt, Artificial Sequence
  Description of Artificial Sequence: Synthetic oligonucleotide
  Antisense strand to SEQ ID NO: 741588
uaauccaaaggccugaccu

SEQ ID NO: 741590 - RNA, 19 nt, Artificial Sequence
  Description of Artificial Sequence: Synthetic oligonucleotide
  Sense strand starting at position 155 of SEQ ID NO: 586752
cuuccagauucccaggaaa

SEQ ID NO: 741591 - RNA, 19 nt, Artificial Sequence
  Description of Artificial Sequence: Synthetic oligonucleotide
  Antisense strand to SEQ ID NO: 741590
uuuccugggaaucuggaag

SEQ ID NO: 741592 - RNA, 19 nt, Artificial Sequence
  Description of Artificial Sequence: Synthetic oligonucleotide
  Sense strand starting at position 166 of SEQ ID NO: 586752
ccaggaaauguguggcugu

SEQ ID NO: 741593 - RNA, 19 nt, Artificial Sequence
  Description of Artificial Sequence: Synthetic oligonucleotide
  Antisense strand to SEQ ID NO: 741592
acagccacacauuuccugg

SEQ ID NO: 741594 - RNA, 19 nt, Artificial Sequence
  Description of Artificial Sequence: Synthetic oligonucleotide
  Sense strand starting at position 169 of SEQ ID NO: 586752
ggaaauguguggcuguaga

SEQ ID NO: 741595 - RNA, 19 nt, Artificial Sequence
  Description of Artificial Sequence: Synthetic oligonucleotide
  Antisense strand to SEQ ID NO: 741594
ucuacagccacacauuucc

SEQ ID NO: 741596 - RNA, 19 nt, Artificial Sequence
  Description of Artificial Sequence: Synthetic oligonucleotide
  Sense strand starting at position 222 of SEQ ID NO: 586752
ccuccugugauaggaguuu

SEQ ID NO: 741597 - RNA, 19 nt, Artificial Sequence
  Description of Artificial Sequence: Synthetic oligonucleotide
  Antisense strand to SEQ ID NO: 741596
aaacuccuaucacaggagg

SEQ ID NO: 741598 - RNA, 19 nt, Artificial Sequence
  Description of Artificial Sequence: Synthetic oligonucleotide
  Sense strand starting at position 315 of SEQ ID NO: 586752
gguccuuccugcucccaua

SEQ ID NO: 741599 - RNA, 19 nt, Artificial Sequence
  Description of Artificial Sequence: Synthetic oligonucleotide
  Antisense strand to SEQ ID NO: 741598
uaugggagcaggaaggacc

SEQ ID NO: 741600 - RNA, 19 nt, Artificial Sequence
  Description of Artificial Sequence: Synthetic oligonucleotide
  Sense strand starting at position 784 of SEQ ID NO: 586752
cagugauccuucuuggaag

SEQ ID NO: 741601 - RNA, 19 nt, Artificial Sequence
  Description of Artificial Sequence: Synthetic oligonucleotide
  Antisense strand to SEQ ID NO: 741600
cuuccaagaaggaucacug

SEQ ID NO: 741602 - RNA, 19 nt, Artificial Sequence
  Description of Artificial Sequence: Synthetic oligonucleotide
  Sense strand starting at position 786 of SEQ ID NO: 586752
gugauccuucuuggaaguu

SEQ ID NO: 741603 - RNA, 19 nt, Artificial Sequence
  Description of Artificial Sequence: Synthetic oligonucleotide
  Antisense strand to SEQ ID NO: 741602
aacuuccaagaaggaucac

SEQ ID NO: 741604 - RNA, 19 nt, Artificial Sequence
  Description of Artificial Sequence: Synthetic oligonucleotide
  Sense strand starting at position 801 of SEQ ID NO: 586752
aguuguggugucugagaaa

SEQ ID NO: 741605 - RNA, 19 nt, Artificial Sequence
  Description of Artificial Sequence: Synthetic oligonucleotide
  Antisense strand to SEQ ID NO: 741604
uuucucagacaccacaacu

SEQ ID NO: 741606 - RNA, 19 nt, Artificial Sequence
  Description of Artificial Sequence: Synthetic oligonucleotide
  Sense strand starting at position 1610 of SEQ ID NO: 586752
gcaggucagacaggguaaa

SEQ ID NO: 741607 - RNA, 19 nt, Artificial Sequence
  Description of Artificial Sequence: Synthetic oligonucleotide
  Antisense strand to SEQ ID NO: 741606
uuuacccugucugaccugc

SEQ ID NO: 741608 - RNA, 19 nt, Artificial Sequence
  Description of Artificial Sequence: Synthetic oligonucleotide
  Sense strand starting at position 1611 of SEQ ID NO: 586752
caggucagacaggguaaau

SEQ ID NO: 741609 - RNA, 19 nt, Artificial Sequence
  Description of Artificial Sequence: Synthetic oligonucleotide
  Antisense strand to SEQ ID NO: 741608
auuuacccugucugaccug

SEQ ID NO: 741610 - RNA, 19 nt, Artificial Sequence
  Description of Artificial Sequence: Synthetic oligonucleotide
  Sense strand starting at position 1670 of SEQ ID NO: 586752
ucccgacacugaucuguuu

SEQ ID NO: 741611 - RNA, 19 nt, Artificial Sequence
  Description of Artificial Sequence: Synthetic oligonucleotide
  Antisense strand to SEQ ID NO: 741610
aaacagaucagugucggga

SEQ ID NO: 741612 - RNA, 19 nt, Artificial Sequence
  Description of Artificial Sequence: Synthetic oligonucleotide
  Sense strand starting at position 1679 of SEQ ID NO: 586752
ugaucuguuucugccagaa

SEQ ID NO: 741613 - RNA, 19 nt, Artificial Sequence
  Description of Artificial Sequence: Synthetic oligonucleotide
  Antisense strand to SEQ ID NO: 741612
uucuggcagaaacagauca

SEQ ID NO: 741614 - RNA, 19 nt, Artificial Sequence
  Description of Artificial Sequence: Synthetic oligonucleotide
  Sense strand starting at position 1683 of SEQ ID NO: 586752
cuguuucugccagaagcca

SEQ ID NO: 741615 - RNA, 19 nt, Artificial Sequence
  Description of Artificial Sequence: Synthetic oligonucleotide
  Antisense strand to SEQ ID NO: 741614
uggcuucuggcagaaacag

SEQ ID NO: 741616 - RNA, 19 nt, Artificial Sequence
  Description of Artificial Sequence: Synthetic oligonucleotide
  Sense strand starting at position 1723 of SEQ ID NO: 586752
gugauuuacuccuggucuc

SEQ ID NO: 741617 - RNA, 19 nt, Artificial Sequence
  Description of Artificial Sequence: Synthetic oligonucleotide
  Antisense strand to SEQ ID NO: 741616
gagaccaggaguaaaucac

SEQ ID NO: 741618 - RNA, 19 nt, Artificial Sequence
  Description of Artificial Sequence: Synthetic oligonucleotide
  Sense strand starting at position 2526 of SEQ ID NO: 586752
cacgcuuugguguugcaga

SEQ ID NO: 741619 - RNA, 19 nt, Artificial Sequence
  Description of Artificial Sequence: Synthetic oligonucleotide
  Antisense strand to SEQ ID NO: 741618
ucugcaacaccaaagcgug

SEQ ID NO: 741620 - RNA, 19 nt, Artificial Sequence
  Description of Artificial Sequence: Synthetic oligonucleotide
  Sense strand starting at position 2531 of SEQ ID NO: 586752
uuugguguugcagaagcua

SEQ ID NO: 741621 - RNA, 19 nt, Artificial Sequence
  Description of Artificial Sequence: Synthetic oligonucleotide
  Antisense strand to SEQ ID NO: 741620
uagcuucugcaacaccaaa

SEQ ID NO: 741622 - RNA, 19 nt, Artificial Sequence
  Description of Artificial Sequence: Synthetic oligonucleotide
  Sense strand starting at position 2568 of SEQ ID NO: 586752
ccaugagggugguaacuuu

SEQ ID NO: 741623 - RNA, 19 nt, Artificial Sequence
  Description of Artificial Sequence: Synthetic oligonucleotide
  Antisense strand to SEQ ID NO: 741622
aaaguuaccacccucaugg

SEQ ID NO: 741624 - RNA, 19 nt, Artificial Sequence
  Description of Artificial Sequence: Synthetic oligonucleotide
  Sense strand starting at position 2712 of SEQ ID NO: 586752
uaggcaauguagugagaug

SEQ ID NO: 741625 - RNA, 19 nt, Artificial Sequence
  Description of Artificial Sequence: Synthetic oligonucleotide
  Antisense strand to SEQ ID NO: 741624
caucucacuacauugccua

SEQ ID NO: 741626 - RNA, 19 nt, Artificial Sequence
  Description of Artificial Sequence: Synthetic oligonucleotide
  Sense strand starting at position 2861 of SEQ ID NO: 586752
gcagcaaucagcugugauu

SEQ ID NO: 741627 - RNA, 19 nt, Artificial Sequence
  Description of Artificial Sequence: Synthetic oligonucleotide
  Antisense strand to SEQ ID NO: 741626
aaucacagcugauugcugc

SEQ ID NO: 741628 - RNA, 19 nt, Artificial Sequence
  Description of Artificial Sequence: Synthetic oligonucleotide
  Sense strand starting at position 2863 of SEQ ID NO: 586752
agcaaucagcugugauugu

SEQ ID NO: 741629 - RNA, 19 nt, Artificial Sequence
  Description of Artificial Sequence: Synthetic oligonucleotide
  Antisense strand to SEQ ID NO: 741628
acaaucacagcugauugcu

SEQ ID NO: 741630 - RNA, 19 nt, Artificial Sequence
  Description of Artificial Sequence: Synthetic oligonucleotide
  Sense strand starting at position 2976 of SEQ ID NO: 586752
ggcugaucgccagagguca

SEQ ID NO: 741631 - RNA, 19 nt, Artificial Sequence
  Description of Artificial Sequence: Synthetic oligonucleotide
  Antisense strand to SEQ ID NO: 741630
ugaccucuggcgaucagcc

SEQ ID NO: 741632 - RNA, 19 nt, Artificial Sequence
  Description of Artificial Sequence: Synthetic oligonucleotide
  Sense strand starting at position 3173 of SEQ ID NO: 586752
cagccuggguaauaguaaa

SEQ ID NO: 741633 - RNA, 19 nt, Artificial Sequence
  Description of Artificial Sequence: Synthetic oligonucleotide
  Antisense strand to SEQ ID NO: 741632
uuuacuauuacccaggcug

SEQ ID NO: 741634 - RNA, 19 nt, Artificial Sequence
  Description of Artificial Sequence: Synthetic oligonucleotide
  Sense strand starting at position 3521 of SEQ ID NO: 586752
cauagaacuuccuugguga

SEQ ID NO: 741635 - RNA, 19 nt, Artificial Sequence
  Description of Artificial Sequence: Synthetic oligonucleotide
  Antisense strand to SEQ ID NO: 741634
ucaccaaggaaguucuaug

SEQ ID NO: 741636 - RNA, 19 nt, Artificial Sequence
  Description of Artificial Sequence: Synthetic oligonucleotide
  Sense strand starting at position 3536 of SEQ ID NO: 586752
gugagguuguugucagagu

SEQ ID NO: 741637 - RNA, 19 nt, Artificial Sequence
  Description of Artificial Sequence: Synthetic oligonucleotide
  Antisense strand to SEQ ID NO: 741636
acucugacaacaaccucac

SEQ ID NO: 741638 - RNA, 19 nt, Artificial Sequence
  Description of Artificial Sequence: Synthetic oligonucleotide
  Sense strand starting at position 3590 of SEQ ID NO: 586752
uagcuauugugggcuguga

SEQ ID NO: 741639 - RNA, 19 nt, Artificial Sequence
  Description of Artificial Sequence: Synthetic oligonucleotide
  Antisense strand to SEQ ID NO: 741638
ucacagcccacaauagcua

SEQ ID NO: 741640 - RNA, 19 nt, Artificial Sequence
  Description of Artificial Sequence: Synthetic oligonucleotide
  Sense strand starting at position 3592 of SEQ ID NO: 586752
gcuauugugggcugugaau

SEQ ID NO: 741641 - RNA, 19 nt, Artificial Sequence
  Description of Artificial Sequence: Synthetic oligonucleotide
  Antisense strand to SEQ ID NO: 741640
auucacagcccacaauagc

SEQ ID NO: 741642 - RNA, 19 nt, Artificial Sequence
  Description of Artificial Sequence: Synthetic oligonucleotide
  Sense strand starting at position 3594 of SEQ ID NO: 586752
uauugugggcugugaauaa

SEQ ID NO: 741643 - RNA, 19 nt, Artificial Sequence
  Description of Artificial Sequence: Synthetic oligonucleotide
  Antisense strand to SEQ ID NO: 741642
uuauucacagcccacaaua

SEQ ID NO: 741644 - RNA, 19 nt, Artificial Sequence
  Description of Artificial Sequence: Synthetic oligonucleotide
  Sense strand starting at position 3627 of SEQ ID NO: 586752
uguaacaauugucuagaga

SEQ ID NO: 741645 - RNA, 19 nt, Artificial Sequence
  Description of Artificial Sequence: Synthetic oligonucleotide
  Antisense strand to SEQ ID NO: 741644
ucucuagacaauuguuaca

SEQ ID NO: 741646 - RNA, 19 nt, Artificial Sequence
  Description of Artificial Sequence: Synthetic oligonucleotide
  Sense strand starting at position 3638 of SEQ ID NO: 586752
ucuagagaaucuuggaaau

SEQ ID NO: 741647 - RNA, 19 nt, Artificial Sequence
  Description of Artificial Sequence: Synthetic oligonucleotide
  Antisense strand to SEQ ID NO: 741646
auuuccaagauucucuaga

SEQ ID NO: 741648 - RNA, 19 nt, Artificial Sequence
  Description of Artificial Sequence: Synthetic oligonucleotide
  Sense strand starting at position 3640 of SEQ ID NO: 586752
uagagaaucuuggaaauug

SEQ ID NO: 741649 - RNA, 19 nt, Artificial Sequence
  Description of Artificial Sequence: Synthetic oligonucleotide
  Antisense strand to SEQ ID NO: 741648
caauuuccaagauucucua

SEQ ID NO: 741650 - RNA, 19 nt, Artificial Sequence
  Description of Artificial Sequence: Synthetic oligonucleotide
  Sense strand starting at position 3696 of SEQ ID NO: 586752
uuaagacauguaggugaga

SEQ ID NO: 741651 - RNA, 19 nt, Artificial Sequence
  Description of Artificial Sequence: Synthetic oligonucleotide
  Antisense strand to SEQ ID NO: 741650
ucucaccuacaugucuuaa

SEQ ID NO: 741652 - RNA, 19 nt, Artificial Sequence
  Description of Artificial Sequence: Synthetic oligonucleotide
  Sense strand starting at position 3701 of SEQ ID NO: 586752
acauguaggugagaggauu

SEQ ID NO: 741653 - RNA, 19 nt, Artificial Sequence
  Description of Artificial Sequence: Synthetic oligonucleotide
  Antisense strand to SEQ ID NO: 741652
aauccucucaccuacaugu

SEQ ID NO: 741654 - RNA, 19 nt, Artificial Sequence
  Description of Artificial Sequence: Synthetic oligonucleotide
  Sense strand starting at position 3734 of SEQ ID NO: 586752
guucgaaucugcguugaac

SEQ ID NO: 741655 - RNA, 19 nt, Artificial Sequence
  Description of Artificial Sequence: Synthetic oligonucleotide
  Antisense strand to SEQ ID NO: 741654
guucaacgcagauucgaac

SEQ ID NO: 741656 - RNA, 19 nt, Artificial Sequence
  Description of Artificial Sequence: Synthetic oligonucleotide
  Sense strand starting at position 3856 of SEQ ID NO: 586752
ugucaaagcccuggaacua

SEQ ID NO: 741657 - RNA, 19 nt, Artificial Sequence
  Description of Artificial Sequence: Synthetic oligonucleotide
  Antisense strand to SEQ ID NO: 741656
uaguuccagggcuuugaca

SEQ ID NO: 741658 - RNA, 19 nt, Artificial Sequence
  Description of Artificial Sequence: Synthetic oligonucleotide
  Sense strand starting at position 3883 of SEQ ID NO: 586752
aggcaaggaucuguccuua

SEQ ID NO: 741659 - RNA, 19 nt, Artificial Sequence
  Description of Artificial Sequence: Synthetic oligonucleotide
  Antisense strand to SEQ ID NO: 741658
uaaggacagauccuugccu

SEQ ID NO: 741660 - RNA, 19 nt, Artificial Sequence
  Description of Artificial Sequence: Synthetic oligonucleotide
  Sense strand starting at position 3887 of SEQ ID NO: 586752
aaggaucuguccuuaugag

SEQ ID NO: 741661 - RNA, 19 nt, Artificial Sequence
  Description of Artificial Sequence: Synthetic oligonucleotide
  Antisense strand to SEQ ID NO: 741660
cucauaaggacagauccuu

SEQ ID NO: 741662 - RNA, 19 nt, Artificial Sequence
  Description of Artificial Sequence: Synthetic oligonucleotide
  Sense strand starting at position 3908 of SEQ ID NO: 586752
uuucuugcagccugucaga

SEQ ID NO: 741663 - RNA, 19 nt, Artificial Sequence
  Description of Artificial Sequence: Synthetic oligonucleotide
  Antisense strand to SEQ ID NO: 741662
ucugacaggcugcaagaaa

SEQ ID NO: 741664 - RNA, 19 nt, Artificial Sequence
  Description of Artificial Sequence: Synthetic oligonucleotide
  Sense strand starting at position 3921 of SEQ ID NO: 586752
gucagagcccaaugaacau

SEQ ID NO: 741665 - RNA, 19 nt, Artificial Sequence
  Description of Artificial Sequence: Synthetic oligonucleotide
  Antisense strand to SEQ ID NO: 741664
auguucauugggcucugac

SEQ ID NO: 741666 - RNA, 19 nt, Artificial Sequence
  Description of Artificial Sequence: Synthetic oligonucleotide
  Sense strand starting at position 80 of SEQ ID NO: 586753
gugccugauuggcaccaaa

SEQ ID NO: 741667 - RNA, 19 nt, Artificial Sequence
  Description of Artificial Sequence: Synthetic oligonucleotide
  Antisense strand to SEQ ID NO: 741666
uuuggugccaaucaggcac

SEQ ID NO: 741668 - RNA, 19 nt, Artificial Sequence
  Description of Artificial Sequence: Synthetic oligonucleotide
  Sense strand starting at position 128 of SEQ ID NO: 586753
aggucaggccuuuggauua

SEQ ID NO: 741669 - RNA, 19 nt, Artificial Sequence
  Description of Artificial Sequence: Synthetic oligonucleotide
  Antisense strand to SEQ ID NO: 741668
uaauccaaaggccugaccu

SEQ ID NO: 741670 - RNA, 19 nt, Artificial Sequence
  Description of Artificial Sequence: Synthetic oligonucleotide
  Sense strand starting at position 194 of SEQ ID NO: 586753
cuuccagauucccaggaaa

SEQ ID NO: 741671 - RNA, 19 nt, Artificial Sequence
  Description of Artificial Sequence: Synthetic oligonucleotide
  Antisense strand to SEQ ID NO: 741670
uuuccugggaaucuggaag

SEQ ID NO: 741672 - RNA, 19 nt, Artificial Sequence
  Description of Artificial Sequence: Synthetic oligonucleotide
  Sense strand starting at position 205 of SEQ ID NO: 586753
ccaggaaauguguggcugu

SEQ ID NO: 741673 - RNA, 19 nt, Artificial Sequence
  Description of Artificial Sequence: Synthetic oligonucleotide
  Antisense strand to SEQ ID NO: 741672
acagccacacauuuccugg

SEQ ID NO: 741674 - RNA, 19 nt, Artificial Sequence
  Description of Artificial Sequence: Synthetic oligonucleotide
  Sense strand starting at position 208 of SEQ ID NO: 586753
ggaaauguguggcuguaga

SEQ ID NO: 741675 - RNA, 19 nt, Artificial Sequence
  Description of Artificial Sequence: Synthetic oligonucleotide
  Antisense strand to SEQ ID NO: 741674
ucuacagccacacauuucc

SEQ ID NO: 741676 - RNA, 19 nt, Artificial Sequence
  Description of Artificial Sequence: Synthetic oligonucleotide
  Sense strand starting at position 261 of SEQ ID NO: 586753
ccuccugugauaggaguuu

SEQ ID NO: 741677 - RNA, 19 nt, Artificial Sequence
  Description of Artificial Sequence: Synthetic oligonucleotide
  Antisense strand to SEQ ID NO: 741676
aaacuccuaucacaggagg

SEQ ID NO: 741678 - RNA, 19 nt, Artificial Sequence
  Description of Artificial Sequence: Synthetic oligonucleotide
  Sense strand starting at position 354 of SEQ ID NO: 586753
gguccuuccugcucccaua

SEQ ID NO: 741679 - RNA, 19 nt, Artificial Sequence
  Description of Artificial Sequence: Synthetic oligonucleotide
  Antisense strand to SEQ ID NO: 741678
uaugggagcaggaaggacc

SEQ ID NO: 741680 - RNA, 19 nt, Artificial Sequence
  Description of Artificial Sequence: Synthetic oligonucleotide
  Sense strand starting at position 823 of SEQ ID NO: 586753
cagugauccuucuuggaag

SEQ ID NO: 741681 - RNA, 19 nt, Artificial Sequence
  Description of Artificial Sequence: Synthetic oligonucleotide
  Antisense strand to SEQ ID NO: 741680
cuuccaagaaggaucacug

SEQ ID NO: 741682 - RNA, 19 nt, Artificial Sequence
  Description of Artificial Sequence: Synthetic oligonucleotide
  Sense strand starting at position 825 of SEQ ID NO: 586753
gugauccuucuuggaaguu

SEQ ID NO: 741683 - RNA, 19 nt, Artificial Sequence
  Description of Artificial Sequence: Synthetic oligonucleotide
  Antisense strand to SEQ ID NO: 741682
aacuuccaagaaggaucac

SEQ ID NO: 741684 - RNA, 19 nt, Artificial Sequence
  Description of Artificial Sequence: Synthetic oligonucleotide
  Sense strand starting at position 840 of SEQ ID NO: 586753
aguuguggugucugagaaa

SEQ ID NO: 741685 - RNA, 19 nt, Artificial Sequence
  Description of Artificial Sequence: Synthetic oligonucleotide
  Antisense strand to SEQ ID NO: 741684
uuucucagacaccacaacu

SEQ ID NO: 741686 - RNA, 19 nt, Artificial Sequence
  Description of Artificial Sequence: Synthetic oligonucleotide
  Sense strand starting at position 1649 of SEQ ID NO: 586753
gcaggucagacaggguaaa

SEQ ID NO: 741687 - RNA, 19 nt, Artificial Sequence
  Description of Artificial Sequence: Synthetic oligonucleotide
  Antisense strand to SEQ ID NO: 741686
uuuacccugucugaccugc

SEQ ID NO: 741688 - RNA, 19 nt, Artificial Sequence
  Description of Artificial Sequence: Synthetic oligonucleotide
  Sense strand starting at position 1650 of SEQ ID NO: 586753
caggucagacaggguaaau

SEQ ID NO: 741689 - RNA, 19 nt, Artificial Sequence
  Description of Artificial Sequence: Synthetic oligonucleotide
  Antisense strand to SEQ ID NO: 741688
auuuacccugucugaccug

SEQ ID NO: 741690 - RNA, 19 nt, Artificial Sequence
  Description of Artificial Sequence: Synthetic oligonucleotide
  Sense strand starting at position 1709 of SEQ ID NO: 586753
ucccgacacugaucuguuu

SEQ ID NO: 741691 - RNA, 19 nt, Artificial Sequence
  Description of Artificial Sequence: Synthetic oligonucleotide
  Antisense strand to SEQ ID NO: 741690
aaacagaucagugucggga

SEQ ID NO: 741692 - RNA, 19 nt, Artificial Sequence
  Description of Artificial Sequence: Synthetic oligonucleotide
  Sense strand starting at position 1718 of SEQ ID NO: 586753
ugaucuguuucugccagaa

SEQ ID NO: 741693 - RNA, 19 nt, Artificial Sequence
  Description of Artificial Sequence: Synthetic oligonucleotide
  Antisense strand to SEQ ID NO: 741692
uucuggcagaaacagauca

SEQ ID NO: 741694 - RNA, 19 nt, Artificial Sequence
  Description of Artificial Sequence: Synthetic oligonucleotide
  Sense strand starting at position 1722 of SEQ ID NO: 586753
cuguuucugccagaagcca

SEQ ID NO: 741695 - RNA, 19 nt, Artificial Sequence
  Description of Artificial Sequence: Synthetic oligonucleotide
  Antisense strand to SEQ ID NO: 741694
uggcuucuggcagaaacag

SEQ ID NO: 741696 - RNA, 19 nt, Artificial Sequence
  Description of Artificial Sequence: Synthetic oligonucleotide
  Sense strand starting at position 1762 of SEQ ID NO: 586753
gugauuuacuccuggucuc

SEQ ID NO: 741697 - RNA, 19 nt, Artificial Sequence
  Description of Artificial Sequence: Synthetic oligonucleotide
  Antisense strand to SEQ ID NO: 741696
gagaccaggaguaaaucac

SEQ ID NO: 741698 - RNA, 19 nt, Artificial Sequence
  Description of Artificial Sequence: Synthetic oligonucleotide
  Sense strand starting at position 2565 of SEQ ID NO: 586753
cacgcuuugguguugcaga

SEQ ID NO: 741699 - RNA, 19 nt, Artificial Sequence
  Description of Artificial Sequence: Synthetic oligonucleotide
  Antisense strand to SEQ ID NO: 741698
ucugcaacaccaaagcgug

SEQ ID NO: 741700 - RNA, 19 nt, Artificial Sequence
  Description of Artificial Sequence: Synthetic oligonucleotide
  Sense strand starting at position 2570 of SEQ ID NO: 586753
uuugguguugcagaagcua

SEQ ID NO: 741701 - RNA, 19 nt, Artificial Sequence
  Description of Artificial Sequence: Synthetic oligonucleotide
  Antisense strand to SEQ ID NO: 741700
uagcuucugcaacaccaaa

SEQ ID NO: 741702 - RNA, 19 nt, Artificial Sequence
  Description of Artificial Sequence: Synthetic oligonucleotide
  Sense strand starting at position 2607 of SEQ ID NO: 586753
ccaugagggugguaacuuu

SEQ ID NO: 741703 - RNA, 19 nt, Artificial Sequence
  Description of Artificial Sequence: Synthetic oligonucleotide
  Antisense strand to SEQ ID NO: 741702
aaaguuaccacccucaugg

SEQ ID NO: 741704 - RNA, 19 nt, Artificial Sequence
  Description of Artificial Sequence: Synthetic oligonucleotide
  Sense strand starting at position 2751 of SEQ ID NO: 586753
uaggcaauguagugagaug

SEQ ID NO: 741705 - RNA, 19 nt, Artificial Sequence
  Description of Artificial Sequence: Synthetic oligonucleotide
  Antisense strand to SEQ ID NO: 741704
caucucacuacauugccua

SEQ ID NO: 741706 - RNA, 19 nt, Artificial Sequence
  Description of Artificial Sequence: Synthetic oligonucleotide
  Sense strand starting at position 2900 of SEQ ID NO: 586753
gcagcaaucagcugugauu

SEQ ID NO: 741707 - RNA, 19 nt, Artificial Sequence
  Description of Artificial Sequence: Synthetic oligonucleotide
  Antisense strand to SEQ ID NO: 741706
aaucacagcugauugcugc

SEQ ID NO: 741708 - RNA, 19 nt, Artificial Sequence
  Description of Artificial Sequence: Synthetic oligonucleotide
  Sense strand starting at position 2902 of SEQ ID NO: 586753
agcaaucagcugugauugu

SEQ ID NO: 741709 - RNA, 19 nt, Artificial Sequence
  Description of Artificial Sequence: Synthetic oligonucleotide
  Antisense strand to SEQ ID NO: 741708
acaaucacagcugauugcu

SEQ ID NO: 741710 - RNA, 19 nt, Artificial Sequence
  Description of Artificial Sequence: Synthetic oligonucleotide
  Sense strand starting at position 3015 of SEQ ID NO: 586753
ggcugaucgccagagguca

SEQ ID NO: 741711 - RNA, 19 nt, Artificial Sequence
  Description of Artificial Sequence: Synthetic oligonucleotide
  Antisense strand to SEQ ID NO: 741710
ugaccucuggcgaucagcc

SEQ ID NO: 741712 - RNA, 19 nt, Artificial Sequence
  Description of Artificial Sequence: Synthetic oligonucleotide
  Sense strand starting at position 3212 of SEQ ID NO: 586753
cagccuggguaauaguaaa

SEQ ID NO: 741713 - RNA, 19 nt, Artificial Sequence
  Description of Artificial Sequence: Synthetic oligonucleotide
  Antisense strand to SEQ ID NO: 741712
uuuacuauuacccaggcug

SEQ ID NO: 741714 - RNA, 19 nt, Artificial Sequence
  Description of Artificial Sequence: Synthetic oligonucleotide
  Sense strand starting at position 3560 of SEQ ID NO: 586753
cauagaacuuccuugguga

SEQ ID NO: 741715 - RNA, 19 nt, Artificial Sequence
  Description of Artificial Sequence: Synthetic oligonucleotide
  Antisense strand to SEQ ID NO: 741714
ucaccaaggaaguucuaug

SEQ ID NO: 741716 - RNA, 19 nt, Artificial Sequence
  Description of Artificial Sequence: Synthetic oligonucleotide
  Sense strand starting at position 3575 of SEQ ID NO: 586753
gugagguuguugucagagu

SEQ ID NO: 741717 - RNA, 19 nt, Artificial Sequence
  Description of Artificial Sequence: Synthetic oligonucleotide
  Antisense strand to SEQ ID NO: 741716
acucugacaacaaccucac

SEQ ID NO: 741718 - RNA, 19 nt, Artificial Sequence
  Description of Artificial Sequence: Synthetic oligonucleotide
  Sense strand starting at position 3629 of SEQ ID NO: 586753
uagcuauugugggcuguga

SEQ ID NO: 741719 - RNA, 19 nt, Artificial Sequence
  Description of Artificial Sequence: Synthetic oligonucleotide
  Antisense strand to SEQ ID NO: 741718
ucacagcccacaauagcua

SEQ ID NO: 741720 - RNA, 19 nt, Artificial Sequence
  Description of Artificial Sequence: Synthetic oligonucleotide
  Sense strand starting at position 3631 of SEQ ID NO: 586753
gcuauugugggcugugaau

SEQ ID NO: 741721 - RNA, 19 nt, Artificial Sequence
  Description of Artificial Sequence: Synthetic oligonucleotide
  Antisense strand to SEQ ID NO: 741720
auucacagcccacaauagc

SEQ ID NO: 741722 - RNA, 19 nt, Artificial Sequence
  Description of Artificial Sequence: Synthetic oligonucleotide
  Sense strand starting at position 3633 of SEQ ID NO: 586753
uauugugggcugugaauaa

SEQ ID NO: 741723 - RNA, 19 nt, Artificial Sequence
  Description of Artificial Sequence: Synthetic oligonucleotide
  Antisense strand to SEQ ID NO: 741722
uuauucacagcccacaaua

SEQ ID NO: 741724 - RNA, 19 nt, Artificial Sequence
  Description of Artificial Sequence: Synthetic oligonucleotide
  Sense strand starting at position 3666 of SEQ ID NO: 586753
uguaacaauugucuagaga

SEQ ID NO: 741725 - RNA, 19 nt, Artificial Sequence
  Description of Artificial Sequence: Synthetic oligonucleotide
  Antisense strand to SEQ ID NO: 741724
ucucuagacaauuguuaca

SEQ ID NO: 741726 - RNA, 19 nt, Artificial Sequence
  Description of Artificial Sequence: Synthetic oligonucleotide
  Sense strand starting at position 3677 of SEQ ID NO: 586753
ucuagagaaucuuggaaau

SEQ ID NO: 741727 - RNA, 19 nt, Artificial Sequence
  Description of Artificial Sequence: Synthetic oligonucleotide
  Antisense strand to SEQ ID NO: 741726
auuuccaagauucucuaga

SEQ ID NO: 741728 - RNA, 19 nt, Artificial Sequence
  Description of Artificial Sequence: Synthetic oligonucleotide
  Sense strand starting at position 3679 of SEQ ID NO: 586753
uagagaaucuuggaaauug

SEQ ID NO: 741729 - RNA, 19 nt, Artificial Sequence
  Description of Artificial Sequence: Synthetic oligonucleotide
  Antisense strand to SEQ ID NO: 741728
caauuuccaagauucucua

SEQ ID NO: 741730 - RNA, 19 nt, Artificial Sequence
  Description of Artificial Sequence: Synthetic oligonucleotide
  Sense strand starting at position 3735 of SEQ ID NO: 586753
uuaagacauguaggugaga

SEQ ID NO: 741731 - RNA, 19 nt, Artificial Sequence
  Description of Artificial Sequence: Synthetic oligonucleotide
  Antisense strand to SEQ ID NO: 741730
ucucaccuacaugucuuaa

SEQ ID NO: 741732 - RNA, 19 nt, Artificial Sequence
  Description of Artificial Sequence: Synthetic oligonucleotide
  Sense strand starting at position 3740 of SEQ ID NO: 586753
acauguaggugagaggauu

SEQ ID NO: 741733 - RNA, 19 nt, Artificial Sequence
  Description of Artificial Sequence: Synthetic oligonucleotide
  Antisense strand to SEQ ID NO: 741732
aauccucucaccuacaugu

SEQ ID NO: 741734 - RNA, 19 nt, Artificial Sequence
  Description of Artificial Sequence: Synthetic oligonucleotide
  Sense strand starting at position 3773 of SEQ ID NO: 586753
guucgaaucugcguugaac

SEQ ID NO: 741735 - RNA, 19 nt, Artificial Sequence
  Description of Artificial Sequence: Synthetic oligonucleotide
  Antisense strand to SEQ ID NO: 741734
guucaacgcagauucgaac

SEQ ID NO: 741736 - RNA, 19 nt, Artificial Sequence
  Description of Artificial Sequence: Synthetic oligonucleotide
  Sense strand starting at position 3895 of SEQ ID NO: 586753
ugucaaagcccuggaacua

SEQ ID NO: 741737 - RNA, 19 nt, Artificial Sequence
  Description of Artificial Sequence: Synthetic oligonucleotide
  Antisense strand to SEQ ID NO: 741736
uaguuccagggcuuugaca

SEQ ID NO: 741738 - RNA, 19 nt, Artificial Sequence
  Description of Artificial Sequence: Synthetic oligonucleotide
  Sense strand starting at position 3922 of SEQ ID NO: 586753
aggcaaggaucuguccuua

SEQ ID NO: 741739 - RNA, 19 nt, Artificial Sequence
  Description of Artificial Sequence: Synthetic oligonucleotide
  Antisense strand to SEQ ID NO: 741738
uaaggacagauccuugccu

SEQ ID NO: 741740 - RNA, 19 nt, Artificial Sequence
  Description of Artificial Sequence: Synthetic oligonucleotide
  Sense strand starting at position 3926 of SEQ ID NO: 586753
aaggaucuguccuuaugag

SEQ ID NO: 741741 - RNA, 19 nt, Artificial Sequence
  Description of Artificial Sequence: Synthetic oligonucleotide
  Antisense strand to SEQ ID NO: 741740
cucauaaggacagauccuu

SEQ ID NO: 741742 - RNA, 19 nt, Artificial Sequence
  Description of Artificial Sequence: Synthetic oligonucleotide
  Sense strand starting at position 3947 of SEQ ID NO: 586753
uuucuugcagccugucaga

SEQ ID NO: 741743 - RNA, 19 nt, Artificial Sequence
  Description of Artificial Sequence: Synthetic oligonucleotide
  Antisense strand to SEQ ID NO: 741742
ucugacaggcugcaagaaa

SEQ ID NO: 741744 - RNA, 19 nt, Artificial Sequence
  Description of Artificial Sequence: Synthetic oligonucleotide
  Sense strand starting at position 3960 of SEQ ID NO: 586753
gucagagcccaaugaacau

SEQ ID NO: 741745 - RNA, 19 nt, Artificial Sequence
  Description of Artificial Sequence: Synthetic oligonucleotide
  Antisense strand to SEQ ID NO: 741744
auguucauugggcucugac

SEQ ID NO: 741746 - RNA, 19 nt, Artificial Sequence
  Description of Artificial Sequence: Synthetic oligonucleotide
  Sense strand starting at position 74 of SEQ ID NO: 586754
ccaggucacuuagcucuua

SEQ ID NO: 741747 - RNA, 19 nt, Artificial Sequence
  Description of Artificial Sequence: Synthetic oligonucleotide
  Antisense strand to SEQ ID NO: 741746
uaagagcuaagugaccugg

SEQ ID NO: 741748 - RNA, 19 nt, Artificial Sequence
  Description of Artificial Sequence: Synthetic oligonucleotide
  Sense strand starting at position 79 of SEQ ID NO: 586754
ucacuuagcucuuaguggu

SEQ ID NO: 741749 - RNA, 19 nt, Artificial Sequence
  Description of Artificial Sequence: Synthetic oligonucleotide
  Antisense strand to SEQ ID NO: 741748
accacuaagagcuaaguga

SEQ ID NO: 741750 - RNA, 19 nt, Artificial Sequence
  Description of Artificial Sequence: Synthetic oligonucleotide
  Sense strand starting at position 82 of SEQ ID NO: 586754
cuuagcucuuaguggugaa

SEQ ID NO: 741751 - RNA, 19 nt, Artificial Sequence
  Description of Artificial Sequence: Synthetic oligonucleotide
  Antisense strand to SEQ ID NO: 741750
uucaccacuaagagcuaag

SEQ ID NO: 741752 - RNA, 19 nt, Artificial Sequence
  Description of Artificial Sequence: Synthetic oligonucleotide
  Sense strand starting at position 83 of SEQ ID NO: 586754
uuagcucuuaguggugaaa

SEQ ID NO: 741753 - RNA, 19 nt, Artificial Sequence
  Description of Artificial Sequence: Synthetic oligonucleotide
  Antisense strand to SEQ ID NO: 741752
uuucaccacuaagagcuaa

SEQ ID NO: 741754 - RNA, 19 nt, Artificial Sequence
  Description of Artificial Sequence: Synthetic oligonucleotide
  Sense strand starting at position 86 of SEQ ID NO: 586754
gcucuuaguggugaaacca

SEQ ID NO: 741755 - RNA, 19 nt, Artificial Sequence
  Description of Artificial Sequence: Synthetic oligonucleotide
  Antisense strand to SEQ ID NO: 741754
ugguuucaccacuaagagc

SEQ ID NO: 741756 - RNA, 19 nt, Artificial Sequence
  Description of Artificial Sequence: Synthetic oligonucleotide
  Sense strand starting at position 127 of SEQ ID NO: 586754
aucccugugcccugggaaa

SEQ ID NO: 741757 - RNA, 19 nt, Artificial Sequence
  Description of Artificial Sequence: Synthetic oligonucleotide
  Antisense strand to SEQ ID NO: 741756
uuucccagggcacagggau

SEQ ID NO: 741758 - RNA, 19 nt, Artificial Sequence
  Description of Artificial Sequence: Synthetic oligonucleotide
  Sense strand starting at position 724 of SEQ ID NO: 586754
gugccugauuggcaccaaa

SEQ ID NO: 741759 - RNA, 19 nt, Artificial Sequence
  Description of Artificial Sequence: Synthetic oligonucleotide
  Antisense strand to SEQ ID NO: 741758
uuuggugccaaucaggcac

SEQ ID NO: 741760 - RNA, 19 nt, Artificial Sequence
  Description of Artificial Sequence: Synthetic oligonucleotide
  Sense strand starting at position 772 of SEQ ID NO: 586754
aggucaggccuuuggauua

SEQ ID NO: 741761 - RNA, 19 nt, Artificial Sequence
  Description of Artificial Sequence: Synthetic oligonucleotide
  Antisense strand to SEQ ID NO: 741760
uaauccaaaggccugaccu

SEQ ID NO: 741762 - RNA, 19 nt, Artificial Sequence
  Description of Artificial Sequence: Synthetic oligonucleotide
  Sense strand starting at position 838 of SEQ ID NO: 586754
cuuccagauucccaggaaa

SEQ ID NO: 741763 - RNA, 19 nt, Artificial Sequence
  Description of Artificial Sequence: Synthetic oligonucleotide
  Antisense strand to SEQ ID NO: 741762
uuuccugggaaucuggaag

SEQ ID NO: 741764 - RNA, 19 nt, Artificial Sequence
  Description of Artificial Sequence: Synthetic oligonucleotide
  Sense strand starting at position 849 of SEQ ID NO: 586754
ccaggaaauguguggcugu

SEQ ID NO: 741765 - RNA, 19 nt, Artificial Sequence
  Description of Artificial Sequence: Synthetic oligonucleotide
  Antisense strand to SEQ ID NO: 741764
acagccacacauuuccugg

SEQ ID NO: 741766 - RNA, 19 nt, Artificial Sequence
  Description of Artificial Sequence: Synthetic oligonucleotide
  Sense strand starting at position 850 of SEQ ID NO: 586754
caggaaauguguggcugua

SEQ ID NO: 741767 - RNA, 19 nt, Artificial Sequence
  Description of Artificial Sequence: Synthetic oligonucleotide
  Antisense strand to SEQ ID NO: 741766
uacagccacacauuuccug

SEQ ID NO: 741768 - RNA, 19 nt, Artificial Sequence
  Description of Artificial Sequence: Synthetic oligonucleotide
  Sense strand starting at position 852 of SEQ ID NO: 586754
ggaaauguguggcuguaga

SEQ ID NO: 741769 - RNA, 19 nt, Artificial Sequence
  Description of Artificial Sequence: Synthetic oligonucleotide
  Antisense strand to SEQ ID NO: 741768
ucuacagccacacauuucc

SEQ ID NO: 741770 - RNA, 19 nt, Artificial Sequence
  Description of Artificial Sequence: Synthetic oligonucleotide
  Sense strand starting at position 898 of SEQ ID NO: 586754
aguccucccuccugugaua

SEQ ID NO: 741771 - RNA, 19 nt, Artificial Sequence
  Description of Artificial Sequence: Synthetic oligonucleotide
  Antisense strand to SEQ ID NO: 741770
uaucacaggagggaggacu

SEQ ID NO: 741772 - RNA, 19 nt, Artificial Sequence
  Description of Artificial Sequence: Synthetic oligonucleotide
  Sense strand starting at position 905 of SEQ ID NO: 586754
ccuccugugauaggaguuu

SEQ ID NO: 741773 - RNA, 19 nt, Artificial Sequence
  Description of Artificial Sequence: Synthetic oligonucleotide
  Antisense strand to SEQ ID NO: 741772
aaacuccuaucacaggagg

SEQ ID NO: 741774 - RNA, 19 nt, Artificial Sequence
  Description of Artificial Sequence: Synthetic oligonucleotide
  Sense strand starting at position 998 of SEQ ID NO: 586754
gguccuuccugcucccaua

SEQ ID NO: 741775 - RNA, 19 nt, Artificial Sequence
  Description of Artificial Sequence: Synthetic oligonucleotide
  Antisense strand to SEQ ID NO: 741774
uaugggagcaggaaggacc

SEQ ID NO: 741776 - RNA, 19 nt, Artificial Sequence
  Description of Artificial Sequence: Synthetic oligonucleotide
  Sense strand starting at position 1467 of SEQ ID NO: 586754
cagugauccuucuuggaag

SEQ ID NO: 741777 - RNA, 19 nt, Artificial Sequence
  Description of Artificial Sequence: Synthetic oligonucleotide
  Antisense strand to SEQ ID NO: 741776
cuuccaagaaggaucacug

SEQ ID NO: 741778 - RNA, 19 nt, Artificial Sequence
  Description of Artificial Sequence: Synthetic oligonucleotide
  Sense strand starting at position 1468 of SEQ ID NO: 586754
agugauccuucuuggaagu

SEQ ID NO: 741779 - RNA, 19 nt, Artificial Sequence
  Description of Artificial Sequence: Synthetic oligonucleotide
  Antisense strand to SEQ ID NO: 741778
acuuccaagaaggaucacu

SEQ ID NO: 741780 - RNA, 19 nt, Artificial Sequence
  Description of Artificial Sequence: Synthetic oligonucleotide
  Sense strand starting at position 1469 of SEQ ID NO: 586754
gugauccuucuuggaaguu

SEQ ID NO: 741781 - RNA, 19 nt, Artificial Sequence
  Description of Artificial Sequence: Synthetic oligonucleotide
  Antisense strand to SEQ ID NO: 741780
aacuuccaagaaggaucac

SEQ ID NO: 741782 - RNA, 19 nt, Artificial Sequence
  Description of Artificial Sequence: Synthetic oligonucleotide
  Sense strand starting at position 1484 of SEQ ID NO: 586754
aguuguggugucugagaaa

SEQ ID NO: 741783 - RNA, 19 nt, Artificial Sequence
  Description of Artificial Sequence: Synthetic oligonucleotide
  Antisense strand to SEQ ID NO: 741782
uuucucagacaccacaacu

SEQ ID NO: 741784 - RNA, 19 nt, Artificial Sequence
  Description of Artificial Sequence: Synthetic oligonucleotide
  Sense strand starting at position 2293 of SEQ ID NO: 586754
gcaggucagacaggguaaa

SEQ ID NO: 741785 - RNA, 19 nt, Artificial Sequence
  Description of Artificial Sequence: Synthetic oligonucleotide
  Antisense strand to SEQ ID NO: 741784
uuuacccugucugaccugc

SEQ ID NO: 741786 - RNA, 19 nt, Artificial Sequence
  Description of Artificial Sequence: Synthetic oligonucleotide
  Sense strand starting at position 2294 of SEQ ID NO: 586754
caggucagacaggguaaau

SEQ ID NO: 741787 - RNA, 19 nt, Artificial Sequence
  Description of Artificial Sequence: Synthetic oligonucleotide
  Antisense strand to SEQ ID NO: 741786
auuuacccugucugaccug

SEQ ID NO: 741788 - RNA, 19 nt, Artificial Sequence
  Description of Artificial Sequence: Synthetic oligonucleotide
  Sense strand starting at position 2344 of SEQ ID NO: 586754
uguacuuugucccgacacu

SEQ ID NO: 741789 - RNA, 19 nt, Artificial Sequence
  Description of Artificial Sequence: Synthetic oligonucleotide
  Antisense strand to SEQ ID NO: 741788
agugucgggacaaaguaca

SEQ ID NO: 741790 - RNA, 19 nt, Artificial Sequence
  Description of Artificial Sequence: Synthetic oligonucleotide
  Sense strand starting at position 2353 of SEQ ID NO: 586754
ucccgacacugaucuguuu

SEQ ID NO: 741791 - RNA, 19 nt, Artificial Sequence
  Description of Artificial Sequence: Synthetic oligonucleotide
  Antisense strand to SEQ ID NO: 741790
aaacagaucagugucggga

SEQ ID NO: 741792 - RNA, 19 nt, Artificial Sequence
  Description of Artificial Sequence: Synthetic oligonucleotide
  Sense strand starting at position 2361 of SEQ ID NO: 586754
cugaucuguuucugccaga

SEQ ID NO: 741793 - RNA, 19 nt, Artificial Sequence
  Description of Artificial Sequence: Synthetic oligonucleotide
  Antisense strand to SEQ ID NO: 741792
ucuggcagaaacagaucag

SEQ ID NO: 741794 - RNA, 19 nt, Artificial Sequence
  Description of Artificial Sequence: Synthetic oligonucleotide
  Sense strand starting at position 2362 of SEQ ID NO: 586754
ugaucuguuucugccagaa

SEQ ID NO: 741795 - RNA, 19 nt, Artificial Sequence
  Description of Artificial Sequence: Synthetic oligonucleotide
  Antisense strand to SEQ ID NO: 741794
uucuggcagaaacagauca

SEQ ID NO: 741796 - RNA, 19 nt, Artificial Sequence
  Description of Artificial Sequence: Synthetic oligonucleotide
  Sense strand starting at position 2366 of SEQ ID NO: 586754
cuguuucugccagaagcca

SEQ ID NO: 741797 - RNA, 19 nt, Artificial Sequence
  Description of Artificial Sequence: Synthetic oligonucleotide
  Antisense strand to SEQ ID NO: 741796
uggcuucuggcagaaacag

SEQ ID NO: 741798 - RNA, 19 nt, Artificial Sequence
  Description of Artificial Sequence: Synthetic oligonucleotide
  Sense strand starting at position 2406 of SEQ ID NO: 586754
gugauuuacuccuggucuc

SEQ ID NO: 741799 - RNA, 19 nt, Artificial Sequence
  Description of Artificial Sequence: Synthetic oligonucleotide
  Antisense strand to SEQ ID NO: 741798
gagaccaggaguaaaucac

SEQ ID NO: 741800 - RNA, 19 nt, Artificial Sequence
  Description of Artificial Sequence: Synthetic oligonucleotide
  Sense strand starting at position 3209 of SEQ ID NO: 586754
cacgcuuugguguugcaga

SEQ ID NO: 741801 - RNA, 19 nt, Artificial Sequence
  Description of Artificial Sequence: Synthetic oligonucleotide
  Antisense strand to SEQ ID NO: 741800
ucugcaacaccaaagcgug

SEQ ID NO: 741802 - RNA, 19 nt, Artificial Sequence
  Description of Artificial Sequence: Synthetic oligonucleotide
  Sense strand starting at position 3210 of SEQ ID NO: 586754
acgcuuugguguugcagaa

SEQ ID NO: 741803 - RNA, 19 nt, Artificial Sequence
  Description of Artificial Sequence: Synthetic oligonucleotide
  Antisense strand to SEQ ID NO: 741802
uucugcaacaccaaagcgu

SEQ ID NO: 741804 - RNA, 19 nt, Artificial Sequence
  Description of Artificial Sequence: Synthetic oligonucleotide
  Sense strand starting at position 3214 of SEQ ID NO: 586754
uuugguguugcagaagcua

SEQ ID NO: 741805 - RNA, 19 nt, Artificial Sequence
  Description of Artificial Sequence: Synthetic oligonucleotide
  Antisense strand to SEQ ID NO: 741804
uagcuucugcaacaccaaa

SEQ ID NO: 741806 - RNA, 19 nt, Artificial Sequence
  Description of Artificial Sequence: Synthetic oligonucleotide
  Sense strand starting at position 3251 of SEQ ID NO: 586754
ccaugagggugguaacuuu

SEQ ID NO: 741807 - RNA, 19 nt, Artificial Sequence
  Description of Artificial Sequence: Synthetic oligonucleotide
  Antisense strand to SEQ ID NO: 741806
aaaguuaccacccucaugg

SEQ ID NO: 741808 - RNA, 19 nt, Artificial Sequence
  Description of Artificial Sequence: Synthetic oligonucleotide
  Sense strand starting at position 3395 of SEQ ID NO: 586754
uaggcaauguagugagaug

SEQ ID NO: 741809 - RNA, 19 nt, Artificial Sequence
  Description of Artificial Sequence: Synthetic oligonucleotide
  Antisense strand to SEQ ID NO: 741808
caucucacuacauugccua

SEQ ID NO: 741810 - RNA, 19 nt, Artificial Sequence
  Description of Artificial Sequence: Synthetic oligonucleotide
  Sense strand starting at position 3544 of SEQ ID NO: 586754
gcagcaaucagcugugauu

SEQ ID NO: 741811 - RNA, 19 nt, Artificial Sequence
  Description of Artificial Sequence: Synthetic oligonucleotide
  Antisense strand to SEQ ID NO: 741810
aaucacagcugauugcugc

SEQ ID NO: 741812 - RNA, 19 nt, Artificial Sequence
  Description of Artificial Sequence: Synthetic oligonucleotide
  Sense strand starting at position 3546 of SEQ ID NO: 586754
agcaaucagcugugauugu

SEQ ID NO: 741813 - RNA, 19 nt, Artificial Sequence
  Description of Artificial Sequence: Synthetic oligonucleotide
  Antisense strand to SEQ ID NO: 741812
acaaucacagcugauugcu

SEQ ID NO: 741814 - RNA, 19 nt, Artificial Sequence
  Description of Artificial Sequence: Synthetic oligonucleotide
  Sense strand starting at position 3659 of SEQ ID NO: 586754
ggcugaucgccagagguca

SEQ ID NO: 741815 - RNA, 19 nt, Artificial Sequence
  Description of Artificial Sequence: Synthetic oligonucleotide
  Antisense strand to SEQ ID NO: 741814
ugaccucuggcgaucagcc

SEQ ID NO: 741816 - RNA, 19 nt, Artificial Sequence
  Description of Artificial Sequence: Synthetic oligonucleotide
  Sense strand starting at position 3856 of SEQ ID NO: 586754
cagccuggguaauaguaaa

SEQ ID NO: 741817 - RNA, 19 nt, Artificial Sequence
  Description of Artificial Sequence: Synthetic oligonucleotide
  Antisense strand to SEQ ID NO: 741816
uuuacuauuacccaggcug

SEQ ID NO: 741818 - RNA, 19 nt, Artificial Sequence
  Description of Artificial Sequence: Synthetic oligonucleotide
  Sense strand starting at position 239 of SEQ ID NO: 586755
uguguauaccuugcguacu

SEQ ID NO: 741819 - RNA, 19 nt, Artificial Sequence
  Description of Artificial Sequence: Synthetic oligonucleotide
  Antisense strand to SEQ ID NO: 741818
aguacgcaagguauacaca

SEQ ID NO: 741820 - RNA, 19 nt, Artificial Sequence
  Description of Artificial Sequence: Synthetic oligonucleotide
  Sense strand starting at position 587 of SEQ ID NO: 586755
acacguuaagcauaucuaa

SEQ ID NO: 741821 - RNA, 19 nt, Artificial Sequence
  Description of Artificial Sequence: Synthetic oligonucleotide
  Antisense strand to SEQ ID NO: 741820
uuagauaugcuuaacgugu

SEQ ID NO: 741822 - RNA, 19 nt, Artificial Sequence
  Description of Artificial Sequence: Synthetic oligonucleotide
  Sense strand starting at position 598 of SEQ ID NO: 586755
auaucuaauugggaaggaa

SEQ ID NO: 741823 - RNA, 19 nt, Artificial Sequence
  Description of Artificial Sequence: Synthetic oligonucleotide
  Antisense strand to SEQ ID NO: 741822
uuccuucccaauuagauau

SEQ ID NO: 741824 - RNA, 19 nt, Artificial Sequence
  Description of Artificial Sequence: Synthetic oligonucleotide
  Sense strand starting at position 681 of SEQ ID NO: 586755
aaugaauuagguugugcuu

SEQ ID NO: 741825 - RNA, 19 nt, Artificial Sequence
  Description of Artificial Sequence: Synthetic oligonucleotide
  Antisense strand to SEQ ID NO: 741824
aagcacaaccuaauucauu

SEQ ID NO: 741826 - RNA, 19 nt, Artificial Sequence
  Description of Artificial Sequence: Synthetic oligonucleotide
  Sense strand starting at position 684 of SEQ ID NO: 586755
gaauuagguugugcuuaag

SEQ ID NO: 741827 - RNA, 19 nt, Artificial Sequence
  Description of Artificial Sequence: Synthetic oligonucleotide
  Antisense strand to SEQ ID NO: 741826
cuuaagcacaaccuaauuc

SEQ ID NO: 741828 - RNA, 19 nt, Artificial Sequence
  Description of Artificial Sequence: Synthetic oligonucleotide
  Sense strand starting at position 840 of SEQ ID NO: 586755
guguauaaacgggaacuga

SEQ ID NO: 741829 - RNA, 19 nt, Artificial Sequence
  Description of Artificial Sequence: Synthetic oligonucleotide
  Antisense strand to SEQ ID NO: 741828
ucaguucccguuuauacac

SEQ ID NO: 741830 - RNA, 19 nt, Artificial Sequence
  Description of Artificial Sequence: Synthetic oligonucleotide
  Sense strand starting at position 859 of SEQ ID NO: 586755
augagauaagcacgauaau

SEQ ID NO: 741831 - RNA, 19 nt, Artificial Sequence
  Description of Artificial Sequence: Synthetic oligonucleotide
  Antisense strand to SEQ ID NO: 741830
auuaucgugcuuaucucau

SEQ ID NO: 741832 - RNA, 19 nt, Artificial Sequence
  Description of Artificial Sequence: Synthetic oligonucleotide
  Sense strand starting at position 878 of SEQ ID NO: 586755
aagugcaaugcugggauau

SEQ ID NO: 741833 - RNA, 19 nt, Artificial Sequence
  Description of Artificial Sequence: Synthetic oligonucleotide
  Antisense strand to SEQ ID NO: 741832
auaucccagcauugcacuu

SEQ ID NO: 741834 - RNA, 19 nt, Artificial Sequence
  Description of Artificial Sequence: Synthetic oligonucleotide
  Sense strand starting at position 879 of SEQ ID NO: 586755
agugcaaugcugggauaua

SEQ ID NO: 741835 - RNA, 19 nt, Artificial Sequence
  Description of Artificial Sequence: Synthetic oligonucleotide
  Antisense strand to SEQ ID NO: 741834
uauaucccagcauugcacu

SEQ ID NO: 741836 - RNA, 19 nt, Artificial Sequence
  Description of Artificial Sequence: Synthetic oligonucleotide
  Sense strand starting at position 890 of SEQ ID NO: 586755
gggauauaguauguguuca

SEQ ID NO: 741837 - RNA, 19 nt, Artificial Sequence
  Description of Artificial Sequence: Synthetic oligonucleotide
  Antisense strand to SEQ ID NO: 741836
ugaacacauacuauauccc

SEQ ID NO: 741838 - RNA, 19 nt, Artificial Sequence
  Description of Artificial Sequence: Synthetic oligonucleotide
  Sense strand starting at position 986 of SEQ ID NO: 586755
ucaagaauaucaguccugu

SEQ ID NO: 741839 - RNA, 19 nt, Artificial Sequence
  Description of Artificial Sequence: Synthetic oligonucleotide
  Antisense strand to SEQ ID NO: 741838
acaggacugauauucuuga

SEQ ID NO: 741840 - RNA, 19 nt, Artificial Sequence
  Description of Artificial Sequence: Synthetic oligonucleotide
  Sense strand starting at position 1156 of SEQ ID NO: 586755
cugcucugaccaugaagga

SEQ ID NO: 741841 - RNA, 19 nt, Artificial Sequence
  Description of Artificial Sequence: Synthetic oligonucleotide
  Antisense strand to SEQ ID NO: 741840
uccuucauggucagagcag

SEQ ID NO: 741842 - RNA, 19 nt, Artificial Sequence
  Description of Artificial Sequence: Synthetic oligonucleotide
  Sense strand starting at position 1319 of SEQ ID NO: 586755
cuuccagaguuccuuuacu

SEQ ID NO: 741843 - RNA, 19 nt, Artificial Sequence
  Description of Artificial Sequence: Synthetic oligonucleotide
  Antisense strand to SEQ ID NO: 741842
aguaaaggaacucuggaag

SEQ ID NO: 741844 - RNA, 19 nt, Artificial Sequence
  Description of Artificial Sequence: Synthetic oligonucleotide
  Sense strand starting at position 1419 of SEQ ID NO: 586755
uuagaagacgucugcugaa

SEQ ID NO: 741845 - RNA, 19 nt, Artificial Sequence
  Description of Artificial Sequence: Synthetic oligonucleotide
  Antisense strand to SEQ ID NO: 741844
uucagcagacgucuucuaa

SEQ ID NO: 741846 - RNA, 19 nt, Artificial Sequence
  Description of Artificial Sequence: Synthetic oligonucleotide
  Sense strand starting at position 1489 of SEQ ID NO: 586755
ggaguauucgcugccugca

SEQ ID NO: 741847 - RNA, 19 nt, Artificial Sequence
  Description of Artificial Sequence: Synthetic oligonucleotide
  Antisense strand to SEQ ID NO: 741846
ugcaggcagcgaauacucc

SEQ ID NO: 741848 - RNA, 19 nt, Artificial Sequence
  Description of Artificial Sequence: Synthetic oligonucleotide
  Sense strand starting at position 1490 of SEQ ID NO: 586755
gaguauucgcugccugcaa

SEQ ID NO: 741849 - RNA, 19 nt, Artificial Sequence
  Description of Artificial Sequence: Synthetic oligonucleotide
  Antisense strand to SEQ ID NO: 741848
uugcaggcagcgaauacuc

SEQ ID NO: 741850 - RNA, 19 nt, Artificial Sequence
  Description of Artificial Sequence: Synthetic oligonucleotide
  Sense strand starting at position 1583 of SEQ ID NO: 586755
cuggcuucacuguggaaga

SEQ ID NO: 741851 - RNA, 19 nt, Artificial Sequence
  Description of Artificial Sequence: Synthetic oligonucleotide
  Antisense strand to SEQ ID NO: 741850
ucuuccacagugaagccag

SEQ ID NO: 741852 - RNA, 19 nt, Artificial Sequence
  Description of Artificial Sequence: Synthetic oligonucleotide
  Sense strand starting at position 1599 of SEQ ID NO: 586755
agaccugaugcguauucca

SEQ ID NO: 741853 - RNA, 19 nt, Artificial Sequence
  Description of Artificial Sequence: Synthetic oligonucleotide
  Antisense strand to SEQ ID NO: 741852
uggaauacgcaucaggucu

SEQ ID NO: 741854 - RNA, 19 nt, Artificial Sequence
  Description of Artificial Sequence: Synthetic oligonucleotide
  Sense strand starting at position 1679 of SEQ ID NO: 586755
ugggcugugagagauuaca

SEQ ID NO: 741855 - RNA, 19 nt, Artificial Sequence
  Description of Artificial Sequence: Synthetic oligonucleotide
  Antisense strand to SEQ ID NO: 741854
uguaaucucucacagccca

SEQ ID NO: 741856 - RNA, 19 nt, Artificial Sequence
  Description of Artificial Sequence: Synthetic oligonucleotide
  Sense strand starting at position 1850 of SEQ ID NO: 586755
gguccuagacuccgagaaa

SEQ ID NO: 741857 - RNA, 19 nt, Artificial Sequence
  Description of Artificial Sequence: Synthetic oligonucleotide
  Antisense strand to SEQ ID NO: 741856
uuucucggagucuaggacc

SEQ ID NO: 741858 - RNA, 19 nt, Artificial Sequence
  Description of Artificial Sequence: Synthetic oligonucleotide
  Sense strand starting at position 1887 of SEQ ID NO: 586755
ccaugaagaccugguuauc

SEQ ID NO: 741859 - RNA, 19 nt, Artificial Sequence
  Description of Artificial Sequence: Synthetic oligonucleotide
  Antisense strand to SEQ ID NO: 741858
gauaaccaggucuucaugg

SEQ ID NO: 741860 - RNA, 19 nt, Artificial Sequence
  Description of Artificial Sequence: Synthetic oligonucleotide
  Sense strand starting at position 2230 of SEQ ID NO: 586755
ugggacuuguaguuucuaa

SEQ ID NO: 741861 - RNA, 19 nt, Artificial Sequence
  Description of Artificial Sequence: Synthetic oligonucleotide
  Antisense strand to SEQ ID NO: 741860
uuagaaacuacaaguccca

SEQ ID NO: 741862 - RNA, 19 nt, Artificial Sequence
  Description of Artificial Sequence: Synthetic oligonucleotide
  Sense strand starting at position 2238 of SEQ ID NO: 586755
guaguuucuaaugaugagu

SEQ ID NO: 741863 - RNA, 19 nt, Artificial Sequence
  Description of Artificial Sequence: Synthetic oligonucleotide
  Antisense strand to SEQ ID NO: 741862
acucaucauuagaaacuac

SEQ ID NO: 741864 - RNA, 19 nt, Artificial Sequence
  Description of Artificial Sequence: Synthetic oligonucleotide
  Sense strand starting at position 2243 of SEQ ID NO: 586755
uucuaaugaugaguugguu

SEQ ID NO: 741865 - RNA, 19 nt, Artificial Sequence
  Description of Artificial Sequence: Synthetic oligonucleotide
  Antisense strand to SEQ ID NO: 741864
aaccaacucaucauuagaa

SEQ ID NO: 741866 - RNA, 19 nt, Artificial Sequence
  Description of Artificial Sequence: Synthetic oligonucleotide
  Sense strand starting at position 2246 of SEQ ID NO: 586755
uaaugaugaguugguuaag

SEQ ID NO: 741867 - RNA, 19 nt, Artificial Sequence
  Description of Artificial Sequence: Synthetic oligonucleotide
  Antisense strand to SEQ ID NO: 741866
cuuaaccaacucaucauua

SEQ ID NO: 741868 - RNA, 19 nt, Artificial Sequence
  Description of Artificial Sequence: Synthetic oligonucleotide
  Sense strand starting at position 2247 of SEQ ID NO: 586755
aaugaugaguugguuaagu

SEQ ID NO: 741869 - RNA, 19 nt, Artificial Sequence
  Description of Artificial Sequence: Synthetic oligonucleotide
  Antisense strand to SEQ ID NO: 741868
acuuaaccaacucaucauu

SEQ ID NO: 741870 - RNA, 19 nt, Artificial Sequence
  Description of Artificial Sequence: Synthetic oligonucleotide
  Sense strand starting at position 2256 of SEQ ID NO: 586755
uugguuaaguggagaggaa

SEQ ID NO: 741871 - RNA, 19 nt, Artificial Sequence
  Description of Artificial Sequence: Synthetic oligonucleotide
  Antisense strand to SEQ ID NO: 741870
uuccucuccacuuaaccaa

SEQ ID NO: 741872 - RNA, 19 nt, Artificial Sequence
  Description of Artificial Sequence: Synthetic oligonucleotide
  Sense strand starting at position 2301 of SEQ ID NO: 586755
uucugagaguaguuauuaa

SEQ ID NO: 741873 - RNA, 19 nt, Artificial Sequence
  Description of Artificial Sequence: Synthetic oligonucleotide
  Antisense strand to SEQ ID NO: 741872
uuaauaacuacucucagaa

SEQ ID NO: 741874 - RNA, 19 nt, Artificial Sequence
  Description of Artificial Sequence: Synthetic oligonucleotide
  Sense strand starting at position 2380 of SEQ ID NO: 586755
guuaaaucuuccuuacagu

SEQ ID NO: 741875 - RNA, 19 nt, Artificial Sequence
  Description of Artificial Sequence: Synthetic oligonucleotide
  Antisense strand to SEQ ID NO: 741874
acuguaaggaagauuuaac

SEQ ID NO: 741876 - RNA, 19 nt, Artificial Sequence
  Description of Artificial Sequence: Synthetic oligonucleotide
  Sense strand starting at position 2414 of SEQ ID NO: 586755
guaugaagugucuacaccu

SEQ ID NO: 741877 - RNA, 19 nt, Artificial Sequence
  Description of Artificial Sequence: Synthetic oligonucleotide
  Antisense strand to SEQ ID NO: 741876
agguguagacacuucauac

SEQ ID NO: 741878 - RNA, 19 nt, Artificial Sequence
  Description of Artificial Sequence: Synthetic oligonucleotide
  Sense strand starting at position 2456 of SEQ ID NO: 586755
aacuaaguuuccgugacau

SEQ ID NO: 741879 - RNA, 19 nt, Artificial Sequence
  Description of Artificial Sequence: Synthetic oligonucleotide
  Antisense strand to SEQ ID NO: 741878
augucacggaaacuuaguu

SEQ ID NO: 741880 - RNA, 19 nt, Artificial Sequence
  Description of Artificial Sequence: Synthetic oligonucleotide
  Sense strand starting at position 2490 of SEQ ID NO: 586755
auauucugucaacauaguu

SEQ ID NO: 741881 - RNA, 19 nt, Artificial Sequence
  Description of Artificial Sequence: Synthetic oligonucleotide
  Antisense strand to SEQ ID NO: 741880
aacuauguugacagaauau

SEQ ID NO: 741882 - RNA, 19 nt, Artificial Sequence
  Description of Artificial Sequence: Synthetic oligonucleotide
  Sense strand starting at position 3012 of SEQ ID NO: 586755
agcauagaguauguuaaga

SEQ ID NO: 741883 - RNA, 19 nt, Artificial Sequence
  Description of Artificial Sequence: Synthetic oligonucleotide
  Antisense strand to SEQ ID NO: 741882
ucuuaacauacucuaugcu

SEQ ID NO: 741884 - RNA, 19 nt, Artificial Sequence
  Description of Artificial Sequence: Synthetic oligonucleotide
  Sense strand starting at position 3394 of SEQ ID NO: 586755
guacauuagguuugaaaca

SEQ ID NO: 741885 - RNA, 19 nt, Artificial Sequence
  Description of Artificial Sequence: Synthetic oligonucleotide
  Antisense strand to SEQ ID NO: 741884
uguuucaaaccuaauguac

SEQ ID NO: 741886 - RNA, 19 nt, Artificial Sequence
  Description of Artificial Sequence: Synthetic oligonucleotide
  Sense strand starting at position 3546 of SEQ ID NO: 586755
ucaugaaacugagaagaau

SEQ ID NO: 741887 - RNA, 19 nt, Artificial Sequence
  Description of Artificial Sequence: Synthetic oligonucleotide
  Antisense strand to SEQ ID NO: 741886
auucuucucaguuucauga

SEQ ID NO: 741888 - RNA, 19 nt, Artificial Sequence
  Description of Artificial Sequence: Synthetic oligonucleotide
  Sense strand starting at position 3776 of SEQ ID NO: 586755
auucguagcaauugggaua

SEQ ID NO: 741889 - RNA, 19 nt, Artificial Sequence
  Description of Artificial Sequence: Synthetic oligonucleotide
  Antisense strand to SEQ ID NO: 741888
uaucccaauugcuacgaau

SEQ ID NO: 741890 - RNA, 19 nt, Artificial Sequence
  Description of Artificial Sequence: Synthetic oligonucleotide
  Sense strand starting at position 3790 of SEQ ID NO: 586755
ggauauugccaucauaagc

SEQ ID NO: 741891 - RNA, 19 nt, Artificial Sequence
  Description of Artificial Sequence: Synthetic oligonucleotide
  Antisense strand to SEQ ID NO: 741890
gcuuaugauggcaauaucc

SEQ ID NO: 741892 - RNA, 19 nt, Artificial Sequence
  Description of Artificial Sequence: Synthetic oligonucleotide
  Sense strand starting at position 3821 of SEQ ID NO: 586755
gcgcuugguauguuuacca

SEQ ID NO: 741893 - RNA, 19 nt, Artificial Sequence
  Description of Artificial Sequence: Synthetic oligonucleotide
  Antisense strand to SEQ ID NO: 741892
ugguaaacauaccaagcgc

SEQ ID NO: 741894 - RNA, 19 nt, Artificial Sequence
  Description of Artificial Sequence: Synthetic oligonucleotide
  Sense strand starting at position 3839 of SEQ ID NO: 586755
aguuaucagucaucaaauu

SEQ ID NO: 741895 - RNA, 19 nt, Artificial Sequence
  Description of Artificial Sequence: Synthetic oligonucleotide
  Antisense strand to SEQ ID NO: 741894
aauuugaugacugauaacu

SEQ ID NO: 741896 - RNA, 19 nt, Artificial Sequence
  Description of Artificial Sequence: Synthetic oligonucleotide
  Sense strand starting at position 3840 of SEQ ID NO: 586755
guuaucagucaucaaauuc

SEQ ID NO: 741897 - RNA, 19 nt, Artificial Sequence
  Description of Artificial Sequence: Synthetic oligonucleotide
  Antisense strand to SEQ ID NO: 741896
gaauuugaugacugauaac

SEQ ID NO: 741898 - RNA, 19 nt, Artificial Sequence
  Description of Artificial Sequence: Synthetic oligonucleotide
  Sense strand starting at position 120 of SEQ ID NO: 586756
guuucugggagcuaaauac

SEQ ID NO: 741899 - RNA, 19 nt, Artificial Sequence
  Description of Artificial Sequence: Synthetic oligonucleotide
  Antisense strand to SEQ ID NO: 741898
guauuuagcucccagaaac

SEQ ID NO: 741900 - RNA, 19 nt, Artificial Sequence
  Description of Artificial Sequence: Synthetic oligonucleotide
  Sense strand starting at position 210 of SEQ ID NO: 586756
ucacuagauuaauugugga

SEQ ID NO: 741901 - RNA, 19 nt, Artificial Sequence
  Description of Artificial Sequence: Synthetic oligonucleotide
  Antisense strand to SEQ ID NO: 741900
uccacaauuaaucuaguga

SEQ ID NO: 741902 - RNA, 19 nt, Artificial Sequence
  Description of Artificial Sequence: Synthetic oligonucleotide
  Sense strand starting at position 240 of SEQ ID NO: 586756
gacugucuucccugaagug

SEQ ID NO: 741903 - RNA, 19 nt, Artificial Sequence
  Description of Artificial Sequence: Synthetic oligonucleotide
  Antisense strand to SEQ ID NO: 741902
cacuucagggaagacaguc

SEQ ID NO: 741904 - RNA, 19 nt, Artificial Sequence
  Description of Artificial Sequence: Synthetic oligonucleotide
  Sense strand starting at position 266 of SEQ ID NO: 586756
acgugaaaccaucacgcaa

SEQ ID NO: 741905 - RNA, 19 nt, Artificial Sequence
  Description of Artificial Sequence: Synthetic oligonucleotide
  Antisense strand to SEQ ID NO: 741904
uugcgugaugguuucacgu

SEQ ID NO: 741906 - RNA, 19 nt, Artificial Sequence
  Description of Artificial Sequence: Synthetic oligonucleotide
  Sense strand starting at position 362 of SEQ ID NO: 586756
ggaguaucaccuuagguca

SEQ ID NO: 741907 - RNA, 19 nt, Artificial Sequence
  Description of Artificial Sequence: Synthetic oligonucleotide
  Antisense strand to SEQ ID NO: 741906
ugaccuaaggugauacucc

SEQ ID NO: 741908 - RNA, 19 nt, Artificial Sequence
  Description of Artificial Sequence: Synthetic oligonucleotide
  Sense strand starting at position 592 of SEQ ID NO: 586756
ucagaugaauagcccuaaa

SEQ ID NO: 741909 - RNA, 19 nt, Artificial Sequence
  Description of Artificial Sequence: Synthetic oligonucleotide
  Antisense strand to SEQ ID NO: 741908
uuuagggcuauucaucuga

SEQ ID NO: 741910 - RNA, 19 nt, Artificial Sequence
  Description of Artificial Sequence: Synthetic oligonucleotide
  Sense strand starting at position 624 of SEQ ID NO: 586756
gggagacagcaccgaauua

SEQ ID NO: 741911 - RNA, 19 nt, Artificial Sequence
  Description of Artificial Sequence: Synthetic oligonucleotide
  Antisense strand to SEQ ID NO: 741910
uaauucggugcugucuccc

SEQ ID NO: 741912 - RNA, 19 nt, Artificial Sequence
  Description of Artificial Sequence: Synthetic oligonucleotide
  Sense strand starting at position 1229 of SEQ ID NO: 586756
caaagaaguccacgacuuc

SEQ ID NO: 741913 - RNA, 19 nt, Artificial Sequence
  Description of Artificial Sequence: Synthetic oligonucleotide
  Antisense strand to SEQ ID NO: 741912
gaagucguggacuucuuug

SEQ ID NO: 741914 - RNA, 19 nt, Artificial Sequence
  Description of Artificial Sequence: Synthetic oligonucleotide
  Sense strand starting at position 2120 of SEQ ID NO: 586756
agaauuagcuaugauuuga

SEQ ID NO: 741915 - RNA, 19 nt, Artificial Sequence
  Description of Artificial Sequence: Synthetic oligonucleotide
  Antisense strand to SEQ ID NO: 741914
ucaaaucauagcuaauucu

SEQ ID NO: 741916 - RNA, 19 nt, Artificial Sequence
  Description of Artificial Sequence: Synthetic oligonucleotide
  Sense strand starting at position 2125 of SEQ ID NO: 586756
uagcuaugauuugagagac

SEQ ID NO: 741917 - RNA, 19 nt, Artificial Sequence
  Description of Artificial Sequence: Synthetic oligonucleotide
  Antisense strand to SEQ ID NO: 741916
gucucucaaaucauagcua

SEQ ID NO: 741918 - RNA, 19 nt, Artificial Sequence
  Description of Artificial Sequence: Synthetic oligonucleotide
  Sense strand starting at position 2171 of SEQ ID NO: 586756
cuuagcuugggcugagaaa

SEQ ID NO: 741919 - RNA, 19 nt, Artificial Sequence
  Description of Artificial Sequence: Synthetic oligonucleotide
  Antisense strand to SEQ ID NO: 741918
uuucucagcccaagcuaag

SEQ ID NO: 741920 - RNA, 19 nt, Artificial Sequence
  Description of Artificial Sequence: Synthetic oligonucleotide
  Sense strand starting at position 2687 of SEQ ID NO: 586756
auuauaucagaacgaguga

SEQ ID NO: 741921 - RNA, 19 nt, Artificial Sequence
  Description of Artificial Sequence: Synthetic oligonucleotide
  Antisense strand to SEQ ID NO: 741920
ucacucguucugauauaau

SEQ ID NO: 741922 - RNA, 19 nt, Artificial Sequence
  Description of Artificial Sequence: Synthetic oligonucleotide
  Sense strand starting at position 2712 of SEQ ID NO: 586756
ccauccuugccuggaggau

SEQ ID NO: 741923 - RNA, 19 nt, Artificial Sequence
  Description of Artificial Sequence: Synthetic oligonucleotide
  Antisense strand to SEQ ID NO: 741922
auccuccaggcaaggaugg

SEQ ID NO: 741924 - RNA, 19 nt, Artificial Sequence
  Description of Artificial Sequence: Synthetic oligonucleotide
  Sense strand starting at position 2727 of SEQ ID NO: 586756
ggaucuaagucucuuugac

SEQ ID NO: 741925 - RNA, 19 nt, Artificial Sequence
  Description of Artificial Sequence: Synthetic oligonucleotide
  Antisense strand to SEQ ID NO: 741924
gucaaagagacuuagaucc

SEQ ID NO: 741926 - RNA, 19 nt, Artificial Sequence
  Description of Artificial Sequence: Synthetic oligonucleotide
  Sense strand starting at position 2735 of SEQ ID NO: 586756
gucucuuugacgcagagaa

SEQ ID NO: 741927 - RNA, 19 nt, Artificial Sequence
  Description of Artificial Sequence: Synthetic oligonucleotide
  Antisense strand to SEQ ID NO: 741926
uucucugcgucaaagagac

SEQ ID NO: 741928 - RNA, 19 nt, Artificial Sequence
  Description of Artificial Sequence: Synthetic oligonucleotide
  Sense strand starting at position 2764 of SEQ ID NO: 586756
uuucuauccagguguagag

SEQ ID NO: 741929 - RNA, 19 nt, Artificial Sequence
  Description of Artificial Sequence: Synthetic oligonucleotide
  Antisense strand to SEQ ID NO: 741928
cucuacaccuggauagaaa

SEQ ID NO: 741930 - RNA, 19 nt, Artificial Sequence
  Description of Artificial Sequence: Synthetic oligonucleotide
  Sense strand starting at position 2774 of SEQ ID NO: 586756
gguguagagcuucagauaa

SEQ ID NO: 741931 - RNA, 19 nt, Artificial Sequence
  Description of Artificial Sequence: Synthetic oligonucleotide
  Antisense strand to SEQ ID NO: 741930
uuaucugaagcucuacacc

SEQ ID NO: 741932 - RNA, 19 nt, Artificial Sequence
  Description of Artificial Sequence: Synthetic oligonucleotide
  Sense strand starting at position 2839 of SEQ ID NO: 586756
ggaaacaugcccuacauuc

SEQ ID NO: 741933 - RNA, 19 nt, Artificial Sequence
  Description of Artificial Sequence: Synthetic oligonucleotide
  Antisense strand to SEQ ID NO: 741932
gaauguagggcauguuucc

SEQ ID NO: 741934 - RNA, 19 nt, Artificial Sequence
  Description of Artificial Sequence: Synthetic oligonucleotide
  Sense strand starting at position 2863 of SEQ ID NO: 586756
ucguccagaccugauguua

SEQ ID NO: 741935 - RNA, 19 nt, Artificial Sequence
  Description of Artificial Sequence: Synthetic oligonucleotide
  Antisense strand to SEQ ID NO: 741934
uaacaucaggucuggacga

SEQ ID NO: 741936 - RNA, 19 nt, Artificial Sequence
  Description of Artificial Sequence: Synthetic oligonucleotide
  Sense strand starting at position 3012 of SEQ ID NO: 586756
agucuucuugauugcaaua

SEQ ID NO: 741937 - RNA, 19 nt, Artificial Sequence
  Description of Artificial Sequence: Synthetic oligonucleotide
  Antisense strand to SEQ ID NO: 741936
uauugcaaucaagaagacu

SEQ ID NO: 741938 - RNA, 19 nt, Artificial Sequence
  Description of Artificial Sequence: Synthetic oligonucleotide
  Sense strand starting at position 3017 of SEQ ID NO: 586756
ucuugauugcaauaaguca

SEQ ID NO: 741939 - RNA, 19 nt, Artificial Sequence
  Description of Artificial Sequence: Synthetic oligonucleotide
  Antisense strand to SEQ ID NO: 741938
ugacuuauugcaaucaaga

SEQ ID NO: 741940 - RNA, 19 nt, Artificial Sequence
  Description of Artificial Sequence: Synthetic oligonucleotide
  Sense strand starting at position 3025 of SEQ ID NO: 586756
gcaauaagucaauagaucu

SEQ ID NO: 741941 - RNA, 19 nt, Artificial Sequence
  Description of Artificial Sequence: Synthetic oligonucleotide
  Antisense strand to SEQ ID NO: 741940
agaucuauugacuuauugc

SEQ ID NO: 741942 - RNA, 19 nt, Artificial Sequence
  Description of Artificial Sequence: Synthetic oligonucleotide
  Sense strand starting at position 3037 of SEQ ID NO: 586756
uagaucugacuuuguugga

SEQ ID NO: 741943 - RNA, 19 nt, Artificial Sequence
  Description of Artificial Sequence: Synthetic oligonucleotide
  Antisense strand to SEQ ID NO: 741942
uccaacaaagucagaucua

SEQ ID NO: 741944 - RNA, 19 nt, Artificial Sequence
  Description of Artificial Sequence: Synthetic oligonucleotide
  Sense strand starting at position 3038 of SEQ ID NO: 586756
agaucugacuuuguuggau

SEQ ID NO: 741945 - RNA, 19 nt, Artificial Sequence
  Description of Artificial Sequence: Synthetic oligonucleotide
  Antisense strand to SEQ ID NO: 741944
auccaacaaagucagaucu

SEQ ID NO: 741946 - RNA, 19 nt, Artificial Sequence
  Description of Artificial Sequence: Synthetic oligonucleotide
  Sense strand starting at position 3079 of SEQ ID NO: 586756
uaggauuauugagcuggga

SEQ ID NO: 741947 - RNA, 19 nt, Artificial Sequence
  Description of Artificial Sequence: Synthetic oligonucleotide
  Antisense strand to SEQ ID NO: 741946
ucccagcucaauaauccua

SEQ ID NO: 741948 - RNA, 19 nt, Artificial Sequence
  Description of Artificial Sequence: Synthetic oligonucleotide
  Sense strand starting at position 3081 of SEQ ID NO: 586756
ggauuauugagcugggagu

SEQ ID NO: 741949 - RNA, 19 nt, Artificial Sequence
  Description of Artificial Sequence: Synthetic oligonucleotide
  Antisense strand to SEQ ID NO: 741948
acucccagcucaauaaucc

SEQ ID NO: 741950 - RNA, 19 nt, Artificial Sequence
  Description of Artificial Sequence: Synthetic oligonucleotide
  Sense strand starting at position 3083 of SEQ ID NO: 586756
auuauugagcugggaguga

SEQ ID NO: 741951 - RNA, 19 nt, Artificial Sequence
  Description of Artificial Sequence: Synthetic oligonucleotide
  Antisense strand to SEQ ID NO: 741950
ucacucccagcucaauaau

SEQ ID NO: 741952 - RNA, 19 nt, Artificial Sequence
  Description of Artificial Sequence: Synthetic oligonucleotide
  Sense strand starting at position 3092 of SEQ ID NO: 586756
cugggagugagccaucauu

SEQ ID NO: 741953 - RNA, 19 nt, Artificial Sequence
  Description of Artificial Sequence: Synthetic oligonucleotide
  Antisense strand to SEQ ID NO: 741952
aaugauggcucacucccag

SEQ ID NO: 741954 - RNA, 19 nt, Artificial Sequence
  Description of Artificial Sequence: Synthetic oligonucleotide
  Sense strand starting at position 3159 of SEQ ID NO: 586756
acgggaacuacuuguccaa

SEQ ID NO: 741955 - RNA, 19 nt, Artificial Sequence
  Description of Artificial Sequence: Synthetic oligonucleotide
  Antisense strand to SEQ ID NO: 741954
uuggacaaguaguucccgu

SEQ ID NO: 741956 - RNA, 19 nt, Artificial Sequence
  Description of Artificial Sequence: Synthetic oligonucleotide
  Sense strand starting at position 3161 of SEQ ID NO: 586756
gggaacuacuuguccaaac

SEQ ID NO: 741957 - RNA, 19 nt, Artificial Sequence
  Description of Artificial Sequence: Synthetic oligonucleotide
  Antisense strand to SEQ ID NO: 741956
guuuggacaaguaguuccc

SEQ ID NO: 741958 - RNA, 19 nt, Artificial Sequence
  Description of Artificial Sequence: Synthetic oligonucleotide
  Sense strand starting at position 3162 of SEQ ID NO: 586756
ggaacuacuuguccaaacu

SEQ ID NO: 741959 - RNA, 19 nt, Artificial Sequence
  Description of Artificial Sequence: Synthetic oligonucleotide
  Antisense strand to SEQ ID NO: 741958
aguuuggacaaguaguucc

SEQ ID NO: 741960 - RNA, 19 nt, Artificial Sequence
  Description of Artificial Sequence: Synthetic oligonucleotide
  Sense strand starting at position 3284 of SEQ ID NO: 586756
gacuauguugcagaccuaa

SEQ ID NO: 741961 - RNA, 19 nt, Artificial Sequence
  Description of Artificial Sequence: Synthetic oligonucleotide
  Antisense strand to SEQ ID NO: 741960
uuaggucugcaacauaguc

SEQ ID NO: 741962 - RNA, 19 nt, Artificial Sequence
  Description of Artificial Sequence: Synthetic oligonucleotide
  Sense strand starting at position 3454 of SEQ ID NO: 586756
ccaauauuguccuuuagag

SEQ ID NO: 741963 - RNA, 19 nt, Artificial Sequence
  Description of Artificial Sequence: Synthetic oligonucleotide
  Antisense strand to SEQ ID NO: 741962
cucuaaaggacaauauugg

SEQ ID NO: 741964 - RNA, 19 nt, Artificial Sequence
  Description of Artificial Sequence: Synthetic oligonucleotide
  Sense strand starting at position 3661 of SEQ ID NO: 586756
cuuugucaggauuaucaca

SEQ ID NO: 741965 - RNA, 19 nt, Artificial Sequence
  Description of Artificial Sequence: Synthetic oligonucleotide
  Antisense strand to SEQ ID NO: 741964
ugugauaauccugacaaag

SEQ ID NO: 741966 - RNA, 19 nt, Artificial Sequence
  Description of Artificial Sequence: Synthetic oligonucleotide
  Sense strand starting at position 3663 of SEQ ID NO: 586756
uugucaggauuaucacaga

SEQ ID NO: 741967 - RNA, 19 nt, Artificial Sequence
  Description of Artificial Sequence: Synthetic oligonucleotide
  Antisense strand to SEQ ID NO: 741966
ucugugauaauccugacaa

SEQ ID NO: 741968 - RNA, 19 nt, Artificial Sequence
  Description of Artificial Sequence: Synthetic oligonucleotide
  Sense strand starting at position 3737 of SEQ ID NO: 586756
accuguaaugcucaaugga

SEQ ID NO: 741969 - RNA, 19 nt, Artificial Sequence
  Description of Artificial Sequence: Synthetic oligonucleotide
  Antisense strand to SEQ ID NO: 741968
uccauugagcauuacaggu

SEQ ID NO: 741970 - RNA, 19 nt, Artificial Sequence
  Description of Artificial Sequence: Synthetic oligonucleotide
  Sense strand starting at position 3740 of SEQ ID NO: 586756
uguaaugcucaauggauua

SEQ ID NO: 741971 - RNA, 19 nt, Artificial Sequence
  Description of Artificial Sequence: Synthetic oligonucleotide
  Antisense strand to SEQ ID NO: 741970
uaauccauugagcauuaca

SEQ ID NO: 741972 - RNA, 19 nt, Artificial Sequence
  Description of Artificial Sequence: Synthetic oligonucleotide
  Sense strand starting at position 3752 of SEQ ID NO: 586756
uggauuacuugcuuaaggu

SEQ ID NO: 741973 - RNA, 19 nt, Artificial Sequence
  Description of Artificial Sequence: Synthetic oligonucleotide
  Antisense strand to SEQ ID NO: 741972
accuuaagcaaguaaucca

SEQ ID NO: 741974 - RNA, 19 nt, Artificial Sequence
  Description of Artificial Sequence: Synthetic oligonucleotide
  Sense strand starting at position 3753 of SEQ ID NO: 586756
ggauuacuugcuuaaggug

SEQ ID NO: 741975 - RNA, 19 nt, Artificial Sequence
  Description of Artificial Sequence: Synthetic oligonucleotide
  Antisense strand to SEQ ID NO: 741974
caccuuaagcaaguaaucc

SEQ ID NO: 741976 - RNA, 19 nt, Artificial Sequence
  Description of Artificial Sequence: Synthetic oligonucleotide
  Sense strand starting at position 3783 of SEQ ID NO: 586756
gcugcucuaccauaaaguu

SEQ ID NO: 741977 - RNA, 19 nt, Artificial Sequence
  Description of Artificial Sequence: Synthetic oligonucleotide
  Antisense strand to SEQ ID NO: 741976
aacuuuaugguagagcagc

SEQ ID NO: 741978 - RNA, 19 nt, Artificial Sequence
  Description of Artificial Sequence: Synthetic oligonucleotide
  Sense strand starting at position 131 of SEQ ID NO: 586757
ggccgacauuuagguagaa

SEQ ID NO: 741979 - RNA, 19 nt, Artificial Sequence
  Description of Artificial Sequence: Synthetic oligonucleotide
  Antisense strand to SEQ ID NO: 741978
uucuaccuaaaugucggcc

SEQ ID NO: 741980 - RNA, 19 nt, Artificial Sequence
  Description of Artificial Sequence: Synthetic oligonucleotide
  Sense strand starting at position 182 of SEQ ID NO: 586757
ccgcuuaucuuugugaccu

SEQ ID NO: 741981 - RNA, 19 nt, Artificial Sequence
  Description of Artificial Sequence: Synthetic oligonucleotide
  Antisense strand to SEQ ID NO: 741980
aggucacaaagauaagcgg

SEQ ID NO: 741982 - RNA, 19 nt, Artificial Sequence
  Description of Artificial Sequence: Synthetic oligonucleotide
  Sense strand starting at position 218 of SEQ ID NO: 586757
acaaaucauuuguggacuu

SEQ ID NO: 741983 - RNA, 19 nt, Artificial Sequence
  Description of Artificial Sequence: Synthetic oligonucleotide
  Antisense strand to SEQ ID NO: 741982
aaguccacaaaugauuugu

SEQ ID NO: 741984 - RNA, 19 nt, Artificial Sequence
  Description of Artificial Sequence: Synthetic oligonucleotide
  Sense strand starting at position 242 of SEQ ID NO: 586757
gaguuaccauaguaacuga

SEQ ID NO: 741985 - RNA, 19 nt, Artificial Sequence
  Description of Artificial Sequence: Synthetic oligonucleotide
  Antisense strand to SEQ ID NO: 741984
ucaguuacuaugguaacuc

SEQ ID NO: 741986 - RNA, 19 nt, Artificial Sequence
  Description of Artificial Sequence: Synthetic oligonucleotide
  Sense strand starting at position 355 of SEQ ID NO: 586757
acaaucaauuaguaaggaa

SEQ ID NO: 741987 - RNA, 19 nt, Artificial Sequence
  Description of Artificial Sequence: Synthetic oligonucleotide
  Antisense strand to SEQ ID NO: 741986
uuccuuacuaauugauugu

SEQ ID NO: 741988 - RNA, 19 nt, Artificial Sequence
  Description of Artificial Sequence: Synthetic oligonucleotide
  Sense strand starting at position 390 of SEQ ID NO: 586757
aaacuuaagugacagcgaa

SEQ ID NO: 741989 - RNA, 19 nt, Artificial Sequence
  Description of Artificial Sequence: Synthetic oligonucleotide
  Antisense strand to SEQ ID NO: 741988
uucgcugucacuuaaguuu

SEQ ID NO: 741990 - RNA, 19 nt, Artificial Sequence
  Description of Artificial Sequence: Synthetic oligonucleotide
  Sense strand starting at position 410 of SEQ ID NO: 586757
aguucuguugaccaaacau

SEQ ID NO: 741991 - RNA, 19 nt, Artificial Sequence
  Description of Artificial Sequence: Synthetic oligonucleotide
  Antisense strand to SEQ ID NO: 741990
auguuuggucaacagaacu

SEQ ID NO: 741992 - RNA, 19 nt, Artificial Sequence
  Description of Artificial Sequence: Synthetic oligonucleotide
  Sense strand starting at position 449 of SEQ ID NO: 586757
ccaaguuacaguuggaguu

SEQ ID NO: 741993 - RNA, 19 nt, Artificial Sequence
  Description of Artificial Sequence: Synthetic oligonucleotide
  Antisense strand to SEQ ID NO: 741992
aacuccaacuguaacuugg

SEQ ID NO: 741994 - RNA, 19 nt, Artificial Sequence
  Description of Artificial Sequence: Synthetic oligonucleotide
  Sense strand starting at position 450 of SEQ ID NO: 586757
caaguuacaguuggaguua

SEQ ID NO: 741995 - RNA, 19 nt, Artificial Sequence
  Description of Artificial Sequence: Synthetic oligonucleotide
  Antisense strand to SEQ ID NO: 741994
uaacuccaacuguaacuug

SEQ ID NO: 741996 - RNA, 19 nt, Artificial Sequence
  Description of Artificial Sequence: Synthetic oligonucleotide
  Sense strand starting at position 492 of SEQ ID NO: 586757
uucgguauccuguaggaaa

SEQ ID NO: 741997 - RNA, 19 nt, Artificial Sequence
  Description of Artificial Sequence: Synthetic oligonucleotide
  Antisense strand to SEQ ID NO: 741996
uuuccuacaggauaccgaa

SEQ ID NO: 741998 - RNA, 19 nt, Artificial Sequence
  Description of Artificial Sequence: Synthetic oligonucleotide
  Sense strand starting at position 494 of SEQ ID NO: 586757
cgguauccuguaggaaaua

SEQ ID NO: 741999 - RNA, 19 nt, Artificial Sequence
  Description of Artificial Sequence: Synthetic oligonucleotide
  Antisense strand to SEQ ID NO: 741998
uauuuccuacaggauaccg

SEQ ID NO: 742000 - RNA, 19 nt, Artificial Sequence
  Description of Artificial Sequence: Synthetic oligonucleotide
  Sense strand starting at position 858 of SEQ ID NO: 586757
gaguaugagcgccggaaga

SEQ ID NO: 742001 - RNA, 19 nt, Artificial Sequence
  Description of Artificial Sequence: Synthetic oligonucleotide
  Antisense strand to SEQ ID NO: 742000
ucuuccggcgcucauacuc

SEQ ID NO: 742002 - RNA, 19 nt, Artificial Sequence
  Description of Artificial Sequence: Synthetic oligonucleotide
  Sense strand starting at position 860 of SEQ ID NO: 586757
guaugagcgccggaagaaa

SEQ ID NO: 742003 - RNA, 19 nt, Artificial Sequence
  Description of Artificial Sequence: Synthetic oligonucleotide
  Antisense strand to SEQ ID NO: 742002
uuucuuccggcgcucauac

SEQ ID NO: 742004 - RNA, 19 nt, Artificial Sequence
  Description of Artificial Sequence: Synthetic oligonucleotide
  Sense strand starting at position 984 of SEQ ID NO: 586757
ccgggcucgaucgcauaua

SEQ ID NO: 742005 - RNA, 19 nt, Artificial Sequence
  Description of Artificial Sequence: Synthetic oligonucleotide
  Antisense strand to SEQ ID NO: 742004
uauaugcgaucgagcccgg

SEQ ID NO: 742006 - RNA, 19 nt, Artificial Sequence
  Description of Artificial Sequence: Synthetic oligonucleotide
  Sense strand starting at position 1369 of SEQ ID NO: 586757
aggcaucgaucgcuuauau

SEQ ID NO: 742007 - RNA, 19 nt, Artificial Sequence
  Description of Artificial Sequence: Synthetic oligonucleotide
  Antisense strand to SEQ ID NO: 742006
auauaagcgaucgaugccu

SEQ ID NO: 742008 - RNA, 19 nt, Artificial Sequence
  Description of Artificial Sequence: Synthetic oligonucleotide
  Sense strand starting at position 1454 of SEQ ID NO: 586757
augcuauugcuauggccau

SEQ ID NO: 742009 - RNA, 19 nt, Artificial Sequence
  Description of Artificial Sequence: Synthetic oligonucleotide
  Antisense strand to SEQ ID NO: 742008
auggccauagcaauagcau

SEQ ID NO: 742010 - RNA, 19 nt, Artificial Sequence
  Description of Artificial Sequence: Synthetic oligonucleotide
  Sense strand starting at position 1830 of SEQ ID NO: 586757
cguaaagcuccuccucgua

SEQ ID NO: 742011 - RNA, 19 nt, Artificial Sequence
  Description of Artificial Sequence: Synthetic oligonucleotide
  Antisense strand to SEQ ID NO: 742010
uacgaggaggagcuuuacg

SEQ ID NO: 742012 - RNA, 19 nt, Artificial Sequence
  Description of Artificial Sequence: Synthetic oligonucleotide
  Sense strand starting at position 2095 of SEQ ID NO: 586757
gcugucuucuccuuggagu

SEQ ID NO: 742013 - RNA, 19 nt, Artificial Sequence
  Description of Artificial Sequence: Synthetic oligonucleotide
  Antisense strand to SEQ ID NO: 742012
acuccaaggagaagacagc

SEQ ID NO: 742014 - RNA, 19 nt, Artificial Sequence
  Description of Artificial Sequence: Synthetic oligonucleotide
  Sense strand starting at position 2146 of SEQ ID NO: 586757
ccuguuguugcuggagaag

SEQ ID NO: 742015 - RNA, 19 nt, Artificial Sequence
  Description of Artificial Sequence: Synthetic oligonucleotide
  Antisense strand to SEQ ID NO: 742014
cuucuccagcaacaacagg

SEQ ID NO: 742016 - RNA, 19 nt, Artificial Sequence
  Description of Artificial Sequence: Synthetic oligonucleotide
  Sense strand starting at position 2330 of SEQ ID NO: 586757
cuacuugaacuccaagguu

SEQ ID NO: 742017 - RNA, 19 nt, Artificial Sequence
  Description of Artificial Sequence: Synthetic oligonucleotide
  Antisense strand to SEQ ID NO: 742016
aaccuuggaguucaaguag

SEQ ID NO: 742018 - RNA, 19 nt, Artificial Sequence
  Description of Artificial Sequence: Synthetic oligonucleotide
  Sense strand starting at position 2400 of SEQ ID NO: 586757
gagguaaacucugucuaaa

SEQ ID NO: 742019 - RNA, 19 nt, Artificial Sequence
  Description of Artificial Sequence: Synthetic oligonucleotide
  Antisense strand to SEQ ID NO: 742018
uuuagacagaguuuaccuc

SEQ ID NO: 742020 - RNA, 19 nt, Artificial Sequence
  Description of Artificial Sequence: Synthetic oligonucleotide
  Sense strand starting at position 2434 of SEQ ID NO: 586757
acuauccaagugugcaaua

SEQ ID NO: 742021 - RNA, 19 nt, Artificial Sequence
  Description of Artificial Sequence: Synthetic oligonucleotide
  Antisense strand to SEQ ID NO: 742020
uauugcacacuuggauagu

SEQ ID NO: 742022 - RNA, 19 nt, Artificial Sequence
  Description of Artificial Sequence: Synthetic oligonucleotide
  Sense strand starting at position 2482 of SEQ ID NO: 586757
cugacugggcccuguaauc

SEQ ID NO: 742023 - RNA, 19 nt, Artificial Sequence
  Description of Artificial Sequence: Synthetic oligonucleotide
  Antisense strand to SEQ ID NO: 742022
gauuacagggcccagucag

SEQ ID NO: 742024 - RNA, 19 nt, Artificial Sequence
  Description of Artificial Sequence: Synthetic oligonucleotide
  Sense strand starting at position 2661 of SEQ ID NO: 586757
aguuucguccuggguucaa

SEQ ID NO: 742025 - RNA, 19 nt, Artificial Sequence
  Description of Artificial Sequence: Synthetic oligonucleotide
  Antisense strand to SEQ ID NO: 742024
uugaacccaggacgaaacu

SEQ ID NO: 742026 - RNA, 19 nt, Artificial Sequence
  Description of Artificial Sequence: Synthetic oligonucleotide
  Sense strand starting at position 3257 of SEQ ID NO: 586757
gagaccaugucucuagaua

SEQ ID NO: 742027 - RNA, 19 nt, Artificial Sequence
  Description of Artificial Sequence: Synthetic oligonucleotide
  Antisense strand to SEQ ID NO: 742026
uaucuagagacauggucuc

SEQ ID NO: 742028 - RNA, 19 nt, Artificial Sequence
  Description of Artificial Sequence: Synthetic oligonucleotide
  Sense strand starting at position 3281 of SEQ ID NO: 586757
cuagauaauugauacauag

SEQ ID NO: 742029 - RNA, 19 nt, Artificial Sequence
  Description of Artificial Sequence: Synthetic oligonucleotide
  Antisense strand to SEQ ID NO: 742028
cuauguaucaauuaucuag

SEQ ID NO: 742030 - RNA, 19 nt, Artificial Sequence
  Description of Artificial Sequence: Synthetic oligonucleotide
  Sense strand starting at position 3297 of SEQ ID NO: 586757
uagcuuucugucggaaauu

SEQ ID NO: 742031 - RNA, 19 nt, Artificial Sequence
  Description of Artificial Sequence: Synthetic oligonucleotide
  Antisense strand to SEQ ID NO: 742030
aauuuccgacagaaagcua

SEQ ID NO: 742032 - RNA, 19 nt, Artificial Sequence
  Description of Artificial Sequence: Synthetic oligonucleotide
  Sense strand starting at position 3298 of SEQ ID NO: 586757
agcuuucugucggaaauuu

SEQ ID NO: 742033 - RNA, 19 nt, Artificial Sequence
  Description of Artificial Sequence: Synthetic oligonucleotide
  Antisense strand to SEQ ID NO: 742032
aaauuuccgacagaaagcu

SEQ ID NO: 742034 - RNA, 19 nt, Artificial Sequence
  Description of Artificial Sequence: Synthetic oligonucleotide
  Sense strand starting at position 3452 of SEQ ID NO: 586757
auagauagguccucaagug

SEQ ID NO: 742035 - RNA, 19 nt, Artificial Sequence
  Description of Artificial Sequence: Synthetic oligonucleotide
  Antisense strand to SEQ ID NO: 742034
cacuugaggaccuaucuau

SEQ ID NO: 742036 - RNA, 19 nt, Artificial Sequence
  Description of Artificial Sequence: Synthetic oligonucleotide
  Sense strand starting at position 3504 of SEQ ID NO: 586757
uucuccaguugauuggaaa

SEQ ID NO: 742037 - RNA, 19 nt, Artificial Sequence
  Description of Artificial Sequence: Synthetic oligonucleotide
  Antisense strand to SEQ ID NO: 742036
uuuccaaucaacuggagaa

SEQ ID NO: 742038 - RNA, 19 nt, Artificial Sequence
  Description of Artificial Sequence: Synthetic oligonucleotide
  Sense strand starting at position 3541 of SEQ ID NO: 586757
ggucacuguuggccuuaaa

SEQ ID NO: 742039 - RNA, 19 nt, Artificial Sequence
  Description of Artificial Sequence: Synthetic oligonucleotide
  Antisense strand to SEQ ID NO: 742038
uuuaaggccaacagugacc

SEQ ID NO: 742040 - RNA, 19 nt, Artificial Sequence
  Description of Artificial Sequence: Synthetic oligonucleotide
  Sense strand starting at position 3544 of SEQ ID NO: 586757
cacuguuggccuuaaagaa

SEQ ID NO: 742041 - RNA, 19 nt, Artificial Sequence
  Description of Artificial Sequence: Synthetic oligonucleotide
  Antisense strand to SEQ ID NO: 742040
uucuuuaaggccaacagug

SEQ ID NO: 742042 - RNA, 19 nt, Artificial Sequence
  Description of Artificial Sequence: Synthetic oligonucleotide
  Sense strand starting at position 3591 of SEQ ID NO: 586757
gguguucagucgccuucua

SEQ ID NO: 742043 - RNA, 19 nt, Artificial Sequence
  Description of Artificial Sequence: Synthetic oligonucleotide
  Antisense strand to SEQ ID NO: 742042
uagaaggcgacugaacacc

SEQ ID NO: 742044 - RNA, 19 nt, Artificial Sequence
  Description of Artificial Sequence: Synthetic oligonucleotide
  Sense strand starting at position 3755 of SEQ ID NO: 586757
uggaguuacacaugaaguc

SEQ ID NO: 742045 - RNA, 19 nt, Artificial Sequence
  Description of Artificial Sequence: Synthetic oligonucleotide
  Antisense strand to SEQ ID NO: 742044
gacuucauguguaacucca

SEQ ID NO: 742046 - RNA, 19 nt, Artificial Sequence
  Description of Artificial Sequence: Synthetic oligonucleotide
  Sense strand starting at position 3833 of SEQ ID NO: 586757
ccuguuucuuuaguuguua

SEQ ID NO: 742047 - RNA, 19 nt, Artificial Sequence
  Description of Artificial Sequence: Synthetic oligonucleotide
  Antisense strand to SEQ ID NO: 742046
uaacaacuaaagaaacagg

SEQ ID NO: 742048 - RNA, 19 nt, Artificial Sequence
  Description of Artificial Sequence: Synthetic oligonucleotide
  Sense strand starting at position 3834 of SEQ ID NO: 586757
cuguuucuuuaguuguuaa

SEQ ID NO: 742049 - RNA, 19 nt, Artificial Sequence
  Description of Artificial Sequence: Synthetic oligonucleotide
  Antisense strand to SEQ ID NO: 742048
uuaacaacuaaagaaacag

SEQ ID NO: 742050 - RNA, 19 nt, Artificial Sequence
  Description of Artificial Sequence: Synthetic oligonucleotide
  Sense strand starting at position 3883 of SEQ ID NO: 586757
gacagcuuauuguauuuga

SEQ ID NO: 742051 - RNA, 19 nt, Artificial Sequence
  Description of Artificial Sequence: Synthetic oligonucleotide
  Antisense strand to SEQ ID NO: 742050
ucaaauacaauaagcuguc

SEQ ID NO: 742052 - RNA, 19 nt, Artificial Sequence
  Description of Artificial Sequence: Synthetic oligonucleotide
  Sense strand starting at position 3890 of SEQ ID NO: 586757
uauuguauuugaguggucu

SEQ ID NO: 742053 - RNA, 19 nt, Artificial Sequence
  Description of Artificial Sequence: Synthetic oligonucleotide
  Antisense strand to SEQ ID NO: 742052
agaccacucaaauacaaua

SEQ ID NO: 742054 - RNA, 19 nt, Artificial Sequence
  Description of Artificial Sequence: Synthetic oligonucleotide
  Sense strand starting at position 3891 of SEQ ID NO: 586757
auuguauuugaguggucuu

SEQ ID NO: 742055 - RNA, 19 nt, Artificial Sequence
  Description of Artificial Sequence: Synthetic oligonucleotide
  Antisense strand to SEQ ID NO: 742054
aagaccacucaaauacaau

SEQ ID NO: 742056 - RNA, 19 nt, Artificial Sequence
  Description of Artificial Sequence: Synthetic oligonucleotide
  Sense strand starting at position 3892 of SEQ ID NO: 586757
uuguauuugaguggucuuu

SEQ ID NO: 742057 - RNA, 19 nt, Artificial Sequence
  Description of Artificial Sequence: Synthetic oligonucleotide
  Antisense strand to SEQ ID NO: 742056
aaagaccacucaaauacaa

SEQ ID NO: 742058 - RNA, 19 nt, Artificial Sequence
  Description of Artificial Sequence: Synthetic oligonucleotide
  Sense strand starting at position 393 of SEQ ID NO: 586758
caagguuaggcuugacaau

SEQ ID NO: 742059 - RNA, 19 nt, Artificial Sequence
  Description of Artificial Sequence: Synthetic oligonucleotide
  Antisense strand to SEQ ID NO: 742058
auugucaagccuaaccuug

SEQ ID NO: 742060 - RNA, 19 nt, Artificial Sequence
  Description of Artificial Sequence: Synthetic oligonucleotide
  Sense strand starting at position 490 of SEQ ID NO: 586758
gaguaaauccagcgccuga

SEQ ID NO: 742061 - RNA, 19 nt, Artificial Sequence
  Description of Artificial Sequence: Synthetic oligonucleotide
  Antisense strand to SEQ ID NO: 742060
ucaggcgcuggauuuacuc

SEQ ID NO: 742062 - RNA, 19 nt, Artificial Sequence
  Description of Artificial Sequence: Synthetic oligonucleotide
  Sense strand starting at position 842 of SEQ ID NO: 586758
gguagaacugaccgcgauu

SEQ ID NO: 742063 - RNA, 19 nt, Artificial Sequence
  Description of Artificial Sequence: Synthetic oligonucleotide
  Antisense strand to SEQ ID NO: 742062
aaucgcggucaguucuacc

SEQ ID NO: 742064 - RNA, 19 nt, Artificial Sequence
  Description of Artificial Sequence: Synthetic oligonucleotide
  Sense strand starting at position 854 of SEQ ID NO: 586758
cgcgauuaggugcuaggua

SEQ ID NO: 742065 - RNA, 19 nt, Artificial Sequence
  Description of Artificial Sequence: Synthetic oligonucleotide
  Antisense strand to SEQ ID NO: 742064
uaccuagcaccuaaucgcg

SEQ ID NO: 742066 - RNA, 19 nt, Artificial Sequence
  Description of Artificial Sequence: Synthetic oligonucleotide
  Sense strand starting at position 971 of SEQ ID NO: 586758
agagauacccacgaaugcu

SEQ ID NO: 742067 - RNA, 19 nt, Artificial Sequence
  Description of Artificial Sequence: Synthetic oligonucleotide
  Antisense strand to SEQ ID NO: 742066
agcauucguggguaucucu

SEQ ID NO: 742068 - RNA, 19 nt, Artificial Sequence
  Description of Artificial Sequence: Synthetic oligonucleotide
  Sense strand starting at position 1039 of SEQ ID NO: 586758
gucgcuaacuucuagagaa

SEQ ID NO: 742069 - RNA, 19 nt, Artificial Sequence
  Description of Artificial Sequence: Synthetic oligonucleotide
  Antisense strand to SEQ ID NO: 742068
uucucuagaaguuagcgac

SEQ ID NO: 742070 - RNA, 19 nt, Artificial Sequence
  Description of Artificial Sequence: Synthetic oligonucleotide
  Sense strand starting at position 1041 of SEQ ID NO: 586758
cgcuaacuucuagagaaga

SEQ ID NO: 742071 - RNA, 19 nt, Artificial Sequence
  Description of Artificial Sequence: Synthetic oligonucleotide
  Antisense strand to SEQ ID NO: 742070
ucuucucuagaaguuagcg

SEQ ID NO: 742072 - RNA, 19 nt, Artificial Sequence
  Description of Artificial Sequence: Synthetic oligonucleotide
  Sense strand starting at position 2008 of SEQ ID NO: 586758
gugggugaaugauuccuca

SEQ ID NO: 742073 - RNA, 19 nt, Artificial Sequence
  Description of Artificial Sequence: Synthetic oligonucleotide
  Antisense strand to SEQ ID NO: 742072
ugaggaaucauucacccac

SEQ ID NO: 742074 - RNA, 19 nt, Artificial Sequence
  Description of Artificial Sequence: Synthetic oligonucleotide
  Sense strand starting at position 2011 of SEQ ID NO: 586758
ggugaaugauuccucaaag

SEQ ID NO: 742075 - RNA, 19 nt, Artificial Sequence
  Description of Artificial Sequence: Synthetic oligonucleotide
  Antisense strand to SEQ ID NO: 742074
cuuugaggaaucauucacc

SEQ ID NO: 742076 - RNA, 19 nt, Artificial Sequence
  Description of Artificial Sequence: Synthetic oligonucleotide
  Sense strand starting at position 2012 of SEQ ID NO: 586758
gugaaugauuccucaaaga

SEQ ID NO: 742077 - RNA, 19 nt, Artificial Sequence
  Description of Artificial Sequence: Synthetic oligonucleotide
  Antisense strand to SEQ ID NO: 742076
ucuuugaggaaucauucac

SEQ ID NO: 742078 - RNA, 19 nt, Artificial Sequence
  Description of Artificial Sequence: Synthetic oligonucleotide
  Sense strand starting at position 2034 of SEQ ID NO: 586758
auuaguacccuguguaaac

SEQ ID NO: 742079 - RNA, 19 nt, Artificial Sequence
  Description of Artificial Sequence: Synthetic oligonucleotide
  Antisense strand to SEQ ID NO: 742078
guuuacacaggguacuaau

SEQ ID NO: 742080 - RNA, 19 nt, Artificial Sequence
  Description of Artificial Sequence: Synthetic oligonucleotide
  Sense strand starting at position 2035 of SEQ ID NO: 586758
uuaguacccuguguaaaca

SEQ ID NO: 742081 - RNA, 19 nt, Artificial Sequence
  Description of Artificial Sequence: Synthetic oligonucleotide
  Antisense strand to SEQ ID NO: 742080
uguuuacacaggguacuaa

SEQ ID NO: 742082 - RNA, 19 nt, Artificial Sequence
  Description of Artificial Sequence: Synthetic oligonucleotide
  Sense strand starting at position 2539 of SEQ ID NO: 586758
ugucccuauuucucaguau

SEQ ID NO: 742083 - RNA, 19 nt, Artificial Sequence
  Description of Artificial Sequence: Synthetic oligonucleotide
  Antisense strand to SEQ ID NO: 742082
auacugagaaauagggaca

SEQ ID NO: 742084 - RNA, 19 nt, Artificial Sequence
  Description of Artificial Sequence: Synthetic oligonucleotide
  Sense strand starting at position 2540 of SEQ ID NO: 586758
gucccuauuucucaguauc

SEQ ID NO: 742085 - RNA, 19 nt, Artificial Sequence
  Description of Artificial Sequence: Synthetic oligonucleotide
  Antisense strand to SEQ ID NO: 742084
gauacugagaaauagggac

SEQ ID NO: 742086 - RNA, 19 nt, Artificial Sequence
  Description of Artificial Sequence: Synthetic oligonucleotide
  Sense strand starting at position 2655 of SEQ ID NO: 586758
gugugucucacucaggauu

SEQ ID NO: 742087 - RNA, 19 nt, Artificial Sequence
  Description of Artificial Sequence: Synthetic oligonucleotide
  Antisense strand to SEQ ID NO: 742086
aauccugagugagacacac

SEQ ID NO: 742088 - RNA, 19 nt, Artificial Sequence
  Description of Artificial Sequence: Synthetic oligonucleotide
  Sense strand starting at position 2848 of SEQ ID NO: 586758
gccagugcuccuugagcuu

SEQ ID NO: 742089 - RNA, 19 nt, Artificial Sequence
  Description of Artificial Sequence: Synthetic oligonucleotide
  Antisense strand to SEQ ID NO: 742088
aagcucaaggagcacuggc

SEQ ID NO: 742090 - RNA, 19 nt, Artificial Sequence
  Description of Artificial Sequence: Synthetic oligonucleotide
  Sense strand starting at position 2857 of SEQ ID NO: 586758
ccuugagcuugcccaaauu

SEQ ID NO: 742091 - RNA, 19 nt, Artificial Sequence
  Description of Artificial Sequence: Synthetic oligonucleotide
  Antisense strand to SEQ ID NO: 742090
aauuugggcaagcucaagg

SEQ ID NO: 742092 - RNA, 19 nt, Artificial Sequence
  Description of Artificial Sequence: Synthetic oligonucleotide
  Sense strand starting at position 2967 of SEQ ID NO: 586758
gggugaugcacauauccau

SEQ ID NO: 742093 - RNA, 19 nt, Artificial Sequence
  Description of Artificial Sequence: Synthetic oligonucleotide
  Antisense strand to SEQ ID NO: 742092
auggauaugugcaucaccc

SEQ ID NO: 742094 - RNA, 19 nt, Artificial Sequence
  Description of Artificial Sequence: Synthetic oligonucleotide
  Sense strand starting at position 2982 of SEQ ID NO: 586758
ccauaucaaucuguaggaa

SEQ ID NO: 742095 - RNA, 19 nt, Artificial Sequence
  Description of Artificial Sequence: Synthetic oligonucleotide
  Antisense strand to SEQ ID NO: 742094
uuccuacagauugauaugg

SEQ ID NO: 742096 - RNA, 19 nt, Artificial Sequence
  Description of Artificial Sequence: Synthetic oligonucleotide
  Sense strand starting at position 2985 of SEQ ID NO: 586758
uaucaaucuguaggaauug

SEQ ID NO: 742097 - RNA, 19 nt, Artificial Sequence
  Description of Artificial Sequence: Synthetic oligonucleotide
  Antisense strand to SEQ ID NO: 742096
caauuccuacagauugaua

SEQ ID NO: 742098 - RNA, 19 nt, Artificial Sequence
  Description of Artificial Sequence: Synthetic oligonucleotide
  Sense strand starting at position 2994 of SEQ ID NO: 586758
guaggaauuguauggaaau

SEQ ID NO: 742099 - RNA, 19 nt, Artificial Sequence
  Description of Artificial Sequence: Synthetic oligonucleotide
  Antisense strand to SEQ ID NO: 742098
auuuccauacaauuccuac

SEQ ID NO: 742100 - RNA, 19 nt, Artificial Sequence
  Description of Artificial Sequence: Synthetic oligonucleotide
  Sense strand starting at position 2995 of SEQ ID NO: 586758
uaggaauuguauggaaauu

SEQ ID NO: 742101 - RNA, 19 nt, Artificial Sequence
  Description of Artificial Sequence: Synthetic oligonucleotide
  Antisense strand to SEQ ID NO: 742100
aauuuccauacaauuccua

SEQ ID NO: 742102 - RNA, 19 nt, Artificial Sequence
  Description of Artificial Sequence: Synthetic oligonucleotide
  Sense strand starting at position 3007 of SEQ ID NO: 586758
ggaaauuuaucucaggaac

SEQ ID NO: 742103 - RNA, 19 nt, Artificial Sequence
  Description of Artificial Sequence: Synthetic oligonucleotide
  Antisense strand to SEQ ID NO: 742102
guuccugagauaaauuucc

SEQ ID NO: 742104 - RNA, 19 nt, Artificial Sequence
  Description of Artificial Sequence: Synthetic oligonucleotide
  Sense strand starting at position 3022 of SEQ ID NO: 586758
gaaccugaguuagugacau

SEQ ID NO: 742105 - RNA, 19 nt, Artificial Sequence
  Description of Artificial Sequence: Synthetic oligonucleotide
  Antisense strand to SEQ ID NO: 742104
augucacuaacucagguuc

SEQ ID NO: 742106 - RNA, 19 nt, Artificial Sequence
  Description of Artificial Sequence: Synthetic oligonucleotide
  Sense strand starting at position 3026 of SEQ ID NO: 586758
cugaguuagugacaucaaa

SEQ ID NO: 742107 - RNA, 19 nt, Artificial Sequence
  Description of Artificial Sequence: Synthetic oligonucleotide
  Antisense strand to SEQ ID NO: 742106
uuugaugucacuaacucag

SEQ ID NO: 742108 - RNA, 19 nt, Artificial Sequence
  Description of Artificial Sequence: Synthetic oligonucleotide
  Sense strand starting at position 3052 of SEQ ID NO: 586758
ugugauauuuaaugagucu

SEQ ID NO: 742109 - RNA, 19 nt, Artificial Sequence
  Description of Artificial Sequence: Synthetic oligonucleotide
  Antisense strand to SEQ ID NO: 742108
agacucauuaaauaucaca

SEQ ID NO: 742110 - RNA, 19 nt, Artificial Sequence
  Description of Artificial Sequence: Synthetic oligonucleotide
  Sense strand starting at position 3059 of SEQ ID NO: 586758
uuuaaugagucuggaaugu

SEQ ID NO: 742111 - RNA, 19 nt, Artificial Sequence
  Description of Artificial Sequence: Synthetic oligonucleotide
  Antisense strand to SEQ ID NO: 742110
acauuccagacucauuaaa

SEQ ID NO: 742112 - RNA, 19 nt, Artificial Sequence
  Description of Artificial Sequence: Synthetic oligonucleotide
  Sense strand starting at position 3373 of SEQ ID NO: 586758
agagcaagcucuucuaauc

SEQ ID NO: 742113 - RNA, 19 nt, Artificial Sequence
  Description of Artificial Sequence: Synthetic oligonucleotide
  Antisense strand to SEQ ID NO: 742112
gauuagaagagcuugcucu

SEQ ID NO: 742114 - RNA, 19 nt, Artificial Sequence
  Description of Artificial Sequence: Synthetic oligonucleotide
  Sense strand starting at position 3412 of SEQ ID NO: 586758
cugugaccuccuggaauuc

SEQ ID NO: 742115 - RNA, 19 nt, Artificial Sequence
  Description of Artificial Sequence: Synthetic oligonucleotide
  Antisense strand to SEQ ID NO: 742114
gaauuccaggaggucacag

SEQ ID NO: 742116 - RNA, 19 nt, Artificial Sequence
  Description of Artificial Sequence: Synthetic oligonucleotide
  Sense strand starting at position 3445 of SEQ ID NO: 586758
agaauaaagcagugaagca

SEQ ID NO: 742117 - RNA, 19 nt, Artificial Sequence
  Description of Artificial Sequence: Synthetic oligonucleotide
  Antisense strand to SEQ ID NO: 742116
ugcuucacugcuuuauucu

SEQ ID NO: 742118 - RNA, 19 nt, Artificial Sequence
  Description of Artificial Sequence: Synthetic oligonucleotide
  Sense strand starting at position 3468 of SEQ ID NO: 586758
uucuaacugugucucugaa

SEQ ID NO: 742119 - RNA, 19 nt, Artificial Sequence
  Description of Artificial Sequence: Synthetic oligonucleotide
  Antisense strand to SEQ ID NO: 742118
uucagagacacaguuagaa

SEQ ID NO: 742120 - RNA, 19 nt, Artificial Sequence
  Description of Artificial Sequence: Synthetic oligonucleotide
  Sense strand starting at position 3709 of SEQ ID NO: 586758
gauuccuauuuguacagga

SEQ ID NO: 742121 - RNA, 19 nt, Artificial Sequence
  Description of Artificial Sequence: Synthetic oligonucleotide
  Antisense strand to SEQ ID NO: 742120
uccuguacaaauaggaauc

SEQ ID NO: 742122 - RNA, 19 nt, Artificial Sequence
  Description of Artificial Sequence: Synthetic oligonucleotide
  Sense strand starting at position 3803 of SEQ ID NO: 586758
ugcugucagagcugaacuu

SEQ ID NO: 742123 - RNA, 19 nt, Artificial Sequence
  Description of Artificial Sequence: Synthetic oligonucleotide
  Antisense strand to SEQ ID NO: 742122
aaguucagcucugacagca

SEQ ID NO: 742124 - RNA, 19 nt, Artificial Sequence
  Description of Artificial Sequence: Synthetic oligonucleotide
  Sense strand starting at position 3815 of SEQ ID NO: 586758
ugaacuucugucugaccuu

SEQ ID NO: 742125 - RNA, 19 nt, Artificial Sequence
  Description of Artificial Sequence: Synthetic oligonucleotide
  Antisense strand to SEQ ID NO: 742124
aaggucagacagaaguuca

SEQ ID NO: 742126 - RNA, 19 nt, Artificial Sequence
  Description of Artificial Sequence: Synthetic oligonucleotide
  Sense strand starting at position 3822 of SEQ ID NO: 586758
cugucugaccuuugggaaa

SEQ ID NO: 742127 - RNA, 19 nt, Artificial Sequence
  Description of Artificial Sequence: Synthetic oligonucleotide
  Antisense strand to SEQ ID NO: 742126
uuucccaaaggucagacag

SEQ ID NO: 742128 - RNA, 19 nt, Artificial Sequence
  Description of Artificial Sequence: Synthetic oligonucleotide
  Sense strand starting at position 3846 of SEQ ID NO: 586758
aaagaauccggcuagcuuu

SEQ ID NO: 742129 - RNA, 19 nt, Artificial Sequence
  Description of Artificial Sequence: Synthetic oligonucleotide
  Antisense strand to SEQ ID NO: 742128
aaagcuagccggauucuuu

SEQ ID NO: 742130 - RNA, 19 nt, Artificial Sequence
  Description of Artificial Sequence: Synthetic oligonucleotide
  Sense strand starting at position 3852 of SEQ ID NO: 586758
uccggcuagcuuuggaaua

SEQ ID NO: 742131 - RNA, 19 nt, Artificial Sequence
  Description of Artificial Sequence: Synthetic oligonucleotide
  Antisense strand to SEQ ID NO: 742130
uauuccaaagcuagccgga

SEQ ID NO: 742132 - RNA, 19 nt, Artificial Sequence
  Description of Artificial Sequence: Synthetic oligonucleotide
  Sense strand starting at position 3916 of SEQ ID NO: 586758
agugccauuuagccuuaaa

SEQ ID NO: 742133 - RNA, 19 nt, Artificial Sequence
  Description of Artificial Sequence: Synthetic oligonucleotide
  Antisense strand to SEQ ID NO: 742132
uuuaaggcuaaauggcacu

SEQ ID NO: 742134 - RNA, 19 nt, Artificial Sequence
  Description of Artificial Sequence: Synthetic oligonucleotide
  Sense strand starting at position 3937 of SEQ ID NO: 586758
aauacugcuugugaaauag

SEQ ID NO: 742135 - RNA, 19 nt, Artificial Sequence
  Description of Artificial Sequence: Synthetic oligonucleotide
  Antisense strand to SEQ ID NO: 742134
cuauuucacaagcaguauu

SEQ ID NO: 742136 - RNA, 19 nt, Artificial Sequence
  Description of Artificial Sequence: Synthetic oligonucleotide
  Sense strand starting at position 3955 of SEQ ID NO: 586758
gaaagaugaucagagaccu

SEQ ID NO: 742137 - RNA, 19 nt, Artificial Sequence
  Description of Artificial Sequence: Synthetic oligonucleotide
  Antisense strand to SEQ ID NO: 742136
aggucucugaucaucuuuc

SEQ ID NO: 742138 - RNA, 19 nt, Artificial Sequence
  Description of Artificial Sequence: Synthetic oligonucleotide
  Sense strand starting at position 402 of SEQ ID NO: 586759
gugugcaauccuggccauu

SEQ ID NO: 742139 - RNA, 19 nt, Artificial Sequence
  Description of Artificial Sequence: Synthetic oligonucleotide
  Antisense strand to SEQ ID NO: 742138
aauggccaggauugcacac

SEQ ID NO: 742140 - RNA, 19 nt, Artificial Sequence
  Description of Artificial Sequence: Synthetic oligonucleotide
  Sense strand starting at position 421 of SEQ ID NO: 586759
ccguacugacucugagauc

SEQ ID NO: 742141 - RNA, 19 nt, Artificial Sequence
  Description of Artificial Sequence: Synthetic oligonucleotide
  Antisense strand to SEQ ID NO: 742140
gaucucagagucaguacgg

SEQ ID NO: 742142 - RNA, 19 nt, Artificial Sequence
  Description of Artificial Sequence: Synthetic oligonucleotide
  Sense strand starting at position 422 of SEQ ID NO: 586759
cguacugacucugagauca

SEQ ID NO: 742143 - RNA, 19 nt, Artificial Sequence
  Description of Artificial Sequence: Synthetic oligonucleotide
  Antisense strand to SEQ ID NO: 742142
ugaucucagagucaguacg

SEQ ID NO: 742144 - RNA, 19 nt, Artificial Sequence
  Description of Artificial Sequence: Synthetic oligonucleotide
  Sense strand starting at position 424 of SEQ ID NO: 586759
uacugacucugagaucaga

SEQ ID NO: 742145 - RNA, 19 nt, Artificial Sequence
  Description of Artificial Sequence: Synthetic oligonucleotide
  Antisense strand to SEQ ID NO: 742144
ucugaucucagagucagua

SEQ ID NO: 742146 - RNA, 19 nt, Artificial Sequence
  Description of Artificial Sequence: Synthetic oligonucleotide
  Sense strand starting at position 442 of SEQ ID NO: 586759
agagcucacucaugacaag

SEQ ID NO: 742147 - RNA, 19 nt, Artificial Sequence
  Description of Artificial Sequence: Synthetic oligonucleotide
  Antisense strand to SEQ ID NO: 742146
cuugucaugagugagcucu

SEQ ID NO: 742148 - RNA, 19 nt, Artificial Sequence
  Description of Artificial Sequence: Synthetic oligonucleotide
  Sense strand starting at position 930 of SEQ ID NO: 586759
agauucccuucuuguguaa

SEQ ID NO: 742149 - RNA, 19 nt, Artificial Sequence
  Description of Artificial Sequence: Synthetic oligonucleotide
  Antisense strand to SEQ ID NO: 742148
uuacacaagaagggaaucu

SEQ ID NO: 742150 - RNA, 19 nt, Artificial Sequence
  Description of Artificial Sequence: Synthetic oligonucleotide
  Sense strand starting at position 932 of SEQ ID NO: 586759
auucccuucuuguguaaag

SEQ ID NO: 742151 - RNA, 19 nt, Artificial Sequence
  Description of Artificial Sequence: Synthetic oligonucleotide
  Antisense strand to SEQ ID NO: 742150
cuuuacacaagaagggaau

SEQ ID NO: 742152 - RNA, 19 nt, Artificial Sequence
  Description of Artificial Sequence: Synthetic oligonucleotide
  Sense strand starting at position 933 of SEQ ID NO: 586759
uucccuucuuguguaaaga

SEQ ID NO: 742153 - RNA, 19 nt, Artificial Sequence
  Description of Artificial Sequence: Synthetic oligonucleotide
  Antisense strand to SEQ ID NO: 742152
ucuuuacacaagaagggaa

SEQ ID NO: 742154 - RNA, 19 nt, Artificial Sequence
  Description of Artificial Sequence: Synthetic oligonucleotide
  Sense strand starting at position 934 of SEQ ID NO: 586759
ucccuucuuguguaaagac

SEQ ID NO: 742155 - RNA, 19 nt, Artificial Sequence
  Description of Artificial Sequence: Synthetic oligonucleotide
  Antisense strand to SEQ ID NO: 742154
gucuuuacacaagaaggga

SEQ ID NO: 742156 - RNA, 19 nt, Artificial Sequence
  Description of Artificial Sequence: Synthetic oligonucleotide
  Sense strand starting at position 1071 of SEQ ID NO: 586759
agacgcagagauuggcaua

SEQ ID NO: 742157 - RNA, 19 nt, Artificial Sequence
  Description of Artificial Sequence: Synthetic oligonucleotide
  Antisense strand to SEQ ID NO: 742156
uaugccaaucucugcgucu

SEQ ID NO: 742158 - RNA, 19 nt, Artificial Sequence
  Description of Artificial Sequence: Synthetic oligonucleotide
  Sense strand starting at position 1074 of SEQ ID NO: 586759
cgcagagauuggcauaggu

SEQ ID NO: 742159 - RNA, 19 nt, Artificial Sequence
  Description of Artificial Sequence: Synthetic oligonucleotide
  Antisense strand to SEQ ID NO: 742158
accuaugccaaucucugcg

SEQ ID NO: 742160 - RNA, 19 nt, Artificial Sequence
  Description of Artificial Sequence: Synthetic oligonucleotide
  Sense strand starting at position 1095 of SEQ ID NO: 586759
acagaaaccuagggauaga

SEQ ID NO: 742161 - RNA, 19 nt, Artificial Sequence
  Description of Artificial Sequence: Synthetic oligonucleotide
  Antisense strand to SEQ ID NO: 742160
ucuaucccuagguuucugu

SEQ ID NO: 742162 - RNA, 19 nt, Artificial Sequence
  Description of Artificial Sequence: Synthetic oligonucleotide
  Sense strand starting at position 1205 of SEQ ID NO: 586759
gaguuaugcccagggccua

SEQ ID NO: 742163 - RNA, 19 nt, Artificial Sequence
  Description of Artificial Sequence: Synthetic oligonucleotide
  Antisense strand to SEQ ID NO: 742162
uaggcccugggcauaacuc

SEQ ID NO: 742164 - RNA, 19 nt, Artificial Sequence
  Description of Artificial Sequence: Synthetic oligonucleotide
  Sense strand starting at position 1343 of SEQ ID NO: 586759
cccugaguuggguaucuaa

SEQ ID NO: 742165 - RNA, 19 nt, Artificial Sequence
  Description of Artificial Sequence: Synthetic oligonucleotide
  Antisense strand to SEQ ID NO: 742164
uuagauacccaacucaggg

SEQ ID NO: 742166 - RNA, 19 nt, Artificial Sequence
  Description of Artificial Sequence: Synthetic oligonucleotide
  Sense strand starting at position 1458 of SEQ ID NO: 586759
gcccuuuagcaaugguuua

SEQ ID NO: 742167 - RNA, 19 nt, Artificial Sequence
  Description of Artificial Sequence: Synthetic oligonucleotide
  Antisense strand to SEQ ID NO: 742166
uaaaccauugcuaaagggc

SEQ ID NO: 742168 - RNA, 19 nt, Artificial Sequence
  Description of Artificial Sequence: Synthetic oligonucleotide
  Sense strand starting at position 2184 of SEQ ID NO: 586759
ggcagauucggaggaaggu

SEQ ID NO: 742169 - RNA, 19 nt, Artificial Sequence
  Description of Artificial Sequence: Synthetic oligonucleotide
  Antisense strand to SEQ ID NO: 742168
accuuccuccgaaucugcc

SEQ ID NO: 742170 - RNA, 19 nt, Artificial Sequence
  Description of Artificial Sequence: Synthetic oligonucleotide
  Sense strand starting at position 2918 of SEQ ID NO: 586759
cugaaaucccuugggcuca

SEQ ID NO: 742171 - RNA, 19 nt, Artificial Sequence
  Description of Artificial Sequence: Synthetic oligonucleotide
  Antisense strand to SEQ ID NO: 742170
ugagcccaagggauuucag

SEQ ID NO: 742172 - RNA, 19 nt, Artificial Sequence
  Description of Artificial Sequence: Synthetic oligonucleotide
  Sense strand starting at position 2952 of SEQ ID NO: 586759
gguaaaucagcucgagaag

SEQ ID NO: 742173 - RNA, 19 nt, Artificial Sequence
  Description of Artificial Sequence: Synthetic oligonucleotide
  Antisense strand to SEQ ID NO: 742172
cuucucgagcugauuuacc

SEQ ID NO: 742174 - RNA, 19 nt, Artificial Sequence
  Description of Artificial Sequence: Synthetic oligonucleotide
  Sense strand starting at position 2953 of SEQ ID NO: 586759
guaaaucagcucgagaaga

SEQ ID NO: 742175 - RNA, 19 nt, Artificial Sequence
  Description of Artificial Sequence: Synthetic oligonucleotide
  Antisense strand to SEQ ID NO: 742174
ucuucucgagcugauuuac

SEQ ID NO: 742176 - RNA, 19 nt, Artificial Sequence
  Description of Artificial Sequence: Synthetic oligonucleotide
  Sense strand starting at position 2963 of SEQ ID NO: 586759
ucgagaagaccucgguugu

SEQ ID NO: 742177 - RNA, 19 nt, Artificial Sequence
  Description of Artificial Sequence: Synthetic oligonucleotide
  Antisense strand to SEQ ID NO: 742176
acaaccgaggucuucucga

SEQ ID NO: 742178 - RNA, 19 nt, Artificial Sequence
  Description of Artificial Sequence: Synthetic oligonucleotide
  Sense strand starting at position 2964 of SEQ ID NO: 586759
cgagaagaccucgguugua

SEQ ID NO: 742179 - RNA, 19 nt, Artificial Sequence
  Description of Artificial Sequence: Synthetic oligonucleotide
  Antisense strand to SEQ ID NO: 742178
uacaaccgaggucuucucg

SEQ ID NO: 742180 - RNA, 19 nt, Artificial Sequence
  Description of Artificial Sequence: Synthetic oligonucleotide
  Sense strand starting at position 3042 of SEQ ID NO: 586759
ugcgaaugcuacuuuccau

SEQ ID NO: 742181 - RNA, 19 nt, Artificial Sequence
  Description of Artificial Sequence: Synthetic oligonucleotide
  Antisense strand to SEQ ID NO: 742180
auggaaaguagcauucgca

SEQ ID NO: 742182 - RNA, 19 nt, Artificial Sequence
  Description of Artificial Sequence: Synthetic oligonucleotide
  Sense strand starting at position 3103 of SEQ ID NO: 586759
gugcaaccucucugagaga

SEQ ID NO: 742183 - RNA, 19 nt, Artificial Sequence
  Description of Artificial Sequence: Synthetic oligonucleotide
  Antisense strand to SEQ ID NO: 742182
ucucucagagagguugcac

SEQ ID NO: 742184 - RNA, 19 nt, Artificial Sequence
  Description of Artificial Sequence: Synthetic oligonucleotide
  Sense strand starting at position 3484 of SEQ ID NO: 586759
gagagacuuugucucagag

SEQ ID NO: 742185 - RNA, 19 nt, Artificial Sequence
  Description of Artificial Sequence: Synthetic oligonucleotide
  Antisense strand to SEQ ID NO: 742184
cucugagacaaagucucuc

SEQ ID NO: 742186 - RNA, 19 nt, Artificial Sequence
  Description of Artificial Sequence: Synthetic oligonucleotide
  Sense strand starting at position 3565 of SEQ ID NO: 586759
accaauuugucuugggcca

SEQ ID NO: 742187 - RNA, 19 nt, Artificial Sequence
  Description of Artificial Sequence: Synthetic oligonucleotide
  Antisense strand to SEQ ID NO: 742186
uggcccaagacaaauuggu

SEQ ID NO: 742188 - RNA, 19 nt, Artificial Sequence
  Description of Artificial Sequence: Synthetic oligonucleotide
  Sense strand starting at position 3567 of SEQ ID NO: 586759
caauuugucuugggccaca

SEQ ID NO: 742189 - RNA, 19 nt, Artificial Sequence
  Description of Artificial Sequence: Synthetic oligonucleotide
  Antisense strand to SEQ ID NO: 742188
uguggcccaagacaaauug

SEQ ID NO: 742190 - RNA, 19 nt, Artificial Sequence
  Description of Artificial Sequence: Synthetic oligonucleotide
  Sense strand starting at position 3614 of SEQ ID NO: 586759
uuuaguccauucuuuggaa

SEQ ID NO: 742191 - RNA, 19 nt, Artificial Sequence
  Description of Artificial Sequence: Synthetic oligonucleotide
  Antisense strand to SEQ ID NO: 742190
uuccaaagaauggacuaaa

SEQ ID NO: 742192 - RNA, 19 nt, Artificial Sequence
  Description of Artificial Sequence: Synthetic oligonucleotide
  Sense strand starting at position 3652 of SEQ ID NO: 586759
auaccaaagugccuuguaa

SEQ ID NO: 742193 - RNA, 19 nt, Artificial Sequence
  Description of Artificial Sequence: Synthetic oligonucleotide
  Antisense strand to SEQ ID NO: 742192
uuacaaggcacuuugguau

SEQ ID NO: 742194 - RNA, 19 nt, Artificial Sequence
  Description of Artificial Sequence: Synthetic oligonucleotide
  Sense strand starting at position 3654 of SEQ ID NO: 586759
accaaagugccuuguaaau

SEQ ID NO: 742195 - RNA, 19 nt, Artificial Sequence
  Description of Artificial Sequence: Synthetic oligonucleotide
  Antisense strand to SEQ ID NO: 742194
auuuacaaggcacuuuggu

SEQ ID NO: 742196 - RNA, 19 nt, Artificial Sequence
  Description of Artificial Sequence: Synthetic oligonucleotide
  Sense strand starting at position 3656 of SEQ ID NO: 586759
caaagugccuuguaaauug

SEQ ID NO: 742197 - RNA, 19 nt, Artificial Sequence
  Description of Artificial Sequence: Synthetic oligonucleotide
  Antisense strand to SEQ ID NO: 742196
caauuuacaaggcacuuug

SEQ ID NO: 742198 - RNA, 19 nt, Artificial Sequence
  Description of Artificial Sequence: Synthetic oligonucleotide
  Sense strand starting at position 3761 of SEQ ID NO: 586759
ccuuuaguaugauuaguuu

SEQ ID NO: 742199 - RNA, 19 nt, Artificial Sequence
  Description of Artificial Sequence: Synthetic oligonucleotide
  Antisense strand to SEQ ID NO: 742198
aaacuaaucauacuaaagg

SEQ ID NO: 742200 - RNA, 19 nt, Artificial Sequence
  Description of Artificial Sequence: Synthetic oligonucleotide
  Sense strand starting at position 33 of SEQ ID NO: 586760
uguccuuugcuuuaaugau

SEQ ID NO: 742201 - RNA, 19 nt, Artificial Sequence
  Description of Artificial Sequence: Synthetic oligonucleotide
  Antisense strand to SEQ ID NO: 742200
aucauuaaagcaaaggaca

SEQ ID NO: 742202 - RNA, 19 nt, Artificial Sequence
  Description of Artificial Sequence: Synthetic oligonucleotide
  Sense strand starting at position 45 of SEQ ID NO: 586760
uaaugaugcuuggccgaau

SEQ ID NO: 742203 - RNA, 19 nt, Artificial Sequence
  Description of Artificial Sequence: Synthetic oligonucleotide
  Antisense strand to SEQ ID NO: 742202
auucggccaagcaucauua

SEQ ID NO: 742204 - RNA, 19 nt, Artificial Sequence
  Description of Artificial Sequence: Synthetic oligonucleotide
  Sense strand starting at position 74 of SEQ ID NO: 586760
aaggcuggccauugaagaa

SEQ ID NO: 742205 - RNA, 19 nt, Artificial Sequence
  Description of Artificial Sequence: Synthetic oligonucleotide
  Antisense strand to SEQ ID NO: 742204
uucuucaauggccagccuu

SEQ ID NO: 742206 - RNA, 19 nt, Artificial Sequence
  Description of Artificial Sequence: Synthetic oligonucleotide
  Sense strand starting at position 296 of SEQ ID NO: 586760
agugucugggucugaagaa

SEQ ID NO: 742207 - RNA, 19 nt, Artificial Sequence
  Description of Artificial Sequence: Synthetic oligonucleotide
  Antisense strand to SEQ ID NO: 742206
uucuucagacccagacacu

SEQ ID NO: 742208 - RNA, 19 nt, Artificial Sequence
  Description of Artificial Sequence: Synthetic oligonucleotide
  Sense strand starting at position 317 of SEQ ID NO: 586760
gagaauugguuauucugac

SEQ ID NO: 742209 - RNA, 19 nt, Artificial Sequence
  Description of Artificial Sequence: Synthetic oligonucleotide
  Antisense strand to SEQ ID NO: 742208
gucagaauaaccaauucuc

SEQ ID NO: 742210 - RNA, 19 nt, Artificial Sequence
  Description of Artificial Sequence: Synthetic oligonucleotide
  Sense strand starting at position 426 of SEQ ID NO: 586760
gcucaacugguccaagauu

SEQ ID NO: 742211 - RNA, 19 nt, Artificial Sequence
  Description of Artificial Sequence: Synthetic oligonucleotide
  Antisense strand to SEQ ID NO: 742210
aaucuuggaccaguugagc

SEQ ID NO: 742212 - RNA, 19 nt, Artificial Sequence
  Description of Artificial Sequence: Synthetic oligonucleotide
  Sense strand starting at position 459 of SEQ ID NO: 586760
acuugauggcucugugaug

SEQ ID NO: 742213 - RNA, 19 nt, Artificial Sequence
  Description of Artificial Sequence: Synthetic oligonucleotide
  Antisense strand to SEQ ID NO: 742212
caucacagagccaucaagu

SEQ ID NO: 742214 - RNA, 19 nt, Artificial Sequence
  Description of Artificial Sequence: Synthetic oligonucleotide
  Sense strand starting at position 606 of SEQ ID NO: 586760
cccagcaucccuggucuaa

SEQ ID NO: 742215 - RNA, 19 nt, Artificial Sequence
  Description of Artificial Sequence: Synthetic oligonucleotide
  Antisense strand to SEQ ID NO: 742214
uuagaccagggaugcuggg

SEQ ID NO: 742216 - RNA, 19 nt, Artificial Sequence
  Description of Artificial Sequence: Synthetic oligonucleotide
  Sense strand starting at position 1033 of SEQ ID NO: 586760
uugucuuacagauguguaa

SEQ ID NO: 742217 - RNA, 19 nt, Artificial Sequence
  Description of Artificial Sequence: Synthetic oligonucleotide
  Antisense strand to SEQ ID NO: 742216
uuacacaucuguaagacaa

SEQ ID NO: 742218 - RNA, 19 nt, Artificial Sequence
  Description of Artificial Sequence: Synthetic oligonucleotide
  Sense strand starting at position 1035 of SEQ ID NO: 586760
gucuuacagauguguaauc

SEQ ID NO: 742219 - RNA, 19 nt, Artificial Sequence
  Description of Artificial Sequence: Synthetic oligonucleotide
  Antisense strand to SEQ ID NO: 742218
gauuacacaucuguaagac

SEQ ID NO: 742220 - RNA, 19 nt, Artificial Sequence
  Description of Artificial Sequence: Synthetic oligonucleotide
  Sense strand starting at position 1037 of SEQ ID NO: 586760
cuuacagauguguaaucgu

SEQ ID NO: 742221 - RNA, 19 nt, Artificial Sequence
  Description of Artificial Sequence: Synthetic oligonucleotide
  Antisense strand to SEQ ID NO: 742220
acgauuacacaucuguaag

SEQ ID NO: 742222 - RNA, 19 nt, Artificial Sequence
  Description of Artificial Sequence: Synthetic oligonucleotide
  Sense strand starting at position 1044 of SEQ ID NO: 586760
auguguaaucgugugcuca

SEQ ID NO: 742223 - RNA, 19 nt, Artificial Sequence
  Description of Artificial Sequence: Synthetic oligonucleotide
  Antisense strand to SEQ ID NO: 742222
ugagcacacgauuacacau

SEQ ID NO: 742224 - RNA, 19 nt, Artificial Sequence
  Description of Artificial Sequence: Synthetic oligonucleotide
  Sense strand starting at position 1206 of SEQ ID NO: 586760
caguguagcgaucauagcu

SEQ ID NO: 742225 - RNA, 19 nt, Artificial Sequence
  Description of Artificial Sequence: Synthetic oligonucleotide
  Antisense strand to SEQ ID NO: 742224
agcuaugaucgcuacacug

SEQ ID NO: 742226 - RNA, 19 nt, Artificial Sequence
  Description of Artificial Sequence: Synthetic oligonucleotide
  Sense strand starting at position 1262 of SEQ ID NO: 586760
cuaccuuaguuuccagagu

SEQ ID NO: 742227 - RNA, 19 nt, Artificial Sequence
  Description of Artificial Sequence: Synthetic oligonucleotide
  Antisense strand to SEQ ID NO: 742226
acucuggaaacuaagguag

SEQ ID NO: 742228 - RNA, 19 nt, Artificial Sequence
  Description of Artificial Sequence: Synthetic oligonucleotide
  Sense strand starting at position 1801 of SEQ ID NO: 586760
ggugcaaagcugugaggaa

SEQ ID NO: 742229 - RNA, 19 nt, Artificial Sequence
  Description of Artificial Sequence: Synthetic oligonucleotide
  Antisense strand to SEQ ID NO: 742228
uuccucacagcuuugcacc

SEQ ID NO: 742230 - RNA, 19 nt, Artificial Sequence
  Description of Artificial Sequence: Synthetic oligonucleotide
  Sense strand starting at position 2001 of SEQ ID NO: 586760
gaaacuguaugugugucua

SEQ ID NO: 742231 - RNA, 19 nt, Artificial Sequence
  Description of Artificial Sequence: Synthetic oligonucleotide
  Antisense strand to SEQ ID NO: 742230
uagacacacauacaguuuc

SEQ ID NO: 742232 - RNA, 19 nt, Artificial Sequence
  Description of Artificial Sequence: Synthetic oligonucleotide
  Sense strand starting at position 2003 of SEQ ID NO: 586760
aacuguaugugugucuaga

SEQ ID NO: 742233 - RNA, 19 nt, Artificial Sequence
  Description of Artificial Sequence: Synthetic oligonucleotide
  Antisense strand to SEQ ID NO: 742232
ucuagacacacauacaguu

SEQ ID NO: 742234 - RNA, 19 nt, Artificial Sequence
  Description of Artificial Sequence: Synthetic oligonucleotide
  Sense strand starting at position 2540 of SEQ ID NO: 586760
agccguaaaccauguuaca

SEQ ID NO: 742235 - RNA, 19 nt, Artificial Sequence
  Description of Artificial Sequence: Synthetic oligonucleotide
  Antisense strand to SEQ ID NO: 742234
uguaacaugguuuacggcu

SEQ ID NO: 742236 - RNA, 19 nt, Artificial Sequence
  Description of Artificial Sequence: Synthetic oligonucleotide
  Sense strand starting at position 2584 of SEQ ID NO: 586760
gcccgagagaugcaauguu

SEQ ID NO: 742237 - RNA, 19 nt, Artificial Sequence
  Description of Artificial Sequence: Synthetic oligonucleotide
  Antisense strand to SEQ ID NO: 742236
aacauugcaucucucgggc

SEQ ID NO: 742238 - RNA, 19 nt, Artificial Sequence
  Description of Artificial Sequence: Synthetic oligonucleotide
  Sense strand starting at position 2601 of SEQ ID NO: 586760
uugcaaauuccacguggga

SEQ ID NO: 742239 - RNA, 19 nt, Artificial Sequence
  Description of Artificial Sequence: Synthetic oligonucleotide
  Antisense strand to SEQ ID NO: 742238
ucccacguggaauuugcaa

SEQ ID NO: 742240 - RNA, 19 nt, Artificial Sequence
  Description of Artificial Sequence: Synthetic oligonucleotide
  Sense strand starting at position 2603 of SEQ ID NO: 586760
gcaaauuccacgugggaaa

SEQ ID NO: 742241 - RNA, 19 nt, Artificial Sequence
  Description of Artificial Sequence: Synthetic oligonucleotide
  Antisense strand to SEQ ID NO: 742240
uuucccacguggaauuugc

SEQ ID NO: 742242 - RNA, 19 nt, Artificial Sequence
  Description of Artificial Sequence: Synthetic oligonucleotide
  Sense strand starting at position 2641 of SEQ ID NO: 586760
ugcagacauucuguggaag

SEQ ID NO: 742243 - RNA, 19 nt, Artificial Sequence
  Description of Artificial Sequence: Synthetic oligonucleotide
  Antisense strand to SEQ ID NO: 742242
cuuccacagaaugucugca

SEQ ID NO: 742244 - RNA, 19 nt, Artificial Sequence
  Description of Artificial Sequence: Synthetic oligonucleotide
  Sense strand starting at position 2642 of SEQ ID NO: 586760
gcagacauucuguggaaga

SEQ ID NO: 742245 - RNA, 19 nt, Artificial Sequence
  Description of Artificial Sequence: Synthetic oligonucleotide
  Antisense strand to SEQ ID NO: 742244
ucuuccacagaaugucugc

SEQ ID NO: 742246 - RNA, 19 nt, Artificial Sequence
  Description of Artificial Sequence: Synthetic oligonucleotide
  Sense strand starting at position 2663 of SEQ ID NO: 586760
gcaugcaccuguccugaaa

SEQ ID NO: 742247 - RNA, 19 nt, Artificial Sequence
  Description of Artificial Sequence: Synthetic oligonucleotide
  Antisense strand to SEQ ID NO: 742246
uuucaggacaggugcaugc

SEQ ID NO: 742248 - RNA, 19 nt, Artificial Sequence
  Description of Artificial Sequence: Synthetic oligonucleotide
  Sense strand starting at position 2666 of SEQ ID NO: 586760
ugcaccuguccugaaaggu

SEQ ID NO: 742249 - RNA, 19 nt, Artificial Sequence
  Description of Artificial Sequence: Synthetic oligonucleotide
  Antisense strand to SEQ ID NO: 742248
accuuucaggacaggugca

SEQ ID NO: 742250 - RNA, 19 nt, Artificial Sequence
  Description of Artificial Sequence: Synthetic oligonucleotide
  Sense strand starting at position 2705 of SEQ ID NO: 586760
gcccaucucccagagauua

SEQ ID NO: 742251 - RNA, 19 nt, Artificial Sequence
  Description of Artificial Sequence: Synthetic oligonucleotide
  Antisense strand to SEQ ID NO: 742250
uaaucucugggagaugggc

SEQ ID NO: 742252 - RNA, 19 nt, Artificial Sequence
  Description of Artificial Sequence: Synthetic oligonucleotide
  Sense strand starting at position 2814 of SEQ ID NO: 586760
gucugauguguccaccagu

SEQ ID NO: 742253 - RNA, 19 nt, Artificial Sequence
  Description of Artificial Sequence: Synthetic oligonucleotide
  Antisense strand to SEQ ID NO: 742252
acugguggacacaucagac

SEQ ID NO: 742254 - RNA, 19 nt, Artificial Sequence
  Description of Artificial Sequence: Synthetic oligonucleotide
  Sense strand starting at position 2817 of SEQ ID NO: 586760
ugauguguccaccaguuac

SEQ ID NO: 742255 - RNA, 19 nt, Artificial Sequence
  Description of Artificial Sequence: Synthetic oligonucleotide
  Antisense strand to SEQ ID NO: 742254
guaacugguggacacauca

SEQ ID NO: 742256 - RNA, 19 nt, Artificial Sequence
  Description of Artificial Sequence: Synthetic oligonucleotide
  Sense strand starting at position 2998 of SEQ ID NO: 586760
ucaaaugucuugucuuacu

SEQ ID NO: 742257 - RNA, 19 nt, Artificial Sequence
  Description of Artificial Sequence: Synthetic oligonucleotide
  Antisense strand to SEQ ID NO: 742256
aguaagacaagacauuuga

SEQ ID NO: 742258 - RNA, 19 nt, Artificial Sequence
  Description of Artificial Sequence: Synthetic oligonucleotide
  Sense strand starting at position 3003 of SEQ ID NO: 586760
ugucuugucuuacucauga

SEQ ID NO: 742259 - RNA, 19 nt, Artificial Sequence
  Description of Artificial Sequence: Synthetic oligonucleotide
  Antisense strand to SEQ ID NO: 742258
ucaugaguaagacaagaca

SEQ ID NO: 742260 - RNA, 19 nt, Artificial Sequence
  Description of Artificial Sequence: Synthetic oligonucleotide
  Sense strand starting at position 3043 of SEQ ID NO: 586760
cuauuuaugucucaaggga

SEQ ID NO: 742261 - RNA, 19 nt, Artificial Sequence
  Description of Artificial Sequence: Synthetic oligonucleotide
  Antisense strand to SEQ ID NO: 742260
ucccuugagacauaaauag

SEQ ID NO: 742262 - RNA, 19 nt, Artificial Sequence
  Description of Artificial Sequence: Synthetic oligonucleotide
  Sense strand starting at position 3047 of SEQ ID NO: 586760
uuaugucucaagggaaugu

SEQ ID NO: 742263 - RNA, 19 nt, Artificial Sequence
  Description of Artificial Sequence: Synthetic oligonucleotide
  Antisense strand to SEQ ID NO: 742262
acauucccuugagacauaa

SEQ ID NO: 742264 - RNA, 19 nt, Artificial Sequence
  Description of Artificial Sequence: Synthetic oligonucleotide
  Sense strand starting at position 3176 of SEQ ID NO: 586760
gguucuagaugccugguaa

SEQ ID NO: 742265 - RNA, 19 nt, Artificial Sequence
  Description of Artificial Sequence: Synthetic oligonucleotide
  Antisense strand to SEQ ID NO: 742264
uuaccaggcaucuagaacc

SEQ ID NO: 742266 - RNA, 19 nt, Artificial Sequence
  Description of Artificial Sequence: Synthetic oligonucleotide
  Sense strand starting at position 3177 of SEQ ID NO: 586760
guucuagaugccugguaag

SEQ ID NO: 742267 - RNA, 19 nt, Artificial Sequence
  Description of Artificial Sequence: Synthetic oligonucleotide
  Antisense strand to SEQ ID NO: 742266
cuuaccaggcaucuagaac

SEQ ID NO: 742268 - RNA, 19 nt, Artificial Sequence
  Description of Artificial Sequence: Synthetic oligonucleotide
  Sense strand starting at position 3227 of SEQ ID NO: 586760
cauacagggugcucuguaa

SEQ ID NO: 742269 - RNA, 19 nt, Artificial Sequence
  Description of Artificial Sequence: Synthetic oligonucleotide
  Antisense strand to SEQ ID NO: 742268
uuacagagcacccuguaug

SEQ ID NO: 742270 - RNA, 19 nt, Artificial Sequence
  Description of Artificial Sequence: Synthetic oligonucleotide
  Sense strand starting at position 3234 of SEQ ID NO: 586760
ggugcucuguaagcugaaa

SEQ ID NO: 742271 - RNA, 19 nt, Artificial Sequence
  Description of Artificial Sequence: Synthetic oligonucleotide
  Antisense strand to SEQ ID NO: 742270
uuucagcuuacagagcacc

SEQ ID NO: 742272 - RNA, 19 nt, Artificial Sequence
  Description of Artificial Sequence: Synthetic oligonucleotide
  Sense strand starting at position 3305 of SEQ ID NO: 586760
ugggaacuaugggugugua

SEQ ID NO: 742273 - RNA, 19 nt, Artificial Sequence
  Description of Artificial Sequence: Synthetic oligonucleotide
  Antisense strand to SEQ ID NO: 742272
uacacacccauaguuccca

SEQ ID NO: 742274 - RNA, 19 nt, Artificial Sequence
  Description of Artificial Sequence: Synthetic oligonucleotide
  Sense strand starting at position 3306 of SEQ ID NO: 586760
gggaacuauggguguguaa

SEQ ID NO: 742275 - RNA, 19 nt, Artificial Sequence
  Description of Artificial Sequence: Synthetic oligonucleotide
  Antisense strand to SEQ ID NO: 742274
uuacacacccauaguuccc

SEQ ID NO: 742276 - RNA, 19 nt, Artificial Sequence
  Description of Artificial Sequence: Synthetic oligonucleotide
  Sense strand starting at position 3333 of SEQ ID NO: 586760
ucagucuggaguugacaga

SEQ ID NO: 742277 - RNA, 19 nt, Artificial Sequence
  Description of Artificial Sequence: Synthetic oligonucleotide
  Antisense strand to SEQ ID NO: 742276
ucugucaacuccagacuga

SEQ ID NO: 742278 - RNA, 19 nt, Artificial Sequence
  Description of Artificial Sequence: Synthetic oligonucleotide
  Sense strand starting at position 3414 of SEQ ID NO: 586760
ugacgugacuuuccuacaa

SEQ ID NO: 742279 - RNA, 19 nt, Artificial Sequence
  Description of Artificial Sequence: Synthetic oligonucleotide
  Antisense strand to SEQ ID NO: 742278
uuguaggaaagucacguca

SEQ ID NO: 742280 - RNA, 19 nt, Artificial Sequence
  Description of Artificial Sequence: Synthetic oligonucleotide
  Sense strand starting at position 133 of SEQ ID NO: 586761
agggcuuugcauggguaga

SEQ ID NO: 742281 - RNA, 19 nt, Artificial Sequence
  Description of Artificial Sequence: Synthetic oligonucleotide
  Antisense strand to SEQ ID NO: 742280
ucuacccaugcaaagcccu

SEQ ID NO: 742282 - RNA, 19 nt, Artificial Sequence
  Description of Artificial Sequence: Synthetic oligonucleotide
  Sense strand starting at position 134 of SEQ ID NO: 586761
gggcuuugcauggguagau

SEQ ID NO: 742283 - RNA, 19 nt, Artificial Sequence
  Description of Artificial Sequence: Synthetic oligonucleotide
  Antisense strand to SEQ ID NO: 742282
aucuacccaugcaaagccc

SEQ ID NO: 742284 - RNA, 19 nt, Artificial Sequence
  Description of Artificial Sequence: Synthetic oligonucleotide
  Sense strand starting at position 144 of SEQ ID NO: 586761
uggguagaugugcggucaa

SEQ ID NO: 742285 - RNA, 19 nt, Artificial Sequence
  Description of Artificial Sequence: Synthetic oligonucleotide
  Antisense strand to SEQ ID NO: 742284
uugaccgcacaucuaccca

SEQ ID NO: 742286 - RNA, 19 nt, Artificial Sequence
  Description of Artificial Sequence: Synthetic oligonucleotide
  Sense strand starting at position 164 of SEQ ID NO: 586761
ugacucauguccuuugcuu

SEQ ID NO: 742287 - RNA, 19 nt, Artificial Sequence
  Description of Artificial Sequence: Synthetic oligonucleotide
  Antisense strand to SEQ ID NO: 742286
aagcaaaggacaugaguca

SEQ ID NO: 742288 - RNA, 19 nt, Artificial Sequence
  Description of Artificial Sequence: Synthetic oligonucleotide
  Sense strand starting at position 166 of SEQ ID NO: 586761
acucauguccuuugcuuua

SEQ ID NO: 742289 - RNA, 19 nt, Artificial Sequence
  Description of Artificial Sequence: Synthetic oligonucleotide
  Antisense strand to SEQ ID NO: 742288
uaaagcaaaggacaugagu

SEQ ID NO: 742290 - RNA, 19 nt, Artificial Sequence
  Description of Artificial Sequence: Synthetic oligonucleotide
  Sense strand starting at position 183 of SEQ ID NO: 586761
uaaugaugcuuggccgaau

SEQ ID NO: 742291 - RNA, 19 nt, Artificial Sequence
  Description of Artificial Sequence: Synthetic oligonucleotide
  Antisense strand to SEQ ID NO: 742290
auucggccaagcaucauua

SEQ ID NO: 742292 - RNA, 19 nt, Artificial Sequence
  Description of Artificial Sequence: Synthetic oligonucleotide
  Sense strand starting at position 212 of SEQ ID NO: 586761
aaggcuggccauugaagaa

SEQ ID NO: 742293 - RNA, 19 nt, Artificial Sequence
  Description of Artificial Sequence: Synthetic oligonucleotide
  Antisense strand to SEQ ID NO: 742292
uucuucaauggccagccuu

SEQ ID NO: 742294 - RNA, 19 nt, Artificial Sequence
  Description of Artificial Sequence: Synthetic oligonucleotide
  Sense strand starting at position 399 of SEQ ID NO: 586761
aggccugacgucuggaaga

SEQ ID NO: 742295 - RNA, 19 nt, Artificial Sequence
  Description of Artificial Sequence: Synthetic oligonucleotide
  Antisense strand to SEQ ID NO: 742294
ucuuccagacgucaggccu

SEQ ID NO: 742296 - RNA, 19 nt, Artificial Sequence
  Description of Artificial Sequence: Synthetic oligonucleotide
  Sense strand starting at position 401 of SEQ ID NO: 586761
gccugacgucuggaagaau

SEQ ID NO: 742297 - RNA, 19 nt, Artificial Sequence
  Description of Artificial Sequence: Synthetic oligonucleotide
  Antisense strand to SEQ ID NO: 742296
auucuuccagacgucaggc

SEQ ID NO: 742298 - RNA, 19 nt, Artificial Sequence
  Description of Artificial Sequence: Synthetic oligonucleotide
  Sense strand starting at position 434 of SEQ ID NO: 586761
agugucugggucugaagaa

SEQ ID NO: 742299 - RNA, 19 nt, Artificial Sequence
  Description of Artificial Sequence: Synthetic oligonucleotide
  Antisense strand to SEQ ID NO: 742298
uucuucagacccagacacu

SEQ ID NO: 742300 - RNA, 19 nt, Artificial Sequence
  Description of Artificial Sequence: Synthetic oligonucleotide
  Sense strand starting at position 467 of SEQ ID NO: 586761
uucugacacucauuggauc

SEQ ID NO: 742301 - RNA, 19 nt, Artificial Sequence
  Description of Artificial Sequence: Synthetic oligonucleotide
  Antisense strand to SEQ ID NO: 742300
gauccaaugagugucagaa

SEQ ID NO: 742302 - RNA, 19 nt, Artificial Sequence
  Description of Artificial Sequence: Synthetic oligonucleotide
  Sense strand starting at position 468 of SEQ ID NO: 586761
ucugacacucauuggauca

SEQ ID NO: 742303 - RNA, 19 nt, Artificial Sequence
  Description of Artificial Sequence: Synthetic oligonucleotide
  Antisense strand to SEQ ID NO: 742302
ugauccaaugagugucaga

SEQ ID NO: 742304 - RNA, 19 nt, Artificial Sequence
  Description of Artificial Sequence: Synthetic oligonucleotide
  Sense strand starting at position 560 of SEQ ID NO: 586761
ggaugcucaacuggucuaa

SEQ ID NO: 742305 - RNA, 19 nt, Artificial Sequence
  Description of Artificial Sequence: Synthetic oligonucleotide
  Antisense strand to SEQ ID NO: 742304
uuagaccaguugagcaucc

SEQ ID NO: 742306 - RNA, 19 nt, Artificial Sequence
  Description of Artificial Sequence: Synthetic oligonucleotide
  Sense strand starting at position 564 of SEQ ID NO: 586761
gcucaacuggucuaagauu

SEQ ID NO: 742307 - RNA, 19 nt, Artificial Sequence
  Description of Artificial Sequence: Synthetic oligonucleotide
  Antisense strand to SEQ ID NO: 742306
aaucuuagaccaguugagc

SEQ ID NO: 742308 - RNA, 19 nt, Artificial Sequence
  Description of Artificial Sequence: Synthetic oligonucleotide
  Sense strand starting at position 597 of SEQ ID NO: 586761
acuugauggcucugugaug

SEQ ID NO: 742309 - RNA, 19 nt, Artificial Sequence
  Description of Artificial Sequence: Synthetic oligonucleotide
  Antisense strand to SEQ ID NO: 742308
caucacagagccaucaagu

SEQ ID NO: 742310 - RNA, 19 nt, Artificial Sequence
  Description of Artificial Sequence: Synthetic oligonucleotide
  Sense strand starting at position 1176 of SEQ ID NO: 586761
aaguguaaucgugugcuca

SEQ ID NO: 742311 - RNA, 19 nt, Artificial Sequence
  Description of Artificial Sequence: Synthetic oligonucleotide
  Antisense strand to SEQ ID NO: 742310
ugagcacacgauuacacuu

SEQ ID NO: 742312 - RNA, 19 nt, Artificial Sequence
  Description of Artificial Sequence: Synthetic oligonucleotide
  Sense strand starting at position 1350 of SEQ ID NO: 586761
caguguagcgaucauagcu

SEQ ID NO: 742313 - RNA, 19 nt, Artificial Sequence
  Description of Artificial Sequence: Synthetic oligonucleotide
  Antisense strand to SEQ ID NO: 742312
agcuaugaucgcuacacug

SEQ ID NO: 742314 - RNA, 19 nt, Artificial Sequence
  Description of Artificial Sequence: Synthetic oligonucleotide
  Sense strand starting at position 1406 of SEQ ID NO: 586761
cuaccuuaguuuccagagu

SEQ ID NO: 742315 - RNA, 19 nt, Artificial Sequence
  Description of Artificial Sequence: Synthetic oligonucleotide
  Antisense strand to SEQ ID NO: 742314
acucuggaaacuaagguag

SEQ ID NO: 742316 - RNA, 19 nt, Artificial Sequence
  Description of Artificial Sequence: Synthetic oligonucleotide
  Sense strand starting at position 1961 of SEQ ID NO: 586761
cugcaaugucaucagcacu

SEQ ID NO: 742317 - RNA, 19 nt, Artificial Sequence
  Description of Artificial Sequence: Synthetic oligonucleotide
  Antisense strand to SEQ ID NO: 742316
agugcugaugacauugcag

SEQ ID NO: 742318 - RNA, 19 nt, Artificial Sequence
  Description of Artificial Sequence: Synthetic oligonucleotide
  Sense strand starting at position 2019 of SEQ ID NO: 586761
gaauaaacgagaggcgaua

SEQ ID NO: 742319 - RNA, 19 nt, Artificial Sequence
  Description of Artificial Sequence: Synthetic oligonucleotide
  Antisense strand to SEQ ID NO: 742318
uaucgccucucguuuauuc

SEQ ID NO: 742320 - RNA, 19 nt, Artificial Sequence
  Description of Artificial Sequence: Synthetic oligonucleotide
  Sense strand starting at position 2092 of SEQ ID NO: 586761
gaaacuguaugugugucua

SEQ ID NO: 742321 - RNA, 19 nt, Artificial Sequence
  Description of Artificial Sequence: Synthetic oligonucleotide
  Antisense strand to SEQ ID NO: 742320
uagacacacauacaguuuc

SEQ ID NO: 742322 - RNA, 19 nt, Artificial Sequence
  Description of Artificial Sequence: Synthetic oligonucleotide
  Sense strand starting at position 2094 of SEQ ID NO: 586761
aacuguaugugugucuaga

SEQ ID NO: 742323 - RNA, 19 nt, Artificial Sequence
  Description of Artificial Sequence: Synthetic oligonucleotide
  Antisense strand to SEQ ID NO: 742322
ucuagacacacauacaguu

SEQ ID NO: 742324 - RNA, 19 nt, Artificial Sequence
  Description of Artificial Sequence: Synthetic oligonucleotide
  Sense strand starting at position 2634 of SEQ ID NO: 586761
agccguaaaccauguuaca

SEQ ID NO: 742325 - RNA, 19 nt, Artificial Sequence
  Description of Artificial Sequence: Synthetic oligonucleotide
  Antisense strand to SEQ ID NO: 742324
uguaacaugguuuacggcu

SEQ ID NO: 742326 - RNA, 19 nt, Artificial Sequence
  Description of Artificial Sequence: Synthetic oligonucleotide
  Sense strand starting at position 2648 of SEQ ID NO: 586761
uuacaaaugcacuggcauu

SEQ ID NO: 742327 - RNA, 19 nt, Artificial Sequence
  Description of Artificial Sequence: Synthetic oligonucleotide
  Antisense strand to SEQ ID NO: 742326
aaugccagugcauuuguaa

SEQ ID NO: 742328 - RNA, 19 nt, Artificial Sequence
  Description of Artificial Sequence: Synthetic oligonucleotide
  Sense strand starting at position 2695 of SEQ ID NO: 586761
uugcaaauuccacguggga

SEQ ID NO: 742329 - RNA, 19 nt, Artificial Sequence
  Description of Artificial Sequence: Synthetic oligonucleotide
  Antisense strand to SEQ ID NO: 742328
ucccacguggaauuugcaa

SEQ ID NO: 742330 - RNA, 19 nt, Artificial Sequence
  Description of Artificial Sequence: Synthetic oligonucleotide
  Sense strand starting at position 2697 of SEQ ID NO: 586761
gcaaauuccacgugggaaa

SEQ ID NO: 742331 - RNA, 19 nt, Artificial Sequence
  Description of Artificial Sequence: Synthetic oligonucleotide
  Antisense strand to SEQ ID NO: 742330
uuucccacguggaauuugc

SEQ ID NO: 742332 - RNA, 19 nt, Artificial Sequence
  Description of Artificial Sequence: Synthetic oligonucleotide
  Sense strand starting at position 2736 of SEQ ID NO: 586761
gcagacauucuguggaaga

SEQ ID NO: 742333 - RNA, 19 nt, Artificial Sequence
  Description of Artificial Sequence: Synthetic oligonucleotide
  Antisense strand to SEQ ID NO: 742332
ucuuccacagaaugucugc

SEQ ID NO: 742334 - RNA, 19 nt, Artificial Sequence
  Description of Artificial Sequence: Synthetic oligonucleotide
  Sense strand starting at position 2761 of SEQ ID NO: 586761
gcuaccuguccugaaaggu

SEQ ID NO: 742335 - RNA, 19 nt, Artificial Sequence
  Description of Artificial Sequence: Synthetic oligonucleotide
  Antisense strand to SEQ ID NO: 742334
accuuucaggacagguagc

SEQ ID NO: 742336 - RNA, 19 nt, Artificial Sequence
  Description of Artificial Sequence: Synthetic oligonucleotide
  Sense strand starting at position 2800 of SEQ ID NO: 586761
gcccaucucccagagauua

SEQ ID NO: 742337 - RNA, 19 nt, Artificial Sequence
  Description of Artificial Sequence: Synthetic oligonucleotide
  Antisense strand to SEQ ID NO: 742336
uaaucucugggagaugggc

SEQ ID NO: 742338 - RNA, 19 nt, Artificial Sequence
  Description of Artificial Sequence: Synthetic oligonucleotide
  Sense strand starting at position 2831 of SEQ ID NO: 586761
augucagagccaugggaaa

SEQ ID NO: 742339 - RNA, 19 nt, Artificial Sequence
  Description of Artificial Sequence: Synthetic oligonucleotide
  Antisense strand to SEQ ID NO: 742338
uuucccauggcucugacau

SEQ ID NO: 742340 - RNA, 19 nt, Artificial Sequence
  Description of Artificial Sequence: Synthetic oligonucleotide
  Sense strand starting at position 2879 of SEQ ID NO: 586761
gaaugcaugcagugaagaa

SEQ ID NO: 742341 - RNA, 19 nt, Artificial Sequence
  Description of Artificial Sequence: Synthetic oligonucleotide
  Antisense strand to SEQ ID NO: 742340
uucuucacugcaugcauuc

SEQ ID NO: 742342 - RNA, 19 nt, Artificial Sequence
  Description of Artificial Sequence: Synthetic oligonucleotide
  Sense strand starting at position 2907 of SEQ ID NO: 586761
gucugauggguccaccagu

SEQ ID NO: 742343 - RNA, 19 nt, Artificial Sequence
  Description of Artificial Sequence: Synthetic oligonucleotide
  Antisense strand to SEQ ID NO: 742342
acugguggacccaucagac

SEQ ID NO: 742344 - RNA, 19 nt, Artificial Sequence
  Description of Artificial Sequence: Synthetic oligonucleotide
  Sense strand starting at position 3091 of SEQ ID NO: 586761
ucaaaugucuuguccuacu

SEQ ID NO: 742345 - RNA, 19 nt, Artificial Sequence
  Description of Artificial Sequence: Synthetic oligonucleotide
  Antisense strand to SEQ ID NO: 742344
aguaggacaagacauuuga

SEQ ID NO: 742346 - RNA, 19 nt, Artificial Sequence
  Description of Artificial Sequence: Synthetic oligonucleotide
  Sense strand starting at position 3131 of SEQ ID NO: 586761
cuauuuaugucucaaggga

SEQ ID NO: 742347 - RNA, 19 nt, Artificial Sequence
  Description of Artificial Sequence: Synthetic oligonucleotide
  Antisense strand to SEQ ID NO: 742346
ucccuugagacauaaauag

SEQ ID NO: 742348 - RNA, 19 nt, Artificial Sequence
  Description of Artificial Sequence: Synthetic oligonucleotide
  Sense strand starting at position 3135 of SEQ ID NO: 586761
uuaugucucaagggaaugu

SEQ ID NO: 742349 - RNA, 19 nt, Artificial Sequence
  Description of Artificial Sequence: Synthetic oligonucleotide
  Antisense strand to SEQ ID NO: 742348
acauucccuugagacauaa

SEQ ID NO: 742350 - RNA, 19 nt, Artificial Sequence
  Description of Artificial Sequence: Synthetic oligonucleotide
  Sense strand starting at position 3146 of SEQ ID NO: 586761
gggaaugugggugggaaua

SEQ ID NO: 742351 - RNA, 19 nt, Artificial Sequence
  Description of Artificial Sequence: Synthetic oligonucleotide
  Antisense strand to SEQ ID NO: 742350
uauucccacccacauuccc

SEQ ID NO: 742352 - RNA, 19 nt, Artificial Sequence
  Description of Artificial Sequence: Synthetic oligonucleotide
  Sense strand starting at position 3311 of SEQ ID NO: 586761
cauacagggugcucuguaa

SEQ ID NO: 742353 - RNA, 19 nt, Artificial Sequence
  Description of Artificial Sequence: Synthetic oligonucleotide
  Antisense strand to SEQ ID NO: 742352
uuacagagcacccuguaug

SEQ ID NO: 742354 - RNA, 19 nt, Artificial Sequence
  Description of Artificial Sequence: Synthetic oligonucleotide
  Sense strand starting at position 3318 of SEQ ID NO: 586761
ggugcucuguaagcugaaa

SEQ ID NO: 742355 - RNA, 19 nt, Artificial Sequence
  Description of Artificial Sequence: Synthetic oligonucleotide
  Antisense strand to SEQ ID NO: 742354
uuucagcuuacagagcacc

SEQ ID NO: 742356 - RNA, 19 nt, Artificial Sequence
  Description of Artificial Sequence: Synthetic oligonucleotide
  Sense strand starting at position 3389 of SEQ ID NO: 586761
gggaacuauggauguguaa

SEQ ID NO: 742357 - RNA, 19 nt, Artificial Sequence
  Description of Artificial Sequence: Synthetic oligonucleotide
  Antisense strand to SEQ ID NO: 742356
uuacacauccauaguuccc

SEQ ID NO: 742358 - RNA, 19 nt, Artificial Sequence
  Description of Artificial Sequence: Synthetic oligonucleotide
  Sense strand starting at position 3402 of SEQ ID NO: 586761
guguaaggcugaccucaau

SEQ ID NO: 742359 - RNA, 19 nt, Artificial Sequence
  Description of Artificial Sequence: Synthetic oligonucleotide
  Antisense strand to SEQ ID NO: 742358
auugaggucagccuuacac

SEQ ID NO: 742360 - RNA, 19 nt, Artificial Sequence
  Description of Artificial Sequence: Synthetic oligonucleotide
  Sense strand starting at position 224 of SEQ ID NO: 586762
aguaguugcgacuacaagu

SEQ ID NO: 742361 - RNA, 19 nt, Artificial Sequence
  Description of Artificial Sequence: Synthetic oligonucleotide
  Antisense strand to SEQ ID NO: 742360
acuuguagucgcaacuacu

SEQ ID NO: 742362 - RNA, 19 nt, Artificial Sequence
  Description of Artificial Sequence: Synthetic oligonucleotide
  Sense strand starting at position 234 of SEQ ID NO: 586762
acuacaaguauauguggua

SEQ ID NO: 742363 - RNA, 19 nt, Artificial Sequence
  Description of Artificial Sequence: Synthetic oligonucleotide
  Antisense strand to SEQ ID NO: 742362
uaccacauauacuuguagu

SEQ ID NO: 742364 - RNA, 19 nt, Artificial Sequence
  Description of Artificial Sequence: Synthetic oligonucleotide
  Sense strand starting at position 241 of SEQ ID NO: 586762
guauaugugguauaugcca

SEQ ID NO: 742365 - RNA, 19 nt, Artificial Sequence
  Description of Artificial Sequence: Synthetic oligonucleotide
  Antisense strand to SEQ ID NO: 742364
uggcauauaccacauauac

SEQ ID NO: 742366 - RNA, 19 nt, Artificial Sequence
  Description of Artificial Sequence: Synthetic oligonucleotide
  Sense strand starting at position 316 of SEQ ID NO: 586762
gcuggucuccuugaacuga

SEQ ID NO: 742367 - RNA, 19 nt, Artificial Sequence
  Description of Artificial Sequence: Synthetic oligonucleotide
  Antisense strand to SEQ ID NO: 742366
ucaguucaaggagaccagc

SEQ ID NO: 742368 - RNA, 19 nt, Artificial Sequence
  Description of Artificial Sequence: Synthetic oligonucleotide
  Sense strand starting at position 411 of SEQ ID NO: 586762
gcacgucaaaugggugaau

SEQ ID NO: 742369 - RNA, 19 nt, Artificial Sequence
  Description of Artificial Sequence: Synthetic oligonucleotide
  Antisense strand to SEQ ID NO: 742368
auucacccauuugacgugc

SEQ ID NO: 742370 - RNA, 19 nt, Artificial Sequence
  Description of Artificial Sequence: Synthetic oligonucleotide
  Sense strand starting at position 429 of SEQ ID NO: 586762
ucguaugguaugugaauuu

SEQ ID NO: 742371 - RNA, 19 nt, Artificial Sequence
  Description of Artificial Sequence: Synthetic oligonucleotide
  Antisense strand to SEQ ID NO: 742370
aaauucacauaccauacga

SEQ ID NO: 742372 - RNA, 19 nt, Artificial Sequence
  Description of Artificial Sequence: Synthetic oligonucleotide
  Sense strand starting at position 824 of SEQ ID NO: 586762
augagcauacagugaucuu

SEQ ID NO: 742373 - RNA, 19 nt, Artificial Sequence
  Description of Artificial Sequence: Synthetic oligonucleotide
  Antisense strand to SEQ ID NO: 742372
aagaucacuguaugcucau

SEQ ID NO: 742374 - RNA, 19 nt, Artificial Sequence
  Description of Artificial Sequence: Synthetic oligonucleotide
  Sense strand starting at position 827 of SEQ ID NO: 586762
agcauacagugaucuuuau

SEQ ID NO: 742375 - RNA, 19 nt, Artificial Sequence
  Description of Artificial Sequence: Synthetic oligonucleotide
  Antisense strand to SEQ ID NO: 742374
auaaagaucacuguaugcu

SEQ ID NO: 742376 - RNA, 19 nt, Artificial Sequence
  Description of Artificial Sequence: Synthetic oligonucleotide
  Sense strand starting at position 857 of SEQ ID NO: 586762
agauccaguccucagcuaa

SEQ ID NO: 742377 - RNA, 19 nt, Artificial Sequence
  Description of Artificial Sequence: Synthetic oligonucleotide
  Antisense strand to SEQ ID NO: 742376
uuagcugaggacuggaucu

SEQ ID NO: 742378 - RNA, 19 nt, Artificial Sequence
  Description of Artificial Sequence: Synthetic oligonucleotide
  Sense strand starting at position 892 of SEQ ID NO: 586762
aguguuacauacucuccua

SEQ ID NO: 742379 - RNA, 19 nt, Artificial Sequence
  Description of Artificial Sequence: Synthetic oligonucleotide
  Antisense strand to SEQ ID NO: 742378
uaggagaguauguaacacu

SEQ ID NO: 742380 - RNA, 19 nt, Artificial Sequence
  Description of Artificial Sequence: Synthetic oligonucleotide
  Sense strand starting at position 1007 of SEQ ID NO: 586762
agagcaguguaccuggaaa

SEQ ID NO: 742381 - RNA, 19 nt, Artificial Sequence
  Description of Artificial Sequence: Synthetic oligonucleotide
  Antisense strand to SEQ ID NO: 742380
uuuccagguacacugcucu

SEQ ID NO: 742382 - RNA, 19 nt, Artificial Sequence
  Description of Artificial Sequence: Synthetic oligonucleotide
  Sense strand starting at position 1009 of SEQ ID NO: 586762
agcaguguaccuggaaauc

SEQ ID NO: 742383 - RNA, 19 nt, Artificial Sequence
  Description of Artificial Sequence: Synthetic oligonucleotide
  Antisense strand to SEQ ID NO: 742382
gauuuccagguacacugcu

SEQ ID NO: 742384 - RNA, 19 nt, Artificial Sequence
  Description of Artificial Sequence: Synthetic oligonucleotide
  Sense strand starting at position 1080 of SEQ ID NO: 586762
uccuauguucugggcaaag

SEQ ID NO: 742385 - RNA, 19 nt, Artificial Sequence
  Description of Artificial Sequence: Synthetic oligonucleotide
  Antisense strand to SEQ ID NO: 742384
cuuugcccagaacauagga

SEQ ID NO: 742386 - RNA, 19 nt, Artificial Sequence
  Description of Artificial Sequence: Synthetic oligonucleotide
  Sense strand starting at position 1215 of SEQ ID NO: 586762
uggugcuugaaagauguuu

SEQ ID NO: 742387 - RNA, 19 nt, Artificial Sequence
  Description of Artificial Sequence: Synthetic oligonucleotide
  Antisense strand to SEQ ID NO: 742386
aaacaucuuucaagcacca

SEQ ID NO: 742388 - RNA, 19 nt, Artificial Sequence
  Description of Artificial Sequence: Synthetic oligonucleotide
  Sense strand starting at position 2093 of SEQ ID NO: 586762
uuugcuccgcuagagagau

SEQ ID NO: 742389 - RNA, 19 nt, Artificial Sequence
  Description of Artificial Sequence: Synthetic oligonucleotide
  Antisense strand to SEQ ID NO: 742388
aucucucuagcggagcaaa

SEQ ID NO: 742390 - RNA, 19 nt, Artificial Sequence
  Description of Artificial Sequence: Synthetic oligonucleotide
  Sense strand starting at position 2099 of SEQ ID NO: 586762
ccgcuagagagaugagguu

SEQ ID NO: 742391 - RNA, 19 nt, Artificial Sequence
  Description of Artificial Sequence: Synthetic oligonucleotide
  Antisense strand to SEQ ID NO: 742390
aaccucaucucucuagcgg

SEQ ID NO: 742392 - RNA, 19 nt, Artificial Sequence
  Description of Artificial Sequence: Synthetic oligonucleotide
  Sense strand starting at position 2105 of SEQ ID NO: 586762
gagagaugagguugucuau

SEQ ID NO: 742393 - RNA, 19 nt, Artificial Sequence
  Description of Artificial Sequence: Synthetic oligonucleotide
  Antisense strand to SEQ ID NO: 742392
auagacaaccucaucucuc

SEQ ID NO: 742394 - RNA, 19 nt, Artificial Sequence
  Description of Artificial Sequence: Synthetic oligonucleotide
  Sense strand starting at position 2108 of SEQ ID NO: 586762
agaugagguugucuaugga

SEQ ID NO: 742395 - RNA, 19 nt, Artificial Sequence
  Description of Artificial Sequence: Synthetic oligonucleotide
  Antisense strand to SEQ ID NO: 742394
uccauagacaaccucaucu

SEQ ID NO: 742396 - RNA, 19 nt, Artificial Sequence
  Description of Artificial Sequence: Synthetic oligonucleotide
  Sense strand starting at position 2111 of SEQ ID NO: 586762
ugagguugucuauggacuu

SEQ ID NO: 742397 - RNA, 19 nt, Artificial Sequence
  Description of Artificial Sequence: Synthetic oligonucleotide
  Antisense strand to SEQ ID NO: 742396
aaguccauagacaaccuca

SEQ ID NO: 742398 - RNA, 19 nt, Artificial Sequence
  Description of Artificial Sequence: Synthetic oligonucleotide
  Sense strand starting at position 2200 of SEQ ID NO: 586762
agagauaguuggguugaug

SEQ ID NO: 742399 - RNA, 19 nt, Artificial Sequence
  Description of Artificial Sequence: Synthetic oligonucleotide
  Antisense strand to SEQ ID NO: 742398
caucaacccaacuaucucu

SEQ ID NO: 742400 - RNA, 19 nt, Artificial Sequence
  Description of Artificial Sequence: Synthetic oligonucleotide
  Sense strand starting at position 2203 of SEQ ID NO: 586762
gauaguuggguugauguga

SEQ ID NO: 742401 - RNA, 19 nt, Artificial Sequence
  Description of Artificial Sequence: Synthetic oligonucleotide
  Antisense strand to SEQ ID NO: 742400
ucacaucaacccaacuauc

SEQ ID NO: 742402 - RNA, 19 nt, Artificial Sequence
  Description of Artificial Sequence: Synthetic oligonucleotide
  Sense strand starting at position 2214 of SEQ ID NO: 586762
ugaugugaaacuuagcgca

SEQ ID NO: 742403 - RNA, 19 nt, Artificial Sequence
  Description of Artificial Sequence: Synthetic oligonucleotide
  Antisense strand to SEQ ID NO: 742402
ugcgcuaaguuucacauca

SEQ ID NO: 742404 - RNA, 19 nt, Artificial Sequence
  Description of Artificial Sequence: Synthetic oligonucleotide
  Sense strand starting at position 2282 of SEQ ID NO: 586762
gggucaggcuuugugacaa

SEQ ID NO: 742405 - RNA, 19 nt, Artificial Sequence
  Description of Artificial Sequence: Synthetic oligonucleotide
  Antisense strand to SEQ ID NO: 742404
uugucacaaagccugaccc

SEQ ID NO: 742406 - RNA, 19 nt, Artificial Sequence
  Description of Artificial Sequence: Synthetic oligonucleotide
  Sense strand starting at position 2319 of SEQ ID NO: 586762
uguguaacaaucugugaga

SEQ ID NO: 742407 - RNA, 19 nt, Artificial Sequence
  Description of Artificial Sequence: Synthetic oligonucleotide
  Antisense strand to SEQ ID NO: 742406
ucucacagauuguuacaca

SEQ ID NO: 742408 - RNA, 19 nt, Artificial Sequence
  Description of Artificial Sequence: Synthetic oligonucleotide
  Sense strand starting at position 2320 of SEQ ID NO: 586762
guguaacaaucugugagac

SEQ ID NO: 742409 - RNA, 19 nt, Artificial Sequence
  Description of Artificial Sequence: Synthetic oligonucleotide
  Antisense strand to SEQ ID NO: 742408
gucucacagauuguuacac

SEQ ID NO: 742410 - RNA, 19 nt, Artificial Sequence
  Description of Artificial Sequence: Synthetic oligonucleotide
  Sense strand starting at position 2321 of SEQ ID NO: 586762
uguaacaaucugugagaca

SEQ ID NO: 742411 - RNA, 19 nt, Artificial Sequence
  Description of Artificial Sequence: Synthetic oligonucleotide
  Antisense strand to SEQ ID NO: 742410
ugucucacagauuguuaca

SEQ ID NO: 742412 - RNA, 19 nt, Artificial Sequence
  Description of Artificial Sequence: Synthetic oligonucleotide
  Sense strand starting at position 2380 of SEQ ID NO: 586762
cugggaucuugcccgggau

SEQ ID NO: 742413 - RNA, 19 nt, Artificial Sequence
  Description of Artificial Sequence: Synthetic oligonucleotide
  Antisense strand to SEQ ID NO: 742412
aucccgggcaagaucccag

SEQ ID NO: 742414 - RNA, 19 nt, Artificial Sequence
  Description of Artificial Sequence: Synthetic oligonucleotide
  Sense strand starting at position 2465 of SEQ ID NO: 586762
caaccuguugauuguaaga

SEQ ID NO: 742415 - RNA, 19 nt, Artificial Sequence
  Description of Artificial Sequence: Synthetic oligonucleotide
  Antisense strand to SEQ ID NO: 742414
ucuuacaaucaacagguug

SEQ ID NO: 742416 - RNA, 19 nt, Artificial Sequence
  Description of Artificial Sequence: Synthetic oligonucleotide
  Sense strand starting at position 2475 of SEQ ID NO: 586762
auuguaagauguucccuau

SEQ ID NO: 742417 - RNA, 19 nt, Artificial Sequence
  Description of Artificial Sequence: Synthetic oligonucleotide
  Antisense strand to SEQ ID NO: 742416
auagggaacaucuuacaau

SEQ ID NO: 742418 - RNA, 19 nt, Artificial Sequence
  Description of Artificial Sequence: Synthetic oligonucleotide
  Sense strand starting at position 2815 of SEQ ID NO: 586762
cguauaagugcuuauuaua

SEQ ID NO: 742419 - RNA, 19 nt, Artificial Sequence
  Description of Artificial Sequence: Synthetic oligonucleotide
  Antisense strand to SEQ ID NO: 742418
uauaauaagcacuuauacg

SEQ ID NO: 742420 - RNA, 19 nt, Artificial Sequence
  Description of Artificial Sequence: Synthetic oligonucleotide
  Sense strand starting at position 2843 of SEQ ID NO: 586762
uaggguaauguaugugaca

SEQ ID NO: 742421 - RNA, 19 nt, Artificial Sequence
  Description of Artificial Sequence: Synthetic oligonucleotide
  Antisense strand to SEQ ID NO: 742420
ugucacauacauuacccua

SEQ ID NO: 742422 - RNA, 19 nt, Artificial Sequence
  Description of Artificial Sequence: Synthetic oligonucleotide
  Sense strand starting at position 2844 of SEQ ID NO: 586762
aggguaauguaugugacaa

SEQ ID NO: 742423 - RNA, 19 nt, Artificial Sequence
  Description of Artificial Sequence: Synthetic oligonucleotide
  Antisense strand to SEQ ID NO: 742422
uugucacauacauuacccu

SEQ ID NO: 742424 - RNA, 19 nt, Artificial Sequence
  Description of Artificial Sequence: Synthetic oligonucleotide
  Sense strand starting at position 2845 of SEQ ID NO: 586762
ggguaauguaugugacaag

SEQ ID NO: 742425 - RNA, 19 nt, Artificial Sequence
  Description of Artificial Sequence: Synthetic oligonucleotide
  Antisense strand to SEQ ID NO: 742424
cuugucacauacauuaccc

SEQ ID NO: 742426 - RNA, 19 nt, Artificial Sequence
  Description of Artificial Sequence: Synthetic oligonucleotide
  Sense strand starting at position 3452 of SEQ ID NO: 586762
auuauacggucucuauaca

SEQ ID NO: 742427 - RNA, 19 nt, Artificial Sequence
  Description of Artificial Sequence: Synthetic oligonucleotide
  Antisense strand to SEQ ID NO: 742426
uguauagagaccguauaau

SEQ ID NO: 742428 - RNA, 19 nt, Artificial Sequence
  Description of Artificial Sequence: Synthetic oligonucleotide
  Sense strand starting at position 3453 of SEQ ID NO: 586762
uuauacggucucuauacau

SEQ ID NO: 742429 - RNA, 19 nt, Artificial Sequence
  Description of Artificial Sequence: Synthetic oligonucleotide
  Antisense strand to SEQ ID NO: 742428
auguauagagaccguauaa

SEQ ID NO: 742430 - RNA, 19 nt, Artificial Sequence
  Description of Artificial Sequence: Synthetic oligonucleotide
  Sense strand starting at position 3484 of SEQ ID NO: 586762
uuacuuuaugugggugaaa

SEQ ID NO: 742431 - RNA, 19 nt, Artificial Sequence
  Description of Artificial Sequence: Synthetic oligonucleotide
  Antisense strand to SEQ ID NO: 742430
uuucacccacauaaaguaa

SEQ ID NO: 742432 - RNA, 19 nt, Artificial Sequence
  Description of Artificial Sequence: Synthetic oligonucleotide
  Sense strand starting at position 3485 of SEQ ID NO: 586762
uacuuuaugugggugaaau

SEQ ID NO: 742433 - RNA, 19 nt, Artificial Sequence
  Description of Artificial Sequence: Synthetic oligonucleotide
  Antisense strand to SEQ ID NO: 742432
auuucacccacauaaagua

SEQ ID NO: 742434 - RNA, 19 nt, Artificial Sequence
  Description of Artificial Sequence: Synthetic oligonucleotide
  Sense strand starting at position 3486 of SEQ ID NO: 586762
acuuuaugugggugaaauc

SEQ ID NO: 742435 - RNA, 19 nt, Artificial Sequence
  Description of Artificial Sequence: Synthetic oligonucleotide
  Antisense strand to SEQ ID NO: 742434
gauuucacccacauaaagu

SEQ ID NO: 742436 - RNA, 19 nt, Artificial Sequence
  Description of Artificial Sequence: Synthetic oligonucleotide
  Sense strand starting at position 3487 of SEQ ID NO: 586762
cuuuaugugggugaaauca

SEQ ID NO: 742437 - RNA, 19 nt, Artificial Sequence
  Description of Artificial Sequence: Synthetic oligonucleotide
  Antisense strand to SEQ ID NO: 742436
ugauuucacccacauaaag

SEQ ID NO: 742438 - RNA, 19 nt, Artificial Sequence
  Description of Artificial Sequence: Synthetic oligonucleotide
  Sense strand starting at position 3548 of SEQ ID NO: 586762
ugagguugucaagguuuau

SEQ ID NO: 742439 - RNA, 19 nt, Artificial Sequence
  Description of Artificial Sequence: Synthetic oligonucleotide
  Antisense strand to SEQ ID NO: 742438
auaaaccuugacaaccuca

SEQ ID NO: 742440 - RNA, 19 nt, Artificial Sequence
  Description of Artificial Sequence: Synthetic oligonucleotide
  Sense strand starting at position 613 of SEQ ID NO: 586763
uauggacauuuccaggcau

SEQ ID NO: 742441 - RNA, 19 nt, Artificial Sequence
  Description of Artificial Sequence: Synthetic oligonucleotide
  Antisense strand to SEQ ID NO: 742440
augccuggaaauguccaua

SEQ ID NO: 742442 - RNA, 19 nt, Artificial Sequence
  Description of Artificial Sequence: Synthetic oligonucleotide
  Sense strand starting at position 926 of SEQ ID NO: 586763
agcugagaugccuggauug

SEQ ID NO: 742443 - RNA, 19 nt, Artificial Sequence
  Description of Artificial Sequence: Synthetic oligonucleotide
  Antisense strand to SEQ ID NO: 742442
caauccaggcaucucagcu

SEQ ID NO: 742444 - RNA, 19 nt, Artificial Sequence
  Description of Artificial Sequence: Synthetic oligonucleotide
  Sense strand starting at position 928 of SEQ ID NO: 586763
cugagaugccuggauugug

SEQ ID NO: 742445 - RNA, 19 nt, Artificial Sequence
  Description of Artificial Sequence: Synthetic oligonucleotide
  Antisense strand to SEQ ID NO: 742444
cacaauccaggcaucucag

SEQ ID NO: 742446 - RNA, 19 nt, Artificial Sequence
  Description of Artificial Sequence: Synthetic oligonucleotide
  Sense strand starting at position 940 of SEQ ID NO: 586763
gauuguguucuccacuuag

SEQ ID NO: 742447 - RNA, 19 nt, Artificial Sequence
  Description of Artificial Sequence: Synthetic oligonucleotide
  Antisense strand to SEQ ID NO: 742446
cuaaguggagaacacaauc

SEQ ID NO: 742448 - RNA, 19 nt, Artificial Sequence
  Description of Artificial Sequence: Synthetic oligonucleotide
  Sense strand starting at position 997 of SEQ ID NO: 586763
uucuguccugacugggaga

SEQ ID NO: 742449 - RNA, 19 nt, Artificial Sequence
  Description of Artificial Sequence: Synthetic oligonucleotide
  Antisense strand to SEQ ID NO: 742448
ucucccagucaggacagaa

SEQ ID NO: 742450 - RNA, 19 nt, Artificial Sequence
  Description of Artificial Sequence: Synthetic oligonucleotide
  Sense strand starting at position 1026 of SEQ ID NO: 586763
auuccaacugcagaguaaa

SEQ ID NO: 742451 - RNA, 19 nt, Artificial Sequence
  Description of Artificial Sequence: Synthetic oligonucleotide
  Antisense strand to SEQ ID NO: 742450
uuuacucugcaguuggaau

SEQ ID NO: 742452 - RNA, 19 nt, Artificial Sequence
  Description of Artificial Sequence: Synthetic oligonucleotide
  Sense strand starting at position 1036 of SEQ ID NO: 586763
cagaguaaacguuagcacu

SEQ ID NO: 742453 - RNA, 19 nt, Artificial Sequence
  Description of Artificial Sequence: Synthetic oligonucleotide
  Antisense strand to SEQ ID NO: 742452
agugcuaacguuuacucug

SEQ ID NO: 742454 - RNA, 19 nt, Artificial Sequence
  Description of Artificial Sequence: Synthetic oligonucleotide
  Sense strand starting at position 1065 of SEQ ID NO: 586763
ugcccuuucgccucauauu

SEQ ID NO: 742455 - RNA, 19 nt, Artificial Sequence
  Description of Artificial Sequence: Synthetic oligonucleotide
  Antisense strand to SEQ ID NO: 742454
aauaugaggcgaaagggca

SEQ ID NO: 742456 - RNA, 19 nt, Artificial Sequence
  Description of Artificial Sequence: Synthetic oligonucleotide
  Sense strand starting at position 1293 of SEQ ID NO: 586763
ugccgaagggcuuacagau

SEQ ID NO: 742457 - RNA, 19 nt, Artificial Sequence
  Description of Artificial Sequence: Synthetic oligonucleotide
  Antisense strand to SEQ ID NO: 742456
aucuguaagcccuucggca

SEQ ID NO: 742458 - RNA, 19 nt, Artificial Sequence
  Description of Artificial Sequence: Synthetic oligonucleotide
  Sense strand starting at position 1299 of SEQ ID NO: 586763
agggcuuacagaugacaau

SEQ ID NO: 742459 - RNA, 19 nt, Artificial Sequence
  Description of Artificial Sequence: Synthetic oligonucleotide
  Antisense strand to SEQ ID NO: 742458
auugucaucuguaagcccu

SEQ ID NO: 742460 - RNA, 19 nt, Artificial Sequence
  Description of Artificial Sequence: Synthetic oligonucleotide
  Sense strand starting at position 1356 of SEQ ID NO: 586763
uaaccagaccuguggugaa

SEQ ID NO: 742461 - RNA, 19 nt, Artificial Sequence
  Description of Artificial Sequence: Synthetic oligonucleotide
  Antisense strand to SEQ ID NO: 742460
uucaccacaggucugguua

SEQ ID NO: 742462 - RNA, 19 nt, Artificial Sequence
  Description of Artificial Sequence: Synthetic oligonucleotide
  Sense strand starting at position 1366 of SEQ ID NO: 586763
uguggugaaaugugaggau

SEQ ID NO: 742463 - RNA, 19 nt, Artificial Sequence
  Description of Artificial Sequence: Synthetic oligonucleotide
  Antisense strand to SEQ ID NO: 742462
auccucacauuucaccaca

SEQ ID NO: 742464 - RNA, 19 nt, Artificial Sequence
  Description of Artificial Sequence: Synthetic oligonucleotide
  Sense strand starting at position 1468 of SEQ ID NO: 586763
gacugacauuuggagugaa

SEQ ID NO: 742465 - RNA, 19 nt, Artificial Sequence
  Description of Artificial Sequence: Synthetic oligonucleotide
  Antisense strand to SEQ ID NO: 742464
uucacuccaaaugucaguc

SEQ ID NO: 742466 - RNA, 19 nt, Artificial Sequence
  Description of Artificial Sequence: Synthetic oligonucleotide
  Sense strand starting at position 1571 of SEQ ID NO: 586763
ccagacuccucuuuaggaa

SEQ ID NO: 742467 - RNA, 19 nt, Artificial Sequence
  Description of Artificial Sequence: Synthetic oligonucleotide
  Antisense strand to SEQ ID NO: 742466
uuccuaaagaggagucugg

SEQ ID NO: 742468 - RNA, 19 nt, Artificial Sequence
  Description of Artificial Sequence: Synthetic oligonucleotide
  Sense strand starting at position 1769 of SEQ ID NO: 586763
aggacacguugaccagaau

SEQ ID NO: 742469 - RNA, 19 nt, Artificial Sequence
  Description of Artificial Sequence: Synthetic oligonucleotide
  Antisense strand to SEQ ID NO: 742468
auucuggucaacguguccu

SEQ ID NO: 742470 - RNA, 19 nt, Artificial Sequence
  Description of Artificial Sequence: Synthetic oligonucleotide
  Sense strand starting at position 1772 of SEQ ID NO: 586763
acacguugaccagaaugua

SEQ ID NO: 742471 - RNA, 19 nt, Artificial Sequence
  Description of Artificial Sequence: Synthetic oligonucleotide
  Antisense strand to SEQ ID NO: 742470
uacauucuggucaacgugu

SEQ ID NO: 742472 - RNA, 19 nt, Artificial Sequence
  Description of Artificial Sequence: Synthetic oligonucleotide
  Sense strand starting at position 2078 of SEQ ID NO: 586763
gggcucugugaaugaucaa

SEQ ID NO: 742473 - RNA, 19 nt, Artificial Sequence
  Description of Artificial Sequence: Synthetic oligonucleotide
  Antisense strand to SEQ ID NO: 742472
uugaucauucacagagccc

SEQ ID NO: 742474 - RNA, 19 nt, Artificial Sequence
  Description of Artificial Sequence: Synthetic oligonucleotide
  Sense strand starting at position 2079 of SEQ ID NO: 586763
ggcucugugaaugaucaau

SEQ ID NO: 742475 - RNA, 19 nt, Artificial Sequence
  Description of Artificial Sequence: Synthetic oligonucleotide
  Antisense strand to SEQ ID NO: 742474
auugaucauucacagagcc

SEQ ID NO: 742476 - RNA, 19 nt, Artificial Sequence
  Description of Artificial Sequence: Synthetic oligonucleotide
  Sense strand starting at position 2081 of SEQ ID NO: 586763
cucugugaaugaucaauac

SEQ ID NO: 742477 - RNA, 19 nt, Artificial Sequence
  Description of Artificial Sequence: Synthetic oligonucleotide
  Antisense strand to SEQ ID NO: 742476
guauugaucauucacagag

SEQ ID NO: 742478 - RNA, 19 nt, Artificial Sequence
  Description of Artificial Sequence: Synthetic oligonucleotide
  Sense strand starting at position 2208 of SEQ ID NO: 586763
gggcucaaauaaucuggau

SEQ ID NO: 742479 - RNA, 19 nt, Artificial Sequence
  Description of Artificial Sequence: Synthetic oligonucleotide
  Antisense strand to SEQ ID NO: 742478
auccagauuauuugagccc

SEQ ID NO: 742480 - RNA, 19 nt, Artificial Sequence
  Description of Artificial Sequence: Synthetic oligonucleotide
  Sense strand starting at position 2371 of SEQ ID NO: 586763
acaacuguaucaguuaagu

SEQ ID NO: 742481 - RNA, 19 nt, Artificial Sequence
  Description of Artificial Sequence: Synthetic oligonucleotide
  Antisense strand to SEQ ID NO: 742480
acuuaacugauacaguugu

SEQ ID NO: 742482 - RNA, 19 nt, Artificial Sequence
  Description of Artificial Sequence: Synthetic oligonucleotide
  Sense strand starting at position 2414 of SEQ ID NO: 586763
guggaaggugcccaucuua

SEQ ID NO: 742483 - RNA, 19 nt, Artificial Sequence
  Description of Artificial Sequence: Synthetic oligonucleotide
  Antisense strand to SEQ ID NO: 742482
uaagaugggcaccuuccac

SEQ ID NO: 742484 - RNA, 19 nt, Artificial Sequence
  Description of Artificial Sequence: Synthetic oligonucleotide
  Sense strand starting at position 2426 of SEQ ID NO: 586763
caucuuaagucugcugaga

SEQ ID NO: 742485 - RNA, 19 nt, Artificial Sequence
  Description of Artificial Sequence: Synthetic oligonucleotide
  Antisense strand to SEQ ID NO: 742484
ucucagcagacuuaagaug

SEQ ID NO: 742486 - RNA, 19 nt, Artificial Sequence
  Description of Artificial Sequence: Synthetic oligonucleotide
  Sense strand starting at position 2498 of SEQ ID NO: 586763
ggaagcacaucaguaaaca

SEQ ID NO: 742487 - RNA, 19 nt, Artificial Sequence
  Description of Artificial Sequence: Synthetic oligonucleotide
  Antisense strand to SEQ ID NO: 742486
uguuuacugaugugcuucc

SEQ ID NO: 742488 - RNA, 19 nt, Artificial Sequence
  Description of Artificial Sequence: Synthetic oligonucleotide
  Sense strand starting at position 2509 of SEQ ID NO: 586763
aguaaacagccuugaugga

SEQ ID NO: 742489 - RNA, 19 nt, Artificial Sequence
  Description of Artificial Sequence: Synthetic oligonucleotide
  Antisense strand to SEQ ID NO: 742488
uccaucaaggcuguuuacu

SEQ ID NO: 742490 - RNA, 19 nt, Artificial Sequence
  Description of Artificial Sequence: Synthetic oligonucleotide
  Sense strand starting at position 2545 of SEQ ID NO: 586763
ugacaaugccuagaggucu

SEQ ID NO: 742491 - RNA, 19 nt, Artificial Sequence
  Description of Artificial Sequence: Synthetic oligonucleotide
  Antisense strand to SEQ ID NO: 742490
agaccucuaggcauuguca

SEQ ID NO: 742492 - RNA, 19 nt, Artificial Sequence
  Description of Artificial Sequence: Synthetic oligonucleotide
  Sense strand starting at position 2587 of SEQ ID NO: 586763
cuccauuucuuuguguuga

SEQ ID NO: 742493 - RNA, 19 nt, Artificial Sequence
  Description of Artificial Sequence: Synthetic oligonucleotide
  Antisense strand to SEQ ID NO: 742492
ucaacacaaagaaauggag

SEQ ID NO: 742494 - RNA, 19 nt, Artificial Sequence
  Description of Artificial Sequence: Synthetic oligonucleotide
  Sense strand starting at position 2589 of SEQ ID NO: 586763
ccauuucuuuguguugaau

SEQ ID NO: 742495 - RNA, 19 nt, Artificial Sequence
  Description of Artificial Sequence: Synthetic oligonucleotide
  Antisense strand to SEQ ID NO: 742494
auucaacacaaagaaaugg

SEQ ID NO: 742496 - RNA, 19 nt, Artificial Sequence
  Description of Artificial Sequence: Synthetic oligonucleotide
  Sense strand starting at position 2592 of SEQ ID NO: 586763
uuucuuuguguugaaucua

SEQ ID NO: 742497 - RNA, 19 nt, Artificial Sequence
  Description of Artificial Sequence: Synthetic oligonucleotide
  Antisense strand to SEQ ID NO: 742496
uagauucaacacaaagaaa

SEQ ID NO: 742498 - RNA, 19 nt, Artificial Sequence
  Description of Artificial Sequence: Synthetic oligonucleotide
  Sense strand starting at position 2600 of SEQ ID NO: 586763
uguugaaucuacucaaaga

SEQ ID NO: 742499 - RNA, 19 nt, Artificial Sequence
  Description of Artificial Sequence: Synthetic oligonucleotide
  Antisense strand to SEQ ID NO: 742498
ucuuugaguagauucaaca

SEQ ID NO: 742500 - RNA, 19 nt, Artificial Sequence
  Description of Artificial Sequence: Synthetic oligonucleotide
  Sense strand starting at position 2838 of SEQ ID NO: 586763
acuuguacucaguacuaca

SEQ ID NO: 742501 - RNA, 19 nt, Artificial Sequence
  Description of Artificial Sequence: Synthetic oligonucleotide
  Antisense strand to SEQ ID NO: 742500
uguaguacugaguacaagu

SEQ ID NO: 742502 - RNA, 19 nt, Artificial Sequence
  Description of Artificial Sequence: Synthetic oligonucleotide
  Sense strand starting at position 2861 of SEQ ID NO: 586763
aggcuuuaugaaugaaucu

SEQ ID NO: 742503 - RNA, 19 nt, Artificial Sequence
  Description of Artificial Sequence: Synthetic oligonucleotide
  Antisense strand to SEQ ID NO: 742502
agauucauucauaaagccu

SEQ ID NO: 742504 - RNA, 19 nt, Artificial Sequence
  Description of Artificial Sequence: Synthetic oligonucleotide
  Sense strand starting at position 3242 of SEQ ID NO: 586763
gugaaaggaugguccagua

SEQ ID NO: 742505 - RNA, 19 nt, Artificial Sequence
  Description of Artificial Sequence: Synthetic oligonucleotide
  Antisense strand to SEQ ID NO: 742504
uacuggaccauccuuucac

SEQ ID NO: 742506 - RNA, 19 nt, Artificial Sequence
  Description of Artificial Sequence: Synthetic oligonucleotide
  Sense strand starting at position 3261 of SEQ ID NO: 586763
auggcagaauaguuuauua

SEQ ID NO: 742507 - RNA, 19 nt, Artificial Sequence
  Description of Artificial Sequence: Synthetic oligonucleotide
  Antisense strand to SEQ ID NO: 742506
uaauaaacuauucugccau

SEQ ID NO: 742508 - RNA, 19 nt, Artificial Sequence
  Description of Artificial Sequence: Synthetic oligonucleotide
  Sense strand starting at position 3436 of SEQ ID NO: 586763
gaguguacucccgaguaua

SEQ ID NO: 742509 - RNA, 19 nt, Artificial Sequence
  Description of Artificial Sequence: Synthetic oligonucleotide
  Antisense strand to SEQ ID NO: 742508
uauacucgggaguacacuc

SEQ ID NO: 742510 - RNA, 19 nt, Artificial Sequence
  Description of Artificial Sequence: Synthetic oligonucleotide
  Sense strand starting at position 3439 of SEQ ID NO: 586763
uguacucccgaguauaaau

SEQ ID NO: 742511 - RNA, 19 nt, Artificial Sequence
  Description of Artificial Sequence: Synthetic oligonucleotide
  Antisense strand to SEQ ID NO: 742510
auuuauacucgggaguaca

SEQ ID NO: 742512 - RNA, 19 nt, Artificial Sequence
  Description of Artificial Sequence: Synthetic oligonucleotide
  Sense strand starting at position 3469 of SEQ ID NO: 586763
gcuagaacuugagcagaaa

SEQ ID NO: 742513 - RNA, 19 nt, Artificial Sequence
  Description of Artificial Sequence: Synthetic oligonucleotide
  Antisense strand to SEQ ID NO: 742512
uuucugcucaaguucuagc

SEQ ID NO: 742514 - RNA, 19 nt, Artificial Sequence
  Description of Artificial Sequence: Synthetic oligonucleotide
  Sense strand starting at position 3752 of SEQ ID NO: 586763
gagaaagaguuugaauuug

SEQ ID NO: 742515 - RNA, 19 nt, Artificial Sequence
  Description of Artificial Sequence: Synthetic oligonucleotide
  Antisense strand to SEQ ID NO: 742514
caaauucaaacucuuucuc

SEQ ID NO: 742516 - RNA, 19 nt, Artificial Sequence
  Description of Artificial Sequence: Synthetic oligonucleotide
  Sense strand starting at position 3803 of SEQ ID NO: 586763
agggcuuucuacuugaaac

SEQ ID NO: 742517 - RNA, 19 nt, Artificial Sequence
  Description of Artificial Sequence: Synthetic oligonucleotide
  Antisense strand to SEQ ID NO: 742516
guuucaaguagaaagcccu

SEQ ID NO: 742518 - RNA, 19 nt, Artificial Sequence
  Description of Artificial Sequence: Synthetic oligonucleotide
  Sense strand starting at position 3964 of SEQ ID NO: 586763
guuaauugcuuauuagaac

SEQ ID NO: 742519 - RNA, 19 nt, Artificial Sequence
  Description of Artificial Sequence: Synthetic oligonucleotide
  Antisense strand to SEQ ID NO: 742518
guucuaauaagcaauuaac

SEQ ID NO: 742520 - RNA, 19 nt, Artificial Sequence
  Description of Artificial Sequence: Synthetic oligonucleotide
  Sense strand starting at position 10 of SEQ ID NO: 586764
ugguuagacuuauucuuaa

SEQ ID NO: 742521 - RNA, 19 nt, Artificial Sequence
  Description of Artificial Sequence: Synthetic oligonucleotide
  Antisense strand to SEQ ID NO: 742520
uuaagaauaagucuaacca

SEQ ID NO: 742522 - RNA, 19 nt, Artificial Sequence
  Description of Artificial Sequence: Synthetic oligonucleotide
  Sense strand starting at position 55 of SEQ ID NO: 586764
cauuguccugguuaaguaa

SEQ ID NO: 742523 - RNA, 19 nt, Artificial Sequence
  Description of Artificial Sequence: Synthetic oligonucleotide
  Antisense strand to SEQ ID NO: 742522
uuacuuaaccaggacaaug

SEQ ID NO: 742524 - RNA, 19 nt, Artificial Sequence
  Description of Artificial Sequence: Synthetic oligonucleotide
  Sense strand starting at position 98 of SEQ ID NO: 586764
uggguaugagucuaacauu

SEQ ID NO: 742525 - RNA, 19 nt, Artificial Sequence
  Description of Artificial Sequence: Synthetic oligonucleotide
  Antisense strand to SEQ ID NO: 742524
aauguuagacucauaccca

SEQ ID NO: 742526 - RNA, 19 nt, Artificial Sequence
  Description of Artificial Sequence: Synthetic oligonucleotide
  Sense strand starting at position 190 of SEQ ID NO: 586764
agguuaucucuauaaagua

SEQ ID NO: 742527 - RNA, 19 nt, Artificial Sequence
  Description of Artificial Sequence: Synthetic oligonucleotide
  Antisense strand to SEQ ID NO: 742526
uacuuuauagagauaaccu

SEQ ID NO: 742528 - RNA, 19 nt, Artificial Sequence
  Description of Artificial Sequence: Synthetic oligonucleotide
  Sense strand starting at position 369 of SEQ ID NO: 586764
aagagcaugugcuuauuua

SEQ ID NO: 742529 - RNA, 19 nt, Artificial Sequence
  Description of Artificial Sequence: Synthetic oligonucleotide
  Antisense strand to SEQ ID NO: 742528
uaaauaagcacaugcucuu

SEQ ID NO: 742530 - RNA, 19 nt, Artificial Sequence
  Description of Artificial Sequence: Synthetic oligonucleotide
  Sense strand starting at position 373 of SEQ ID NO: 586764
gcaugugcuuauuuagaga

SEQ ID NO: 742531 - RNA, 19 nt, Artificial Sequence
  Description of Artificial Sequence: Synthetic oligonucleotide
  Antisense strand to SEQ ID NO: 742530
ucucuaaauaagcacaugc

SEQ ID NO: 742532 - RNA, 19 nt, Artificial Sequence
  Description of Artificial Sequence: Synthetic oligonucleotide
  Sense strand starting at position 613 of SEQ ID NO: 586764
gcuuauaagaaaggaagua

SEQ ID NO: 742533 - RNA, 19 nt, Artificial Sequence
  Description of Artificial Sequence: Synthetic oligonucleotide
  Antisense strand to SEQ ID NO: 742532
uacuuccuuucuuauaagc

SEQ ID NO: 742534 - RNA, 19 nt, Artificial Sequence
  Description of Artificial Sequence: Synthetic oligonucleotide
  Sense strand starting at position 671 of SEQ ID NO: 586764
agagguaucaauggguucu

SEQ ID NO: 742535 - RNA, 19 nt, Artificial Sequence
  Description of Artificial Sequence: Synthetic oligonucleotide
  Antisense strand to SEQ ID NO: 742534
agaacccauugauaccucu

SEQ ID NO: 742536 - RNA, 19 nt, Artificial Sequence
  Description of Artificial Sequence: Synthetic oligonucleotide
  Sense strand starting at position 732 of SEQ ID NO: 586764
auaugacuuuaucugguaa

SEQ ID NO: 742537 - RNA, 19 nt, Artificial Sequence
  Description of Artificial Sequence: Synthetic oligonucleotide
  Antisense strand to SEQ ID NO: 742536
uuaccagauaaagucauau

SEQ ID NO: 742538 - RNA, 19 nt, Artificial Sequence
  Description of Artificial Sequence: Synthetic oligonucleotide
  Sense strand starting at position 940 of SEQ ID NO: 586764
aaaggaaugcuuugcagag

SEQ ID NO: 742539 - RNA, 19 nt, Artificial Sequence
  Description of Artificial Sequence: Synthetic oligonucleotide
  Antisense strand to SEQ ID NO: 742538
cucugcaaagcauuccuuu

SEQ ID NO: 742540 - RNA, 19 nt, Artificial Sequence
  Description of Artificial Sequence: Synthetic oligonucleotide
  Sense strand starting at position 1045 of SEQ ID NO: 586764
gggagagucaaaugucaca

SEQ ID NO: 742541 - RNA, 19 nt, Artificial Sequence
  Description of Artificial Sequence: Synthetic oligonucleotide
  Antisense strand to SEQ ID NO: 742540
ugugacauuugacucuccc

SEQ ID NO: 742542 - RNA, 19 nt, Artificial Sequence
  Description of Artificial Sequence: Synthetic oligonucleotide
  Sense strand starting at position 1063 of SEQ ID NO: 586764
accaguuaggaaugacuuu

SEQ ID NO: 742543 - RNA, 19 nt, Artificial Sequence
  Description of Artificial Sequence: Synthetic oligonucleotide
  Antisense strand to SEQ ID NO: 742542
aaagucauuccuaacuggu

SEQ ID NO: 742544 - RNA, 19 nt, Artificial Sequence
  Description of Artificial Sequence: Synthetic oligonucleotide
  Sense strand starting at position 1505 of SEQ ID NO: 586764
gcagucuuaggaugagaac

SEQ ID NO: 742545 - RNA, 19 nt, Artificial Sequence
  Description of Artificial Sequence: Synthetic oligonucleotide
  Antisense strand to SEQ ID NO: 742544
guucucauccuaagacugc

SEQ ID NO: 742546 - RNA, 19 nt, Artificial Sequence
  Description of Artificial Sequence: Synthetic oligonucleotide
  Sense strand starting at position 1634 of SEQ ID NO: 586764
cguaacgaucguaggacau

SEQ ID NO: 742547 - RNA, 19 nt, Artificial Sequence
  Description of Artificial Sequence: Synthetic oligonucleotide
  Antisense strand to SEQ ID NO: 742546
auguccuacgaucguuacg

SEQ ID NO: 742548 - RNA, 19 nt, Artificial Sequence
  Description of Artificial Sequence: Synthetic oligonucleotide
  Sense strand starting at position 2027 of SEQ ID NO: 586764
uuaggaccagauugucaaa

SEQ ID NO: 742549 - RNA, 19 nt, Artificial Sequence
  Description of Artificial Sequence: Synthetic oligonucleotide
  Antisense strand to SEQ ID NO: 742548
uuugacaaucugguccuaa

SEQ ID NO: 742550 - RNA, 19 nt, Artificial Sequence
  Description of Artificial Sequence: Synthetic oligonucleotide
  Sense strand starting at position 2099 of SEQ ID NO: 586764
aacauuagugauugagcua

SEQ ID NO: 742551 - RNA, 19 nt, Artificial Sequence
  Description of Artificial Sequence: Synthetic oligonucleotide
  Antisense strand to SEQ ID NO: 742550
uagcucaaucacuaauguu

SEQ ID NO: 742552 - RNA, 19 nt, Artificial Sequence
  Description of Artificial Sequence: Synthetic oligonucleotide
  Sense strand starting at position 2106 of SEQ ID NO: 586764
gugauugagcuacacauua

SEQ ID NO: 742553 - RNA, 19 nt, Artificial Sequence
  Description of Artificial Sequence: Synthetic oligonucleotide
  Antisense strand to SEQ ID NO: 742552
uaauguguagcucaaucac

SEQ ID NO: 742554 - RNA, 19 nt, Artificial Sequence
  Description of Artificial Sequence: Synthetic oligonucleotide
  Sense strand starting at position 2111 of SEQ ID NO: 586764
ugagcuacacauuaaguua

SEQ ID NO: 742555 - RNA, 19 nt, Artificial Sequence
  Description of Artificial Sequence: Synthetic oligonucleotide
  Antisense strand to SEQ ID NO: 742554
uaacuuaauguguagcuca

SEQ ID NO: 742556 - RNA, 19 nt, Artificial Sequence
  Description of Artificial Sequence: Synthetic oligonucleotide
  Sense strand starting at position 2126 of SEQ ID NO: 586764
guuaauuacugauuguaag

SEQ ID NO: 742557 - RNA, 19 nt, Artificial Sequence
  Description of Artificial Sequence: Synthetic oligonucleotide
  Antisense strand to SEQ ID NO: 742556
cuuacaaucaguaauuaac

SEQ ID NO: 742558 - RNA, 19 nt, Artificial Sequence
  Description of Artificial Sequence: Synthetic oligonucleotide
  Sense strand starting at position 2155 of SEQ ID NO: 586764
uauagaagggauuguguca

SEQ ID NO: 742559 - RNA, 19 nt, Artificial Sequence
  Description of Artificial Sequence: Synthetic oligonucleotide
  Antisense strand to SEQ ID NO: 742558
ugacacaaucccuucuaua

SEQ ID NO: 742560 - RNA, 19 nt, Artificial Sequence
  Description of Artificial Sequence: Synthetic oligonucleotide
  Sense strand starting at position 2162 of SEQ ID NO: 586764
gggauugugucaccaauga

SEQ ID NO: 742561 - RNA, 19 nt, Artificial Sequence
  Description of Artificial Sequence: Synthetic oligonucleotide
  Antisense strand to SEQ ID NO: 742560
ucauuggugacacaauccc

SEQ ID NO: 742562 - RNA, 19 nt, Artificial Sequence
  Description of Artificial Sequence: Synthetic oligonucleotide
  Sense strand starting at position 2293 of SEQ ID NO: 586764
cuaagagaauuccugaagu

SEQ ID NO: 742563 - RNA, 19 nt, Artificial Sequence
  Description of Artificial Sequence: Synthetic oligonucleotide
  Antisense strand to SEQ ID NO: 742562
acuucaggaauucucuuag

SEQ ID NO: 742564 - RNA, 19 nt, Artificial Sequence
  Description of Artificial Sequence: Synthetic oligonucleotide
  Sense strand starting at position 2349 of SEQ ID NO: 586764
gaauuagaguaguccuaga

SEQ ID NO: 742565 - RNA, 19 nt, Artificial Sequence
  Description of Artificial Sequence: Synthetic oligonucleotide
  Antisense strand to SEQ ID NO: 742564
ucuaggacuacucuaauuc

SEQ ID NO: 742566 - RNA, 19 nt, Artificial Sequence
  Description of Artificial Sequence: Synthetic oligonucleotide
  Sense strand starting at position 2386 of SEQ ID NO: 586764
ccaguuucucaguagaaau

SEQ ID NO: 742567 - RNA, 19 nt, Artificial Sequence
  Description of Artificial Sequence: Synthetic oligonucleotide
  Antisense strand to SEQ ID NO: 742566
auuucuacugagaaacugg

SEQ ID NO: 742568 - RNA, 19 nt, Artificial Sequence
  Description of Artificial Sequence: Synthetic oligonucleotide
  Sense strand starting at position 2388 of SEQ ID NO: 586764
aguuucucaguagaaauau

SEQ ID NO: 742569 - RNA, 19 nt, Artificial Sequence
  Description of Artificial Sequence: Synthetic oligonucleotide
  Antisense strand to SEQ ID NO: 742568
auauuucuacugagaaacu

SEQ ID NO: 742570 - RNA, 19 nt, Artificial Sequence
  Description of Artificial Sequence: Synthetic oligonucleotide
  Sense strand starting at position 2447 of SEQ ID NO: 586764
ucuggagcaguuuauauaa

SEQ ID NO: 742571 - RNA, 19 nt, Artificial Sequence
  Description of Artificial Sequence: Synthetic oligonucleotide
  Antisense strand to SEQ ID NO: 742570
uuauauaaacugcuccaga

SEQ ID NO: 742572 - RNA, 19 nt, Artificial Sequence
  Description of Artificial Sequence: Synthetic oligonucleotide
  Sense strand starting at position 2532 of SEQ ID NO: 586764
ggaacuaauggaugugcua

SEQ ID NO: 742573 - RNA, 19 nt, Artificial Sequence
  Description of Artificial Sequence: Synthetic oligonucleotide
  Antisense strand to SEQ ID NO: 742572
uagcacauccauuaguucc

SEQ ID NO: 742574 - RNA, 19 nt, Artificial Sequence
  Description of Artificial Sequence: Synthetic oligonucleotide
  Sense strand starting at position 2840 of SEQ ID NO: 586764
auccauuuguguuuaagua

SEQ ID NO: 742575 - RNA, 19 nt, Artificial Sequence
  Description of Artificial Sequence: Synthetic oligonucleotide
  Antisense strand to SEQ ID NO: 742574
uacuuaaacacaaauggau

SEQ ID NO: 742576 - RNA, 19 nt, Artificial Sequence
  Description of Artificial Sequence: Synthetic oligonucleotide
  Sense strand starting at position 2992 of SEQ ID NO: 586764
uuuacagguggcuaauuaa

SEQ ID NO: 742577 - RNA, 19 nt, Artificial Sequence
  Description of Artificial Sequence: Synthetic oligonucleotide
  Antisense strand to SEQ ID NO: 742576
uuaauuagccaccuguaaa

SEQ ID NO: 742578 - RNA, 19 nt, Artificial Sequence
  Description of Artificial Sequence: Synthetic oligonucleotide
  Sense strand starting at position 3203 of SEQ ID NO: 586764
uuuguuagugccuuugcua

SEQ ID NO: 742579 - RNA, 19 nt, Artificial Sequence
  Description of Artificial Sequence: Synthetic oligonucleotide
  Antisense strand to SEQ ID NO: 742578
uagcaaaggcacuaacaaa

SEQ ID NO: 742580 - RNA, 19 nt, Artificial Sequence
  Description of Artificial Sequence: Synthetic oligonucleotide
  Sense strand starting at position 3375 of SEQ ID NO: 586764
cuaaauguccaccaacgau

SEQ ID NO: 742581 - RNA, 19 nt, Artificial Sequence
  Description of Artificial Sequence: Synthetic oligonucleotide
  Antisense strand to SEQ ID NO: 742580
aucguugguggacauuuag

SEQ ID NO: 742582 - RNA, 19 nt, Artificial Sequence
  Description of Artificial Sequence: Synthetic oligonucleotide
  Sense strand starting at position 3457 of SEQ ID NO: 586764
augagaucuuauccuuuga

SEQ ID NO: 742583 - RNA, 19 nt, Artificial Sequence
  Description of Artificial Sequence: Synthetic oligonucleotide
  Antisense strand to SEQ ID NO: 742582
ucaaaggauaagaucucau

SEQ ID NO: 742584 - RNA, 19 nt, Artificial Sequence
  Description of Artificial Sequence: Synthetic oligonucleotide
  Sense strand starting at position 3459 of SEQ ID NO: 586764
gagaucuuauccuuugaug

SEQ ID NO: 742585 - RNA, 19 nt, Artificial Sequence
  Description of Artificial Sequence: Synthetic oligonucleotide
  Antisense strand to SEQ ID NO: 742584
caucaaaggauaagaucuc

SEQ ID NO: 742586 - RNA, 19 nt, Artificial Sequence
  Description of Artificial Sequence: Synthetic oligonucleotide
  Sense strand starting at position 3461 of SEQ ID NO: 586764
gaucuuauccuuugaugga

SEQ ID NO: 742587 - RNA, 19 nt, Artificial Sequence
  Description of Artificial Sequence: Synthetic oligonucleotide
  Antisense strand to SEQ ID NO: 742586
uccaucaaaggauaagauc

SEQ ID NO: 742588 - RNA, 19 nt, Artificial Sequence
  Description of Artificial Sequence: Synthetic oligonucleotide
  Sense strand starting at position 3617 of SEQ ID NO: 586764
gggccuaucacaggguaaa

SEQ ID NO: 742589 - RNA, 19 nt, Artificial Sequence
  Description of Artificial Sequence: Synthetic oligonucleotide
  Antisense strand to SEQ ID NO: 742588
uuuacccugugauaggccc

SEQ ID NO: 742590 - RNA, 19 nt, Artificial Sequence
  Description of Artificial Sequence: Synthetic oligonucleotide
  Sense strand starting at position 3618 of SEQ ID NO: 586764
ggccuaucacaggguaaag

SEQ ID NO: 742591 - RNA, 19 nt, Artificial Sequence
  Description of Artificial Sequence: Synthetic oligonucleotide
  Antisense strand to SEQ ID NO: 742590
cuuuacccugugauaggcc

SEQ ID NO: 742592 - RNA, 19 nt, Artificial Sequence
  Description of Artificial Sequence: Synthetic oligonucleotide
  Sense strand starting at position 3856 of SEQ ID NO: 586764
gugguaacaaaugauugua

SEQ ID NO: 742593 - RNA, 19 nt, Artificial Sequence
  Description of Artificial Sequence: Synthetic oligonucleotide
  Antisense strand to SEQ ID NO: 742592
uacaaucauuuguuaccac

SEQ ID NO: 742594 - RNA, 19 nt, Artificial Sequence
  Description of Artificial Sequence: Synthetic oligonucleotide
  Sense strand starting at position 3858 of SEQ ID NO: 586764
gguaacaaaugauuguaua

SEQ ID NO: 742595 - RNA, 19 nt, Artificial Sequence
  Description of Artificial Sequence: Synthetic oligonucleotide
  Antisense strand to SEQ ID NO: 742594
uauacaaucauuuguuacc

SEQ ID NO: 742596 - RNA, 19 nt, Artificial Sequence
  Description of Artificial Sequence: Synthetic oligonucleotide
  Sense strand starting at position 3859 of SEQ ID NO: 586764
guaacaaaugauuguauac

SEQ ID NO: 742597 - RNA, 19 nt, Artificial Sequence
  Description of Artificial Sequence: Synthetic oligonucleotide
  Antisense strand to SEQ ID NO: 742596
guauacaaucauuuguuac

SEQ ID NO: 742598 - RNA, 19 nt, Artificial Sequence
  Description of Artificial Sequence: Synthetic oligonucleotide
  Sense strand starting at position 3902 of SEQ ID NO: 586764
ugauuauuaucagcaagac

SEQ ID NO: 742599 - RNA, 19 nt, Artificial Sequence
  Description of Artificial Sequence: Synthetic oligonucleotide
  Antisense strand to SEQ ID NO: 742598
gucuugcugauaauaauca

SEQ ID NO: 742600 - RNA, 19 nt, Artificial Sequence
  Description of Artificial Sequence: Synthetic oligonucleotide
  Sense strand starting at position 11 of SEQ ID NO: 586765
ugguuagacuuauucuuaa

SEQ ID NO: 742601 - RNA, 19 nt, Artificial Sequence
  Description of Artificial Sequence: Synthetic oligonucleotide
  Antisense strand to SEQ ID NO: 742600
uuaagaauaagucuaacca

SEQ ID NO: 742602 - RNA, 19 nt, Artificial Sequence
  Description of Artificial Sequence: Synthetic oligonucleotide
  Sense strand starting at position 56 of SEQ ID NO: 586765
cauuguccugguuaaguaa

SEQ ID NO: 742603 - RNA, 19 nt, Artificial Sequence
  Description of Artificial Sequence: Synthetic oligonucleotide
  Antisense strand to SEQ ID NO: 742602
uuacuuaaccaggacaaug

SEQ ID NO: 742604 - RNA, 19 nt, Artificial Sequence
  Description of Artificial Sequence: Synthetic oligonucleotide
  Sense strand starting at position 99 of SEQ ID NO: 586765
uggguaugagucuaacauu

SEQ ID NO: 742605 - RNA, 19 nt, Artificial Sequence
  Description of Artificial Sequence: Synthetic oligonucleotide
  Antisense strand to SEQ ID NO: 742604
aauguuagacucauaccca

SEQ ID NO: 742606 - RNA, 19 nt, Artificial Sequence
  Description of Artificial Sequence: Synthetic oligonucleotide
  Sense strand starting at position 160 of SEQ ID NO: 586765
ugggaaaugaauuggcuau

SEQ ID NO: 742607 - RNA, 19 nt, Artificial Sequence
  Description of Artificial Sequence: Synthetic oligonucleotide
  Antisense strand to SEQ ID NO: 742606
auagccaauucauuuccca

SEQ ID NO: 742608 - RNA, 19 nt, Artificial Sequence
  Description of Artificial Sequence: Synthetic oligonucleotide
  Sense strand starting at position 191 of SEQ ID NO: 586765
agguuaucucuauaaagua

SEQ ID NO: 742609 - RNA, 19 nt, Artificial Sequence
  Description of Artificial Sequence: Synthetic oligonucleotide
  Antisense strand to SEQ ID NO: 742608
uacuuuauagagauaaccu

SEQ ID NO: 742610 - RNA, 19 nt, Artificial Sequence
  Description of Artificial Sequence: Synthetic oligonucleotide
  Sense strand starting at position 224 of SEQ ID NO: 586765
guggauggugcagaguaau

SEQ ID NO: 742611 - RNA, 19 nt, Artificial Sequence
  Description of Artificial Sequence: Synthetic oligonucleotide
  Antisense strand to SEQ ID NO: 742610
auuacucugcaccauccac

SEQ ID NO: 742612 - RNA, 19 nt, Artificial Sequence
  Description of Artificial Sequence: Synthetic oligonucleotide
  Sense strand starting at position 370 of SEQ ID NO: 586765
aagagcaugugcuuauuua

SEQ ID NO: 742613 - RNA, 19 nt, Artificial Sequence
  Description of Artificial Sequence: Synthetic oligonucleotide
  Antisense strand to SEQ ID NO: 742612
uaaauaagcacaugcucuu

SEQ ID NO: 742614 - RNA, 19 nt, Artificial Sequence
  Description of Artificial Sequence: Synthetic oligonucleotide
  Sense strand starting at position 374 of SEQ ID NO: 586765
gcaugugcuuauuuagaga

SEQ ID NO: 742615 - RNA, 19 nt, Artificial Sequence
  Description of Artificial Sequence: Synthetic oligonucleotide
  Antisense strand to SEQ ID NO: 742614
ucucuaaauaagcacaugc

SEQ ID NO: 742616 - RNA, 19 nt, Artificial Sequence
  Description of Artificial Sequence: Synthetic oligonucleotide
  Sense strand starting at position 614 of SEQ ID NO: 586765
gcuuauaagaaaggaagua

SEQ ID NO: 742617 - RNA, 19 nt, Artificial Sequence
  Description of Artificial Sequence: Synthetic oligonucleotide
  Antisense strand to SEQ ID NO: 742616
uacuuccuuucuuauaagc

SEQ ID NO: 742618 - RNA, 19 nt, Artificial Sequence
  Description of Artificial Sequence: Synthetic oligonucleotide
  Sense strand starting at position 672 of SEQ ID NO: 586765
agagguaucaauggguucu

SEQ ID NO: 742619 - RNA, 19 nt, Artificial Sequence
  Description of Artificial Sequence: Synthetic oligonucleotide
  Antisense strand to SEQ ID NO: 742618
agaacccauugauaccucu

SEQ ID NO: 742620 - RNA, 19 nt, Artificial Sequence
  Description of Artificial Sequence: Synthetic oligonucleotide
  Sense strand starting at position 733 of SEQ ID NO: 586765
auaugacuuuaucugguaa

SEQ ID NO: 742621 - RNA, 19 nt, Artificial Sequence
  Description of Artificial Sequence: Synthetic oligonucleotide
  Antisense strand to SEQ ID NO: 742620
uuaccagauaaagucauau

SEQ ID NO: 742622 - RNA, 19 nt, Artificial Sequence
  Description of Artificial Sequence: Synthetic oligonucleotide
  Sense strand starting at position 941 of SEQ ID NO: 586765
aaaggaaugcuuugcagag

SEQ ID NO: 742623 - RNA, 19 nt, Artificial Sequence
  Description of Artificial Sequence: Synthetic oligonucleotide
  Antisense strand to SEQ ID NO: 742622
cucugcaaagcauuccuuu

SEQ ID NO: 742624 - RNA, 19 nt, Artificial Sequence
  Description of Artificial Sequence: Synthetic oligonucleotide
  Sense strand starting at position 1046 of SEQ ID NO: 586765
gggagagucaaaugucaca

SEQ ID NO: 742625 - RNA, 19 nt, Artificial Sequence
  Description of Artificial Sequence: Synthetic oligonucleotide
  Antisense strand to SEQ ID NO: 742624
ugugacauuugacucuccc

SEQ ID NO: 742626 - RNA, 19 nt, Artificial Sequence
  Description of Artificial Sequence: Synthetic oligonucleotide
  Sense strand starting at position 1064 of SEQ ID NO: 586765
accaguuaggaaugacuuu

SEQ ID NO: 742627 - RNA, 19 nt, Artificial Sequence
  Description of Artificial Sequence: Synthetic oligonucleotide
  Antisense strand to SEQ ID NO: 742626
aaagucauuccuaacuggu

SEQ ID NO: 742628 - RNA, 19 nt, Artificial Sequence
  Description of Artificial Sequence: Synthetic oligonucleotide
  Sense strand starting at position 2100 of SEQ ID NO: 586765
aacauuagugauugagcua

SEQ ID NO: 742629 - RNA, 19 nt, Artificial Sequence
  Description of Artificial Sequence: Synthetic oligonucleotide
  Antisense strand to SEQ ID NO: 742628
uagcucaaucacuaauguu

SEQ ID NO: 742630 - RNA, 19 nt, Artificial Sequence
  Description of Artificial Sequence: Synthetic oligonucleotide
  Sense strand starting at position 2107 of SEQ ID NO: 586765
gugauugagcuacacauua

SEQ ID NO: 742631 - RNA, 19 nt, Artificial Sequence
  Description of Artificial Sequence: Synthetic oligonucleotide
  Antisense strand to SEQ ID NO: 742630
uaauguguagcucaaucac

SEQ ID NO: 742632 - RNA, 19 nt, Artificial Sequence
  Description of Artificial Sequence: Synthetic oligonucleotide
  Sense strand starting at position 2112 of SEQ ID NO: 586765
ugagcuacacauuaaguua

SEQ ID NO: 742633 - RNA, 19 nt, Artificial Sequence
  Description of Artificial Sequence: Synthetic oligonucleotide
  Antisense strand to SEQ ID NO: 742632
uaacuuaauguguagcuca

SEQ ID NO: 742634 - RNA, 19 nt, Artificial Sequence
  Description of Artificial Sequence: Synthetic oligonucleotide
  Sense strand starting at position 2168 of SEQ ID NO: 586765
ugugucaccagugauagga

SEQ ID NO: 742635 - RNA, 19 nt, Artificial Sequence
  Description of Artificial Sequence: Synthetic oligonucleotide
  Antisense strand to SEQ ID NO: 742634
uccuaucacuggugacaca

SEQ ID NO: 742636 - RNA, 19 nt, Artificial Sequence
  Description of Artificial Sequence: Synthetic oligonucleotide
  Sense strand starting at position 2294 of SEQ ID NO: 586765
cuaagagaauuccugaagu

SEQ ID NO: 742637 - RNA, 19 nt, Artificial Sequence
  Description of Artificial Sequence: Synthetic oligonucleotide
  Antisense strand to SEQ ID NO: 742636
acuucaggaauucucuuag

SEQ ID NO: 742638 - RNA, 19 nt, Artificial Sequence
  Description of Artificial Sequence: Synthetic oligonucleotide
  Sense strand starting at position 2350 of SEQ ID NO: 586765
gaauuagaguaguccuaga

SEQ ID NO: 742639 - RNA, 19 nt, Artificial Sequence
  Description of Artificial Sequence: Synthetic oligonucleotide
  Antisense strand to SEQ ID NO: 742638
ucuaggacuacucuaauuc

SEQ ID NO: 742640 - RNA, 19 nt, Artificial Sequence
  Description of Artificial Sequence: Synthetic oligonucleotide
  Sense strand starting at position 2386 of SEQ ID NO: 586765
cccaguuucucaguagaaa

SEQ ID NO: 742641 - RNA, 19 nt, Artificial Sequence
  Description of Artificial Sequence: Synthetic oligonucleotide
  Antisense strand to SEQ ID NO: 742640
uuucuacugagaaacuggg

SEQ ID NO: 742642 - RNA, 19 nt, Artificial Sequence
  Description of Artificial Sequence: Synthetic oligonucleotide
  Sense strand starting at position 2387 of SEQ ID NO: 586765
ccaguuucucaguagaaau

SEQ ID NO: 742643 - RNA, 19 nt, Artificial Sequence
  Description of Artificial Sequence: Synthetic oligonucleotide
  Antisense strand to SEQ ID NO: 742642
auuucuacugagaaacugg

SEQ ID NO: 742644 - RNA, 19 nt, Artificial Sequence
  Description of Artificial Sequence: Synthetic oligonucleotide
  Sense strand starting at position 2389 of SEQ ID NO: 586765
aguuucucaguagaaauau

SEQ ID NO: 742645 - RNA, 19 nt, Artificial Sequence
  Description of Artificial Sequence: Synthetic oligonucleotide
  Antisense strand to SEQ ID NO: 742644
auauuucuacugagaaacu

SEQ ID NO: 742646 - RNA, 19 nt, Artificial Sequence
  Description of Artificial Sequence: Synthetic oligonucleotide
  Sense strand starting at position 2448 of SEQ ID NO: 586765
ucuggagcaguuuauauaa

SEQ ID NO: 742647 - RNA, 19 nt, Artificial Sequence
  Description of Artificial Sequence: Synthetic oligonucleotide
  Antisense strand to SEQ ID NO: 742646
uuauauaaacugcuccaga

SEQ ID NO: 742648 - RNA, 19 nt, Artificial Sequence
  Description of Artificial Sequence: Synthetic oligonucleotide
  Sense strand starting at position 2533 of SEQ ID NO: 586765
ggaacuaauggaugugcua

SEQ ID NO: 742649 - RNA, 19 nt, Artificial Sequence
  Description of Artificial Sequence: Synthetic oligonucleotide
  Antisense strand to SEQ ID NO: 742648
uagcacauccauuaguucc

SEQ ID NO: 742650 - RNA, 19 nt, Artificial Sequence
  Description of Artificial Sequence: Synthetic oligonucleotide
  Sense strand starting at position 2841 of SEQ ID NO: 586765
auccauuuguguuuaagua

SEQ ID NO: 742651 - RNA, 19 nt, Artificial Sequence
  Description of Artificial Sequence: Synthetic oligonucleotide
  Antisense strand to SEQ ID NO: 742650
uacuuaaacacaaauggau

SEQ ID NO: 742652 - RNA, 19 nt, Artificial Sequence
  Description of Artificial Sequence: Synthetic oligonucleotide
  Sense strand starting at position 2993 of SEQ ID NO: 586765
uuuacagguggcuaauuaa

SEQ ID NO: 742653 - RNA, 19 nt, Artificial Sequence
  Description of Artificial Sequence: Synthetic oligonucleotide
  Antisense strand to SEQ ID NO: 742652
uuaauuagccaccuguaaa

SEQ ID NO: 742654 - RNA, 19 nt, Artificial Sequence
  Description of Artificial Sequence: Synthetic oligonucleotide
  Sense strand starting at position 3204 of SEQ ID NO: 586765
uuuguuagugccuuugcua

SEQ ID NO: 742655 - RNA, 19 nt, Artificial Sequence
  Description of Artificial Sequence: Synthetic oligonucleotide
  Antisense strand to SEQ ID NO: 742654
uagcaaaggcacuaacaaa

SEQ ID NO: 742656 - RNA, 19 nt, Artificial Sequence
  Description of Artificial Sequence: Synthetic oligonucleotide
  Sense strand starting at position 3253 of SEQ ID NO: 586765
accugcuuaucucugaaga

SEQ ID NO: 742657 - RNA, 19 nt, Artificial Sequence
  Description of Artificial Sequence: Synthetic oligonucleotide
  Antisense strand to SEQ ID NO: 742656
ucuucagagauaagcaggu

SEQ ID NO: 742658 - RNA, 19 nt, Artificial Sequence
  Description of Artificial Sequence: Synthetic oligonucleotide
  Sense strand starting at position 3376 of SEQ ID NO: 586765
cuaaauguccaccaacgau

SEQ ID NO: 742659 - RNA, 19 nt, Artificial Sequence
  Description of Artificial Sequence: Synthetic oligonucleotide
  Antisense strand to SEQ ID NO: 742658
aucguugguggacauuuag

SEQ ID NO: 742660 - RNA, 19 nt, Artificial Sequence
  Description of Artificial Sequence: Synthetic oligonucleotide
  Sense strand starting at position 3458 of SEQ ID NO: 586765
augagaucuuguccuuuga

SEQ ID NO: 742661 - RNA, 19 nt, Artificial Sequence
  Description of Artificial Sequence: Synthetic oligonucleotide
  Antisense strand to SEQ ID NO: 742660
ucaaaggacaagaucucau

SEQ ID NO: 742662 - RNA, 19 nt, Artificial Sequence
  Description of Artificial Sequence: Synthetic oligonucleotide
  Sense strand starting at position 3460 of SEQ ID NO: 586765
gagaucuuguccuuugaug

SEQ ID NO: 742663 - RNA, 19 nt, Artificial Sequence
  Description of Artificial Sequence: Synthetic oligonucleotide
  Antisense strand to SEQ ID NO: 742662
caucaaaggacaagaucuc

SEQ ID NO: 742664 - RNA, 19 nt, Artificial Sequence
  Description of Artificial Sequence: Synthetic oligonucleotide
  Sense strand starting at position 3462 of SEQ ID NO: 586765
gaucuuguccuuugaugga

SEQ ID NO: 742665 - RNA, 19 nt, Artificial Sequence
  Description of Artificial Sequence: Synthetic oligonucleotide
  Antisense strand to SEQ ID NO: 742664
uccaucaaaggacaagauc

SEQ ID NO: 742666 - RNA, 19 nt, Artificial Sequence
  Description of Artificial Sequence: Synthetic oligonucleotide
  Sense strand starting at position 3618 of SEQ ID NO: 586765
gggccuaucacaggguaaa

SEQ ID NO: 742667 - RNA, 19 nt, Artificial Sequence
  Description of Artificial Sequence: Synthetic oligonucleotide
  Antisense strand to SEQ ID NO: 742666
uuuacccugugauaggccc

SEQ ID NO: 742668 - RNA, 19 nt, Artificial Sequence
  Description of Artificial Sequence: Synthetic oligonucleotide
  Sense strand starting at position 3619 of SEQ ID NO: 586765
ggccuaucacaggguaaag

SEQ ID NO: 742669 - RNA, 19 nt, Artificial Sequence
  Description of Artificial Sequence: Synthetic oligonucleotide
  Antisense strand to SEQ ID NO: 742668
cuuuacccugugauaggcc

SEQ ID NO: 742670 - RNA, 19 nt, Artificial Sequence
  Description of Artificial Sequence: Synthetic oligonucleotide
  Sense strand starting at position 3856 of SEQ ID NO: 586765
agugguaacaaaugauugu

SEQ ID NO: 742671 - RNA, 19 nt, Artificial Sequence
  Description of Artificial Sequence: Synthetic oligonucleotide
  Antisense strand to SEQ ID NO: 742670
acaaucauuuguuaccacu

SEQ ID NO: 742672 - RNA, 19 nt, Artificial Sequence
  Description of Artificial Sequence: Synthetic oligonucleotide
  Sense strand starting at position 3857 of SEQ ID NO: 586765
gugguaacaaaugauugua

SEQ ID NO: 742673 - RNA, 19 nt, Artificial Sequence
  Description of Artificial Sequence: Synthetic oligonucleotide
  Antisense strand to SEQ ID NO: 742672
uacaaucauuuguuaccac

SEQ ID NO: 742674 - RNA, 19 nt, Artificial Sequence
  Description of Artificial Sequence: Synthetic oligonucleotide
  Sense strand starting at position 3859 of SEQ ID NO: 586765
gguaacaaaugauuguaua

SEQ ID NO: 742675 - RNA, 19 nt, Artificial Sequence
  Description of Artificial Sequence: Synthetic oligonucleotide
  Antisense strand to SEQ ID NO: 742674
uauacaaucauuuguuacc

SEQ ID NO: 742676 - RNA, 19 nt, Artificial Sequence
  Description of Artificial Sequence: Synthetic oligonucleotide
  Sense strand starting at position 3860 of SEQ ID NO: 586765
guaacaaaugauuguauac

SEQ ID NO: 742677 - RNA, 19 nt, Artificial Sequence
  Description of Artificial Sequence: Synthetic oligonucleotide
  Antisense strand to SEQ ID NO: 742676
guauacaaucauuuguuac

SEQ ID NO: 742678 - RNA, 19 nt, Artificial Sequence
  Description of Artificial Sequence: Synthetic oligonucleotide
  Sense strand starting at position 3903 of SEQ ID NO: 586765
ugauuauuaucagcaagac

SEQ ID NO: 742679 - RNA, 19 nt, Artificial Sequence
  Description of Artificial Sequence: Synthetic oligonucleotide
  Antisense strand to SEQ ID NO: 742678
gucuugcugauaauaauca

SEQ ID NO: 742680 - RNA, 19 nt, Artificial Sequence
  Description of Artificial Sequence: Synthetic oligonucleotide
  Sense strand starting at position 2 of SEQ ID NO: 586766
guaauuacaguuuguuucu

SEQ ID NO: 742681 - RNA, 19 nt, Artificial Sequence
  Description of Artificial Sequence: Synthetic oligonucleotide
  Antisense strand to SEQ ID NO: 742680
agaaacaaacuguaauuac

SEQ ID NO: 742682 - RNA, 19 nt, Artificial Sequence
  Description of Artificial Sequence: Synthetic oligonucleotide
  Sense strand starting at position 176 of SEQ ID NO: 586766
ucugauucuuuacccgaaa

SEQ ID NO: 742683 - RNA, 19 nt, Artificial Sequence
  Description of Artificial Sequence: Synthetic oligonucleotide
  Antisense strand to SEQ ID NO: 742682
uuucggguaaagaaucaga

SEQ ID NO: 742684 - RNA, 19 nt, Artificial Sequence
  Description of Artificial Sequence: Synthetic oligonucleotide
  Sense strand starting at position 223 of SEQ ID NO: 586766
ccaugacgucugcuuuguu

SEQ ID NO: 742685 - RNA, 19 nt, Artificial Sequence
  Description of Artificial Sequence: Synthetic oligonucleotide
  Antisense strand to SEQ ID NO: 742684
aacaaagcagacgucaugg

SEQ ID NO: 742686 - RNA, 19 nt, Artificial Sequence
  Description of Artificial Sequence: Synthetic oligonucleotide
  Sense strand starting at position 260 of SEQ ID NO: 586766
uugguagauucuguuuaga

SEQ ID NO: 742687 - RNA, 19 nt, Artificial Sequence
  Description of Artificial Sequence: Synthetic oligonucleotide
  Antisense strand to SEQ ID NO: 742686
ucuaaacagaaucuaccaa

SEQ ID NO: 742688 - RNA, 19 nt, Artificial Sequence
  Description of Artificial Sequence: Synthetic oligonucleotide
  Sense strand starting at position 262 of SEQ ID NO: 586766
gguagauucuguuuagaaa

SEQ ID NO: 742689 - RNA, 19 nt, Artificial Sequence
  Description of Artificial Sequence: Synthetic oligonucleotide
  Antisense strand to SEQ ID NO: 742688
uuucuaaacagaaucuacc

SEQ ID NO: 742690 - RNA, 19 nt, Artificial Sequence
  Description of Artificial Sequence: Synthetic oligonucleotide
  Sense strand starting at position 275 of SEQ ID NO: 586766
uagaaagucuuacugcgau

SEQ ID NO: 742691 - RNA, 19 nt, Artificial Sequence
  Description of Artificial Sequence: Synthetic oligonucleotide
  Antisense strand to SEQ ID NO: 742690
aucgcaguaagacuuucua

SEQ ID NO: 742692 - RNA, 19 nt, Artificial Sequence
  Description of Artificial Sequence: Synthetic oligonucleotide
  Sense strand starting at position 278 of SEQ ID NO: 586766
aaagucuuacugcgauauu

SEQ ID NO: 742693 - RNA, 19 nt, Artificial Sequence
  Description of Artificial Sequence: Synthetic oligonucleotide
  Antisense strand to SEQ ID NO: 742692
aauaucgcaguaagacuuu

SEQ ID NO: 742694 - RNA, 19 nt, Artificial Sequence
  Description of Artificial Sequence: Synthetic oligonucleotide
  Sense strand starting at position 281 of SEQ ID NO: 586766
gucuuacugcgauauuagc

SEQ ID NO: 742695 - RNA, 19 nt, Artificial Sequence
  Description of Artificial Sequence: Synthetic oligonucleotide
  Antisense strand to SEQ ID NO: 742694
gcuaauaucgcaguaagac

SEQ ID NO: 742696 - RNA, 19 nt, Artificial Sequence
  Description of Artificial Sequence: Synthetic oligonucleotide
  Sense strand starting at position 287 of SEQ ID NO: 586766
cugcgauauuagcuuauaa

SEQ ID NO: 742697 - RNA, 19 nt, Artificial Sequence
  Description of Artificial Sequence: Synthetic oligonucleotide
  Antisense strand to SEQ ID NO: 742696
uuauaagcuaauaucgcag

SEQ ID NO: 742698 - RNA, 19 nt, Artificial Sequence
  Description of Artificial Sequence: Synthetic oligonucleotide
  Sense strand starting at position 289 of SEQ ID NO: 586766
gcgauauuagcuuauaaag

SEQ ID NO: 742699 - RNA, 19 nt, Artificial Sequence
  Description of Artificial Sequence: Synthetic oligonucleotide
  Antisense strand to SEQ ID NO: 742698
cuuuauaagcuaauaucgc

SEQ ID NO: 742700 - RNA, 19 nt, Artificial Sequence
  Description of Artificial Sequence: Synthetic oligonucleotide
  Sense strand starting at position 325 of SEQ ID NO: 586766
gucaaacacuuucuuggau

SEQ ID NO: 742701 - RNA, 19 nt, Artificial Sequence
  Description of Artificial Sequence: Synthetic oligonucleotide
  Antisense strand to SEQ ID NO: 742700
auccaagaaaguguuugac

SEQ ID NO: 742702 - RNA, 19 nt, Artificial Sequence
  Description of Artificial Sequence: Synthetic oligonucleotide
  Sense strand starting at position 509 of SEQ ID NO: 586766
cuuuaagagguuugcaucu

SEQ ID NO: 742703 - RNA, 19 nt, Artificial Sequence
  Description of Artificial Sequence: Synthetic oligonucleotide
  Antisense strand to SEQ ID NO: 742702
agaugcaaaccucuuaaag

SEQ ID NO: 742704 - RNA, 19 nt, Artificial Sequence
  Description of Artificial Sequence: Synthetic oligonucleotide
  Sense strand starting at position 538 of SEQ ID NO: 586766
guaggauuagauugugauu

SEQ ID NO: 742705 - RNA, 19 nt, Artificial Sequence
  Description of Artificial Sequence: Synthetic oligonucleotide
  Antisense strand to SEQ ID NO: 742704
aaucacaaucuaauccuac

SEQ ID NO: 742706 - RNA, 19 nt, Artificial Sequence
  Description of Artificial Sequence: Synthetic oligonucleotide
  Sense strand starting at position 574 of SEQ ID NO: 586766
aucucagguuugguaucaa

SEQ ID NO: 742707 - RNA, 19 nt, Artificial Sequence
  Description of Artificial Sequence: Synthetic oligonucleotide
  Antisense strand to SEQ ID NO: 742706
uugauaccaaaccugagau

SEQ ID NO: 742708 - RNA, 19 nt, Artificial Sequence
  Description of Artificial Sequence: Synthetic oligonucleotide
  Sense strand starting at position 584 of SEQ ID NO: 586766
ugguaucaaugccuuaaau

SEQ ID NO: 742709 - RNA, 19 nt, Artificial Sequence
  Description of Artificial Sequence: Synthetic oligonucleotide
  Antisense strand to SEQ ID NO: 742708
auuuaaggcauugauacca

SEQ ID NO: 742710 - RNA, 19 nt, Artificial Sequence
  Description of Artificial Sequence: Synthetic oligonucleotide
  Sense strand starting at position 586 of SEQ ID NO: 586766
guaucaaugccuuaaauag

SEQ ID NO: 742711 - RNA, 19 nt, Artificial Sequence
  Description of Artificial Sequence: Synthetic oligonucleotide
  Antisense strand to SEQ ID NO: 742710
cuauuuaaggcauugauac

SEQ ID NO: 742712 - RNA, 19 nt, Artificial Sequence
  Description of Artificial Sequence: Synthetic oligonucleotide
  Sense strand starting at position 968 of SEQ ID NO: 586766
aacaguauuggguguggua

SEQ ID NO: 742713 - RNA, 19 nt, Artificial Sequence
  Description of Artificial Sequence: Synthetic oligonucleotide
  Antisense strand to SEQ ID NO: 742712
uaccacacccaauacuguu

SEQ ID NO: 742714 - RNA, 19 nt, Artificial Sequence
  Description of Artificial Sequence: Synthetic oligonucleotide
  Sense strand starting at position 970 of SEQ ID NO: 586766
caguauugggugugguaaa

SEQ ID NO: 742715 - RNA, 19 nt, Artificial Sequence
  Description of Artificial Sequence: Synthetic oligonucleotide
  Antisense strand to SEQ ID NO: 742714
uuuaccacacccaauacug

SEQ ID NO: 742716 - RNA, 19 nt, Artificial Sequence
  Description of Artificial Sequence: Synthetic oligonucleotide
  Sense strand starting at position 1022 of SEQ ID NO: 586766
ggucaugagaaccaugcuu

SEQ ID NO: 742717 - RNA, 19 nt, Artificial Sequence
  Description of Artificial Sequence: Synthetic oligonucleotide
  Antisense strand to SEQ ID NO: 742716
aagcaugguucucaugacc

SEQ ID NO: 742718 - RNA, 19 nt, Artificial Sequence
  Description of Artificial Sequence: Synthetic oligonucleotide
  Sense strand starting at position 1024 of SEQ ID NO: 586766
ucaugagaaccaugcuuac

SEQ ID NO: 742719 - RNA, 19 nt, Artificial Sequence
  Description of Artificial Sequence: Synthetic oligonucleotide
  Antisense strand to SEQ ID NO: 742718
guaagcaugguucucauga

SEQ ID NO: 742720 - RNA, 19 nt, Artificial Sequence
  Description of Artificial Sequence: Synthetic oligonucleotide
  Sense strand starting at position 1027 of SEQ ID NO: 586766
ugagaaccaugcuuacaca

SEQ ID NO: 742721 - RNA, 19 nt, Artificial Sequence
  Description of Artificial Sequence: Synthetic oligonucleotide
  Antisense strand to SEQ ID NO: 742720
uguguaagcaugguucuca

SEQ ID NO: 742722 - RNA, 19 nt, Artificial Sequence
  Description of Artificial Sequence: Synthetic oligonucleotide
  Sense strand starting at position 1998 of SEQ ID NO: 586766
ccauguucucgugacagaa

SEQ ID NO: 742723 - RNA, 19 nt, Artificial Sequence
  Description of Artificial Sequence: Synthetic oligonucleotide
  Antisense strand to SEQ ID NO: 742722
uucugucacgagaacaugg

SEQ ID NO: 742724 - RNA, 19 nt, Artificial Sequence
  Description of Artificial Sequence: Synthetic oligonucleotide
  Sense strand starting at position 2025 of SEQ ID NO: 586766
ugauguacuuaagacagaa

SEQ ID NO: 742725 - RNA, 19 nt, Artificial Sequence
  Description of Artificial Sequence: Synthetic oligonucleotide
  Antisense strand to SEQ ID NO: 742724
uucugucuuaaguacauca

SEQ ID NO: 742726 - RNA, 19 nt, Artificial Sequence
  Description of Artificial Sequence: Synthetic oligonucleotide
  Sense strand starting at position 2140 of SEQ ID NO: 586766
cccaaaguccuaugauguu

SEQ ID NO: 742727 - RNA, 19 nt, Artificial Sequence
  Description of Artificial Sequence: Synthetic oligonucleotide
  Antisense strand to SEQ ID NO: 742726
aacaucauaggacuuuggg

SEQ ID NO: 742728 - RNA, 19 nt, Artificial Sequence
  Description of Artificial Sequence: Synthetic oligonucleotide
  Sense strand starting at position 2149 of SEQ ID NO: 586766
cuaugauguugacuuacaa

SEQ ID NO: 742729 - RNA, 19 nt, Artificial Sequence
  Description of Artificial Sequence: Synthetic oligonucleotide
  Antisense strand to SEQ ID NO: 742728
uuguaagucaacaucauag

SEQ ID NO: 742730 - RNA, 19 nt, Artificial Sequence
  Description of Artificial Sequence: Synthetic oligonucleotide
  Sense strand starting at position 2395 of SEQ ID NO: 586766
aguugagcucagugacacu

SEQ ID NO: 742731 - RNA, 19 nt, Artificial Sequence
  Description of Artificial Sequence: Synthetic oligonucleotide
  Antisense strand to SEQ ID NO: 742730
agugucacugagcucaacu

SEQ ID NO: 742732 - RNA, 19 nt, Artificial Sequence
  Description of Artificial Sequence: Synthetic oligonucleotide
  Sense strand starting at position 2517 of SEQ ID NO: 586766
auacauggauaugagagau

SEQ ID NO: 742733 - RNA, 19 nt, Artificial Sequence
  Description of Artificial Sequence: Synthetic oligonucleotide
  Antisense strand to SEQ ID NO: 742732
aucucucauauccauguau

SEQ ID NO: 742734 - RNA, 19 nt, Artificial Sequence
  Description of Artificial Sequence: Synthetic oligonucleotide
  Sense strand starting at position 2592 of SEQ ID NO: 586766
ggaaaugaaucagaaacau

SEQ ID NO: 742735 - RNA, 19 nt, Artificial Sequence
  Description of Artificial Sequence: Synthetic oligonucleotide
  Antisense strand to SEQ ID NO: 742734
auguuucugauucauuucc

SEQ ID NO: 742736 - RNA, 19 nt, Artificial Sequence
  Description of Artificial Sequence: Synthetic oligonucleotide
  Sense strand starting at position 2635 of SEQ ID NO: 586766
acaguaauaccuggaacuu

SEQ ID NO: 742737 - RNA, 19 nt, Artificial Sequence
  Description of Artificial Sequence: Synthetic oligonucleotide
  Antisense strand to SEQ ID NO: 742736
aaguuccagguauuacugu

SEQ ID NO: 742738 - RNA, 19 nt, Artificial Sequence
  Description of Artificial Sequence: Synthetic oligonucleotide
  Sense strand starting at position 2685 of SEQ ID NO: 586766
agaugugguacugauguga

SEQ ID NO: 742739 - RNA, 19 nt, Artificial Sequence
  Description of Artificial Sequence: Synthetic oligonucleotide
  Antisense strand to SEQ ID NO: 742738
ucacaucaguaccacaucu

SEQ ID NO: 742740 - RNA, 19 nt, Artificial Sequence
  Description of Artificial Sequence: Synthetic oligonucleotide
  Sense strand starting at position 2693 of SEQ ID NO: 586766
uacugaugugauuguuuga

SEQ ID NO: 742741 - RNA, 19 nt, Artificial Sequence
  Description of Artificial Sequence: Synthetic oligonucleotide
  Antisense strand to SEQ ID NO: 742740
ucaaacaaucacaucagua

SEQ ID NO: 742742 - RNA, 19 nt, Artificial Sequence
  Description of Artificial Sequence: Synthetic oligonucleotide
  Sense strand starting at position 2753 of SEQ ID NO: 586766
caacuauuggcuugcugga

SEQ ID NO: 742743 - RNA, 19 nt, Artificial Sequence
  Description of Artificial Sequence: Synthetic oligonucleotide
  Antisense strand to SEQ ID NO: 742742
uccagcaagccaauaguug

SEQ ID NO: 742744 - RNA, 19 nt, Artificial Sequence
  Description of Artificial Sequence: Synthetic oligonucleotide
  Sense strand starting at position 2783 of SEQ ID NO: 586766
ucaagaagucaauaugcuu

SEQ ID NO: 742745 - RNA, 19 nt, Artificial Sequence
  Description of Artificial Sequence: Synthetic oligonucleotide
  Antisense strand to SEQ ID NO: 742744
aagcauauugacuucuuga

SEQ ID NO: 742746 - RNA, 19 nt, Artificial Sequence
  Description of Artificial Sequence: Synthetic oligonucleotide
  Sense strand starting at position 2795 of SEQ ID NO: 586766
uaugcuugccggcucuaua

SEQ ID NO: 742747 - RNA, 19 nt, Artificial Sequence
  Description of Artificial Sequence: Synthetic oligonucleotide
  Antisense strand to SEQ ID NO: 742746
uauagagccggcaagcaua

SEQ ID NO: 742748 - RNA, 19 nt, Artificial Sequence
  Description of Artificial Sequence: Synthetic oligonucleotide
  Sense strand starting at position 2869 of SEQ ID NO: 586766
cuuggagucaggugaagaa

SEQ ID NO: 742749 - RNA, 19 nt, Artificial Sequence
  Description of Artificial Sequence: Synthetic oligonucleotide
  Antisense strand to SEQ ID NO: 742748
uucuucaccugacuccaag

SEQ ID NO: 742750 - RNA, 19 nt, Artificial Sequence
  Description of Artificial Sequence: Synthetic oligonucleotide
  Sense strand starting at position 3659 of SEQ ID NO: 586766
agaggauaauguccacauc

SEQ ID NO: 742751 - RNA, 19 nt, Artificial Sequence
  Description of Artificial Sequence: Synthetic oligonucleotide
  Antisense strand to SEQ ID NO: 742750
gauguggacauuauccucu

SEQ ID NO: 742752 - RNA, 19 nt, Artificial Sequence
  Description of Artificial Sequence: Synthetic oligonucleotide
  Sense strand starting at position 3690 of SEQ ID NO: 586766
gaagaaguuguguagugga

SEQ ID NO: 742753 - RNA, 19 nt, Artificial Sequence
  Description of Artificial Sequence: Synthetic oligonucleotide
  Antisense strand to SEQ ID NO: 742752
uccacuacacaacuucuuc

SEQ ID NO: 742754 - RNA, 19 nt, Artificial Sequence
  Description of Artificial Sequence: Synthetic oligonucleotide
  Sense strand starting at position 3800 of SEQ ID NO: 586766
aggcuaaauuuagauguga

SEQ ID NO: 742755 - RNA, 19 nt, Artificial Sequence
  Description of Artificial Sequence: Synthetic oligonucleotide
  Antisense strand to SEQ ID NO: 742754
ucacaucuaaauuuagccu

SEQ ID NO: 742756 - RNA, 19 nt, Artificial Sequence
  Description of Artificial Sequence: Synthetic oligonucleotide
  Sense strand starting at position 3813 of SEQ ID NO: 586766
augugauaguuuccuaagc

SEQ ID NO: 742757 - RNA, 19 nt, Artificial Sequence
  Description of Artificial Sequence: Synthetic oligonucleotide
  Antisense strand to SEQ ID NO: 742756
gcuuaggaaacuaucacau

SEQ ID NO: 742758 - RNA, 19 nt, Artificial Sequence
  Description of Artificial Sequence: Synthetic oligonucleotide
  Sense strand starting at position 3814 of SEQ ID NO: 586766
ugugauaguuuccuaagca

SEQ ID NO: 742759 - RNA, 19 nt, Artificial Sequence
  Description of Artificial Sequence: Synthetic oligonucleotide
  Antisense strand to SEQ ID NO: 742758
ugcuuaggaaacuaucaca

SEQ ID NO: 742760 - RNA, 19 nt, Artificial Sequence
  Description of Artificial Sequence: Synthetic oligonucleotide
  Sense strand starting at position 11 of SEQ ID NO: 586767
aaguaaguacaaugugauc

SEQ ID NO: 742761 - RNA, 19 nt, Artificial Sequence
  Description of Artificial Sequence: Synthetic oligonucleotide
  Antisense strand to SEQ ID NO: 742760
gaucacauuguacuuacuu

SEQ ID NO: 742762 - RNA, 19 nt, Artificial Sequence
  Description of Artificial Sequence: Synthetic oligonucleotide
  Sense strand starting at position 44 of SEQ ID NO: 586767
gcaagacaugucuaaucac

SEQ ID NO: 742763 - RNA, 19 nt, Artificial Sequence
  Description of Artificial Sequence: Synthetic oligonucleotide
  Antisense strand to SEQ ID NO: 742762
gugauuagacaugucuugc

SEQ ID NO: 742764 - RNA, 19 nt, Artificial Sequence
  Description of Artificial Sequence: Synthetic oligonucleotide
  Sense strand starting at position 47 of SEQ ID NO: 586767
agacaugucuaaucacaug

SEQ ID NO: 742765 - RNA, 19 nt, Artificial Sequence
  Description of Artificial Sequence: Synthetic oligonucleotide
  Antisense strand to SEQ ID NO: 742764
caugugauuagacaugucu

SEQ ID NO: 742766 - RNA, 19 nt, Artificial Sequence
  Description of Artificial Sequence: Synthetic oligonucleotide
  Sense strand starting at position 100 of SEQ ID NO: 586767
gugggaucagcuggaacua

SEQ ID NO: 742767 - RNA, 19 nt, Artificial Sequence
  Description of Artificial Sequence: Synthetic oligonucleotide
  Antisense strand to SEQ ID NO: 742766
uaguuccagcugaucccac

SEQ ID NO: 742768 - RNA, 19 nt, Artificial Sequence
  Description of Artificial Sequence: Synthetic oligonucleotide
  Sense strand starting at position 328 of SEQ ID NO: 586767
caggaagugucacuaauua

SEQ ID NO: 742769 - RNA, 19 nt, Artificial Sequence
  Description of Artificial Sequence: Synthetic oligonucleotide
  Antisense strand to SEQ ID NO: 742768
uaauuagugacacuuccug

SEQ ID NO: 742770 - RNA, 19 nt, Artificial Sequence
  Description of Artificial Sequence: Synthetic oligonucleotide
  Sense strand starting at position 489 of SEQ ID NO: 586767
ucagacaucuuagugggua

SEQ ID NO: 742771 - RNA, 19 nt, Artificial Sequence
  Description of Artificial Sequence: Synthetic oligonucleotide
  Antisense strand to SEQ ID NO: 742770
uacccacuaagaugucuga

SEQ ID NO: 742772 - RNA, 19 nt, Artificial Sequence
  Description of Artificial Sequence: Synthetic oligonucleotide
  Sense strand starting at position 491 of SEQ ID NO: 586767
agacaucuuaguggguaua

SEQ ID NO: 742773 - RNA, 19 nt, Artificial Sequence
  Description of Artificial Sequence: Synthetic oligonucleotide
  Antisense strand to SEQ ID NO: 742772
uauacccacuaagaugucu

SEQ ID NO: 742774 - RNA, 19 nt, Artificial Sequence
  Description of Artificial Sequence: Synthetic oligonucleotide
  Sense strand starting at position 492 of SEQ ID NO: 586767
gacaucuuaguggguauau

SEQ ID NO: 742775 - RNA, 19 nt, Artificial Sequence
  Description of Artificial Sequence: Synthetic oligonucleotide
  Antisense strand to SEQ ID NO: 742774
auauacccacuaagauguc

SEQ ID NO: 742776 - RNA, 19 nt, Artificial Sequence
  Description of Artificial Sequence: Synthetic oligonucleotide
  Sense strand starting at position 493 of SEQ ID NO: 586767
acaucuuaguggguauaua

SEQ ID NO: 742777 - RNA, 19 nt, Artificial Sequence
  Description of Artificial Sequence: Synthetic oligonucleotide
  Antisense strand to SEQ ID NO: 742776
uauauacccacuaagaugu

SEQ ID NO: 742778 - RNA, 19 nt, Artificial Sequence
  Description of Artificial Sequence: Synthetic oligonucleotide
  Sense strand starting at position 494 of SEQ ID NO: 586767
caucuuaguggguauauaa

SEQ ID NO: 742779 - RNA, 19 nt, Artificial Sequence
  Description of Artificial Sequence: Synthetic oligonucleotide
  Antisense strand to SEQ ID NO: 742778
uuauauacccacuaagaug

SEQ ID NO: 742780 - RNA, 19 nt, Artificial Sequence
  Description of Artificial Sequence: Synthetic oligonucleotide
  Sense strand starting at position 569 of SEQ ID NO: 586767
gcauuuguauguuuaucag

SEQ ID NO: 742781 - RNA, 19 nt, Artificial Sequence
  Description of Artificial Sequence: Synthetic oligonucleotide
  Antisense strand to SEQ ID NO: 742780
cugauaaacauacaaaugc

SEQ ID NO: 742782 - RNA, 19 nt, Artificial Sequence
  Description of Artificial Sequence: Synthetic oligonucleotide
  Sense strand starting at position 687 of SEQ ID NO: 586767
cuauguacuguaugaacaa

SEQ ID NO: 742783 - RNA, 19 nt, Artificial Sequence
  Description of Artificial Sequence: Synthetic oligonucleotide
  Antisense strand to SEQ ID NO: 742782
uuguucauacaguacauag

SEQ ID NO: 742784 - RNA, 19 nt, Artificial Sequence
  Description of Artificial Sequence: Synthetic oligonucleotide
  Sense strand starting at position 772 of SEQ ID NO: 586767
ucuuaauggugacuuugau

SEQ ID NO: 742785 - RNA, 19 nt, Artificial Sequence
  Description of Artificial Sequence: Synthetic oligonucleotide
  Antisense strand to SEQ ID NO: 742784
aucaaagucaccauuaaga

SEQ ID NO: 742786 - RNA, 19 nt, Artificial Sequence
  Description of Artificial Sequence: Synthetic oligonucleotide
  Sense strand starting at position 779 of SEQ ID NO: 586767
ggugacuuugaugagcaca

SEQ ID NO: 742787 - RNA, 19 nt, Artificial Sequence
  Description of Artificial Sequence: Synthetic oligonucleotide
  Antisense strand to SEQ ID NO: 742786
ugugcucaucaaagucacc

SEQ ID NO: 742788 - RNA, 19 nt, Artificial Sequence
  Description of Artificial Sequence: Synthetic oligonucleotide
  Sense strand starting at position 781 of SEQ ID NO: 586767
ugacuuugaugagcacaau

SEQ ID NO: 742789 - RNA, 19 nt, Artificial Sequence
  Description of Artificial Sequence: Synthetic oligonucleotide
  Antisense strand to SEQ ID NO: 742788
auugugcucaucaaaguca

SEQ ID NO: 742790 - RNA, 19 nt, Artificial Sequence
  Description of Artificial Sequence: Synthetic oligonucleotide
  Sense strand starting at position 787 of SEQ ID NO: 586767
ugaugagcacaaugauuaa

SEQ ID NO: 742791 - RNA, 19 nt, Artificial Sequence
  Description of Artificial Sequence: Synthetic oligonucleotide
  Antisense strand to SEQ ID NO: 742790
uuaaucauugugcucauca

SEQ ID NO: 742792 - RNA, 19 nt, Artificial Sequence
  Description of Artificial Sequence: Synthetic oligonucleotide
  Sense strand starting at position 879 of SEQ ID NO: 586767
augccuauccaguauuaua

SEQ ID NO: 742793 - RNA, 19 nt, Artificial Sequence
  Description of Artificial Sequence: Synthetic oligonucleotide
  Antisense strand to SEQ ID NO: 742792
uauaauacuggauaggcau

SEQ ID NO: 742794 - RNA, 19 nt, Artificial Sequence
  Description of Artificial Sequence: Synthetic oligonucleotide
  Sense strand starting at position 935 of SEQ ID NO: 586767
ucaguuuauauguauaggu

SEQ ID NO: 742795 - RNA, 19 nt, Artificial Sequence
  Description of Artificial Sequence: Synthetic oligonucleotide
  Antisense strand to SEQ ID NO: 742794
accuauacauauaaacuga

SEQ ID NO: 742796 - RNA, 19 nt, Artificial Sequence
  Description of Artificial Sequence: Synthetic oligonucleotide
  Sense strand starting at position 943 of SEQ ID NO: 586767
uauguauaggucuauagua

SEQ ID NO: 742797 - RNA, 19 nt, Artificial Sequence
  Description of Artificial Sequence: Synthetic oligonucleotide
  Antisense strand to SEQ ID NO: 742796
uacuauagaccuauacaua

SEQ ID NO: 742798 - RNA, 19 nt, Artificial Sequence
  Description of Artificial Sequence: Synthetic oligonucleotide
  Sense strand starting at position 945 of SEQ ID NO: 586767
uguauaggucuauaguauu

SEQ ID NO: 742799 - RNA, 19 nt, Artificial Sequence
  Description of Artificial Sequence: Synthetic oligonucleotide
  Antisense strand to SEQ ID NO: 742798
aauacuauagaccuauaca

SEQ ID NO: 742800 - RNA, 19 nt, Artificial Sequence
  Description of Artificial Sequence: Synthetic oligonucleotide
  Sense strand starting at position 958 of SEQ ID NO: 586767
aguauuccaguuuaaggua

SEQ ID NO: 742801 - RNA, 19 nt, Artificial Sequence
  Description of Artificial Sequence: Synthetic oligonucleotide
  Antisense strand to SEQ ID NO: 742800
uaccuuaaacuggaauacu

SEQ ID NO: 742802 - RNA, 19 nt, Artificial Sequence
  Description of Artificial Sequence: Synthetic oligonucleotide
  Sense strand starting at position 1048 of SEQ ID NO: 586767
caugguucccuuugagaug

SEQ ID NO: 742803 - RNA, 19 nt, Artificial Sequence
  Description of Artificial Sequence: Synthetic oligonucleotide
  Antisense strand to SEQ ID NO: 742802
caucucaaagggaaccaug

SEQ ID NO: 742804 - RNA, 19 nt, Artificial Sequence
  Description of Artificial Sequence: Synthetic oligonucleotide
  Sense strand starting at position 2228 of SEQ ID NO: 586767
uguguacauguauauaaca

SEQ ID NO: 742805 - RNA, 19 nt, Artificial Sequence
  Description of Artificial Sequence: Synthetic oligonucleotide
  Antisense strand to SEQ ID NO: 742804
uguuauauacauguacaca

SEQ ID NO: 742806 - RNA, 19 nt, Artificial Sequence
  Description of Artificial Sequence: Synthetic oligonucleotide
  Sense strand starting at position 2586 of SEQ ID NO: 586767
cuuuaaagcuuucugagau

SEQ ID NO: 742807 - RNA, 19 nt, Artificial Sequence
  Description of Artificial Sequence: Synthetic oligonucleotide
  Antisense strand to SEQ ID NO: 742806
aucucagaaagcuuuaaag

SEQ ID NO: 742808 - RNA, 19 nt, Artificial Sequence
  Description of Artificial Sequence: Synthetic oligonucleotide
  Sense strand starting at position 2729 of SEQ ID NO: 586767
uuguaaauuaggcaugagu

SEQ ID NO: 742809 - RNA, 19 nt, Artificial Sequence
  Description of Artificial Sequence: Synthetic oligonucleotide
  Antisense strand to SEQ ID NO: 742808
acucaugccuaauuuacaa

SEQ ID NO: 742810 - RNA, 19 nt, Artificial Sequence
  Description of Artificial Sequence: Synthetic oligonucleotide
  Sense strand starting at position 2731 of SEQ ID NO: 586767
guaaauuaggcaugaguga

SEQ ID NO: 742811 - RNA, 19 nt, Artificial Sequence
  Description of Artificial Sequence: Synthetic oligonucleotide
  Antisense strand to SEQ ID NO: 742810
ucacucaugccuaauuuac

SEQ ID NO: 742812 - RNA, 19 nt, Artificial Sequence
  Description of Artificial Sequence: Synthetic oligonucleotide
  Sense strand starting at position 2796 of SEQ ID NO: 586767
auaacuaagcauggugaca

SEQ ID NO: 742813 - RNA, 19 nt, Artificial Sequence
  Description of Artificial Sequence: Synthetic oligonucleotide
  Antisense strand to SEQ ID NO: 742812
ugucaccaugcuuaguuau

SEQ ID NO: 742814 - RNA, 19 nt, Artificial Sequence
  Description of Artificial Sequence: Synthetic oligonucleotide
  Sense strand starting at position 2890 of SEQ ID NO: 586767
cuguaucguaauuguauuu

SEQ ID NO: 742815 - RNA, 19 nt, Artificial Sequence
  Description of Artificial Sequence: Synthetic oligonucleotide
  Antisense strand to SEQ ID NO: 742814
aaauacaauuacgauacag

SEQ ID NO: 742816 - RNA, 19 nt, Artificial Sequence
  Description of Artificial Sequence: Synthetic oligonucleotide
  Sense strand starting at position 3094 of SEQ ID NO: 586767
ucagauggaaucugagcau

SEQ ID NO: 742817 - RNA, 19 nt, Artificial Sequence
  Description of Artificial Sequence: Synthetic oligonucleotide
  Antisense strand to SEQ ID NO: 742816
augcucagauuccaucuga

SEQ ID NO: 742818 - RNA, 19 nt, Artificial Sequence
  Description of Artificial Sequence: Synthetic oligonucleotide
  Sense strand starting at position 3233 of SEQ ID NO: 586767
ggccucaucagguggagaa

SEQ ID NO: 742819 - RNA, 19 nt, Artificial Sequence
  Description of Artificial Sequence: Synthetic oligonucleotide
  Antisense strand to SEQ ID NO: 742818
uucuccaccugaugaggcc

SEQ ID NO: 742820 - RNA, 19 nt, Artificial Sequence
  Description of Artificial Sequence: Synthetic oligonucleotide
  Sense strand starting at position 3234 of SEQ ID NO: 586767
gccucaucagguggagaaa

SEQ ID NO: 742821 - RNA, 19 nt, Artificial Sequence
  Description of Artificial Sequence: Synthetic oligonucleotide
  Antisense strand to SEQ ID NO: 742820
uuucuccaccugaugaggc

SEQ ID NO: 742822 - RNA, 19 nt, Artificial Sequence
  Description of Artificial Sequence: Synthetic oligonucleotide
  Sense strand starting at position 3399 of SEQ ID NO: 586767
auacguagauccucaaauu

SEQ ID NO: 742823 - RNA, 19 nt, Artificial Sequence
  Description of Artificial Sequence: Synthetic oligonucleotide
  Antisense strand to SEQ ID NO: 742822
aauuugaggaucuacguau

SEQ ID NO: 742824 - RNA, 19 nt, Artificial Sequence
  Description of Artificial Sequence: Synthetic oligonucleotide
  Sense strand starting at position 3430 of SEQ ID NO: 586767
uaggguauuguacagagua

SEQ ID NO: 742825 - RNA, 19 nt, Artificial Sequence
  Description of Artificial Sequence: Synthetic oligonucleotide
  Antisense strand to SEQ ID NO: 742824
uacucuguacaauacccua

SEQ ID NO: 742826 - RNA, 19 nt, Artificial Sequence
  Description of Artificial Sequence: Synthetic oligonucleotide
  Sense strand starting at position 3432 of SEQ ID NO: 586767
ggguauuguacagaguauu

SEQ ID NO: 742827 - RNA, 19 nt, Artificial Sequence
  Description of Artificial Sequence: Synthetic oligonucleotide
  Antisense strand to SEQ ID NO: 742826
aauacucuguacaauaccc

SEQ ID NO: 742828 - RNA, 19 nt, Artificial Sequence
  Description of Artificial Sequence: Synthetic oligonucleotide
  Sense strand starting at position 3670 of SEQ ID NO: 586767
agugaaauugcagaugcua

SEQ ID NO: 742829 - RNA, 19 nt, Artificial Sequence
  Description of Artificial Sequence: Synthetic oligonucleotide
  Antisense strand to SEQ ID NO: 742828
uagcaucugcaauuucacu

SEQ ID NO: 742830 - RNA, 19 nt, Artificial Sequence
  Description of Artificial Sequence: Synthetic oligonucleotide
  Sense strand starting at position 3763 of SEQ ID NO: 586767
ucccacaguguguaagaau

SEQ ID NO: 742831 - RNA, 19 nt, Artificial Sequence
  Description of Artificial Sequence: Synthetic oligonucleotide
  Antisense strand to SEQ ID NO: 742830
auucuuacacacuguggga

SEQ ID NO: 742832 - RNA, 19 nt, Artificial Sequence
  Description of Artificial Sequence: Synthetic oligonucleotide
  Sense strand starting at position 3804 of SEQ ID NO: 586767
aguacuaggcauuaccaau

SEQ ID NO: 742833 - RNA, 19 nt, Artificial Sequence
  Description of Artificial Sequence: Synthetic oligonucleotide
  Antisense strand to SEQ ID NO: 742832
auugguaaugccuaguacu

SEQ ID NO: 742834 - RNA, 19 nt, Artificial Sequence
  Description of Artificial Sequence: Synthetic oligonucleotide
  Sense strand starting at position 3878 of SEQ ID NO: 586767
uuguauaucccuuaacgaa

SEQ ID NO: 742835 - RNA, 19 nt, Artificial Sequence
  Description of Artificial Sequence: Synthetic oligonucleotide
  Antisense strand to SEQ ID NO: 742834
uucguuaagggauauacaa

SEQ ID NO: 742836 - RNA, 19 nt, Artificial Sequence
  Description of Artificial Sequence: Synthetic oligonucleotide
  Sense strand starting at position 3891 of SEQ ID NO: 586767
aacgaaugauccuugagug

SEQ ID NO: 742837 - RNA, 19 nt, Artificial Sequence
  Description of Artificial Sequence: Synthetic oligonucleotide
  Antisense strand to SEQ ID NO: 742836
cacucaaggaucauucguu

SEQ ID NO: 742838 - RNA, 19 nt, Artificial Sequence
  Description of Artificial Sequence: Synthetic oligonucleotide
  Sense strand starting at position 3948 of SEQ ID NO: 586767
ccagcuguggaugauguaa

SEQ ID NO: 742839 - RNA, 19 nt, Artificial Sequence
  Description of Artificial Sequence: Synthetic oligonucleotide
  Antisense strand to SEQ ID NO: 742838
uuacaucauccacagcugg

SEQ ID NO: 742840 - RNA, 19 nt, Artificial Sequence
  Description of Artificial Sequence: Synthetic oligonucleotide
  Sense strand starting at position 207 of SEQ ID NO: 586768
gagggaucaucuguaccac

SEQ ID NO: 742841 - RNA, 19 nt, Artificial Sequence
  Description of Artificial Sequence: Synthetic oligonucleotide
  Antisense strand to SEQ ID NO: 742840
gugguacagaugaucccuc

SEQ ID NO: 742842 - RNA, 19 nt, Artificial Sequence
  Description of Artificial Sequence: Synthetic oligonucleotide
  Sense strand starting at position 346 of SEQ ID NO: 586768
uguauagugcaagggauua

SEQ ID NO: 742843 - RNA, 19 nt, Artificial Sequence
  Description of Artificial Sequence: Synthetic oligonucleotide
  Antisense strand to SEQ ID NO: 742842
uaaucccuugcacuauaca

SEQ ID NO: 742844 - RNA, 19 nt, Artificial Sequence
  Description of Artificial Sequence: Synthetic oligonucleotide
  Sense strand starting at position 351 of SEQ ID NO: 586768
agugcaagggauuaucagu

SEQ ID NO: 742845 - RNA, 19 nt, Artificial Sequence
  Description of Artificial Sequence: Synthetic oligonucleotide
  Antisense strand to SEQ ID NO: 742844
acugauaaucccuugcacu

SEQ ID NO: 742846 - RNA, 19 nt, Artificial Sequence
  Description of Artificial Sequence: Synthetic oligonucleotide
  Sense strand starting at position 483 of SEQ ID NO: 586768
uugaaauuuauguacgcgu

SEQ ID NO: 742847 - RNA, 19 nt, Artificial Sequence
  Description of Artificial Sequence: Synthetic oligonucleotide
  Antisense strand to SEQ ID NO: 742846
acgcguacauaaauuucaa

SEQ ID NO: 742848 - RNA, 19 nt, Artificial Sequence
  Description of Artificial Sequence: Synthetic oligonucleotide
  Sense strand starting at position 486 of SEQ ID NO: 586768
aaauuuauguacgcgugga

SEQ ID NO: 742849 - RNA, 19 nt, Artificial Sequence
  Description of Artificial Sequence: Synthetic oligonucleotide
  Antisense strand to SEQ ID NO: 742848
uccacgcguacauaaauuu

SEQ ID NO: 742850 - RNA, 19 nt, Artificial Sequence
  Description of Artificial Sequence: Synthetic oligonucleotide
  Sense strand starting at position 487 of SEQ ID NO: 586768
aauuuauguacgcguggaa

SEQ ID NO: 742851 - RNA, 19 nt, Artificial Sequence
  Description of Artificial Sequence: Synthetic oligonucleotide
  Antisense strand to SEQ ID NO: 742850
uuccacgcguacauaaauu

SEQ ID NO: 742852 - RNA, 19 nt, Artificial Sequence
  Description of Artificial Sequence: Synthetic oligonucleotide
  Sense strand starting at position 525 of SEQ ID NO: 586768
uggcuucuaucacuccaga

SEQ ID NO: 742853 - RNA, 19 nt, Artificial Sequence
  Description of Artificial Sequence: Synthetic oligonucleotide
  Antisense strand to SEQ ID NO: 742852
ucuggagugauagaagcca

SEQ ID NO: 742854 - RNA, 19 nt, Artificial Sequence
  Description of Artificial Sequence: Synthetic oligonucleotide
  Sense strand starting at position 545 of SEQ ID NO: 586768
uuuguaucacuccagaucu

SEQ ID NO: 742855 - RNA, 19 nt, Artificial Sequence
  Description of Artificial Sequence: Synthetic oligonucleotide
  Antisense strand to SEQ ID NO: 742854
agaucuggagugauacaaa

SEQ ID NO: 742856 - RNA, 19 nt, Artificial Sequence
  Description of Artificial Sequence: Synthetic oligonucleotide
  Sense strand starting at position 547 of SEQ ID NO: 586768
uguaucacuccagaucugu

SEQ ID NO: 742857 - RNA, 19 nt, Artificial Sequence
  Description of Artificial Sequence: Synthetic oligonucleotide
  Antisense strand to SEQ ID NO: 742856
acagaucuggagugauaca

SEQ ID NO: 742858 - RNA, 19 nt, Artificial Sequence
  Description of Artificial Sequence: Synthetic oligonucleotide
  Sense strand starting at position 553 of SEQ ID NO: 586768
acuccagaucuguaucacu

SEQ ID NO: 742859 - RNA, 19 nt, Artificial Sequence
  Description of Artificial Sequence: Synthetic oligonucleotide
  Antisense strand to SEQ ID NO: 742858
agugauacagaucuggagu

SEQ ID NO: 742860 - RNA, 19 nt, Artificial Sequence
  Description of Artificial Sequence: Synthetic oligonucleotide
  Sense strand starting at position 676 of SEQ ID NO: 586768
cuucucccuguugauagau

SEQ ID NO: 742861 - RNA, 19 nt, Artificial Sequence
  Description of Artificial Sequence: Synthetic oligonucleotide
  Antisense strand to SEQ ID NO: 742860
aucuaucaacagggagaag

SEQ ID NO: 742862 - RNA, 19 nt, Artificial Sequence
  Description of Artificial Sequence: Synthetic oligonucleotide
  Sense strand starting at position 899 of SEQ ID NO: 586768
cugagaugauuccucgauu

SEQ ID NO: 742863 - RNA, 19 nt, Artificial Sequence
  Description of Artificial Sequence: Synthetic oligonucleotide
  Antisense strand to SEQ ID NO: 742862
aaucgaggaaucaucucag

SEQ ID NO: 742864 - RNA, 19 nt, Artificial Sequence
  Description of Artificial Sequence: Synthetic oligonucleotide
  Sense strand starting at position 2002 of SEQ ID NO: 586768
gcucuuguggcagagaaag

SEQ ID NO: 742865 - RNA, 19 nt, Artificial Sequence
  Description of Artificial Sequence: Synthetic oligonucleotide
  Antisense strand to SEQ ID NO: 742864
cuuucucugccacaagagc

SEQ ID NO: 742866 - RNA, 19 nt, Artificial Sequence
  Description of Artificial Sequence: Synthetic oligonucleotide
  Sense strand starting at position 2049 of SEQ ID NO: 586768
agagcugugggucaaagau

SEQ ID NO: 742867 - RNA, 19 nt, Artificial Sequence
  Description of Artificial Sequence: Synthetic oligonucleotide
  Antisense strand to SEQ ID NO: 742866
aucuuugacccacagcucu

SEQ ID NO: 742868 - RNA, 19 nt, Artificial Sequence
  Description of Artificial Sequence: Synthetic oligonucleotide
  Sense strand starting at position 2059 of SEQ ID NO: 586768
gucaaagaugcacaauauu

SEQ ID NO: 742869 - RNA, 19 nt, Artificial Sequence
  Description of Artificial Sequence: Synthetic oligonucleotide
  Antisense strand to SEQ ID NO: 742868
aauauugugcaucuuugac

SEQ ID NO: 742870 - RNA, 19 nt, Artificial Sequence
  Description of Artificial Sequence: Synthetic oligonucleotide
  Sense strand starting at position 2121 of SEQ ID NO: 586768
aauggauucuuuguugaau

SEQ ID NO: 742871 - RNA, 19 nt, Artificial Sequence
  Description of Artificial Sequence: Synthetic oligonucleotide
  Antisense strand to SEQ ID NO: 742870
auucaacaaagaauccauu

SEQ ID NO: 742872 - RNA, 19 nt, Artificial Sequence
  Description of Artificial Sequence: Synthetic oligonucleotide
  Sense strand starting at position 2122 of SEQ ID NO: 586768
auggauucuuuguugaauu

SEQ ID NO: 742873 - RNA, 19 nt, Artificial Sequence
  Description of Artificial Sequence: Synthetic oligonucleotide
  Antisense strand to SEQ ID NO: 742872
aauucaacaaagaauccau

SEQ ID NO: 742874 - RNA, 19 nt, Artificial Sequence
  Description of Artificial Sequence: Synthetic oligonucleotide
  Sense strand starting at position 2289 of SEQ ID NO: 586768
cuuguauuacuguauacac

SEQ ID NO: 742875 - RNA, 19 nt, Artificial Sequence
  Description of Artificial Sequence: Synthetic oligonucleotide
  Antisense strand to SEQ ID NO: 742874
guguauacaguaauacaag

SEQ ID NO: 742876 - RNA, 19 nt, Artificial Sequence
  Description of Artificial Sequence: Synthetic oligonucleotide
  Sense strand starting at position 2291 of SEQ ID NO: 586768
uguauuacuguauacacau

SEQ ID NO: 742877 - RNA, 19 nt, Artificial Sequence
  Description of Artificial Sequence: Synthetic oligonucleotide
  Antisense strand to SEQ ID NO: 742876
auguguauacaguaauaca

SEQ ID NO: 742878 - RNA, 19 nt, Artificial Sequence
  Description of Artificial Sequence: Synthetic oligonucleotide
  Sense strand starting at position 2368 of SEQ ID NO: 586768
guggaauccuuaguuauua

SEQ ID NO: 742879 - RNA, 19 nt, Artificial Sequence
  Description of Artificial Sequence: Synthetic oligonucleotide
  Antisense strand to SEQ ID NO: 742878
uaauaacuaaggauuccac

SEQ ID NO: 742880 - RNA, 19 nt, Artificial Sequence
  Description of Artificial Sequence: Synthetic oligonucleotide
  Sense strand starting at position 2369 of SEQ ID NO: 586768
uggaauccuuaguuauuaa

SEQ ID NO: 742881 - RNA, 19 nt, Artificial Sequence
  Description of Artificial Sequence: Synthetic oligonucleotide
  Antisense strand to SEQ ID NO: 742880
uuaauaacuaaggauucca

SEQ ID NO: 742882 - RNA, 19 nt, Artificial Sequence
  Description of Artificial Sequence: Synthetic oligonucleotide
  Sense strand starting at position 2747 of SEQ ID NO: 586768
uuuagucacacgugaaaga

SEQ ID NO: 742883 - RNA, 19 nt, Artificial Sequence
  Description of Artificial Sequence: Synthetic oligonucleotide
  Antisense strand to SEQ ID NO: 742882
ucuuucacgugugacuaaa

SEQ ID NO: 742884 - RNA, 19 nt, Artificial Sequence
  Description of Artificial Sequence: Synthetic oligonucleotide
  Sense strand starting at position 2748 of SEQ ID NO: 586768
uuagucacacgugaaagaa

SEQ ID NO: 742885 - RNA, 19 nt, Artificial Sequence
  Description of Artificial Sequence: Synthetic oligonucleotide
  Antisense strand to SEQ ID NO: 742884
uucuuucacgugugacuaa

SEQ ID NO: 742886 - RNA, 19 nt, Artificial Sequence
  Description of Artificial Sequence: Synthetic oligonucleotide
  Sense strand starting at position 2940 of SEQ ID NO: 586768
guuucuauuucucuuaugu

SEQ ID NO: 742887 - RNA, 19 nt, Artificial Sequence
  Description of Artificial Sequence: Synthetic oligonucleotide
  Antisense strand to SEQ ID NO: 742886
acauaagagaaauagaaac

SEQ ID NO: 742888 - RNA, 19 nt, Artificial Sequence
  Description of Artificial Sequence: Synthetic oligonucleotide
  Sense strand starting at position 2958 of SEQ ID NO: 586768
uuugguagcauugagauaa

SEQ ID NO: 742889 - RNA, 19 nt, Artificial Sequence
  Description of Artificial Sequence: Synthetic oligonucleotide
  Antisense strand to SEQ ID NO: 742888
uuaucucaaugcuaccaaa

SEQ ID NO: 742890 - RNA, 19 nt, Artificial Sequence
  Description of Artificial Sequence: Synthetic oligonucleotide
  Sense strand starting at position 2991 of SEQ ID NO: 586768
uuauguuuggcuuauauug

SEQ ID NO: 742891 - RNA, 19 nt, Artificial Sequence
  Description of Artificial Sequence: Synthetic oligonucleotide
  Antisense strand to SEQ ID NO: 742890
caauauaagccaaacauaa

SEQ ID NO: 742892 - RNA, 19 nt, Artificial Sequence
  Description of Artificial Sequence: Synthetic oligonucleotide
  Sense strand starting at position 3039 of SEQ ID NO: 586768
agugaauuugcaggugcua

SEQ ID NO: 742893 - RNA, 19 nt, Artificial Sequence
  Description of Artificial Sequence: Synthetic oligonucleotide
  Antisense strand to SEQ ID NO: 742892
uagcaccugcaaauucacu

SEQ ID NO: 742894 - RNA, 19 nt, Artificial Sequence
  Description of Artificial Sequence: Synthetic oligonucleotide
  Sense strand starting at position 3172 of SEQ ID NO: 586768
auaauauaucacugaugug

SEQ ID NO: 742895 - RNA, 19 nt, Artificial Sequence
  Description of Artificial Sequence: Synthetic oligonucleotide
  Antisense strand to SEQ ID NO: 742894
cacaucagugauauauuau

SEQ ID NO: 742896 - RNA, 19 nt, Artificial Sequence
  Description of Artificial Sequence: Synthetic oligonucleotide
  Sense strand starting at position 3182 of SEQ ID NO: 586768
acugauguguaccucagaa

SEQ ID NO: 742897 - RNA, 19 nt, Artificial Sequence
  Description of Artificial Sequence: Synthetic oligonucleotide
  Antisense strand to SEQ ID NO: 742896
uucugagguacacaucagu

SEQ ID NO: 742898 - RNA, 19 nt, Artificial Sequence
  Description of Artificial Sequence: Synthetic oligonucleotide
  Sense strand starting at position 3254 of SEQ ID NO: 586768
uugcuaauucgauaagaga

SEQ ID NO: 742899 - RNA, 19 nt, Artificial Sequence
  Description of Artificial Sequence: Synthetic oligonucleotide
  Antisense strand to SEQ ID NO: 742898
ucucuuaucgaauuagcaa

SEQ ID NO: 742900 - RNA, 19 nt, Artificial Sequence
  Description of Artificial Sequence: Synthetic oligonucleotide
  Sense strand starting at position 3491 of SEQ ID NO: 586768
ugaaauugucuuggaauau

SEQ ID NO: 742901 - RNA, 19 nt, Artificial Sequence
  Description of Artificial Sequence: Synthetic oligonucleotide
  Antisense strand to SEQ ID NO: 742900
auauuccaagacaauuuca

SEQ ID NO: 742902 - RNA, 19 nt, Artificial Sequence
  Description of Artificial Sequence: Synthetic oligonucleotide
  Sense strand starting at position 3625 of SEQ ID NO: 586768
ggaacauguuucuucccau

SEQ ID NO: 742903 - RNA, 19 nt, Artificial Sequence
  Description of Artificial Sequence: Synthetic oligonucleotide
  Antisense strand to SEQ ID NO: 742902
augggaagaaacauguucc

SEQ ID NO: 742904 - RNA, 19 nt, Artificial Sequence
  Description of Artificial Sequence: Synthetic oligonucleotide
  Sense strand starting at position 3656 of SEQ ID NO: 586768
agaggugucagcuaauggu

SEQ ID NO: 742905 - RNA, 19 nt, Artificial Sequence
  Description of Artificial Sequence: Synthetic oligonucleotide
  Antisense strand to SEQ ID NO: 742904
accauuagcugacaccucu

SEQ ID NO: 742906 - RNA, 19 nt, Artificial Sequence
  Description of Artificial Sequence: Synthetic oligonucleotide
  Sense strand starting at position 3663 of SEQ ID NO: 586768
ucagcuaaugguuaugauu

SEQ ID NO: 742907 - RNA, 19 nt, Artificial Sequence
  Description of Artificial Sequence: Synthetic oligonucleotide
  Antisense strand to SEQ ID NO: 742906
aaucauaaccauuagcuga

SEQ ID NO: 742908 - RNA, 19 nt, Artificial Sequence
  Description of Artificial Sequence: Synthetic oligonucleotide
  Sense strand starting at position 3778 of SEQ ID NO: 586768
cugauucuugugugcauuu

SEQ ID NO: 742909 - RNA, 19 nt, Artificial Sequence
  Description of Artificial Sequence: Synthetic oligonucleotide
  Antisense strand to SEQ ID NO: 742908
aaaugcacacaagaaucag

SEQ ID NO: 742910 - RNA, 19 nt, Artificial Sequence
  Description of Artificial Sequence: Synthetic oligonucleotide
  Sense strand starting at position 3785 of SEQ ID NO: 586768
uugugugcauuucuuaacu

SEQ ID NO: 742911 - RNA, 19 nt, Artificial Sequence
  Description of Artificial Sequence: Synthetic oligonucleotide
  Antisense strand to SEQ ID NO: 742910
aguuaagaaaugcacacaa

SEQ ID NO: 742912 - RNA, 19 nt, Artificial Sequence
  Description of Artificial Sequence: Synthetic oligonucleotide
  Sense strand starting at position 3826 of SEQ ID NO: 586768
agggaaugguuaguuacua

SEQ ID NO: 742913 - RNA, 19 nt, Artificial Sequence
  Description of Artificial Sequence: Synthetic oligonucleotide
  Antisense strand to SEQ ID NO: 742912
uaguaacuaaccauucccu

SEQ ID NO: 742914 - RNA, 19 nt, Artificial Sequence
  Description of Artificial Sequence: Synthetic oligonucleotide
  Sense strand starting at position 3874 of SEQ ID NO: 586768
auaauugcugacugugaaa

SEQ ID NO: 742915 - RNA, 19 nt, Artificial Sequence
  Description of Artificial Sequence: Synthetic oligonucleotide
  Antisense strand to SEQ ID NO: 742914
uuucacagucagcaauuau

SEQ ID NO: 742916 - RNA, 19 nt, Artificial Sequence
  Description of Artificial Sequence: Synthetic oligonucleotide
  Sense strand starting at position 3923 of SEQ ID NO: 586768
aauagaaaguugcuugguu

SEQ ID NO: 742917 - RNA, 19 nt, Artificial Sequence
  Description of Artificial Sequence: Synthetic oligonucleotide
  Antisense strand to SEQ ID NO: 742916
aaccaagcaacuuucuauu

SEQ ID NO: 742918 - RNA, 19 nt, Artificial Sequence
  Description of Artificial Sequence: Synthetic oligonucleotide
  Sense strand starting at position 3927 of SEQ ID NO: 586768
gaaaguugcuugguuugag

SEQ ID NO: 742919 - RNA, 19 nt, Artificial Sequence
  Description of Artificial Sequence: Synthetic oligonucleotide
  Antisense strand to SEQ ID NO: 742918
cucaaaccaagcaacuuuc

SEQ ID NO: 742920 - RNA, 19 nt, Artificial Sequence
  Description of Artificial Sequence: Synthetic oligonucleotide
  Sense strand starting at position 349 of SEQ ID NO: 586769
cuacgccuggccuaaauau

SEQ ID NO: 742921 - RNA, 19 nt, Artificial Sequence
  Description of Artificial Sequence: Synthetic oligonucleotide
  Antisense strand to SEQ ID NO: 742920
auauuuaggccaggcguag

SEQ ID NO: 742922 - RNA, 19 nt, Artificial Sequence
  Description of Artificial Sequence: Synthetic oligonucleotide
  Sense strand starting at position 704 of SEQ ID NO: 586769
augacuuuguuaucagucu

SEQ ID NO: 742923 - RNA, 19 nt, Artificial Sequence
  Description of Artificial Sequence: Synthetic oligonucleotide
  Antisense strand to SEQ ID NO: 742922
agacugauaacaaagucau

SEQ ID NO: 742924 - RNA, 19 nt, Artificial Sequence
  Description of Artificial Sequence: Synthetic oligonucleotide
  Sense strand starting at position 924 of SEQ ID NO: 586769
ggcuuucucgggagguagu

SEQ ID NO: 742925 - RNA, 19 nt, Artificial Sequence
  Description of Artificial Sequence: Synthetic oligonucleotide
  Antisense strand to SEQ ID NO: 742924
acuaccucccgagaaagcc

SEQ ID NO: 742926 - RNA, 19 nt, Artificial Sequence
  Description of Artificial Sequence: Synthetic oligonucleotide
  Sense strand starting at position 973 of SEQ ID NO: 586769
uucucuagagugugauuau

SEQ ID NO: 742927 - RNA, 19 nt, Artificial Sequence
  Description of Artificial Sequence: Synthetic oligonucleotide
  Antisense strand to SEQ ID NO: 742926
auaaucacacucuagagaa

SEQ ID NO: 742928 - RNA, 19 nt, Artificial Sequence
  Description of Artificial Sequence: Synthetic oligonucleotide
  Sense strand starting at position 976 of SEQ ID NO: 586769
ucuagagugugauuaugua

SEQ ID NO: 742929 - RNA, 19 nt, Artificial Sequence
  Description of Artificial Sequence: Synthetic oligonucleotide
  Antisense strand to SEQ ID NO: 742928
uacauaaucacacucuaga

SEQ ID NO: 742930 - RNA, 19 nt, Artificial Sequence
  Description of Artificial Sequence: Synthetic oligonucleotide
  Sense strand starting at position 989 of SEQ ID NO: 586769
uauguauccugaguaggga

SEQ ID NO: 742931 - RNA, 19 nt, Artificial Sequence
  Description of Artificial Sequence: Synthetic oligonucleotide
  Antisense strand to SEQ ID NO: 742930
ucccuacucaggauacaua

SEQ ID NO: 742932 - RNA, 19 nt, Artificial Sequence
  Description of Artificial Sequence: Synthetic oligonucleotide
  Sense strand starting at position 990 of SEQ ID NO: 586769
auguauccugaguagggau

SEQ ID NO: 742933 - RNA, 19 nt, Artificial Sequence
  Description of Artificial Sequence: Synthetic oligonucleotide
  Antisense strand to SEQ ID NO: 742932
aucccuacucaggauacau

SEQ ID NO: 742934 - RNA, 19 nt, Artificial Sequence
  Description of Artificial Sequence: Synthetic oligonucleotide
  Sense strand starting at position 2064 of SEQ ID NO: 586769
gcugcaacuguacauauua

SEQ ID NO: 742935 - RNA, 19 nt, Artificial Sequence
  Description of Artificial Sequence: Synthetic oligonucleotide
  Antisense strand to SEQ ID NO: 742934
uaauauguacaguugcagc

SEQ ID NO: 742936 - RNA, 19 nt, Artificial Sequence
  Description of Artificial Sequence: Synthetic oligonucleotide
  Sense strand starting at position 2124 of SEQ ID NO: 586769
ugaucuuagucacuuacua

SEQ ID NO: 742937 - RNA, 19 nt, Artificial Sequence
  Description of Artificial Sequence: Synthetic oligonucleotide
  Antisense strand to SEQ ID NO: 742936
uaguaagugacuaagauca

SEQ ID NO: 742938 - RNA, 19 nt, Artificial Sequence
  Description of Artificial Sequence: Synthetic oligonucleotide
  Sense strand starting at position 2246 of SEQ ID NO: 586769
aucuacuuucguuacaguu

SEQ ID NO: 742939 - RNA, 19 nt, Artificial Sequence
  Description of Artificial Sequence: Synthetic oligonucleotide
  Antisense strand to SEQ ID NO: 742938
aacuguaacgaaaguagau

SEQ ID NO: 742940 - RNA, 19 nt, Artificial Sequence
  Description of Artificial Sequence: Synthetic oligonucleotide
  Sense strand starting at position 2300 of SEQ ID NO: 586769
uggacucuuuccucaguuu

SEQ ID NO: 742941 - RNA, 19 nt, Artificial Sequence
  Description of Artificial Sequence: Synthetic oligonucleotide
  Antisense strand to SEQ ID NO: 742940
aaacugaggaaagagucca

SEQ ID NO: 742942 - RNA, 19 nt, Artificial Sequence
  Description of Artificial Sequence: Synthetic oligonucleotide
  Sense strand starting at position 2312 of SEQ ID NO: 586769
ucaguuugugaugauuaca

SEQ ID NO: 742943 - RNA, 19 nt, Artificial Sequence
  Description of Artificial Sequence: Synthetic oligonucleotide
  Antisense strand to SEQ ID NO: 742942
uguaaucaucacaaacuga

SEQ ID NO: 742944 - RNA, 19 nt, Artificial Sequence
  Description of Artificial Sequence: Synthetic oligonucleotide
  Sense strand starting at position 2315 of SEQ ID NO: 586769
guuugugaugauuacauca

SEQ ID NO: 742945 - RNA, 19 nt, Artificial Sequence
  Description of Artificial Sequence: Synthetic oligonucleotide
  Antisense strand to SEQ ID NO: 742944
ugauguaaucaucacaaac

SEQ ID NO: 742946 - RNA, 19 nt, Artificial Sequence
  Description of Artificial Sequence: Synthetic oligonucleotide
  Sense strand starting at position 2397 of SEQ ID NO: 586769
ggugucuaugucuauauau

SEQ ID NO: 742947 - RNA, 19 nt, Artificial Sequence
  Description of Artificial Sequence: Synthetic oligonucleotide
  Antisense strand to SEQ ID NO: 742946
auauauagacauagacacc

SEQ ID NO: 742948 - RNA, 19 nt, Artificial Sequence
  Description of Artificial Sequence: Synthetic oligonucleotide
  Sense strand starting at position 2430 of SEQ ID NO: 586769
ggaugaugaccaugucaau

SEQ ID NO: 742949 - RNA, 19 nt, Artificial Sequence
  Description of Artificial Sequence: Synthetic oligonucleotide
  Antisense strand to SEQ ID NO: 742948
auugacauggucaucaucc

SEQ ID NO: 742950 - RNA, 19 nt, Artificial Sequence
  Description of Artificial Sequence: Synthetic oligonucleotide
  Sense strand starting at position 2436 of SEQ ID NO: 586769
ugaccaugucaaugauccu

SEQ ID NO: 742951 - RNA, 19 nt, Artificial Sequence
  Description of Artificial Sequence: Synthetic oligonucleotide
  Antisense strand to SEQ ID NO: 742950
aggaucauugacaugguca

SEQ ID NO: 742952 - RNA, 19 nt, Artificial Sequence
  Description of Artificial Sequence: Synthetic oligonucleotide
  Sense strand starting at position 2522 of SEQ ID NO: 586769
cugauugcauaaucuugaa

SEQ ID NO: 742953 - RNA, 19 nt, Artificial Sequence
  Description of Artificial Sequence: Synthetic oligonucleotide
  Antisense strand to SEQ ID NO: 742952
uucaagauuaugcaaucag

SEQ ID NO: 742954 - RNA, 19 nt, Artificial Sequence
  Description of Artificial Sequence: Synthetic oligonucleotide
  Sense strand starting at position 2565 of SEQ ID NO: 586769
cccuaacuuuggcuggauu

SEQ ID NO: 742955 - RNA, 19 nt, Artificial Sequence
  Description of Artificial Sequence: Synthetic oligonucleotide
  Antisense strand to SEQ ID NO: 742954
aauccagccaaaguuaggg

SEQ ID NO: 742956 - RNA, 19 nt, Artificial Sequence
  Description of Artificial Sequence: Synthetic oligonucleotide
  Sense strand starting at position 2589 of SEQ ID NO: 586769
agagaucuuugugucuuga

SEQ ID NO: 742957 - RNA, 19 nt, Artificial Sequence
  Description of Artificial Sequence: Synthetic oligonucleotide
  Antisense strand to SEQ ID NO: 742956
ucaagacacaaagaucucu

SEQ ID NO: 742958 - RNA, 19 nt, Artificial Sequence
  Description of Artificial Sequence: Synthetic oligonucleotide
  Sense strand starting at position 2632 of SEQ ID NO: 586769
ucuguuuguguugucuuau

SEQ ID NO: 742959 - RNA, 19 nt, Artificial Sequence
  Description of Artificial Sequence: Synthetic oligonucleotide
  Antisense strand to SEQ ID NO: 742958
auaagacaacacaaacaga

SEQ ID NO: 742960 - RNA, 19 nt, Artificial Sequence
  Description of Artificial Sequence: Synthetic oligonucleotide
  Sense strand starting at position 2641 of SEQ ID NO: 586769
guugucuuaugaucagaau

SEQ ID NO: 742961 - RNA, 19 nt, Artificial Sequence
  Description of Artificial Sequence: Synthetic oligonucleotide
  Antisense strand to SEQ ID NO: 742960
auucugaucauaagacaac

SEQ ID NO: 742962 - RNA, 19 nt, Artificial Sequence
  Description of Artificial Sequence: Synthetic oligonucleotide
  Sense strand starting at position 2647 of SEQ ID NO: 586769
uuaugaucagaauguaguu

SEQ ID NO: 742963 - RNA, 19 nt, Artificial Sequence
  Description of Artificial Sequence: Synthetic oligonucleotide
  Antisense strand to SEQ ID NO: 742962
aacuacauucugaucauaa

SEQ ID NO: 742964 - RNA, 19 nt, Artificial Sequence
  Description of Artificial Sequence: Synthetic oligonucleotide
  Sense strand starting at position 2676 of SEQ ID NO: 586769
uuucuuggacuacaguaau

SEQ ID NO: 742965 - RNA, 19 nt, Artificial Sequence
  Description of Artificial Sequence: Synthetic oligonucleotide
  Antisense strand to SEQ ID NO: 742964
auuacuguaguccaagaaa

SEQ ID NO: 742966 - RNA, 19 nt, Artificial Sequence
  Description of Artificial Sequence: Synthetic oligonucleotide
  Sense strand starting at position 2682 of SEQ ID NO: 586769
ggacuacaguaaucuauug

SEQ ID NO: 742967 - RNA, 19 nt, Artificial Sequence
  Description of Artificial Sequence: Synthetic oligonucleotide
  Antisense strand to SEQ ID NO: 742966
caauagauuacuguagucc

SEQ ID NO: 742968 - RNA, 19 nt, Artificial Sequence
  Description of Artificial Sequence: Synthetic oligonucleotide
  Sense strand starting at position 2909 of SEQ ID NO: 586769
agaucaaaucuguguacuu

SEQ ID NO: 742969 - RNA, 19 nt, Artificial Sequence
  Description of Artificial Sequence: Synthetic oligonucleotide
  Antisense strand to SEQ ID NO: 742968
aaguacacagauuugaucu

SEQ ID NO: 742970 - RNA, 19 nt, Artificial Sequence
  Description of Artificial Sequence: Synthetic oligonucleotide
  Sense strand starting at position 2910 of SEQ ID NO: 586769
gaucaaaucuguguacuug

SEQ ID NO: 742971 - RNA, 19 nt, Artificial Sequence
  Description of Artificial Sequence: Synthetic oligonucleotide
  Antisense strand to SEQ ID NO: 742970
caaguacacagauuugauc

SEQ ID NO: 742972 - RNA, 19 nt, Artificial Sequence
  Description of Artificial Sequence: Synthetic oligonucleotide
  Sense strand starting at position 3075 of SEQ ID NO: 586769
augaaaccauauguuugua

SEQ ID NO: 742973 - RNA, 19 nt, Artificial Sequence
  Description of Artificial Sequence: Synthetic oligonucleotide
  Antisense strand to SEQ ID NO: 742972
uacaaacauaugguuucau

SEQ ID NO: 742974 - RNA, 19 nt, Artificial Sequence
  Description of Artificial Sequence: Synthetic oligonucleotide
  Sense strand starting at position 3083 of SEQ ID NO: 586769
auauguuuguacucauuag

SEQ ID NO: 742975 - RNA, 19 nt, Artificial Sequence
  Description of Artificial Sequence: Synthetic oligonucleotide
  Antisense strand to SEQ ID NO: 742974
cuaaugaguacaaacauau

SEQ ID NO: 742976 - RNA, 19 nt, Artificial Sequence
  Description of Artificial Sequence: Synthetic oligonucleotide
  Sense strand starting at position 3087 of SEQ ID NO: 586769
guuuguacucauuagucaa

SEQ ID NO: 742977 - RNA, 19 nt, Artificial Sequence
  Description of Artificial Sequence: Synthetic oligonucleotide
  Antisense strand to SEQ ID NO: 742976
uugacuaaugaguacaaac

SEQ ID NO: 742978 - RNA, 19 nt, Artificial Sequence
  Description of Artificial Sequence: Synthetic oligonucleotide
  Sense strand starting at position 3090 of SEQ ID NO: 586769
uguacucauuagucaacuu

SEQ ID NO: 742979 - RNA, 19 nt, Artificial Sequence
  Description of Artificial Sequence: Synthetic oligonucleotide
  Antisense strand to SEQ ID NO: 742978
aaguugacuaaugaguaca

SEQ ID NO: 742980 - RNA, 19 nt, Artificial Sequence
  Description of Artificial Sequence: Synthetic oligonucleotide
  Sense strand starting at position 3421 of SEQ ID NO: 586769
uaaacauggcugugaagau

SEQ ID NO: 742981 - RNA, 19 nt, Artificial Sequence
  Description of Artificial Sequence: Synthetic oligonucleotide
  Antisense strand to SEQ ID NO: 742980
aucuucacagccauguuua

SEQ ID NO: 742982 - RNA, 19 nt, Artificial Sequence
  Description of Artificial Sequence: Synthetic oligonucleotide
  Sense strand starting at position 3554 of SEQ ID NO: 586769
aguaauaaaugucuaccca

SEQ ID NO: 742983 - RNA, 19 nt, Artificial Sequence
  Description of Artificial Sequence: Synthetic oligonucleotide
  Antisense strand to SEQ ID NO: 742982
uggguagacauuuauuacu

SEQ ID NO: 742984 - RNA, 19 nt, Artificial Sequence
  Description of Artificial Sequence: Synthetic oligonucleotide
  Sense strand starting at position 3555 of SEQ ID NO: 586769
guaauaaaugucuacccag

SEQ ID NO: 742985 - RNA, 19 nt, Artificial Sequence
  Description of Artificial Sequence: Synthetic oligonucleotide
  Antisense strand to SEQ ID NO: 742984
cuggguagacauuuauuac

SEQ ID NO: 742986 - RNA, 19 nt, Artificial Sequence
  Description of Artificial Sequence: Synthetic oligonucleotide
  Sense strand starting at position 3605 of SEQ ID NO: 586769
auccuuacucuguguaaug

SEQ ID NO: 742987 - RNA, 19 nt, Artificial Sequence
  Description of Artificial Sequence: Synthetic oligonucleotide
  Antisense strand to SEQ ID NO: 742986
cauuacacagaguaaggau

SEQ ID NO: 742988 - RNA, 19 nt, Artificial Sequence
  Description of Artificial Sequence: Synthetic oligonucleotide
  Sense strand starting at position 3614 of SEQ ID NO: 586769
cuguguaaugugcuuguuu

SEQ ID NO: 742989 - RNA, 19 nt, Artificial Sequence
  Description of Artificial Sequence: Synthetic oligonucleotide
  Antisense strand to SEQ ID NO: 742988
aaacaagcacauuacacag

SEQ ID NO: 742990 - RNA, 19 nt, Artificial Sequence
  Description of Artificial Sequence: Synthetic oligonucleotide
  Sense strand starting at position 3699 of SEQ ID NO: 586769
ugggucauagccugggauu

SEQ ID NO: 742991 - RNA, 19 nt, Artificial Sequence
  Description of Artificial Sequence: Synthetic oligonucleotide
  Antisense strand to SEQ ID NO: 742990
aaucccaggcuaugaccca

SEQ ID NO: 742992 - RNA, 19 nt, Artificial Sequence
  Description of Artificial Sequence: Synthetic oligonucleotide
  Sense strand starting at position 3844 of SEQ ID NO: 586769
uauggugacucuuuaguuu

SEQ ID NO: 742993 - RNA, 19 nt, Artificial Sequence
  Description of Artificial Sequence: Synthetic oligonucleotide
  Antisense strand to SEQ ID NO: 742992
aaacuaaagagucaccaua

SEQ ID NO: 742994 - RNA, 19 nt, Artificial Sequence
  Description of Artificial Sequence: Synthetic oligonucleotide
  Sense strand starting at position 3912 of SEQ ID NO: 586769
uauacugagguuugaauca

SEQ ID NO: 742995 - RNA, 19 nt, Artificial Sequence
  Description of Artificial Sequence: Synthetic oligonucleotide
  Antisense strand to SEQ ID NO: 742994
ugauucaaaccucaguaua

SEQ ID NO: 742996 - RNA, 19 nt, Artificial Sequence
  Description of Artificial Sequence: Synthetic oligonucleotide
  Sense strand starting at position 3917 of SEQ ID NO: 586769
ugagguuugaaucauugua

SEQ ID NO: 742997 - RNA, 19 nt, Artificial Sequence
  Description of Artificial Sequence: Synthetic oligonucleotide
  Antisense strand to SEQ ID NO: 742996
uacaaugauucaaaccuca

SEQ ID NO: 742998 - RNA, 19 nt, Artificial Sequence
  Description of Artificial Sequence: Synthetic oligonucleotide
  Sense strand starting at position 3919 of SEQ ID NO: 586769
agguuugaaucauuguaau

SEQ ID NO: 742999 - RNA, 19 nt, Artificial Sequence
  Description of Artificial Sequence: Synthetic oligonucleotide
  Antisense strand to SEQ ID NO: 742998
auuacaaugauucaaaccu

SEQ ID NO: 743000 - RNA, 19 nt, Artificial Sequence
  Description of Artificial Sequence: Synthetic oligonucleotide
  Sense strand starting at position 10 of SEQ ID NO: 586770
ugguuagacuuauucuuaa

SEQ ID NO: 743001 - RNA, 19 nt, Artificial Sequence
  Description of Artificial Sequence: Synthetic oligonucleotide
  Antisense strand to SEQ ID NO: 743000
uuaagaauaagucuaacca

SEQ ID NO: 743002 - RNA, 19 nt, Artificial Sequence
  Description of Artificial Sequence: Synthetic oligonucleotide
  Sense strand starting at position 55 of SEQ ID NO: 586770
cauuguccugguuaaguaa

SEQ ID NO: 743003 - RNA, 19 nt, Artificial Sequence
  Description of Artificial Sequence: Synthetic oligonucleotide
  Antisense strand to SEQ ID NO: 743002
uuacuuaaccaggacaaug

SEQ ID NO: 743004 - RNA, 19 nt, Artificial Sequence
  Description of Artificial Sequence: Synthetic oligonucleotide
  Sense strand starting at position 98 of SEQ ID NO: 586770
uggguaugagucuaacauu

SEQ ID NO: 743005 - RNA, 19 nt, Artificial Sequence
  Description of Artificial Sequence: Synthetic oligonucleotide
  Antisense strand to SEQ ID NO: 743004
aauguuagacucauaccca

SEQ ID NO: 743006 - RNA, 19 nt, Artificial Sequence
  Description of Artificial Sequence: Synthetic oligonucleotide
  Sense strand starting at position 190 of SEQ ID NO: 586770
agguuaucucuauaaagua

SEQ ID NO: 743007 - RNA, 19 nt, Artificial Sequence
  Description of Artificial Sequence: Synthetic oligonucleotide
  Antisense strand to SEQ ID NO: 743006
uacuuuauagagauaaccu

SEQ ID NO: 743008 - RNA, 19 nt, Artificial Sequence
  Description of Artificial Sequence: Synthetic oligonucleotide
  Sense strand starting at position 369 of SEQ ID NO: 586770
aagagcaugugcuuauuua

SEQ ID NO: 743009 - RNA, 19 nt, Artificial Sequence
  Description of Artificial Sequence: Synthetic oligonucleotide
  Antisense strand to SEQ ID NO: 743008
uaaauaagcacaugcucuu

SEQ ID NO: 743010 - RNA, 19 nt, Artificial Sequence
  Description of Artificial Sequence: Synthetic oligonucleotide
  Sense strand starting at position 373 of SEQ ID NO: 586770
gcaugugcuuauuuagaga

SEQ ID NO: 743011 - RNA, 19 nt, Artificial Sequence
  Description of Artificial Sequence: Synthetic oligonucleotide
  Antisense strand to SEQ ID NO: 743010
ucucuaaauaagcacaugc

SEQ ID NO: 743012 - RNA, 19 nt, Artificial Sequence
  Description of Artificial Sequence: Synthetic oligonucleotide
  Sense strand starting at position 613 of SEQ ID NO: 586770
gcuuauaagaaaggaagua

SEQ ID NO: 743013 - RNA, 19 nt, Artificial Sequence
  Description of Artificial Sequence: Synthetic oligonucleotide
  Antisense strand to SEQ ID NO: 743012
uacuuccuuucuuauaagc

SEQ ID NO: 743014 - RNA, 19 nt, Artificial Sequence
  Description of Artificial Sequence: Synthetic oligonucleotide
  Sense strand starting at position 671 of SEQ ID NO: 586770
agagguaucaauggguucu

SEQ ID NO: 743015 - RNA, 19 nt, Artificial Sequence
  Description of Artificial Sequence: Synthetic oligonucleotide
  Antisense strand to SEQ ID NO: 743014
agaacccauugauaccucu

SEQ ID NO: 743016 - RNA, 19 nt, Artificial Sequence
  Description of Artificial Sequence: Synthetic oligonucleotide
  Sense strand starting at position 732 of SEQ ID NO: 586770
auaugacuuuaucugguaa

SEQ ID NO: 743017 - RNA, 19 nt, Artificial Sequence
  Description of Artificial Sequence: Synthetic oligonucleotide
  Antisense strand to SEQ ID NO: 743016
uuaccagauaaagucauau

SEQ ID NO: 743018 - RNA, 19 nt, Artificial Sequence
  Description of Artificial Sequence: Synthetic oligonucleotide
  Sense strand starting at position 940 of SEQ ID NO: 586770
aaaggaaugcuuugcagag

SEQ ID NO: 743019 - RNA, 19 nt, Artificial Sequence
  Description of Artificial Sequence: Synthetic oligonucleotide
  Antisense strand to SEQ ID NO: 743018
cucugcaaagcauuccuuu

SEQ ID NO: 743020 - RNA, 19 nt, Artificial Sequence
  Description of Artificial Sequence: Synthetic oligonucleotide
  Sense strand starting at position 1045 of SEQ ID NO: 586770
gggagagucaaaugucaca

SEQ ID NO: 743021 - RNA, 19 nt, Artificial Sequence
  Description of Artificial Sequence: Synthetic oligonucleotide
  Antisense strand to SEQ ID NO: 743020
ugugacauuugacucuccc

SEQ ID NO: 743022 - RNA, 19 nt, Artificial Sequence
  Description of Artificial Sequence: Synthetic oligonucleotide
  Sense strand starting at position 1063 of SEQ ID NO: 586770
accaguuaggaaugacuuu

SEQ ID NO: 743023 - RNA, 19 nt, Artificial Sequence
  Description of Artificial Sequence: Synthetic oligonucleotide
  Antisense strand to SEQ ID NO: 743022
aaagucauuccuaacuggu

SEQ ID NO: 743024 - RNA, 19 nt, Artificial Sequence
  Description of Artificial Sequence: Synthetic oligonucleotide
  Sense strand starting at position 1505 of SEQ ID NO: 586770
gcagucuuaggaugagaac

SEQ ID NO: 743025 - RNA, 19 nt, Artificial Sequence
  Description of Artificial Sequence: Synthetic oligonucleotide
  Antisense strand to SEQ ID NO: 743024
guucucauccuaagacugc

SEQ ID NO: 743026 - RNA, 19 nt, Artificial Sequence
  Description of Artificial Sequence: Synthetic oligonucleotide
  Sense strand starting at position 1634 of SEQ ID NO: 586770
cguaacgaucguaggacau

SEQ ID NO: 743027 - RNA, 19 nt, Artificial Sequence
  Description of Artificial Sequence: Synthetic oligonucleotide
  Antisense strand to SEQ ID NO: 743026
auguccuacgaucguuacg

SEQ ID NO: 743028 - RNA, 19 nt, Artificial Sequence
  Description of Artificial Sequence: Synthetic oligonucleotide
  Sense strand starting at position 2027 of SEQ ID NO: 586770
uuaggaccagauugucaaa

SEQ ID NO: 743029 - RNA, 19 nt, Artificial Sequence
  Description of Artificial Sequence: Synthetic oligonucleotide
  Antisense strand to SEQ ID NO: 743028
uuugacaaucugguccuaa

SEQ ID NO: 743030 - RNA, 19 nt, Artificial Sequence
  Description of Artificial Sequence: Synthetic oligonucleotide
  Sense strand starting at position 2099 of SEQ ID NO: 586770
aacauuagugauugagcua

SEQ ID NO: 743031 - RNA, 19 nt, Artificial Sequence
  Description of Artificial Sequence: Synthetic oligonucleotide
  Antisense strand to SEQ ID NO: 743030
uagcucaaucacuaauguu

SEQ ID NO: 743032 - RNA, 19 nt, Artificial Sequence
  Description of Artificial Sequence: Synthetic oligonucleotide
  Sense strand starting at position 2106 of SEQ ID NO: 586770
gugauugagcuacacauua

SEQ ID NO: 743033 - RNA, 19 nt, Artificial Sequence
  Description of Artificial Sequence: Synthetic oligonucleotide
  Antisense strand to SEQ ID NO: 743032
uaauguguagcucaaucac

SEQ ID NO: 743034 - RNA, 19 nt, Artificial Sequence
  Description of Artificial Sequence: Synthetic oligonucleotide
  Sense strand starting at position 2111 of SEQ ID NO: 586770
ugagcuacacauuaaguua

SEQ ID NO: 743035 - RNA, 19 nt, Artificial Sequence
  Description of Artificial Sequence: Synthetic oligonucleotide
  Antisense strand to SEQ ID NO: 743034
uaacuuaauguguagcuca

SEQ ID NO: 743036 - RNA, 19 nt, Artificial Sequence
  Description of Artificial Sequence: Synthetic oligonucleotide
  Sense strand starting at position 2126 of SEQ ID NO: 586770
guuaauuacugauuguaag

SEQ ID NO: 743037 - RNA, 19 nt, Artificial Sequence
  Description of Artificial Sequence: Synthetic oligonucleotide
  Antisense strand to SEQ ID NO: 743036
cuuacaaucaguaauuaac

SEQ ID NO: 743038 - RNA, 19 nt, Artificial Sequence
  Description of Artificial Sequence: Synthetic oligonucleotide
  Sense strand starting at position 2155 of SEQ ID NO: 586770
uauagaagggauuguguca

SEQ ID NO: 743039 - RNA, 19 nt, Artificial Sequence
  Description of Artificial Sequence: Synthetic oligonucleotide
  Antisense strand to SEQ ID NO: 743038
ugacacaaucccuucuaua

SEQ ID NO: 743040 - RNA, 19 nt, Artificial Sequence
  Description of Artificial Sequence: Synthetic oligonucleotide
  Sense strand starting at position 2162 of SEQ ID NO: 586770
gggauugugucaccaauga

SEQ ID NO: 743041 - RNA, 19 nt, Artificial Sequence
  Description of Artificial Sequence: Synthetic oligonucleotide
  Antisense strand to SEQ ID NO: 743040
ucauuggugacacaauccc

SEQ ID NO: 743042 - RNA, 19 nt, Artificial Sequence
  Description of Artificial Sequence: Synthetic oligonucleotide
  Sense strand starting at position 2293 of SEQ ID NO: 586770
cuaagagaauuccugaagu

SEQ ID NO: 743043 - RNA, 19 nt, Artificial Sequence
  Description of Artificial Sequence: Synthetic oligonucleotide
  Antisense strand to SEQ ID NO: 743042
acuucaggaauucucuuag

SEQ ID NO: 743044 - RNA, 19 nt, Artificial Sequence
  Description of Artificial Sequence: Synthetic oligonucleotide
  Sense strand starting at position 2349 of SEQ ID NO: 586770
gaauuagaguaguccuaga

SEQ ID NO: 743045 - RNA, 19 nt, Artificial Sequence
  Description of Artificial Sequence: Synthetic oligonucleotide
  Antisense strand to SEQ ID NO: 743044
ucuaggacuacucuaauuc

SEQ ID NO: 743046 - RNA, 19 nt, Artificial Sequence
  Description of Artificial Sequence: Synthetic oligonucleotide
  Sense strand starting at position 2386 of SEQ ID NO: 586770
ccaguuucucaguagaaau

SEQ ID NO: 743047 - RNA, 19 nt, Artificial Sequence
  Description of Artificial Sequence: Synthetic oligonucleotide
  Antisense strand to SEQ ID NO: 743046
auuucuacugagaaacugg

SEQ ID NO: 743048 - RNA, 19 nt, Artificial Sequence
  Description of Artificial Sequence: Synthetic oligonucleotide
  Sense strand starting at position 2388 of SEQ ID NO: 586770
aguuucucaguagaaauau

SEQ ID NO: 743049 - RNA, 19 nt, Artificial Sequence
  Description of Artificial Sequence: Synthetic oligonucleotide
  Antisense strand to SEQ ID NO: 743048
auauuucuacugagaaacu

SEQ ID NO: 743050 - RNA, 19 nt, Artificial Sequence
  Description of Artificial Sequence: Synthetic oligonucleotide
  Sense strand starting at position 2447 of SEQ ID NO: 586770
ucuggagcaguuuauauaa

SEQ ID NO: 743051 - RNA, 19 nt, Artificial Sequence
  Description of Artificial Sequence: Synthetic oligonucleotide
  Antisense strand to SEQ ID NO: 743050
uuauauaaacugcuccaga

SEQ ID NO: 743052 - RNA, 19 nt, Artificial Sequence
  Description of Artificial Sequence: Synthetic oligonucleotide
  Sense strand starting at position 2532 of SEQ ID NO: 586770
ggaacuaauggaugugcua

SEQ ID NO: 743053 - RNA, 19 nt, Artificial Sequence
  Description of Artificial Sequence: Synthetic oligonucleotide
  Antisense strand to SEQ ID NO: 743052
uagcacauccauuaguucc

SEQ ID NO: 743054 - RNA, 19 nt, Artificial Sequence
  Description of Artificial Sequence: Synthetic oligonucleotide
  Sense strand starting at position 2840 of SEQ ID NO: 586770
auccauuuguguuuaagua

SEQ ID NO: 743055 - RNA, 19 nt, Artificial Sequence
  Description of Artificial Sequence: Synthetic oligonucleotide
  Antisense strand to SEQ ID NO: 743054
uacuuaaacacaaauggau

SEQ ID NO: 743056 - RNA, 19 nt, Artificial Sequence
  Description of Artificial Sequence: Synthetic oligonucleotide
  Sense strand starting at position 2992 of SEQ ID NO: 586770
uuuacagguggcuaauuaa

SEQ ID NO: 743057 - RNA, 19 nt, Artificial Sequence
  Description of Artificial Sequence: Synthetic oligonucleotide
  Antisense strand to SEQ ID NO: 743056
uuaauuagccaccuguaaa

SEQ ID NO: 743058 - RNA, 19 nt, Artificial Sequence
  Description of Artificial Sequence: Synthetic oligonucleotide
  Sense strand starting at position 3203 of SEQ ID NO: 586770
uuuguuagugccuuugcua

SEQ ID NO: 743059 - RNA, 19 nt, Artificial Sequence
  Description of Artificial Sequence: Synthetic oligonucleotide
  Antisense strand to SEQ ID NO: 743058
uagcaaaggcacuaacaaa

SEQ ID NO: 743060 - RNA, 19 nt, Artificial Sequence
  Description of Artificial Sequence: Synthetic oligonucleotide
  Sense strand starting at position 3375 of SEQ ID NO: 586770
cuaaauguccaccaacgau

SEQ ID NO: 743061 - RNA, 19 nt, Artificial Sequence
  Description of Artificial Sequence: Synthetic oligonucleotide
  Antisense strand to SEQ ID NO: 743060
aucguugguggacauuuag

SEQ ID NO: 743062 - RNA, 19 nt, Artificial Sequence
  Description of Artificial Sequence: Synthetic oligonucleotide
  Sense strand starting at position 3457 of SEQ ID NO: 586770
augagaucuuauccuuuga

SEQ ID NO: 743063 - RNA, 19 nt, Artificial Sequence
  Description of Artificial Sequence: Synthetic oligonucleotide
  Antisense strand to SEQ ID NO: 743062
ucaaaggauaagaucucau

SEQ ID NO: 743064 - RNA, 19 nt, Artificial Sequence
  Description of Artificial Sequence: Synthetic oligonucleotide
  Sense strand starting at position 3459 of SEQ ID NO: 586770
gagaucuuauccuuugaug

SEQ ID NO: 743065 - RNA, 19 nt, Artificial Sequence
  Description of Artificial Sequence: Synthetic oligonucleotide
  Antisense strand to SEQ ID NO: 743064
caucaaaggauaagaucuc

SEQ ID NO: 743066 - RNA, 19 nt, Artificial Sequence
  Description of Artificial Sequence: Synthetic oligonucleotide
  Sense strand starting at position 3461 of SEQ ID NO: 586770
gaucuuauccuuugaugga

SEQ ID NO: 743067 - RNA, 19 nt, Artificial Sequence
  Description of Artificial Sequence: Synthetic oligonucleotide
  Antisense strand to SEQ ID NO: 743066
uccaucaaaggauaagauc

SEQ ID NO: 743068 - RNA, 19 nt, Artificial Sequence
  Description of Artificial Sequence: Synthetic oligonucleotide
  Sense strand starting at position 3617 of SEQ ID NO: 586770
gggccuaucacaggguaaa

SEQ ID NO: 743069 - RNA, 19 nt, Artificial Sequence
  Description of Artificial Sequence: Synthetic oligonucleotide
  Antisense strand to SEQ ID NO: 743068
uuuacccugugauaggccc

SEQ ID NO: 743070 - RNA, 19 nt, Artificial Sequence
  Description of Artificial Sequence: Synthetic oligonucleotide
  Sense strand starting at position 3618 of SEQ ID NO: 586770
ggccuaucacaggguaaag

SEQ ID NO: 743071 - RNA, 19 nt, Artificial Sequence
  Description of Artificial Sequence: Synthetic oligonucleotide
  Antisense strand to SEQ ID NO: 743070
cuuuacccugugauaggcc

SEQ ID NO: 743072 - RNA, 19 nt, Artificial Sequence
  Description of Artificial Sequence: Synthetic oligonucleotide
  Sense strand starting at position 3856 of SEQ ID NO: 586770
gugguaacaaaugauugua

SEQ ID NO: 743073 - RNA, 19 nt, Artificial Sequence
  Description of Artificial Sequence: Synthetic oligonucleotide
  Antisense strand to SEQ ID NO: 743072
uacaaucauuuguuaccac

SEQ ID NO: 743074 - RNA, 19 nt, Artificial Sequence
  Description of Artificial Sequence: Synthetic oligonucleotide
  Sense strand starting at position 3858 of SEQ ID NO: 586770
gguaacaaaugauuguaua

SEQ ID NO: 743075 - RNA, 19 nt, Artificial Sequence
  Description of Artificial Sequence: Synthetic oligonucleotide
  Antisense strand to SEQ ID NO: 743074
uauacaaucauuuguuacc

SEQ ID NO: 743076 - RNA, 19 nt, Artificial Sequence
  Description of Artificial Sequence: Synthetic oligonucleotide
  Sense strand starting at position 3859 of SEQ ID NO: 586770
guaacaaaugauuguauac

SEQ ID NO: 743077 - RNA, 19 nt, Artificial Sequence
  Description of Artificial Sequence: Synthetic oligonucleotide
  Antisense strand to SEQ ID NO: 743076
guauacaaucauuuguuac

SEQ ID NO: 743078 - RNA, 19 nt, Artificial Sequence
  Description of Artificial Sequence: Synthetic oligonucleotide
  Sense strand starting at position 3902 of SEQ ID NO: 586770
ugauuauuaucagcaagac

SEQ ID NO: 743079 - RNA, 19 nt, Artificial Sequence
  Description of Artificial Sequence: Synthetic oligonucleotide
  Antisense strand to SEQ ID NO: 743078
gucuugcugauaauaauca

SEQ ID NO: 743080 - RNA, 19 nt, Artificial Sequence
  Description of Artificial Sequence: Synthetic oligonucleotide
  Sense strand starting at position 11 of SEQ ID NO: 586771
ugguuagacuuauucuuaa

SEQ ID NO: 743081 - RNA, 19 nt, Artificial Sequence
  Description of Artificial Sequence: Synthetic oligonucleotide
  Antisense strand to SEQ ID NO: 743080
uuaagaauaagucuaacca

SEQ ID NO: 743082 - RNA, 19 nt, Artificial Sequence
  Description of Artificial Sequence: Synthetic oligonucleotide
  Sense strand starting at position 56 of SEQ ID NO: 586771
cauuguccugguuaaguaa

SEQ ID NO: 743083 - RNA, 19 nt, Artificial Sequence
  Description of Artificial Sequence: Synthetic oligonucleotide
  Antisense strand to SEQ ID NO: 743082
uuacuuaaccaggacaaug

SEQ ID NO: 743084 - RNA, 19 nt, Artificial Sequence
  Description of Artificial Sequence: Synthetic oligonucleotide
  Sense strand starting at position 99 of SEQ ID NO: 586771
uggguaugagucuaacauu

SEQ ID NO: 743085 - RNA, 19 nt, Artificial Sequence
  Description of Artificial Sequence: Synthetic oligonucleotide
  Antisense strand to SEQ ID NO: 743084
aauguuagacucauaccca

SEQ ID NO: 743086 - RNA, 19 nt, Artificial Sequence
  Description of Artificial Sequence: Synthetic oligonucleotide
  Sense strand starting at position 160 of SEQ ID NO: 586771
ugggaaaugaauuggcuau

SEQ ID NO: 743087 - RNA, 19 nt, Artificial Sequence
  Description of Artificial Sequence: Synthetic oligonucleotide
  Antisense strand to SEQ ID NO: 743086
auagccaauucauuuccca

SEQ ID NO: 743088 - RNA, 19 nt, Artificial Sequence
  Description of Artificial Sequence: Synthetic oligonucleotide
  Sense strand starting at position 191 of SEQ ID NO: 586771
agguuaucucuauaaagua

SEQ ID NO: 743089 - RNA, 19 nt, Artificial Sequence
  Description of Artificial Sequence: Synthetic oligonucleotide
  Antisense strand to SEQ ID NO: 743088
uacuuuauagagauaaccu

SEQ ID NO: 743090 - RNA, 19 nt, Artificial Sequence
  Description of Artificial Sequence: Synthetic oligonucleotide
  Sense strand starting at position 224 of SEQ ID NO: 586771
guggauggugcagaguaau

SEQ ID NO: 743091 - RNA, 19 nt, Artificial Sequence
  Description of Artificial Sequence: Synthetic oligonucleotide
  Antisense strand to SEQ ID NO: 743090
auuacucugcaccauccac

SEQ ID NO: 743092 - RNA, 19 nt, Artificial Sequence
  Description of Artificial Sequence: Synthetic oligonucleotide
  Sense strand starting at position 370 of SEQ ID NO: 586771
aagagcaugugcuuauuua

SEQ ID NO: 743093 - RNA, 19 nt, Artificial Sequence
  Description of Artificial Sequence: Synthetic oligonucleotide
  Antisense strand to SEQ ID NO: 743092
uaaauaagcacaugcucuu

SEQ ID NO: 743094 - RNA, 19 nt, Artificial Sequence
  Description of Artificial Sequence: Synthetic oligonucleotide
  Sense strand starting at position 374 of SEQ ID NO: 586771
gcaugugcuuauuuagaga

SEQ ID NO: 743095 - RNA, 19 nt, Artificial Sequence
  Description of Artificial Sequence: Synthetic oligonucleotide
  Antisense strand to SEQ ID NO: 743094
ucucuaaauaagcacaugc

SEQ ID NO: 743096 - RNA, 19 nt, Artificial Sequence
  Description of Artificial Sequence: Synthetic oligonucleotide
  Sense strand starting at position 614 of SEQ ID NO: 586771
gcuuauaagaaaggaagua

SEQ ID NO: 743097 - RNA, 19 nt, Artificial Sequence
  Description of Artificial Sequence: Synthetic oligonucleotide
  Antisense strand to SEQ ID NO: 743096
uacuuccuuucuuauaagc

SEQ ID NO: 743098 - RNA, 19 nt, Artificial Sequence
  Description of Artificial Sequence: Synthetic oligonucleotide
  Sense strand starting at position 672 of SEQ ID NO: 586771
agagguaucaauggguucu

SEQ ID NO: 743099 - RNA, 19 nt, Artificial Sequence
  Description of Artificial Sequence: Synthetic oligonucleotide
  Antisense strand to SEQ ID NO: 743098
agaacccauugauaccucu

SEQ ID NO: 743100 - RNA, 19 nt, Artificial Sequence
  Description of Artificial Sequence: Synthetic oligonucleotide
  Sense strand starting at position 733 of SEQ ID NO: 586771
auaugacuuuaucugguaa

SEQ ID NO: 743101 - RNA, 19 nt, Artificial Sequence
  Description of Artificial Sequence: Synthetic oligonucleotide
  Antisense strand to SEQ ID NO: 743100
uuaccagauaaagucauau

SEQ ID NO: 743102 - RNA, 19 nt, Artificial Sequence
  Description of Artificial Sequence: Synthetic oligonucleotide
  Sense strand starting at position 941 of SEQ ID NO: 586771
aaaggaaugcuuugcagag

SEQ ID NO: 743103 - RNA, 19 nt, Artificial Sequence
  Description of Artificial Sequence: Synthetic oligonucleotide
  Antisense strand to SEQ ID NO: 743102
cucugcaaagcauuccuuu

SEQ ID NO: 743104 - RNA, 19 nt, Artificial Sequence
  Description of Artificial Sequence: Synthetic oligonucleotide
  Sense strand starting at position 1046 of SEQ ID NO: 586771
gggagagucaaaugucaca

SEQ ID NO: 743105 - RNA, 19 nt, Artificial Sequence
  Description of Artificial Sequence: Synthetic oligonucleotide
  Antisense strand to SEQ ID NO: 743104
ugugacauuugacucuccc

SEQ ID NO: 743106 - RNA, 19 nt, Artificial Sequence
  Description of Artificial Sequence: Synthetic oligonucleotide
  Sense strand starting at position 1064 of SEQ ID NO: 586771
accaguuaggaaugacuuu

SEQ ID NO: 743107 - RNA, 19 nt, Artificial Sequence
  Description of Artificial Sequence: Synthetic oligonucleotide
  Antisense strand to SEQ ID NO: 743106
aaagucauuccuaacuggu

SEQ ID NO: 743108 - RNA, 19 nt, Artificial Sequence
  Description of Artificial Sequence: Synthetic oligonucleotide
  Sense strand starting at position 2100 of SEQ ID NO: 586771
aacauuagugauugagcua

SEQ ID NO: 743109 - RNA, 19 nt, Artificial Sequence
  Description of Artificial Sequence: Synthetic oligonucleotide
  Antisense strand to SEQ ID NO: 743108
uagcucaaucacuaauguu

SEQ ID NO: 743110 - RNA, 19 nt, Artificial Sequence
  Description of Artificial Sequence: Synthetic oligonucleotide
  Sense strand starting at position 2107 of SEQ ID NO: 586771
gugauugagcuacacauua

SEQ ID NO: 743111 - RNA, 19 nt, Artificial Sequence
  Description of Artificial Sequence: Synthetic oligonucleotide
  Antisense strand to SEQ ID NO: 743110
uaauguguagcucaaucac

SEQ ID NO: 743112 - RNA, 19 nt, Artificial Sequence
  Description of Artificial Sequence: Synthetic oligonucleotide
  Sense strand starting at position 2112 of SEQ ID NO: 586771
ugagcuacacauuaaguua

SEQ ID NO: 743113 - RNA, 19 nt, Artificial Sequence
  Description of Artificial Sequence: Synthetic oligonucleotide
  Antisense strand to SEQ ID NO: 743112
uaacuuaauguguagcuca

SEQ ID NO: 743114 - RNA, 19 nt, Artificial Sequence
  Description of Artificial Sequence: Synthetic oligonucleotide
  Sense strand starting at position 2168 of SEQ ID NO: 586771
ugugucaccagugauagga

SEQ ID NO: 743115 - RNA, 19 nt, Artificial Sequence
  Description of Artificial Sequence: Synthetic oligonucleotide
  Antisense strand to SEQ ID NO: 743114
uccuaucacuggugacaca

SEQ ID NO: 743116 - RNA, 19 nt, Artificial Sequence
  Description of Artificial Sequence: Synthetic oligonucleotide
  Sense strand starting at position 2294 of SEQ ID NO: 586771
cuaagagaauuccugaagu

SEQ ID NO: 743117 - RNA, 19 nt, Artificial Sequence
  Description of Artificial Sequence: Synthetic oligonucleotide
  Antisense strand to SEQ ID NO: 743116
acuucaggaauucucuuag

SEQ ID NO: 743118 - RNA, 19 nt, Artificial Sequence
  Description of Artificial Sequence: Synthetic oligonucleotide
  Sense strand starting at position 2350 of SEQ ID NO: 586771
gaauuagaguaguccuaga

SEQ ID NO: 743119 - RNA, 19 nt, Artificial Sequence
  Description of Artificial Sequence: Synthetic oligonucleotide
  Antisense strand to SEQ ID NO: 743118
ucuaggacuacucuaauuc

SEQ ID NO: 743120 - RNA, 19 nt, Artificial Sequence
  Description of Artificial Sequence: Synthetic oligonucleotide
  Sense strand starting at position 2386 of SEQ ID NO: 586771
cccaguuucucaguagaaa

SEQ ID NO: 743121 - RNA, 19 nt, Artificial Sequence
  Description of Artificial Sequence: Synthetic oligonucleotide
  Antisense strand to SEQ ID NO: 743120
uuucuacugagaaacuggg

SEQ ID NO: 743122 - RNA, 19 nt, Artificial Sequence
  Description of Artificial Sequence: Synthetic oligonucleotide
  Sense strand starting at position 2387 of SEQ ID NO: 586771
ccaguuucucaguagaaau

SEQ ID NO: 743123 - RNA, 19 nt, Artificial Sequence
  Description of Artificial Sequence: Synthetic oligonucleotide
  Antisense strand to SEQ ID NO: 743122
auuucuacugagaaacugg

SEQ ID NO: 743124 - RNA, 19 nt, Artificial Sequence
  Description of Artificial Sequence: Synthetic oligonucleotide
  Sense strand starting at position 2389 of SEQ ID NO: 586771
aguuucucaguagaaauau

SEQ ID NO: 743125 - RNA, 19 nt, Artificial Sequence
  Description of Artificial Sequence: Synthetic oligonucleotide
  Antisense strand to SEQ ID NO: 743124
auauuucuacugagaaacu

SEQ ID NO: 743126 - RNA, 19 nt, Artificial Sequence
  Description of Artificial Sequence: Synthetic oligonucleotide
  Sense strand starting at position 2448 of SEQ ID NO: 586771
ucuggagcaguuuauauaa

SEQ ID NO: 743127 - RNA, 19 nt, Artificial Sequence
  Description of Artificial Sequence: Synthetic oligonucleotide
  Antisense strand to SEQ ID NO: 743126
uuauauaaacugcuccaga

SEQ ID NO: 743128 - RNA, 19 nt, Artificial Sequence
  Description of Artificial Sequence: Synthetic oligonucleotide
  Sense strand starting at position 2533 of SEQ ID NO: 586771
ggaacuaauggaugugcua

SEQ ID NO: 743129 - RNA, 19 nt, Artificial Sequence
  Description of Artificial Sequence: Synthetic oligonucleotide
  Antisense strand to SEQ ID NO: 743128
uagcacauccauuaguucc

SEQ ID NO: 743130 - RNA, 19 nt, Artificial Sequence
  Description of Artificial Sequence: Synthetic oligonucleotide
  Sense strand starting at position 2841 of SEQ ID NO: 586771
auccauuuguguuuaagua

SEQ ID NO: 743131 - RNA, 19 nt, Artificial Sequence
  Description of Artificial Sequence: Synthetic oligonucleotide
  Antisense strand to SEQ ID NO: 743130
uacuuaaacacaaauggau

SEQ ID NO: 743132 - RNA, 19 nt, Artificial Sequence
  Description of Artificial Sequence: Synthetic oligonucleotide
  Sense strand starting at position 2993 of SEQ ID NO: 586771
uuuacagguggcuaauuaa

SEQ ID NO: 743133 - RNA, 19 nt, Artificial Sequence
  Description of Artificial Sequence: Synthetic oligonucleotide
  Antisense strand to SEQ ID NO: 743132
uuaauuagccaccuguaaa

SEQ ID NO: 743134 - RNA, 19 nt, Artificial Sequence
  Description of Artificial Sequence: Synthetic oligonucleotide
  Sense strand starting at position 3204 of SEQ ID NO: 586771
uuuguuagugccuuugcua

SEQ ID NO: 743135 - RNA, 19 nt, Artificial Sequence
  Description of Artificial Sequence: Synthetic oligonucleotide
  Antisense strand to SEQ ID NO: 743134
uagcaaaggcacuaacaaa

SEQ ID NO: 743136 - RNA, 19 nt, Artificial Sequence
  Description of Artificial Sequence: Synthetic oligonucleotide
  Sense strand starting at position 3253 of SEQ ID NO: 586771
accugcuuaucucugaaga

SEQ ID NO: 743137 - RNA, 19 nt, Artificial Sequence
  Description of Artificial Sequence: Synthetic oligonucleotide
  Antisense strand to SEQ ID NO: 743136
ucuucagagauaagcaggu

SEQ ID NO: 743138 - RNA, 19 nt, Artificial Sequence
  Description of Artificial Sequence: Synthetic oligonucleotide
  Sense strand starting at position 3376 of SEQ ID NO: 586771
cuaaauguccaccaacgau

SEQ ID NO: 743139 - RNA, 19 nt, Artificial Sequence
  Description of Artificial Sequence: Synthetic oligonucleotide
  Antisense strand to SEQ ID NO: 743138
aucguugguggacauuuag

SEQ ID NO: 743140 - RNA, 19 nt, Artificial Sequence
  Description of Artificial Sequence: Synthetic oligonucleotide
  Sense strand starting at position 3458 of SEQ ID NO: 586771
augagaucuuguccuuuga

SEQ ID NO: 743141 - RNA, 19 nt, Artificial Sequence
  Description of Artificial Sequence: Synthetic oligonucleotide
  Antisense strand to SEQ ID NO: 743140
ucaaaggacaagaucucau

SEQ ID NO: 743142 - RNA, 19 nt, Artificial Sequence
  Description of Artificial Sequence: Synthetic oligonucleotide
  Sense strand starting at position 3460 of SEQ ID NO: 586771
gagaucuuguccuuugaug

SEQ ID NO: 743143 - RNA, 19 nt, Artificial Sequence
  Description of Artificial Sequence: Synthetic oligonucleotide
  Antisense strand to SEQ ID NO: 743142
caucaaaggacaagaucuc

SEQ ID NO: 743144 - RNA, 19 nt, Artificial Sequence
  Description of Artificial Sequence: Synthetic oligonucleotide
  Sense strand starting at position 3462 of SEQ ID NO: 586771
gaucuuguccuuugaugga

SEQ ID NO: 743145 - RNA, 19 nt, Artificial Sequence
  Description of Artificial Sequence: Synthetic oligonucleotide
  Antisense strand to SEQ ID NO: 743144
uccaucaaaggacaagauc

SEQ ID NO: 743146 - RNA, 19 nt, Artificial Sequence
  Description of Artificial Sequence: Synthetic oligonucleotide
  Sense strand starting at position 3618 of SEQ ID NO: 586771
gggccuaucacaggguaaa

SEQ ID NO: 743147 - RNA, 19 nt, Artificial Sequence
  Description of Artificial Sequence: Synthetic oligonucleotide
  Antisense strand to SEQ ID NO: 743146
uuuacccugugauaggccc

SEQ ID NO: 743148 - RNA, 19 nt, Artificial Sequence
  Description of Artificial Sequence: Synthetic oligonucleotide
  Sense strand starting at position 3619 of SEQ ID NO: 586771
ggccuaucacaggguaaag

SEQ ID NO: 743149 - RNA, 19 nt, Artificial Sequence
  Description of Artificial Sequence: Synthetic oligonucleotide
  Antisense strand to SEQ ID NO: 743148
cuuuacccugugauaggcc

SEQ ID NO: 743150 - RNA, 19 nt, Artificial Sequence
  Description of Artificial Sequence: Synthetic oligonucleotide
  Sense strand starting at position 3856 of SEQ ID NO: 586771
agugguaacaaaugauugu

SEQ ID NO: 743151 - RNA, 19 nt, Artificial Sequence
  Description of Artificial Sequence: Synthetic oligonucleotide
  Antisense strand to SEQ ID NO: 743150
acaaucauuuguuaccacu

SEQ ID NO: 743152 - RNA, 19 nt, Artificial Sequence
  Description of Artificial Sequence: Synthetic oligonucleotide
  Sense strand starting at position 3857 of SEQ ID NO: 586771
gugguaacaaaugauugua

SEQ ID NO: 743153 - RNA, 19 nt, Artificial Sequence
  Description of Artificial Sequence: Synthetic oligonucleotide
  Antisense strand to SEQ ID NO: 743152
uacaaucauuuguuaccac

SEQ ID NO: 743154 - RNA, 19 nt, Artificial Sequence
  Description of Artificial Sequence: Synthetic oligonucleotide
  Sense strand starting at position 3859 of SEQ ID NO: 586771
gguaacaaaugauuguaua

SEQ ID NO: 743155 - RNA, 19 nt, Artificial Sequence
  Description of Artificial Sequence: Synthetic oligonucleotide
  Antisense strand to SEQ ID NO: 743154
uauacaaucauuuguuacc

SEQ ID NO: 743156 - RNA, 19 nt, Artificial Sequence
  Description of Artificial Sequence: Synthetic oligonucleotide
  Sense strand starting at position 3860 of SEQ ID NO: 586771
guaacaaaugauuguauac

SEQ ID NO: 743157 - RNA, 19 nt, Artificial Sequence
  Description of Artificial Sequence: Synthetic oligonucleotide
  Antisense strand to SEQ ID NO: 743156
guauacaaucauuuguuac

SEQ ID NO: 743158 - RNA, 19 nt, Artificial Sequence
  Description of Artificial Sequence: Synthetic oligonucleotide
  Sense strand starting at position 3903 of SEQ ID NO: 586771
ugauuauuaucagcaagac

SEQ ID NO: 743159 - RNA, 19 nt, Artificial Sequence
  Description of Artificial Sequence: Synthetic oligonucleotide
  Antisense strand to SEQ ID NO: 743158
gucuugcugauaauaauca

SEQ ID NO: 743160 - RNA, 19 nt, Artificial Sequence
  Description of Artificial Sequence: Synthetic oligonucleotide
  Sense strand starting at position 136 of SEQ ID NO: 586772
ggaauagcuucucuuugga

SEQ ID NO: 743161 - RNA, 19 nt, Artificial Sequence
  Description of Artificial Sequence: Synthetic oligonucleotide
  Antisense strand to SEQ ID NO: 743160
uccaaagagaagcuauucc

SEQ ID NO: 743162 - RNA, 19 nt, Artificial Sequence
  Description of Artificial Sequence: Synthetic oligonucleotide
  Sense strand starting at position 297 of SEQ ID NO: 586772
auguaaucaccguaaugau

SEQ ID NO: 743163 - RNA, 19 nt, Artificial Sequence
  Description of Artificial Sequence: Synthetic oligonucleotide
  Antisense strand to SEQ ID NO: 743162
aucauuacggugauuacau

SEQ ID NO: 743164 - RNA, 19 nt, Artificial Sequence
  Description of Artificial Sequence: Synthetic oligonucleotide
  Sense strand starting at position 436 of SEQ ID NO: 586772
ugcagaauuaagugaaaug

SEQ ID NO: 743165 - RNA, 19 nt, Artificial Sequence
  Description of Artificial Sequence: Synthetic oligonucleotide
  Antisense strand to SEQ ID NO: 743164
cauuucacuuaauucugca

SEQ ID NO: 743166 - RNA, 19 nt, Artificial Sequence
  Description of Artificial Sequence: Synthetic oligonucleotide
  Sense strand starting at position 538 of SEQ ID NO: 586772
uagggugauuuagaugaac

SEQ ID NO: 743167 - RNA, 19 nt, Artificial Sequence
  Description of Artificial Sequence: Synthetic oligonucleotide
  Antisense strand to SEQ ID NO: 743166
guucaucuaaaucacccua

SEQ ID NO: 743168 - RNA, 19 nt, Artificial Sequence
  Description of Artificial Sequence: Synthetic oligonucleotide
  Sense strand starting at position 660 of SEQ ID NO: 586772
gucaguauuuauucugugu

SEQ ID NO: 743169 - RNA, 19 nt, Artificial Sequence
  Description of Artificial Sequence: Synthetic oligonucleotide
  Antisense strand to SEQ ID NO: 743168
acacagaauaaauacugac

SEQ ID NO: 743170 - RNA, 19 nt, Artificial Sequence
  Description of Artificial Sequence: Synthetic oligonucleotide
  Sense strand starting at position 664 of SEQ ID NO: 586772
guauuuauucugugugauu

SEQ ID NO: 743171 - RNA, 19 nt, Artificial Sequence
  Description of Artificial Sequence: Synthetic oligonucleotide
  Antisense strand to SEQ ID NO: 743170
aaucacacagaauaaauac

SEQ ID NO: 743172 - RNA, 19 nt, Artificial Sequence
  Description of Artificial Sequence: Synthetic oligonucleotide
  Sense strand starting at position 669 of SEQ ID NO: 586772
uauucugugugauuacaag

SEQ ID NO: 743173 - RNA, 19 nt, Artificial Sequence
  Description of Artificial Sequence: Synthetic oligonucleotide
  Antisense strand to SEQ ID NO: 743172
cuuguaaucacacagaaua

SEQ ID NO: 743174 - RNA, 19 nt, Artificial Sequence
  Description of Artificial Sequence: Synthetic oligonucleotide
  Sense strand starting at position 701 of SEQ ID NO: 586772
uagcauaugguaugggauu

SEQ ID NO: 743175 - RNA, 19 nt, Artificial Sequence
  Description of Artificial Sequence: Synthetic oligonucleotide
  Antisense strand to SEQ ID NO: 743174
aaucccauaccauaugcua

SEQ ID NO: 743176 - RNA, 19 nt, Artificial Sequence
  Description of Artificial Sequence: Synthetic oligonucleotide
  Sense strand starting at position 715 of SEQ ID NO: 586772
ggauuaccagcauauacuu

SEQ ID NO: 743177 - RNA, 19 nt, Artificial Sequence
  Description of Artificial Sequence: Synthetic oligonucleotide
  Antisense strand to SEQ ID NO: 743176
aaguauaugcugguaaucc

SEQ ID NO: 743178 - RNA, 19 nt, Artificial Sequence
  Description of Artificial Sequence: Synthetic oligonucleotide
  Sense strand starting at position 892 of SEQ ID NO: 586772
ucugcaugugcuuugugau

SEQ ID NO: 743179 - RNA, 19 nt, Artificial Sequence
  Description of Artificial Sequence: Synthetic oligonucleotide
  Antisense strand to SEQ ID NO: 743178
aucacaaagcacaugcaga

SEQ ID NO: 743180 - RNA, 19 nt, Artificial Sequence
  Description of Artificial Sequence: Synthetic oligonucleotide
  Sense strand starting at position 2063 of SEQ ID NO: 586772
aaugcagauccggauuagu

SEQ ID NO: 743181 - RNA, 19 nt, Artificial Sequence
  Description of Artificial Sequence: Synthetic oligonucleotide
  Antisense strand to SEQ ID NO: 743180
acuaauccggaucugcauu

SEQ ID NO: 743182 - RNA, 19 nt, Artificial Sequence
  Description of Artificial Sequence: Synthetic oligonucleotide
  Sense strand starting at position 2123 of SEQ ID NO: 586772
ugacucagucagcaagguu

SEQ ID NO: 743183 - RNA, 19 nt, Artificial Sequence
  Description of Artificial Sequence: Synthetic oligonucleotide
  Antisense strand to SEQ ID NO: 743182
aaccuugcugacugaguca

SEQ ID NO: 743184 - RNA, 19 nt, Artificial Sequence
  Description of Artificial Sequence: Synthetic oligonucleotide
  Sense strand starting at position 2263 of SEQ ID NO: 586772
cuuaacuuggauugcaaga

SEQ ID NO: 743185 - RNA, 19 nt, Artificial Sequence
  Description of Artificial Sequence: Synthetic oligonucleotide
  Antisense strand to SEQ ID NO: 743184
ucuugcaauccaaguuaag

SEQ ID NO: 743186 - RNA, 19 nt, Artificial Sequence
  Description of Artificial Sequence: Synthetic oligonucleotide
  Sense strand starting at position 2454 of SEQ ID NO: 586772
uuuguaauuugugcagagu

SEQ ID NO: 743187 - RNA, 19 nt, Artificial Sequence
  Description of Artificial Sequence: Synthetic oligonucleotide
  Antisense strand to SEQ ID NO: 743186
acucugcacaaauuacaaa

SEQ ID NO: 743188 - RNA, 19 nt, Artificial Sequence
  Description of Artificial Sequence: Synthetic oligonucleotide
  Sense strand starting at position 2457 of SEQ ID NO: 586772
guaauuugugcagagugca

SEQ ID NO: 743189 - RNA, 19 nt, Artificial Sequence
  Description of Artificial Sequence: Synthetic oligonucleotide
  Antisense strand to SEQ ID NO: 743188
ugcacucugcacaaauuac

SEQ ID NO: 743190 - RNA, 19 nt, Artificial Sequence
  Description of Artificial Sequence: Synthetic oligonucleotide
  Sense strand starting at position 2673 of SEQ ID NO: 586772
ccaagaaaguuugccauca

SEQ ID NO: 743191 - RNA, 19 nt, Artificial Sequence
  Description of Artificial Sequence: Synthetic oligonucleotide
  Antisense strand to SEQ ID NO: 743190
ugauggcaaacuuucuugg

SEQ ID NO: 743192 - RNA, 19 nt, Artificial Sequence
  Description of Artificial Sequence: Synthetic oligonucleotide
  Sense strand starting at position 2736 of SEQ ID NO: 586772
agggcaagugguuaucuau

SEQ ID NO: 743193 - RNA, 19 nt, Artificial Sequence
  Description of Artificial Sequence: Synthetic oligonucleotide
  Antisense strand to SEQ ID NO: 743192
auagauaaccacuugcccu

SEQ ID NO: 743194 - RNA, 19 nt, Artificial Sequence
  Description of Artificial Sequence: Synthetic oligonucleotide
  Sense strand starting at position 2744 of SEQ ID NO: 586772
ugguuaucuaugugaagag

SEQ ID NO: 743195 - RNA, 19 nt, Artificial Sequence
  Description of Artificial Sequence: Synthetic oligonucleotide
  Antisense strand to SEQ ID NO: 743194
cucuucacauagauaacca

SEQ ID NO: 743196 - RNA, 19 nt, Artificial Sequence
  Description of Artificial Sequence: Synthetic oligonucleotide
  Sense strand starting at position 2858 of SEQ ID NO: 586772
acuacacuuguuggaugaa

SEQ ID NO: 743197 - RNA, 19 nt, Artificial Sequence
  Description of Artificial Sequence: Synthetic oligonucleotide
  Antisense strand to SEQ ID NO: 743196
uucauccaacaaguguagu

SEQ ID NO: 743198 - RNA, 19 nt, Artificial Sequence
  Description of Artificial Sequence: Synthetic oligonucleotide
  Sense strand starting at position 2861 of SEQ ID NO: 586772
acacuuguuggaugaauug

SEQ ID NO: 743199 - RNA, 19 nt, Artificial Sequence
  Description of Artificial Sequence: Synthetic oligonucleotide
  Antisense strand to SEQ ID NO: 743198
caauucauccaacaagugu

SEQ ID NO: 743200 - RNA, 19 nt, Artificial Sequence
  Description of Artificial Sequence: Synthetic oligonucleotide
  Sense strand starting at position 2898 of SEQ ID NO: 586772
ggacgaaugaaaggcauua

SEQ ID NO: 743201 - RNA, 19 nt, Artificial Sequence
  Description of Artificial Sequence: Synthetic oligonucleotide
  Antisense strand to SEQ ID NO: 743200
uaaugccuuucauucgucc

SEQ ID NO: 743202 - RNA, 19 nt, Artificial Sequence
  Description of Artificial Sequence: Synthetic oligonucleotide
  Sense strand starting at position 2903 of SEQ ID NO: 586772
aaugaaaggcauuacguua

SEQ ID NO: 743203 - RNA, 19 nt, Artificial Sequence
  Description of Artificial Sequence: Synthetic oligonucleotide
  Antisense strand to SEQ ID NO: 743202
uaacguaaugccuuucauu

SEQ ID NO: 743204 - RNA, 19 nt, Artificial Sequence
  Description of Artificial Sequence: Synthetic oligonucleotide
  Sense strand starting at position 2908 of SEQ ID NO: 586772
aaggcauuacguuaggaau

SEQ ID NO: 743205 - RNA, 19 nt, Artificial Sequence
  Description of Artificial Sequence: Synthetic oligonucleotide
  Antisense strand to SEQ ID NO: 743204
auuccuaacguaaugccuu

SEQ ID NO: 743206 - RNA, 19 nt, Artificial Sequence
  Description of Artificial Sequence: Synthetic oligonucleotide
  Sense strand starting at position 2914 of SEQ ID NO: 586772
uuacguuaggaauaacauu

SEQ ID NO: 743207 - RNA, 19 nt, Artificial Sequence
  Description of Artificial Sequence: Synthetic oligonucleotide
  Antisense strand to SEQ ID NO: 743206
aauguuauuccuaacguaa

SEQ ID NO: 743208 - RNA, 19 nt, Artificial Sequence
  Description of Artificial Sequence: Synthetic oligonucleotide
  Sense strand starting at position 3131 of SEQ ID NO: 586772
ccaccuuuagcccaggaaa

SEQ ID NO: 743209 - RNA, 19 nt, Artificial Sequence
  Description of Artificial Sequence: Synthetic oligonucleotide
  Antisense strand to SEQ ID NO: 743208
uuuccugggcuaaaggugg

SEQ ID NO: 743210 - RNA, 19 nt, Artificial Sequence
  Description of Artificial Sequence: Synthetic oligonucleotide
  Sense strand starting at position 3133 of SEQ ID NO: 586772
accuuuagcccaggaaacu

SEQ ID NO: 743211 - RNA, 19 nt, Artificial Sequence
  Description of Artificial Sequence: Synthetic oligonucleotide
  Antisense strand to SEQ ID NO: 743210
aguuuccugggcuaaaggu

SEQ ID NO: 743212 - RNA, 19 nt, Artificial Sequence
  Description of Artificial Sequence: Synthetic oligonucleotide
  Sense strand starting at position 3142 of SEQ ID NO: 586772
ccaggaaacugucugccaa

SEQ ID NO: 743213 - RNA, 19 nt, Artificial Sequence
  Description of Artificial Sequence: Synthetic oligonucleotide
  Antisense strand to SEQ ID NO: 743212
uuggcagacaguuuccugg

SEQ ID NO: 743214 - RNA, 19 nt, Artificial Sequence
  Description of Artificial Sequence: Synthetic oligonucleotide
  Sense strand starting at position 3143 of SEQ ID NO: 586772
caggaaacugucugccaau

SEQ ID NO: 743215 - RNA, 19 nt, Artificial Sequence
  Description of Artificial Sequence: Synthetic oligonucleotide
  Antisense strand to SEQ ID NO: 743214
auuggcagacaguuuccug

SEQ ID NO: 743216 - RNA, 19 nt, Artificial Sequence
  Description of Artificial Sequence: Synthetic oligonucleotide
  Sense strand starting at position 3144 of SEQ ID NO: 586772
aggaaacugucugccaaua

SEQ ID NO: 743217 - RNA, 19 nt, Artificial Sequence
  Description of Artificial Sequence: Synthetic oligonucleotide
  Antisense strand to SEQ ID NO: 743216
uauuggcagacaguuuccu

SEQ ID NO: 743218 - RNA, 19 nt, Artificial Sequence
  Description of Artificial Sequence: Synthetic oligonucleotide
  Sense strand starting at position 3313 of SEQ ID NO: 586772
uagagaaauugugcagaga

SEQ ID NO: 743219 - RNA, 19 nt, Artificial Sequence
  Description of Artificial Sequence: Synthetic oligonucleotide
  Antisense strand to SEQ ID NO: 743218
ucucugcacaauuucucua

SEQ ID NO: 743220 - RNA, 19 nt, Artificial Sequence
  Description of Artificial Sequence: Synthetic oligonucleotide
  Sense strand starting at position 3516 of SEQ ID NO: 586772
cacggauugucccugagga

SEQ ID NO: 743221 - RNA, 19 nt, Artificial Sequence
  Description of Artificial Sequence: Synthetic oligonucleotide
  Antisense strand to SEQ ID NO: 743220
uccucagggacaauccgug

SEQ ID NO: 743222 - RNA, 19 nt, Artificial Sequence
  Description of Artificial Sequence: Synthetic oligonucleotide
  Sense strand starting at position 3517 of SEQ ID NO: 586772
acggauugucccugaggac

SEQ ID NO: 743223 - RNA, 19 nt, Artificial Sequence
  Description of Artificial Sequence: Synthetic oligonucleotide
  Antisense strand to SEQ ID NO: 743222
guccucagggacaauccgu

SEQ ID NO: 743224 - RNA, 19 nt, Artificial Sequence
  Description of Artificial Sequence: Synthetic oligonucleotide
  Sense strand starting at position 3518 of SEQ ID NO: 586772
cggauugucccugaggaca

SEQ ID NO: 743225 - RNA, 19 nt, Artificial Sequence
  Description of Artificial Sequence: Synthetic oligonucleotide
  Antisense strand to SEQ ID NO: 743224
uguccucagggacaauccg

SEQ ID NO: 743226 - RNA, 19 nt, Artificial Sequence
  Description of Artificial Sequence: Synthetic oligonucleotide
  Sense strand starting at position 3575 of SEQ ID NO: 586772
agacucugugucuaccaga

SEQ ID NO: 743227 - RNA, 19 nt, Artificial Sequence
  Description of Artificial Sequence: Synthetic oligonucleotide
  Antisense strand to SEQ ID NO: 743226
ucugguagacacagagucu

SEQ ID NO: 743228 - RNA, 19 nt, Artificial Sequence
  Description of Artificial Sequence: Synthetic oligonucleotide
  Sense strand starting at position 3580 of SEQ ID NO: 586772
cugugucuaccagaacaaa

SEQ ID NO: 743229 - RNA, 19 nt, Artificial Sequence
  Description of Artificial Sequence: Synthetic oligonucleotide
  Antisense strand to SEQ ID NO: 743228
uuuguucugguagacacag

SEQ ID NO: 743230 - RNA, 19 nt, Artificial Sequence
  Description of Artificial Sequence: Synthetic oligonucleotide
  Sense strand starting at position 3692 of SEQ ID NO: 586772
gcuggaucucuacacauaa

SEQ ID NO: 743231 - RNA, 19 nt, Artificial Sequence
  Description of Artificial Sequence: Synthetic oligonucleotide
  Antisense strand to SEQ ID NO: 743230
uuauguguagagauccagc

SEQ ID NO: 743232 - RNA, 19 nt, Artificial Sequence
  Description of Artificial Sequence: Synthetic oligonucleotide
  Sense strand starting at position 3804 of SEQ ID NO: 586772
agucuugcccuggauggau

SEQ ID NO: 743233 - RNA, 19 nt, Artificial Sequence
  Description of Artificial Sequence: Synthetic oligonucleotide
  Antisense strand to SEQ ID NO: 743232
auccauccagggcaagacu

SEQ ID NO: 743234 - RNA, 19 nt, Artificial Sequence
  Description of Artificial Sequence: Synthetic oligonucleotide
  Sense strand starting at position 3891 of SEQ ID NO: 586772
aguuaauucuaacuuggua

SEQ ID NO: 743235 - RNA, 19 nt, Artificial Sequence
  Description of Artificial Sequence: Synthetic oligonucleotide
  Antisense strand to SEQ ID NO: 743234
uaccaaguuagaauuaacu

SEQ ID NO: 743236 - RNA, 19 nt, Artificial Sequence
  Description of Artificial Sequence: Synthetic oligonucleotide
  Sense strand starting at position 3977 of SEQ ID NO: 586772
uccacauaguaccugagau

SEQ ID NO: 743237 - RNA, 19 nt, Artificial Sequence
  Description of Artificial Sequence: Synthetic oligonucleotide
  Antisense strand to SEQ ID NO: 743236
aucucagguacuaugugga

SEQ ID NO: 743238 - RNA, 19 nt, Artificial Sequence
  Description of Artificial Sequence: Synthetic oligonucleotide
  Sense strand starting at position 3981 of SEQ ID NO: 586772
cauaguaccugagauuuga

SEQ ID NO: 743239 - RNA, 19 nt, Artificial Sequence
  Description of Artificial Sequence: Synthetic oligonucleotide
  Antisense strand to SEQ ID NO: 743238
ucaaaucucagguacuaug

SEQ ID NO: 743240 - RNA, 19 nt, Artificial Sequence
  Description of Artificial Sequence: Synthetic oligonucleotide
  Sense strand starting at position 187 of SEQ ID NO: 586773
gcagauguauacugaauca

SEQ ID NO: 743241 - RNA, 19 nt, Artificial Sequence
  Description of Artificial Sequence: Synthetic oligonucleotide
  Antisense strand to SEQ ID NO: 743240
ugauucaguauacaucugc

SEQ ID NO: 743242 - RNA, 19 nt, Artificial Sequence
  Description of Artificial Sequence: Synthetic oligonucleotide
  Sense strand starting at position 1287 of SEQ ID NO: 586773
gcagaaggcuuuccucuga

SEQ ID NO: 743243 - RNA, 19 nt, Artificial Sequence
  Description of Artificial Sequence: Synthetic oligonucleotide
  Antisense strand to SEQ ID NO: 743242
ucagaggaaagccuucugc

SEQ ID NO: 743244 - RNA, 19 nt, Artificial Sequence
  Description of Artificial Sequence: Synthetic oligonucleotide
  Sense strand starting at position 1965 of SEQ ID NO: 586773
gaggaacucugugauggau

SEQ ID NO: 743245 - RNA, 19 nt, Artificial Sequence
  Description of Artificial Sequence: Synthetic oligonucleotide
  Antisense strand to SEQ ID NO: 743244
auccaucacagaguuccuc

SEQ ID NO: 743246 - RNA, 19 nt, Artificial Sequence
  Description of Artificial Sequence: Synthetic oligonucleotide
  Sense strand starting at position 1967 of SEQ ID NO: 586773
ggaacucugugauggaugu

SEQ ID NO: 743247 - RNA, 19 nt, Artificial Sequence
  Description of Artificial Sequence: Synthetic oligonucleotide
  Antisense strand to SEQ ID NO: 743246
acauccaucacagaguucc

SEQ ID NO: 743248 - RNA, 19 nt, Artificial Sequence
  Description of Artificial Sequence: Synthetic oligonucleotide
  Sense strand starting at position 1968 of SEQ ID NO: 586773
gaacucugugauggauguu

SEQ ID NO: 743249 - RNA, 19 nt, Artificial Sequence
  Description of Artificial Sequence: Synthetic oligonucleotide
  Antisense strand to SEQ ID NO: 743248
aacauccaucacagaguuc

SEQ ID NO: 743250 - RNA, 19 nt, Artificial Sequence
  Description of Artificial Sequence: Synthetic oligonucleotide
  Sense strand starting at position 1971 of SEQ ID NO: 586773
cucugugauggauguuaua

SEQ ID NO: 743251 - RNA, 19 nt, Artificial Sequence
  Description of Artificial Sequence: Synthetic oligonucleotide
  Antisense strand to SEQ ID NO: 743250
uauaacauccaucacagag

SEQ ID NO: 743252 - RNA, 19 nt, Artificial Sequence
  Description of Artificial Sequence: Synthetic oligonucleotide
  Sense strand starting at position 2587 of SEQ ID NO: 586773
auaaacgugucacauauua

SEQ ID NO: 743253 - RNA, 19 nt, Artificial Sequence
  Description of Artificial Sequence: Synthetic oligonucleotide
  Antisense strand to SEQ ID NO: 743252
uaauaugugacacguuuau

SEQ ID NO: 743254 - RNA, 19 nt, Artificial Sequence
  Description of Artificial Sequence: Synthetic oligonucleotide
  Sense strand starting at position 2592 of SEQ ID NO: 586773
cgugucacauauuaauaua

SEQ ID NO: 743255 - RNA, 19 nt, Artificial Sequence
  Description of Artificial Sequence: Synthetic oligonucleotide
  Antisense strand to SEQ ID NO: 743254
uauauuaauaugugacacg

SEQ ID NO: 743256 - RNA, 19 nt, Artificial Sequence
  Description of Artificial Sequence: Synthetic oligonucleotide
  Sense strand starting at position 3084 of SEQ ID NO: 586773
auagauuugcaccguguca

SEQ ID NO: 743257 - RNA, 19 nt, Artificial Sequence
  Description of Artificial Sequence: Synthetic oligonucleotide
  Antisense strand to SEQ ID NO: 743256
ugacacggugcaaaucuau

SEQ ID NO: 743258 - RNA, 19 nt, Artificial Sequence
  Description of Artificial Sequence: Synthetic oligonucleotide
  Sense strand starting at position 3086 of SEQ ID NO: 586773
agauuugcaccgugucauu

SEQ ID NO: 743259 - RNA, 19 nt, Artificial Sequence
  Description of Artificial Sequence: Synthetic oligonucleotide
  Antisense strand to SEQ ID NO: 743258
aaugacacggugcaaaucu

SEQ ID NO: 743260 - RNA, 19 nt, Artificial Sequence
  Description of Artificial Sequence: Synthetic oligonucleotide
  Sense strand starting at position 3091 of SEQ ID NO: 586773
ugcaccgugucauuaucua

SEQ ID NO: 743261 - RNA, 19 nt, Artificial Sequence
  Description of Artificial Sequence: Synthetic oligonucleotide
  Antisense strand to SEQ ID NO: 743260
uagauaaugacacggugca

SEQ ID NO: 743262 - RNA, 19 nt, Artificial Sequence
  Description of Artificial Sequence: Synthetic oligonucleotide
  Sense strand starting at position 3095 of SEQ ID NO: 586773
ccgugucauuaucuaaaca

SEQ ID NO: 743263 - RNA, 19 nt, Artificial Sequence
  Description of Artificial Sequence: Synthetic oligonucleotide
  Antisense strand to SEQ ID NO: 743262
uguuuagauaaugacacgg

SEQ ID NO: 743264 - RNA, 19 nt, Artificial Sequence
  Description of Artificial Sequence: Synthetic oligonucleotide
  Sense strand starting at position 3599 of SEQ ID NO: 586773
uccuaaucaucgcucagau

SEQ ID NO: 743265 - RNA, 19 nt, Artificial Sequence
  Description of Artificial Sequence: Synthetic oligonucleotide
  Antisense strand to SEQ ID NO: 743264
aucugagcgaugauuagga

SEQ ID NO: 743266 - RNA, 19 nt, Artificial Sequence
  Description of Artificial Sequence: Synthetic oligonucleotide
  Sense strand starting at position 3601 of SEQ ID NO: 586773
cuaaucaucgcucagauug

SEQ ID NO: 743267 - RNA, 19 nt, Artificial Sequence
  Description of Artificial Sequence: Synthetic oligonucleotide
  Antisense strand to SEQ ID NO: 743266
caaucugagcgaugauuag

SEQ ID NO: 743268 - RNA, 19 nt, Artificial Sequence
  Description of Artificial Sequence: Synthetic oligonucleotide
  Sense strand starting at position 101 of SEQ ID NO: 586774
gucuaccaccuggaucaua

SEQ ID NO: 743269 - RNA, 19 nt, Artificial Sequence
  Description of Artificial Sequence: Synthetic oligonucleotide
  Antisense strand to SEQ ID NO: 743268
uaugauccaggugguagac

SEQ ID NO: 743270 - RNA, 19 nt, Artificial Sequence
  Description of Artificial Sequence: Synthetic oligonucleotide
  Sense strand starting at position 222 of SEQ ID NO: 586774
auucuuacacacugugauu

SEQ ID NO: 743271 - RNA, 19 nt, Artificial Sequence
  Description of Artificial Sequence: Synthetic oligonucleotide
  Antisense strand to SEQ ID NO: 743270
aaucacaguguguaagaau

SEQ ID NO: 743272 - RNA, 19 nt, Artificial Sequence
  Description of Artificial Sequence: Synthetic oligonucleotide
  Sense strand starting at position 791 of SEQ ID NO: 586774
gucagugaccuuuauaugu

SEQ ID NO: 743273 - RNA, 19 nt, Artificial Sequence
  Description of Artificial Sequence: Synthetic oligonucleotide
  Antisense strand to SEQ ID NO: 743272
acauauaaaggucacugac

SEQ ID NO: 743274 - RNA, 19 nt, Artificial Sequence
  Description of Artificial Sequence: Synthetic oligonucleotide
  Sense strand starting at position 901 of SEQ ID NO: 586774
gcuggaauacuggaauugu

SEQ ID NO: 743275 - RNA, 19 nt, Artificial Sequence
  Description of Artificial Sequence: Synthetic oligonucleotide
  Antisense strand to SEQ ID NO: 743274
acaauuccaguauuccagc

SEQ ID NO: 743276 - RNA, 19 nt, Artificial Sequence
  Description of Artificial Sequence: Synthetic oligonucleotide
  Sense strand starting at position 909 of SEQ ID NO: 586774
acuggaauuguguguuaaa

SEQ ID NO: 743277 - RNA, 19 nt, Artificial Sequence
  Description of Artificial Sequence: Synthetic oligonucleotide
  Antisense strand to SEQ ID NO: 743276
uuuaacacacaauuccagu

SEQ ID NO: 743278 - RNA, 19 nt, Artificial Sequence
  Description of Artificial Sequence: Synthetic oligonucleotide
  Sense strand starting at position 910 of SEQ ID NO: 586774
cuggaauuguguguuaaau

SEQ ID NO: 743279 - RNA, 19 nt, Artificial Sequence
  Description of Artificial Sequence: Synthetic oligonucleotide
  Antisense strand to SEQ ID NO: 743278
auuuaacacacaauuccag

SEQ ID NO: 743280 - RNA, 19 nt, Artificial Sequence
  Description of Artificial Sequence: Synthetic oligonucleotide
  Sense strand starting at position 1059 of SEQ ID NO: 586774
uugaaugcacugggugaua

SEQ ID NO: 743281 - RNA, 19 nt, Artificial Sequence
  Description of Artificial Sequence: Synthetic oligonucleotide
  Antisense strand to SEQ ID NO: 743280
uaucacccagugcauucaa

SEQ ID NO: 743282 - RNA, 19 nt, Artificial Sequence
  Description of Artificial Sequence: Synthetic oligonucleotide
  Sense strand starting at position 1116 of SEQ ID NO: 586774
aucuuuauuccggagagua

SEQ ID NO: 743283 - RNA, 19 nt, Artificial Sequence
  Description of Artificial Sequence: Synthetic oligonucleotide
  Antisense strand to SEQ ID NO: 743282
uacucuccggaauaaagau

SEQ ID NO: 743284 - RNA, 19 nt, Artificial Sequence
  Description of Artificial Sequence: Synthetic oligonucleotide
  Sense strand starting at position 1118 of SEQ ID NO: 586774
cuuuauuccggagaguaua

SEQ ID NO: 743285 - RNA, 19 nt, Artificial Sequence
  Description of Artificial Sequence: Synthetic oligonucleotide
  Antisense strand to SEQ ID NO: 743284
uauacucuccggaauaaag

SEQ ID NO: 743286 - RNA, 19 nt, Artificial Sequence
  Description of Artificial Sequence: Synthetic oligonucleotide
  Sense strand starting at position 1216 of SEQ ID NO: 586774
cugggucucauguaggaga

SEQ ID NO: 743287 - RNA, 19 nt, Artificial Sequence
  Description of Artificial Sequence: Synthetic oligonucleotide
  Antisense strand to SEQ ID NO: 743286
ucuccuacaugagacccag

SEQ ID NO: 743288 - RNA, 19 nt, Artificial Sequence
  Description of Artificial Sequence: Synthetic oligonucleotide
  Sense strand starting at position 1509 of SEQ ID NO: 586774
caucaagaucgccauguga

SEQ ID NO: 743289 - RNA, 19 nt, Artificial Sequence
  Description of Artificial Sequence: Synthetic oligonucleotide
  Antisense strand to SEQ ID NO: 743288
ucacauggcgaucuugaug

SEQ ID NO: 743290 - RNA, 19 nt, Artificial Sequence
  Description of Artificial Sequence: Synthetic oligonucleotide
  Sense strand starting at position 1628 of SEQ ID NO: 586774
caacauagcggucauagga

SEQ ID NO: 743291 - RNA, 19 nt, Artificial Sequence
  Description of Artificial Sequence: Synthetic oligonucleotide
  Antisense strand to SEQ ID NO: 743290
uccuaugaccgcuauguug

SEQ ID NO: 743292 - RNA, 19 nt, Artificial Sequence
  Description of Artificial Sequence: Synthetic oligonucleotide
  Sense strand starting at position 1727 of SEQ ID NO: 586774
uagauuucuugccagauag

SEQ ID NO: 743293 - RNA, 19 nt, Artificial Sequence
  Description of Artificial Sequence: Synthetic oligonucleotide
  Antisense strand to SEQ ID NO: 743292
cuaucuggcaagaaaucua

SEQ ID NO: 743294 - RNA, 19 nt, Artificial Sequence
  Description of Artificial Sequence: Synthetic oligonucleotide
  Sense strand starting at position 1766 of SEQ ID NO: 586774
ggaugauuguggagacaug

SEQ ID NO: 743295 - RNA, 19 nt, Artificial Sequence
  Description of Artificial Sequence: Synthetic oligonucleotide
  Antisense strand to SEQ ID NO: 743294
caugucuccacaaucaucc

SEQ ID NO: 743296 - RNA, 19 nt, Artificial Sequence
  Description of Artificial Sequence: Synthetic oligonucleotide
  Sense strand starting at position 1784 of SEQ ID NO: 586774
gcaucagauccaugaggga

SEQ ID NO: 743297 - RNA, 19 nt, Artificial Sequence
  Description of Artificial Sequence: Synthetic oligonucleotide
  Antisense strand to SEQ ID NO: 743296
ucccucauggaucugaugc

SEQ ID NO: 743298 - RNA, 19 nt, Artificial Sequence
  Description of Artificial Sequence: Synthetic oligonucleotide
  Sense strand starting at position 1815 of SEQ ID NO: 586774
caggaaauacauuggugua

SEQ ID NO: 743299 - RNA, 19 nt, Artificial Sequence
  Description of Artificial Sequence: Synthetic oligonucleotide
  Antisense strand to SEQ ID NO: 743298
uacaccaauguauuuccug

SEQ ID NO: 743300 - RNA, 19 nt, Artificial Sequence
  Description of Artificial Sequence: Synthetic oligonucleotide
  Sense strand starting at position 1816 of SEQ ID NO: 586774
aggaaauacauugguguau

SEQ ID NO: 743301 - RNA, 19 nt, Artificial Sequence
  Description of Artificial Sequence: Synthetic oligonucleotide
  Antisense strand to SEQ ID NO: 743300
auacaccaauguauuuccu

SEQ ID NO: 743302 - RNA, 19 nt, Artificial Sequence
  Description of Artificial Sequence: Synthetic oligonucleotide
  Sense strand starting at position 1959 of SEQ ID NO: 586774
aaggaugaagucugccaga

SEQ ID NO: 743303 - RNA, 19 nt, Artificial Sequence
  Description of Artificial Sequence: Synthetic oligonucleotide
  Antisense strand to SEQ ID NO: 743302
ucuggcagacuucauccuu

SEQ ID NO: 743304 - RNA, 19 nt, Artificial Sequence
  Description of Artificial Sequence: Synthetic oligonucleotide
  Sense strand starting at position 1964 of SEQ ID NO: 586774
ugaagucugccagagaggu

SEQ ID NO: 743305 - RNA, 19 nt, Artificial Sequence
  Description of Artificial Sequence: Synthetic oligonucleotide
  Antisense strand to SEQ ID NO: 743304
accucucuggcagacuuca

SEQ ID NO: 743306 - RNA, 19 nt, Artificial Sequence
  Description of Artificial Sequence: Synthetic oligonucleotide
  Sense strand starting at position 1972 of SEQ ID NO: 586774
gccagagaggucugauucu

SEQ ID NO: 743307 - RNA, 19 nt, Artificial Sequence
  Description of Artificial Sequence: Synthetic oligonucleotide
  Antisense strand to SEQ ID NO: 743306
agaaucagaccucucuggc

SEQ ID NO: 743308 - RNA, 19 nt, Artificial Sequence
  Description of Artificial Sequence: Synthetic oligonucleotide
  Sense strand starting at position 2008 of SEQ ID NO: 586774
uuucucaaucccugaggaa

SEQ ID NO: 743309 - RNA, 19 nt, Artificial Sequence
  Description of Artificial Sequence: Synthetic oligonucleotide
  Antisense strand to SEQ ID NO: 743308
uuccucagggauugagaaa

SEQ ID NO: 743310 - RNA, 19 nt, Artificial Sequence
  Description of Artificial Sequence: Synthetic oligonucleotide
  Sense strand starting at position 2036 of SEQ ID NO: 586774
ggagauaaagagugugacu

SEQ ID NO: 743311 - RNA, 19 nt, Artificial Sequence
  Description of Artificial Sequence: Synthetic oligonucleotide
  Antisense strand to SEQ ID NO: 743310
agucacacucuuuaucucc

SEQ ID NO: 743312 - RNA, 19 nt, Artificial Sequence
  Description of Artificial Sequence: Synthetic oligonucleotide
  Sense strand starting at position 2257 of SEQ ID NO: 586774
gucucuucucguuaagaaa

SEQ ID NO: 743313 - RNA, 19 nt, Artificial Sequence
  Description of Artificial Sequence: Synthetic oligonucleotide
  Antisense strand to SEQ ID NO: 743312
uuucuuaacgagaagagac

SEQ ID NO: 743314 - RNA, 19 nt, Artificial Sequence
  Description of Artificial Sequence: Synthetic oligonucleotide
  Sense strand starting at position 2418 of SEQ ID NO: 586774
agacuugaaguuugauacu

SEQ ID NO: 743315 - RNA, 19 nt, Artificial Sequence
  Description of Artificial Sequence: Synthetic oligonucleotide
  Antisense strand to SEQ ID NO: 743314
aguaucaaacuucaagucu

SEQ ID NO: 743316 - RNA, 19 nt, Artificial Sequence
  Description of Artificial Sequence: Synthetic oligonucleotide
  Sense strand starting at position 2442 of SEQ ID NO: 586774
gagucuagauauucugaga

SEQ ID NO: 743317 - RNA, 19 nt, Artificial Sequence
  Description of Artificial Sequence: Synthetic oligonucleotide
  Antisense strand to SEQ ID NO: 743316
ucucagaauaucuagacuc

SEQ ID NO: 743318 - RNA, 19 nt, Artificial Sequence
  Description of Artificial Sequence: Synthetic oligonucleotide
  Sense strand starting at position 2445 of SEQ ID NO: 586774
ucuagauauucugagauuu

SEQ ID NO: 743319 - RNA, 19 nt, Artificial Sequence
  Description of Artificial Sequence: Synthetic oligonucleotide
  Antisense strand to SEQ ID NO: 743318
aaaucucagaauaucuaga

SEQ ID NO: 743320 - RNA, 19 nt, Artificial Sequence
  Description of Artificial Sequence: Synthetic oligonucleotide
  Sense strand starting at position 2466 of SEQ ID NO: 586774
gagugaucauguuugugaa

SEQ ID NO: 743321 - RNA, 19 nt, Artificial Sequence
  Description of Artificial Sequence: Synthetic oligonucleotide
  Antisense strand to SEQ ID NO: 743320
uucacaaacaugaucacuc

SEQ ID NO: 743322 - RNA, 19 nt, Artificial Sequence
  Description of Artificial Sequence: Synthetic oligonucleotide
  Sense strand starting at position 2467 of SEQ ID NO: 586774
agugaucauguuugugaag

SEQ ID NO: 743323 - RNA, 19 nt, Artificial Sequence
  Description of Artificial Sequence: Synthetic oligonucleotide
  Antisense strand to SEQ ID NO: 743322
cuucacaaacaugaucacu

SEQ ID NO: 743324 - RNA, 19 nt, Artificial Sequence
  Description of Artificial Sequence: Synthetic oligonucleotide
  Sense strand starting at position 2642 of SEQ ID NO: 586774
aaucuaugcguggcuguua

SEQ ID NO: 743325 - RNA, 19 nt, Artificial Sequence
  Description of Artificial Sequence: Synthetic oligonucleotide
  Antisense strand to SEQ ID NO: 743324
uaacagccacgcauagauu

SEQ ID NO: 743326 - RNA, 19 nt, Artificial Sequence
  Description of Artificial Sequence: Synthetic oligonucleotide
  Sense strand starting at position 3060 of SEQ ID NO: 586774
gggauuucaccguguucga

SEQ ID NO: 743327 - RNA, 19 nt, Artificial Sequence
  Description of Artificial Sequence: Synthetic oligonucleotide
  Antisense strand to SEQ ID NO: 743326
ucgaacacggugaaauccc

SEQ ID NO: 743328 - RNA, 19 nt, Artificial Sequence
  Description of Artificial Sequence: Synthetic oligonucleotide
  Sense strand starting at position 3178 of SEQ ID NO: 586774
cuucuuaauggccagauua

SEQ ID NO: 743329 - RNA, 19 nt, Artificial Sequence
  Description of Artificial Sequence: Synthetic oligonucleotide
  Antisense strand to SEQ ID NO: 743328
uaaucuggccauuaagaag

SEQ ID NO: 743330 - RNA, 19 nt, Artificial Sequence
  Description of Artificial Sequence: Synthetic oligonucleotide
  Sense strand starting at position 3629 of SEQ ID NO: 586774
ggcaguguccucuaggaug

SEQ ID NO: 743331 - RNA, 19 nt, Artificial Sequence
  Description of Artificial Sequence: Synthetic oligonucleotide
  Antisense strand to SEQ ID NO: 743330
cauccuagaggacacugcc

SEQ ID NO: 743332 - RNA, 19 nt, Artificial Sequence
  Description of Artificial Sequence: Synthetic oligonucleotide
  Sense strand starting at position 3634 of SEQ ID NO: 586774
uguccucuaggaugugaaa

SEQ ID NO: 743333 - RNA, 19 nt, Artificial Sequence
  Description of Artificial Sequence: Synthetic oligonucleotide
  Antisense strand to SEQ ID NO: 743332
uuucacauccuagaggaca

SEQ ID NO: 743334 - RNA, 19 nt, Artificial Sequence
  Description of Artificial Sequence: Synthetic oligonucleotide
  Sense strand starting at position 3735 of SEQ ID NO: 586774
gagaaugaguccucucacu

SEQ ID NO: 743335 - RNA, 19 nt, Artificial Sequence
  Description of Artificial Sequence: Synthetic oligonucleotide
  Antisense strand to SEQ ID NO: 743334
agugagaggacucauucuc

SEQ ID NO: 743336 - RNA, 19 nt, Artificial Sequence
  Description of Artificial Sequence: Synthetic oligonucleotide
  Sense strand starting at position 3946 of SEQ ID NO: 586774
ggcaaauaagguuacucua

SEQ ID NO: 743337 - RNA, 19 nt, Artificial Sequence
  Description of Artificial Sequence: Synthetic oligonucleotide
  Antisense strand to SEQ ID NO: 743336
uagaguaaccuuauuugcc

SEQ ID NO: 743338 - RNA, 19 nt, Artificial Sequence
  Description of Artificial Sequence: Synthetic oligonucleotide
  Sense strand starting at position 3957 of SEQ ID NO: 586774
uuacucuauuggcuaguaa

SEQ ID NO: 743339 - RNA, 19 nt, Artificial Sequence
  Description of Artificial Sequence: Synthetic oligonucleotide
  Antisense strand to SEQ ID NO: 743338
uuacuagccaauagaguaa

SEQ ID NO: 743340 - RNA, 19 nt, Artificial Sequence
  Description of Artificial Sequence: Synthetic oligonucleotide
  Sense strand starting at position 3968 of SEQ ID NO: 586774
gcuaguaagacugauucug

SEQ ID NO: 743341 - RNA, 19 nt, Artificial Sequence
  Description of Artificial Sequence: Synthetic oligonucleotide
  Antisense strand to SEQ ID NO: 743340
cagaaucagucuuacuagc

SEQ ID NO: 743342 - RNA, 19 nt, Artificial Sequence
  Description of Artificial Sequence: Synthetic oligonucleotide
  Sense strand starting at position 3970 of SEQ ID NO: 586774
uaguaagacugauucugac

SEQ ID NO: 743343 - RNA, 19 nt, Artificial Sequence
  Description of Artificial Sequence: Synthetic oligonucleotide
  Antisense strand to SEQ ID NO: 743342
gucagaaucagucuuacua

SEQ ID NO: 743344 - RNA, 19 nt, Artificial Sequence
  Description of Artificial Sequence: Synthetic oligonucleotide
  Sense strand starting at position 3977 of SEQ ID NO: 586774
acugauucugacuagcaau

SEQ ID NO: 743345 - RNA, 19 nt, Artificial Sequence
  Description of Artificial Sequence: Synthetic oligonucleotide
  Antisense strand to SEQ ID NO: 743344
auugcuagucagaaucagu

SEQ ID NO: 743346 - RNA, 19 nt, Artificial Sequence
  Description of Artificial Sequence: Synthetic oligonucleotide
  Sense strand starting at position 3983 of SEQ ID NO: 586774
ucugacuagcaaugggaaa

SEQ ID NO: 743347 - RNA, 19 nt, Artificial Sequence
  Description of Artificial Sequence: Synthetic oligonucleotide
  Antisense strand to SEQ ID NO: 743346
uuucccauugcuagucaga

SEQ ID NO: 743348 - RNA, 19 nt, Artificial Sequence
  Description of Artificial Sequence: Synthetic oligonucleotide
  Sense strand starting at position 11 of SEQ ID NO: 586775
agaaguucucaaugugaag

SEQ ID NO: 743349 - RNA, 19 nt, Artificial Sequence
  Description of Artificial Sequence: Synthetic oligonucleotide
  Antisense strand to SEQ ID NO: 743348
cuucacauugagaacuucu

SEQ ID NO: 743350 - RNA, 19 nt, Artificial Sequence
  Description of Artificial Sequence: Synthetic oligonucleotide
  Sense strand starting at position 105 of SEQ ID NO: 586775
cauugacuuuggcugaaga

SEQ ID NO: 743351 - RNA, 19 nt, Artificial Sequence
  Description of Artificial Sequence: Synthetic oligonucleotide
  Antisense strand to SEQ ID NO: 743350
ucuucagccaaagucaaug

SEQ ID NO: 743352 - RNA, 19 nt, Artificial Sequence
  Description of Artificial Sequence: Synthetic oligonucleotide
  Sense strand starting at position 107 of SEQ ID NO: 586775
uugacuuuggcugaagagu

SEQ ID NO: 743353 - RNA, 19 nt, Artificial Sequence
  Description of Artificial Sequence: Synthetic oligonucleotide
  Antisense strand to SEQ ID NO: 743352
acucuucagccaaagucaa

SEQ ID NO: 743354 - RNA, 19 nt, Artificial Sequence
  Description of Artificial Sequence: Synthetic oligonucleotide
  Sense strand starting at position 168 of SEQ ID NO: 586775
cucauaauuugugugcuuu

SEQ ID NO: 743355 - RNA, 19 nt, Artificial Sequence
  Description of Artificial Sequence: Synthetic oligonucleotide
  Antisense strand to SEQ ID NO: 743354
aaagcacacaaauuaugag

SEQ ID NO: 743356 - RNA, 19 nt, Artificial Sequence
  Description of Artificial Sequence: Synthetic oligonucleotide
  Sense strand starting at position 199 of SEQ ID NO: 586775
ugaagauucugagaaagag

SEQ ID NO: 743357 - RNA, 19 nt, Artificial Sequence
  Description of Artificial Sequence: Synthetic oligonucleotide
  Antisense strand to SEQ ID NO: 743356
cucuuucucagaaucuuca

SEQ ID NO: 743358 - RNA, 19 nt, Artificial Sequence
  Description of Artificial Sequence: Synthetic oligonucleotide
  Sense strand starting at position 317 of SEQ ID NO: 586775
gcaccugaagcuuaacuuu

SEQ ID NO: 743359 - RNA, 19 nt, Artificial Sequence
  Description of Artificial Sequence: Synthetic oligonucleotide
  Antisense strand to SEQ ID NO: 743358
aaaguuaagcuucaggugc

SEQ ID NO: 743360 - RNA, 19 nt, Artificial Sequence
  Description of Artificial Sequence: Synthetic oligonucleotide
  Sense strand starting at position 378 of SEQ ID NO: 586775
ucacccuaucgaggugaaa

SEQ ID NO: 743361 - RNA, 19 nt, Artificial Sequence
  Description of Artificial Sequence: Synthetic oligonucleotide
  Antisense strand to SEQ ID NO: 743360
uuucaccucgauaggguga

SEQ ID NO: 743362 - RNA, 19 nt, Artificial Sequence
  Description of Artificial Sequence: Synthetic oligonucleotide
  Sense strand starting at position 380 of SEQ ID NO: 586775
acccuaucgaggugaaaca

SEQ ID NO: 743363 - RNA, 19 nt, Artificial Sequence
  Description of Artificial Sequence: Synthetic oligonucleotide
  Antisense strand to SEQ ID NO: 743362
uguuucaccucgauagggu

SEQ ID NO: 743364 - RNA, 19 nt, Artificial Sequence
  Description of Artificial Sequence: Synthetic oligonucleotide
  Sense strand starting at position 396 of SEQ ID NO: 586775
acaagaccuugaguugaua

SEQ ID NO: 743365 - RNA, 19 nt, Artificial Sequence
  Description of Artificial Sequence: Synthetic oligonucleotide
  Antisense strand to SEQ ID NO: 743364
uaucaacucaaggucuugu

SEQ ID NO: 743366 - RNA, 19 nt, Artificial Sequence
  Description of Artificial Sequence: Synthetic oligonucleotide
  Sense strand starting at position 423 of SEQ ID NO: 586775
cugaauuagcuccagcacu

SEQ ID NO: 743367 - RNA, 19 nt, Artificial Sequence
  Description of Artificial Sequence: Synthetic oligonucleotide
  Antisense strand to SEQ ID NO: 743366
agugcuggagcuaauucag

SEQ ID NO: 743368 - RNA, 19 nt, Artificial Sequence
  Description of Artificial Sequence: Synthetic oligonucleotide
  Sense strand starting at position 491 of SEQ ID NO: 586775
uuagucagccuugacaaua

SEQ ID NO: 743369 - RNA, 19 nt, Artificial Sequence
  Description of Artificial Sequence: Synthetic oligonucleotide
  Antisense strand to SEQ ID NO: 743368
uauugucaaggcugacuaa

SEQ ID NO: 743370 - RNA, 19 nt, Artificial Sequence
  Description of Artificial Sequence: Synthetic oligonucleotide
  Sense strand starting at position 534 of SEQ ID NO: 586775
acacaauuacugcauguga

SEQ ID NO: 743371 - RNA, 19 nt, Artificial Sequence
  Description of Artificial Sequence: Synthetic oligonucleotide
  Antisense strand to SEQ ID NO: 743370
ucacaugcaguaauugugu

SEQ ID NO: 743372 - RNA, 19 nt, Artificial Sequence
  Description of Artificial Sequence: Synthetic oligonucleotide
  Sense strand starting at position 536 of SEQ ID NO: 586775
acaauuacugcaugugaug

SEQ ID NO: 743373 - RNA, 19 nt, Artificial Sequence
  Description of Artificial Sequence: Synthetic oligonucleotide
  Antisense strand to SEQ ID NO: 743372
caucacaugcaguaauugu

SEQ ID NO: 743374 - RNA, 19 nt, Artificial Sequence
  Description of Artificial Sequence: Synthetic oligonucleotide
  Sense strand starting at position 638 of SEQ ID NO: 586775
aaauguggauguguaagua

SEQ ID NO: 743375 - RNA, 19 nt, Artificial Sequence
  Description of Artificial Sequence: Synthetic oligonucleotide
  Antisense strand to SEQ ID NO: 743374
uacuuacacauccacauuu

SEQ ID NO: 743376 - RNA, 19 nt, Artificial Sequence
  Description of Artificial Sequence: Synthetic oligonucleotide
  Sense strand starting at position 654 of SEQ ID NO: 586775
guaccagugguccaaggua

SEQ ID NO: 743377 - RNA, 19 nt, Artificial Sequence
  Description of Artificial Sequence: Synthetic oligonucleotide
  Antisense strand to SEQ ID NO: 743376
uaccuuggaccacugguac

SEQ ID NO: 743378 - RNA, 19 nt, Artificial Sequence
  Description of Artificial Sequence: Synthetic oligonucleotide
  Sense strand starting at position 668 of SEQ ID NO: 586775
agguaagauccaugaguag

SEQ ID NO: 743379 - RNA, 19 nt, Artificial Sequence
  Description of Artificial Sequence: Synthetic oligonucleotide
  Antisense strand to SEQ ID NO: 743378
cuacucauggaucuuaccu

SEQ ID NO: 743380 - RNA, 19 nt, Artificial Sequence
  Description of Artificial Sequence: Synthetic oligonucleotide
  Sense strand starting at position 674 of SEQ ID NO: 586775
gauccaugaguaggucuau

SEQ ID NO: 743381 - RNA, 19 nt, Artificial Sequence
  Description of Artificial Sequence: Synthetic oligonucleotide
  Antisense strand to SEQ ID NO: 743380
auagaccuacucauggauc

SEQ ID NO: 743382 - RNA, 19 nt, Artificial Sequence
  Description of Artificial Sequence: Synthetic oligonucleotide
  Sense strand starting at position 683 of SEQ ID NO: 586775
guaggucuaucauuacaaa

SEQ ID NO: 743383 - RNA, 19 nt, Artificial Sequence
  Description of Artificial Sequence: Synthetic oligonucleotide
  Antisense strand to SEQ ID NO: 743382
uuuguaaugauagaccuac

SEQ ID NO: 743384 - RNA, 19 nt, Artificial Sequence
  Description of Artificial Sequence: Synthetic oligonucleotide
  Sense strand starting at position 746 of SEQ ID NO: 586775
auugucaggcuguaagagu

SEQ ID NO: 743385 - RNA, 19 nt, Artificial Sequence
  Description of Artificial Sequence: Synthetic oligonucleotide
  Antisense strand to SEQ ID NO: 743384
acucuuacagccugacaau

SEQ ID NO: 743386 - RNA, 19 nt, Artificial Sequence
  Description of Artificial Sequence: Synthetic oligonucleotide
  Sense strand starting at position 771 of SEQ ID NO: 586775
ggaagaagugugggagguu

SEQ ID NO: 743387 - RNA, 19 nt, Artificial Sequence
  Description of Artificial Sequence: Synthetic oligonucleotide
  Antisense strand to SEQ ID NO: 743386
aaccucccacacuucuucc

SEQ ID NO: 743388 - RNA, 19 nt, Artificial Sequence
  Description of Artificial Sequence: Synthetic oligonucleotide
  Sense strand starting at position 2026 of SEQ ID NO: 586775
agaauuacuuguuugaaug

SEQ ID NO: 743389 - RNA, 19 nt, Artificial Sequence
  Description of Artificial Sequence: Synthetic oligonucleotide
  Antisense strand to SEQ ID NO: 743388
cauucaaacaaguaauucu

SEQ ID NO: 743390 - RNA, 19 nt, Artificial Sequence
  Description of Artificial Sequence: Synthetic oligonucleotide
  Sense strand starting at position 2446 of SEQ ID NO: 586775
acuggaaaccuacguuuaa

SEQ ID NO: 743391 - RNA, 19 nt, Artificial Sequence
  Description of Artificial Sequence: Synthetic oligonucleotide
  Antisense strand to SEQ ID NO: 743390
uuaaacguagguuuccagu

SEQ ID NO: 743392 - RNA, 19 nt, Artificial Sequence
  Description of Artificial Sequence: Synthetic oligonucleotide
  Sense strand starting at position 2447 of SEQ ID NO: 586775
cuggaaaccuacguuuaaa

SEQ ID NO: 743393 - RNA, 19 nt, Artificial Sequence
  Description of Artificial Sequence: Synthetic oligonucleotide
  Antisense strand to SEQ ID NO: 743392
uuuaaacguagguuuccag

SEQ ID NO: 743394 - RNA, 19 nt, Artificial Sequence
  Description of Artificial Sequence: Synthetic oligonucleotide
  Sense strand starting at position 2490 of SEQ ID NO: 586775
gauguugguuuauugauaa

SEQ ID NO: 743395 - RNA, 19 nt, Artificial Sequence
  Description of Artificial Sequence: Synthetic oligonucleotide
  Antisense strand to SEQ ID NO: 743394
uuaucaauaaaccaacauc

SEQ ID NO: 743396 - RNA, 19 nt, Artificial Sequence
  Description of Artificial Sequence: Synthetic oligonucleotide
  Sense strand starting at position 2717 of SEQ ID NO: 586775
caugaucucuguguuggga

SEQ ID NO: 743397 - RNA, 19 nt, Artificial Sequence
  Description of Artificial Sequence: Synthetic oligonucleotide
  Antisense strand to SEQ ID NO: 743396
ucccaacacagagaucaug

SEQ ID NO: 743398 - RNA, 19 nt, Artificial Sequence
  Description of Artificial Sequence: Synthetic oligonucleotide
  Sense strand starting at position 2799 of SEQ ID NO: 586775
uggagacaaucuguaacau

SEQ ID NO: 743399 - RNA, 19 nt, Artificial Sequence
  Description of Artificial Sequence: Synthetic oligonucleotide
  Antisense strand to SEQ ID NO: 743398
auguuacagauugucucca

SEQ ID NO: 743400 - RNA, 19 nt, Artificial Sequence
  Description of Artificial Sequence: Synthetic oligonucleotide
  Sense strand starting at position 2896 of SEQ ID NO: 586775
gugggaugggauuguaauu

SEQ ID NO: 743401 - RNA, 19 nt, Artificial Sequence
  Description of Artificial Sequence: Synthetic oligonucleotide
  Antisense strand to SEQ ID NO: 743400
aauuacaaucccaucccac

SEQ ID NO: 743402 - RNA, 19 nt, Artificial Sequence
  Description of Artificial Sequence: Synthetic oligonucleotide
  Sense strand starting at position 2901 of SEQ ID NO: 586775
augggauuguaauuguacu

SEQ ID NO: 743403 - RNA, 19 nt, Artificial Sequence
  Description of Artificial Sequence: Synthetic oligonucleotide
  Antisense strand to SEQ ID NO: 743402
aguacaauuacaaucccau

SEQ ID NO: 743404 - RNA, 19 nt, Artificial Sequence
  Description of Artificial Sequence: Synthetic oligonucleotide
  Sense strand starting at position 2902 of SEQ ID NO: 586775
ugggauuguaauuguacuu

SEQ ID NO: 743405 - RNA, 19 nt, Artificial Sequence
  Description of Artificial Sequence: Synthetic oligonucleotide
  Antisense strand to SEQ ID NO: 743404
aaguacaauuacaauccca

SEQ ID NO: 743406 - RNA, 19 nt, Artificial Sequence
  Description of Artificial Sequence: Synthetic oligonucleotide
  Sense strand starting at position 3034 of SEQ ID NO: 586775
agagaaagcagaugucuaa

SEQ ID NO: 743407 - RNA, 19 nt, Artificial Sequence
  Description of Artificial Sequence: Synthetic oligonucleotide
  Antisense strand to SEQ ID NO: 743406
uuagacaucugcuuucucu

SEQ ID NO: 743408 - RNA, 19 nt, Artificial Sequence
  Description of Artificial Sequence: Synthetic oligonucleotide
  Sense strand starting at position 3037 of SEQ ID NO: 586775
gaaagcagaugucuaagua

SEQ ID NO: 743409 - RNA, 19 nt, Artificial Sequence
  Description of Artificial Sequence: Synthetic oligonucleotide
  Antisense strand to SEQ ID NO: 743408
uacuuagacaucugcuuuc

SEQ ID NO: 743410 - RNA, 19 nt, Artificial Sequence
  Description of Artificial Sequence: Synthetic oligonucleotide
  Sense strand starting at position 3677 of SEQ ID NO: 586775
ugucaacuauuguugacua

SEQ ID NO: 743411 - RNA, 19 nt, Artificial Sequence
  Description of Artificial Sequence: Synthetic oligonucleotide
  Antisense strand to SEQ ID NO: 743410
uagucaacaauaguugaca

SEQ ID NO: 743412 - RNA, 19 nt, Artificial Sequence
  Description of Artificial Sequence: Synthetic oligonucleotide
  Sense strand starting at position 3682 of SEQ ID NO: 586775
acuauuguugacuagauuc

SEQ ID NO: 743413 - RNA, 19 nt, Artificial Sequence
  Description of Artificial Sequence: Synthetic oligonucleotide
  Antisense strand to SEQ ID NO: 743412
gaaucuagucaacaauagu

SEQ ID NO: 743414 - RNA, 19 nt, Artificial Sequence
  Description of Artificial Sequence: Synthetic oligonucleotide
  Sense strand starting at position 3689 of SEQ ID NO: 586775
uugacuagauuccagauuu

SEQ ID NO: 743415 - RNA, 19 nt, Artificial Sequence
  Description of Artificial Sequence: Synthetic oligonucleotide
  Antisense strand to SEQ ID NO: 743414
aaaucuggaaucuagucaa

SEQ ID NO: 743416 - RNA, 19 nt, Artificial Sequence
  Description of Artificial Sequence: Synthetic oligonucleotide
  Sense strand starting at position 3702 of SEQ ID NO: 586775
agauuugcaucugaauuag

SEQ ID NO: 743417 - RNA, 19 nt, Artificial Sequence
  Description of Artificial Sequence: Synthetic oligonucleotide
  Antisense strand to SEQ ID NO: 743416
cuaauucagaugcaaaucu

SEQ ID NO: 743418 - RNA, 19 nt, Artificial Sequence
  Description of Artificial Sequence: Synthetic oligonucleotide
  Sense strand starting at position 3760 of SEQ ID NO: 586775
aucguuguuagaugaugga

SEQ ID NO: 743419 - RNA, 19 nt, Artificial Sequence
  Description of Artificial Sequence: Synthetic oligonucleotide
  Antisense strand to SEQ ID NO: 743418
uccaucaucuaacaacgau

SEQ ID NO: 743420 - RNA, 19 nt, Artificial Sequence
  Description of Artificial Sequence: Synthetic oligonucleotide
  Sense strand starting at position 3785 of SEQ ID NO: 586775
gggugaauauuacccuuaa

SEQ ID NO: 743421 - RNA, 19 nt, Artificial Sequence
  Description of Artificial Sequence: Synthetic oligonucleotide
  Antisense strand to SEQ ID NO: 743420
uuaaggguaauauucaccc

SEQ ID NO: 743422 - RNA, 19 nt, Artificial Sequence
  Description of Artificial Sequence: Synthetic oligonucleotide
  Sense strand starting at position 3786 of SEQ ID NO: 586775
ggugaauauuacccuuaau

SEQ ID NO: 743423 - RNA, 19 nt, Artificial Sequence
  Description of Artificial Sequence: Synthetic oligonucleotide
  Antisense strand to SEQ ID NO: 743422
auuaaggguaauauucacc

SEQ ID NO: 743424 - RNA, 19 nt, Artificial Sequence
  Description of Artificial Sequence: Synthetic oligonucleotide
  Sense strand starting at position 3956 of SEQ ID NO: 586775
auuacaaaugagugacagu

SEQ ID NO: 743425 - RNA, 19 nt, Artificial Sequence
  Description of Artificial Sequence: Synthetic oligonucleotide
  Antisense strand to SEQ ID NO: 743424
acugucacucauuuguaau

SEQ ID NO: 743426 - RNA, 19 nt, Artificial Sequence
  Description of Artificial Sequence: Synthetic oligonucleotide
  Sense strand starting at position 3969 of SEQ ID NO: 586775
gacagugucucaucucaga

SEQ ID NO: 743427 - RNA, 19 nt, Artificial Sequence
  Description of Artificial Sequence: Synthetic oligonucleotide
  Antisense strand to SEQ ID NO: 743426
ucugagaugagacacuguc

SEQ ID NO: 743428 - RNA, 19 nt, Artificial Sequence
  Description of Artificial Sequence: Synthetic oligonucleotide
  Sense strand starting at position 7 of SEQ ID NO: 586776
gguuuagaaaguugacuag

SEQ ID NO: 743429 - RNA, 19 nt, Artificial Sequence
  Description of Artificial Sequence: Synthetic oligonucleotide
  Antisense strand to SEQ ID NO: 743428
cuagucaacuuucuaaacc

SEQ ID NO: 743430 - RNA, 19 nt, Artificial Sequence
  Description of Artificial Sequence: Synthetic oligonucleotide
  Sense strand starting at position 19 of SEQ ID NO: 586776
ugacuagugcccuacugua

SEQ ID NO: 743431 - RNA, 19 nt, Artificial Sequence
  Description of Artificial Sequence: Synthetic oligonucleotide
  Antisense strand to SEQ ID NO: 743430
uacaguagggcacuaguca

SEQ ID NO: 743432 - RNA, 19 nt, Artificial Sequence
  Description of Artificial Sequence: Synthetic oligonucleotide
  Sense strand starting at position 29 of SEQ ID NO: 586776
ccuacuguaugugugagaa

SEQ ID NO: 743433 - RNA, 19 nt, Artificial Sequence
  Description of Artificial Sequence: Synthetic oligonucleotide
  Antisense strand to SEQ ID NO: 743432
uucucacacauacaguagg

SEQ ID NO: 743434 - RNA, 19 nt, Artificial Sequence
  Description of Artificial Sequence: Synthetic oligonucleotide
  Sense strand starting at position 99 of SEQ ID NO: 586776
ugaggcaucuauccugacu

SEQ ID NO: 743435 - RNA, 19 nt, Artificial Sequence
  Description of Artificial Sequence: Synthetic oligonucleotide
  Antisense strand to SEQ ID NO: 743434
agucaggauagaugccuca

SEQ ID NO: 743436 - RNA, 19 nt, Artificial Sequence
  Description of Artificial Sequence: Synthetic oligonucleotide
  Sense strand starting at position 152 of SEQ ID NO: 586776
auugguauuggcugaagag

SEQ ID NO: 743437 - RNA, 19 nt, Artificial Sequence
  Description of Artificial Sequence: Synthetic oligonucleotide
  Antisense strand to SEQ ID NO: 743436
cucuucagccaauaccaau

SEQ ID NO: 743438 - RNA, 19 nt, Artificial Sequence
  Description of Artificial Sequence: Synthetic oligonucleotide
  Sense strand starting at position 153 of SEQ ID NO: 586776
uugguauuggcugaagagu

SEQ ID NO: 743439 - RNA, 19 nt, Artificial Sequence
  Description of Artificial Sequence: Synthetic oligonucleotide
  Antisense strand to SEQ ID NO: 743438
acucuucagccaauaccaa

SEQ ID NO: 743440 - RNA, 19 nt, Artificial Sequence
  Description of Artificial Sequence: Synthetic oligonucleotide
  Sense strand starting at position 346 of SEQ ID NO: 586776
gugaguaaugccugaaacu

SEQ ID NO: 743441 - RNA, 19 nt, Artificial Sequence
  Description of Artificial Sequence: Synthetic oligonucleotide
  Antisense strand to SEQ ID NO: 743440
aguuucaggcauuacucac

SEQ ID NO: 743442 - RNA, 19 nt, Artificial Sequence
  Description of Artificial Sequence: Synthetic oligonucleotide
  Sense strand starting at position 347 of SEQ ID NO: 586776
ugaguaaugccugaaacuu

SEQ ID NO: 743443 - RNA, 19 nt, Artificial Sequence
  Description of Artificial Sequence: Synthetic oligonucleotide
  Antisense strand to SEQ ID NO: 743442
aaguuucaggcauuacuca

SEQ ID NO: 743444 - RNA, 19 nt, Artificial Sequence
  Description of Artificial Sequence: Synthetic oligonucleotide
  Sense strand starting at position 543 of SEQ ID NO: 586776
acaacauccuucucggaau

SEQ ID NO: 743445 - RNA, 19 nt, Artificial Sequence
  Description of Artificial Sequence: Synthetic oligonucleotide
  Antisense strand to SEQ ID NO: 743444
auuccgagaaggauguugu

SEQ ID NO: 743446 - RNA, 19 nt, Artificial Sequence
  Description of Artificial Sequence: Synthetic oligonucleotide
  Sense strand starting at position 576 of SEQ ID NO: 586776
auuguauguggcuacauaa

SEQ ID NO: 743447 - RNA, 19 nt, Artificial Sequence
  Description of Artificial Sequence: Synthetic oligonucleotide
  Antisense strand to SEQ ID NO: 743446
uuauguagccacauacaau

SEQ ID NO: 743448 - RNA, 19 nt, Artificial Sequence
  Description of Artificial Sequence: Synthetic oligonucleotide
  Sense strand starting at position 711 of SEQ ID NO: 586776
uaugaauaggucuacgguu

SEQ ID NO: 743449 - RNA, 19 nt, Artificial Sequence
  Description of Artificial Sequence: Synthetic oligonucleotide
  Antisense strand to SEQ ID NO: 743448
aaccguagaccuauucaua

SEQ ID NO: 743450 - RNA, 19 nt, Artificial Sequence
  Description of Artificial Sequence: Synthetic oligonucleotide
  Sense strand starting at position 717 of SEQ ID NO: 586776
uaggucuacgguuauaaau

SEQ ID NO: 743451 - RNA, 19 nt, Artificial Sequence
  Description of Artificial Sequence: Synthetic oligonucleotide
  Antisense strand to SEQ ID NO: 743450
auuuauaaccguagaccua

SEQ ID NO: 743452 - RNA, 19 nt, Artificial Sequence
  Description of Artificial Sequence: Synthetic oligonucleotide
  Sense strand starting at position 812 of SEQ ID NO: 586776
guggaagguucuguuacag

SEQ ID NO: 743453 - RNA, 19 nt, Artificial Sequence
  Description of Artificial Sequence: Synthetic oligonucleotide
  Antisense strand to SEQ ID NO: 743452
cuguaacagaaccuuccac

SEQ ID NO: 743454 - RNA, 19 nt, Artificial Sequence
  Description of Artificial Sequence: Synthetic oligonucleotide
  Sense strand starting at position 849 of SEQ ID NO: 586776
aucauacugcugggauaua

SEQ ID NO: 743455 - RNA, 19 nt, Artificial Sequence
  Description of Artificial Sequence: Synthetic oligonucleotide
  Antisense strand to SEQ ID NO: 743454
uauaucccagcaguaugau

SEQ ID NO: 743456 - RNA, 19 nt, Artificial Sequence
  Description of Artificial Sequence: Synthetic oligonucleotide
  Sense strand starting at position 1014 of SEQ ID NO: 586776
aggcaaagcuucuucuuaa

SEQ ID NO: 743457 - RNA, 19 nt, Artificial Sequence
  Description of Artificial Sequence: Synthetic oligonucleotide
  Antisense strand to SEQ ID NO: 743456
uuaagaagaagcuuugccu

SEQ ID NO: 743458 - RNA, 19 nt, Artificial Sequence
  Description of Artificial Sequence: Synthetic oligonucleotide
  Sense strand starting at position 1015 of SEQ ID NO: 586776
ggcaaagcuucuucuuaaa

SEQ ID NO: 743459 - RNA, 19 nt, Artificial Sequence
  Description of Artificial Sequence: Synthetic oligonucleotide
  Antisense strand to SEQ ID NO: 743458
uuuaagaagaagcuuugcc

SEQ ID NO: 743460 - RNA, 19 nt, Artificial Sequence
  Description of Artificial Sequence: Synthetic oligonucleotide
  Sense strand starting at position 2090 of SEQ ID NO: 586776
gaaugcauacuguauacga

SEQ ID NO: 743461 - RNA, 19 nt, Artificial Sequence
  Description of Artificial Sequence: Synthetic oligonucleotide
  Antisense strand to SEQ ID NO: 743460
ucguauacaguaugcauuc

SEQ ID NO: 743462 - RNA, 19 nt, Artificial Sequence
  Description of Artificial Sequence: Synthetic oligonucleotide
  Sense strand starting at position 2112 of SEQ ID NO: 586776
uccagccuuggccaaauau

SEQ ID NO: 743463 - RNA, 19 nt, Artificial Sequence
  Description of Artificial Sequence: Synthetic oligonucleotide
  Antisense strand to SEQ ID NO: 743462
auauuuggccaaggcugga

SEQ ID NO: 743464 - RNA, 19 nt, Artificial Sequence
  Description of Artificial Sequence: Synthetic oligonucleotide
  Sense strand starting at position 2154 of SEQ ID NO: 586776
augacaggcuuguuuccaa

SEQ ID NO: 743465 - RNA, 19 nt, Artificial Sequence
  Description of Artificial Sequence: Synthetic oligonucleotide
  Antisense strand to SEQ ID NO: 743464
uuggaaacaagccugucau

SEQ ID NO: 743466 - RNA, 19 nt, Artificial Sequence
  Description of Artificial Sequence: Synthetic oligonucleotide
  Sense strand starting at position 2184 of SEQ ID NO: 586776
uuuacuuugcauuagagag

SEQ ID NO: 743467 - RNA, 19 nt, Artificial Sequence
  Description of Artificial Sequence: Synthetic oligonucleotide
  Antisense strand to SEQ ID NO: 743466
cucucuaaugcaaaguaaa

SEQ ID NO: 743468 - RNA, 19 nt, Artificial Sequence
  Description of Artificial Sequence: Synthetic oligonucleotide
  Sense strand starting at position 2192 of SEQ ID NO: 586776
gcauuagagagacaguagu

SEQ ID NO: 743469 - RNA, 19 nt, Artificial Sequence
  Description of Artificial Sequence: Synthetic oligonucleotide
  Antisense strand to SEQ ID NO: 743468
acuacugucucucuaaugc

SEQ ID NO: 743470 - RNA, 19 nt, Artificial Sequence
  Description of Artificial Sequence: Synthetic oligonucleotide
  Sense strand starting at position 2247 of SEQ ID NO: 586776
aguuaaagccuguagauaa

SEQ ID NO: 743471 - RNA, 19 nt, Artificial Sequence
  Description of Artificial Sequence: Synthetic oligonucleotide
  Antisense strand to SEQ ID NO: 743470
uuaucuacaggcuuuaacu

SEQ ID NO: 743472 - RNA, 19 nt, Artificial Sequence
  Description of Artificial Sequence: Synthetic oligonucleotide
  Sense strand starting at position 2363 of SEQ ID NO: 586776
uagaaagucccaggcucua

SEQ ID NO: 743473 - RNA, 19 nt, Artificial Sequence
  Description of Artificial Sequence: Synthetic oligonucleotide
  Antisense strand to SEQ ID NO: 743472
uagagccugggacuuucua

SEQ ID NO: 743474 - RNA, 19 nt, Artificial Sequence
  Description of Artificial Sequence: Synthetic oligonucleotide
  Sense strand starting at position 2653 of SEQ ID NO: 586776
ccaagaugcuucucagaaa

SEQ ID NO: 743475 - RNA, 19 nt, Artificial Sequence
  Description of Artificial Sequence: Synthetic oligonucleotide
  Antisense strand to SEQ ID NO: 743474
uuucugagaagcaucuugg

SEQ ID NO: 743476 - RNA, 19 nt, Artificial Sequence
  Description of Artificial Sequence: Synthetic oligonucleotide
  Sense strand starting at position 2682 of SEQ ID NO: 586776
ggcuuaucucauggagaac

SEQ ID NO: 743477 - RNA, 19 nt, Artificial Sequence
  Description of Artificial Sequence: Synthetic oligonucleotide
  Antisense strand to SEQ ID NO: 743476
guucuccaugagauaagcc

SEQ ID NO: 743478 - RNA, 19 nt, Artificial Sequence
  Description of Artificial Sequence: Synthetic oligonucleotide
  Sense strand starting at position 2763 of SEQ ID NO: 586776
ggucuuagugaccagcaca

SEQ ID NO: 743479 - RNA, 19 nt, Artificial Sequence
  Description of Artificial Sequence: Synthetic oligonucleotide
  Antisense strand to SEQ ID NO: 743478
ugugcuggucacuaagacc

SEQ ID NO: 743480 - RNA, 19 nt, Artificial Sequence
  Description of Artificial Sequence: Synthetic oligonucleotide
  Sense strand starting at position 2829 of SEQ ID NO: 586776
cugagacacuagucaacuu

SEQ ID NO: 743481 - RNA, 19 nt, Artificial Sequence
  Description of Artificial Sequence: Synthetic oligonucleotide
  Antisense strand to SEQ ID NO: 743480
aaguugacuagugucucag

SEQ ID NO: 743482 - RNA, 19 nt, Artificial Sequence
  Description of Artificial Sequence: Synthetic oligonucleotide
  Sense strand starting at position 3110 of SEQ ID NO: 586776
gagggcuagaacuguuuga

SEQ ID NO: 743483 - RNA, 19 nt, Artificial Sequence
  Description of Artificial Sequence: Synthetic oligonucleotide
  Antisense strand to SEQ ID NO: 743482
ucaaacaguucuagcccuc

SEQ ID NO: 743484 - RNA, 19 nt, Artificial Sequence
  Description of Artificial Sequence: Synthetic oligonucleotide
  Sense strand starting at position 3117 of SEQ ID NO: 586776
agaacuguuugaccuggga

SEQ ID NO: 743485 - RNA, 19 nt, Artificial Sequence
  Description of Artificial Sequence: Synthetic oligonucleotide
  Antisense strand to SEQ ID NO: 743484
ucccaggucaaacaguucu

SEQ ID NO: 743486 - RNA, 19 nt, Artificial Sequence
  Description of Artificial Sequence: Synthetic oligonucleotide
  Sense strand starting at position 3120 of SEQ ID NO: 586776
acuguuugaccugggaagu

SEQ ID NO: 743487 - RNA, 19 nt, Artificial Sequence
  Description of Artificial Sequence: Synthetic oligonucleotide
  Antisense strand to SEQ ID NO: 743486
acuucccaggucaaacagu

SEQ ID NO: 743488 - RNA, 19 nt, Artificial Sequence
  Description of Artificial Sequence: Synthetic oligonucleotide
  Sense strand starting at position 3121 of SEQ ID NO: 586776
cuguuugaccugggaaguc

SEQ ID NO: 743489 - RNA, 19 nt, Artificial Sequence
  Description of Artificial Sequence: Synthetic oligonucleotide
  Antisense strand to SEQ ID NO: 743488
gacuucccaggucaaacag

SEQ ID NO: 743490 - RNA, 19 nt, Artificial Sequence
  Description of Artificial Sequence: Synthetic oligonucleotide
  Sense strand starting at position 3240 of SEQ ID NO: 586776
agccucuggccucaaucau

SEQ ID NO: 743491 - RNA, 19 nt, Artificial Sequence
  Description of Artificial Sequence: Synthetic oligonucleotide
  Antisense strand to SEQ ID NO: 743490
augauugaggccagaggcu

SEQ ID NO: 743492 - RNA, 19 nt, Artificial Sequence
  Description of Artificial Sequence: Synthetic oligonucleotide
  Sense strand starting at position 3345 of SEQ ID NO: 586776
ggaauaaauucugugacua

SEQ ID NO: 743493 - RNA, 19 nt, Artificial Sequence
  Description of Artificial Sequence: Synthetic oligonucleotide
  Antisense strand to SEQ ID NO: 743492
uagucacagaauuuauucc

SEQ ID NO: 743494 - RNA, 19 nt, Artificial Sequence
  Description of Artificial Sequence: Synthetic oligonucleotide
  Sense strand starting at position 3346 of SEQ ID NO: 586776
gaauaaauucugugacuag

SEQ ID NO: 743495 - RNA, 19 nt, Artificial Sequence
  Description of Artificial Sequence: Synthetic oligonucleotide
  Antisense strand to SEQ ID NO: 743494
cuagucacagaauuuauuc

SEQ ID NO: 743496 - RNA, 19 nt, Artificial Sequence
  Description of Artificial Sequence: Synthetic oligonucleotide
  Sense strand starting at position 3358 of SEQ ID NO: 586776
ugacuagucugaccagaag

SEQ ID NO: 743497 - RNA, 19 nt, Artificial Sequence
  Description of Artificial Sequence: Synthetic oligonucleotide
  Antisense strand to SEQ ID NO: 743496
cuucuggucagacuaguca

SEQ ID NO: 743498 - RNA, 19 nt, Artificial Sequence
  Description of Artificial Sequence: Synthetic oligonucleotide
  Sense strand starting at position 3540 of SEQ ID NO: 586776
ccagcuggcccuugaagaa

SEQ ID NO: 743499 - RNA, 19 nt, Artificial Sequence
  Description of Artificial Sequence: Synthetic oligonucleotide
  Antisense strand to SEQ ID NO: 743498
uucuucaagggccagcugg

SEQ ID NO: 743500 - RNA, 19 nt, Artificial Sequence
  Description of Artificial Sequence: Synthetic oligonucleotide
  Sense strand starting at position 3966 of SEQ ID NO: 586776
gaagaaauaucagugagcu

SEQ ID NO: 743501 - RNA, 19 nt, Artificial Sequence
  Description of Artificial Sequence: Synthetic oligonucleotide
  Antisense strand to SEQ ID NO: 743500
agcucacugauauuucuuc

SEQ ID NO: 743502 - RNA, 19 nt, Artificial Sequence
  Description of Artificial Sequence: Synthetic oligonucleotide
  Sense strand starting at position 3967 of SEQ ID NO: 586776
aagaaauaucagugagcug

SEQ ID NO: 743503 - RNA, 19 nt, Artificial Sequence
  Description of Artificial Sequence: Synthetic oligonucleotide
  Antisense strand to SEQ ID NO: 743502
cagcucacugauauuucuu

SEQ ID NO: 743504 - RNA, 19 nt, Artificial Sequence
  Description of Artificial Sequence: Synthetic oligonucleotide
  Sense strand starting at position 3970 of SEQ ID NO: 586776
aaauaucagugagcugaaa

SEQ ID NO: 743505 - RNA, 19 nt, Artificial Sequence
  Description of Artificial Sequence: Synthetic oligonucleotide
  Antisense strand to SEQ ID NO: 743504
uuucagcucacugauauuu

SEQ ID NO: 743506 - RNA, 19 nt, Artificial Sequence
  Description of Artificial Sequence: Synthetic oligonucleotide
  Sense strand starting at position 3972 of SEQ ID NO: 586776
auaucagugagcugaaaga

SEQ ID NO: 743507 - RNA, 19 nt, Artificial Sequence
  Description of Artificial Sequence: Synthetic oligonucleotide
  Antisense strand to SEQ ID NO: 743506
ucuuucagcucacugauau

SEQ ID NO: 743508 - RNA, 19 nt, Artificial Sequence
  Description of Artificial Sequence: Synthetic oligonucleotide
  Sense strand starting at position 81 of SEQ ID NO: 586777
accuucuauggguguaaag

SEQ ID NO: 743509 - RNA, 19 nt, Artificial Sequence
  Description of Artificial Sequence: Synthetic oligonucleotide
  Antisense strand to SEQ ID NO: 743508
cuuuacacccauagaaggu

SEQ ID NO: 743510 - RNA, 19 nt, Artificial Sequence
  Description of Artificial Sequence: Synthetic oligonucleotide
  Sense strand starting at position 83 of SEQ ID NO: 586777
cuucuauggguguaaagca

SEQ ID NO: 743511 - RNA, 19 nt, Artificial Sequence
  Description of Artificial Sequence: Synthetic oligonucleotide
  Antisense strand to SEQ ID NO: 743510
ugcuuuacacccauagaag

SEQ ID NO: 743512 - RNA, 19 nt, Artificial Sequence
  Description of Artificial Sequence: Synthetic oligonucleotide
  Sense strand starting at position 136 of SEQ ID NO: 586777
ggguguuagauauauaggu

SEQ ID NO: 743513 - RNA, 19 nt, Artificial Sequence
  Description of Artificial Sequence: Synthetic oligonucleotide
  Antisense strand to SEQ ID NO: 743512
accuauauaucuaacaccc

SEQ ID NO: 743514 - RNA, 19 nt, Artificial Sequence
  Description of Artificial Sequence: Synthetic oligonucleotide
  Sense strand starting at position 138 of SEQ ID NO: 586777
guguuagauauauagguaa

SEQ ID NO: 743515 - RNA, 19 nt, Artificial Sequence
  Description of Artificial Sequence: Synthetic oligonucleotide
  Antisense strand to SEQ ID NO: 743514
uuaccuauauaucuaacac

SEQ ID NO: 743516 - RNA, 19 nt, Artificial Sequence
  Description of Artificial Sequence: Synthetic oligonucleotide
  Sense strand starting at position 164 of SEQ ID NO: 586777
ugagaaucacuauggcaug

SEQ ID NO: 743517 - RNA, 19 nt, Artificial Sequence
  Description of Artificial Sequence: Synthetic oligonucleotide
  Antisense strand to SEQ ID NO: 743516
caugccauagugauucuca

SEQ ID NO: 743518 - RNA, 19 nt, Artificial Sequence
  Description of Artificial Sequence: Synthetic oligonucleotide
  Sense strand starting at position 170 of SEQ ID NO: 586777
ucacuauggcauggaauga

SEQ ID NO: 743519 - RNA, 19 nt, Artificial Sequence
  Description of Artificial Sequence: Synthetic oligonucleotide
  Antisense strand to SEQ ID NO: 743518
ucauuccaugccauaguga

SEQ ID NO: 743520 - RNA, 19 nt, Artificial Sequence
  Description of Artificial Sequence: Synthetic oligonucleotide
  Sense strand starting at position 225 of SEQ ID NO: 586777
cugaguugaguguggagaa

SEQ ID NO: 743521 - RNA, 19 nt, Artificial Sequence
  Description of Artificial Sequence: Synthetic oligonucleotide
  Antisense strand to SEQ ID NO: 743520
uucuccacacucaacucag

SEQ ID NO: 743522 - RNA, 19 nt, Artificial Sequence
  Description of Artificial Sequence: Synthetic oligonucleotide
  Sense strand starting at position 329 of SEQ ID NO: 586777
agaaguaaugagggcaauu

SEQ ID NO: 743523 - RNA, 19 nt, Artificial Sequence
  Description of Artificial Sequence: Synthetic oligonucleotide
  Antisense strand to SEQ ID NO: 743522
aauugcccucauuacuucu

SEQ ID NO: 743524 - RNA, 19 nt, Artificial Sequence
  Description of Artificial Sequence: Synthetic oligonucleotide
  Sense strand starting at position 488 of SEQ ID NO: 586777
aacacaauuguguaaggua

SEQ ID NO: 743525 - RNA, 19 nt, Artificial Sequence
  Description of Artificial Sequence: Synthetic oligonucleotide
  Antisense strand to SEQ ID NO: 743524
uaccuuacacaauuguguu

SEQ ID NO: 743526 - RNA, 19 nt, Artificial Sequence
  Description of Artificial Sequence: Synthetic oligonucleotide
  Sense strand starting at position 738 of SEQ ID NO: 586777
uaguguauggcagauccaa

SEQ ID NO: 743527 - RNA, 19 nt, Artificial Sequence
  Description of Artificial Sequence: Synthetic oligonucleotide
  Antisense strand to SEQ ID NO: 743526
uuggaucugccauacacua

SEQ ID NO: 743528 - RNA, 19 nt, Artificial Sequence
  Description of Artificial Sequence: Synthetic oligonucleotide
  Sense strand starting at position 840 of SEQ ID NO: 586777
ggucacaaccauugagaac

SEQ ID NO: 743529 - RNA, 19 nt, Artificial Sequence
  Description of Artificial Sequence: Synthetic oligonucleotide
  Antisense strand to SEQ ID NO: 743528
guucucaaugguugugacc

SEQ ID NO: 743530 - RNA, 19 nt, Artificial Sequence
  Description of Artificial Sequence: Synthetic oligonucleotide
  Sense strand starting at position 987 of SEQ ID NO: 586777
ugagucguuaaaggagaaa

SEQ ID NO: 743531 - RNA, 19 nt, Artificial Sequence
  Description of Artificial Sequence: Synthetic oligonucleotide
  Antisense strand to SEQ ID NO: 743530
uuucuccuuuaacgacuca

SEQ ID NO: 743532 - RNA, 19 nt, Artificial Sequence
  Description of Artificial Sequence: Synthetic oligonucleotide
  Sense strand starting at position 1047 of SEQ ID NO: 586777
ucuaaucagcuguaauuga

SEQ ID NO: 743533 - RNA, 19 nt, Artificial Sequence
  Description of Artificial Sequence: Synthetic oligonucleotide
  Antisense strand to SEQ ID NO: 743532
ucaauuacagcugauuaga

SEQ ID NO: 743534 - RNA, 19 nt, Artificial Sequence
  Description of Artificial Sequence: Synthetic oligonucleotide
  Sense strand starting at position 1055 of SEQ ID NO: 586777
gcuguaauugacuagucag

SEQ ID NO: 743535 - RNA, 19 nt, Artificial Sequence
  Description of Artificial Sequence: Synthetic oligonucleotide
  Antisense strand to SEQ ID NO: 743534
cugacuagucaauuacagc

SEQ ID NO: 743536 - RNA, 19 nt, Artificial Sequence
  Description of Artificial Sequence: Synthetic oligonucleotide
  Sense strand starting at position 1058 of SEQ ID NO: 586777
guaauugacuagucagauc

SEQ ID NO: 743537 - RNA, 19 nt, Artificial Sequence
  Description of Artificial Sequence: Synthetic oligonucleotide
  Antisense strand to SEQ ID NO: 743536
gaucugacuagucaauuac

SEQ ID NO: 743538 - RNA, 19 nt, Artificial Sequence
  Description of Artificial Sequence: Synthetic oligonucleotide
  Sense strand starting at position 2087 of SEQ ID NO: 586777
cuucucuaucaguaauagu

SEQ ID NO: 743539 - RNA, 19 nt, Artificial Sequence
  Description of Artificial Sequence: Synthetic oligonucleotide
  Antisense strand to SEQ ID NO: 743538
acuauuacugauagagaag

SEQ ID NO: 743540 - RNA, 19 nt, Artificial Sequence
  Description of Artificial Sequence: Synthetic oligonucleotide
  Sense strand starting at position 2246 of SEQ ID NO: 586777
aagaaaucgugucuuggag

SEQ ID NO: 743541 - RNA, 19 nt, Artificial Sequence
  Description of Artificial Sequence: Synthetic oligonucleotide
  Antisense strand to SEQ ID NO: 743540
cuccaagacacgauuucuu

SEQ ID NO: 743542 - RNA, 19 nt, Artificial Sequence
  Description of Artificial Sequence: Synthetic oligonucleotide
  Sense strand starting at position 2435 of SEQ ID NO: 586777
ggaaguucuuccuuacaac

SEQ ID NO: 743543 - RNA, 19 nt, Artificial Sequence
  Description of Artificial Sequence: Synthetic oligonucleotide
  Antisense strand to SEQ ID NO: 743542
guuguaaggaagaacuucc

SEQ ID NO: 743544 - RNA, 19 nt, Artificial Sequence
  Description of Artificial Sequence: Synthetic oligonucleotide
  Sense strand starting at position 2484 of SEQ ID NO: 586777
ucuaccaucccuggagaua

SEQ ID NO: 743545 - RNA, 19 nt, Artificial Sequence
  Description of Artificial Sequence: Synthetic oligonucleotide
  Antisense strand to SEQ ID NO: 743544
uaucuccagggaugguaga

SEQ ID NO: 743546 - RNA, 19 nt, Artificial Sequence
  Description of Artificial Sequence: Synthetic oligonucleotide
  Sense strand starting at position 2544 of SEQ ID NO: 586777
guagcagagauuugggcuu

SEQ ID NO: 743547 - RNA, 19 nt, Artificial Sequence
  Description of Artificial Sequence: Synthetic oligonucleotide
  Antisense strand to SEQ ID NO: 743546
aagcccaaaucucugcuac

SEQ ID NO: 743548 - RNA, 19 nt, Artificial Sequence
  Description of Artificial Sequence: Synthetic oligonucleotide
  Sense strand starting at position 2610 of SEQ ID NO: 586777
accgauuugcuaugaccuu

SEQ ID NO: 743549 - RNA, 19 nt, Artificial Sequence
  Description of Artificial Sequence: Synthetic oligonucleotide
  Antisense strand to SEQ ID NO: 743548
aaggucauagcaaaucggu

SEQ ID NO: 743550 - RNA, 19 nt, Artificial Sequence
  Description of Artificial Sequence: Synthetic oligonucleotide
  Sense strand starting at position 2616 of SEQ ID NO: 586777
uugcuaugaccuugaaauc

SEQ ID NO: 743551 - RNA, 19 nt, Artificial Sequence
  Description of Artificial Sequence: Synthetic oligonucleotide
  Antisense strand to SEQ ID NO: 743550
gauuucaaggucauagcaa

SEQ ID NO: 743552 - RNA, 19 nt, Artificial Sequence
  Description of Artificial Sequence: Synthetic oligonucleotide
  Sense strand starting at position 2617 of SEQ ID NO: 586777
ugcuaugaccuugaaaucu

SEQ ID NO: 743553 - RNA, 19 nt, Artificial Sequence
  Description of Artificial Sequence: Synthetic oligonucleotide
  Antisense strand to SEQ ID NO: 743552
agauuucaaggucauagca

SEQ ID NO: 743554 - RNA, 19 nt, Artificial Sequence
  Description of Artificial Sequence: Synthetic oligonucleotide
  Sense strand starting at position 2665 of SEQ ID NO: 586777
cgucaaugugaauauuaau

SEQ ID NO: 743555 - RNA, 19 nt, Artificial Sequence
  Description of Artificial Sequence: Synthetic oligonucleotide
  Antisense strand to SEQ ID NO: 743554
auuaauauucacauugacg

SEQ ID NO: 743556 - RNA, 19 nt, Artificial Sequence
  Description of Artificial Sequence: Synthetic oligonucleotide
  Sense strand starting at position 2784 of SEQ ID NO: 586777
cccauauuagagcagugau

SEQ ID NO: 743557 - RNA, 19 nt, Artificial Sequence
  Description of Artificial Sequence: Synthetic oligonucleotide
  Antisense strand to SEQ ID NO: 743556
aucacugcucuaauauggg

SEQ ID NO: 743558 - RNA, 19 nt, Artificial Sequence
  Description of Artificial Sequence: Synthetic oligonucleotide
  Sense strand starting at position 2787 of SEQ ID NO: 586777
auauuagagcagugaugaa

SEQ ID NO: 743559 - RNA, 19 nt, Artificial Sequence
  Description of Artificial Sequence: Synthetic oligonucleotide
  Antisense strand to SEQ ID NO: 743558
uucaucacugcucuaauau

SEQ ID NO: 743560 - RNA, 19 nt, Artificial Sequence
  Description of Artificial Sequence: Synthetic oligonucleotide
  Sense strand starting at position 2870 of SEQ ID NO: 586777
aaguaaacaugggcucauu

SEQ ID NO: 743561 - RNA, 19 nt, Artificial Sequence
  Description of Artificial Sequence: Synthetic oligonucleotide
  Antisense strand to SEQ ID NO: 743560
aaugagcccauguuuacuu

SEQ ID NO: 743562 - RNA, 19 nt, Artificial Sequence
  Description of Artificial Sequence: Synthetic oligonucleotide
  Sense strand starting at position 3135 of SEQ ID NO: 586777
aggagauaugauugccaug

SEQ ID NO: 743563 - RNA, 19 nt, Artificial Sequence
  Description of Artificial Sequence: Synthetic oligonucleotide
  Antisense strand to SEQ ID NO: 743562
cauggcaaucauaucuccu

SEQ ID NO: 743564 - RNA, 19 nt, Artificial Sequence
  Description of Artificial Sequence: Synthetic oligonucleotide
  Sense strand starting at position 3152 of SEQ ID NO: 586777
ugcugugauggaugggaaa

SEQ ID NO: 743565 - RNA, 19 nt, Artificial Sequence
  Description of Artificial Sequence: Synthetic oligonucleotide
  Antisense strand to SEQ ID NO: 743564
uuucccauccaucacagca

SEQ ID NO: 743566 - RNA, 19 nt, Artificial Sequence
  Description of Artificial Sequence: Synthetic oligonucleotide
  Sense strand starting at position 3238 of SEQ ID NO: 586777
ggaucugaacaguggucua

SEQ ID NO: 743567 - RNA, 19 nt, Artificial Sequence
  Description of Artificial Sequence: Synthetic oligonucleotide
  Antisense strand to SEQ ID NO: 743566
uagaccacuguucagaucc

SEQ ID NO: 743568 - RNA, 19 nt, Artificial Sequence
  Description of Artificial Sequence: Synthetic oligonucleotide
  Sense strand starting at position 3367 of SEQ ID NO: 586777
ugagcugugagcuaugaaa

SEQ ID NO: 743569 - RNA, 19 nt, Artificial Sequence
  Description of Artificial Sequence: Synthetic oligonucleotide
  Antisense strand to SEQ ID NO: 743568
uuucauagcucacagcuca

SEQ ID NO: 743570 - RNA, 19 nt, Artificial Sequence
  Description of Artificial Sequence: Synthetic oligonucleotide
  Sense strand starting at position 3389 of SEQ ID NO: 586777
guuggaggcuacucagaau

SEQ ID NO: 743571 - RNA, 19 nt, Artificial Sequence
  Description of Artificial Sequence: Synthetic oligonucleotide
  Antisense strand to SEQ ID NO: 743570
auucugaguagccuccaac

SEQ ID NO: 743572 - RNA, 19 nt, Artificial Sequence
  Description of Artificial Sequence: Synthetic oligonucleotide
  Sense strand starting at position 3423 of SEQ ID NO: 586777
uaaauacugugguuccaga

SEQ ID NO: 743573 - RNA, 19 nt, Artificial Sequence
  Description of Artificial Sequence: Synthetic oligonucleotide
  Antisense strand to SEQ ID NO: 743572
ucuggaaccacaguauuua

SEQ ID NO: 743574 - RNA, 19 nt, Artificial Sequence
  Description of Artificial Sequence: Synthetic oligonucleotide
  Sense strand starting at position 3460 of SEQ ID NO: 586777
acguuagaagcagaaucuu

SEQ ID NO: 743575 - RNA, 19 nt, Artificial Sequence
  Description of Artificial Sequence: Synthetic oligonucleotide
  Antisense strand to SEQ ID NO: 743574
aagauucugcuucuaacgu

SEQ ID NO: 743576 - RNA, 19 nt, Artificial Sequence
  Description of Artificial Sequence: Synthetic oligonucleotide
  Sense strand starting at position 3483 of SEQ ID NO: 586777
aguaauuggugacuuggau

SEQ ID NO: 743577 - RNA, 19 nt, Artificial Sequence
  Description of Artificial Sequence: Synthetic oligonucleotide
  Antisense strand to SEQ ID NO: 743576
auccaagucaccaauuacu

SEQ ID NO: 743578 - RNA, 19 nt, Artificial Sequence
  Description of Artificial Sequence: Synthetic oligonucleotide
  Sense strand starting at position 3551 of SEQ ID NO: 586777
gcuuauuaccuagagguga

SEQ ID NO: 743579 - RNA, 19 nt, Artificial Sequence
  Description of Artificial Sequence: Synthetic oligonucleotide
  Antisense strand to SEQ ID NO: 743578
ucaccucuagguaauaagc

SEQ ID NO: 743580 - RNA, 19 nt, Artificial Sequence
  Description of Artificial Sequence: Synthetic oligonucleotide
  Sense strand starting at position 3553 of SEQ ID NO: 586777
uuauuaccuagaggugaug

SEQ ID NO: 743581 - RNA, 19 nt, Artificial Sequence
  Description of Artificial Sequence: Synthetic oligonucleotide
  Antisense strand to SEQ ID NO: 743580
caucaccucuagguaauaa

SEQ ID NO: 743582 - RNA, 19 nt, Artificial Sequence
  Description of Artificial Sequence: Synthetic oligonucleotide
  Sense strand starting at position 3576 of SEQ ID NO: 586777
uuacuaagguaguuagaug

SEQ ID NO: 743583 - RNA, 19 nt, Artificial Sequence
  Description of Artificial Sequence: Synthetic oligonucleotide
  Antisense strand to SEQ ID NO: 743582
caucuaacuaccuuaguaa

SEQ ID NO: 743584 - RNA, 19 nt, Artificial Sequence
  Description of Artificial Sequence: Synthetic oligonucleotide
  Sense strand starting at position 3769 of SEQ ID NO: 586777
aagacacugugguuuagau

SEQ ID NO: 743585 - RNA, 19 nt, Artificial Sequence
  Description of Artificial Sequence: Synthetic oligonucleotide
  Antisense strand to SEQ ID NO: 743584
aucuaaaccacagugucuu

SEQ ID NO: 743586 - RNA, 19 nt, Artificial Sequence
  Description of Artificial Sequence: Synthetic oligonucleotide
  Sense strand starting at position 3805 of SEQ ID NO: 586777
caaguuagacagugauaaa

SEQ ID NO: 743587 - RNA, 19 nt, Artificial Sequence
  Description of Artificial Sequence: Synthetic oligonucleotide
  Antisense strand to SEQ ID NO: 743586
uuuaucacugucuaacuug

SEQ ID NO: 743588 - RNA, 19 nt, Artificial Sequence
  Description of Artificial Sequence: Synthetic oligonucleotide
  Sense strand starting at position 3 of SEQ ID NO: 586778
gugaacuuacuagguuuau

SEQ ID NO: 743589 - RNA, 19 nt, Artificial Sequence
  Description of Artificial Sequence: Synthetic oligonucleotide
  Antisense strand to SEQ ID NO: 743588
auaaaccuaguaaguucac

SEQ ID NO: 743590 - RNA, 19 nt, Artificial Sequence
  Description of Artificial Sequence: Synthetic oligonucleotide
  Sense strand starting at position 4 of SEQ ID NO: 586778
ugaacuuacuagguuuauu

SEQ ID NO: 743591 - RNA, 19 nt, Artificial Sequence
  Description of Artificial Sequence: Synthetic oligonucleotide
  Antisense strand to SEQ ID NO: 743590
aauaaaccuaguaaguuca

SEQ ID NO: 743592 - RNA, 19 nt, Artificial Sequence
  Description of Artificial Sequence: Synthetic oligonucleotide
  Sense strand starting at position 41 of SEQ ID NO: 586778
gcaaaugaauguuucuaau

SEQ ID NO: 743593 - RNA, 19 nt, Artificial Sequence
  Description of Artificial Sequence: Synthetic oligonucleotide
  Antisense strand to SEQ ID NO: 743592
auuagaaacauucauuugc

SEQ ID NO: 743594 - RNA, 19 nt, Artificial Sequence
  Description of Artificial Sequence: Synthetic oligonucleotide
  Sense strand starting at position 136 of SEQ ID NO: 586778
agcggagauuuaucuuguu

SEQ ID NO: 743595 - RNA, 19 nt, Artificial Sequence
  Description of Artificial Sequence: Synthetic oligonucleotide
  Antisense strand to SEQ ID NO: 743594
aacaagauaaaucuccgcu

SEQ ID NO: 743596 - RNA, 19 nt, Artificial Sequence
  Description of Artificial Sequence: Synthetic oligonucleotide
  Sense strand starting at position 185 of SEQ ID NO: 586778
ugcaaagguaccugaugaa

SEQ ID NO: 743597 - RNA, 19 nt, Artificial Sequence
  Description of Artificial Sequence: Synthetic oligonucleotide
  Antisense strand to SEQ ID NO: 743596
uucaucagguaccuuugca

SEQ ID NO: 743598 - RNA, 19 nt, Artificial Sequence
  Description of Artificial Sequence: Synthetic oligonucleotide
  Sense strand starting at position 247 of SEQ ID NO: 586778
ggugucaucuugucaggaa

SEQ ID NO: 743599 - RNA, 19 nt, Artificial Sequence
  Description of Artificial Sequence: Synthetic oligonucleotide
  Antisense strand to SEQ ID NO: 743598
uuccugacaagaugacacc

SEQ ID NO: 743600 - RNA, 19 nt, Artificial Sequence
  Description of Artificial Sequence: Synthetic oligonucleotide
  Sense strand starting at position 314 of SEQ ID NO: 586778
cauaauaccgucugugaau

SEQ ID NO: 743601 - RNA, 19 nt, Artificial Sequence
  Description of Artificial Sequence: Synthetic oligonucleotide
  Antisense strand to SEQ ID NO: 743600
auucacagacgguauuaug

SEQ ID NO: 743602 - RNA, 19 nt, Artificial Sequence
  Description of Artificial Sequence: Synthetic oligonucleotide
  Sense strand starting at position 315 of SEQ ID NO: 586778
auaauaccgucugugaauc

SEQ ID NO: 743603 - RNA, 19 nt, Artificial Sequence
  Description of Artificial Sequence: Synthetic oligonucleotide
  Antisense strand to SEQ ID NO: 743602
gauucacagacgguauuau

SEQ ID NO: 743604 - RNA, 19 nt, Artificial Sequence
  Description of Artificial Sequence: Synthetic oligonucleotide
  Sense strand starting at position 395 of SEQ ID NO: 586778
ccaagagcuuugucagguu

SEQ ID NO: 743605 - RNA, 19 nt, Artificial Sequence
  Description of Artificial Sequence: Synthetic oligonucleotide
  Antisense strand to SEQ ID NO: 743604
aaccugacaaagcucuugg

SEQ ID NO: 743606 - RNA, 19 nt, Artificial Sequence
  Description of Artificial Sequence: Synthetic oligonucleotide
  Sense strand starting at position 652 of SEQ ID NO: 586778
cagugcauacugugauaga

SEQ ID NO: 743607 - RNA, 19 nt, Artificial Sequence
  Description of Artificial Sequence: Synthetic oligonucleotide
  Antisense strand to SEQ ID NO: 743606
ucuaucacaguaugcacug

SEQ ID NO: 743608 - RNA, 19 nt, Artificial Sequence
  Description of Artificial Sequence: Synthetic oligonucleotide
  Sense strand starting at position 818 of SEQ ID NO: 586778
uacugaaagcucugggcua

SEQ ID NO: 743609 - RNA, 19 nt, Artificial Sequence
  Description of Artificial Sequence: Synthetic oligonucleotide
  Antisense strand to SEQ ID NO: 743608
uagcccagagcuuucagua

SEQ ID NO: 743610 - RNA, 19 nt, Artificial Sequence
  Description of Artificial Sequence: Synthetic oligonucleotide
  Sense strand starting at position 820 of SEQ ID NO: 586778
cugaaagcucugggcuacu

SEQ ID NO: 743611 - RNA, 19 nt, Artificial Sequence
  Description of Artificial Sequence: Synthetic oligonucleotide
  Antisense strand to SEQ ID NO: 743610
aguagcccagagcuuucag

SEQ ID NO: 743612 - RNA, 19 nt, Artificial Sequence
  Description of Artificial Sequence: Synthetic oligonucleotide
  Sense strand starting at position 877 of SEQ ID NO: 586778
cuuccauggugguccauaa

SEQ ID NO: 743613 - RNA, 19 nt, Artificial Sequence
  Description of Artificial Sequence: Synthetic oligonucleotide
  Antisense strand to SEQ ID NO: 743612
uuauggaccaccauggaag

SEQ ID NO: 743614 - RNA, 19 nt, Artificial Sequence
  Description of Artificial Sequence: Synthetic oligonucleotide
  Sense strand starting at position 923 of SEQ ID NO: 586778
cagggcucacuguaguuau

SEQ ID NO: 743615 - RNA, 19 nt, Artificial Sequence
  Description of Artificial Sequence: Synthetic oligonucleotide
  Antisense strand to SEQ ID NO: 743614
auaacuacagugagcccug

SEQ ID NO: 743616 - RNA, 19 nt, Artificial Sequence
  Description of Artificial Sequence: Synthetic oligonucleotide
  Sense strand starting at position 933 of SEQ ID NO: 586778
uguaguuauugcucagagg

SEQ ID NO: 743617 - RNA, 19 nt, Artificial Sequence
  Description of Artificial Sequence: Synthetic oligonucleotide
  Antisense strand to SEQ ID NO: 743616
ccucugagcaauaacuaca

SEQ ID NO: 743618 - RNA, 19 nt, Artificial Sequence
  Description of Artificial Sequence: Synthetic oligonucleotide
  Sense strand starting at position 962 of SEQ ID NO: 586778
aaagaaacucagcaguguu

SEQ ID NO: 743619 - RNA, 19 nt, Artificial Sequence
  Description of Artificial Sequence: Synthetic oligonucleotide
  Antisense strand to SEQ ID NO: 743618
aacacugcugaguuucuuu

SEQ ID NO: 743620 - RNA, 19 nt, Artificial Sequence
  Description of Artificial Sequence: Synthetic oligonucleotide
  Sense strand starting at position 965 of SEQ ID NO: 586778
gaaacucagcaguguucuu

SEQ ID NO: 743621 - RNA, 19 nt, Artificial Sequence
  Description of Artificial Sequence: Synthetic oligonucleotide
  Antisense strand to SEQ ID NO: 743620
aagaacacugcugaguuuc

SEQ ID NO: 743622 - RNA, 19 nt, Artificial Sequence
  Description of Artificial Sequence: Synthetic oligonucleotide
  Sense strand starting at position 2139 of SEQ ID NO: 586778
caaguagccagcgagugau

SEQ ID NO: 743623 - RNA, 19 nt, Artificial Sequence
  Description of Artificial Sequence: Synthetic oligonucleotide
  Antisense strand to SEQ ID NO: 743622
aucacucgcuggcuacuug

SEQ ID NO: 743624 - RNA, 19 nt, Artificial Sequence
  Description of Artificial Sequence: Synthetic oligonucleotide
  Sense strand starting at position 2627 of SEQ ID NO: 586778
ggcaacagacauugacauu

SEQ ID NO: 743625 - RNA, 19 nt, Artificial Sequence
  Description of Artificial Sequence: Synthetic oligonucleotide
  Antisense strand to SEQ ID NO: 743624
aaugucaaugucuguugcc

SEQ ID NO: 743626 - RNA, 19 nt, Artificial Sequence
  Description of Artificial Sequence: Synthetic oligonucleotide
  Sense strand starting at position 2636 of SEQ ID NO: 586778
cauugacauuuagggagaa

SEQ ID NO: 743627 - RNA, 19 nt, Artificial Sequence
  Description of Artificial Sequence: Synthetic oligonucleotide
  Antisense strand to SEQ ID NO: 743626
uucucccuaaaugucaaug

SEQ ID NO: 743628 - RNA, 19 nt, Artificial Sequence
  Description of Artificial Sequence: Synthetic oligonucleotide
  Sense strand starting at position 2751 of SEQ ID NO: 586778
agagcauuagugcauguga

SEQ ID NO: 743629 - RNA, 19 nt, Artificial Sequence
  Description of Artificial Sequence: Synthetic oligonucleotide
  Antisense strand to SEQ ID NO: 743628
ucacaugcacuaaugcucu

SEQ ID NO: 743630 - RNA, 19 nt, Artificial Sequence
  Description of Artificial Sequence: Synthetic oligonucleotide
  Sense strand starting at position 2790 of SEQ ID NO: 586778
ggcuaauccgucuauguca

SEQ ID NO: 743631 - RNA, 19 nt, Artificial Sequence
  Description of Artificial Sequence: Synthetic oligonucleotide
  Antisense strand to SEQ ID NO: 743630
ugacauagacggauuagcc

SEQ ID NO: 743632 - RNA, 19 nt, Artificial Sequence
  Description of Artificial Sequence: Synthetic oligonucleotide
  Sense strand starting at position 2837 of SEQ ID NO: 586778
uuuaaagggucccugcaaa

SEQ ID NO: 743633 - RNA, 19 nt, Artificial Sequence
  Description of Artificial Sequence: Synthetic oligonucleotide
  Antisense strand to SEQ ID NO: 743632
uuugcagggacccuuuaaa

SEQ ID NO: 743634 - RNA, 19 nt, Artificial Sequence
  Description of Artificial Sequence: Synthetic oligonucleotide
  Sense strand starting at position 2890 of SEQ ID NO: 586778
gugcacauuucuccggcua

SEQ ID NO: 743635 - RNA, 19 nt, Artificial Sequence
  Description of Artificial Sequence: Synthetic oligonucleotide
  Antisense strand to SEQ ID NO: 743634
uagccggagaaaugugcac

SEQ ID NO: 743636 - RNA, 19 nt, Artificial Sequence
  Description of Artificial Sequence: Synthetic oligonucleotide
  Sense strand starting at position 2891 of SEQ ID NO: 586778
ugcacauuucuccggcuau

SEQ ID NO: 743637 - RNA, 19 nt, Artificial Sequence
  Description of Artificial Sequence: Synthetic oligonucleotide
  Antisense strand to SEQ ID NO: 743636
auagccggagaaaugugca

SEQ ID NO: 743638 - RNA, 19 nt, Artificial Sequence
  Description of Artificial Sequence: Synthetic oligonucleotide
  Sense strand starting at position 2901 of SEQ ID NO: 586778
uccggcuaugaucaugaaa

SEQ ID NO: 743639 - RNA, 19 nt, Artificial Sequence
  Description of Artificial Sequence: Synthetic oligonucleotide
  Antisense strand to SEQ ID NO: 743638
uuucaugaucauagccgga

SEQ ID NO: 743640 - RNA, 19 nt, Artificial Sequence
  Description of Artificial Sequence: Synthetic oligonucleotide
  Sense strand starting at position 2919 of SEQ ID NO: 586778
auuagugaaagucagaguu

SEQ ID NO: 743641 - RNA, 19 nt, Artificial Sequence
  Description of Artificial Sequence: Synthetic oligonucleotide
  Antisense strand to SEQ ID NO: 743640
aacucugacuuucacuaau

SEQ ID NO: 743642 - RNA, 19 nt, Artificial Sequence
  Description of Artificial Sequence: Synthetic oligonucleotide
  Sense strand starting at position 2972 of SEQ ID NO: 586778
cucugcuucguguuugcaa

SEQ ID NO: 743643 - RNA, 19 nt, Artificial Sequence
  Description of Artificial Sequence: Synthetic oligonucleotide
  Antisense strand to SEQ ID NO: 743642
uugcaaacacgaagcagag

SEQ ID NO: 743644 - RNA, 19 nt, Artificial Sequence
  Description of Artificial Sequence: Synthetic oligonucleotide
  Sense strand starting at position 3088 of SEQ ID NO: 586778
ggcauaaucugucuaccca

SEQ ID NO: 743645 - RNA, 19 nt, Artificial Sequence
  Description of Artificial Sequence: Synthetic oligonucleotide
  Antisense strand to SEQ ID NO: 743644
uggguagacagauuaugcc

SEQ ID NO: 743646 - RNA, 19 nt, Artificial Sequence
  Description of Artificial Sequence: Synthetic oligonucleotide
  Sense strand starting at position 3157 of SEQ ID NO: 586778
aaguguaagcuauggaguu

SEQ ID NO: 743647 - RNA, 19 nt, Artificial Sequence
  Description of Artificial Sequence: Synthetic oligonucleotide
  Antisense strand to SEQ ID NO: 743646
aacuccauagcuuacacuu

SEQ ID NO: 743648 - RNA, 19 nt, Artificial Sequence
  Description of Artificial Sequence: Synthetic oligonucleotide
  Sense strand starting at position 3210 of SEQ ID NO: 586778
gcuugucacgggccguaaa

SEQ ID NO: 743649 - RNA, 19 nt, Artificial Sequence
  Description of Artificial Sequence: Synthetic oligonucleotide
  Antisense strand to SEQ ID NO: 743648
uuuacggcccgugacaagc

SEQ ID NO: 743650 - RNA, 19 nt, Artificial Sequence
  Description of Artificial Sequence: Synthetic oligonucleotide
  Sense strand starting at position 3221 of SEQ ID NO: 586778
gccguaaaucugcucuucu

SEQ ID NO: 743651 - RNA, 19 nt, Artificial Sequence
  Description of Artificial Sequence: Synthetic oligonucleotide
  Antisense strand to SEQ ID NO: 743650
agaagagcagauuuacggc

SEQ ID NO: 743652 - RNA, 19 nt, Artificial Sequence
  Description of Artificial Sequence: Synthetic oligonucleotide
  Sense strand starting at position 3302 of SEQ ID NO: 586778
agccucuauggugauuaua

SEQ ID NO: 743653 - RNA, 19 nt, Artificial Sequence
  Description of Artificial Sequence: Synthetic oligonucleotide
  Antisense strand to SEQ ID NO: 743652
uauaaucaccauagaggcu

SEQ ID NO: 743654 - RNA, 19 nt, Artificial Sequence
  Description of Artificial Sequence: Synthetic oligonucleotide
  Sense strand starting at position 3304 of SEQ ID NO: 586778
ccucuauggugauuauaaa

SEQ ID NO: 743655 - RNA, 19 nt, Artificial Sequence
  Description of Artificial Sequence: Synthetic oligonucleotide
  Antisense strand to SEQ ID NO: 743654
uuuauaaucaccauagagg

SEQ ID NO: 743656 - RNA, 19 nt, Artificial Sequence
  Description of Artificial Sequence: Synthetic oligonucleotide
  Sense strand starting at position 3405 of SEQ ID NO: 586778
uuguuagaccgucaauaga

SEQ ID NO: 743657 - RNA, 19 nt, Artificial Sequence
  Description of Artificial Sequence: Synthetic oligonucleotide
  Antisense strand to SEQ ID NO: 743656
ucuauugacggucuaacaa

SEQ ID NO: 743658 - RNA, 19 nt, Artificial Sequence
  Description of Artificial Sequence: Synthetic oligonucleotide
  Sense strand starting at position 3483 of SEQ ID NO: 586778
gugugaagaucuuuacagc

SEQ ID NO: 743659 - RNA, 19 nt, Artificial Sequence
  Description of Artificial Sequence: Synthetic oligonucleotide
  Antisense strand to SEQ ID NO: 743658
gcuguaaagaucuucacac

SEQ ID NO: 743660 - RNA, 19 nt, Artificial Sequence
  Description of Artificial Sequence: Synthetic oligonucleotide
  Sense strand starting at position 3484 of SEQ ID NO: 586778
ugugaagaucuuuacagcu

SEQ ID NO: 743661 - RNA, 19 nt, Artificial Sequence
  Description of Artificial Sequence: Synthetic oligonucleotide
  Antisense strand to SEQ ID NO: 743660
agcuguaaagaucuucaca

SEQ ID NO: 743662 - RNA, 19 nt, Artificial Sequence
  Description of Artificial Sequence: Synthetic oligonucleotide
  Sense strand starting at position 3503 of SEQ ID NO: 586778
uuacacuguuucuuggaau

SEQ ID NO: 743663 - RNA, 19 nt, Artificial Sequence
  Description of Artificial Sequence: Synthetic oligonucleotide
  Antisense strand to SEQ ID NO: 743662
auuccaagaaacaguguaa

SEQ ID NO: 743664 - RNA, 19 nt, Artificial Sequence
  Description of Artificial Sequence: Synthetic oligonucleotide
  Sense strand starting at position 3604 of SEQ ID NO: 586778
ugaagcuguguguagauau

SEQ ID NO: 743665 - RNA, 19 nt, Artificial Sequence
  Description of Artificial Sequence: Synthetic oligonucleotide
  Antisense strand to SEQ ID NO: 743664
auaucuacacacagcuuca

SEQ ID NO: 743666 - RNA, 19 nt, Artificial Sequence
  Description of Artificial Sequence: Synthetic oligonucleotide
  Sense strand starting at position 3675 of SEQ ID NO: 586778
gccacacagcaaugacauu

SEQ ID NO: 743667 - RNA, 19 nt, Artificial Sequence
  Description of Artificial Sequence: Synthetic oligonucleotide
  Antisense strand to SEQ ID NO: 743666
aaugucauugcuguguggc

SEQ ID NO: 743668 - RNA, 19 nt, Artificial Sequence
  Description of Artificial Sequence: Synthetic oligonucleotide
  Sense strand starting at position 58 of SEQ ID NO: 586779
gugaaauuccaacaguuac

SEQ ID NO: 743669 - RNA, 19 nt, Artificial Sequence
  Description of Artificial Sequence: Synthetic oligonucleotide
  Antisense strand to SEQ ID NO: 743668
guaacuguuggaauuucac

SEQ ID NO: 743670 - RNA, 19 nt, Artificial Sequence
  Description of Artificial Sequence: Synthetic oligonucleotide
  Sense strand starting at position 227 of SEQ ID NO: 586779
aaguuugaagucuagaucu

SEQ ID NO: 743671 - RNA, 19 nt, Artificial Sequence
  Description of Artificial Sequence: Synthetic oligonucleotide
  Antisense strand to SEQ ID NO: 743670
agaucuagacuucaaacuu

SEQ ID NO: 743672 - RNA, 19 nt, Artificial Sequence
  Description of Artificial Sequence: Synthetic oligonucleotide
  Sense strand starting at position 261 of SEQ ID NO: 586779
agacauaguuguguuuaac

SEQ ID NO: 743673 - RNA, 19 nt, Artificial Sequence
  Description of Artificial Sequence: Synthetic oligonucleotide
  Antisense strand to SEQ ID NO: 743672
guuaaacacaacuaugucu

SEQ ID NO: 743674 - RNA, 19 nt, Artificial Sequence
  Description of Artificial Sequence: Synthetic oligonucleotide
  Sense strand starting at position 291 of SEQ ID NO: 586779
acaggaugcucucuagaau

SEQ ID NO: 743675 - RNA, 19 nt, Artificial Sequence
  Description of Artificial Sequence: Synthetic oligonucleotide
  Antisense strand to SEQ ID NO: 743674
auucuagagagcauccugu

SEQ ID NO: 743676 - RNA, 19 nt, Artificial Sequence
  Description of Artificial Sequence: Synthetic oligonucleotide
  Sense strand starting at position 364 of SEQ ID NO: 586779
gugaaaggaauaugcugaa

SEQ ID NO: 743677 - RNA, 19 nt, Artificial Sequence
  Description of Artificial Sequence: Synthetic oligonucleotide
  Antisense strand to SEQ ID NO: 743676
uucagcauauuccuuucac

SEQ ID NO: 743678 - RNA, 19 nt, Artificial Sequence
  Description of Artificial Sequence: Synthetic oligonucleotide
  Sense strand starting at position 492 of SEQ ID NO: 586779
uagacugguucugugacaa

SEQ ID NO: 743679 - RNA, 19 nt, Artificial Sequence
  Description of Artificial Sequence: Synthetic oligonucleotide
  Antisense strand to SEQ ID NO: 743678
uugucacagaaccagucua

SEQ ID NO: 743680 - RNA, 19 nt, Artificial Sequence
  Description of Artificial Sequence: Synthetic oligonucleotide
  Sense strand starting at position 510 of SEQ ID NO: 586779
aaacguaaacaguguuaca

SEQ ID NO: 743681 - RNA, 19 nt, Artificial Sequence
  Description of Artificial Sequence: Synthetic oligonucleotide
  Antisense strand to SEQ ID NO: 743680
uguaacacuguuuacguuu

SEQ ID NO: 743682 - RNA, 19 nt, Artificial Sequence
  Description of Artificial Sequence: Synthetic oligonucleotide
  Sense strand starting at position 672 of SEQ ID NO: 586779
uuucuacucugauuaggac

SEQ ID NO: 743683 - RNA, 19 nt, Artificial Sequence
  Description of Artificial Sequence: Synthetic oligonucleotide
  Antisense strand to SEQ ID NO: 743682
guccuaaucagaguagaaa

SEQ ID NO: 743684 - RNA, 19 nt, Artificial Sequence
  Description of Artificial Sequence: Synthetic oligonucleotide
  Sense strand starting at position 761 of SEQ ID NO: 586779
gaggaaaugaguugggcua

SEQ ID NO: 743685 - RNA, 19 nt, Artificial Sequence
  Description of Artificial Sequence: Synthetic oligonucleotide
  Antisense strand to SEQ ID NO: 743684
uagcccaacucauuuccuc

SEQ ID NO: 743686 - RNA, 19 nt, Artificial Sequence
  Description of Artificial Sequence: Synthetic oligonucleotide
  Sense strand starting at position 762 of SEQ ID NO: 586779
aggaaaugaguugggcuaa

SEQ ID NO: 743687 - RNA, 19 nt, Artificial Sequence
  Description of Artificial Sequence: Synthetic oligonucleotide
  Antisense strand to SEQ ID NO: 743686
uuagcccaacucauuuccu

SEQ ID NO: 743688 - RNA, 19 nt, Artificial Sequence
  Description of Artificial Sequence: Synthetic oligonucleotide
  Sense strand starting at position 865 of SEQ ID NO: 586779
gaacuaaggcuaugagagu

SEQ ID NO: 743689 - RNA, 19 nt, Artificial Sequence
  Description of Artificial Sequence: Synthetic oligonucleotide
  Antisense strand to SEQ ID NO: 743688
acucucauagccuuaguuc

SEQ ID NO: 743690 - RNA, 19 nt, Artificial Sequence
  Description of Artificial Sequence: Synthetic oligonucleotide
  Sense strand starting at position 922 of SEQ ID NO: 586779
aucuacuuccaugguguga

SEQ ID NO: 743691 - RNA, 19 nt, Artificial Sequence
  Description of Artificial Sequence: Synthetic oligonucleotide
  Antisense strand to SEQ ID NO: 743690
ucacaccauggaaguagau

SEQ ID NO: 743692 - RNA, 19 nt, Artificial Sequence
  Description of Artificial Sequence: Synthetic oligonucleotide
  Sense strand starting at position 949 of SEQ ID NO: 586779
uguacacacucuuugacuu

SEQ ID NO: 743693 - RNA, 19 nt, Artificial Sequence
  Description of Artificial Sequence: Synthetic oligonucleotide
  Antisense strand to SEQ ID NO: 743692
aagucaaagaguguguaca

SEQ ID NO: 743694 - RNA, 19 nt, Artificial Sequence
  Description of Artificial Sequence: Synthetic oligonucleotide
  Sense strand starting at position 950 of SEQ ID NO: 586779
guacacacucuuugacuuu

SEQ ID NO: 743695 - RNA, 19 nt, Artificial Sequence
  Description of Artificial Sequence: Synthetic oligonucleotide
  Antisense strand to SEQ ID NO: 743694
aaagucaaagaguguguac

SEQ ID NO: 743696 - RNA, 19 nt, Artificial Sequence
  Description of Artificial Sequence: Synthetic oligonucleotide
  Sense strand starting at position 1020 of SEQ ID NO: 586779
auaauuaacccugaggcuu

SEQ ID NO: 743697 - RNA, 19 nt, Artificial Sequence
  Description of Artificial Sequence: Synthetic oligonucleotide
  Antisense strand to SEQ ID NO: 743696
aagccucaggguuaauuau

SEQ ID NO: 743698 - RNA, 19 nt, Artificial Sequence
  Description of Artificial Sequence: Synthetic oligonucleotide
  Sense strand starting at position 1127 of SEQ ID NO: 586779
ugucauuccgaagaguaaa

SEQ ID NO: 743699 - RNA, 19 nt, Artificial Sequence
  Description of Artificial Sequence: Synthetic oligonucleotide
  Antisense strand to SEQ ID NO: 743698
uuuacucuucggaaugaca

SEQ ID NO: 743700 - RNA, 19 nt, Artificial Sequence
  Description of Artificial Sequence: Synthetic oligonucleotide
  Sense strand starting at position 1334 of SEQ ID NO: 586779
ugaggaugguggagauaau

SEQ ID NO: 743701 - RNA, 19 nt, Artificial Sequence
  Description of Artificial Sequence: Synthetic oligonucleotide
  Antisense strand to SEQ ID NO: 743700
auuaucuccaccauccuca

SEQ ID NO: 743702 - RNA, 19 nt, Artificial Sequence
  Description of Artificial Sequence: Synthetic oligonucleotide
  Sense strand starting at position 1346 of SEQ ID NO: 586779
agauaauguagguguagga

SEQ ID NO: 743703 - RNA, 19 nt, Artificial Sequence
  Description of Artificial Sequence: Synthetic oligonucleotide
  Antisense strand to SEQ ID NO: 743702
uccuacaccuacauuaucu

SEQ ID NO: 743704 - RNA, 19 nt, Artificial Sequence
  Description of Artificial Sequence: Synthetic oligonucleotide
  Sense strand starting at position 1363 of SEQ ID NO: 586779
gagacaaucguagggauca

SEQ ID NO: 743705 - RNA, 19 nt, Artificial Sequence
  Description of Artificial Sequence: Synthetic oligonucleotide
  Antisense strand to SEQ ID NO: 743704
ugaucccuacgauugucuc

SEQ ID NO: 743706 - RNA, 19 nt, Artificial Sequence
  Description of Artificial Sequence: Synthetic oligonucleotide
  Sense strand starting at position 1427 of SEQ ID NO: 586779
cugugagaagaguguuauc

SEQ ID NO: 743707 - RNA, 19 nt, Artificial Sequence
  Description of Artificial Sequence: Synthetic oligonucleotide
  Antisense strand to SEQ ID NO: 743706
gauaacacucuucucacag

SEQ ID NO: 743708 - RNA, 19 nt, Artificial Sequence
  Description of Artificial Sequence: Synthetic oligonucleotide
  Sense strand starting at position 1698 of SEQ ID NO: 586779
aaaguugagcgauacaugu

SEQ ID NO: 743709 - RNA, 19 nt, Artificial Sequence
  Description of Artificial Sequence: Synthetic oligonucleotide
  Antisense strand to SEQ ID NO: 743708
acauguaucgcucaacuuu

SEQ ID NO: 743710 - RNA, 19 nt, Artificial Sequence
  Description of Artificial Sequence: Synthetic oligonucleotide
  Sense strand starting at position 1720 of SEQ ID NO: 586779
gaaagauacugucugcauc

SEQ ID NO: 743711 - RNA, 19 nt, Artificial Sequence
  Description of Artificial Sequence: Synthetic oligonucleotide
  Antisense strand to SEQ ID NO: 743710
gaugcagacaguaucuuuc

SEQ ID NO: 743712 - RNA, 19 nt, Artificial Sequence
  Description of Artificial Sequence: Synthetic oligonucleotide
  Sense strand starting at position 1787 of SEQ ID NO: 586779
ccaggaucuccaggguaga

SEQ ID NO: 743713 - RNA, 19 nt, Artificial Sequence
  Description of Artificial Sequence: Synthetic oligonucleotide
  Antisense strand to SEQ ID NO: 743712
ucuacccuggagauccugg

SEQ ID NO: 743714 - RNA, 19 nt, Artificial Sequence
  Description of Artificial Sequence: Synthetic oligonucleotide
  Sense strand starting at position 1841 of SEQ ID NO: 586779
gacguuuauccacacagac

SEQ ID NO: 743715 - RNA, 19 nt, Artificial Sequence
  Description of Artificial Sequence: Synthetic oligonucleotide
  Antisense strand to SEQ ID NO: 743714
gucuguguggauaaacguc

SEQ ID NO: 743716 - RNA, 19 nt, Artificial Sequence
  Description of Artificial Sequence: Synthetic oligonucleotide
  Sense strand starting at position 2159 of SEQ ID NO: 586779
acauacauagcuugaggua

SEQ ID NO: 743717 - RNA, 19 nt, Artificial Sequence
  Description of Artificial Sequence: Synthetic oligonucleotide
  Antisense strand to SEQ ID NO: 743716
uaccucaagcuauguaugu

SEQ ID NO: 743718 - RNA, 19 nt, Artificial Sequence
  Description of Artificial Sequence: Synthetic oligonucleotide
  Sense strand starting at position 2256 of SEQ ID NO: 586779
ucuucuacugguggugaaa

SEQ ID NO: 743719 - RNA, 19 nt, Artificial Sequence
  Description of Artificial Sequence: Synthetic oligonucleotide
  Antisense strand to SEQ ID NO: 743718
uuucaccaccaguagaaga

SEQ ID NO: 743720 - RNA, 19 nt, Artificial Sequence
  Description of Artificial Sequence: Synthetic oligonucleotide
  Sense strand starting at position 2384 of SEQ ID NO: 586779
uggaguuacuuucucuuag

SEQ ID NO: 743721 - RNA, 19 nt, Artificial Sequence
  Description of Artificial Sequence: Synthetic oligonucleotide
  Antisense strand to SEQ ID NO: 743720
cuaagagaaaguaacucca

SEQ ID NO: 743722 - RNA, 19 nt, Artificial Sequence
  Description of Artificial Sequence: Synthetic oligonucleotide
  Sense strand starting at position 2399 of SEQ ID NO: 586779
uuagguuaacugugcaaga

SEQ ID NO: 743723 - RNA, 19 nt, Artificial Sequence
  Description of Artificial Sequence: Synthetic oligonucleotide
  Antisense strand to SEQ ID NO: 743722
ucuugcacaguuaaccuaa

SEQ ID NO: 743724 - RNA, 19 nt, Artificial Sequence
  Description of Artificial Sequence: Synthetic oligonucleotide
  Sense strand starting at position 2400 of SEQ ID NO: 586779
uagguuaacugugcaagau

SEQ ID NO: 743725 - RNA, 19 nt, Artificial Sequence
  Description of Artificial Sequence: Synthetic oligonucleotide
  Antisense strand to SEQ ID NO: 743724
aucuugcacaguuaaccua

SEQ ID NO: 743726 - RNA, 19 nt, Artificial Sequence
  Description of Artificial Sequence: Synthetic oligonucleotide
  Sense strand starting at position 2401 of SEQ ID NO: 586779
agguuaacugugcaagaug

SEQ ID NO: 743727 - RNA, 19 nt, Artificial Sequence
  Description of Artificial Sequence: Synthetic oligonucleotide
  Antisense strand to SEQ ID NO: 743726
caucuugcacaguuaaccu

SEQ ID NO: 743728 - RNA, 19 nt, Artificial Sequence
  Description of Artificial Sequence: Synthetic oligonucleotide
  Sense strand starting at position 2404 of SEQ ID NO: 586779
uuaacugugcaagaugaca

SEQ ID NO: 743729 - RNA, 19 nt, Artificial Sequence
  Description of Artificial Sequence: Synthetic oligonucleotide
  Antisense strand to SEQ ID NO: 743728
ugucaucuugcacaguuaa

SEQ ID NO: 743730 - RNA, 19 nt, Artificial Sequence
  Description of Artificial Sequence: Synthetic oligonucleotide
  Sense strand starting at position 2468 of SEQ ID NO: 586779
agcucucaucuguaauggu

SEQ ID NO: 743731 - RNA, 19 nt, Artificial Sequence
  Description of Artificial Sequence: Synthetic oligonucleotide
  Antisense strand to SEQ ID NO: 743730
accauuacagaugagagcu

SEQ ID NO: 743732 - RNA, 19 nt, Artificial Sequence
  Description of Artificial Sequence: Synthetic oligonucleotide
  Sense strand starting at position 2584 of SEQ ID NO: 586779
acagcaagaucucuaaaug

SEQ ID NO: 743733 - RNA, 19 nt, Artificial Sequence
  Description of Artificial Sequence: Synthetic oligonucleotide
  Antisense strand to SEQ ID NO: 743732
cauuuagagaucuugcugu

SEQ ID NO: 743734 - RNA, 19 nt, Artificial Sequence
  Description of Artificial Sequence: Synthetic oligonucleotide
  Sense strand starting at position 2605 of SEQ ID NO: 586779
aacucuagagcuugggaua

SEQ ID NO: 743735 - RNA, 19 nt, Artificial Sequence
  Description of Artificial Sequence: Synthetic oligonucleotide
  Antisense strand to SEQ ID NO: 743734
uaucccaagcucuagaguu

SEQ ID NO: 743736 - RNA, 19 nt, Artificial Sequence
  Description of Artificial Sequence: Synthetic oligonucleotide
  Sense strand starting at position 2606 of SEQ ID NO: 586779
acucuagagcuugggauaa

SEQ ID NO: 743737 - RNA, 19 nt, Artificial Sequence
  Description of Artificial Sequence: Synthetic oligonucleotide
  Antisense strand to SEQ ID NO: 743736
uuaucccaagcucuagagu

SEQ ID NO: 743738 - RNA, 19 nt, Artificial Sequence
  Description of Artificial Sequence: Synthetic oligonucleotide
  Sense strand starting at position 2618 of SEQ ID NO: 586779
gggauaauuucccagaaca

SEQ ID NO: 743739 - RNA, 19 nt, Artificial Sequence
  Description of Artificial Sequence: Synthetic oligonucleotide
  Antisense strand to SEQ ID NO: 743738
uguucugggaaauuauccc

SEQ ID NO: 743740 - RNA, 19 nt, Artificial Sequence
  Description of Artificial Sequence: Synthetic oligonucleotide
  Sense strand starting at position 3354 of SEQ ID NO: 586779
agcugugugagucaagauu

SEQ ID NO: 743741 - RNA, 19 nt, Artificial Sequence
  Description of Artificial Sequence: Synthetic oligonucleotide
  Antisense strand to SEQ ID NO: 743740
aaucuugacucacacagcu

SEQ ID NO: 743742 - RNA, 19 nt, Artificial Sequence
  Description of Artificial Sequence: Synthetic oligonucleotide
  Sense strand starting at position 3373 of SEQ ID NO: 586779
ugaaccuaggucugucaga

SEQ ID NO: 743743 - RNA, 19 nt, Artificial Sequence
  Description of Artificial Sequence: Synthetic oligonucleotide
  Antisense strand to SEQ ID NO: 743742
ucugacagaccuagguuca

SEQ ID NO: 743744 - RNA, 19 nt, Artificial Sequence
  Description of Artificial Sequence: Synthetic oligonucleotide
  Sense strand starting at position 3577 of SEQ ID NO: 586779
auaaguagugcugacaaau

SEQ ID NO: 743745 - RNA, 19 nt, Artificial Sequence
  Description of Artificial Sequence: Synthetic oligonucleotide
  Antisense strand to SEQ ID NO: 743744
auuugucagcacuacuuau

SEQ ID NO: 743746 - RNA, 19 nt, Artificial Sequence
  Description of Artificial Sequence: Synthetic oligonucleotide
  Sense strand starting at position 3964 of SEQ ID NO: 586779
gcaggaagggucuggagau

SEQ ID NO: 743747 - RNA, 19 nt, Artificial Sequence
  Description of Artificial Sequence: Synthetic oligonucleotide
  Antisense strand to SEQ ID NO: 743746
aucuccagacccuuccugc

SEQ ID NO: 743748 - RNA, 19 nt, Artificial Sequence
  Description of Artificial Sequence: Synthetic oligonucleotide
  Sense strand starting at position 349 of SEQ ID NO: 586780
uguuaugccuucccuagga

SEQ ID NO: 743749 - RNA, 19 nt, Artificial Sequence
  Description of Artificial Sequence: Synthetic oligonucleotide
  Antisense strand to SEQ ID NO: 743748
uccuagggaaggcauaaca

SEQ ID NO: 743750 - RNA, 19 nt, Artificial Sequence
  Description of Artificial Sequence: Synthetic oligonucleotide
  Sense strand starting at position 382 of SEQ ID NO: 586780
cucacuaugccuggaaugu

SEQ ID NO: 743751 - RNA, 19 nt, Artificial Sequence
  Description of Artificial Sequence: Synthetic oligonucleotide
  Antisense strand to SEQ ID NO: 743750
acauuccaggcauagugag

SEQ ID NO: 743752 - RNA, 19 nt, Artificial Sequence
  Description of Artificial Sequence: Synthetic oligonucleotide
  Sense strand starting at position 383 of SEQ ID NO: 586780
ucacuaugccuggaauguu

SEQ ID NO: 743753 - RNA, 19 nt, Artificial Sequence
  Description of Artificial Sequence: Synthetic oligonucleotide
  Antisense strand to SEQ ID NO: 743752
aacauuccaggcauaguga

SEQ ID NO: 743754 - RNA, 19 nt, Artificial Sequence
  Description of Artificial Sequence: Synthetic oligonucleotide
  Sense strand starting at position 391 of SEQ ID NO: 586780
ccuggaauguucuuuaaca

SEQ ID NO: 743755 - RNA, 19 nt, Artificial Sequence
  Description of Artificial Sequence: Synthetic oligonucleotide
  Antisense strand to SEQ ID NO: 743754
uguuaaagaacauuccagg

SEQ ID NO: 743756 - RNA, 19 nt, Artificial Sequence
  Description of Artificial Sequence: Synthetic oligonucleotide
  Sense strand starting at position 392 of SEQ ID NO: 586780
cuggaauguucuuuaacaa

SEQ ID NO: 743757 - RNA, 19 nt, Artificial Sequence
  Description of Artificial Sequence: Synthetic oligonucleotide
  Antisense strand to SEQ ID NO: 743756
uuguuaaagaacauuccag

SEQ ID NO: 743758 - RNA, 19 nt, Artificial Sequence
  Description of Artificial Sequence: Synthetic oligonucleotide
  Sense strand starting at position 405 of SEQ ID NO: 586780
uaacaaguuuccgaaugua

SEQ ID NO: 743759 - RNA, 19 nt, Artificial Sequence
  Description of Artificial Sequence: Synthetic oligonucleotide
  Antisense strand to SEQ ID NO: 743758
uacauucggaaacuuguua

SEQ ID NO: 743760 - RNA, 19 nt, Artificial Sequence
  Description of Artificial Sequence: Synthetic oligonucleotide
  Sense strand starting at position 408 of SEQ ID NO: 586780
caaguuuccgaauguauca

SEQ ID NO: 743761 - RNA, 19 nt, Artificial Sequence
  Description of Artificial Sequence: Synthetic oligonucleotide
  Antisense strand to SEQ ID NO: 743760
ugauacauucggaaacuug

SEQ ID NO: 743762 - RNA, 19 nt, Artificial Sequence
  Description of Artificial Sequence: Synthetic oligonucleotide
  Sense strand starting at position 749 of SEQ ID NO: 586780
cuauauagauagucuaucu

SEQ ID NO: 743763 - RNA, 19 nt, Artificial Sequence
  Description of Artificial Sequence: Synthetic oligonucleotide
  Antisense strand to SEQ ID NO: 743762
agauagacuaucuauauag

SEQ ID NO: 743764 - RNA, 19 nt, Artificial Sequence
  Description of Artificial Sequence: Synthetic oligonucleotide
  Sense strand starting at position 757 of SEQ ID NO: 586780
auagucuaucucugacauu

SEQ ID NO: 743765 - RNA, 19 nt, Artificial Sequence
  Description of Artificial Sequence: Synthetic oligonucleotide
  Antisense strand to SEQ ID NO: 743764
aaugucagagauagacuau

SEQ ID NO: 743766 - RNA, 19 nt, Artificial Sequence
  Description of Artificial Sequence: Synthetic oligonucleotide
  Sense strand starting at position 839 of SEQ ID NO: 586780
gcuagauagcaagacaugu

SEQ ID NO: 743767 - RNA, 19 nt, Artificial Sequence
  Description of Artificial Sequence: Synthetic oligonucleotide
  Antisense strand to SEQ ID NO: 743766
acaugucuugcuaucuagc

SEQ ID NO: 743768 - RNA, 19 nt, Artificial Sequence
  Description of Artificial Sequence: Synthetic oligonucleotide
  Sense strand starting at position 939 of SEQ ID NO: 586780
ugcaaaucauuugauaaug

SEQ ID NO: 743769 - RNA, 19 nt, Artificial Sequence
  Description of Artificial Sequence: Synthetic oligonucleotide
  Antisense strand to SEQ ID NO: 743768
cauuaucaaaugauuugca

SEQ ID NO: 743770 - RNA, 19 nt, Artificial Sequence
  Description of Artificial Sequence: Synthetic oligonucleotide
  Sense strand starting at position 944 of SEQ ID NO: 586780
aucauuugauaauggcaau

SEQ ID NO: 743771 - RNA, 19 nt, Artificial Sequence
  Description of Artificial Sequence: Synthetic oligonucleotide
  Antisense strand to SEQ ID NO: 743770
auugccauuaucaaaugau

SEQ ID NO: 743772 - RNA, 19 nt, Artificial Sequence
  Description of Artificial Sequence: Synthetic oligonucleotide
  Sense strand starting at position 956 of SEQ ID NO: 586780
uggcaauaauuaugaugca

SEQ ID NO: 743773 - RNA, 19 nt, Artificial Sequence
  Description of Artificial Sequence: Synthetic oligonucleotide
  Antisense strand to SEQ ID NO: 743772
ugcaucauaauuauugcca

SEQ ID NO: 743774 - RNA, 19 nt, Artificial Sequence
  Description of Artificial Sequence: Synthetic oligonucleotide
  Sense strand starting at position 1020 of SEQ ID NO: 586780
cuaagugcuuuaccaugua

SEQ ID NO: 743775 - RNA, 19 nt, Artificial Sequence
  Description of Artificial Sequence: Synthetic oligonucleotide
  Antisense strand to SEQ ID NO: 743774
uacaugguaaagcacuuag

SEQ ID NO: 743776 - RNA, 19 nt, Artificial Sequence
  Description of Artificial Sequence: Synthetic oligonucleotide
  Sense strand starting at position 1054 of SEQ ID NO: 586780
aggcuaauuccugaauagu

SEQ ID NO: 743777 - RNA, 19 nt, Artificial Sequence
  Description of Artificial Sequence: Synthetic oligonucleotide
  Antisense strand to SEQ ID NO: 743776
acuauucaggaauuagccu

SEQ ID NO: 743778 - RNA, 19 nt, Artificial Sequence
  Description of Artificial Sequence: Synthetic oligonucleotide
  Sense strand starting at position 2011 of SEQ ID NO: 586780
agcccuuguuccuugugaa

SEQ ID NO: 743779 - RNA, 19 nt, Artificial Sequence
  Description of Artificial Sequence: Synthetic oligonucleotide
  Antisense strand to SEQ ID NO: 743778
uucacaaggaacaagggcu

SEQ ID NO: 743780 - RNA, 19 nt, Artificial Sequence
  Description of Artificial Sequence: Synthetic oligonucleotide
  Sense strand starting at position 2012 of SEQ ID NO: 586780
gcccuuguuccuugugaaa

SEQ ID NO: 743781 - RNA, 19 nt, Artificial Sequence
  Description of Artificial Sequence: Synthetic oligonucleotide
  Antisense strand to SEQ ID NO: 743780
uuucacaaggaacaagggc

SEQ ID NO: 743782 - RNA, 19 nt, Artificial Sequence
  Description of Artificial Sequence: Synthetic oligonucleotide
  Sense strand starting at position 2050 of SEQ ID NO: 586780
agaacaaccgcuuauccua

SEQ ID NO: 743783 - RNA, 19 nt, Artificial Sequence
  Description of Artificial Sequence: Synthetic oligonucleotide
  Antisense strand to SEQ ID NO: 743782
uaggauaagcgguuguucu

SEQ ID NO: 743784 - RNA, 19 nt, Artificial Sequence
  Description of Artificial Sequence: Synthetic oligonucleotide
  Sense strand starting at position 2148 of SEQ ID NO: 586780
acacgauguugaugucaaa

SEQ ID NO: 743785 - RNA, 19 nt, Artificial Sequence
  Description of Artificial Sequence: Synthetic oligonucleotide
  Antisense strand to SEQ ID NO: 743784
uuugacaucaacaucgugu

SEQ ID NO: 743786 - RNA, 19 nt, Artificial Sequence
  Description of Artificial Sequence: Synthetic oligonucleotide
  Sense strand starting at position 2151 of SEQ ID NO: 586780
cgauguugaugucaaauac

SEQ ID NO: 743787 - RNA, 19 nt, Artificial Sequence
  Description of Artificial Sequence: Synthetic oligonucleotide
  Antisense strand to SEQ ID NO: 743786
guauuugacaucaacaucg

SEQ ID NO: 743788 - RNA, 19 nt, Artificial Sequence
  Description of Artificial Sequence: Synthetic oligonucleotide
  Sense strand starting at position 2334 of SEQ ID NO: 586780
gucugcuuccaugaucaca

SEQ ID NO: 743789 - RNA, 19 nt, Artificial Sequence
  Description of Artificial Sequence: Synthetic oligonucleotide
  Antisense strand to SEQ ID NO: 743788
ugugaucauggaagcagac

SEQ ID NO: 743790 - RNA, 19 nt, Artificial Sequence
  Description of Artificial Sequence: Synthetic oligonucleotide
  Sense strand starting at position 2342 of SEQ ID NO: 586780
ccaugaucacaauguguuc

SEQ ID NO: 743791 - RNA, 19 nt, Artificial Sequence
  Description of Artificial Sequence: Synthetic oligonucleotide
  Antisense strand to SEQ ID NO: 743790
gaacacauugugaucaugg

SEQ ID NO: 743792 - RNA, 19 nt, Artificial Sequence
  Description of Artificial Sequence: Synthetic oligonucleotide
  Sense strand starting at position 2376 of SEQ ID NO: 586780
ucuaucaucuuggguggaa

SEQ ID NO: 743793 - RNA, 19 nt, Artificial Sequence
  Description of Artificial Sequence: Synthetic oligonucleotide
  Antisense strand to SEQ ID NO: 743792
uuccacccaagaugauaga

SEQ ID NO: 743794 - RNA, 19 nt, Artificial Sequence
  Description of Artificial Sequence: Synthetic oligonucleotide
  Sense strand starting at position 2885 of SEQ ID NO: 586780
gaggucuauccaggacauu

SEQ ID NO: 743795 - RNA, 19 nt, Artificial Sequence
  Description of Artificial Sequence: Synthetic oligonucleotide
  Antisense strand to SEQ ID NO: 743794
aauguccuggauagaccuc

SEQ ID NO: 743796 - RNA, 19 nt, Artificial Sequence
  Description of Artificial Sequence: Synthetic oligonucleotide
  Sense strand starting at position 2896 of SEQ ID NO: 586780
aggacauugucacaaggua

SEQ ID NO: 743797 - RNA, 19 nt, Artificial Sequence
  Description of Artificial Sequence: Synthetic oligonucleotide
  Antisense strand to SEQ ID NO: 743796
uaccuugugacaauguccu

SEQ ID NO: 743798 - RNA, 19 nt, Artificial Sequence
  Description of Artificial Sequence: Synthetic oligonucleotide
  Sense strand starting at position 2926 of SEQ ID NO: 586780
aagacaaaguauugaguuu

SEQ ID NO: 743799 - RNA, 19 nt, Artificial Sequence
  Description of Artificial Sequence: Synthetic oligonucleotide
  Antisense strand to SEQ ID NO: 743798
aaacucaauacuuugucuu

SEQ ID NO: 743800 - RNA, 19 nt, Artificial Sequence
  Description of Artificial Sequence: Synthetic oligonucleotide
  Sense strand starting at position 2945 of SEQ ID NO: 586780
uucccugaccucugggaua

SEQ ID NO: 743801 - RNA, 19 nt, Artificial Sequence
  Description of Artificial Sequence: Synthetic oligonucleotide
  Antisense strand to SEQ ID NO: 743800
uaucccagaggucagggaa

SEQ ID NO: 743802 - RNA, 19 nt, Artificial Sequence
  Description of Artificial Sequence: Synthetic oligonucleotide
  Sense strand starting at position 3062 of SEQ ID NO: 586780
gacagagucugaucagcuc

SEQ ID NO: 743803 - RNA, 19 nt, Artificial Sequence
  Description of Artificial Sequence: Synthetic oligonucleotide
  Antisense strand to SEQ ID NO: 743802
gagcugaucagacucuguc

SEQ ID NO: 743804 - RNA, 19 nt, Artificial Sequence
  Description of Artificial Sequence: Synthetic oligonucleotide
  Sense strand starting at position 3070 of SEQ ID NO: 586780
cugaucagcucccaguuaa

SEQ ID NO: 743805 - RNA, 19 nt, Artificial Sequence
  Description of Artificial Sequence: Synthetic oligonucleotide
  Antisense strand to SEQ ID NO: 743804
uuaacugggagcugaucag

SEQ ID NO: 743806 - RNA, 19 nt, Artificial Sequence
  Description of Artificial Sequence: Synthetic oligonucleotide
  Sense strand starting at position 3091 of SEQ ID NO: 586780
auuucuagcucugagauuu

SEQ ID NO: 743807 - RNA, 19 nt, Artificial Sequence
  Description of Artificial Sequence: Synthetic oligonucleotide
  Antisense strand to SEQ ID NO: 743806
aaaucucagagcuagaaau

SEQ ID NO: 743808 - RNA, 19 nt, Artificial Sequence
  Description of Artificial Sequence: Synthetic oligonucleotide
  Sense strand starting at position 3110 of SEQ ID NO: 586780
ugauuccucuuguuaugag

SEQ ID NO: 743809 - RNA, 19 nt, Artificial Sequence
  Description of Artificial Sequence: Synthetic oligonucleotide
  Antisense strand to SEQ ID NO: 743808
cucauaacaagaggaauca

SEQ ID NO: 743810 - RNA, 19 nt, Artificial Sequence
  Description of Artificial Sequence: Synthetic oligonucleotide
  Sense strand starting at position 3111 of SEQ ID NO: 586780
gauuccucuuguuaugaga

SEQ ID NO: 743811 - RNA, 19 nt, Artificial Sequence
  Description of Artificial Sequence: Synthetic oligonucleotide
  Antisense strand to SEQ ID NO: 743810
ucucauaacaagaggaauc

SEQ ID NO: 743812 - RNA, 19 nt, Artificial Sequence
  Description of Artificial Sequence: Synthetic oligonucleotide
  Sense strand starting at position 3114 of SEQ ID NO: 586780
uccucuuguuaugagauga

SEQ ID NO: 743813 - RNA, 19 nt, Artificial Sequence
  Description of Artificial Sequence: Synthetic oligonucleotide
  Antisense strand to SEQ ID NO: 743812
ucaucucauaacaagagga

SEQ ID NO: 743814 - RNA, 19 nt, Artificial Sequence
  Description of Artificial Sequence: Synthetic oligonucleotide
  Sense strand starting at position 3244 of SEQ ID NO: 586780
gguaacuuauccucugcau

SEQ ID NO: 743815 - RNA, 19 nt, Artificial Sequence
  Description of Artificial Sequence: Synthetic oligonucleotide
  Antisense strand to SEQ ID NO: 743814
augcagaggauaaguuacc

SEQ ID NO: 743816 - RNA, 19 nt, Artificial Sequence
  Description of Artificial Sequence: Synthetic oligonucleotide
  Sense strand starting at position 3342 of SEQ ID NO: 586780
auggucucagucuguuaga

SEQ ID NO: 743817 - RNA, 19 nt, Artificial Sequence
  Description of Artificial Sequence: Synthetic oligonucleotide
  Antisense strand to SEQ ID NO: 743816
ucuaacagacugagaccau

SEQ ID NO: 743818 - RNA, 19 nt, Artificial Sequence
  Description of Artificial Sequence: Synthetic oligonucleotide
  Sense strand starting at position 3715 of SEQ ID NO: 586780
ggucauuucucuuucucgu

SEQ ID NO: 743819 - RNA, 19 nt, Artificial Sequence
  Description of Artificial Sequence: Synthetic oligonucleotide
  Antisense strand to SEQ ID NO: 743818
acgagaaagagaaaugacc

SEQ ID NO: 743820 - RNA, 19 nt, Artificial Sequence
  Description of Artificial Sequence: Synthetic oligonucleotide
  Sense strand starting at position 3748 of SEQ ID NO: 586780
uuguauuaccagugccaag

SEQ ID NO: 743821 - RNA, 19 nt, Artificial Sequence
  Description of Artificial Sequence: Synthetic oligonucleotide
  Antisense strand to SEQ ID NO: 743820
cuuggcacugguaauacaa

SEQ ID NO: 743822 - RNA, 19 nt, Artificial Sequence
  Description of Artificial Sequence: Synthetic oligonucleotide
  Sense strand starting at position 3765 of SEQ ID NO: 586780
agaacagagucugacacua

SEQ ID NO: 743823 - RNA, 19 nt, Artificial Sequence
  Description of Artificial Sequence: Synthetic oligonucleotide
  Antisense strand to SEQ ID NO: 743822
uagugucagacucuguucu

SEQ ID NO: 743824 - RNA, 19 nt, Artificial Sequence
  Description of Artificial Sequence: Synthetic oligonucleotide
  Sense strand starting at position 3789 of SEQ ID NO: 586780
gaguaugcacucuguauuu

SEQ ID NO: 743825 - RNA, 19 nt, Artificial Sequence
  Description of Artificial Sequence: Synthetic oligonucleotide
  Antisense strand to SEQ ID NO: 743824
aaauacagagugcauacuc

SEQ ID NO: 743826 - RNA, 19 nt, Artificial Sequence
  Description of Artificial Sequence: Synthetic oligonucleotide
  Sense strand starting at position 3950 of SEQ ID NO: 586780
cuauguggcaggcagauau

SEQ ID NO: 743827 - RNA, 19 nt, Artificial Sequence
  Description of Artificial Sequence: Synthetic oligonucleotide
  Antisense strand to SEQ ID NO: 743826
auaucugccugccacauag

SEQ ID NO: 743828 - RNA, 19 nt, Artificial Sequence
  Description of Artificial Sequence: Synthetic oligonucleotide
  Sense strand starting at position 600 of SEQ ID NO: 586781
auggaaggauuccgagaga

SEQ ID NO: 743829 - RNA, 19 nt, Artificial Sequence
  Description of Artificial Sequence: Synthetic oligonucleotide
  Antisense strand to SEQ ID NO: 743828
ucucucggaauccuuccau

SEQ ID NO: 743830 - RNA, 19 nt, Artificial Sequence
  Description of Artificial Sequence: Synthetic oligonucleotide
  Sense strand starting at position 655 of SEQ ID NO: 586781
cuccuuguccaggagauau

SEQ ID NO: 743831 - RNA, 19 nt, Artificial Sequence
  Description of Artificial Sequence: Synthetic oligonucleotide
  Antisense strand to SEQ ID NO: 743830
auaucuccuggacaaggag

SEQ ID NO: 743832 - RNA, 19 nt, Artificial Sequence
  Description of Artificial Sequence: Synthetic oligonucleotide
  Sense strand starting at position 833 of SEQ ID NO: 586781
ugggcacugcuagaucauu

SEQ ID NO: 743833 - RNA, 19 nt, Artificial Sequence
  Description of Artificial Sequence: Synthetic oligonucleotide
  Antisense strand to SEQ ID NO: 743832
aaugaucuagcagugccca

SEQ ID NO: 743834 - RNA, 19 nt, Artificial Sequence
  Description of Artificial Sequence: Synthetic oligonucleotide
  Sense strand starting at position 841 of SEQ ID NO: 586781
gcuagaucauucugguuug

SEQ ID NO: 743835 - RNA, 19 nt, Artificial Sequence
  Description of Artificial Sequence: Synthetic oligonucleotide
  Antisense strand to SEQ ID NO: 743834
caaaccagaaugaucuagc

SEQ ID NO: 743836 - RNA, 19 nt, Artificial Sequence
  Description of Artificial Sequence: Synthetic oligonucleotide
  Sense strand starting at position 844 of SEQ ID NO: 586781
agaucauucugguuuggga

SEQ ID NO: 743837 - RNA, 19 nt, Artificial Sequence
  Description of Artificial Sequence: Synthetic oligonucleotide
  Antisense strand to SEQ ID NO: 743836
ucccaaaccagaaugaucu

SEQ ID NO: 743838 - RNA, 19 nt, Artificial Sequence
  Description of Artificial Sequence: Synthetic oligonucleotide
  Sense strand starting at position 1106 of SEQ ID NO: 586781
gugggauuguggaggaaac

SEQ ID NO: 743839 - RNA, 19 nt, Artificial Sequence
  Description of Artificial Sequence: Synthetic oligonucleotide
  Antisense strand to SEQ ID NO: 743838
guuuccuccacaaucccac

SEQ ID NO: 743840 - RNA, 19 nt, Artificial Sequence
  Description of Artificial Sequence: Synthetic oligonucleotide
  Sense strand starting at position 1140 of SEQ ID NO: 586781
ggagcugggucuugagaca

SEQ ID NO: 743841 - RNA, 19 nt, Artificial Sequence
  Description of Artificial Sequence: Synthetic oligonucleotide
  Antisense strand to SEQ ID NO: 743840
ugucucaagacccagcucc

SEQ ID NO: 743842 - RNA, 19 nt, Artificial Sequence
  Description of Artificial Sequence: Synthetic oligonucleotide
  Sense strand starting at position 1414 of SEQ ID NO: 586781
uaaugagcaguccgagaaa

SEQ ID NO: 743843 - RNA, 19 nt, Artificial Sequence
  Description of Artificial Sequence: Synthetic oligonucleotide
  Antisense strand to SEQ ID NO: 743842
uuucucggacugcucauua

SEQ ID NO: 743844 - RNA, 19 nt, Artificial Sequence
  Description of Artificial Sequence: Synthetic oligonucleotide
  Sense strand starting at position 1524 of SEQ ID NO: 586781
gaguuugacuuccucuaag

SEQ ID NO: 743845 - RNA, 19 nt, Artificial Sequence
  Description of Artificial Sequence: Synthetic oligonucleotide
  Antisense strand to SEQ ID NO: 743844
cuuagaggaagucaaacuc

SEQ ID NO: 743846 - RNA, 19 nt, Artificial Sequence
  Description of Artificial Sequence: Synthetic oligonucleotide
  Sense strand starting at position 2607 of SEQ ID NO: 586781
uggugcgaucacgguucaa

SEQ ID NO: 743847 - RNA, 19 nt, Artificial Sequence
  Description of Artificial Sequence: Synthetic oligonucleotide
  Antisense strand to SEQ ID NO: 743846
uugaaccgugaucgcacca

SEQ ID NO: 743848 - RNA, 19 nt, Artificial Sequence
  Description of Artificial Sequence: Synthetic oligonucleotide
  Sense strand starting at position 2649 of SEQ ID NO: 586781
gagugauccucugcccuca

SEQ ID NO: 743849 - RNA, 19 nt, Artificial Sequence
  Description of Artificial Sequence: Synthetic oligonucleotide
  Antisense strand to SEQ ID NO: 743848
ugagggcagaggaucacuc

SEQ ID NO: 743850 - RNA, 19 nt, Artificial Sequence
  Description of Artificial Sequence: Synthetic oligonucleotide
  Sense strand starting at position 2994 of SEQ ID NO: 586781
ggaugauacaugugagcca

SEQ ID NO: 743851 - RNA, 19 nt, Artificial Sequence
  Description of Artificial Sequence: Synthetic oligonucleotide
  Antisense strand to SEQ ID NO: 743850
uggcucacauguaucaucc

SEQ ID NO: 743852 - RNA, 19 nt, Artificial Sequence
  Description of Artificial Sequence: Synthetic oligonucleotide
  Sense strand starting at position 3053 of SEQ ID NO: 586781
gagauagagucuuccugua

SEQ ID NO: 743853 - RNA, 19 nt, Artificial Sequence
  Description of Artificial Sequence: Synthetic oligonucleotide
  Antisense strand to SEQ ID NO: 743852
uacaggaagacucuaucuc

SEQ ID NO: 743854 - RNA, 19 nt, Artificial Sequence
  Description of Artificial Sequence: Synthetic oligonucleotide
  Sense strand starting at position 3055 of SEQ ID NO: 586781
gauagagucuuccuguauu

SEQ ID NO: 743855 - RNA, 19 nt, Artificial Sequence
  Description of Artificial Sequence: Synthetic oligonucleotide
  Antisense strand to SEQ ID NO: 743854
aauacaggaagacucuauc

SEQ ID NO: 743856 - RNA, 19 nt, Artificial Sequence
  Description of Artificial Sequence: Synthetic oligonucleotide
  Sense strand starting at position 3334 of SEQ ID NO: 586781
aagagcuugcacugagcua

SEQ ID NO: 743857 - RNA, 19 nt, Artificial Sequence
  Description of Artificial Sequence: Synthetic oligonucleotide
  Antisense strand to SEQ ID NO: 743856
uagcucagugcaagcucuu

SEQ ID NO: 743858 - RNA, 19 nt, Artificial Sequence
  Description of Artificial Sequence: Synthetic oligonucleotide
  Sense strand starting at position 3335 of SEQ ID NO: 586781
agagcuugcacugagcuaa

SEQ ID NO: 743859 - RNA, 19 nt, Artificial Sequence
  Description of Artificial Sequence: Synthetic oligonucleotide
  Antisense strand to SEQ ID NO: 743858
uuagcucagugcaagcucu

SEQ ID NO: 743860 - RNA, 19 nt, Artificial Sequence
  Description of Artificial Sequence: Synthetic oligonucleotide
  Sense strand starting at position 3438 of SEQ ID NO: 586781
uucucaugcuguucgcaga

SEQ ID NO: 743861 - RNA, 19 nt, Artificial Sequence
  Description of Artificial Sequence: Synthetic oligonucleotide
  Antisense strand to SEQ ID NO: 743860
ucugcgaacagcaugagaa

SEQ ID NO: 743862 - RNA, 19 nt, Artificial Sequence
  Description of Artificial Sequence: Synthetic oligonucleotide
  Sense strand starting at position 3508 of SEQ ID NO: 586781
gggagccucucaccuuuaa

SEQ ID NO: 743863 - RNA, 19 nt, Artificial Sequence
  Description of Artificial Sequence: Synthetic oligonucleotide
  Antisense strand to SEQ ID NO: 743862
uuaaaggugagaggcuccc

SEQ ID NO: 743864 - RNA, 19 nt, Artificial Sequence
  Description of Artificial Sequence: Synthetic oligonucleotide
  Sense strand starting at position 3518 of SEQ ID NO: 586781
caccuuuaacggugaauuc

SEQ ID NO: 743865 - RNA, 19 nt, Artificial Sequence
  Description of Artificial Sequence: Synthetic oligonucleotide
  Antisense strand to SEQ ID NO: 743864
gaauucaccguuaaaggug

SEQ ID NO: 743866 - RNA, 19 nt, Artificial Sequence
  Description of Artificial Sequence: Synthetic oligonucleotide
  Sense strand starting at position 3519 of SEQ ID NO: 586781
accuuuaacggugaauucu

SEQ ID NO: 743867 - RNA, 19 nt, Artificial Sequence
  Description of Artificial Sequence: Synthetic oligonucleotide
  Antisense strand to SEQ ID NO: 743866
agaauucaccguuaaaggu

SEQ ID NO: 743868 - RNA, 19 nt, Artificial Sequence
  Description of Artificial Sequence: Synthetic oligonucleotide
  Sense strand starting at position 3527 of SEQ ID NO: 586781
cggugaauucucugcgguu

SEQ ID NO: 743869 - RNA, 19 nt, Artificial Sequence
  Description of Artificial Sequence: Synthetic oligonucleotide
  Antisense strand to SEQ ID NO: 743868
aaccgcagagaauucaccg

SEQ ID NO: 743870 - RNA, 19 nt, Artificial Sequence
  Description of Artificial Sequence: Synthetic oligonucleotide
  Sense strand starting at position 3528 of SEQ ID NO: 586781
ggugaauucucugcgguuu

SEQ ID NO: 743871 - RNA, 19 nt, Artificial Sequence
  Description of Artificial Sequence: Synthetic oligonucleotide
  Antisense strand to SEQ ID NO: 743870
aaaccgcagagaauucacc

SEQ ID NO: 743872 - RNA, 19 nt, Artificial Sequence
  Description of Artificial Sequence: Synthetic oligonucleotide
  Sense strand starting at position 3583 of SEQ ID NO: 586781
ggaagugcagcacaugaau

SEQ ID NO: 743873 - RNA, 19 nt, Artificial Sequence
  Description of Artificial Sequence: Synthetic oligonucleotide
  Antisense strand to SEQ ID NO: 743872
auucaugugcugcacuucc

SEQ ID NO: 743874 - RNA, 19 nt, Artificial Sequence
  Description of Artificial Sequence: Synthetic oligonucleotide
  Sense strand starting at position 3586 of SEQ ID NO: 586781
agugcagcacaugaauaau

SEQ ID NO: 743875 - RNA, 19 nt, Artificial Sequence
  Description of Artificial Sequence: Synthetic oligonucleotide
  Antisense strand to SEQ ID NO: 743874
auuauucaugugcugcacu

SEQ ID NO: 743876 - RNA, 19 nt, Artificial Sequence
  Description of Artificial Sequence: Synthetic oligonucleotide
  Sense strand starting at position 3690 of SEQ ID NO: 586781
gcgugcccuacauaggauu

SEQ ID NO: 743877 - RNA, 19 nt, Artificial Sequence
  Description of Artificial Sequence: Synthetic oligonucleotide
  Antisense strand to SEQ ID NO: 743876
aauccuauguagggcacgc

SEQ ID NO: 743878 - RNA, 19 nt, Artificial Sequence
  Description of Artificial Sequence: Synthetic oligonucleotide
  Sense strand starting at position 3724 of SEQ ID NO: 586781
acagcauuggaccgugaca

SEQ ID NO: 743879 - RNA, 19 nt, Artificial Sequence
  Description of Artificial Sequence: Synthetic oligonucleotide
  Antisense strand to SEQ ID NO: 743878
ugucacgguccaaugcugu

SEQ ID NO: 743880 - RNA, 19 nt, Artificial Sequence
  Description of Artificial Sequence: Synthetic oligonucleotide
  Sense strand starting at position 3726 of SEQ ID NO: 586781
agcauuggaccgugacaca

SEQ ID NO: 743881 - RNA, 19 nt, Artificial Sequence
  Description of Artificial Sequence: Synthetic oligonucleotide
  Antisense strand to SEQ ID NO: 743880
ugugucacgguccaaugcu

SEQ ID NO: 743882 - RNA, 19 nt, Artificial Sequence
  Description of Artificial Sequence: Synthetic oligonucleotide
  Sense strand starting at position 3793 of SEQ ID NO: 586781
uuaugacaauuggaagagu

SEQ ID NO: 743883 - RNA, 19 nt, Artificial Sequence
  Description of Artificial Sequence: Synthetic oligonucleotide
  Antisense strand to SEQ ID NO: 743882
acucuuccaauugucauaa

SEQ ID NO: 743884 - RNA, 19 nt, Artificial Sequence
  Description of Artificial Sequence: Synthetic oligonucleotide
  Sense strand starting at position 3871 of SEQ ID NO: 586781
ugcugacagccagaaugaa

SEQ ID NO: 743885 - RNA, 19 nt, Artificial Sequence
  Description of Artificial Sequence: Synthetic oligonucleotide
  Antisense strand to SEQ ID NO: 743884
uucauucuggcugucagca

SEQ ID NO: 743886 - RNA, 19 nt, Artificial Sequence
  Description of Artificial Sequence: Synthetic oligonucleotide
  Sense strand starting at position 63 of SEQ ID NO: 586782
uuucuauugugaccuagaa

SEQ ID NO: 743887 - RNA, 19 nt, Artificial Sequence
  Description of Artificial Sequence: Synthetic oligonucleotide
  Antisense strand to SEQ ID NO: 743886
uucuaggucacaauagaaa

SEQ ID NO: 743888 - RNA, 19 nt, Artificial Sequence
  Description of Artificial Sequence: Synthetic oligonucleotide
  Sense strand starting at position 170 of SEQ ID NO: 586782
aaaggugcucgguaaauau

SEQ ID NO: 743889 - RNA, 19 nt, Artificial Sequence
  Description of Artificial Sequence: Synthetic oligonucleotide
  Antisense strand to SEQ ID NO: 743888
auauuuaccgagcaccuuu

SEQ ID NO: 743890 - RNA, 19 nt, Artificial Sequence
  Description of Artificial Sequence: Synthetic oligonucleotide
  Sense strand starting at position 357 of SEQ ID NO: 586782
gugauccaccacuaaguuu

SEQ ID NO: 743891 - RNA, 19 nt, Artificial Sequence
  Description of Artificial Sequence: Synthetic oligonucleotide
  Antisense strand to SEQ ID NO: 743890
aaacuuagugguggaucac

SEQ ID NO: 743892 - RNA, 19 nt, Artificial Sequence
  Description of Artificial Sequence: Synthetic oligonucleotide
  Sense strand starting at position 431 of SEQ ID NO: 586782
aucugcguuccauagauga

SEQ ID NO: 743893 - RNA, 19 nt, Artificial Sequence
  Description of Artificial Sequence: Synthetic oligonucleotide
  Antisense strand to SEQ ID NO: 743892
ucaucuauggaacgcagau

SEQ ID NO: 743894 - RNA, 19 nt, Artificial Sequence
  Description of Artificial Sequence: Synthetic oligonucleotide
  Sense strand starting at position 433 of SEQ ID NO: 586782
cugcguuccauagaugaaa

SEQ ID NO: 743895 - RNA, 19 nt, Artificial Sequence
  Description of Artificial Sequence: Synthetic oligonucleotide
  Antisense strand to SEQ ID NO: 743894
uuucaucuauggaacgcag

SEQ ID NO: 743896 - RNA, 19 nt, Artificial Sequence
  Description of Artificial Sequence: Synthetic oligonucleotide
  Sense strand starting at position 636 of SEQ ID NO: 586782
uauuucuaguuggaugaaa

SEQ ID NO: 743897 - RNA, 19 nt, Artificial Sequence
  Description of Artificial Sequence: Synthetic oligonucleotide
  Antisense strand to SEQ ID NO: 743896
uuucauccaacuagaaaua

SEQ ID NO: 743898 - RNA, 19 nt, Artificial Sequence
  Description of Artificial Sequence: Synthetic oligonucleotide
  Sense strand starting at position 638 of SEQ ID NO: 586782
uuucuaguuggaugaaagu

SEQ ID NO: 743899 - RNA, 19 nt, Artificial Sequence
  Description of Artificial Sequence: Synthetic oligonucleotide
  Antisense strand to SEQ ID NO: 743898
acuuucauccaacuagaaa

SEQ ID NO: 743900 - RNA, 19 nt, Artificial Sequence
  Description of Artificial Sequence: Synthetic oligonucleotide
  Sense strand starting at position 825 of SEQ ID NO: 586782
guuuauagccuaggaggaa

SEQ ID NO: 743901 - RNA, 19 nt, Artificial Sequence
  Description of Artificial Sequence: Synthetic oligonucleotide
  Antisense strand to SEQ ID NO: 743900
uuccuccuaggcuauaaac

SEQ ID NO: 743902 - RNA, 19 nt, Artificial Sequence
  Description of Artificial Sequence: Synthetic oligonucleotide
  Sense strand starting at position 923 of SEQ ID NO: 586782
ggauuaaauugccuaacga

SEQ ID NO: 743903 - RNA, 19 nt, Artificial Sequence
  Description of Artificial Sequence: Synthetic oligonucleotide
  Antisense strand to SEQ ID NO: 743902
ucguuaggcaauuuaaucc

SEQ ID NO: 743904 - RNA, 19 nt, Artificial Sequence
  Description of Artificial Sequence: Synthetic oligonucleotide
  Sense strand starting at position 981 of SEQ ID NO: 586782
aacgcaugacuguacuuaa

SEQ ID NO: 743905 - RNA, 19 nt, Artificial Sequence
  Description of Artificial Sequence: Synthetic oligonucleotide
  Antisense strand to SEQ ID NO: 743904
uuaaguacagucaugcguu

SEQ ID NO: 743906 - RNA, 19 nt, Artificial Sequence
  Description of Artificial Sequence: Synthetic oligonucleotide
  Sense strand starting at position 1022 of SEQ ID NO: 586782
guaugaguaugacccugaa

SEQ ID NO: 743907 - RNA, 19 nt, Artificial Sequence
  Description of Artificial Sequence: Synthetic oligonucleotide
  Antisense strand to SEQ ID NO: 743906
uucagggucauacucauac

SEQ ID NO: 743908 - RNA, 19 nt, Artificial Sequence
  Description of Artificial Sequence: Synthetic oligonucleotide
  Sense strand starting at position 1025 of SEQ ID NO: 586782
ugaguaugacccugaauuc

SEQ ID NO: 743909 - RNA, 19 nt, Artificial Sequence
  Description of Artificial Sequence: Synthetic oligonucleotide
  Antisense strand to SEQ ID NO: 743908
gaauucagggucauacuca

SEQ ID NO: 743910 - RNA, 19 nt, Artificial Sequence
  Description of Artificial Sequence: Synthetic oligonucleotide
  Sense strand starting at position 1059 of SEQ ID NO: 586782
gcagguaagauccaaguuu

SEQ ID NO: 743911 - RNA, 19 nt, Artificial Sequence
  Description of Artificial Sequence: Synthetic oligonucleotide
  Antisense strand to SEQ ID NO: 743910
aaacuuggaucuuaccugc

SEQ ID NO: 743912 - RNA, 19 nt, Artificial Sequence
  Description of Artificial Sequence: Synthetic oligonucleotide
  Sense strand starting at position 1084 of SEQ ID NO: 586782
uuccaauucugauugaguc

SEQ ID NO: 743913 - RNA, 19 nt, Artificial Sequence
  Description of Artificial Sequence: Synthetic oligonucleotide
  Antisense strand to SEQ ID NO: 743912
gacucaaucagaauuggaa

SEQ ID NO: 743914 - RNA, 19 nt, Artificial Sequence
  Description of Artificial Sequence: Synthetic oligonucleotide
  Sense strand starting at position 1085 of SEQ ID NO: 586782
uccaauucugauugagucu

SEQ ID NO: 743915 - RNA, 19 nt, Artificial Sequence
  Description of Artificial Sequence: Synthetic oligonucleotide
  Antisense strand to SEQ ID NO: 743914
agacucaaucagaauugga

SEQ ID NO: 743916 - RNA, 19 nt, Artificial Sequence
  Description of Artificial Sequence: Synthetic oligonucleotide
  Sense strand starting at position 1088 of SEQ ID NO: 586782
aauucugauugagucugaa

SEQ ID NO: 743917 - RNA, 19 nt, Artificial Sequence
  Description of Artificial Sequence: Synthetic oligonucleotide
  Antisense strand to SEQ ID NO: 743916
uucagacucaaucagaauu

SEQ ID NO: 743918 - RNA, 19 nt, Artificial Sequence
  Description of Artificial Sequence: Synthetic oligonucleotide
  Sense strand starting at position 1091 of SEQ ID NO: 586782
ucugauugagucugaauca

SEQ ID NO: 743919 - RNA, 19 nt, Artificial Sequence
  Description of Artificial Sequence: Synthetic oligonucleotide
  Antisense strand to SEQ ID NO: 743918
ugauucagacucaaucaga

SEQ ID NO: 743920 - RNA, 19 nt, Artificial Sequence
  Description of Artificial Sequence: Synthetic oligonucleotide
  Sense strand starting at position 1240 of SEQ ID NO: 586782
uagggcauccugugaacua

SEQ ID NO: 743921 - RNA, 19 nt, Artificial Sequence
  Description of Artificial Sequence: Synthetic oligonucleotide
  Antisense strand to SEQ ID NO: 743920
uaguucacaggaugcccua

SEQ ID NO: 743922 - RNA, 19 nt, Artificial Sequence
  Description of Artificial Sequence: Synthetic oligonucleotide
  Sense strand starting at position 1354 of SEQ ID NO: 586782
cuuaguggccuugaaagca

SEQ ID NO: 743923 - RNA, 19 nt, Artificial Sequence
  Description of Artificial Sequence: Synthetic oligonucleotide
  Antisense strand to SEQ ID NO: 743922
ugcuuucaaggccacuaag

SEQ ID NO: 743924 - RNA, 19 nt, Artificial Sequence
  Description of Artificial Sequence: Synthetic oligonucleotide
  Sense strand starting at position 1408 of SEQ ID NO: 586782
cacagaaacgugugaacuu

SEQ ID NO: 743925 - RNA, 19 nt, Artificial Sequence
  Description of Artificial Sequence: Synthetic oligonucleotide
  Antisense strand to SEQ ID NO: 743924
aaguucacacguuucugug

SEQ ID NO: 743926 - RNA, 19 nt, Artificial Sequence
  Description of Artificial Sequence: Synthetic oligonucleotide
  Sense strand starting at position 1464 of SEQ ID NO: 586782
acauaaaugucauuggguu

SEQ ID NO: 743927 - RNA, 19 nt, Artificial Sequence
  Description of Artificial Sequence: Synthetic oligonucleotide
  Antisense strand to SEQ ID NO: 743926
aacccaaugacauuuaugu

SEQ ID NO: 743928 - RNA, 19 nt, Artificial Sequence
  Description of Artificial Sequence: Synthetic oligonucleotide
  Sense strand starting at position 1465 of SEQ ID NO: 586782
cauaaaugucauuggguug

SEQ ID NO: 743929 - RNA, 19 nt, Artificial Sequence
  Description of Artificial Sequence: Synthetic oligonucleotide
  Antisense strand to SEQ ID NO: 743928
caacccaaugacauuuaug

SEQ ID NO: 743930 - RNA, 19 nt, Artificial Sequence
  Description of Artificial Sequence: Synthetic oligonucleotide
  Sense strand starting at position 2513 of SEQ ID NO: 586782
guccuaaugggaugaaguc

SEQ ID NO: 743931 - RNA, 19 nt, Artificial Sequence
  Description of Artificial Sequence: Synthetic oligonucleotide
  Antisense strand to SEQ ID NO: 743930
gacuucaucccauuaggac

SEQ ID NO: 743932 - RNA, 19 nt, Artificial Sequence
  Description of Artificial Sequence: Synthetic oligonucleotide
  Sense strand starting at position 2522 of SEQ ID NO: 586782
ggaugaagucguagugugu

SEQ ID NO: 743933 - RNA, 19 nt, Artificial Sequence
  Description of Artificial Sequence: Synthetic oligonucleotide
  Antisense strand to SEQ ID NO: 743932
acacacuacgacuucaucc

SEQ ID NO: 743934 - RNA, 19 nt, Artificial Sequence
  Description of Artificial Sequence: Synthetic oligonucleotide
  Sense strand starting at position 2541 of SEQ ID NO: 586782
guuggugagguugauagua

SEQ ID NO: 743935 - RNA, 19 nt, Artificial Sequence
  Description of Artificial Sequence: Synthetic oligonucleotide
  Antisense strand to SEQ ID NO: 743934
uacuaucaaccucaccaac

SEQ ID NO: 743936 - RNA, 19 nt, Artificial Sequence
  Description of Artificial Sequence: Synthetic oligonucleotide
  Sense strand starting at position 2595 of SEQ ID NO: 586782
guauuuauuugugaggcac

SEQ ID NO: 743937 - RNA, 19 nt, Artificial Sequence
  Description of Artificial Sequence: Synthetic oligonucleotide
  Antisense strand to SEQ ID NO: 743936
gugccucacaaauaaauac

SEQ ID NO: 743938 - RNA, 19 nt, Artificial Sequence
  Description of Artificial Sequence: Synthetic oligonucleotide
  Sense strand starting at position 2751 of SEQ ID NO: 586782
uggaauaguugagccucaa

SEQ ID NO: 743939 - RNA, 19 nt, Artificial Sequence
  Description of Artificial Sequence: Synthetic oligonucleotide
  Antisense strand to SEQ ID NO: 743938
uugaggcucaacuauucca

SEQ ID NO: 743940 - RNA, 19 nt, Artificial Sequence
  Description of Artificial Sequence: Synthetic oligonucleotide
  Sense strand starting at position 2790 of SEQ ID NO: 586782
ggauaauacuggcuagguu

SEQ ID NO: 743941 - RNA, 19 nt, Artificial Sequence
  Description of Artificial Sequence: Synthetic oligonucleotide
  Antisense strand to SEQ ID NO: 743940
aaccuagccaguauuaucc

SEQ ID NO: 743942 - RNA, 19 nt, Artificial Sequence
  Description of Artificial Sequence: Synthetic oligonucleotide
  Sense strand starting at position 2791 of SEQ ID NO: 586782
gauaauacuggcuagguua

SEQ ID NO: 743943 - RNA, 19 nt, Artificial Sequence
  Description of Artificial Sequence: Synthetic oligonucleotide
  Antisense strand to SEQ ID NO: 743942
uaaccuagccaguauuauc

SEQ ID NO: 743944 - RNA, 19 nt, Artificial Sequence
  Description of Artificial Sequence: Synthetic oligonucleotide
  Sense strand starting at position 2871 of SEQ ID NO: 586782
ucaaucugcccauagauug

SEQ ID NO: 743945 - RNA, 19 nt, Artificial Sequence
  Description of Artificial Sequence: Synthetic oligonucleotide
  Antisense strand to SEQ ID NO: 743944
caaucuaugggcagauuga

SEQ ID NO: 743946 - RNA, 19 nt, Artificial Sequence
  Description of Artificial Sequence: Synthetic oligonucleotide
  Sense strand starting at position 2885 of SEQ ID NO: 586782
gauuguagaucagucuuag

SEQ ID NO: 743947 - RNA, 19 nt, Artificial Sequence
  Description of Artificial Sequence: Synthetic oligonucleotide
  Antisense strand to SEQ ID NO: 743946
cuaagacugaucuacaauc

SEQ ID NO: 743948 - RNA, 19 nt, Artificial Sequence
  Description of Artificial Sequence: Synthetic oligonucleotide
  Sense strand starting at position 3089 of SEQ ID NO: 586782
cucuccuaagaugguuaua

SEQ ID NO: 743949 - RNA, 19 nt, Artificial Sequence
  Description of Artificial Sequence: Synthetic oligonucleotide
  Antisense strand to SEQ ID NO: 743948
uauaaccaucuuaggagag

SEQ ID NO: 743950 - RNA, 19 nt, Artificial Sequence
  Description of Artificial Sequence: Synthetic oligonucleotide
  Sense strand starting at position 3092 of SEQ ID NO: 586782
uccuaagaugguuauacgu

SEQ ID NO: 743951 - RNA, 19 nt, Artificial Sequence
  Description of Artificial Sequence: Synthetic oligonucleotide
  Antisense strand to SEQ ID NO: 743950
acguauaaccaucuuagga

SEQ ID NO: 743952 - RNA, 19 nt, Artificial Sequence
  Description of Artificial Sequence: Synthetic oligonucleotide
  Sense strand starting at position 3125 of SEQ ID NO: 586782
gcauauaagguauacauau

SEQ ID NO: 743953 - RNA, 19 nt, Artificial Sequence
  Description of Artificial Sequence: Synthetic oligonucleotide
  Antisense strand to SEQ ID NO: 743952
auauguauaccuuauaugc

SEQ ID NO: 743954 - RNA, 19 nt, Artificial Sequence
  Description of Artificial Sequence: Synthetic oligonucleotide
  Sense strand starting at position 3156 of SEQ ID NO: 586782
acacgacaucuuuauagca

SEQ ID NO: 743955 - RNA, 19 nt, Artificial Sequence
  Description of Artificial Sequence: Synthetic oligonucleotide
  Antisense strand to SEQ ID NO: 743954
ugcuauaaagaugucgugu

SEQ ID NO: 743956 - RNA, 19 nt, Artificial Sequence
  Description of Artificial Sequence: Synthetic oligonucleotide
  Sense strand starting at position 3305 of SEQ ID NO: 586782
gauaauuguugaucugaga

SEQ ID NO: 743957 - RNA, 19 nt, Artificial Sequence
  Description of Artificial Sequence: Synthetic oligonucleotide
  Antisense strand to SEQ ID NO: 743956
ucucagaucaacaauuauc

SEQ ID NO: 743958 - RNA, 19 nt, Artificial Sequence
  Description of Artificial Sequence: Synthetic oligonucleotide
  Sense strand starting at position 3355 of SEQ ID NO: 586782
ugguuucucagaggagaga

SEQ ID NO: 743959 - RNA, 19 nt, Artificial Sequence
  Description of Artificial Sequence: Synthetic oligonucleotide
  Antisense strand to SEQ ID NO: 743958
ucucuccucugagaaacca

SEQ ID NO: 743960 - RNA, 19 nt, Artificial Sequence
  Description of Artificial Sequence: Synthetic oligonucleotide
  Sense strand starting at position 3634 of SEQ ID NO: 586782
uguugaaacgacuauugca

SEQ ID NO: 743961 - RNA, 19 nt, Artificial Sequence
  Description of Artificial Sequence: Synthetic oligonucleotide
  Antisense strand to SEQ ID NO: 743960
ugcaauagucguuucaaca

SEQ ID NO: 743962 - RNA, 19 nt, Artificial Sequence
  Description of Artificial Sequence: Synthetic oligonucleotide
  Sense strand starting at position 3667 of SEQ ID NO: 586782
gaauaauaauggccucgau

SEQ ID NO: 743963 - RNA, 19 nt, Artificial Sequence
  Description of Artificial Sequence: Synthetic oligonucleotide
  Antisense strand to SEQ ID NO: 743962
aucgaggccauuauuauuc

SEQ ID NO: 743964 - RNA, 19 nt, Artificial Sequence
  Description of Artificial Sequence: Synthetic oligonucleotide
  Sense strand starting at position 3670 of SEQ ID NO: 586782
uaauaauggccucgauagg

SEQ ID NO: 743965 - RNA, 19 nt, Artificial Sequence
  Description of Artificial Sequence: Synthetic oligonucleotide
  Antisense strand to SEQ ID NO: 743964
ccuaucgaggccauuauua

SEQ ID NO: 743966 - RNA, 19 nt, Artificial Sequence
  Description of Artificial Sequence: Synthetic oligonucleotide
  Sense strand starting at position 182 of SEQ ID NO: 586783
cagacaaggucucugcauu

SEQ ID NO: 743967 - RNA, 19 nt, Artificial Sequence
  Description of Artificial Sequence: Synthetic oligonucleotide
  Antisense strand to SEQ ID NO: 743966
aaugcagagaccuugucug

SEQ ID NO: 743968 - RNA, 19 nt, Artificial Sequence
  Description of Artificial Sequence: Synthetic oligonucleotide
  Sense strand starting at position 325 of SEQ ID NO: 586783
gucauuuagcuuggaugca

SEQ ID NO: 743969 - RNA, 19 nt, Artificial Sequence
  Description of Artificial Sequence: Synthetic oligonucleotide
  Antisense strand to SEQ ID NO: 743968
ugcauccaagcuaaaugac

SEQ ID NO: 743970 - RNA, 19 nt, Artificial Sequence
  Description of Artificial Sequence: Synthetic oligonucleotide
  Sense strand starting at position 330 of SEQ ID NO: 586783
uuagcuuggaugcauaaga

SEQ ID NO: 743971 - RNA, 19 nt, Artificial Sequence
  Description of Artificial Sequence: Synthetic oligonucleotide
  Antisense strand to SEQ ID NO: 743970
ucuuaugcauccaagcuaa

SEQ ID NO: 743972 - RNA, 19 nt, Artificial Sequence
  Description of Artificial Sequence: Synthetic oligonucleotide
  Sense strand starting at position 377 of SEQ ID NO: 586783
agccaaguauaguccuuua

SEQ ID NO: 743973 - RNA, 19 nt, Artificial Sequence
  Description of Artificial Sequence: Synthetic oligonucleotide
  Antisense strand to SEQ ID NO: 743972
uaaaggacuauacuuggcu

SEQ ID NO: 743974 - RNA, 19 nt, Artificial Sequence
  Description of Artificial Sequence: Synthetic oligonucleotide
  Sense strand starting at position 382 of SEQ ID NO: 586783
aguauaguccuuuagccaa

SEQ ID NO: 743975 - RNA, 19 nt, Artificial Sequence
  Description of Artificial Sequence: Synthetic oligonucleotide
  Antisense strand to SEQ ID NO: 743974
uuggcuaaaggacuauacu

SEQ ID NO: 743976 - RNA, 19 nt, Artificial Sequence
  Description of Artificial Sequence: Synthetic oligonucleotide
  Sense strand starting at position 400 of SEQ ID NO: 586783
aggaccucaccuuguauga

SEQ ID NO: 743977 - RNA, 19 nt, Artificial Sequence
  Description of Artificial Sequence: Synthetic oligonucleotide
  Antisense strand to SEQ ID NO: 743976
ucauacaaggugagguccu

SEQ ID NO: 743978 - RNA, 19 nt, Artificial Sequence
  Description of Artificial Sequence: Synthetic oligonucleotide
  Sense strand starting at position 466 of SEQ ID NO: 586783
cacccaucuguggaaguau

SEQ ID NO: 743979 - RNA, 19 nt, Artificial Sequence
  Description of Artificial Sequence: Synthetic oligonucleotide
  Antisense strand to SEQ ID NO: 743978
auacuuccacagaugggug

SEQ ID NO: 743980 - RNA, 19 nt, Artificial Sequence
  Description of Artificial Sequence: Synthetic oligonucleotide
  Sense strand starting at position 748 of SEQ ID NO: 586783
uuaagaaguaucuggacga

SEQ ID NO: 743981 - RNA, 19 nt, Artificial Sequence
  Description of Artificial Sequence: Synthetic oligonucleotide
  Antisense strand to SEQ ID NO: 743980
ucguccagauacuucuuaa

SEQ ID NO: 743982 - RNA, 19 nt, Artificial Sequence
  Description of Artificial Sequence: Synthetic oligonucleotide
  Sense strand starting at position 844 of SEQ ID NO: 586783
gggaguuucuggcuuauga

SEQ ID NO: 743983 - RNA, 19 nt, Artificial Sequence
  Description of Artificial Sequence: Synthetic oligonucleotide
  Antisense strand to SEQ ID NO: 743982
ucauaagccagaaacuccc

SEQ ID NO: 743984 - RNA, 19 nt, Artificial Sequence
  Description of Artificial Sequence: Synthetic oligonucleotide
  Sense strand starting at position 846 of SEQ ID NO: 586783
gaguuucuggcuuaugaug

SEQ ID NO: 743985 - RNA, 19 nt, Artificial Sequence
  Description of Artificial Sequence: Synthetic oligonucleotide
  Antisense strand to SEQ ID NO: 743984
caucauaagccagaaacuc

SEQ ID NO: 743986 - RNA, 19 nt, Artificial Sequence
  Description of Artificial Sequence: Synthetic oligonucleotide
  Sense strand starting at position 852 of SEQ ID NO: 586783
cuggcuuaugaugacagua

SEQ ID NO: 743987 - RNA, 19 nt, Artificial Sequence
  Description of Artificial Sequence: Synthetic oligonucleotide
  Antisense strand to SEQ ID NO: 743986
uacugucaucauaagccag

SEQ ID NO: 743988 - RNA, 19 nt, Artificial Sequence
  Description of Artificial Sequence: Synthetic oligonucleotide
  Sense strand starting at position 881 of SEQ ID NO: 586783
uuaccugaccacggaauaa

SEQ ID NO: 743989 - RNA, 19 nt, Artificial Sequence
  Description of Artificial Sequence: Synthetic oligonucleotide
  Antisense strand to SEQ ID NO: 743988
uuauuccguggucagguaa

SEQ ID NO: 743990 - RNA, 19 nt, Artificial Sequence
  Description of Artificial Sequence: Synthetic oligonucleotide
  Sense strand starting at position 948 of SEQ ID NO: 586783
gugcauaagucccuaagac

SEQ ID NO: 743991 - RNA, 19 nt, Artificial Sequence
  Description of Artificial Sequence: Synthetic oligonucleotide
  Antisense strand to SEQ ID NO: 743990
gucuuagggacuuaugcac

SEQ ID NO: 743992 - RNA, 19 nt, Artificial Sequence
  Description of Artificial Sequence: Synthetic oligonucleotide
  Sense strand starting at position 1039 of SEQ ID NO: 586783
gccugaaggugaucugaac

SEQ ID NO: 743993 - RNA, 19 nt, Artificial Sequence
  Description of Artificial Sequence: Synthetic oligonucleotide
  Antisense strand to SEQ ID NO: 743992
guucagaucaccuucaggc

SEQ ID NO: 743994 - RNA, 19 nt, Artificial Sequence
  Description of Artificial Sequence: Synthetic oligonucleotide
  Sense strand starting at position 1045 of SEQ ID NO: 586783
aggugaucugaacaguagu

SEQ ID NO: 743995 - RNA, 19 nt, Artificial Sequence
  Description of Artificial Sequence: Synthetic oligonucleotide
  Antisense strand to SEQ ID NO: 743994
acuacuguucagaucaccu

SEQ ID NO: 743996 - RNA, 19 nt, Artificial Sequence
  Description of Artificial Sequence: Synthetic oligonucleotide
  Sense strand starting at position 1099 of SEQ ID NO: 586783
gggccagaaagcugaugaa

SEQ ID NO: 743997 - RNA, 19 nt, Artificial Sequence
  Description of Artificial Sequence: Synthetic oligonucleotide
  Antisense strand to SEQ ID NO: 743996
uucaucagcuuucuggccc

SEQ ID NO: 743998 - RNA, 19 nt, Artificial Sequence
  Description of Artificial Sequence: Synthetic oligonucleotide
  Sense strand starting at position 1109 of SEQ ID NO: 586783
gcugaugaauauguaaauu

SEQ ID NO: 743999 - RNA, 19 nt, Artificial Sequence
  Description of Artificial Sequence: Synthetic oligonucleotide
  Antisense strand to SEQ ID NO: 743998
aauuuacauauucaucagc

SEQ ID NO: 744000 - RNA, 19 nt, Artificial Sequence
  Description of Artificial Sequence: Synthetic oligonucleotide
  Sense strand starting at position 1260 of SEQ ID NO: 586783
cgcggaugugguaaagcuu

SEQ ID NO: 744001 - RNA, 19 nt, Artificial Sequence
  Description of Artificial Sequence: Synthetic oligonucleotide
  Antisense strand to SEQ ID NO: 744000
aagcuuuaccacauccgcg

SEQ ID NO: 744002 - RNA, 19 nt, Artificial Sequence
  Description of Artificial Sequence: Synthetic oligonucleotide
  Sense strand starting at position 1935 of SEQ ID NO: 586783
gccaguucugaguacuuug

SEQ ID NO: 744003 - RNA, 19 nt, Artificial Sequence
  Description of Artificial Sequence: Synthetic oligonucleotide
  Antisense strand to SEQ ID NO: 744002
caaaguacucagaacuggc

SEQ ID NO: 744004 - RNA, 19 nt, Artificial Sequence
  Description of Artificial Sequence: Synthetic oligonucleotide
  Sense strand starting at position 1942 of SEQ ID NO: 586783
cugaguacuuugcccagaa

SEQ ID NO: 744005 - RNA, 19 nt, Artificial Sequence
  Description of Artificial Sequence: Synthetic oligonucleotide
  Antisense strand to SEQ ID NO: 744004
uucugggcaaaguacucag

SEQ ID NO: 744006 - RNA, 19 nt, Artificial Sequence
  Description of Artificial Sequence: Synthetic oligonucleotide
  Sense strand starting at position 1943 of SEQ ID NO: 586783
ugaguacuuugcccagaac

SEQ ID NO: 744007 - RNA, 19 nt, Artificial Sequence
  Description of Artificial Sequence: Synthetic oligonucleotide
  Antisense strand to SEQ ID NO: 744006
guucugggcaaaguacuca

SEQ ID NO: 744008 - RNA, 19 nt, Artificial Sequence
  Description of Artificial Sequence: Synthetic oligonucleotide
  Sense strand starting at position 1944 of SEQ ID NO: 586783
gaguacuuugcccagaacu

SEQ ID NO: 744009 - RNA, 19 nt, Artificial Sequence
  Description of Artificial Sequence: Synthetic oligonucleotide
  Antisense strand to SEQ ID NO: 744008
aguucugggcaaaguacuc

SEQ ID NO: 744010 - RNA, 19 nt, Artificial Sequence
  Description of Artificial Sequence: Synthetic oligonucleotide
  Sense strand starting at position 1946 of SEQ ID NO: 586783
guacuuugcccagaacuuc

SEQ ID NO: 744011 - RNA, 19 nt, Artificial Sequence
  Description of Artificial Sequence: Synthetic oligonucleotide
  Antisense strand to SEQ ID NO: 744010
gaaguucugggcaaaguac

SEQ ID NO: 744012 - RNA, 19 nt, Artificial Sequence
  Description of Artificial Sequence: Synthetic oligonucleotide
  Sense strand starting at position 2071 of SEQ ID NO: 586783
ggcagagugaugcacaauc

SEQ ID NO: 744013 - RNA, 19 nt, Artificial Sequence
  Description of Artificial Sequence: Synthetic oligonucleotide
  Antisense strand to SEQ ID NO: 744012
gauugugcaucacucugcc

SEQ ID NO: 744014 - RNA, 19 nt, Artificial Sequence
  Description of Artificial Sequence: Synthetic oligonucleotide
  Sense strand starting at position 2125 of SEQ ID NO: 586783
gggcgauguccucggaaga

SEQ ID NO: 744015 - RNA, 19 nt, Artificial Sequence
  Description of Artificial Sequence: Synthetic oligonucleotide
  Antisense strand to SEQ ID NO: 744014
ucuuccgaggacaucgccc

SEQ ID NO: 744016 - RNA, 19 nt, Artificial Sequence
  Description of Artificial Sequence: Synthetic oligonucleotide
  Sense strand starting at position 2126 of SEQ ID NO: 586783
ggcgauguccucggaagaa

SEQ ID NO: 744017 - RNA, 19 nt, Artificial Sequence
  Description of Artificial Sequence: Synthetic oligonucleotide
  Antisense strand to SEQ ID NO: 744016
uucuuccgaggacaucgcc

SEQ ID NO: 744018 - RNA, 19 nt, Artificial Sequence
  Description of Artificial Sequence: Synthetic oligonucleotide
  Sense strand starting at position 2276 of SEQ ID NO: 586783
cgcgguaggcguucgguaa

SEQ ID NO: 744019 - RNA, 19 nt, Artificial Sequence
  Description of Artificial Sequence: Synthetic oligonucleotide
  Antisense strand to SEQ ID NO: 744018
uuaccgaacgccuaccgcg

SEQ ID NO: 744020 - RNA, 19 nt, Artificial Sequence
  Description of Artificial Sequence: Synthetic oligonucleotide
  Sense strand starting at position 2752 of SEQ ID NO: 586783
caguuugcagacugcaaau

SEQ ID NO: 744021 - RNA, 19 nt, Artificial Sequence
  Description of Artificial Sequence: Synthetic oligonucleotide
  Antisense strand to SEQ ID NO: 744020
auuugcagucugcaaacug

SEQ ID NO: 744022 - RNA, 19 nt, Artificial Sequence
  Description of Artificial Sequence: Synthetic oligonucleotide
  Sense strand starting at position 2826 of SEQ ID NO: 586783
aguauaugccaggagcagu

SEQ ID NO: 744023 - RNA, 19 nt, Artificial Sequence
  Description of Artificial Sequence: Synthetic oligonucleotide
  Antisense strand to SEQ ID NO: 744022
acugcuccuggcauauacu

SEQ ID NO: 744024 - RNA, 19 nt, Artificial Sequence
  Description of Artificial Sequence: Synthetic oligonucleotide
  Sense strand starting at position 2839 of SEQ ID NO: 586783
agcaguugcgagcuugcaa

SEQ ID NO: 744025 - RNA, 19 nt, Artificial Sequence
  Description of Artificial Sequence: Synthetic oligonucleotide
  Antisense strand to SEQ ID NO: 744024
uugcaagcucgcaacugcu

SEQ ID NO: 744026 - RNA, 19 nt, Artificial Sequence
  Description of Artificial Sequence: Synthetic oligonucleotide
  Sense strand starting at position 2966 of SEQ ID NO: 586783
gacagacuguuaguacuga

SEQ ID NO: 744027 - RNA, 19 nt, Artificial Sequence
  Description of Artificial Sequence: Synthetic oligonucleotide
  Antisense strand to SEQ ID NO: 744026
ucaguacuaacagucuguc

SEQ ID NO: 744028 - RNA, 19 nt, Artificial Sequence
  Description of Artificial Sequence: Synthetic oligonucleotide
  Sense strand starting at position 3074 of SEQ ID NO: 586783
gauuccugagccugggaaa

SEQ ID NO: 744029 - RNA, 19 nt, Artificial Sequence
  Description of Artificial Sequence: Synthetic oligonucleotide
  Antisense strand to SEQ ID NO: 744028
uuucccaggcucaggaauc

SEQ ID NO: 744030 - RNA, 19 nt, Artificial Sequence
  Description of Artificial Sequence: Synthetic oligonucleotide
  Sense strand starting at position 3243 of SEQ ID NO: 586783
agggcuccacaguguuaaa

SEQ ID NO: 744031 - RNA, 19 nt, Artificial Sequence
  Description of Artificial Sequence: Synthetic oligonucleotide
  Antisense strand to SEQ ID NO: 744030
uuuaacacuguggagcccu

SEQ ID NO: 744032 - RNA, 19 nt, Artificial Sequence
  Description of Artificial Sequence: Synthetic oligonucleotide
  Sense strand starting at position 3331 of SEQ ID NO: 586783
uucugagacucuuuccgga

SEQ ID NO: 744033 - RNA, 19 nt, Artificial Sequence
  Description of Artificial Sequence: Synthetic oligonucleotide
  Antisense strand to SEQ ID NO: 744032
uccggaaagagucucagaa

SEQ ID NO: 744034 - RNA, 19 nt, Artificial Sequence
  Description of Artificial Sequence: Synthetic oligonucleotide
  Sense strand starting at position 3336 of SEQ ID NO: 586783
agacucuuuccggagcuau

SEQ ID NO: 744035 - RNA, 19 nt, Artificial Sequence
  Description of Artificial Sequence: Synthetic oligonucleotide
  Antisense strand to SEQ ID NO: 744034
auagcuccggaaagagucu

SEQ ID NO: 744036 - RNA, 19 nt, Artificial Sequence
  Description of Artificial Sequence: Synthetic oligonucleotide
  Sense strand starting at position 3386 of SEQ ID NO: 586783
cuucgcuuucuggaaccau

SEQ ID NO: 744037 - RNA, 19 nt, Artificial Sequence
  Description of Artificial Sequence: Synthetic oligonucleotide
  Antisense strand to SEQ ID NO: 744036
augguuccagaaagcgaag

SEQ ID NO: 744038 - RNA, 19 nt, Artificial Sequence
  Description of Artificial Sequence: Synthetic oligonucleotide
  Sense strand starting at position 3474 of SEQ ID NO: 586783
agagaugcugccgagcaaa

SEQ ID NO: 744039 - RNA, 19 nt, Artificial Sequence
  Description of Artificial Sequence: Synthetic oligonucleotide
  Antisense strand to SEQ ID NO: 744038
uuugcucggcagcaucucu

SEQ ID NO: 744040 - RNA, 19 nt, Artificial Sequence
  Description of Artificial Sequence: Synthetic oligonucleotide
  Sense strand starting at position 3486 of SEQ ID NO: 586783
gagcaaauccacugucaug

SEQ ID NO: 744041 - RNA, 19 nt, Artificial Sequence
  Description of Artificial Sequence: Synthetic oligonucleotide
  Antisense strand to SEQ ID NO: 744040
caugacaguggauuugcuc

SEQ ID NO: 744042 - RNA, 19 nt, Artificial Sequence
  Description of Artificial Sequence: Synthetic oligonucleotide
  Sense strand starting at position 3522 of SEQ ID NO: 586783
cggagaagcuuauuggaga

SEQ ID NO: 744043 - RNA, 19 nt, Artificial Sequence
  Description of Artificial Sequence: Synthetic oligonucleotide
  Antisense strand to SEQ ID NO: 744042
ucuccaauaagcuucuccg

SEQ ID NO: 744044 - RNA, 19 nt, Artificial Sequence
  Description of Artificial Sequence: Synthetic oligonucleotide
  Sense strand starting at position 3722 of SEQ ID NO: 586783
uuccgucuuucuguaauuu

SEQ ID NO: 744045 - RNA, 19 nt, Artificial Sequence
  Description of Artificial Sequence: Synthetic oligonucleotide
  Antisense strand to SEQ ID NO: 744044
aaauuacagaaagacggaa

SEQ ID NO: 744046 - RNA, 19 nt, Artificial Sequence
  Description of Artificial Sequence: Synthetic oligonucleotide
  Sense strand starting at position 125 of SEQ ID NO: 586784
agaugaccauuugaugaau

SEQ ID NO: 744047 - RNA, 19 nt, Artificial Sequence
  Description of Artificial Sequence: Synthetic oligonucleotide
  Antisense strand to SEQ ID NO: 744046
auucaucaaauggucaucu

SEQ ID NO: 744048 - RNA, 19 nt, Artificial Sequence
  Description of Artificial Sequence: Synthetic oligonucleotide
  Sense strand starting at position 142 of SEQ ID NO: 586784
augagugacugauugacca

SEQ ID NO: 744049 - RNA, 19 nt, Artificial Sequence
  Description of Artificial Sequence: Synthetic oligonucleotide
  Antisense strand to SEQ ID NO: 744048
uggucaaucagucacucau

SEQ ID NO: 744050 - RNA, 19 nt, Artificial Sequence
  Description of Artificial Sequence: Synthetic oligonucleotide
  Sense strand starting at position 146 of SEQ ID NO: 586784
gugacugauugaccaagca

SEQ ID NO: 744051 - RNA, 19 nt, Artificial Sequence
  Description of Artificial Sequence: Synthetic oligonucleotide
  Antisense strand to SEQ ID NO: 744050
ugcuuggucaaucagucac

SEQ ID NO: 744052 - RNA, 19 nt, Artificial Sequence
  Description of Artificial Sequence: Synthetic oligonucleotide
  Sense strand starting at position 287 of SEQ ID NO: 586784
aguauuugaucugagaauu

SEQ ID NO: 744053 - RNA, 19 nt, Artificial Sequence
  Description of Artificial Sequence: Synthetic oligonucleotide
  Antisense strand to SEQ ID NO: 744052
aauucucagaucaaauacu

SEQ ID NO: 744054 - RNA, 19 nt, Artificial Sequence
  Description of Artificial Sequence: Synthetic oligonucleotide
  Sense strand starting at position 557 of SEQ ID NO: 586784
ugcauuagccaaugacuaa

SEQ ID NO: 744055 - RNA, 19 nt, Artificial Sequence
  Description of Artificial Sequence: Synthetic oligonucleotide
  Antisense strand to SEQ ID NO: 744054
uuagucauuggcuaaugca

SEQ ID NO: 744056 - RNA, 19 nt, Artificial Sequence
  Description of Artificial Sequence: Synthetic oligonucleotide
  Sense strand starting at position 720 of SEQ ID NO: 586784
acagauucauggguggcaa

SEQ ID NO: 744057 - RNA, 19 nt, Artificial Sequence
  Description of Artificial Sequence: Synthetic oligonucleotide
  Antisense strand to SEQ ID NO: 744056
uugccacccaugaaucugu

SEQ ID NO: 744058 - RNA, 19 nt, Artificial Sequence
  Description of Artificial Sequence: Synthetic oligonucleotide
  Sense strand starting at position 734 of SEQ ID NO: 586784
ggcaaagcuccuuauccca

SEQ ID NO: 744059 - RNA, 19 nt, Artificial Sequence
  Description of Artificial Sequence: Synthetic oligonucleotide
  Antisense strand to SEQ ID NO: 744058
ugggauaaggagcuuugcc

SEQ ID NO: 744060 - RNA, 19 nt, Artificial Sequence
  Description of Artificial Sequence: Synthetic oligonucleotide
  Sense strand starting at position 775 of SEQ ID NO: 586784
cccugaugaugugucauaa

SEQ ID NO: 744061 - RNA, 19 nt, Artificial Sequence
  Description of Artificial Sequence: Synthetic oligonucleotide
  Antisense strand to SEQ ID NO: 744060
uuaugacacaucaucaggg

SEQ ID NO: 744062 - RNA, 19 nt, Artificial Sequence
  Description of Artificial Sequence: Synthetic oligonucleotide
  Sense strand starting at position 934 of SEQ ID NO: 586784
cagagaccacuuuggucau

SEQ ID NO: 744063 - RNA, 19 nt, Artificial Sequence
  Description of Artificial Sequence: Synthetic oligonucleotide
  Antisense strand to SEQ ID NO: 744062
augaccaaaguggucucug

SEQ ID NO: 744064 - RNA, 19 nt, Artificial Sequence
  Description of Artificial Sequence: Synthetic oligonucleotide
  Sense strand starting at position 936 of SEQ ID NO: 586784
gagaccacuuuggucauaa

SEQ ID NO: 744065 - RNA, 19 nt, Artificial Sequence
  Description of Artificial Sequence: Synthetic oligonucleotide
  Antisense strand to SEQ ID NO: 744064
uuaugaccaaaguggucuc

SEQ ID NO: 744066 - RNA, 19 nt, Artificial Sequence
  Description of Artificial Sequence: Synthetic oligonucleotide
  Sense strand starting at position 937 of SEQ ID NO: 586784
agaccacuuuggucauaaa

SEQ ID NO: 744067 - RNA, 19 nt, Artificial Sequence
  Description of Artificial Sequence: Synthetic oligonucleotide
  Antisense strand to SEQ ID NO: 744066
uuuaugaccaaaguggucu

SEQ ID NO: 744068 - RNA, 19 nt, Artificial Sequence
  Description of Artificial Sequence: Synthetic oligonucleotide
  Sense strand starting at position 1111 of SEQ ID NO: 586784
acaguuauuuaggaguuaa

SEQ ID NO: 744069 - RNA, 19 nt, Artificial Sequence
  Description of Artificial Sequence: Synthetic oligonucleotide
  Antisense strand to SEQ ID NO: 744068
uuaacuccuaaauaacugu

SEQ ID NO: 744070 - RNA, 19 nt, Artificial Sequence
  Description of Artificial Sequence: Synthetic oligonucleotide
  Sense strand starting at position 1191 of SEQ ID NO: 586784
uguagauuagguuaccuca

SEQ ID NO: 744071 - RNA, 19 nt, Artificial Sequence
  Description of Artificial Sequence: Synthetic oligonucleotide
  Antisense strand to SEQ ID NO: 744070
ugagguaaccuaaucuaca

SEQ ID NO: 744072 - RNA, 19 nt, Artificial Sequence
  Description of Artificial Sequence: Synthetic oligonucleotide
  Sense strand starting at position 1354 of SEQ ID NO: 586784
uuugcuuagcaggauauaa

SEQ ID NO: 744073 - RNA, 19 nt, Artificial Sequence
  Description of Artificial Sequence: Synthetic oligonucleotide
  Antisense strand to SEQ ID NO: 744072
uuauauccugcuaagcaaa

SEQ ID NO: 744074 - RNA, 19 nt, Artificial Sequence
  Description of Artificial Sequence: Synthetic oligonucleotide
  Sense strand starting at position 1579 of SEQ ID NO: 586784
guaggcacacauuauuaaa

SEQ ID NO: 744075 - RNA, 19 nt, Artificial Sequence
  Description of Artificial Sequence: Synthetic oligonucleotide
  Antisense strand to SEQ ID NO: 744074
uuuaauaaugugugccuac

SEQ ID NO: 744076 - RNA, 19 nt, Artificial Sequence
  Description of Artificial Sequence: Synthetic oligonucleotide
  Sense strand starting at position 1677 of SEQ ID NO: 586784
caaguaaaugugugcauuu

SEQ ID NO: 744077 - RNA, 19 nt, Artificial Sequence
  Description of Artificial Sequence: Synthetic oligonucleotide
  Antisense strand to SEQ ID NO: 744076
aaaugcacacauuuacuug

SEQ ID NO: 744078 - RNA, 19 nt, Artificial Sequence
  Description of Artificial Sequence: Synthetic oligonucleotide
  Sense strand starting at position 1712 of SEQ ID NO: 586784
uggcuuacauuugcauauu

SEQ ID NO: 744079 - RNA, 19 nt, Artificial Sequence
  Description of Artificial Sequence: Synthetic oligonucleotide
  Antisense strand to SEQ ID NO: 744078
aauaugcaaauguaagcca

SEQ ID NO: 744080 - RNA, 19 nt, Artificial Sequence
  Description of Artificial Sequence: Synthetic oligonucleotide
  Sense strand starting at position 1741 of SEQ ID NO: 586784
ugaguuaaacuuuaccugu

SEQ ID NO: 744081 - RNA, 19 nt, Artificial Sequence
  Description of Artificial Sequence: Synthetic oligonucleotide
  Antisense strand to SEQ ID NO: 744080
acagguaaaguuuaacuca

SEQ ID NO: 744082 - RNA, 19 nt, Artificial Sequence
  Description of Artificial Sequence: Synthetic oligonucleotide
  Sense strand starting at position 1761 of SEQ ID NO: 586784
gacuuccuugcuuggaaga

SEQ ID NO: 744083 - RNA, 19 nt, Artificial Sequence
  Description of Artificial Sequence: Synthetic oligonucleotide
  Antisense strand to SEQ ID NO: 744082
ucuuccaagcaaggaaguc

SEQ ID NO: 744084 - RNA, 19 nt, Artificial Sequence
  Description of Artificial Sequence: Synthetic oligonucleotide
  Sense strand starting at position 1829 of SEQ ID NO: 586784
agguucuucucaucacuca

SEQ ID NO: 744085 - RNA, 19 nt, Artificial Sequence
  Description of Artificial Sequence: Synthetic oligonucleotide
  Antisense strand to SEQ ID NO: 744084
ugagugaugagaagaaccu

SEQ ID NO: 744086 - RNA, 19 nt, Artificial Sequence
  Description of Artificial Sequence: Synthetic oligonucleotide
  Sense strand starting at position 1830 of SEQ ID NO: 586784
gguucuucucaucacucau

SEQ ID NO: 744087 - RNA, 19 nt, Artificial Sequence
  Description of Artificial Sequence: Synthetic oligonucleotide
  Antisense strand to SEQ ID NO: 744086
augagugaugagaagaacc

SEQ ID NO: 744088 - RNA, 19 nt, Artificial Sequence
  Description of Artificial Sequence: Synthetic oligonucleotide
  Sense strand starting at position 1862 of SEQ ID NO: 586784
ucacuuggccucgagacaa

SEQ ID NO: 744089 - RNA, 19 nt, Artificial Sequence
  Description of Artificial Sequence: Synthetic oligonucleotide
  Antisense strand to SEQ ID NO: 744088
uugucucgaggccaaguga

SEQ ID NO: 744090 - RNA, 19 nt, Artificial Sequence
  Description of Artificial Sequence: Synthetic oligonucleotide
  Sense strand starting at position 2068 of SEQ ID NO: 586784
cugcaaguggcuuaaacau

SEQ ID NO: 744091 - RNA, 19 nt, Artificial Sequence
  Description of Artificial Sequence: Synthetic oligonucleotide
  Antisense strand to SEQ ID NO: 744090
auguuuaagccacuugcag

SEQ ID NO: 744092 - RNA, 19 nt, Artificial Sequence
  Description of Artificial Sequence: Synthetic oligonucleotide
  Sense strand starting at position 2308 of SEQ ID NO: 586784
cugugauagcuauaauaau

SEQ ID NO: 744093 - RNA, 19 nt, Artificial Sequence
  Description of Artificial Sequence: Synthetic oligonucleotide
  Antisense strand to SEQ ID NO: 744092
auuauuauagcuaucacag

SEQ ID NO: 744094 - RNA, 19 nt, Artificial Sequence
  Description of Artificial Sequence: Synthetic oligonucleotide
  Sense strand starting at position 2341 of SEQ ID NO: 586784
auaacuaguguuggaaaga

SEQ ID NO: 744095 - RNA, 19 nt, Artificial Sequence
  Description of Artificial Sequence: Synthetic oligonucleotide
  Antisense strand to SEQ ID NO: 744094
ucuuuccaacacuaguuau

SEQ ID NO: 744096 - RNA, 19 nt, Artificial Sequence
  Description of Artificial Sequence: Synthetic oligonucleotide
  Sense strand starting at position 2431 of SEQ ID NO: 586784
uuugguagcuguucuauuu

SEQ ID NO: 744097 - RNA, 19 nt, Artificial Sequence
  Description of Artificial Sequence: Synthetic oligonucleotide
  Antisense strand to SEQ ID NO: 744096
aaauagaacagcuaccaaa

SEQ ID NO: 744098 - RNA, 19 nt, Artificial Sequence
  Description of Artificial Sequence: Synthetic oligonucleotide
  Sense strand starting at position 2489 of SEQ ID NO: 586784
auuccaauccuagguauag

SEQ ID NO: 744099 - RNA, 19 nt, Artificial Sequence
  Description of Artificial Sequence: Synthetic oligonucleotide
  Antisense strand to SEQ ID NO: 744098
cuauaccuaggauuggaau

SEQ ID NO: 744100 - RNA, 19 nt, Artificial Sequence
  Description of Artificial Sequence: Synthetic oligonucleotide
  Sense strand starting at position 2490 of SEQ ID NO: 586784
uuccaauccuagguauaga

SEQ ID NO: 744101 - RNA, 19 nt, Artificial Sequence
  Description of Artificial Sequence: Synthetic oligonucleotide
  Antisense strand to SEQ ID NO: 744100
ucuauaccuaggauuggaa

SEQ ID NO: 744102 - RNA, 19 nt, Artificial Sequence
  Description of Artificial Sequence: Synthetic oligonucleotide
  Sense strand starting at position 2720 of SEQ ID NO: 586784
acaacauuaggcuaaguca

SEQ ID NO: 744103 - RNA, 19 nt, Artificial Sequence
  Description of Artificial Sequence: Synthetic oligonucleotide
  Antisense strand to SEQ ID NO: 744102
ugacuuagccuaauguugu

SEQ ID NO: 744104 - RNA, 19 nt, Artificial Sequence
  Description of Artificial Sequence: Synthetic oligonucleotide
  Sense strand starting at position 2723 of SEQ ID NO: 586784
acauuaggcuaagucaaau

SEQ ID NO: 744105 - RNA, 19 nt, Artificial Sequence
  Description of Artificial Sequence: Synthetic oligonucleotide
  Antisense strand to SEQ ID NO: 744104
auuugacuuagccuaaugu

SEQ ID NO: 744106 - RNA, 19 nt, Artificial Sequence
  Description of Artificial Sequence: Synthetic oligonucleotide
  Sense strand starting at position 2822 of SEQ ID NO: 586784
aauaauuagugguuacuga

SEQ ID NO: 744107 - RNA, 19 nt, Artificial Sequence
  Description of Artificial Sequence: Synthetic oligonucleotide
  Antisense strand to SEQ ID NO: 744106
ucaguaaccacuaauuauu

SEQ ID NO: 744108 - RNA, 19 nt, Artificial Sequence
  Description of Artificial Sequence: Synthetic oligonucleotide
  Sense strand starting at position 2845 of SEQ ID NO: 586784
agaguagagugacugcuua

SEQ ID NO: 744109 - RNA, 19 nt, Artificial Sequence
  Description of Artificial Sequence: Synthetic oligonucleotide
  Antisense strand to SEQ ID NO: 744108
uaagcagucacucuacucu

SEQ ID NO: 744110 - RNA, 19 nt, Artificial Sequence
  Description of Artificial Sequence: Synthetic oligonucleotide
  Sense strand starting at position 3164 of SEQ ID NO: 586784
gagucuugcccugauggag

SEQ ID NO: 744111 - RNA, 19 nt, Artificial Sequence
  Description of Artificial Sequence: Synthetic oligonucleotide
  Antisense strand to SEQ ID NO: 744110
cuccaucagggcaagacuc

SEQ ID NO: 744112 - RNA, 19 nt, Artificial Sequence
  Description of Artificial Sequence: Synthetic oligonucleotide
  Sense strand starting at position 3201 of SEQ ID NO: 586784
gaggaaaugugggccuaga

SEQ ID NO: 744113 - RNA, 19 nt, Artificial Sequence
  Description of Artificial Sequence: Synthetic oligonucleotide
  Antisense strand to SEQ ID NO: 744112
ucuaggcccacauuuccuc

SEQ ID NO: 744114 - RNA, 19 nt, Artificial Sequence
  Description of Artificial Sequence: Synthetic oligonucleotide
  Sense strand starting at position 3245 of SEQ ID NO: 586784
gguuaagaguaacuaacau

SEQ ID NO: 744115 - RNA, 19 nt, Artificial Sequence
  Description of Artificial Sequence: Synthetic oligonucleotide
  Antisense strand to SEQ ID NO: 744114
auguuaguuacucuuaacc

SEQ ID NO: 744116 - RNA, 19 nt, Artificial Sequence
  Description of Artificial Sequence: Synthetic oligonucleotide
  Sense strand starting at position 3451 of SEQ ID NO: 586784
ggaaccagcuaguuaacua

SEQ ID NO: 744117 - RNA, 19 nt, Artificial Sequence
  Description of Artificial Sequence: Synthetic oligonucleotide
  Antisense strand to SEQ ID NO: 744116
uaguuaacuagcugguucc

SEQ ID NO: 744118 - RNA, 19 nt, Artificial Sequence
  Description of Artificial Sequence: Synthetic oligonucleotide
  Sense strand starting at position 3455 of SEQ ID NO: 586784
ccagcuaguuaacuaugau

SEQ ID NO: 744119 - RNA, 19 nt, Artificial Sequence
  Description of Artificial Sequence: Synthetic oligonucleotide
  Antisense strand to SEQ ID NO: 744118
aucauaguuaacuagcugg

SEQ ID NO: 744120 - RNA, 19 nt, Artificial Sequence
  Description of Artificial Sequence: Synthetic oligonucleotide
  Sense strand starting at position 3771 of SEQ ID NO: 586784
cuagguguaccugaaguua

SEQ ID NO: 744121 - RNA, 19 nt, Artificial Sequence
  Description of Artificial Sequence: Synthetic oligonucleotide
  Antisense strand to SEQ ID NO: 744120
uaacuucagguacaccuag

SEQ ID NO: 744122 - RNA, 19 nt, Artificial Sequence
  Description of Artificial Sequence: Synthetic oligonucleotide
  Sense strand starting at position 3811 of SEQ ID NO: 586784
guagcaagagaguacugua

SEQ ID NO: 744123 - RNA, 19 nt, Artificial Sequence
  Description of Artificial Sequence: Synthetic oligonucleotide
  Antisense strand to SEQ ID NO: 744122
uacaguacucucuugcuac

SEQ ID NO: 744124 - RNA, 19 nt, Artificial Sequence
  Description of Artificial Sequence: Synthetic oligonucleotide
  Sense strand starting at position 3978 of SEQ ID NO: 586784
cagauuccacaguggauua

SEQ ID NO: 744125 - RNA, 19 nt, Artificial Sequence
  Description of Artificial Sequence: Synthetic oligonucleotide
  Antisense strand to SEQ ID NO: 744124
uaauccacuguggaaucug

SEQ ID NO: 744126 - RNA, 19 nt, Artificial Sequence
  Description of Artificial Sequence: Synthetic oligonucleotide
  Sense strand starting at position 32 of SEQ ID NO: 586785
aggaauacuuucguuuaau

SEQ ID NO: 744127 - RNA, 19 nt, Artificial Sequence
  Description of Artificial Sequence: Synthetic oligonucleotide
  Antisense strand to SEQ ID NO: 744126
auuaaacgaaaguauuccu

SEQ ID NO: 744128 - RNA, 19 nt, Artificial Sequence
  Description of Artificial Sequence: Synthetic oligonucleotide
  Sense strand starting at position 145 of SEQ ID NO: 586785
gacuguuucuacccugaga

SEQ ID NO: 744129 - RNA, 19 nt, Artificial Sequence
  Description of Artificial Sequence: Synthetic oligonucleotide
  Antisense strand to SEQ ID NO: 744128
ucucaggguagaaacaguc

SEQ ID NO: 744130 - RNA, 19 nt, Artificial Sequence
  Description of Artificial Sequence: Synthetic oligonucleotide
  Sense strand starting at position 148 of SEQ ID NO: 586785
uguuucuacccugagaacu

SEQ ID NO: 744131 - RNA, 19 nt, Artificial Sequence
  Description of Artificial Sequence: Synthetic oligonucleotide
  Antisense strand to SEQ ID NO: 744130
aguucucaggguagaaaca

SEQ ID NO: 744132 - RNA, 19 nt, Artificial Sequence
  Description of Artificial Sequence: Synthetic oligonucleotide
  Sense strand starting at position 290 of SEQ ID NO: 586785
gugugcuuucuuguccuga

SEQ ID NO: 744133 - RNA, 19 nt, Artificial Sequence
  Description of Artificial Sequence: Synthetic oligonucleotide
  Antisense strand to SEQ ID NO: 744132
ucaggacaagaaagcacac

SEQ ID NO: 744134 - RNA, 19 nt, Artificial Sequence
  Description of Artificial Sequence: Synthetic oligonucleotide
  Sense strand starting at position 421 of SEQ ID NO: 586785
cugugaaagacuggauauc

SEQ ID NO: 744135 - RNA, 19 nt, Artificial Sequence
  Description of Artificial Sequence: Synthetic oligonucleotide
  Antisense strand to SEQ ID NO: 744134
gauauccagucuuucacag

SEQ ID NO: 744136 - RNA, 19 nt, Artificial Sequence
  Description of Artificial Sequence: Synthetic oligonucleotide
  Sense strand starting at position 442 of SEQ ID NO: 586785
aggugagaucaaugcugag

SEQ ID NO: 744137 - RNA, 19 nt, Artificial Sequence
  Description of Artificial Sequence: Synthetic oligonucleotide
  Antisense strand to SEQ ID NO: 744136
cucagcauugaucucaccu

SEQ ID NO: 744138 - RNA, 19 nt, Artificial Sequence
  Description of Artificial Sequence: Synthetic oligonucleotide
  Sense strand starting at position 501 of SEQ ID NO: 586785
acccacauuguacgaaauu

SEQ ID NO: 744139 - RNA, 19 nt, Artificial Sequence
  Description of Artificial Sequence: Synthetic oligonucleotide
  Antisense strand to SEQ ID NO: 744138
aauuucguacaaugugggu

SEQ ID NO: 744140 - RNA, 19 nt, Artificial Sequence
  Description of Artificial Sequence: Synthetic oligonucleotide
  Sense strand starting at position 546 of SEQ ID NO: 586785
gcuggaaaugacuguggau

SEQ ID NO: 744141 - RNA, 19 nt, Artificial Sequence
  Description of Artificial Sequence: Synthetic oligonucleotide
  Antisense strand to SEQ ID NO: 744140
auccacagucauuuccagc

SEQ ID NO: 744142 - RNA, 19 nt, Artificial Sequence
  Description of Artificial Sequence: Synthetic oligonucleotide
  Sense strand starting at position 548 of SEQ ID NO: 586785
uggaaaugacuguggauuc

SEQ ID NO: 744143 - RNA, 19 nt, Artificial Sequence
  Description of Artificial Sequence: Synthetic oligonucleotide
  Antisense strand to SEQ ID NO: 744142
gaauccacagucauuucca

SEQ ID NO: 744144 - RNA, 19 nt, Artificial Sequence
  Description of Artificial Sequence: Synthetic oligonucleotide
  Sense strand starting at position 676 of SEQ ID NO: 586785
uugccagaaguacaauaua

SEQ ID NO: 744145 - RNA, 19 nt, Artificial Sequence
  Description of Artificial Sequence: Synthetic oligonucleotide
  Antisense strand to SEQ ID NO: 744144
uauauuguacuucuggcaa

SEQ ID NO: 744146 - RNA, 19 nt, Artificial Sequence
  Description of Artificial Sequence: Synthetic oligonucleotide
  Sense strand starting at position 805 of SEQ ID NO: 586785
ugaccauccugguugaaau

SEQ ID NO: 744147 - RNA, 19 nt, Artificial Sequence
  Description of Artificial Sequence: Synthetic oligonucleotide
  Antisense strand to SEQ ID NO: 744146
auuucaaccaggaugguca

SEQ ID NO: 744148 - RNA, 19 nt, Artificial Sequence
  Description of Artificial Sequence: Synthetic oligonucleotide
  Sense strand starting at position 806 of SEQ ID NO: 586785
gaccauccugguugaaaua

SEQ ID NO: 744149 - RNA, 19 nt, Artificial Sequence
  Description of Artificial Sequence: Synthetic oligonucleotide
  Antisense strand to SEQ ID NO: 744148
uauuucaaccaggaugguc

SEQ ID NO: 744150 - RNA, 19 nt, Artificial Sequence
  Description of Artificial Sequence: Synthetic oligonucleotide
  Sense strand starting at position 862 of SEQ ID NO: 586785
gugugaugauaggcauaag

SEQ ID NO: 744151 - RNA, 19 nt, Artificial Sequence
  Description of Artificial Sequence: Synthetic oligonucleotide
  Antisense strand to SEQ ID NO: 744150
cuuaugccuaucaucacac

SEQ ID NO: 744152 - RNA, 19 nt, Artificial Sequence
  Description of Artificial Sequence: Synthetic oligonucleotide
  Sense strand starting at position 883 of SEQ ID NO: 586785
gguaccuaucacugggauu

SEQ ID NO: 744153 - RNA, 19 nt, Artificial Sequence
  Description of Artificial Sequence: Synthetic oligonucleotide
  Antisense strand to SEQ ID NO: 744152
aaucccagugauagguacc

SEQ ID NO: 744154 - RNA, 19 nt, Artificial Sequence
  Description of Artificial Sequence: Synthetic oligonucleotide
  Sense strand starting at position 1019 of SEQ ID NO: 586785
cgcuacugcauuuggauaa

SEQ ID NO: 744155 - RNA, 19 nt, Artificial Sequence
  Description of Artificial Sequence: Synthetic oligonucleotide
  Antisense strand to SEQ ID NO: 744154
uuauccaaaugcaguagcg

SEQ ID NO: 744156 - RNA, 19 nt, Artificial Sequence
  Description of Artificial Sequence: Synthetic oligonucleotide
  Sense strand starting at position 1163 of SEQ ID NO: 586785
aauguuuggcacuagaugu

SEQ ID NO: 744157 - RNA, 19 nt, Artificial Sequence
  Description of Artificial Sequence: Synthetic oligonucleotide
  Antisense strand to SEQ ID NO: 744156
acaucuagugccaaacauu

SEQ ID NO: 744158 - RNA, 19 nt, Artificial Sequence
  Description of Artificial Sequence: Synthetic oligonucleotide
  Sense strand starting at position 1472 of SEQ ID NO: 586785
aauaucugcgccuuucgua

SEQ ID NO: 744159 - RNA, 19 nt, Artificial Sequence
  Description of Artificial Sequence: Synthetic oligonucleotide
  Antisense strand to SEQ ID NO: 744158
uacgaaaggcgcagauauu

SEQ ID NO: 744160 - RNA, 19 nt, Artificial Sequence
  Description of Artificial Sequence: Synthetic oligonucleotide
  Sense strand starting at position 1574 of SEQ ID NO: 586785
acugauuucgcguauccau

SEQ ID NO: 744161 - RNA, 19 nt, Artificial Sequence
  Description of Artificial Sequence: Synthetic oligonucleotide
  Antisense strand to SEQ ID NO: 744160
auggauacgcgaaaucagu

SEQ ID NO: 744162 - RNA, 19 nt, Artificial Sequence
  Description of Artificial Sequence: Synthetic oligonucleotide
  Sense strand starting at position 1581 of SEQ ID NO: 586785
ucgcguauccauuccuuua

SEQ ID NO: 744163 - RNA, 19 nt, Artificial Sequence
  Description of Artificial Sequence: Synthetic oligonucleotide
  Antisense strand to SEQ ID NO: 744162
uaaaggaauggauacgcga

SEQ ID NO: 744164 - RNA, 19 nt, Artificial Sequence
  Description of Artificial Sequence: Synthetic oligonucleotide
  Sense strand starting at position 1744 of SEQ ID NO: 586785
aggagacgccguagcgauu

SEQ ID NO: 744165 - RNA, 19 nt, Artificial Sequence
  Description of Artificial Sequence: Synthetic oligonucleotide
  Antisense strand to SEQ ID NO: 744164
aaucgcuacggcgucuccu

SEQ ID NO: 744166 - RNA, 19 nt, Artificial Sequence
  Description of Artificial Sequence: Synthetic oligonucleotide
  Sense strand starting at position 2419 of SEQ ID NO: 586785
gcauuucgaggucgacauu

SEQ ID NO: 744167 - RNA, 19 nt, Artificial Sequence
  Description of Artificial Sequence: Synthetic oligonucleotide
  Antisense strand to SEQ ID NO: 744166
aaugucgaccucgaaaugc

SEQ ID NO: 744168 - RNA, 19 nt, Artificial Sequence
  Description of Artificial Sequence: Synthetic oligonucleotide
  Sense strand starting at position 2965 of SEQ ID NO: 586785
acacuaugauucccgaauc

SEQ ID NO: 744169 - RNA, 19 nt, Artificial Sequence
  Description of Artificial Sequence: Synthetic oligonucleotide
  Antisense strand to SEQ ID NO: 744168
gauucgggaaucauagugu

SEQ ID NO: 744170 - RNA, 19 nt, Artificial Sequence
  Description of Artificial Sequence: Synthetic oligonucleotide
  Sense strand starting at position 2978 of SEQ ID NO: 586785
cgaaucagaagucaugcuu

SEQ ID NO: 744171 - RNA, 19 nt, Artificial Sequence
  Description of Artificial Sequence: Synthetic oligonucleotide
  Antisense strand to SEQ ID NO: 744170
aagcaugacuucugauucg

SEQ ID NO: 744172 - RNA, 19 nt, Artificial Sequence
  Description of Artificial Sequence: Synthetic oligonucleotide
  Sense strand starting at position 2998 of SEQ ID NO: 586785
uuaugaucuccagaagcuu

SEQ ID NO: 744173 - RNA, 19 nt, Artificial Sequence
  Description of Artificial Sequence: Synthetic oligonucleotide
  Antisense strand to SEQ ID NO: 744172
aagcuucuggagaucauaa

SEQ ID NO: 744174 - RNA, 19 nt, Artificial Sequence
  Description of Artificial Sequence: Synthetic oligonucleotide
  Sense strand starting at position 3019 of SEQ ID NO: 586785
ugggcacuuccugggaaua

SEQ ID NO: 744175 - RNA, 19 nt, Artificial Sequence
  Description of Artificial Sequence: Synthetic oligonucleotide
  Antisense strand to SEQ ID NO: 744174
uauucccaggaagugccca

SEQ ID NO: 744176 - RNA, 19 nt, Artificial Sequence
  Description of Artificial Sequence: Synthetic oligonucleotide
  Sense strand starting at position 3020 of SEQ ID NO: 586785
gggcacuuccugggaauau

SEQ ID NO: 744177 - RNA, 19 nt, Artificial Sequence
  Description of Artificial Sequence: Synthetic oligonucleotide
  Antisense strand to SEQ ID NO: 744176
auauucccaggaagugccc

SEQ ID NO: 744178 - RNA, 19 nt, Artificial Sequence
  Description of Artificial Sequence: Synthetic oligonucleotide
  Sense strand starting at position 3029 of SEQ ID NO: 586785
cugggaauauguucuccca

SEQ ID NO: 744179 - RNA, 19 nt, Artificial Sequence
  Description of Artificial Sequence: Synthetic oligonucleotide
  Antisense strand to SEQ ID NO: 744178
ugggagaacauauucccag

SEQ ID NO: 744180 - RNA, 19 nt, Artificial Sequence
  Description of Artificial Sequence: Synthetic oligonucleotide
  Sense strand starting at position 3031 of SEQ ID NO: 586785
gggaauauguucucccacu

SEQ ID NO: 744181 - RNA, 19 nt, Artificial Sequence
  Description of Artificial Sequence: Synthetic oligonucleotide
  Antisense strand to SEQ ID NO: 744180
agugggagaacauauuccc

SEQ ID NO: 744182 - RNA, 19 nt, Artificial Sequence
  Description of Artificial Sequence: Synthetic oligonucleotide
  Sense strand starting at position 3109 of SEQ ID NO: 586785
cucuuaagccgugugucuu

SEQ ID NO: 744183 - RNA, 19 nt, Artificial Sequence
  Description of Artificial Sequence: Synthetic oligonucleotide
  Antisense strand to SEQ ID NO: 744182
aagacacacggcuuaagag

SEQ ID NO: 744184 - RNA, 19 nt, Artificial Sequence
  Description of Artificial Sequence: Synthetic oligonucleotide
  Sense strand starting at position 3181 of SEQ ID NO: 586785
cuguuuaagcaucauugaa

SEQ ID NO: 744185 - RNA, 19 nt, Artificial Sequence
  Description of Artificial Sequence: Synthetic oligonucleotide
  Antisense strand to SEQ ID NO: 744184
uucaaugaugcuuaaacag

SEQ ID NO: 744186 - RNA, 19 nt, Artificial Sequence
  Description of Artificial Sequence: Synthetic oligonucleotide
  Sense strand starting at position 3183 of SEQ ID NO: 586785
guuuaagcaucauugaaau

SEQ ID NO: 744187 - RNA, 19 nt, Artificial Sequence
  Description of Artificial Sequence: Synthetic oligonucleotide
  Antisense strand to SEQ ID NO: 744186
auuucaaugaugcuuaaac

SEQ ID NO: 744188 - RNA, 19 nt, Artificial Sequence
  Description of Artificial Sequence: Synthetic oligonucleotide
  Sense strand starting at position 3359 of SEQ ID NO: 586785
ccgaaugcucuugagaaac

SEQ ID NO: 744189 - RNA, 19 nt, Artificial Sequence
  Description of Artificial Sequence: Synthetic oligonucleotide
  Antisense strand to SEQ ID NO: 744188
guuucucaagagcauucgg

SEQ ID NO: 744190 - RNA, 19 nt, Artificial Sequence
  Description of Artificial Sequence: Synthetic oligonucleotide
  Sense strand starting at position 3388 of SEQ ID NO: 586785
guuguuauccaagaacuca

SEQ ID NO: 744191 - RNA, 19 nt, Artificial Sequence
  Description of Artificial Sequence: Synthetic oligonucleotide
  Antisense strand to SEQ ID NO: 744190
ugaguucuuggauaacaac

SEQ ID NO: 744192 - RNA, 19 nt, Artificial Sequence
  Description of Artificial Sequence: Synthetic oligonucleotide
  Sense strand starting at position 3398 of SEQ ID NO: 586785
aagaacucagagugguauu

SEQ ID NO: 744193 - RNA, 19 nt, Artificial Sequence
  Description of Artificial Sequence: Synthetic oligonucleotide
  Antisense strand to SEQ ID NO: 744192
aauaccacucugaguucuu

SEQ ID NO: 744194 - RNA, 19 nt, Artificial Sequence
  Description of Artificial Sequence: Synthetic oligonucleotide
  Sense strand starting at position 3399 of SEQ ID NO: 586785
agaacucagagugguauua

SEQ ID NO: 744195 - RNA, 19 nt, Artificial Sequence
  Description of Artificial Sequence: Synthetic oligonucleotide
  Antisense strand to SEQ ID NO: 744194
uaauaccacucugaguucu

SEQ ID NO: 744196 - RNA, 19 nt, Artificial Sequence
  Description of Artificial Sequence: Synthetic oligonucleotide
  Sense strand starting at position 3444 of SEQ ID NO: 586785
gugagcucauuucugguga

SEQ ID NO: 744197 - RNA, 19 nt, Artificial Sequence
  Description of Artificial Sequence: Synthetic oligonucleotide
  Antisense strand to SEQ ID NO: 744196
ucaccagaaaugagcucac

SEQ ID NO: 744198 - RNA, 19 nt, Artificial Sequence
  Description of Artificial Sequence: Synthetic oligonucleotide
  Sense strand starting at position 3527 of SEQ ID NO: 586785
guucuuguacacuauagaa

SEQ ID NO: 744199 - RNA, 19 nt, Artificial Sequence
  Description of Artificial Sequence: Synthetic oligonucleotide
  Antisense strand to SEQ ID NO: 744198
uucuauaguguacaagaac

SEQ ID NO: 744200 - RNA, 19 nt, Artificial Sequence
  Description of Artificial Sequence: Synthetic oligonucleotide
  Sense strand starting at position 3561 of SEQ ID NO: 586785
uuucuuauccagggauuau

SEQ ID NO: 744201 - RNA, 19 nt, Artificial Sequence
  Description of Artificial Sequence: Synthetic oligonucleotide
  Antisense strand to SEQ ID NO: 744200
auaaucccuggauaagaaa

SEQ ID NO: 744202 - RNA, 19 nt, Artificial Sequence
  Description of Artificial Sequence: Synthetic oligonucleotide
  Sense strand starting at position 3648 of SEQ ID NO: 586785
aaggaacagucuuuaguuu

SEQ ID NO: 744203 - RNA, 19 nt, Artificial Sequence
  Description of Artificial Sequence: Synthetic oligonucleotide
  Antisense strand to SEQ ID NO: 744202
aaacuaaagacuguuccuu

SEQ ID NO: 744204 - RNA, 19 nt, Artificial Sequence
  Description of Artificial Sequence: Synthetic oligonucleotide
  Sense strand starting at position 3921 of SEQ ID NO: 586785
agcuacaauccugagguuu

SEQ ID NO: 744205 - RNA, 19 nt, Artificial Sequence
  Description of Artificial Sequence: Synthetic oligonucleotide
  Antisense strand to SEQ ID NO: 744204
aaaccucaggauuguagcu

SEQ ID NO: 744206 - RNA, 19 nt, Artificial Sequence
  Description of Artificial Sequence: Synthetic oligonucleotide
  Sense strand starting at position 55 of SEQ ID NO: 586786
gggaguuucuauucuacug

SEQ ID NO: 744207 - RNA, 19 nt, Artificial Sequence
  Description of Artificial Sequence: Synthetic oligonucleotide
  Antisense strand to SEQ ID NO: 744206
caguagaauagaaacuccc

SEQ ID NO: 744208 - RNA, 19 nt, Artificial Sequence
  Description of Artificial Sequence: Synthetic oligonucleotide
  Sense strand starting at position 103 of SEQ ID NO: 586786
guucccugugaccaagagu

SEQ ID NO: 744209 - RNA, 19 nt, Artificial Sequence
  Description of Artificial Sequence: Synthetic oligonucleotide
  Antisense strand to SEQ ID NO: 744208
acucuuggucacagggaac

SEQ ID NO: 744210 - RNA, 19 nt, Artificial Sequence
  Description of Artificial Sequence: Synthetic oligonucleotide
  Sense strand starting at position 137 of SEQ ID NO: 586786
ccucaaaugggaugugauc

SEQ ID NO: 744211 - RNA, 19 nt, Artificial Sequence
  Description of Artificial Sequence: Synthetic oligonucleotide
  Antisense strand to SEQ ID NO: 744210
gaucacaucccauuugagg

SEQ ID NO: 744212 - RNA, 19 nt, Artificial Sequence
  Description of Artificial Sequence: Synthetic oligonucleotide
  Sense strand starting at position 139 of SEQ ID NO: 586786
ucaaaugggaugugaucuu

SEQ ID NO: 744213 - RNA, 19 nt, Artificial Sequence
  Description of Artificial Sequence: Synthetic oligonucleotide
  Antisense strand to SEQ ID NO: 744212
aagaucacaucccauuuga

SEQ ID NO: 744214 - RNA, 19 nt, Artificial Sequence
  Description of Artificial Sequence: Synthetic oligonucleotide
  Sense strand starting at position 146 of SEQ ID NO: 586786
ggaugugaucuuuagguug

SEQ ID NO: 744215 - RNA, 19 nt, Artificial Sequence
  Description of Artificial Sequence: Synthetic oligonucleotide
  Antisense strand to SEQ ID NO: 744214
caaccuaaagaucacaucc

SEQ ID NO: 744216 - RNA, 19 nt, Artificial Sequence
  Description of Artificial Sequence: Synthetic oligonucleotide
  Sense strand starting at position 273 of SEQ ID NO: 586786
ggguguuccagucacagaa

SEQ ID NO: 744217 - RNA, 19 nt, Artificial Sequence
  Description of Artificial Sequence: Synthetic oligonucleotide
  Antisense strand to SEQ ID NO: 744216
uucugugacuggaacaccc

SEQ ID NO: 744218 - RNA, 19 nt, Artificial Sequence
  Description of Artificial Sequence: Synthetic oligonucleotide
  Sense strand starting at position 357 of SEQ ID NO: 586786
uccaguuuguaagcagauu

SEQ ID NO: 744219 - RNA, 19 nt, Artificial Sequence
  Description of Artificial Sequence: Synthetic oligonucleotide
  Antisense strand to SEQ ID NO: 744218
aaucugcuuacaaacugga

SEQ ID NO: 744220 - RNA, 19 nt, Artificial Sequence
  Description of Artificial Sequence: Synthetic oligonucleotide
  Sense strand starting at position 368 of SEQ ID NO: 586786
agcagauuaauaggguuga

SEQ ID NO: 744221 - RNA, 19 nt, Artificial Sequence
  Description of Artificial Sequence: Synthetic oligonucleotide
  Antisense strand to SEQ ID NO: 744220
ucaacccuauuaaucugcu

SEQ ID NO: 744222 - RNA, 19 nt, Artificial Sequence
  Description of Artificial Sequence: Synthetic oligonucleotide
  Sense strand starting at position 379 of SEQ ID NO: 586786
aggguugaacuggguuuaa

SEQ ID NO: 744223 - RNA, 19 nt, Artificial Sequence
  Description of Artificial Sequence: Synthetic oligonucleotide
  Antisense strand to SEQ ID NO: 744222
uuaaacccaguucaacccu

SEQ ID NO: 744224 - RNA, 19 nt, Artificial Sequence
  Description of Artificial Sequence: Synthetic oligonucleotide
  Sense strand starting at position 392 of SEQ ID NO: 586786
guuuaaagaucucuaccag

SEQ ID NO: 744225 - RNA, 19 nt, Artificial Sequence
  Description of Artificial Sequence: Synthetic oligonucleotide
  Antisense strand to SEQ ID NO: 744224
cugguagagaucuuuaaac

SEQ ID NO: 744226 - RNA, 19 nt, Artificial Sequence
  Description of Artificial Sequence: Synthetic oligonucleotide
  Sense strand starting at position 635 of SEQ ID NO: 586786
uccgcaggugcucauuaaa

SEQ ID NO: 744227 - RNA, 19 nt, Artificial Sequence
  Description of Artificial Sequence: Synthetic oligonucleotide
  Antisense strand to SEQ ID NO: 744226
uuuaaugagcaccugcgga

SEQ ID NO: 744228 - RNA, 19 nt, Artificial Sequence
  Description of Artificial Sequence: Synthetic oligonucleotide
  Sense strand starting at position 696 of SEQ ID NO: 586786
accgaauugucugcucaaa

SEQ ID NO: 744229 - RNA, 19 nt, Artificial Sequence
  Description of Artificial Sequence: Synthetic oligonucleotide
  Antisense strand to SEQ ID NO: 744228
uuugagcagacaauucggu

SEQ ID NO: 744230 - RNA, 19 nt, Artificial Sequence
  Description of Artificial Sequence: Synthetic oligonucleotide
  Sense strand starting at position 1674 of SEQ ID NO: 586786
gcgaucacuccgcauagaa

SEQ ID NO: 744231 - RNA, 19 nt, Artificial Sequence
  Description of Artificial Sequence: Synthetic oligonucleotide
  Antisense strand to SEQ ID NO: 744230
uucuaugcggagugaucgc

SEQ ID NO: 744232 - RNA, 19 nt, Artificial Sequence
  Description of Artificial Sequence: Synthetic oligonucleotide
  Sense strand starting at position 1676 of SEQ ID NO: 586786
gaucacuccgcauagaaga

SEQ ID NO: 744233 - RNA, 19 nt, Artificial Sequence
  Description of Artificial Sequence: Synthetic oligonucleotide
  Antisense strand to SEQ ID NO: 744232
ucuucuaugcggagugauc

SEQ ID NO: 744234 - RNA, 19 nt, Artificial Sequence
  Description of Artificial Sequence: Synthetic oligonucleotide
  Sense strand starting at position 1887 of SEQ ID NO: 586786
cugcuaaguaacgauugaa

SEQ ID NO: 744235 - RNA, 19 nt, Artificial Sequence
  Description of Artificial Sequence: Synthetic oligonucleotide
  Antisense strand to SEQ ID NO: 744234
uucaaucguuacuuagcag

SEQ ID NO: 744236 - RNA, 19 nt, Artificial Sequence
  Description of Artificial Sequence: Synthetic oligonucleotide
  Sense strand starting at position 1890 of SEQ ID NO: 586786
cuaaguaacgauugaacaa

SEQ ID NO: 744237 - RNA, 19 nt, Artificial Sequence
  Description of Artificial Sequence: Synthetic oligonucleotide
  Antisense strand to SEQ ID NO: 744236
uuguucaaucguuacuuag

SEQ ID NO: 744238 - RNA, 19 nt, Artificial Sequence
  Description of Artificial Sequence: Synthetic oligonucleotide
  Sense strand starting at position 1969 of SEQ ID NO: 586786
guuagagcccuuugaggag

SEQ ID NO: 744239 - RNA, 19 nt, Artificial Sequence
  Description of Artificial Sequence: Synthetic oligonucleotide
  Antisense strand to SEQ ID NO: 744238
cuccucaaagggcucuaac

SEQ ID NO: 744240 - RNA, 19 nt, Artificial Sequence
  Description of Artificial Sequence: Synthetic oligonucleotide
  Sense strand starting at position 1973 of SEQ ID NO: 586786
gagcccuuugaggagguaa

SEQ ID NO: 744241 - RNA, 19 nt, Artificial Sequence
  Description of Artificial Sequence: Synthetic oligonucleotide
  Antisense strand to SEQ ID NO: 744240
uuaccuccucaaagggcuc

SEQ ID NO: 744242 - RNA, 19 nt, Artificial Sequence
  Description of Artificial Sequence: Synthetic oligonucleotide
  Sense strand starting at position 2038 of SEQ ID NO: 586786
agcaaucuuuccucucgga

SEQ ID NO: 744243 - RNA, 19 nt, Artificial Sequence
  Description of Artificial Sequence: Synthetic oligonucleotide
  Antisense strand to SEQ ID NO: 744242
uccgagaggaaagauugcu

SEQ ID NO: 744244 - RNA, 19 nt, Artificial Sequence
  Description of Artificial Sequence: Synthetic oligonucleotide
  Sense strand starting at position 2129 of SEQ ID NO: 586786
guaggguuacgugggaaca

SEQ ID NO: 744245 - RNA, 19 nt, Artificial Sequence
  Description of Artificial Sequence: Synthetic oligonucleotide
  Antisense strand to SEQ ID NO: 744244
uguucccacguaacccuac

SEQ ID NO: 744246 - RNA, 19 nt, Artificial Sequence
  Description of Artificial Sequence: Synthetic oligonucleotide
  Sense strand starting at position 2139 of SEQ ID NO: 586786
gugggaacagugugguuga

SEQ ID NO: 744247 - RNA, 19 nt, Artificial Sequence
  Description of Artificial Sequence: Synthetic oligonucleotide
  Antisense strand to SEQ ID NO: 744246
ucaaccacacuguucccac

SEQ ID NO: 744248 - RNA, 19 nt, Artificial Sequence
  Description of Artificial Sequence: Synthetic oligonucleotide
  Sense strand starting at position 2142 of SEQ ID NO: 586786
ggaacagugugguugaucu

SEQ ID NO: 744249 - RNA, 19 nt, Artificial Sequence
  Description of Artificial Sequence: Synthetic oligonucleotide
  Antisense strand to SEQ ID NO: 744248
agaucaaccacacuguucc

SEQ ID NO: 744250 - RNA, 19 nt, Artificial Sequence
  Description of Artificial Sequence: Synthetic oligonucleotide
  Sense strand starting at position 2144 of SEQ ID NO: 586786
aacagugugguugaucuuu

SEQ ID NO: 744251 - RNA, 19 nt, Artificial Sequence
  Description of Artificial Sequence: Synthetic oligonucleotide
  Antisense strand to SEQ ID NO: 744250
aaagaucaaccacacuguu

SEQ ID NO: 744252 - RNA, 19 nt, Artificial Sequence
  Description of Artificial Sequence: Synthetic oligonucleotide
  Sense strand starting at position 2146 of SEQ ID NO: 586786
cagugugguugaucuuuaa

SEQ ID NO: 744253 - RNA, 19 nt, Artificial Sequence
  Description of Artificial Sequence: Synthetic oligonucleotide
  Antisense strand to SEQ ID NO: 744252
uuaaagaucaaccacacug

SEQ ID NO: 744254 - RNA, 19 nt, Artificial Sequence
  Description of Artificial Sequence: Synthetic oligonucleotide
  Sense strand starting at position 2149 of SEQ ID NO: 586786
ugugguugaucuuuaaaga

SEQ ID NO: 744255 - RNA, 19 nt, Artificial Sequence
  Description of Artificial Sequence: Synthetic oligonucleotide
  Antisense strand to SEQ ID NO: 744254
ucuuuaaagaucaaccaca

SEQ ID NO: 744256 - RNA, 19 nt, Artificial Sequence
  Description of Artificial Sequence: Synthetic oligonucleotide
  Sense strand starting at position 2150 of SEQ ID NO: 586786
gugguugaucuuuaaagac

SEQ ID NO: 744257 - RNA, 19 nt, Artificial Sequence
  Description of Artificial Sequence: Synthetic oligonucleotide
  Antisense strand to SEQ ID NO: 744256
gucuuuaaagaucaaccac

SEQ ID NO: 744258 - RNA, 19 nt, Artificial Sequence
  Description of Artificial Sequence: Synthetic oligonucleotide
  Sense strand starting at position 2172 of SEQ ID NO: 586786
uacgaaggcuguuuaacaa

SEQ ID NO: 744259 - RNA, 19 nt, Artificial Sequence
  Description of Artificial Sequence: Synthetic oligonucleotide
  Antisense strand to SEQ ID NO: 744258
uuguuaaacagccuucgua

SEQ ID NO: 744260 - RNA, 19 nt, Artificial Sequence
  Description of Artificial Sequence: Synthetic oligonucleotide
  Sense strand starting at position 2234 of SEQ ID NO: 586786
ccaugauguggugguaaac

SEQ ID NO: 744261 - RNA, 19 nt, Artificial Sequence
  Description of Artificial Sequence: Synthetic oligonucleotide
  Antisense strand to SEQ ID NO: 744260
guuuaccaccacaucaugg

SEQ ID NO: 744262 - RNA, 19 nt, Artificial Sequence
  Description of Artificial Sequence: Synthetic oligonucleotide
  Sense strand starting at position 2240 of SEQ ID NO: 586786
uguggugguaaacgagaaa

SEQ ID NO: 744263 - RNA, 19 nt, Artificial Sequence
  Description of Artificial Sequence: Synthetic oligonucleotide
  Antisense strand to SEQ ID NO: 744262
uuucucguuuaccaccaca

SEQ ID NO: 744264 - RNA, 19 nt, Artificial Sequence
  Description of Artificial Sequence: Synthetic oligonucleotide
  Sense strand starting at position 2260 of SEQ ID NO: 586786
gauggcuguacagaaaugu

SEQ ID NO: 744265 - RNA, 19 nt, Artificial Sequence
  Description of Artificial Sequence: Synthetic oligonucleotide
  Antisense strand to SEQ ID NO: 744264
acauuucuguacagccauc

SEQ ID NO: 744266 - RNA, 19 nt, Artificial Sequence
  Description of Artificial Sequence: Synthetic oligonucleotide
  Sense strand starting at position 2372 of SEQ ID NO: 586786
uuugaauaagcacggagaa

SEQ ID NO: 744267 - RNA, 19 nt, Artificial Sequence
  Description of Artificial Sequence: Synthetic oligonucleotide
  Antisense strand to SEQ ID NO: 744266
uucuccgugcuuauucaaa

SEQ ID NO: 744268 - RNA, 19 nt, Artificial Sequence
  Description of Artificial Sequence: Synthetic oligonucleotide
  Sense strand starting at position 2373 of SEQ ID NO: 586786
uugaauaagcacggagaaa

SEQ ID NO: 744269 - RNA, 19 nt, Artificial Sequence
  Description of Artificial Sequence: Synthetic oligonucleotide
  Antisense strand to SEQ ID NO: 744268
uuucuccgugcuuauucaa

SEQ ID NO: 744270 - RNA, 19 nt, Artificial Sequence
  Description of Artificial Sequence: Synthetic oligonucleotide
  Sense strand starting at position 2422 of SEQ ID NO: 586786
gaggcaguaggagguauua

SEQ ID NO: 744271 - RNA, 19 nt, Artificial Sequence
  Description of Artificial Sequence: Synthetic oligonucleotide
  Antisense strand to SEQ ID NO: 744270
uaauaccuccuacugccuc

SEQ ID NO: 744272 - RNA, 19 nt, Artificial Sequence
  Description of Artificial Sequence: Synthetic oligonucleotide
  Sense strand starting at position 2494 of SEQ ID NO: 586786
uacgguauacgguauaaca

SEQ ID NO: 744273 - RNA, 19 nt, Artificial Sequence
  Description of Artificial Sequence: Synthetic oligonucleotide
  Antisense strand to SEQ ID NO: 744272
uguuauaccguauaccgua

SEQ ID NO: 744274 - RNA, 19 nt, Artificial Sequence
  Description of Artificial Sequence: Synthetic oligonucleotide
  Sense strand starting at position 2496 of SEQ ID NO: 586786
cgguauacgguauaacauu

SEQ ID NO: 744275 - RNA, 19 nt, Artificial Sequence
  Description of Artificial Sequence: Synthetic oligonucleotide
  Antisense strand to SEQ ID NO: 744274
aauguuauaccguauaccg

SEQ ID NO: 744276 - RNA, 19 nt, Artificial Sequence
  Description of Artificial Sequence: Synthetic oligonucleotide
  Sense strand starting at position 3063 of SEQ ID NO: 586786
aguauaaugguacagucau

SEQ ID NO: 744277 - RNA, 19 nt, Artificial Sequence
  Description of Artificial Sequence: Synthetic oligonucleotide
  Antisense strand to SEQ ID NO: 744276
augacuguaccauuauacu

SEQ ID NO: 744278 - RNA, 19 nt, Artificial Sequence
  Description of Artificial Sequence: Synthetic oligonucleotide
  Sense strand starting at position 3718 of SEQ ID NO: 586786
uggauuaaguaucccagca

SEQ ID NO: 744279 - RNA, 19 nt, Artificial Sequence
  Description of Artificial Sequence: Synthetic oligonucleotide
  Antisense strand to SEQ ID NO: 744278
ugcugggauacuuaaucca

SEQ ID NO: 744280 - RNA, 19 nt, Artificial Sequence
  Description of Artificial Sequence: Synthetic oligonucleotide
  Sense strand starting at position 3796 of SEQ ID NO: 586786
uucuuagagcccuagaaau

SEQ ID NO: 744281 - RNA, 19 nt, Artificial Sequence
  Description of Artificial Sequence: Synthetic oligonucleotide
  Antisense strand to SEQ ID NO: 744280
auuucuagggcucuaagaa

SEQ ID NO: 744282 - RNA, 19 nt, Artificial Sequence
  Description of Artificial Sequence: Synthetic oligonucleotide
  Sense strand starting at position 3862 of SEQ ID NO: 586786
agcaaacucucaguaagaa

SEQ ID NO: 744283 - RNA, 19 nt, Artificial Sequence
  Description of Artificial Sequence: Synthetic oligonucleotide
  Antisense strand to SEQ ID NO: 744282
uucuuacugagaguuugcu

SEQ ID NO: 744284 - RNA, 19 nt, Artificial Sequence
  Description of Artificial Sequence: Synthetic oligonucleotide
  Sense strand starting at position 3863 of SEQ ID NO: 586786
gcaaacucucaguaagaac

SEQ ID NO: 744285 - RNA, 19 nt, Artificial Sequence
  Description of Artificial Sequence: Synthetic oligonucleotide
  Antisense strand to SEQ ID NO: 744284
guucuuacugagaguuugc

SEQ ID NO: 744286 - RNA, 19 nt, Artificial Sequence
  Description of Artificial Sequence: Synthetic oligonucleotide
  Sense strand starting at position 57 of SEQ ID NO: 586787
gggagaagauaguccgauu

SEQ ID NO: 744287 - RNA, 19 nt, Artificial Sequence
  Description of Artificial Sequence: Synthetic oligonucleotide
  Antisense strand to SEQ ID NO: 744286
aaucggacuaucuucuccc

SEQ ID NO: 744288 - RNA, 19 nt, Artificial Sequence
  Description of Artificial Sequence: Synthetic oligonucleotide
  Sense strand starting at position 195 of SEQ ID NO: 586787
ugauuccucuggucagaug

SEQ ID NO: 744289 - RNA, 19 nt, Artificial Sequence
  Description of Artificial Sequence: Synthetic oligonucleotide
  Antisense strand to SEQ ID NO: 744288
caucugaccagaggaauca

SEQ ID NO: 744290 - RNA, 19 nt, Artificial Sequence
  Description of Artificial Sequence: Synthetic oligonucleotide
  Sense strand starting at position 292 of SEQ ID NO: 586787
guuauuagaggucacugca

SEQ ID NO: 744291 - RNA, 19 nt, Artificial Sequence
  Description of Artificial Sequence: Synthetic oligonucleotide
  Antisense strand to SEQ ID NO: 744290
ugcagugaccucuaauaac

SEQ ID NO: 744292 - RNA, 19 nt, Artificial Sequence
  Description of Artificial Sequence: Synthetic oligonucleotide
  Sense strand starting at position 309 of SEQ ID NO: 586787
cagggucacuugguggaaa

SEQ ID NO: 744293 - RNA, 19 nt, Artificial Sequence
  Description of Artificial Sequence: Synthetic oligonucleotide
  Antisense strand to SEQ ID NO: 744292
uuuccaccaagugacccug

SEQ ID NO: 744294 - RNA, 19 nt, Artificial Sequence
  Description of Artificial Sequence: Synthetic oligonucleotide
  Sense strand starting at position 322 of SEQ ID NO: 586787
uggaaagggugcucaauac

SEQ ID NO: 744295 - RNA, 19 nt, Artificial Sequence
  Description of Artificial Sequence: Synthetic oligonucleotide
  Antisense strand to SEQ ID NO: 744294
guauugagcacccuuucca

SEQ ID NO: 744296 - RNA, 19 nt, Artificial Sequence
  Description of Artificial Sequence: Synthetic oligonucleotide
  Sense strand starting at position 365 of SEQ ID NO: 586787
gcaagaguuuggagggaca

SEQ ID NO: 744297 - RNA, 19 nt, Artificial Sequence
  Description of Artificial Sequence: Synthetic oligonucleotide
  Antisense strand to SEQ ID NO: 744296
ugucccuccaaacucuugc

SEQ ID NO: 744298 - RNA, 19 nt, Artificial Sequence
  Description of Artificial Sequence: Synthetic oligonucleotide
  Sense strand starting at position 602 of SEQ ID NO: 586787
uuucuucugcugggagaga

SEQ ID NO: 744299 - RNA, 19 nt, Artificial Sequence
  Description of Artificial Sequence: Synthetic oligonucleotide
  Antisense strand to SEQ ID NO: 744298
ucucucccagcagaagaaa

SEQ ID NO: 744300 - RNA, 19 nt, Artificial Sequence
  Description of Artificial Sequence: Synthetic oligonucleotide
  Sense strand starting at position 654 of SEQ ID NO: 586787
uguugugagggugauccaa

SEQ ID NO: 744301 - RNA, 19 nt, Artificial Sequence
  Description of Artificial Sequence: Synthetic oligonucleotide
  Antisense strand to SEQ ID NO: 744300
uuggaucacccucacaaca

SEQ ID NO: 744302 - RNA, 19 nt, Artificial Sequence
  Description of Artificial Sequence: Synthetic oligonucleotide
  Sense strand starting at position 656 of SEQ ID NO: 586787
uugugagggugauccaaga

SEQ ID NO: 744303 - RNA, 19 nt, Artificial Sequence
  Description of Artificial Sequence: Synthetic oligonucleotide
  Antisense strand to SEQ ID NO: 744302
ucuuggaucacccucacaa

SEQ ID NO: 744304 - RNA, 19 nt, Artificial Sequence
  Description of Artificial Sequence: Synthetic oligonucleotide
  Sense strand starting at position 708 of SEQ ID NO: 586787
gcuagagauuuggcuguga

SEQ ID NO: 744305 - RNA, 19 nt, Artificial Sequence
  Description of Artificial Sequence: Synthetic oligonucleotide
  Antisense strand to SEQ ID NO: 744304
ucacagccaaaucucuagc

SEQ ID NO: 744306 - RNA, 19 nt, Artificial Sequence
  Description of Artificial Sequence: Synthetic oligonucleotide
  Sense strand starting at position 844 of SEQ ID NO: 586787
ggguguugaguggagagau

SEQ ID NO: 744307 - RNA, 19 nt, Artificial Sequence
  Description of Artificial Sequence: Synthetic oligonucleotide
  Antisense strand to SEQ ID NO: 744306
aucucuccacucaacaccc

SEQ ID NO: 744308 - RNA, 19 nt, Artificial Sequence
  Description of Artificial Sequence: Synthetic oligonucleotide
  Sense strand starting at position 856 of SEQ ID NO: 586787
gagagauggugcucagacu

SEQ ID NO: 744309 - RNA, 19 nt, Artificial Sequence
  Description of Artificial Sequence: Synthetic oligonucleotide
  Antisense strand to SEQ ID NO: 744308
agucugagcaccaucucuc

SEQ ID NO: 744310 - RNA, 19 nt, Artificial Sequence
  Description of Artificial Sequence: Synthetic oligonucleotide
  Sense strand starting at position 876 of SEQ ID NO: 586787
agggcuauacccugaggau

SEQ ID NO: 744311 - RNA, 19 nt, Artificial Sequence
  Description of Artificial Sequence: Synthetic oligonucleotide
  Antisense strand to SEQ ID NO: 744310
auccucaggguauagcccu

SEQ ID NO: 744312 - RNA, 19 nt, Artificial Sequence
  Description of Artificial Sequence: Synthetic oligonucleotide
  Sense strand starting at position 891 of SEQ ID NO: 586787
ggauguugcccuuaauauc

SEQ ID NO: 744313 - RNA, 19 nt, Artificial Sequence
  Description of Artificial Sequence: Synthetic oligonucleotide
  Antisense strand to SEQ ID NO: 744312
gauauuaagggcaacaucc

SEQ ID NO: 744314 - RNA, 19 nt, Artificial Sequence
  Description of Artificial Sequence: Synthetic oligonucleotide
  Sense strand starting at position 1083 of SEQ ID NO: 586787
uaagaaagguucuuugucu

SEQ ID NO: 744315 - RNA, 19 nt, Artificial Sequence
  Description of Artificial Sequence: Synthetic oligonucleotide
  Antisense strand to SEQ ID NO: 744314
agacaaagaaccuuucuua

SEQ ID NO: 744316 - RNA, 19 nt, Artificial Sequence
  Description of Artificial Sequence: Synthetic oligonucleotide
  Sense strand starting at position 1144 of SEQ ID NO: 586787
ggguacuuacacugggagu

SEQ ID NO: 744317 - RNA, 19 nt, Artificial Sequence
  Description of Artificial Sequence: Synthetic oligonucleotide
  Antisense strand to SEQ ID NO: 744316
acucccaguguaaguaccc

SEQ ID NO: 744318 - RNA, 19 nt, Artificial Sequence
  Description of Artificial Sequence: Synthetic oligonucleotide
  Sense strand starting at position 1301 of SEQ ID NO: 586787
gcccuuuggcuccaagaca

SEQ ID NO: 744319 - RNA, 19 nt, Artificial Sequence
  Description of Artificial Sequence: Synthetic oligonucleotide
  Antisense strand to SEQ ID NO: 744318
ugucuuggagccaaagggc

SEQ ID NO: 744320 - RNA, 19 nt, Artificial Sequence
  Description of Artificial Sequence: Synthetic oligonucleotide
  Sense strand starting at position 1339 of SEQ ID NO: 586787
cuaggaucuugcucacaca

SEQ ID NO: 744321 - RNA, 19 nt, Artificial Sequence
  Description of Artificial Sequence: Synthetic oligonucleotide
  Antisense strand to SEQ ID NO: 744320
ugugugagcaagauccuag

SEQ ID NO: 744322 - RNA, 19 nt, Artificial Sequence
  Description of Artificial Sequence: Synthetic oligonucleotide
  Sense strand starting at position 1368 of SEQ ID NO: 586787
accugagucaggugagaag

SEQ ID NO: 744323 - RNA, 19 nt, Artificial Sequence
  Description of Artificial Sequence: Synthetic oligonucleotide
  Antisense strand to SEQ ID NO: 744322
cuucucaccugacucaggu

SEQ ID NO: 744324 - RNA, 19 nt, Artificial Sequence
  Description of Artificial Sequence: Synthetic oligonucleotide
  Sense strand starting at position 1665 of SEQ ID NO: 586787
ggcccauuaccuuaaggau

SEQ ID NO: 744325 - RNA, 19 nt, Artificial Sequence
  Description of Artificial Sequence: Synthetic oligonucleotide
  Antisense strand to SEQ ID NO: 744324
auccuuaagguaaugggcc

SEQ ID NO: 744326 - RNA, 19 nt, Artificial Sequence
  Description of Artificial Sequence: Synthetic oligonucleotide
  Sense strand starting at position 1673 of SEQ ID NO: 586787
accuuaaggauccgugaga

SEQ ID NO: 744327 - RNA, 19 nt, Artificial Sequence
  Description of Artificial Sequence: Synthetic oligonucleotide
  Antisense strand to SEQ ID NO: 744326
ucucacggauccuuaaggu

SEQ ID NO: 744328 - RNA, 19 nt, Artificial Sequence
  Description of Artificial Sequence: Synthetic oligonucleotide
  Sense strand starting at position 1674 of SEQ ID NO: 586787
ccuuaaggauccgugagau

SEQ ID NO: 744329 - RNA, 19 nt, Artificial Sequence
  Description of Artificial Sequence: Synthetic oligonucleotide
  Antisense strand to SEQ ID NO: 744328
aucucacggauccuuaagg

SEQ ID NO: 744330 - RNA, 19 nt, Artificial Sequence
  Description of Artificial Sequence: Synthetic oligonucleotide
  Sense strand starting at position 1680 of SEQ ID NO: 586787
ggauccgugagaugucaca

SEQ ID NO: 744331 - RNA, 19 nt, Artificial Sequence
  Description of Artificial Sequence: Synthetic oligonucleotide
  Antisense strand to SEQ ID NO: 744330
ugugacaucucacggaucc

SEQ ID NO: 744332 - RNA, 19 nt, Artificial Sequence
  Description of Artificial Sequence: Synthetic oligonucleotide
  Sense strand starting at position 1808 of SEQ ID NO: 586787
gggcgugagacagagguau

SEQ ID NO: 744333 - RNA, 19 nt, Artificial Sequence
  Description of Artificial Sequence: Synthetic oligonucleotide
  Antisense strand to SEQ ID NO: 744332
auaccucugucucacgccc

SEQ ID NO: 744334 - RNA, 19 nt, Artificial Sequence
  Description of Artificial Sequence: Synthetic oligonucleotide
  Sense strand starting at position 2080 of SEQ ID NO: 586787
cccagaacauuggccaaua

SEQ ID NO: 744335 - RNA, 19 nt, Artificial Sequence
  Description of Artificial Sequence: Synthetic oligonucleotide
  Antisense strand to SEQ ID NO: 744334
uauuggccaauguucuggg

SEQ ID NO: 744336 - RNA, 19 nt, Artificial Sequence
  Description of Artificial Sequence: Synthetic oligonucleotide
  Sense strand starting at position 2341 of SEQ ID NO: 586787
ugaaaugguccugggaggu

SEQ ID NO: 744337 - RNA, 19 nt, Artificial Sequence
  Description of Artificial Sequence: Synthetic oligonucleotide
  Antisense strand to SEQ ID NO: 744336
accucccaggaccauuuca

SEQ ID NO: 744338 - RNA, 19 nt, Artificial Sequence
  Description of Artificial Sequence: Synthetic oligonucleotide
  Sense strand starting at position 2439 of SEQ ID NO: 586787
uuaaaccuuugugugauaa

SEQ ID NO: 744339 - RNA, 19 nt, Artificial Sequence
  Description of Artificial Sequence: Synthetic oligonucleotide
  Antisense strand to SEQ ID NO: 744338
uuaucacacaaagguuuaa

SEQ ID NO: 744340 - RNA, 19 nt, Artificial Sequence
  Description of Artificial Sequence: Synthetic oligonucleotide
  Sense strand starting at position 2486 of SEQ ID NO: 586787
acuggaucuuucuugaagu

SEQ ID NO: 744341 - RNA, 19 nt, Artificial Sequence
  Description of Artificial Sequence: Synthetic oligonucleotide
  Antisense strand to SEQ ID NO: 744340
acuucaagaaagauccagu

SEQ ID NO: 744342 - RNA, 19 nt, Artificial Sequence
  Description of Artificial Sequence: Synthetic oligonucleotide
  Sense strand starting at position 2653 of SEQ ID NO: 586787
ccuucucagcccuggaaga

SEQ ID NO: 744343 - RNA, 19 nt, Artificial Sequence
  Description of Artificial Sequence: Synthetic oligonucleotide
  Antisense strand to SEQ ID NO: 744342
ucuuccagggcugagaagg

SEQ ID NO: 744344 - RNA, 19 nt, Artificial Sequence
  Description of Artificial Sequence: Synthetic oligonucleotide
  Sense strand starting at position 2969 of SEQ ID NO: 586787
ucauucucugaagaguucu

SEQ ID NO: 744345 - RNA, 19 nt, Artificial Sequence
  Description of Artificial Sequence: Synthetic oligonucleotide
  Antisense strand to SEQ ID NO: 744344
agaacucuucagagaauga

SEQ ID NO: 744346 - RNA, 19 nt, Artificial Sequence
  Description of Artificial Sequence: Synthetic oligonucleotide
  Sense strand starting at position 3199 of SEQ ID NO: 586787
auuaguaaucaaugggagu

SEQ ID NO: 744347 - RNA, 19 nt, Artificial Sequence
  Description of Artificial Sequence: Synthetic oligonucleotide
  Antisense strand to SEQ ID NO: 744346
acucccauugauuacuaau

SEQ ID NO: 744348 - RNA, 19 nt, Artificial Sequence
  Description of Artificial Sequence: Synthetic oligonucleotide
  Sense strand starting at position 3200 of SEQ ID NO: 586787
uuaguaaucaaugggaguu

SEQ ID NO: 744349 - RNA, 19 nt, Artificial Sequence
  Description of Artificial Sequence: Synthetic oligonucleotide
  Antisense strand to SEQ ID NO: 744348
aacucccauugauuacuaa

SEQ ID NO: 744350 - RNA, 19 nt, Artificial Sequence
  Description of Artificial Sequence: Synthetic oligonucleotide
  Sense strand starting at position 3340 of SEQ ID NO: 586787
uuguaugcugaauaagaua

SEQ ID NO: 744351 - RNA, 19 nt, Artificial Sequence
  Description of Artificial Sequence: Synthetic oligonucleotide
  Antisense strand to SEQ ID NO: 744350
uaucuuauucagcauacaa

SEQ ID NO: 744352 - RNA, 19 nt, Artificial Sequence
  Description of Artificial Sequence: Synthetic oligonucleotide
  Sense strand starting at position 3354 of SEQ ID NO: 586787
agauauuaagcaugagcac

SEQ ID NO: 744353 - RNA, 19 nt, Artificial Sequence
  Description of Artificial Sequence: Synthetic oligonucleotide
  Antisense strand to SEQ ID NO: 744352
gugcucaugcuuaauaucu

SEQ ID NO: 744354 - RNA, 19 nt, Artificial Sequence
  Description of Artificial Sequence: Synthetic oligonucleotide
  Sense strand starting at position 3377 of SEQ ID NO: 586787
cugguuguucaggaugaag

SEQ ID NO: 744355 - RNA, 19 nt, Artificial Sequence
  Description of Artificial Sequence: Synthetic oligonucleotide
  Antisense strand to SEQ ID NO: 744354
cuucauccugaacaaccag

SEQ ID NO: 744356 - RNA, 19 nt, Artificial Sequence
  Description of Artificial Sequence: Synthetic oligonucleotide
  Sense strand starting at position 3484 of SEQ ID NO: 586787
uuacaaagaguuuggaauc

SEQ ID NO: 744357 - RNA, 19 nt, Artificial Sequence
  Description of Artificial Sequence: Synthetic oligonucleotide
  Antisense strand to SEQ ID NO: 744356
gauuccaaacucuuuguaa

SEQ ID NO: 744358 - RNA, 19 nt, Artificial Sequence
  Description of Artificial Sequence: Synthetic oligonucleotide
  Sense strand starting at position 3504 of SEQ ID NO: 586787
agagucuacuuauuaaguu

SEQ ID NO: 744359 - RNA, 19 nt, Artificial Sequence
  Description of Artificial Sequence: Synthetic oligonucleotide
  Antisense strand to SEQ ID NO: 744358
aacuuaauaaguagacucu

SEQ ID NO: 744360 - RNA, 19 nt, Artificial Sequence
  Description of Artificial Sequence: Synthetic oligonucleotide
  Sense strand starting at position 3647 of SEQ ID NO: 586787
acagauuggcauugccaca

SEQ ID NO: 744361 - RNA, 19 nt, Artificial Sequence
  Description of Artificial Sequence: Synthetic oligonucleotide
  Antisense strand to SEQ ID NO: 744360
uguggcaaugccaaucugu

SEQ ID NO: 744362 - RNA, 19 nt, Artificial Sequence
  Description of Artificial Sequence: Synthetic oligonucleotide
  Sense strand starting at position 3706 of SEQ ID NO: 586787
gccaguuccucaucagaag

SEQ ID NO: 744363 - RNA, 19 nt, Artificial Sequence
  Description of Artificial Sequence: Synthetic oligonucleotide
  Antisense strand to SEQ ID NO: 744362
cuucugaugaggaacuggc

SEQ ID NO: 744364 - RNA, 19 nt, Artificial Sequence
  Description of Artificial Sequence: Synthetic oligonucleotide
  Sense strand starting at position 3910 of SEQ ID NO: 586787
ucuccuaagugaccagaau

SEQ ID NO: 744365 - RNA, 19 nt, Artificial Sequence
  Description of Artificial Sequence: Synthetic oligonucleotide
  Antisense strand to SEQ ID NO: 744364
auucuggucacuuaggaga

SEQ ID NO: 744366 - RNA, 19 nt, Artificial Sequence
  Description of Artificial Sequence: Synthetic oligonucleotide
  Sense strand starting at position 83 of SEQ ID NO: 586788
guccaugccugccucauau

SEQ ID NO: 744367 - RNA, 19 nt, Artificial Sequence
  Description of Artificial Sequence: Synthetic oligonucleotide
  Antisense strand to SEQ ID NO: 744366
auaugaggcaggcauggac

SEQ ID NO: 744368 - RNA, 19 nt, Artificial Sequence
  Description of Artificial Sequence: Synthetic oligonucleotide
  Sense strand starting at position 87 of SEQ ID NO: 586788
augccugccucauauuaga

SEQ ID NO: 744369 - RNA, 19 nt, Artificial Sequence
  Description of Artificial Sequence: Synthetic oligonucleotide
  Antisense strand to SEQ ID NO: 744368
ucuaauaugaggcaggcau

SEQ ID NO: 744370 - RNA, 19 nt, Artificial Sequence
  Description of Artificial Sequence: Synthetic oligonucleotide
  Sense strand starting at position 95 of SEQ ID NO: 586788
cucauauuagauggucaac

SEQ ID NO: 744371 - RNA, 19 nt, Artificial Sequence
  Description of Artificial Sequence: Synthetic oligonucleotide
  Antisense strand to SEQ ID NO: 744370
guugaccaucuaauaugag

SEQ ID NO: 744372 - RNA, 19 nt, Artificial Sequence
  Description of Artificial Sequence: Synthetic oligonucleotide
  Sense strand starting at position 106 of SEQ ID NO: 586788
uggucaacaugugaacuua

SEQ ID NO: 744373 - RNA, 19 nt, Artificial Sequence
  Description of Artificial Sequence: Synthetic oligonucleotide
  Antisense strand to SEQ ID NO: 744372
uaaguucacauguugacca

SEQ ID NO: 744374 - RNA, 19 nt, Artificial Sequence
  Description of Artificial Sequence: Synthetic oligonucleotide
  Sense strand starting at position 135 of SEQ ID NO: 586788
ucauaagagucagagaauc

SEQ ID NO: 744375 - RNA, 19 nt, Artificial Sequence
  Description of Artificial Sequence: Synthetic oligonucleotide
  Antisense strand to SEQ ID NO: 744374
gauucucugacucuuauga

SEQ ID NO: 744376 - RNA, 19 nt, Artificial Sequence
  Description of Artificial Sequence: Synthetic oligonucleotide
  Sense strand starting at position 151 of SEQ ID NO: 586788
aucagauguccaggcucaa

SEQ ID NO: 744377 - RNA, 19 nt, Artificial Sequence
  Description of Artificial Sequence: Synthetic oligonucleotide
  Antisense strand to SEQ ID NO: 744376
uugagccuggacaucugau

SEQ ID NO: 744378 - RNA, 19 nt, Artificial Sequence
  Description of Artificial Sequence: Synthetic oligonucleotide
  Sense strand starting at position 195 of SEQ ID NO: 586788
agaugaaagugguuugcca

SEQ ID NO: 744379 - RNA, 19 nt, Artificial Sequence
  Description of Artificial Sequence: Synthetic oligonucleotide
  Antisense strand to SEQ ID NO: 744378
uggcaaaccacuuucaucu

SEQ ID NO: 744380 - RNA, 19 nt, Artificial Sequence
  Description of Artificial Sequence: Synthetic oligonucleotide
  Sense strand starting at position 199 of SEQ ID NO: 586788
gaaagugguuugccaagga

SEQ ID NO: 744381 - RNA, 19 nt, Artificial Sequence
  Description of Artificial Sequence: Synthetic oligonucleotide
  Antisense strand to SEQ ID NO: 744380
uccuuggcaaaccacuuuc

SEQ ID NO: 744382 - RNA, 19 nt, Artificial Sequence
  Description of Artificial Sequence: Synthetic oligonucleotide
  Sense strand starting at position 203 of SEQ ID NO: 586788
gugguuugccaaggacauu

SEQ ID NO: 744383 - RNA, 19 nt, Artificial Sequence
  Description of Artificial Sequence: Synthetic oligonucleotide
  Antisense strand to SEQ ID NO: 744382
aauguccuuggcaaaccac

SEQ ID NO: 744384 - RNA, 19 nt, Artificial Sequence
  Description of Artificial Sequence: Synthetic oligonucleotide
  Sense strand starting at position 248 of SEQ ID NO: 586788
ucgaguaaauaugguucca

SEQ ID NO: 744385 - RNA, 19 nt, Artificial Sequence
  Description of Artificial Sequence: Synthetic oligonucleotide
  Antisense strand to SEQ ID NO: 744384
uggaaccauauuuacucga

SEQ ID NO: 744386 - RNA, 19 nt, Artificial Sequence
  Description of Artificial Sequence: Synthetic oligonucleotide
  Sense strand starting at position 250 of SEQ ID NO: 586788
gaguaaauaugguuccagu

SEQ ID NO: 744387 - RNA, 19 nt, Artificial Sequence
  Description of Artificial Sequence: Synthetic oligonucleotide
  Antisense strand to SEQ ID NO: 744386
acuggaaccauauuuacuc

SEQ ID NO: 744388 - RNA, 19 nt, Artificial Sequence
  Description of Artificial Sequence: Synthetic oligonucleotide
  Sense strand starting at position 823 of SEQ ID NO: 586788
gucucuuuacccuaaaguu

SEQ ID NO: 744389 - RNA, 19 nt, Artificial Sequence
  Description of Artificial Sequence: Synthetic oligonucleotide
  Antisense strand to SEQ ID NO: 744388
aacuuuaggguaaagagac

SEQ ID NO: 744390 - RNA, 19 nt, Artificial Sequence
  Description of Artificial Sequence: Synthetic oligonucleotide
  Sense strand starting at position 938 of SEQ ID NO: 586788
ucaucugcgaaauaugagu

SEQ ID NO: 744391 - RNA, 19 nt, Artificial Sequence
  Description of Artificial Sequence: Synthetic oligonucleotide
  Antisense strand to SEQ ID NO: 744390
acucauauuucgcagauga

SEQ ID NO: 744392 - RNA, 19 nt, Artificial Sequence
  Description of Artificial Sequence: Synthetic oligonucleotide
  Sense strand starting at position 969 of SEQ ID NO: 586788
aggccuaacucugaucacu

SEQ ID NO: 744393 - RNA, 19 nt, Artificial Sequence
  Description of Artificial Sequence: Synthetic oligonucleotide
  Antisense strand to SEQ ID NO: 744392
agugaucagaguuaggccu

SEQ ID NO: 744394 - RNA, 19 nt, Artificial Sequence
  Description of Artificial Sequence: Synthetic oligonucleotide
  Sense strand starting at position 1124 of SEQ ID NO: 586788
cggacugauaacuguguga

SEQ ID NO: 744395 - RNA, 19 nt, Artificial Sequence
  Description of Artificial Sequence: Synthetic oligonucleotide
  Antisense strand to SEQ ID NO: 744394
ucacacaguuaucaguccg

SEQ ID NO: 744396 - RNA, 19 nt, Artificial Sequence
  Description of Artificial Sequence: Synthetic oligonucleotide
  Sense strand starting at position 1126 of SEQ ID NO: 586788
gacugauaacugugugaca

SEQ ID NO: 744397 - RNA, 19 nt, Artificial Sequence
  Description of Artificial Sequence: Synthetic oligonucleotide
  Antisense strand to SEQ ID NO: 744396
ugucacacaguuaucaguc

SEQ ID NO: 744398 - RNA, 19 nt, Artificial Sequence
  Description of Artificial Sequence: Synthetic oligonucleotide
  Sense strand starting at position 1127 of SEQ ID NO: 586788
acugauaacugugugacau

SEQ ID NO: 744399 - RNA, 19 nt, Artificial Sequence
  Description of Artificial Sequence: Synthetic oligonucleotide
  Antisense strand to SEQ ID NO: 744398
augucacacaguuaucagu

SEQ ID NO: 744400 - RNA, 19 nt, Artificial Sequence
  Description of Artificial Sequence: Synthetic oligonucleotide
  Sense strand starting at position 1128 of SEQ ID NO: 586788
cugauaacugugugacauc

SEQ ID NO: 744401 - RNA, 19 nt, Artificial Sequence
  Description of Artificial Sequence: Synthetic oligonucleotide
  Antisense strand to SEQ ID NO: 744400
gaugucacacaguuaucag

SEQ ID NO: 744402 - RNA, 19 nt, Artificial Sequence
  Description of Artificial Sequence: Synthetic oligonucleotide
  Sense strand starting at position 1129 of SEQ ID NO: 586788
ugauaacugugugacauca

SEQ ID NO: 744403 - RNA, 19 nt, Artificial Sequence
  Description of Artificial Sequence: Synthetic oligonucleotide
  Antisense strand to SEQ ID NO: 744402
ugaugucacacaguuauca

SEQ ID NO: 744404 - RNA, 19 nt, Artificial Sequence
  Description of Artificial Sequence: Synthetic oligonucleotide
  Sense strand starting at position 1185 of SEQ ID NO: 586788
acaauauccuuuggcguga

SEQ ID NO: 744405 - RNA, 19 nt, Artificial Sequence
  Description of Artificial Sequence: Synthetic oligonucleotide
  Antisense strand to SEQ ID NO: 744404
ucacgccaaaggauauugu

SEQ ID NO: 744406 - RNA, 19 nt, Artificial Sequence
  Description of Artificial Sequence: Synthetic oligonucleotide
  Sense strand starting at position 1223 of SEQ ID NO: 586788
aaauguguaaugugauggu

SEQ ID NO: 744407 - RNA, 19 nt, Artificial Sequence
  Description of Artificial Sequence: Synthetic oligonucleotide
  Antisense strand to SEQ ID NO: 744406
accaucacauuacacauuu

SEQ ID NO: 744408 - RNA, 19 nt, Artificial Sequence
  Description of Artificial Sequence: Synthetic oligonucleotide
  Sense strand starting at position 1227 of SEQ ID NO: 586788
guguaaugugaugguguua

SEQ ID NO: 744409 - RNA, 19 nt, Artificial Sequence
  Description of Artificial Sequence: Synthetic oligonucleotide
  Antisense strand to SEQ ID NO: 744408
uaacaccaucacauuacac

SEQ ID NO: 744410 - RNA, 19 nt, Artificial Sequence
  Description of Artificial Sequence: Synthetic oligonucleotide
  Sense strand starting at position 333 of SEQ ID NO: 586789
cgugauagugacuaaguua

SEQ ID NO: 744411 - RNA, 19 nt, Artificial Sequence
  Description of Artificial Sequence: Synthetic oligonucleotide
  Antisense strand to SEQ ID NO: 744410
uaacuuagucacuaucacg

SEQ ID NO: 744412 - RNA, 19 nt, Artificial Sequence
  Description of Artificial Sequence: Synthetic oligonucleotide
  Sense strand starting at position 336 of SEQ ID NO: 586789
gauagugacuaaguuaauu

SEQ ID NO: 744413 - RNA, 19 nt, Artificial Sequence
  Description of Artificial Sequence: Synthetic oligonucleotide
  Antisense strand to SEQ ID NO: 744412
aauuaacuuagucacuauc

SEQ ID NO: 744414 - RNA, 19 nt, Artificial Sequence
  Description of Artificial Sequence: Synthetic oligonucleotide
  Sense strand starting at position 393 of SEQ ID NO: 586789
ccuauauauccaggucuuu

SEQ ID NO: 744415 - RNA, 19 nt, Artificial Sequence
  Description of Artificial Sequence: Synthetic oligonucleotide
  Antisense strand to SEQ ID NO: 744414
aaagaccuggauauauagg

SEQ ID NO: 744416 - RNA, 19 nt, Artificial Sequence
  Description of Artificial Sequence: Synthetic oligonucleotide
  Sense strand starting at position 531 of SEQ ID NO: 586789
guuuguuuacaguaagaaa

SEQ ID NO: 744417 - RNA, 19 nt, Artificial Sequence
  Description of Artificial Sequence: Synthetic oligonucleotide
  Antisense strand to SEQ ID NO: 744416
uuucuuacuguaaacaaac

SEQ ID NO: 744418 - RNA, 19 nt, Artificial Sequence
  Description of Artificial Sequence: Synthetic oligonucleotide
  Sense strand starting at position 629 of SEQ ID NO: 586789
gagaguuacaggcggaaau

SEQ ID NO: 744419 - RNA, 19 nt, Artificial Sequence
  Description of Artificial Sequence: Synthetic oligonucleotide
  Antisense strand to SEQ ID NO: 744418
auuuccgccuguaacucuc

SEQ ID NO: 744420 - RNA, 19 nt, Artificial Sequence
  Description of Artificial Sequence: Synthetic oligonucleotide
  Sense strand starting at position 685 of SEQ ID NO: 586789
cuaugcaaguugccauuua

SEQ ID NO: 744421 - RNA, 19 nt, Artificial Sequence
  Description of Artificial Sequence: Synthetic oligonucleotide
  Antisense strand to SEQ ID NO: 744420
uaaauggcaacuugcauag

SEQ ID NO: 744422 - RNA, 19 nt, Artificial Sequence
  Description of Artificial Sequence: Synthetic oligonucleotide
  Sense strand starting at position 900 of SEQ ID NO: 586789
aggguuccucaaugaauau

SEQ ID NO: 744423 - RNA, 19 nt, Artificial Sequence
  Description of Artificial Sequence: Synthetic oligonucleotide
  Antisense strand to SEQ ID NO: 744422
auauucauugaggaacccu

SEQ ID NO: 744424 - RNA, 19 nt, Artificial Sequence
  Description of Artificial Sequence: Synthetic oligonucleotide
  Sense strand starting at position 1116 of SEQ ID NO: 586789
uaacacguccguguuguau

SEQ ID NO: 744425 - RNA, 19 nt, Artificial Sequence
  Description of Artificial Sequence: Synthetic oligonucleotide
  Antisense strand to SEQ ID NO: 744424
auacaacacggacguguua

SEQ ID NO: 744426 - RNA, 19 nt, Artificial Sequence
  Description of Artificial Sequence: Synthetic oligonucleotide
  Sense strand starting at position 1127 of SEQ ID NO: 586789
uguuguauuaauggaagac

SEQ ID NO: 744427 - RNA, 19 nt, Artificial Sequence
  Description of Artificial Sequence: Synthetic oligonucleotide
  Antisense strand to SEQ ID NO: 744426
gucuuccauuaauacaaca

SEQ ID NO: 744428 - RNA, 19 nt, Artificial Sequence
  Description of Artificial Sequence: Synthetic oligonucleotide
  Sense strand starting at position 1241 of SEQ ID NO: 586789
ccaagaauguaacccuuga

SEQ ID NO: 744429 - RNA, 19 nt, Artificial Sequence
  Description of Artificial Sequence: Synthetic oligonucleotide
  Antisense strand to SEQ ID NO: 744428
ucaaggguuacauucuugg

SEQ ID NO: 744430 - RNA, 19 nt, Artificial Sequence
  Description of Artificial Sequence: Synthetic oligonucleotide
  Sense strand starting at position 1311 of SEQ ID NO: 586789
ggcuuaggaucucucuaug

SEQ ID NO: 744431 - RNA, 19 nt, Artificial Sequence
  Description of Artificial Sequence: Synthetic oligonucleotide
  Antisense strand to SEQ ID NO: 744430
cauagagagauccuaagcc

SEQ ID NO: 744432 - RNA, 19 nt, Artificial Sequence
  Description of Artificial Sequence: Synthetic oligonucleotide
  Sense strand starting at position 1415 of SEQ ID NO: 586789
cgggaagcuguacauauau

SEQ ID NO: 744433 - RNA, 19 nt, Artificial Sequence
  Description of Artificial Sequence: Synthetic oligonucleotide
  Antisense strand to SEQ ID NO: 744432
auauauguacagcuucccg

SEQ ID NO: 744434 - RNA, 19 nt, Artificial Sequence
  Description of Artificial Sequence: Synthetic oligonucleotide
  Sense strand starting at position 1425 of SEQ ID NO: 586789
uacauauaugcccggacau

SEQ ID NO: 744435 - RNA, 19 nt, Artificial Sequence
  Description of Artificial Sequence: Synthetic oligonucleotide
  Antisense strand to SEQ ID NO: 744434
auguccgggcauauaugua

SEQ ID NO: 744436 - RNA, 19 nt, Artificial Sequence
  Description of Artificial Sequence: Synthetic oligonucleotide
  Sense strand starting at position 1426 of SEQ ID NO: 586789
acauauaugcccggacaua

SEQ ID NO: 744437 - RNA, 19 nt, Artificial Sequence
  Description of Artificial Sequence: Synthetic oligonucleotide
  Antisense strand to SEQ ID NO: 744436
uauguccgggcauauaugu

SEQ ID NO: 744438 - RNA, 19 nt, Artificial Sequence
  Description of Artificial Sequence: Synthetic oligonucleotide
  Sense strand starting at position 1427 of SEQ ID NO: 586789
cauauaugcccggacauau

SEQ ID NO: 744439 - RNA, 19 nt, Artificial Sequence
  Description of Artificial Sequence: Synthetic oligonucleotide
  Antisense strand to SEQ ID NO: 744438
auauguccgggcauauaug

SEQ ID NO: 744440 - RNA, 19 nt, Artificial Sequence
  Description of Artificial Sequence: Synthetic oligonucleotide
  Sense strand starting at position 1938 of SEQ ID NO: 586789
gcaaccuuugcagaagaca

SEQ ID NO: 744441 - RNA, 19 nt, Artificial Sequence
  Description of Artificial Sequence: Synthetic oligonucleotide
  Antisense strand to SEQ ID NO: 744440
ugucuucugcaaagguugc

SEQ ID NO: 744442 - RNA, 19 nt, Artificial Sequence
  Description of Artificial Sequence: Synthetic oligonucleotide
  Sense strand starting at position 2148 of SEQ ID NO: 586789
cgcucucagcaccgauuua

SEQ ID NO: 744443 - RNA, 19 nt, Artificial Sequence
  Description of Artificial Sequence: Synthetic oligonucleotide
  Antisense strand to SEQ ID NO: 744442
uaaaucggugcugagagcg

SEQ ID NO: 744444 - RNA, 19 nt, Artificial Sequence
  Description of Artificial Sequence: Synthetic oligonucleotide
  Sense strand starting at position 2325 of SEQ ID NO: 586789
gcuccugggauuuguaguu

SEQ ID NO: 744445 - RNA, 19 nt, Artificial Sequence
  Description of Artificial Sequence: Synthetic oligonucleotide
  Antisense strand to SEQ ID NO: 744444
aacuacaaaucccaggagc

SEQ ID NO: 744446 - RNA, 19 nt, Artificial Sequence
  Description of Artificial Sequence: Synthetic oligonucleotide
  Sense strand starting at position 2420 of SEQ ID NO: 586789
cccugauaccuuugaggca

SEQ ID NO: 744447 - RNA, 19 nt, Artificial Sequence
  Description of Artificial Sequence: Synthetic oligonucleotide
  Antisense strand to SEQ ID NO: 744446
ugccucaaagguaucaggg

SEQ ID NO: 744448 - RNA, 19 nt, Artificial Sequence
  Description of Artificial Sequence: Synthetic oligonucleotide
  Sense strand starting at position 2630 of SEQ ID NO: 586789
ugcaguaauaucgagauug

SEQ ID NO: 744449 - RNA, 19 nt, Artificial Sequence
  Description of Artificial Sequence: Synthetic oligonucleotide
  Antisense strand to SEQ ID NO: 744448
caaucucgauauuacugca

SEQ ID NO: 744450 - RNA, 19 nt, Artificial Sequence
  Description of Artificial Sequence: Synthetic oligonucleotide
  Sense strand starting at position 2746 of SEQ ID NO: 586789
ucauuuaaugugugacugu

SEQ ID NO: 744451 - RNA, 19 nt, Artificial Sequence
  Description of Artificial Sequence: Synthetic oligonucleotide
  Antisense strand to SEQ ID NO: 744450
acagucacacauuaaauga

SEQ ID NO: 744452 - RNA, 19 nt, Artificial Sequence
  Description of Artificial Sequence: Synthetic oligonucleotide
  Sense strand starting at position 2786 of SEQ ID NO: 586789
guuagcagcacguuaucau

SEQ ID NO: 744453 - RNA, 19 nt, Artificial Sequence
  Description of Artificial Sequence: Synthetic oligonucleotide
  Antisense strand to SEQ ID NO: 744452
augauaacgugcugcuaac

SEQ ID NO: 744454 - RNA, 19 nt, Artificial Sequence
  Description of Artificial Sequence: Synthetic oligonucleotide
  Sense strand starting at position 2856 of SEQ ID NO: 586789
gcuguuacauuucuuagac

SEQ ID NO: 744455 - RNA, 19 nt, Artificial Sequence
  Description of Artificial Sequence: Synthetic oligonucleotide
  Antisense strand to SEQ ID NO: 744454
gucuaagaaauguaacagc

SEQ ID NO: 744456 - RNA, 19 nt, Artificial Sequence
  Description of Artificial Sequence: Synthetic oligonucleotide
  Sense strand starting at position 2875 of SEQ ID NO: 586789
gggacuguucagcacugaa

SEQ ID NO: 744457 - RNA, 19 nt, Artificial Sequence
  Description of Artificial Sequence: Synthetic oligonucleotide
  Antisense strand to SEQ ID NO: 744456
uucagugcugaacaguccc

SEQ ID NO: 744458 - RNA, 19 nt, Artificial Sequence
  Description of Artificial Sequence: Synthetic oligonucleotide
  Sense strand starting at position 2944 of SEQ ID NO: 586789
gucucaacuguugagguua

SEQ ID NO: 744459 - RNA, 19 nt, Artificial Sequence
  Description of Artificial Sequence: Synthetic oligonucleotide
  Antisense strand to SEQ ID NO: 744458
uaaccucaacaguugagac

SEQ ID NO: 744460 - RNA, 19 nt, Artificial Sequence
  Description of Artificial Sequence: Synthetic oligonucleotide
  Sense strand starting at position 2949 of SEQ ID NO: 586789
aacuguugagguuagguaa

SEQ ID NO: 744461 - RNA, 19 nt, Artificial Sequence
  Description of Artificial Sequence: Synthetic oligonucleotide
  Antisense strand to SEQ ID NO: 744460
uuaccuaaccucaacaguu

SEQ ID NO: 744462 - RNA, 19 nt, Artificial Sequence
  Description of Artificial Sequence: Synthetic oligonucleotide
  Sense strand starting at position 2997 of SEQ ID NO: 586789
augaauaaguugcucagaa

SEQ ID NO: 744463 - RNA, 19 nt, Artificial Sequence
  Description of Artificial Sequence: Synthetic oligonucleotide
  Antisense strand to SEQ ID NO: 744462
uucugagcaacuuauucau

SEQ ID NO: 744464 - RNA, 19 nt, Artificial Sequence
  Description of Artificial Sequence: Synthetic oligonucleotide
  Sense strand starting at position 2998 of SEQ ID NO: 586789
ugaauaaguugcucagaaa

SEQ ID NO: 744465 - RNA, 19 nt, Artificial Sequence
  Description of Artificial Sequence: Synthetic oligonucleotide
  Antisense strand to SEQ ID NO: 744464
uuucugagcaacuuauuca

SEQ ID NO: 744466 - RNA, 19 nt, Artificial Sequence
  Description of Artificial Sequence: Synthetic oligonucleotide
  Sense strand starting at position 3147 of SEQ ID NO: 586789
gucucuuaugagggaacca

SEQ ID NO: 744467 - RNA, 19 nt, Artificial Sequence
  Description of Artificial Sequence: Synthetic oligonucleotide
  Antisense strand to SEQ ID NO: 744466
ugguucccucauaagagac

SEQ ID NO: 744468 - RNA, 19 nt, Artificial Sequence
  Description of Artificial Sequence: Synthetic oligonucleotide
  Sense strand starting at position 3240 of SEQ ID NO: 586789
gugugauguaaugaguaau

SEQ ID NO: 744469 - RNA, 19 nt, Artificial Sequence
  Description of Artificial Sequence: Synthetic oligonucleotide
  Antisense strand to SEQ ID NO: 744468
auuacucauuacaucacac

SEQ ID NO: 744470 - RNA, 19 nt, Artificial Sequence
  Description of Artificial Sequence: Synthetic oligonucleotide
  Sense strand starting at position 3328 of SEQ ID NO: 586789
acgauuguauaacuauaga

SEQ ID NO: 744471 - RNA, 19 nt, Artificial Sequence
  Description of Artificial Sequence: Synthetic oligonucleotide
  Antisense strand to SEQ ID NO: 744470
ucuauaguuauacaaucgu

SEQ ID NO: 744472 - RNA, 19 nt, Artificial Sequence
  Description of Artificial Sequence: Synthetic oligonucleotide
  Sense strand starting at position 3364 of SEQ ID NO: 586789
uuuauauaggugcauauga

SEQ ID NO: 744473 - RNA, 19 nt, Artificial Sequence
  Description of Artificial Sequence: Synthetic oligonucleotide
  Antisense strand to SEQ ID NO: 744472
ucauaugcaccuauauaaa

SEQ ID NO: 744474 - RNA, 19 nt, Artificial Sequence
  Description of Artificial Sequence: Synthetic oligonucleotide
  Sense strand starting at position 3421 of SEQ ID NO: 586789
agaggauuguguucauuga

SEQ ID NO: 744475 - RNA, 19 nt, Artificial Sequence
  Description of Artificial Sequence: Synthetic oligonucleotide
  Antisense strand to SEQ ID NO: 744474
ucaaugaacacaauccucu

SEQ ID NO: 744476 - RNA, 19 nt, Artificial Sequence
  Description of Artificial Sequence: Synthetic oligonucleotide
  Sense strand starting at position 3540 of SEQ ID NO: 586789
acuuuaaagugggauuuac

SEQ ID NO: 744477 - RNA, 19 nt, Artificial Sequence
  Description of Artificial Sequence: Synthetic oligonucleotide
  Antisense strand to SEQ ID NO: 744476
guaaaucccacuuuaaagu

SEQ ID NO: 744478 - RNA, 19 nt, Artificial Sequence
  Description of Artificial Sequence: Synthetic oligonucleotide
  Sense strand starting at position 3753 of SEQ ID NO: 586789
ucguauuuagaauguguuc

SEQ ID NO: 744479 - RNA, 19 nt, Artificial Sequence
  Description of Artificial Sequence: Synthetic oligonucleotide
  Antisense strand to SEQ ID NO: 744478
gaacacauucuaaauacga

SEQ ID NO: 744480 - RNA, 19 nt, Artificial Sequence
  Description of Artificial Sequence: Synthetic oligonucleotide
  Sense strand starting at position 3755 of SEQ ID NO: 586789
guauuuagaauguguuccu

SEQ ID NO: 744481 - RNA, 19 nt, Artificial Sequence
  Description of Artificial Sequence: Synthetic oligonucleotide
  Antisense strand to SEQ ID NO: 744480
aggaacacauucuaaauac

SEQ ID NO: 744482 - RNA, 19 nt, Artificial Sequence
  Description of Artificial Sequence: Synthetic oligonucleotide
  Sense strand starting at position 3758 of SEQ ID NO: 586789
uuuagaauguguuccuaua

SEQ ID NO: 744483 - RNA, 19 nt, Artificial Sequence
  Description of Artificial Sequence: Synthetic oligonucleotide
  Antisense strand to SEQ ID NO: 744482
uauaggaacacauucuaaa

SEQ ID NO: 744484 - RNA, 19 nt, Artificial Sequence
  Description of Artificial Sequence: Synthetic oligonucleotide
  Sense strand starting at position 3760 of SEQ ID NO: 586789
uagaauguguuccuauaga

SEQ ID NO: 744485 - RNA, 19 nt, Artificial Sequence
  Description of Artificial Sequence: Synthetic oligonucleotide
  Antisense strand to SEQ ID NO: 744484
ucuauaggaacacauucua

SEQ ID NO: 744486 - RNA, 19 nt, Artificial Sequence
  Description of Artificial Sequence: Synthetic oligonucleotide
  Sense strand starting at position 3872 of SEQ ID NO: 586789
cuuagaugaucagcauuau

SEQ ID NO: 744487 - RNA, 19 nt, Artificial Sequence
  Description of Artificial Sequence: Synthetic oligonucleotide
  Antisense strand to SEQ ID NO: 744486
auaaugcugaucaucuaag

SEQ ID NO: 744488 - RNA, 19 nt, Artificial Sequence
  Description of Artificial Sequence: Synthetic oligonucleotide
  Sense strand starting at position 3873 of SEQ ID NO: 586789
uuagaugaucagcauuauu

SEQ ID NO: 744489 - RNA, 19 nt, Artificial Sequence
  Description of Artificial Sequence: Synthetic oligonucleotide
  Antisense strand to SEQ ID NO: 744488
aauaaugcugaucaucuaa

SEQ ID NO: 744490 - RNA, 19 nt, Artificial Sequence
  Description of Artificial Sequence: Synthetic oligonucleotide
  Sense strand starting at position 377 of SEQ ID NO: 586790
ccaagcguuucuugcagaa

SEQ ID NO: 744491 - RNA, 19 nt, Artificial Sequence
  Description of Artificial Sequence: Synthetic oligonucleotide
  Antisense strand to SEQ ID NO: 744490
uucugcaagaaacgcuugg

SEQ ID NO: 744492 - RNA, 19 nt, Artificial Sequence
  Description of Artificial Sequence: Synthetic oligonucleotide
  Sense strand starting at position 379 of SEQ ID NO: 586790
aagcguuucuugcagaaac

SEQ ID NO: 744493 - RNA, 19 nt, Artificial Sequence
  Description of Artificial Sequence: Synthetic oligonucleotide
  Antisense strand to SEQ ID NO: 744492
guuucugcaagaaacgcuu

SEQ ID NO: 744494 - RNA, 19 nt, Artificial Sequence
  Description of Artificial Sequence: Synthetic oligonucleotide
  Sense strand starting at position 544 of SEQ ID NO: 586790
ggguuaagaugaugcgugu

SEQ ID NO: 744495 - RNA, 19 nt, Artificial Sequence
  Description of Artificial Sequence: Synthetic oligonucleotide
  Antisense strand to SEQ ID NO: 744494
acacgcaucaucuuaaccc

SEQ ID NO: 744496 - RNA, 19 nt, Artificial Sequence
  Description of Artificial Sequence: Synthetic oligonucleotide
  Sense strand starting at position 550 of SEQ ID NO: 586790
agaugaugcguguuacggu

SEQ ID NO: 744497 - RNA, 19 nt, Artificial Sequence
  Description of Artificial Sequence: Synthetic oligonucleotide
  Antisense strand to SEQ ID NO: 744496
accguaacacgcaucaucu

SEQ ID NO: 744498 - RNA, 19 nt, Artificial Sequence
  Description of Artificial Sequence: Synthetic oligonucleotide
  Sense strand starting at position 556 of SEQ ID NO: 586790
ugcguguuacggugggaau

SEQ ID NO: 744499 - RNA, 19 nt, Artificial Sequence
  Description of Artificial Sequence: Synthetic oligonucleotide
  Antisense strand to SEQ ID NO: 744498
auucccaccguaacacgca

SEQ ID NO: 744500 - RNA, 19 nt, Artificial Sequence
  Description of Artificial Sequence: Synthetic oligonucleotide
  Sense strand starting at position 557 of SEQ ID NO: 586790
gcguguuacggugggaaug

SEQ ID NO: 744501 - RNA, 19 nt, Artificial Sequence
  Description of Artificial Sequence: Synthetic oligonucleotide
  Antisense strand to SEQ ID NO: 744500
cauucccaccguaacacgc

SEQ ID NO: 744502 - RNA, 19 nt, Artificial Sequence
  Description of Artificial Sequence: Synthetic oligonucleotide
  Sense strand starting at position 558 of SEQ ID NO: 586790
cguguuacggugggaauga

SEQ ID NO: 744503 - RNA, 19 nt, Artificial Sequence
  Description of Artificial Sequence: Synthetic oligonucleotide
  Antisense strand to SEQ ID NO: 744502
ucauucccaccguaacacg

SEQ ID NO: 744504 - RNA, 19 nt, Artificial Sequence
  Description of Artificial Sequence: Synthetic oligonucleotide
  Sense strand starting at position 559 of SEQ ID NO: 586790
guguuacggugggaaugau

SEQ ID NO: 744505 - RNA, 19 nt, Artificial Sequence
  Description of Artificial Sequence: Synthetic oligonucleotide
  Antisense strand to SEQ ID NO: 744504
aucauucccaccguaacac

SEQ ID NO: 744506 - RNA, 19 nt, Artificial Sequence
  Description of Artificial Sequence: Synthetic oligonucleotide
  Sense strand starting at position 568 of SEQ ID NO: 586790
ugggaaugaugccuucagu

SEQ ID NO: 744507 - RNA, 19 nt, Artificial Sequence
  Description of Artificial Sequence: Synthetic oligonucleotide
  Antisense strand to SEQ ID NO: 744506
acugaaggcaucauuccca

SEQ ID NO: 744508 - RNA, 19 nt, Artificial Sequence
  Description of Artificial Sequence: Synthetic oligonucleotide
  Sense strand starting at position 1382 of SEQ ID NO: 586790
ucgaauuccuuccuggaau

SEQ ID NO: 744509 - RNA, 19 nt, Artificial Sequence
  Description of Artificial Sequence: Synthetic oligonucleotide
  Antisense strand to SEQ ID NO: 744508
auuccaggaaggaauucga

SEQ ID NO: 744510 - RNA, 19 nt, Artificial Sequence
  Description of Artificial Sequence: Synthetic oligonucleotide
  Sense strand starting at position 1383 of SEQ ID NO: 586790
cgaauuccuuccuggaauc

SEQ ID NO: 744511 - RNA, 19 nt, Artificial Sequence
  Description of Artificial Sequence: Synthetic oligonucleotide
  Antisense strand to SEQ ID NO: 744510
gauuccaggaaggaauucg

SEQ ID NO: 744512 - RNA, 19 nt, Artificial Sequence
  Description of Artificial Sequence: Synthetic oligonucleotide
  Sense strand starting at position 1605 of SEQ ID NO: 586790
guggugugucagcaaggga

SEQ ID NO: 744513 - RNA, 19 nt, Artificial Sequence
  Description of Artificial Sequence: Synthetic oligonucleotide
  Antisense strand to SEQ ID NO: 744512
ucccuugcugacacaccac

SEQ ID NO: 744514 - RNA, 19 nt, Artificial Sequence
  Description of Artificial Sequence: Synthetic oligonucleotide
  Sense strand starting at position 1675 of SEQ ID NO: 586790
acuggagcugucuggaaga

SEQ ID NO: 744515 - RNA, 19 nt, Artificial Sequence
  Description of Artificial Sequence: Synthetic oligonucleotide
  Antisense strand to SEQ ID NO: 744514
ucuuccagacagcuccagu

SEQ ID NO: 744516 - RNA, 19 nt, Artificial Sequence
  Description of Artificial Sequence: Synthetic oligonucleotide
  Sense strand starting at position 2070 of SEQ ID NO: 586790
caaguaacgucaucgggaa

SEQ ID NO: 744517 - RNA, 19 nt, Artificial Sequence
  Description of Artificial Sequence: Synthetic oligonucleotide
  Antisense strand to SEQ ID NO: 744516
uucccgaugacguuacuug

SEQ ID NO: 744518 - RNA, 19 nt, Artificial Sequence
  Description of Artificial Sequence: Synthetic oligonucleotide
  Sense strand starting at position 2092 of SEQ ID NO: 586790
cacucuguccagugaggga

SEQ ID NO: 744519 - RNA, 19 nt, Artificial Sequence
  Description of Artificial Sequence: Synthetic oligonucleotide
  Antisense strand to SEQ ID NO: 744518
ucccucacuggacagagug

SEQ ID NO: 744520 - RNA, 19 nt, Artificial Sequence
  Description of Artificial Sequence: Synthetic oligonucleotide
  Sense strand starting at position 2105 of SEQ ID NO: 586790
gagggaguaucuccgggaa

SEQ ID NO: 744521 - RNA, 19 nt, Artificial Sequence
  Description of Artificial Sequence: Synthetic oligonucleotide
  Antisense strand to SEQ ID NO: 744520
uucccggagauacucccuc

SEQ ID NO: 744522 - RNA, 19 nt, Artificial Sequence
  Description of Artificial Sequence: Synthetic oligonucleotide
  Sense strand starting at position 2107 of SEQ ID NO: 586790
gggaguaucuccgggaacu

SEQ ID NO: 744523 - RNA, 19 nt, Artificial Sequence
  Description of Artificial Sequence: Synthetic oligonucleotide
  Antisense strand to SEQ ID NO: 744522
aguucccggagauacuccc

SEQ ID NO: 744524 - RNA, 19 nt, Artificial Sequence
  Description of Artificial Sequence: Synthetic oligonucleotide
  Sense strand starting at position 2108 of SEQ ID NO: 586790
ggaguaucuccgggaacuu

SEQ ID NO: 744525 - RNA, 19 nt, Artificial Sequence
  Description of Artificial Sequence: Synthetic oligonucleotide
  Antisense strand to SEQ ID NO: 744524
aaguucccggagauacucc

SEQ ID NO: 744526 - RNA, 19 nt, Artificial Sequence
  Description of Artificial Sequence: Synthetic oligonucleotide
  Sense strand starting at position 2109 of SEQ ID NO: 586790
gaguaucuccgggaacuuc

SEQ ID NO: 744527 - RNA, 19 nt, Artificial Sequence
  Description of Artificial Sequence: Synthetic oligonucleotide
  Antisense strand to SEQ ID NO: 744526
gaaguucccggagauacuc

SEQ ID NO: 744528 - RNA, 19 nt, Artificial Sequence
  Description of Artificial Sequence: Synthetic oligonucleotide
  Sense strand starting at position 2117 of SEQ ID NO: 586790
ccgggaacuucugaggacu

SEQ ID NO: 744529 - RNA, 19 nt, Artificial Sequence
  Description of Artificial Sequence: Synthetic oligonucleotide
  Antisense strand to SEQ ID NO: 744528
aguccucagaaguucccgg

SEQ ID NO: 744530 - RNA, 19 nt, Artificial Sequence
  Description of Artificial Sequence: Synthetic oligonucleotide
  Sense strand starting at position 2678 of SEQ ID NO: 586790
aagggaguguccuuguuac

SEQ ID NO: 744531 - RNA, 19 nt, Artificial Sequence
  Description of Artificial Sequence: Synthetic oligonucleotide
  Antisense strand to SEQ ID NO: 744530
guaacaaggacacucccuu

SEQ ID NO: 744532 - RNA, 19 nt, Artificial Sequence
  Description of Artificial Sequence: Synthetic oligonucleotide
  Sense strand starting at position 2685 of SEQ ID NO: 586790
uguccuuguuacucaggaa

SEQ ID NO: 744533 - RNA, 19 nt, Artificial Sequence
  Description of Artificial Sequence: Synthetic oligonucleotide
  Antisense strand to SEQ ID NO: 744532
uuccugaguaacaaggaca

SEQ ID NO: 744534 - RNA, 19 nt, Artificial Sequence
  Description of Artificial Sequence: Synthetic oligonucleotide
  Sense strand starting at position 2688 of SEQ ID NO: 586790
ccuuguuacucaggaagag

SEQ ID NO: 744535 - RNA, 19 nt, Artificial Sequence
  Description of Artificial Sequence: Synthetic oligonucleotide
  Antisense strand to SEQ ID NO: 744534
cucuuccugaguaacaagg

SEQ ID NO: 744536 - RNA, 19 nt, Artificial Sequence
  Description of Artificial Sequence: Synthetic oligonucleotide
  Sense strand starting at position 2878 of SEQ ID NO: 586790
ccaagagcaucugugcaua

SEQ ID NO: 744537 - RNA, 19 nt, Artificial Sequence
  Description of Artificial Sequence: Synthetic oligonucleotide
  Antisense strand to SEQ ID NO: 744536
uaugcacagaugcucuugg

SEQ ID NO: 744538 - RNA, 19 nt, Artificial Sequence
  Description of Artificial Sequence: Synthetic oligonucleotide
  Sense strand starting at position 2880 of SEQ ID NO: 586790
aagagcaucugugcauaga

SEQ ID NO: 744539 - RNA, 19 nt, Artificial Sequence
  Description of Artificial Sequence: Synthetic oligonucleotide
  Antisense strand to SEQ ID NO: 744538
ucuaugcacagaugcucuu

SEQ ID NO: 744540 - RNA, 19 nt, Artificial Sequence
  Description of Artificial Sequence: Synthetic oligonucleotide
  Sense strand starting at position 2883 of SEQ ID NO: 586790
agcaucugugcauagaguu

SEQ ID NO: 744541 - RNA, 19 nt, Artificial Sequence
  Description of Artificial Sequence: Synthetic oligonucleotide
  Antisense strand to SEQ ID NO: 744540
aacucuaugcacagaugcu

SEQ ID NO: 744542 - RNA, 19 nt, Artificial Sequence
  Description of Artificial Sequence: Synthetic oligonucleotide
  Sense strand starting at position 2889 of SEQ ID NO: 586790
ugugcauagaguuguucca

SEQ ID NO: 744543 - RNA, 19 nt, Artificial Sequence
  Description of Artificial Sequence: Synthetic oligonucleotide
  Antisense strand to SEQ ID NO: 744542
uggaacaacucuaugcaca

SEQ ID NO: 744544 - RNA, 19 nt, Artificial Sequence
  Description of Artificial Sequence: Synthetic oligonucleotide
  Sense strand starting at position 2891 of SEQ ID NO: 586790
ugcauagaguuguuccaga

SEQ ID NO: 744545 - RNA, 19 nt, Artificial Sequence
  Description of Artificial Sequence: Synthetic oligonucleotide
  Antisense strand to SEQ ID NO: 744544
ucuggaacaacucuaugca

SEQ ID NO: 744546 - RNA, 19 nt, Artificial Sequence
  Description of Artificial Sequence: Synthetic oligonucleotide
  Sense strand starting at position 2896 of SEQ ID NO: 586790
agaguuguuccagaaggua

SEQ ID NO: 744547 - RNA, 19 nt, Artificial Sequence
  Description of Artificial Sequence: Synthetic oligonucleotide
  Antisense strand to SEQ ID NO: 744546
uaccuucuggaacaacucu

SEQ ID NO: 744548 - RNA, 19 nt, Artificial Sequence
  Description of Artificial Sequence: Synthetic oligonucleotide
  Sense strand starting at position 2917 of SEQ ID NO: 586790
gccagaacuucccagucca

SEQ ID NO: 744549 - RNA, 19 nt, Artificial Sequence
  Description of Artificial Sequence: Synthetic oligonucleotide
  Antisense strand to SEQ ID NO: 744548
uggacugggaaguucuggc

SEQ ID NO: 744550 - RNA, 19 nt, Artificial Sequence
  Description of Artificial Sequence: Synthetic oligonucleotide
  Sense strand starting at position 3795 of SEQ ID NO: 586790
ggcuaaucugccuauugca

SEQ ID NO: 744551 - RNA, 19 nt, Artificial Sequence
  Description of Artificial Sequence: Synthetic oligonucleotide
  Antisense strand to SEQ ID NO: 744550
ugcaauaggcagauuagcc

SEQ ID NO: 744552 - RNA, 19 nt, Artificial Sequence
  Description of Artificial Sequence: Synthetic oligonucleotide
  Sense strand starting at position 50 of SEQ ID NO: 586791
agcagagacucuguaauca

SEQ ID NO: 744553 - RNA, 19 nt, Artificial Sequence
  Description of Artificial Sequence: Synthetic oligonucleotide
  Antisense strand to SEQ ID NO: 744552
ugauuacagagucucugcu

SEQ ID NO: 744554 - RNA, 19 nt, Artificial Sequence
  Description of Artificial Sequence: Synthetic oligonucleotide
  Sense strand starting at position 69 of SEQ ID NO: 586791
gccagaguugcucugcacu

SEQ ID NO: 744555 - RNA, 19 nt, Artificial Sequence
  Description of Artificial Sequence: Synthetic oligonucleotide
  Antisense strand to SEQ ID NO: 744554
agugcagagcaacucuggc

SEQ ID NO: 744556 - RNA, 19 nt, Artificial Sequence
  Description of Artificial Sequence: Synthetic oligonucleotide
  Sense strand starting at position 111 of SEQ ID NO: 586791
ggccuccucugauuccuua

SEQ ID NO: 744557 - RNA, 19 nt, Artificial Sequence
  Description of Artificial Sequence: Synthetic oligonucleotide
  Antisense strand to SEQ ID NO: 744556
uaaggaaucagaggaggcc

SEQ ID NO: 744558 - RNA, 19 nt, Artificial Sequence
  Description of Artificial Sequence: Synthetic oligonucleotide
  Sense strand starting at position 142 of SEQ ID NO: 586791
agccauaauugggcugcua

SEQ ID NO: 744559 - RNA, 19 nt, Artificial Sequence
  Description of Artificial Sequence: Synthetic oligonucleotide
  Antisense strand to SEQ ID NO: 744558
uagcagcccaauuauggcu

SEQ ID NO: 744560 - RNA, 19 nt, Artificial Sequence
  Description of Artificial Sequence: Synthetic oligonucleotide
  Sense strand starting at position 144 of SEQ ID NO: 586791
ccauaauugggcugcuaaa

SEQ ID NO: 744561 - RNA, 19 nt, Artificial Sequence
  Description of Artificial Sequence: Synthetic oligonucleotide
  Antisense strand to SEQ ID NO: 744560
uuuagcagcccaauuaugg

SEQ ID NO: 744562 - RNA, 19 nt, Artificial Sequence
  Description of Artificial Sequence: Synthetic oligonucleotide
  Sense strand starting at position 204 of SEQ ID NO: 586791
ggugucuaagucuaugcuu

SEQ ID NO: 744563 - RNA, 19 nt, Artificial Sequence
  Description of Artificial Sequence: Synthetic oligonucleotide
  Antisense strand to SEQ ID NO: 744562
aagcauagacuuagacacc

SEQ ID NO: 744564 - RNA, 19 nt, Artificial Sequence
  Description of Artificial Sequence: Synthetic oligonucleotide
  Sense strand starting at position 212 of SEQ ID NO: 586791
agucuaugcuuauuaaagu

SEQ ID NO: 744565 - RNA, 19 nt, Artificial Sequence
  Description of Artificial Sequence: Synthetic oligonucleotide
  Antisense strand to SEQ ID NO: 744564
acuuuaauaagcauagacu

SEQ ID NO: 744566 - RNA, 19 nt, Artificial Sequence
  Description of Artificial Sequence: Synthetic oligonucleotide
  Sense strand starting at position 370 of SEQ ID NO: 586791
uagcuugguccacaguaau

SEQ ID NO: 744567 - RNA, 19 nt, Artificial Sequence
  Description of Artificial Sequence: Synthetic oligonucleotide
  Antisense strand to SEQ ID NO: 744566
auuacuguggaccaagcua

SEQ ID NO: 744568 - RNA, 19 nt, Artificial Sequence
  Description of Artificial Sequence: Synthetic oligonucleotide
  Sense strand starting at position 608 of SEQ ID NO: 586791
cguuguaaccuccaaccuu

SEQ ID NO: 744569 - RNA, 19 nt, Artificial Sequence
  Description of Artificial Sequence: Synthetic oligonucleotide
  Antisense strand to SEQ ID NO: 744568
aagguuggagguuacaacg

SEQ ID NO: 744570 - RNA, 19 nt, Artificial Sequence
  Description of Artificial Sequence: Synthetic oligonucleotide
  Sense strand starting at position 746 of SEQ ID NO: 586791
ucaguagagagcuagguuu

SEQ ID NO: 744571 - RNA, 19 nt, Artificial Sequence
  Description of Artificial Sequence: Synthetic oligonucleotide
  Antisense strand to SEQ ID NO: 744570
aaaccuagcucucuacuga

SEQ ID NO: 744572 - RNA, 19 nt, Artificial Sequence
  Description of Artificial Sequence: Synthetic oligonucleotide
  Sense strand starting at position 786 of SEQ ID NO: 586791
gcccaauuaucucuggagu

SEQ ID NO: 744573 - RNA, 19 nt, Artificial Sequence
  Description of Artificial Sequence: Synthetic oligonucleotide
  Antisense strand to SEQ ID NO: 744572
acuccagagauaauugggc

SEQ ID NO: 744574 - RNA, 19 nt, Artificial Sequence
  Description of Artificial Sequence: Synthetic oligonucleotide
  Sense strand starting at position 787 of SEQ ID NO: 586791
cccaauuaucucuggaguc

SEQ ID NO: 744575 - RNA, 19 nt, Artificial Sequence
  Description of Artificial Sequence: Synthetic oligonucleotide
  Antisense strand to SEQ ID NO: 744574
gacuccagagauaauuggg

SEQ ID NO: 744576 - RNA, 19 nt, Artificial Sequence
  Description of Artificial Sequence: Synthetic oligonucleotide
  Sense strand starting at position 852 of SEQ ID NO: 586791
gguugagugcauuaaccaa

SEQ ID NO: 744577 - RNA, 19 nt, Artificial Sequence
  Description of Artificial Sequence: Synthetic oligonucleotide
  Antisense strand to SEQ ID NO: 744576
uugguuaaugcacucaacc

SEQ ID NO: 744578 - RNA, 19 nt, Artificial Sequence
  Description of Artificial Sequence: Synthetic oligonucleotide
  Sense strand starting at position 930 of SEQ ID NO: 586791
cuuuaugagcgcuauaauu

SEQ ID NO: 744579 - RNA, 19 nt, Artificial Sequence
  Description of Artificial Sequence: Synthetic oligonucleotide
  Antisense strand to SEQ ID NO: 744578
aauuauagcgcucauaaag

SEQ ID NO: 744580 - RNA, 19 nt, Artificial Sequence
  Description of Artificial Sequence: Synthetic oligonucleotide
  Sense strand starting at position 977 of SEQ ID NO: 586791
uaaggauuagcccaguguu

SEQ ID NO: 744581 - RNA, 19 nt, Artificial Sequence
  Description of Artificial Sequence: Synthetic oligonucleotide
  Antisense strand to SEQ ID NO: 744580
aacacugggcuaauccuua

SEQ ID NO: 744582 - RNA, 19 nt, Artificial Sequence
  Description of Artificial Sequence: Synthetic oligonucleotide
  Sense strand starting at position 1039 of SEQ ID NO: 586791
acgugacauagcugggauu

SEQ ID NO: 744583 - RNA, 19 nt, Artificial Sequence
  Description of Artificial Sequence: Synthetic oligonucleotide
  Antisense strand to SEQ ID NO: 744582
aaucccagcuaugucacgu

SEQ ID NO: 744584 - RNA, 19 nt, Artificial Sequence
  Description of Artificial Sequence: Synthetic oligonucleotide
  Sense strand starting at position 1041 of SEQ ID NO: 586791
gugacauagcugggauuca

SEQ ID NO: 744585 - RNA, 19 nt, Artificial Sequence
  Description of Artificial Sequence: Synthetic oligonucleotide
  Antisense strand to SEQ ID NO: 744584
ugaaucccagcuaugucac

SEQ ID NO: 744586 - RNA, 19 nt, Artificial Sequence
  Description of Artificial Sequence: Synthetic oligonucleotide
  Sense strand starting at position 1297 of SEQ ID NO: 586791
guacaaucguuauucccau

SEQ ID NO: 744587 - RNA, 19 nt, Artificial Sequence
  Description of Artificial Sequence: Synthetic oligonucleotide
  Antisense strand to SEQ ID NO: 744586
augggaauaacgauuguac

SEQ ID NO: 744588 - RNA, 19 nt, Artificial Sequence
  Description of Artificial Sequence: Synthetic oligonucleotide
  Sense strand starting at position 1304 of SEQ ID NO: 586791
cguuauucccauuggcaaa

SEQ ID NO: 744589 - RNA, 19 nt, Artificial Sequence
  Description of Artificial Sequence: Synthetic oligonucleotide
  Antisense strand to SEQ ID NO: 744588
uuugccaaugggaauaacg

SEQ ID NO: 744590 - RNA, 19 nt, Artificial Sequence
  Description of Artificial Sequence: Synthetic oligonucleotide
  Sense strand starting at position 2245 of SEQ ID NO: 586791
gaccucaugccuuagagau

SEQ ID NO: 744591 - RNA, 19 nt, Artificial Sequence
  Description of Artificial Sequence: Synthetic oligonucleotide
  Antisense strand to SEQ ID NO: 744590
aucucuaaggcaugagguc

SEQ ID NO: 744592 - RNA, 19 nt, Artificial Sequence
  Description of Artificial Sequence: Synthetic oligonucleotide
  Sense strand starting at position 2252 of SEQ ID NO: 586791
ugccuuagagaucgccuga

SEQ ID NO: 744593 - RNA, 19 nt, Artificial Sequence
  Description of Artificial Sequence: Synthetic oligonucleotide
  Antisense strand to SEQ ID NO: 744592
ucaggcgaucucuaaggca

SEQ ID NO: 744594 - RNA, 19 nt, Artificial Sequence
  Description of Artificial Sequence: Synthetic oligonucleotide
  Sense strand starting at position 2711 of SEQ ID NO: 586791
ggcacaucuuucuucucga

SEQ ID NO: 744595 - RNA, 19 nt, Artificial Sequence
  Description of Artificial Sequence: Synthetic oligonucleotide
  Antisense strand to SEQ ID NO: 744594
ucgagaagaaagaugugcc

SEQ ID NO: 744596 - RNA, 19 nt, Artificial Sequence
  Description of Artificial Sequence: Synthetic oligonucleotide
  Sense strand starting at position 2716 of SEQ ID NO: 586791
aucuuucuucucgaucuga

SEQ ID NO: 744597 - RNA, 19 nt, Artificial Sequence
  Description of Artificial Sequence: Synthetic oligonucleotide
  Antisense strand to SEQ ID NO: 744596
ucagaucgagaagaaagau

SEQ ID NO: 744598 - RNA, 19 nt, Artificial Sequence
  Description of Artificial Sequence: Synthetic oligonucleotide
  Sense strand starting at position 2831 of SEQ ID NO: 586791
cgaauuucccugggucgua

SEQ ID NO: 744599 - RNA, 19 nt, Artificial Sequence
  Description of Artificial Sequence: Synthetic oligonucleotide
  Antisense strand to SEQ ID NO: 744598
uacgacccagggaaauucg

SEQ ID NO: 744600 - RNA, 19 nt, Artificial Sequence
  Description of Artificial Sequence: Synthetic oligonucleotide
  Sense strand starting at position 2858 of SEQ ID NO: 586791
aucauucucuugucacaga

SEQ ID NO: 744601 - RNA, 19 nt, Artificial Sequence
  Description of Artificial Sequence: Synthetic oligonucleotide
  Antisense strand to SEQ ID NO: 744600
ucugugacaagagaaugau

SEQ ID NO: 744602 - RNA, 19 nt, Artificial Sequence
  Description of Artificial Sequence: Synthetic oligonucleotide
  Sense strand starting at position 2947 of SEQ ID NO: 586791
accacugauuugggaguca

SEQ ID NO: 744603 - RNA, 19 nt, Artificial Sequence
  Description of Artificial Sequence: Synthetic oligonucleotide
  Antisense strand to SEQ ID NO: 744602
ugacucccaaaucaguggu

SEQ ID NO: 744604 - RNA, 19 nt, Artificial Sequence
  Description of Artificial Sequence: Synthetic oligonucleotide
  Sense strand starting at position 3001 of SEQ ID NO: 586791
cugugugacccugauucua

SEQ ID NO: 744605 - RNA, 19 nt, Artificial Sequence
  Description of Artificial Sequence: Synthetic oligonucleotide
  Antisense strand to SEQ ID NO: 744604
uagaaucagggucacacag

SEQ ID NO: 744606 - RNA, 19 nt, Artificial Sequence
  Description of Artificial Sequence: Synthetic oligonucleotide
  Sense strand starting at position 3106 of SEQ ID NO: 586791
uguaaagugucaguacaga

SEQ ID NO: 744607 - RNA, 19 nt, Artificial Sequence
  Description of Artificial Sequence: Synthetic oligonucleotide
  Antisense strand to SEQ ID NO: 744606
ucuguacugacacuuuaca

SEQ ID NO: 744608 - RNA, 19 nt, Artificial Sequence
  Description of Artificial Sequence: Synthetic oligonucleotide
  Sense strand starting at position 3154 of SEQ ID NO: 586791
ugaaucuguuaugcugaaa

SEQ ID NO: 744609 - RNA, 19 nt, Artificial Sequence
  Description of Artificial Sequence: Synthetic oligonucleotide
  Antisense strand to SEQ ID NO: 744608
uuucagcauaacagauuca

SEQ ID NO: 744610 - RNA, 19 nt, Artificial Sequence
  Description of Artificial Sequence: Synthetic oligonucleotide
  Sense strand starting at position 3157 of SEQ ID NO: 586791
aucuguuaugcugaaaggu

SEQ ID NO: 744611 - RNA, 19 nt, Artificial Sequence
  Description of Artificial Sequence: Synthetic oligonucleotide
  Antisense strand to SEQ ID NO: 744610
accuuucagcauaacagau

SEQ ID NO: 744612 - RNA, 19 nt, Artificial Sequence
  Description of Artificial Sequence: Synthetic oligonucleotide
  Sense strand starting at position 3206 of SEQ ID NO: 586791
aaggaaaugcugugugguu

SEQ ID NO: 744613 - RNA, 19 nt, Artificial Sequence
  Description of Artificial Sequence: Synthetic oligonucleotide
  Antisense strand to SEQ ID NO: 744612
aaccacacagcauuuccuu

SEQ ID NO: 744614 - RNA, 19 nt, Artificial Sequence
  Description of Artificial Sequence: Synthetic oligonucleotide
  Sense strand starting at position 3211 of SEQ ID NO: 586791
aaugcugugugguuugaaa

SEQ ID NO: 744615 - RNA, 19 nt, Artificial Sequence
  Description of Artificial Sequence: Synthetic oligonucleotide
  Antisense strand to SEQ ID NO: 744614
uuucaaaccacacagcauu

SEQ ID NO: 744616 - RNA, 19 nt, Artificial Sequence
  Description of Artificial Sequence: Synthetic oligonucleotide
  Sense strand starting at position 3231 of SEQ ID NO: 586791
acgcuuugcuauuuagauu

SEQ ID NO: 744617 - RNA, 19 nt, Artificial Sequence
  Description of Artificial Sequence: Synthetic oligonucleotide
  Antisense strand to SEQ ID NO: 744616
aaucuaaauagcaaagcgu

SEQ ID NO: 744618 - RNA, 19 nt, Artificial Sequence
  Description of Artificial Sequence: Synthetic oligonucleotide
  Sense strand starting at position 3257 of SEQ ID NO: 586791
gccucuuguaugggaacua

SEQ ID NO: 744619 - RNA, 19 nt, Artificial Sequence
  Description of Artificial Sequence: Synthetic oligonucleotide
  Antisense strand to SEQ ID NO: 744618
uaguucccauacaagaggc

SEQ ID NO: 744620 - RNA, 19 nt, Artificial Sequence
  Description of Artificial Sequence: Synthetic oligonucleotide
  Sense strand starting at position 3290 of SEQ ID NO: 586791
auauguuguuuggugugaa

SEQ ID NO: 744621 - RNA, 19 nt, Artificial Sequence
  Description of Artificial Sequence: Synthetic oligonucleotide
  Antisense strand to SEQ ID NO: 744620
uucacaccaaacaacauau

SEQ ID NO: 744622 - RNA, 19 nt, Artificial Sequence
  Description of Artificial Sequence: Synthetic oligonucleotide
  Sense strand starting at position 3293 of SEQ ID NO: 586791
uguuguuuggugugaaaga

SEQ ID NO: 744623 - RNA, 19 nt, Artificial Sequence
  Description of Artificial Sequence: Synthetic oligonucleotide
  Antisense strand to SEQ ID NO: 744622
ucuuucacaccaaacaaca

SEQ ID NO: 744624 - RNA, 19 nt, Artificial Sequence
  Description of Artificial Sequence: Synthetic oligonucleotide
  Sense strand starting at position 3306 of SEQ ID NO: 586791
gaaagagaccuuggcaauc

SEQ ID NO: 744625 - RNA, 19 nt, Artificial Sequence
  Description of Artificial Sequence: Synthetic oligonucleotide
  Antisense strand to SEQ ID NO: 744624
gauugccaaggucucuuuc

SEQ ID NO: 744626 - RNA, 19 nt, Artificial Sequence
  Description of Artificial Sequence: Synthetic oligonucleotide
  Sense strand starting at position 3480 of SEQ ID NO: 586791
auccuaagguacuuugauu

SEQ ID NO: 744627 - RNA, 19 nt, Artificial Sequence
  Description of Artificial Sequence: Synthetic oligonucleotide
  Antisense strand to SEQ ID NO: 744626
aaucaaaguaccuuaggau

SEQ ID NO: 744628 - RNA, 19 nt, Artificial Sequence
  Description of Artificial Sequence: Synthetic oligonucleotide
  Sense strand starting at position 3545 of SEQ ID NO: 586791
uuguuauugagacaugguc

SEQ ID NO: 744629 - RNA, 19 nt, Artificial Sequence
  Description of Artificial Sequence: Synthetic oligonucleotide
  Antisense strand to SEQ ID NO: 744628
gaccaugucucaauaacaa

SEQ ID NO: 744630 - RNA, 19 nt, Artificial Sequence
  Description of Artificial Sequence: Synthetic oligonucleotide
  Sense strand starting at position 3547 of SEQ ID NO: 586791
guuauugagacauggucuc

SEQ ID NO: 744631 - RNA, 19 nt, Artificial Sequence
  Description of Artificial Sequence: Synthetic oligonucleotide
  Antisense strand to SEQ ID NO: 744630
gagaccaugucucaauaac

SEQ ID NO: 744632 - RNA, 19 nt, Artificial Sequence
  Description of Artificial Sequence: Synthetic oligonucleotide
  Sense strand starting at position 40 of SEQ ID NO: 586792
aauacaaucggacguaaug

SEQ ID NO: 744633 - RNA, 19 nt, Artificial Sequence
  Description of Artificial Sequence: Synthetic oligonucleotide
  Antisense strand to SEQ ID NO: 744632
cauuacguccgauuguauu

SEQ ID NO: 744634 - RNA, 19 nt, Artificial Sequence
  Description of Artificial Sequence: Synthetic oligonucleotide
  Sense strand starting at position 42 of SEQ ID NO: 586792
uacaaucggacguaauguu

SEQ ID NO: 744635 - RNA, 19 nt, Artificial Sequence
  Description of Artificial Sequence: Synthetic oligonucleotide
  Antisense strand to SEQ ID NO: 744634
aacauuacguccgauugua

SEQ ID NO: 744636 - RNA, 19 nt, Artificial Sequence
  Description of Artificial Sequence: Synthetic oligonucleotide
  Sense strand starting at position 220 of SEQ ID NO: 586792
uggcaugguuucccauuga

SEQ ID NO: 744637 - RNA, 19 nt, Artificial Sequence
  Description of Artificial Sequence: Synthetic oligonucleotide
  Antisense strand to SEQ ID NO: 744636
ucaaugggaaaccaugcca

SEQ ID NO: 744638 - RNA, 19 nt, Artificial Sequence
  Description of Artificial Sequence: Synthetic oligonucleotide
  Sense strand starting at position 224 of SEQ ID NO: 586792
augguuucccauugaaauc

SEQ ID NO: 744639 - RNA, 19 nt, Artificial Sequence
  Description of Artificial Sequence: Synthetic oligonucleotide
  Antisense strand to SEQ ID NO: 744638
gauuucaaugggaaaccau

SEQ ID NO: 744640 - RNA, 19 nt, Artificial Sequence
  Description of Artificial Sequence: Synthetic oligonucleotide
  Sense strand starting at position 255 of SEQ ID NO: 586792
gcucacuuggacuauauau

SEQ ID NO: 744641 - RNA, 19 nt, Artificial Sequence
  Description of Artificial Sequence: Synthetic oligonucleotide
  Antisense strand to SEQ ID NO: 744640
auauauaguccaagugagc

SEQ ID NO: 744642 - RNA, 19 nt, Artificial Sequence
  Description of Artificial Sequence: Synthetic oligonucleotide
  Sense strand starting at position 554 of SEQ ID NO: 586792
augccaaaugacugaugaa

SEQ ID NO: 744643 - RNA, 19 nt, Artificial Sequence
  Description of Artificial Sequence: Synthetic oligonucleotide
  Antisense strand to SEQ ID NO: 744642
uucaucagucauuuggcau

SEQ ID NO: 744644 - RNA, 19 nt, Artificial Sequence
  Description of Artificial Sequence: Synthetic oligonucleotide
  Sense strand starting at position 584 of SEQ ID NO: 586792
guaguaauggaaggugucu

SEQ ID NO: 744645 - RNA, 19 nt, Artificial Sequence
  Description of Artificial Sequence: Synthetic oligonucleotide
  Antisense strand to SEQ ID NO: 744644
agacaccuuccauuacuac

SEQ ID NO: 744646 - RNA, 19 nt, Artificial Sequence
  Description of Artificial Sequence: Synthetic oligonucleotide
  Sense strand starting at position 622 of SEQ ID NO: 586792
ugaggagcaagcugugaau

SEQ ID NO: 744647 - RNA, 19 nt, Artificial Sequence
  Description of Artificial Sequence: Synthetic oligonucleotide
  Antisense strand to SEQ ID NO: 744646
auucacagcuugcuccuca

SEQ ID NO: 744648 - RNA, 19 nt, Artificial Sequence
  Description of Artificial Sequence: Synthetic oligonucleotide
  Sense strand starting at position 624 of SEQ ID NO: 586792
aggagcaagcugugaauau

SEQ ID NO: 744649 - RNA, 19 nt, Artificial Sequence
  Description of Artificial Sequence: Synthetic oligonucleotide
  Antisense strand to SEQ ID NO: 744648
auauucacagcuugcuccu

SEQ ID NO: 744650 - RNA, 19 nt, Artificial Sequence
  Description of Artificial Sequence: Synthetic oligonucleotide
  Sense strand starting at position 809 of SEQ ID NO: 586792
cuagaauucuggccacucu

SEQ ID NO: 744651 - RNA, 19 nt, Artificial Sequence
  Description of Artificial Sequence: Synthetic oligonucleotide
  Antisense strand to SEQ ID NO: 744650
agaguggccagaauucuag

SEQ ID NO: 744652 - RNA, 19 nt, Artificial Sequence
  Description of Artificial Sequence: Synthetic oligonucleotide
  Sense strand starting at position 945 of SEQ ID NO: 586792
agaaguucgacugggcuaa

SEQ ID NO: 744653 - RNA, 19 nt, Artificial Sequence
  Description of Artificial Sequence: Synthetic oligonucleotide
  Antisense strand to SEQ ID NO: 744652
uuagcccagucgaacuucu

SEQ ID NO: 744654 - RNA, 19 nt, Artificial Sequence
  Description of Artificial Sequence: Synthetic oligonucleotide
  Sense strand starting at position 1148 of SEQ ID NO: 586792
ugaguauugggccaccaua

SEQ ID NO: 744655 - RNA, 19 nt, Artificial Sequence
  Description of Artificial Sequence: Synthetic oligonucleotide
  Antisense strand to SEQ ID NO: 744654
uaugguggcccaauacuca

SEQ ID NO: 744656 - RNA, 19 nt, Artificial Sequence
  Description of Artificial Sequence: Synthetic oligonucleotide
  Sense strand starting at position 1247 of SEQ ID NO: 586792
aacccucucuguguuggaa

SEQ ID NO: 744657 - RNA, 19 nt, Artificial Sequence
  Description of Artificial Sequence: Synthetic oligonucleotide
  Antisense strand to SEQ ID NO: 744656
uuccaacacagagaggguu

SEQ ID NO: 744658 - RNA, 19 nt, Artificial Sequence
  Description of Artificial Sequence: Synthetic oligonucleotide
  Sense strand starting at position 1767 of SEQ ID NO: 586792
ggcuaaugcccagggauaa

SEQ ID NO: 744659 - RNA, 19 nt, Artificial Sequence
  Description of Artificial Sequence: Synthetic oligonucleotide
  Antisense strand to SEQ ID NO: 744658
uuaucccugggcauuagcc

SEQ ID NO: 744660 - RNA, 19 nt, Artificial Sequence
  Description of Artificial Sequence: Synthetic oligonucleotide
  Sense strand starting at position 1768 of SEQ ID NO: 586792
gcuaaugcccagggauaag

SEQ ID NO: 744661 - RNA, 19 nt, Artificial Sequence
  Description of Artificial Sequence: Synthetic oligonucleotide
  Antisense strand to SEQ ID NO: 744660
cuuaucccugggcauuagc

SEQ ID NO: 744662 - RNA, 19 nt, Artificial Sequence
  Description of Artificial Sequence: Synthetic oligonucleotide
  Sense strand starting at position 2654 of SEQ ID NO: 586792
cucucuugugcggaagaaa

SEQ ID NO: 744663 - RNA, 19 nt, Artificial Sequence
  Description of Artificial Sequence: Synthetic oligonucleotide
  Antisense strand to SEQ ID NO: 744662
uuucuuccgcacaagagag

SEQ ID NO: 744664 - RNA, 19 nt, Artificial Sequence
  Description of Artificial Sequence: Synthetic oligonucleotide
  Sense strand starting at position 2696 of SEQ ID NO: 586792
ggagguaaguuucuucaga

SEQ ID NO: 744665 - RNA, 19 nt, Artificial Sequence
  Description of Artificial Sequence: Synthetic oligonucleotide
  Antisense strand to SEQ ID NO: 744664
ucugaagaaacuuaccucc

SEQ ID NO: 744666 - RNA, 19 nt, Artificial Sequence
  Description of Artificial Sequence: Synthetic oligonucleotide
  Sense strand starting at position 2846 of SEQ ID NO: 586792
aagguagaaugcucuggaa

SEQ ID NO: 744667 - RNA, 19 nt, Artificial Sequence
  Description of Artificial Sequence: Synthetic oligonucleotide
  Antisense strand to SEQ ID NO: 744666
uuccagagcauucuaccuu

SEQ ID NO: 744668 - RNA, 19 nt, Artificial Sequence
  Description of Artificial Sequence: Synthetic oligonucleotide
  Sense strand starting at position 2848 of SEQ ID NO: 586792
gguagaaugcucuggaaga

SEQ ID NO: 744669 - RNA, 19 nt, Artificial Sequence
  Description of Artificial Sequence: Synthetic oligonucleotide
  Antisense strand to SEQ ID NO: 744668
ucuuccagagcauucuacc

SEQ ID NO: 744670 - RNA, 19 nt, Artificial Sequence
  Description of Artificial Sequence: Synthetic oligonucleotide
  Sense strand starting at position 2874 of SEQ ID NO: 586792
cagguaugaaguugggagu

SEQ ID NO: 744671 - RNA, 19 nt, Artificial Sequence
  Description of Artificial Sequence: Synthetic oligonucleotide
  Antisense strand to SEQ ID NO: 744670
acucccaacuucauaccug

SEQ ID NO: 744672 - RNA, 19 nt, Artificial Sequence
  Description of Artificial Sequence: Synthetic oligonucleotide
  Sense strand starting at position 2937 of SEQ ID NO: 586792
auccaugcccaagaugauu

SEQ ID NO: 744673 - RNA, 19 nt, Artificial Sequence
  Description of Artificial Sequence: Synthetic oligonucleotide
  Antisense strand to SEQ ID NO: 744672
aaucaucuugggcauggau

SEQ ID NO: 744674 - RNA, 19 nt, Artificial Sequence
  Description of Artificial Sequence: Synthetic oligonucleotide
  Sense strand starting at position 2952 of SEQ ID NO: 586792
gauugcaagcgacaucaca

SEQ ID NO: 744675 - RNA, 19 nt, Artificial Sequence
  Description of Artificial Sequence: Synthetic oligonucleotide
  Antisense strand to SEQ ID NO: 744674
ugugaugucgcuugcaauc

SEQ ID NO: 744676 - RNA, 19 nt, Artificial Sequence
  Description of Artificial Sequence: Synthetic oligonucleotide
  Sense strand starting at position 2967 of SEQ ID NO: 586792
cacagaaggguccgucaaa

SEQ ID NO: 744677 - RNA, 19 nt, Artificial Sequence
  Description of Artificial Sequence: Synthetic oligonucleotide
  Antisense strand to SEQ ID NO: 744676
uuugacggacccuucugug

SEQ ID NO: 744678 - RNA, 19 nt, Artificial Sequence
  Description of Artificial Sequence: Synthetic oligonucleotide
  Sense strand starting at position 2968 of SEQ ID NO: 586792
acagaaggguccgucaaac

SEQ ID NO: 744679 - RNA, 19 nt, Artificial Sequence
  Description of Artificial Sequence: Synthetic oligonucleotide
  Antisense strand to SEQ ID NO: 744678
guuugacggacccuucugu

SEQ ID NO: 744680 - RNA, 19 nt, Artificial Sequence
  Description of Artificial Sequence: Synthetic oligonucleotide
  Sense strand starting at position 3031 of SEQ ID NO: 586792
cucucaggguuccugagau

SEQ ID NO: 744681 - RNA, 19 nt, Artificial Sequence
  Description of Artificial Sequence: Synthetic oligonucleotide
  Antisense strand to SEQ ID NO: 744680
aucucaggaacccugagag

SEQ ID NO: 744682 - RNA, 19 nt, Artificial Sequence
  Description of Artificial Sequence: Synthetic oligonucleotide
  Sense strand starting at position 3058 of SEQ ID NO: 586792
gggcaugcccuauacagua

SEQ ID NO: 744683 - RNA, 19 nt, Artificial Sequence
  Description of Artificial Sequence: Synthetic oligonucleotide
  Antisense strand to SEQ ID NO: 744682
uacuguauagggcaugccc

SEQ ID NO: 744684 - RNA, 19 nt, Artificial Sequence
  Description of Artificial Sequence: Synthetic oligonucleotide
  Sense strand starting at position 3166 of SEQ ID NO: 586792
augauaaacuuagaaguga

SEQ ID NO: 744685 - RNA, 19 nt, Artificial Sequence
  Description of Artificial Sequence: Synthetic oligonucleotide
  Antisense strand to SEQ ID NO: 744684
ucacuucuaaguuuaucau

SEQ ID NO: 744686 - RNA, 19 nt, Artificial Sequence
  Description of Artificial Sequence: Synthetic oligonucleotide
  Sense strand starting at position 3301 of SEQ ID NO: 586792
agaacuuagaggugagagu

SEQ ID NO: 744687 - RNA, 19 nt, Artificial Sequence
  Description of Artificial Sequence: Synthetic oligonucleotide
  Antisense strand to SEQ ID NO: 744686
acucucaccucuaaguucu

SEQ ID NO: 744688 - RNA, 19 nt, Artificial Sequence
  Description of Artificial Sequence: Synthetic oligonucleotide
  Sense strand starting at position 3362 of SEQ ID NO: 586792
guaguaacucaagguaaga

SEQ ID NO: 744689 - RNA, 19 nt, Artificial Sequence
  Description of Artificial Sequence: Synthetic oligonucleotide
  Antisense strand to SEQ ID NO: 744688
ucuuaccuugaguuacuac

SEQ ID NO: 744690 - RNA, 19 nt, Artificial Sequence
  Description of Artificial Sequence: Synthetic oligonucleotide
  Sense strand starting at position 3501 of SEQ ID NO: 586792
guauuauuacuaggcaaug

SEQ ID NO: 744691 - RNA, 19 nt, Artificial Sequence
  Description of Artificial Sequence: Synthetic oligonucleotide
  Antisense strand to SEQ ID NO: 744690
cauugccuaguaauaauac

SEQ ID NO: 744692 - RNA, 19 nt, Artificial Sequence
  Description of Artificial Sequence: Synthetic oligonucleotide
  Sense strand starting at position 3518 of SEQ ID NO: 586792
ugguaacauuaagcaauau

SEQ ID NO: 744693 - RNA, 19 nt, Artificial Sequence
  Description of Artificial Sequence: Synthetic oligonucleotide
  Antisense strand to SEQ ID NO: 744692
auauugcuuaauguuacca

SEQ ID NO: 744694 - RNA, 19 nt, Artificial Sequence
  Description of Artificial Sequence: Synthetic oligonucleotide
  Sense strand starting at position 3821 of SEQ ID NO: 586792
cauguaauacucgagacua

SEQ ID NO: 744695 - RNA, 19 nt, Artificial Sequence
  Description of Artificial Sequence: Synthetic oligonucleotide
  Antisense strand to SEQ ID NO: 744694
uagucucgaguauuacaug

SEQ ID NO: 744696 - RNA, 19 nt, Artificial Sequence
  Description of Artificial Sequence: Synthetic oligonucleotide
  Sense strand starting at position 3823 of SEQ ID NO: 586792
uguaauacucgagacuauu

SEQ ID NO: 744697 - RNA, 19 nt, Artificial Sequence
  Description of Artificial Sequence: Synthetic oligonucleotide
  Antisense strand to SEQ ID NO: 744696
aauagucucgaguauuaca

SEQ ID NO: 744698 - RNA, 19 nt, Artificial Sequence
  Description of Artificial Sequence: Synthetic oligonucleotide
  Sense strand starting at position 3829 of SEQ ID NO: 586792
acucgagacuauucuauga

SEQ ID NO: 744699 - RNA, 19 nt, Artificial Sequence
  Description of Artificial Sequence: Synthetic oligonucleotide
  Antisense strand to SEQ ID NO: 744698
ucauagaauagucucgagu

SEQ ID NO: 744700 - RNA, 19 nt, Artificial Sequence
  Description of Artificial Sequence: Synthetic oligonucleotide
  Sense strand starting at position 3833 of SEQ ID NO: 586792
gagacuauucuaugaggua

SEQ ID NO: 744701 - RNA, 19 nt, Artificial Sequence
  Description of Artificial Sequence: Synthetic oligonucleotide
  Antisense strand to SEQ ID NO: 744700
uaccucauagaauagucuc

SEQ ID NO: 744702 - RNA, 19 nt, Artificial Sequence
  Description of Artificial Sequence: Synthetic oligonucleotide
  Sense strand starting at position 3942 of SEQ ID NO: 586792
aagaccagaguuugaguua

SEQ ID NO: 744703 - RNA, 19 nt, Artificial Sequence
  Description of Artificial Sequence: Synthetic oligonucleotide
  Antisense strand to SEQ ID NO: 744702
uaacucaaacucuggucuu

SEQ ID NO: 744704 - RNA, 19 nt, Artificial Sequence
  Description of Artificial Sequence: Synthetic oligonucleotide
  Sense strand starting at position 3947 of SEQ ID NO: 586792
cagaguuugaguuauggcu

SEQ ID NO: 744705 - RNA, 19 nt, Artificial Sequence
  Description of Artificial Sequence: Synthetic oligonucleotide
  Antisense strand to SEQ ID NO: 744704
agccauaacucaaacucug

SEQ ID NO: 744706 - RNA, 19 nt, Artificial Sequence
  Description of Artificial Sequence: Synthetic oligonucleotide
  Sense strand starting at position 3953 of SEQ ID NO: 586792
uugaguuauggcugauuac

SEQ ID NO: 744707 - RNA, 19 nt, Artificial Sequence
  Description of Artificial Sequence: Synthetic oligonucleotide
  Antisense strand to SEQ ID NO: 744706
guaaucagccauaacucaa

SEQ ID NO: 744708 - RNA, 19 nt, Artificial Sequence
  Description of Artificial Sequence: Synthetic oligonucleotide
  Sense strand starting at position 3956 of SEQ ID NO: 586792
aguuauggcugauuaccuu

SEQ ID NO: 744709 - RNA, 19 nt, Artificial Sequence
  Description of Artificial Sequence: Synthetic oligonucleotide
  Antisense strand to SEQ ID NO: 744708
aagguaaucagccauaacu

SEQ ID NO: 744710 - RNA, 19 nt, Artificial Sequence
  Description of Artificial Sequence: Synthetic oligonucleotide
  Sense strand starting at position 3962 of SEQ ID NO: 586792
ggcugauuaccuuauccua

SEQ ID NO: 744711 - RNA, 19 nt, Artificial Sequence
  Description of Artificial Sequence: Synthetic oligonucleotide
  Antisense strand to SEQ ID NO: 744710
uaggauaagguaaucagcc

SEQ ID NO: 744712 - RNA, 19 nt, Artificial Sequence
  Description of Artificial Sequence: Synthetic oligonucleotide
  Sense strand starting at position 98 of SEQ ID NO: 586793
ggguucuacucaccuccaa

SEQ ID NO: 744713 - RNA, 19 nt, Artificial Sequence
  Description of Artificial Sequence: Synthetic oligonucleotide
  Antisense strand to SEQ ID NO: 744712
uuggaggugaguagaaccc

SEQ ID NO: 744714 - RNA, 19 nt, Artificial Sequence
  Description of Artificial Sequence: Synthetic oligonucleotide
  Sense strand starting at position 127 of SEQ ID NO: 586793
gaggcaaucccucacaagu

SEQ ID NO: 744715 - RNA, 19 nt, Artificial Sequence
  Description of Artificial Sequence: Synthetic oligonucleotide
  Antisense strand to SEQ ID NO: 744714
acuugugagggauugccuc

SEQ ID NO: 744716 - RNA, 19 nt, Artificial Sequence
  Description of Artificial Sequence: Synthetic oligonucleotide
  Sense strand starting at position 386 of SEQ ID NO: 586793
caaauacuuuggguagcau

SEQ ID NO: 744717 - RNA, 19 nt, Artificial Sequence
  Description of Artificial Sequence: Synthetic oligonucleotide
  Antisense strand to SEQ ID NO: 744716
augcuacccaaaguauuug

SEQ ID NO: 744718 - RNA, 19 nt, Artificial Sequence
  Description of Artificial Sequence: Synthetic oligonucleotide
  Sense strand starting at position 397 of SEQ ID NO: 586793
gguagcaugacauaugauc

SEQ ID NO: 744719 - RNA, 19 nt, Artificial Sequence
  Description of Artificial Sequence: Synthetic oligonucleotide
  Antisense strand to SEQ ID NO: 744718
gaucauaugucaugcuacc

SEQ ID NO: 744720 - RNA, 19 nt, Artificial Sequence
  Description of Artificial Sequence: Synthetic oligonucleotide
  Sense strand starting at position 1231 of SEQ ID NO: 586793
gguggaaaguucucaccua

SEQ ID NO: 744721 - RNA, 19 nt, Artificial Sequence
  Description of Artificial Sequence: Synthetic oligonucleotide
  Antisense strand to SEQ ID NO: 744720
uaggugagaacuuuccacc

SEQ ID NO: 744722 - RNA, 19 nt, Artificial Sequence
  Description of Artificial Sequence: Synthetic oligonucleotide
  Sense strand starting at position 1238 of SEQ ID NO: 586793
aguucucaccuauggugaa

SEQ ID NO: 744723 - RNA, 19 nt, Artificial Sequence
  Description of Artificial Sequence: Synthetic oligonucleotide
  Antisense strand to SEQ ID NO: 744722
uucaccauaggugagaacu

SEQ ID NO: 744724 - RNA, 19 nt, Artificial Sequence
  Description of Artificial Sequence: Synthetic oligonucleotide
  Sense strand starting at position 2013 of SEQ ID NO: 586793
ccaggaagguaauugucaa

SEQ ID NO: 744725 - RNA, 19 nt, Artificial Sequence
  Description of Artificial Sequence: Synthetic oligonucleotide
  Antisense strand to SEQ ID NO: 744724
uugacaauuaccuuccugg

SEQ ID NO: 744726 - RNA, 19 nt, Artificial Sequence
  Description of Artificial Sequence: Synthetic oligonucleotide
  Sense strand starting at position 2042 of SEQ ID NO: 586793
ggcucuaugaugugaaaug

SEQ ID NO: 744727 - RNA, 19 nt, Artificial Sequence
  Description of Artificial Sequence: Synthetic oligonucleotide
  Antisense strand to SEQ ID NO: 744726
cauuucacaucauagagcc

SEQ ID NO: 744728 - RNA, 19 nt, Artificial Sequence
  Description of Artificial Sequence: Synthetic oligonucleotide
  Sense strand starting at position 2051 of SEQ ID NO: 586793
augugaaauguacaaucga

SEQ ID NO: 744729 - RNA, 19 nt, Artificial Sequence
  Description of Artificial Sequence: Synthetic oligonucleotide
  Antisense strand to SEQ ID NO: 744728
ucgauuguacauuucacau

SEQ ID NO: 744730 - RNA, 19 nt, Artificial Sequence
  Description of Artificial Sequence: Synthetic oligonucleotide
  Sense strand starting at position 2120 of SEQ ID NO: 586793
cgaauuuggguuugcccaa

SEQ ID NO: 744731 - RNA, 19 nt, Artificial Sequence
  Description of Artificial Sequence: Synthetic oligonucleotide
  Antisense strand to SEQ ID NO: 744730
uugggcaaacccaaauucg

SEQ ID NO: 744732 - RNA, 19 nt, Artificial Sequence
  Description of Artificial Sequence: Synthetic oligonucleotide
  Sense strand starting at position 2157 of SEQ ID NO: 586793
uuugcugauguggaagaua

SEQ ID NO: 744733 - RNA, 19 nt, Artificial Sequence
  Description of Artificial Sequence: Synthetic oligonucleotide
  Antisense strand to SEQ ID NO: 744732
uaucuuccacaucagcaaa

SEQ ID NO: 744734 - RNA, 19 nt, Artificial Sequence
  Description of Artificial Sequence: Synthetic oligonucleotide
  Sense strand starting at position 2160 of SEQ ID NO: 586793
gcugauguggaagauaucu

SEQ ID NO: 744735 - RNA, 19 nt, Artificial Sequence
  Description of Artificial Sequence: Synthetic oligonucleotide
  Antisense strand to SEQ ID NO: 744734
agauaucuuccacaucagc

SEQ ID NO: 744736 - RNA, 19 nt, Artificial Sequence
  Description of Artificial Sequence: Synthetic oligonucleotide
  Sense strand starting at position 2165 of SEQ ID NO: 586793
uguggaagauaucuuacca

SEQ ID NO: 744737 - RNA, 19 nt, Artificial Sequence
  Description of Artificial Sequence: Synthetic oligonucleotide
  Antisense strand to SEQ ID NO: 744736
ugguaagauaucuuccaca

SEQ ID NO: 744738 - RNA, 19 nt, Artificial Sequence
  Description of Artificial Sequence: Synthetic oligonucleotide
  Sense strand starting at position 2320 of SEQ ID NO: 586793
uuugcagugccugaaauga

SEQ ID NO: 744739 - RNA, 19 nt, Artificial Sequence
  Description of Artificial Sequence: Synthetic oligonucleotide
  Antisense strand to SEQ ID NO: 744738
ucauuucaggcacugcaaa

SEQ ID NO: 744740 - RNA, 19 nt, Artificial Sequence
  Description of Artificial Sequence: Synthetic oligonucleotide
  Sense strand starting at position 2328 of SEQ ID NO: 586793
gccugaaaugaccgaguua

SEQ ID NO: 744741 - RNA, 19 nt, Artificial Sequence
  Description of Artificial Sequence: Synthetic oligonucleotide
  Antisense strand to SEQ ID NO: 744740
uaacucggucauuucaggc

SEQ ID NO: 744742 - RNA, 19 nt, Artificial Sequence
  Description of Artificial Sequence: Synthetic oligonucleotide
  Sense strand starting at position 2349 of SEQ ID NO: 586793
caaggcuuacacugggaaa

SEQ ID NO: 744743 - RNA, 19 nt, Artificial Sequence
  Description of Artificial Sequence: Synthetic oligonucleotide
  Antisense strand to SEQ ID NO: 744742
uuucccaguguaagccuug

SEQ ID NO: 744744 - RNA, 19 nt, Artificial Sequence
  Description of Artificial Sequence: Synthetic oligonucleotide
  Sense strand starting at position 2470 of SEQ ID NO: 586793
agaagaguccacgguauaa

SEQ ID NO: 744745 - RNA, 19 nt, Artificial Sequence
  Description of Artificial Sequence: Synthetic oligonucleotide
  Antisense strand to SEQ ID NO: 744744
uuauaccguggacucuucu

SEQ ID NO: 744746 - RNA, 19 nt, Artificial Sequence
  Description of Artificial Sequence: Synthetic oligonucleotide
  Sense strand starting at position 2472 of SEQ ID NO: 586793
aagaguccacgguauaaca

SEQ ID NO: 744747 - RNA, 19 nt, Artificial Sequence
  Description of Artificial Sequence: Synthetic oligonucleotide
  Antisense strand to SEQ ID NO: 744746
uguuauaccguggacucuu

SEQ ID NO: 744748 - RNA, 19 nt, Artificial Sequence
  Description of Artificial Sequence: Synthetic oligonucleotide
  Sense strand starting at position 2474 of SEQ ID NO: 586793
gaguccacgguauaacaau

SEQ ID NO: 744749 - RNA, 19 nt, Artificial Sequence
  Description of Artificial Sequence: Synthetic oligonucleotide
  Antisense strand to SEQ ID NO: 744748
auuguuauaccguggacuc

SEQ ID NO: 744750 - RNA, 19 nt, Artificial Sequence
  Description of Artificial Sequence: Synthetic oligonucleotide
  Sense strand starting at position 2480 of SEQ ID NO: 586793
acgguauaacaauguggaa

SEQ ID NO: 744751 - RNA, 19 nt, Artificial Sequence
  Description of Artificial Sequence: Synthetic oligonucleotide
  Antisense strand to SEQ ID NO: 744750
uuccacauuguuauaccgu

SEQ ID NO: 744752 - RNA, 19 nt, Artificial Sequence
  Description of Artificial Sequence: Synthetic oligonucleotide
  Sense strand starting at position 2482 of SEQ ID NO: 586793
gguauaacaauguggaaug

SEQ ID NO: 744753 - RNA, 19 nt, Artificial Sequence
  Description of Artificial Sequence: Synthetic oligonucleotide
  Antisense strand to SEQ ID NO: 744752
cauuccacauuguuauacc

SEQ ID NO: 744754 - RNA, 19 nt, Artificial Sequence
  Description of Artificial Sequence: Synthetic oligonucleotide
  Sense strand starting at position 2604 of SEQ ID NO: 586793
ccagguauauucuuaauug

SEQ ID NO: 744755 - RNA, 19 nt, Artificial Sequence
  Description of Artificial Sequence: Synthetic oligonucleotide
  Antisense strand to SEQ ID NO: 744754
caauuaagaauauaccugg

SEQ ID NO: 744756 - RNA, 19 nt, Artificial Sequence
  Description of Artificial Sequence: Synthetic oligonucleotide
  Sense strand starting at position 2630 of SEQ ID NO: 586793
uucaguuuagaggguaaug

SEQ ID NO: 744757 - RNA, 19 nt, Artificial Sequence
  Description of Artificial Sequence: Synthetic oligonucleotide
  Antisense strand to SEQ ID NO: 744756
cauuacccucuaaacugaa

SEQ ID NO: 744758 - RNA, 19 nt, Artificial Sequence
  Description of Artificial Sequence: Synthetic oligonucleotide
  Sense strand starting at position 2641 of SEQ ID NO: 586793
ggguaauggcuccacauau

SEQ ID NO: 744759 - RNA, 19 nt, Artificial Sequence
  Description of Artificial Sequence: Synthetic oligonucleotide
  Antisense strand to SEQ ID NO: 744758
auauguggagccauuaccc

SEQ ID NO: 744760 - RNA, 19 nt, Artificial Sequence
  Description of Artificial Sequence: Synthetic oligonucleotide
  Sense strand starting at position 2846 of SEQ ID NO: 586793
gugucagaguguauguagu

SEQ ID NO: 744761 - RNA, 19 nt, Artificial Sequence
  Description of Artificial Sequence: Synthetic oligonucleotide
  Antisense strand to SEQ ID NO: 744760
acuacauacacucugacac

SEQ ID NO: 744762 - RNA, 19 nt, Artificial Sequence
  Description of Artificial Sequence: Synthetic oligonucleotide
  Sense strand starting at position 2875 of SEQ ID NO: 586793
guuauaaauucucucagga

SEQ ID NO: 744763 - RNA, 19 nt, Artificial Sequence
  Description of Artificial Sequence: Synthetic oligonucleotide
  Antisense strand to SEQ ID NO: 744762
uccugagagaauuuauaac

SEQ ID NO: 744764 - RNA, 19 nt, Artificial Sequence
  Description of Artificial Sequence: Synthetic oligonucleotide
  Sense strand starting at position 2925 of SEQ ID NO: 586793
uagguugguagcgagauua

SEQ ID NO: 744765 - RNA, 19 nt, Artificial Sequence
  Description of Artificial Sequence: Synthetic oligonucleotide
  Antisense strand to SEQ ID NO: 744764
uaaucucgcuaccaaccua

SEQ ID NO: 744766 - RNA, 19 nt, Artificial Sequence
  Description of Artificial Sequence: Synthetic oligonucleotide
  Sense strand starting at position 3034 of SEQ ID NO: 586793
ucauguaguccuugagacu

SEQ ID NO: 744767 - RNA, 19 nt, Artificial Sequence
  Description of Artificial Sequence: Synthetic oligonucleotide
  Antisense strand to SEQ ID NO: 744766
agucucaaggacuacauga

SEQ ID NO: 744768 - RNA, 19 nt, Artificial Sequence
  Description of Artificial Sequence: Synthetic oligonucleotide
  Sense strand starting at position 3035 of SEQ ID NO: 586793
cauguaguccuugagacug

SEQ ID NO: 744769 - RNA, 19 nt, Artificial Sequence
  Description of Artificial Sequence: Synthetic oligonucleotide
  Antisense strand to SEQ ID NO: 744768
cagucucaaggacuacaug

SEQ ID NO: 744770 - RNA, 19 nt, Artificial Sequence
  Description of Artificial Sequence: Synthetic oligonucleotide
  Sense strand starting at position 3040 of SEQ ID NO: 586793
aguccuugagacuguaaua

SEQ ID NO: 744771 - RNA, 19 nt, Artificial Sequence
  Description of Artificial Sequence: Synthetic oligonucleotide
  Antisense strand to SEQ ID NO: 744770
uauuacagucucaaggacu

SEQ ID NO: 744772 - RNA, 19 nt, Artificial Sequence
  Description of Artificial Sequence: Synthetic oligonucleotide
  Sense strand starting at position 3266 of SEQ ID NO: 586793
agcugacucccagaucuua

SEQ ID NO: 744773 - RNA, 19 nt, Artificial Sequence
  Description of Artificial Sequence: Synthetic oligonucleotide
  Antisense strand to SEQ ID NO: 744772
uaagaucugggagucagcu

SEQ ID NO: 744774 - RNA, 19 nt, Artificial Sequence
  Description of Artificial Sequence: Synthetic oligonucleotide
  Sense strand starting at position 3277 of SEQ ID NO: 586793
agaucuuacuauguagacu

SEQ ID NO: 744775 - RNA, 19 nt, Artificial Sequence
  Description of Artificial Sequence: Synthetic oligonucleotide
  Antisense strand to SEQ ID NO: 744774
agucuacauaguaagaucu

SEQ ID NO: 744776 - RNA, 19 nt, Artificial Sequence
  Description of Artificial Sequence: Synthetic oligonucleotide
  Sense strand starting at position 3560 of SEQ ID NO: 586793
aguagcagggucuauagau

SEQ ID NO: 744777 - RNA, 19 nt, Artificial Sequence
  Description of Artificial Sequence: Synthetic oligonucleotide
  Antisense strand to SEQ ID NO: 744776
aucuauagacccugcuacu

SEQ ID NO: 744778 - RNA, 19 nt, Artificial Sequence
  Description of Artificial Sequence: Synthetic oligonucleotide
  Sense strand starting at position 3716 of SEQ ID NO: 586793
gagacacaugccugaccuu

SEQ ID NO: 744779 - RNA, 19 nt, Artificial Sequence
  Description of Artificial Sequence: Synthetic oligonucleotide
  Antisense strand to SEQ ID NO: 744778
aaggucaggcaugugucuc

SEQ ID NO: 744780 - RNA, 19 nt, Artificial Sequence
  Description of Artificial Sequence: Synthetic oligonucleotide
  Sense strand starting at position 3717 of SEQ ID NO: 586793
agacacaugccugaccuua

SEQ ID NO: 744781 - RNA, 19 nt, Artificial Sequence
  Description of Artificial Sequence: Synthetic oligonucleotide
  Antisense strand to SEQ ID NO: 744780
uaaggucaggcaugugucu

SEQ ID NO: 744782 - RNA, 19 nt, Artificial Sequence
  Description of Artificial Sequence: Synthetic oligonucleotide
  Sense strand starting at position 3764 of SEQ ID NO: 586793
accaaagguuucuuauagu

SEQ ID NO: 744783 - RNA, 19 nt, Artificial Sequence
  Description of Artificial Sequence: Synthetic oligonucleotide
  Antisense strand to SEQ ID NO: 744782
acuauaagaaaccuuuggu

SEQ ID NO: 744784 - RNA, 19 nt, Artificial Sequence
  Description of Artificial Sequence: Synthetic oligonucleotide
  Sense strand starting at position 3871 of SEQ ID NO: 586793
accugaaagcccugagucu

SEQ ID NO: 744785 - RNA, 19 nt, Artificial Sequence
  Description of Artificial Sequence: Synthetic oligonucleotide
  Antisense strand to SEQ ID NO: 744784
agacucagggcuuucaggu

SEQ ID NO: 744786 - RNA, 19 nt, Artificial Sequence
  Description of Artificial Sequence: Synthetic oligonucleotide
  Sense strand starting at position 3882 of SEQ ID NO: 586793
cugagucuccuguaguaaa

SEQ ID NO: 744787 - RNA, 19 nt, Artificial Sequence
  Description of Artificial Sequence: Synthetic oligonucleotide
  Antisense strand to SEQ ID NO: 744786
uuuacuacaggagacucag

SEQ ID NO: 744788 - RNA, 19 nt, Artificial Sequence
  Description of Artificial Sequence: Synthetic oligonucleotide
  Sense strand starting at position 3926 of SEQ ID NO: 586793
agucuauugcaauggaaau

SEQ ID NO: 744789 - RNA, 19 nt, Artificial Sequence
  Description of Artificial Sequence: Synthetic oligonucleotide
  Antisense strand to SEQ ID NO: 744788
auuuccauugcaauagacu

SEQ ID NO: 744790 - RNA, 19 nt, Artificial Sequence
  Description of Artificial Sequence: Synthetic oligonucleotide
  Sense strand starting at position 3953 of SEQ ID NO: 586793
gcguaagugagugaaauua

SEQ ID NO: 744791 - RNA, 19 nt, Artificial Sequence
  Description of Artificial Sequence: Synthetic oligonucleotide
  Antisense strand to SEQ ID NO: 744790
uaauuucacucacuuacgc

SEQ ID NO: 744792 - RNA, 19 nt, Artificial Sequence
  Description of Artificial Sequence: Synthetic oligonucleotide
  Sense strand starting at position 10 of SEQ ID NO: 586794
guaguaauggaaggugucu

SEQ ID NO: 744793 - RNA, 19 nt, Artificial Sequence
  Description of Artificial Sequence: Synthetic oligonucleotide
  Antisense strand to SEQ ID NO: 744792
agacaccuuccauuacuac

SEQ ID NO: 744794 - RNA, 19 nt, Artificial Sequence
  Description of Artificial Sequence: Synthetic oligonucleotide
  Sense strand starting at position 48 of SEQ ID NO: 586794
ugaggagcaagcugugaau

SEQ ID NO: 744795 - RNA, 19 nt, Artificial Sequence
  Description of Artificial Sequence: Synthetic oligonucleotide
  Antisense strand to SEQ ID NO: 744794
auucacagcuugcuccuca

SEQ ID NO: 744796 - RNA, 19 nt, Artificial Sequence
  Description of Artificial Sequence: Synthetic oligonucleotide
  Sense strand starting at position 50 of SEQ ID NO: 586794
aggagcaagcugugaauau

SEQ ID NO: 744797 - RNA, 19 nt, Artificial Sequence
  Description of Artificial Sequence: Synthetic oligonucleotide
  Antisense strand to SEQ ID NO: 744796
auauucacagcuugcuccu

SEQ ID NO: 744798 - RNA, 19 nt, Artificial Sequence
  Description of Artificial Sequence: Synthetic oligonucleotide
  Sense strand starting at position 235 of SEQ ID NO: 586794
cuagaauucuggccacucu

SEQ ID NO: 744799 - RNA, 19 nt, Artificial Sequence
  Description of Artificial Sequence: Synthetic oligonucleotide
  Antisense strand to SEQ ID NO: 744798
agaguggccagaauucuag

SEQ ID NO: 744800 - RNA, 19 nt, Artificial Sequence
  Description of Artificial Sequence: Synthetic oligonucleotide
  Sense strand starting at position 371 of SEQ ID NO: 586794
agaaguucgacugggcuaa

SEQ ID NO: 744801 - RNA, 19 nt, Artificial Sequence
  Description of Artificial Sequence: Synthetic oligonucleotide
  Antisense strand to SEQ ID NO: 744800
uuagcccagucgaacuucu

SEQ ID NO: 744802 - RNA, 19 nt, Artificial Sequence
  Description of Artificial Sequence: Synthetic oligonucleotide
  Sense strand starting at position 574 of SEQ ID NO: 586794
ugaguauugggccaccaua

SEQ ID NO: 744803 - RNA, 19 nt, Artificial Sequence
  Description of Artificial Sequence: Synthetic oligonucleotide
  Antisense strand to SEQ ID NO: 744802
uaugguggcccaauacuca

SEQ ID NO: 744804 - RNA, 19 nt, Artificial Sequence
  Description of Artificial Sequence: Synthetic oligonucleotide
  Sense strand starting at position 673 of SEQ ID NO: 586794
aacccucucuguguuggaa

SEQ ID NO: 744805 - RNA, 19 nt, Artificial Sequence
  Description of Artificial Sequence: Synthetic oligonucleotide
  Antisense strand to SEQ ID NO: 744804
uuccaacacagagaggguu

SEQ ID NO: 744806 - RNA, 19 nt, Artificial Sequence
  Description of Artificial Sequence: Synthetic oligonucleotide
  Sense strand starting at position 696 of SEQ ID NO: 586794
aguagcagugacuguaauu

SEQ ID NO: 744807 - RNA, 19 nt, Artificial Sequence
  Description of Artificial Sequence: Synthetic oligonucleotide
  Antisense strand to SEQ ID NO: 744806
aauuacagucacugcuacu

SEQ ID NO: 744808 - RNA, 19 nt, Artificial Sequence
  Description of Artificial Sequence: Synthetic oligonucleotide
  Sense strand starting at position 1193 of SEQ ID NO: 586794
ggcuaaugcccagggauaa

SEQ ID NO: 744809 - RNA, 19 nt, Artificial Sequence
  Description of Artificial Sequence: Synthetic oligonucleotide
  Antisense strand to SEQ ID NO: 744808
uuaucccugggcauuagcc

SEQ ID NO: 744810 - RNA, 19 nt, Artificial Sequence
  Description of Artificial Sequence: Synthetic oligonucleotide
  Sense strand starting at position 1194 of SEQ ID NO: 586794
gcuaaugcccagggauaag

SEQ ID NO: 744811 - RNA, 19 nt, Artificial Sequence
  Description of Artificial Sequence: Synthetic oligonucleotide
  Antisense strand to SEQ ID NO: 744810
cuuaucccugggcauuagc

SEQ ID NO: 744812 - RNA, 19 nt, Artificial Sequence
  Description of Artificial Sequence: Synthetic oligonucleotide
  Sense strand starting at position 2080 of SEQ ID NO: 586794
cucucuugugcggaagaaa

SEQ ID NO: 744813 - RNA, 19 nt, Artificial Sequence
  Description of Artificial Sequence: Synthetic oligonucleotide
  Antisense strand to SEQ ID NO: 744812
uuucuuccgcacaagagag

SEQ ID NO: 744814 - RNA, 19 nt, Artificial Sequence
  Description of Artificial Sequence: Synthetic oligonucleotide
  Sense strand starting at position 2122 of SEQ ID NO: 586794
ggagguaaguuucuucaga

SEQ ID NO: 744815 - RNA, 19 nt, Artificial Sequence
  Description of Artificial Sequence: Synthetic oligonucleotide
  Antisense strand to SEQ ID NO: 744814
ucugaagaaacuuaccucc

SEQ ID NO: 744816 - RNA, 19 nt, Artificial Sequence
  Description of Artificial Sequence: Synthetic oligonucleotide
  Sense strand starting at position 2272 of SEQ ID NO: 586794
aagguagaaugcucuggaa

SEQ ID NO: 744817 - RNA, 19 nt, Artificial Sequence
  Description of Artificial Sequence: Synthetic oligonucleotide
  Antisense strand to SEQ ID NO: 744816
uuccagagcauucuaccuu

SEQ ID NO: 744818 - RNA, 19 nt, Artificial Sequence
  Description of Artificial Sequence: Synthetic oligonucleotide
  Sense strand starting at position 2274 of SEQ ID NO: 586794
gguagaaugcucuggaaga

SEQ ID NO: 744819 - RNA, 19 nt, Artificial Sequence
  Description of Artificial Sequence: Synthetic oligonucleotide
  Antisense strand to SEQ ID NO: 744818
ucuuccagagcauucuacc

SEQ ID NO: 744820 - RNA, 19 nt, Artificial Sequence
  Description of Artificial Sequence: Synthetic oligonucleotide
  Sense strand starting at position 2300 of SEQ ID NO: 586794
cagguaugaaguugggagu

SEQ ID NO: 744821 - RNA, 19 nt, Artificial Sequence
  Description of Artificial Sequence: Synthetic oligonucleotide
  Antisense strand to SEQ ID NO: 744820
acucccaacuucauaccug

SEQ ID NO: 744822 - RNA, 19 nt, Artificial Sequence
  Description of Artificial Sequence: Synthetic oligonucleotide
  Sense strand starting at position 2363 of SEQ ID NO: 586794
auccaugcccaagaugauu

SEQ ID NO: 744823 - RNA, 19 nt, Artificial Sequence
  Description of Artificial Sequence: Synthetic oligonucleotide
  Antisense strand to SEQ ID NO: 744822
aaucaucuugggcauggau

SEQ ID NO: 744824 - RNA, 19 nt, Artificial Sequence
  Description of Artificial Sequence: Synthetic oligonucleotide
  Sense strand starting at position 2378 of SEQ ID NO: 586794
gauugcaagcgacaucaca

SEQ ID NO: 744825 - RNA, 19 nt, Artificial Sequence
  Description of Artificial Sequence: Synthetic oligonucleotide
  Antisense strand to SEQ ID NO: 744824
ugugaugucgcuugcaauc

SEQ ID NO: 744826 - RNA, 19 nt, Artificial Sequence
  Description of Artificial Sequence: Synthetic oligonucleotide
  Sense strand starting at position 2393 of SEQ ID NO: 586794
cacagaaggguccgucaaa

SEQ ID NO: 744827 - RNA, 19 nt, Artificial Sequence
  Description of Artificial Sequence: Synthetic oligonucleotide
  Antisense strand to SEQ ID NO: 744826
uuugacggacccuucugug

SEQ ID NO: 744828 - RNA, 19 nt, Artificial Sequence
  Description of Artificial Sequence: Synthetic oligonucleotide
  Sense strand starting at position 2394 of SEQ ID NO: 586794
acagaaggguccgucaaac

SEQ ID NO: 744829 - RNA, 19 nt, Artificial Sequence
  Description of Artificial Sequence: Synthetic oligonucleotide
  Antisense strand to SEQ ID NO: 744828
guuugacggacccuucugu

SEQ ID NO: 744830 - RNA, 19 nt, Artificial Sequence
  Description of Artificial Sequence: Synthetic oligonucleotide
  Sense strand starting at position 2457 of SEQ ID NO: 586794
cucucaggguuccugagau

SEQ ID NO: 744831 - RNA, 19 nt, Artificial Sequence
  Description of Artificial Sequence: Synthetic oligonucleotide
  Antisense strand to SEQ ID NO: 744830
aucucaggaacccugagag

SEQ ID NO: 744832 - RNA, 19 nt, Artificial Sequence
  Description of Artificial Sequence: Synthetic oligonucleotide
  Sense strand starting at position 2484 of SEQ ID NO: 586794
gggcaugcccuauacagua

SEQ ID NO: 744833 - RNA, 19 nt, Artificial Sequence
  Description of Artificial Sequence: Synthetic oligonucleotide
  Antisense strand to SEQ ID NO: 744832
uacuguauagggcaugccc

SEQ ID NO: 744834 - RNA, 19 nt, Artificial Sequence
  Description of Artificial Sequence: Synthetic oligonucleotide
  Sense strand starting at position 2592 of SEQ ID NO: 586794
augauaaacuuagaaguga

SEQ ID NO: 744835 - RNA, 19 nt, Artificial Sequence
  Description of Artificial Sequence: Synthetic oligonucleotide
  Antisense strand to SEQ ID NO: 744834
ucacuucuaaguuuaucau

SEQ ID NO: 744836 - RNA, 19 nt, Artificial Sequence
  Description of Artificial Sequence: Synthetic oligonucleotide
  Sense strand starting at position 2727 of SEQ ID NO: 586794
agaacuuagaggugagagu

SEQ ID NO: 744837 - RNA, 19 nt, Artificial Sequence
  Description of Artificial Sequence: Synthetic oligonucleotide
  Antisense strand to SEQ ID NO: 744836
acucucaccucuaaguucu

SEQ ID NO: 744838 - RNA, 19 nt, Artificial Sequence
  Description of Artificial Sequence: Synthetic oligonucleotide
  Sense strand starting at position 2788 of SEQ ID NO: 586794
guaguaacucaagguaaga

SEQ ID NO: 744839 - RNA, 19 nt, Artificial Sequence
  Description of Artificial Sequence: Synthetic oligonucleotide
  Antisense strand to SEQ ID NO: 744838
ucuuaccuugaguuacuac

SEQ ID NO: 744840 - RNA, 19 nt, Artificial Sequence
  Description of Artificial Sequence: Synthetic oligonucleotide
  Sense strand starting at position 2927 of SEQ ID NO: 586794
guauuauuacuaggcaaug

SEQ ID NO: 744841 - RNA, 19 nt, Artificial Sequence
  Description of Artificial Sequence: Synthetic oligonucleotide
  Antisense strand to SEQ ID NO: 744840
cauugccuaguaauaauac

SEQ ID NO: 744842 - RNA, 19 nt, Artificial Sequence
  Description of Artificial Sequence: Synthetic oligonucleotide
  Sense strand starting at position 2944 of SEQ ID NO: 586794
ugguaacauuaagcaauau

SEQ ID NO: 744843 - RNA, 19 nt, Artificial Sequence
  Description of Artificial Sequence: Synthetic oligonucleotide
  Antisense strand to SEQ ID NO: 744842
auauugcuuaauguuacca

SEQ ID NO: 744844 - RNA, 19 nt, Artificial Sequence
  Description of Artificial Sequence: Synthetic oligonucleotide
  Sense strand starting at position 3247 of SEQ ID NO: 586794
cauguaauacucgagacua

SEQ ID NO: 744845 - RNA, 19 nt, Artificial Sequence
  Description of Artificial Sequence: Synthetic oligonucleotide
  Antisense strand to SEQ ID NO: 744844
uagucucgaguauuacaug

SEQ ID NO: 744846 - RNA, 19 nt, Artificial Sequence
  Description of Artificial Sequence: Synthetic oligonucleotide
  Sense strand starting at position 3249 of SEQ ID NO: 586794
uguaauacucgagacuauu

SEQ ID NO: 744847 - RNA, 19 nt, Artificial Sequence
  Description of Artificial Sequence: Synthetic oligonucleotide
  Antisense strand to SEQ ID NO: 744846
aauagucucgaguauuaca

SEQ ID NO: 744848 - RNA, 19 nt, Artificial Sequence
  Description of Artificial Sequence: Synthetic oligonucleotide
  Sense strand starting at position 3255 of SEQ ID NO: 586794
acucgagacuauucuauga

SEQ ID NO: 744849 - RNA, 19 nt, Artificial Sequence
  Description of Artificial Sequence: Synthetic oligonucleotide
  Antisense strand to SEQ ID NO: 744848
ucauagaauagucucgagu

SEQ ID NO: 744850 - RNA, 19 nt, Artificial Sequence
  Description of Artificial Sequence: Synthetic oligonucleotide
  Sense strand starting at position 3259 of SEQ ID NO: 586794
gagacuauucuaugaggua

SEQ ID NO: 744851 - RNA, 19 nt, Artificial Sequence
  Description of Artificial Sequence: Synthetic oligonucleotide
  Antisense strand to SEQ ID NO: 744850
uaccucauagaauagucuc

SEQ ID NO: 744852 - RNA, 19 nt, Artificial Sequence
  Description of Artificial Sequence: Synthetic oligonucleotide
  Sense strand starting at position 3368 of SEQ ID NO: 586794
aagaccagaguuugaguua

SEQ ID NO: 744853 - RNA, 19 nt, Artificial Sequence
  Description of Artificial Sequence: Synthetic oligonucleotide
  Antisense strand to SEQ ID NO: 744852
uaacucaaacucuggucuu

SEQ ID NO: 744854 - RNA, 19 nt, Artificial Sequence
  Description of Artificial Sequence: Synthetic oligonucleotide
  Sense strand starting at position 3373 of SEQ ID NO: 586794
cagaguuugaguuauggcu

SEQ ID NO: 744855 - RNA, 19 nt, Artificial Sequence
  Description of Artificial Sequence: Synthetic oligonucleotide
  Antisense strand to SEQ ID NO: 744854
agccauaacucaaacucug

SEQ ID NO: 744856 - RNA, 19 nt, Artificial Sequence
  Description of Artificial Sequence: Synthetic oligonucleotide
  Sense strand starting at position 3379 of SEQ ID NO: 586794
uugaguuauggcugauuac

SEQ ID NO: 744857 - RNA, 19 nt, Artificial Sequence
  Description of Artificial Sequence: Synthetic oligonucleotide
  Antisense strand to SEQ ID NO: 744856
guaaucagccauaacucaa

SEQ ID NO: 744858 - RNA, 19 nt, Artificial Sequence
  Description of Artificial Sequence: Synthetic oligonucleotide
  Sense strand starting at position 3382 of SEQ ID NO: 586794
aguuauggcugauuaccuu

SEQ ID NO: 744859 - RNA, 19 nt, Artificial Sequence
  Description of Artificial Sequence: Synthetic oligonucleotide
  Antisense strand to SEQ ID NO: 744858
aagguaaucagccauaacu

SEQ ID NO: 744860 - RNA, 19 nt, Artificial Sequence
  Description of Artificial Sequence: Synthetic oligonucleotide
  Sense strand starting at position 3388 of SEQ ID NO: 586794
ggcugauuaccuuauccua

SEQ ID NO: 744861 - RNA, 19 nt, Artificial Sequence
  Description of Artificial Sequence: Synthetic oligonucleotide
  Antisense strand to SEQ ID NO: 744860
uaggauaagguaaucagcc

SEQ ID NO: 744862 - RNA, 19 nt, Artificial Sequence
  Description of Artificial Sequence: Synthetic oligonucleotide
  Sense strand starting at position 3582 of SEQ ID NO: 586794
augucauaguuucucuaag

SEQ ID NO: 744863 - RNA, 19 nt, Artificial Sequence
  Description of Artificial Sequence: Synthetic oligonucleotide
  Antisense strand to SEQ ID NO: 744862
cuuagagaaacuaugacau

SEQ ID NO: 744864 - RNA, 19 nt, Artificial Sequence
  Description of Artificial Sequence: Synthetic oligonucleotide
  Sense strand starting at position 3584 of SEQ ID NO: 586794
gucauaguuucucuaagua

SEQ ID NO: 744865 - RNA, 19 nt, Artificial Sequence
  Description of Artificial Sequence: Synthetic oligonucleotide
  Antisense strand to SEQ ID NO: 744864
uacuuagagaaacuaugac

SEQ ID NO: 744866 - RNA, 19 nt, Artificial Sequence
  Description of Artificial Sequence: Synthetic oligonucleotide
  Sense strand starting at position 3599 of SEQ ID NO: 586794
aguacuggccuaggaugaa

SEQ ID NO: 744867 - RNA, 19 nt, Artificial Sequence
  Description of Artificial Sequence: Synthetic oligonucleotide
  Antisense strand to SEQ ID NO: 744866
uucauccuaggccaguacu

SEQ ID NO: 744868 - RNA, 19 nt, Artificial Sequence
  Description of Artificial Sequence: Synthetic oligonucleotide
  Sense strand starting at position 3680 of SEQ ID NO: 586794
uuccuacucuuaguggaau

SEQ ID NO: 744869 - RNA, 19 nt, Artificial Sequence
  Description of Artificial Sequence: Synthetic oligonucleotide
  Antisense strand to SEQ ID NO: 744868
auuccacuaagaguaggaa

SEQ ID NO: 744870 - RNA, 19 nt, Artificial Sequence
  Description of Artificial Sequence: Synthetic oligonucleotide
  Sense strand starting at position 3900 of SEQ ID NO: 586794
ccauaauagucuuuagagc

SEQ ID NO: 744871 - RNA, 19 nt, Artificial Sequence
  Description of Artificial Sequence: Synthetic oligonucleotide
  Antisense strand to SEQ ID NO: 744870
gcucuaaagacuauuaugg

SEQ ID NO: 744872 - RNA, 19 nt, Artificial Sequence
  Description of Artificial Sequence: Synthetic oligonucleotide
  Sense strand starting at position 13 of SEQ ID NO: 586795
guaguaauggaaggugucu

SEQ ID NO: 744873 - RNA, 19 nt, Artificial Sequence
  Description of Artificial Sequence: Synthetic oligonucleotide
  Antisense strand to SEQ ID NO: 744872
agacaccuuccauuacuac

SEQ ID NO: 744874 - RNA, 19 nt, Artificial Sequence
  Description of Artificial Sequence: Synthetic oligonucleotide
  Sense strand starting at position 51 of SEQ ID NO: 586795
ugaggagcaagcugugaau

SEQ ID NO: 744875 - RNA, 19 nt, Artificial Sequence
  Description of Artificial Sequence: Synthetic oligonucleotide
  Antisense strand to SEQ ID NO: 744874
auucacagcuugcuccuca

SEQ ID NO: 744876 - RNA, 19 nt, Artificial Sequence
  Description of Artificial Sequence: Synthetic oligonucleotide
  Sense strand starting at position 53 of SEQ ID NO: 586795
aggagcaagcugugaauau

SEQ ID NO: 744877 - RNA, 19 nt, Artificial Sequence
  Description of Artificial Sequence: Synthetic oligonucleotide
  Antisense strand to SEQ ID NO: 744876
auauucacagcuugcuccu

SEQ ID NO: 744878 - RNA, 19 nt, Artificial Sequence
  Description of Artificial Sequence: Synthetic oligonucleotide
  Sense strand starting at position 238 of SEQ ID NO: 586795
cuagaauucuggccacucu

SEQ ID NO: 744879 - RNA, 19 nt, Artificial Sequence
  Description of Artificial Sequence: Synthetic oligonucleotide
  Antisense strand to SEQ ID NO: 744878
agaguggccagaauucuag

SEQ ID NO: 744880 - RNA, 19 nt, Artificial Sequence
  Description of Artificial Sequence: Synthetic oligonucleotide
  Sense strand starting at position 374 of SEQ ID NO: 586795
agaaguucgacugggcuaa

SEQ ID NO: 744881 - RNA, 19 nt, Artificial Sequence
  Description of Artificial Sequence: Synthetic oligonucleotide
  Antisense strand to SEQ ID NO: 744880
uuagcccagucgaacuucu

SEQ ID NO: 744882 - RNA, 19 nt, Artificial Sequence
  Description of Artificial Sequence: Synthetic oligonucleotide
  Sense strand starting at position 577 of SEQ ID NO: 586795
ugaguauugggccaccaua

SEQ ID NO: 744883 - RNA, 19 nt, Artificial Sequence
  Description of Artificial Sequence: Synthetic oligonucleotide
  Antisense strand to SEQ ID NO: 744882
uaugguggcccaauacuca

SEQ ID NO: 744884 - RNA, 19 nt, Artificial Sequence
  Description of Artificial Sequence: Synthetic oligonucleotide
  Sense strand starting at position 676 of SEQ ID NO: 586795
aacccucucuguguuggaa

SEQ ID NO: 744885 - RNA, 19 nt, Artificial Sequence
  Description of Artificial Sequence: Synthetic oligonucleotide
  Antisense strand to SEQ ID NO: 744884
uuccaacacagagaggguu

SEQ ID NO: 744886 - RNA, 19 nt, Artificial Sequence
  Description of Artificial Sequence: Synthetic oligonucleotide
  Sense strand starting at position 699 of SEQ ID NO: 586795
aguagcagugacuguaauu

SEQ ID NO: 744887 - RNA, 19 nt, Artificial Sequence
  Description of Artificial Sequence: Synthetic oligonucleotide
  Antisense strand to SEQ ID NO: 744886
aauuacagucacugcuacu

SEQ ID NO: 744888 - RNA, 19 nt, Artificial Sequence
  Description of Artificial Sequence: Synthetic oligonucleotide
  Sense strand starting at position 1196 of SEQ ID NO: 586795
ggcuaaugcccagggauaa

SEQ ID NO: 744889 - RNA, 19 nt, Artificial Sequence
  Description of Artificial Sequence: Synthetic oligonucleotide
  Antisense strand to SEQ ID NO: 744888
uuaucccugggcauuagcc

SEQ ID NO: 744890 - RNA, 19 nt, Artificial Sequence
  Description of Artificial Sequence: Synthetic oligonucleotide
  Sense strand starting at position 1197 of SEQ ID NO: 586795
gcuaaugcccagggauaag

SEQ ID NO: 744891 - RNA, 19 nt, Artificial Sequence
  Description of Artificial Sequence: Synthetic oligonucleotide
  Antisense strand to SEQ ID NO: 744890
cuuaucccugggcauuagc

SEQ ID NO: 744892 - RNA, 19 nt, Artificial Sequence
  Description of Artificial Sequence: Synthetic oligonucleotide
  Sense strand starting at position 2083 of SEQ ID NO: 586795
cucucuugugcggaagaaa

SEQ ID NO: 744893 - RNA, 19 nt, Artificial Sequence
  Description of Artificial Sequence: Synthetic oligonucleotide
  Antisense strand to SEQ ID NO: 744892
uuucuuccgcacaagagag

SEQ ID NO: 744894 - RNA, 19 nt, Artificial Sequence
  Description of Artificial Sequence: Synthetic oligonucleotide
  Sense strand starting at position 2125 of SEQ ID NO: 586795
ggagguaaguuucuucaga

SEQ ID NO: 744895 - RNA, 19 nt, Artificial Sequence
  Description of Artificial Sequence: Synthetic oligonucleotide
  Antisense strand to SEQ ID NO: 744894
ucugaagaaacuuaccucc

SEQ ID NO: 744896 - RNA, 19 nt, Artificial Sequence
  Description of Artificial Sequence: Synthetic oligonucleotide
  Sense strand starting at position 2275 of SEQ ID NO: 586795
aagguagaaugcucuggaa

SEQ ID NO: 744897 - RNA, 19 nt, Artificial Sequence
  Description of Artificial Sequence: Synthetic oligonucleotide
  Antisense strand to SEQ ID NO: 744896
uuccagagcauucuaccuu

SEQ ID NO: 744898 - RNA, 19 nt, Artificial Sequence
  Description of Artificial Sequence: Synthetic oligonucleotide
  Sense strand starting at position 2277 of SEQ ID NO: 586795
gguagaaugcucuggaaga

SEQ ID NO: 744899 - RNA, 19 nt, Artificial Sequence
  Description of Artificial Sequence: Synthetic oligonucleotide
  Antisense strand to SEQ ID NO: 744898
ucuuccagagcauucuacc

SEQ ID NO: 744900 - RNA, 19 nt, Artificial Sequence
  Description of Artificial Sequence: Synthetic oligonucleotide
  Sense strand starting at position 2303 of SEQ ID NO: 586795
cagguaugaaguugggagu

SEQ ID NO: 744901 - RNA, 19 nt, Artificial Sequence
  Description of Artificial Sequence: Synthetic oligonucleotide
  Antisense strand to SEQ ID NO: 744900
acucccaacuucauaccug

SEQ ID NO: 744902 - RNA, 19 nt, Artificial Sequence
  Description of Artificial Sequence: Synthetic oligonucleotide
  Sense strand starting at position 2366 of SEQ ID NO: 586795
auccaugcccaagaugauu

SEQ ID NO: 744903 - RNA, 19 nt, Artificial Sequence
  Description of Artificial Sequence: Synthetic oligonucleotide
  Antisense strand to SEQ ID NO: 744902
aaucaucuugggcauggau

SEQ ID NO: 744904 - RNA, 19 nt, Artificial Sequence
  Description of Artificial Sequence: Synthetic oligonucleotide
  Sense strand starting at position 2381 of SEQ ID NO: 586795
gauugcaagcgacaucaca

SEQ ID NO: 744905 - RNA, 19 nt, Artificial Sequence
  Description of Artificial Sequence: Synthetic oligonucleotide
  Antisense strand to SEQ ID NO: 744904
ugugaugucgcuugcaauc

SEQ ID NO: 744906 - RNA, 19 nt, Artificial Sequence
  Description of Artificial Sequence: Synthetic oligonucleotide
  Sense strand starting at position 2396 of SEQ ID NO: 586795
cacagaaggguccgucaaa

SEQ ID NO: 744907 - RNA, 19 nt, Artificial Sequence
  Description of Artificial Sequence: Synthetic oligonucleotide
  Antisense strand to SEQ ID NO: 744906
uuugacggacccuucugug

SEQ ID NO: 744908 - RNA, 19 nt, Artificial Sequence
  Description of Artificial Sequence: Synthetic oligonucleotide
  Sense strand starting at position 2397 of SEQ ID NO: 586795
acagaaggguccgucaaac

SEQ ID NO: 744909 - RNA, 19 nt, Artificial Sequence
  Description of Artificial Sequence: Synthetic oligonucleotide
  Antisense strand to SEQ ID NO: 744908
guuugacggacccuucugu

SEQ ID NO: 744910 - RNA, 19 nt, Artificial Sequence
  Description of Artificial Sequence: Synthetic oligonucleotide
  Sense strand starting at position 2460 of SEQ ID NO: 586795
cucucaggguuccugagau

SEQ ID NO: 744911 - RNA, 19 nt, Artificial Sequence
  Description of Artificial Sequence: Synthetic oligonucleotide
  Antisense strand to SEQ ID NO: 744910
aucucaggaacccugagag

SEQ ID NO: 744912 - RNA, 19 nt, Artificial Sequence
  Description of Artificial Sequence: Synthetic oligonucleotide
  Sense strand starting at position 2487 of SEQ ID NO: 586795
gggcaugcccuauacagua

SEQ ID NO: 744913 - RNA, 19 nt, Artificial Sequence
  Description of Artificial Sequence: Synthetic oligonucleotide
  Antisense strand to SEQ ID NO: 744912
uacuguauagggcaugccc

SEQ ID NO: 744914 - RNA, 19 nt, Artificial Sequence
  Description of Artificial Sequence: Synthetic oligonucleotide
  Sense strand starting at position 2595 of SEQ ID NO: 586795
augauaaacuuagaaguga

SEQ ID NO: 744915 - RNA, 19 nt, Artificial Sequence
  Description of Artificial Sequence: Synthetic oligonucleotide
  Antisense strand to SEQ ID NO: 744914
ucacuucuaaguuuaucau

SEQ ID NO: 744916 - RNA, 19 nt, Artificial Sequence
  Description of Artificial Sequence: Synthetic oligonucleotide
  Sense strand starting at position 2730 of SEQ ID NO: 586795
agaacuuagaggugagagu

SEQ ID NO: 744917 - RNA, 19 nt, Artificial Sequence
  Description of Artificial Sequence: Synthetic oligonucleotide
  Antisense strand to SEQ ID NO: 744916
acucucaccucuaaguucu

SEQ ID NO: 744918 - RNA, 19 nt, Artificial Sequence
  Description of Artificial Sequence: Synthetic oligonucleotide
  Sense strand starting at position 2791 of SEQ ID NO: 586795
guaguaacucaagguaaga

SEQ ID NO: 744919 - RNA, 19 nt, Artificial Sequence
  Description of Artificial Sequence: Synthetic oligonucleotide
  Antisense strand to SEQ ID NO: 744918
ucuuaccuugaguuacuac

SEQ ID NO: 744920 - RNA, 19 nt, Artificial Sequence
  Description of Artificial Sequence: Synthetic oligonucleotide
  Sense strand starting at position 2930 of SEQ ID NO: 586795
guauuauuacuaggcaaug

SEQ ID NO: 744921 - RNA, 19 nt, Artificial Sequence
  Description of Artificial Sequence: Synthetic oligonucleotide
  Antisense strand to SEQ ID NO: 744920
cauugccuaguaauaauac

SEQ ID NO: 744922 - RNA, 19 nt, Artificial Sequence
  Description of Artificial Sequence: Synthetic oligonucleotide
  Sense strand starting at position 2947 of SEQ ID NO: 586795
ugguaacauuaagcaauau

SEQ ID NO: 744923 - RNA, 19 nt, Artificial Sequence
  Description of Artificial Sequence: Synthetic oligonucleotide
  Antisense strand to SEQ ID NO: 744922
auauugcuuaauguuacca

SEQ ID NO: 744924 - RNA, 19 nt, Artificial Sequence
  Description of Artificial Sequence: Synthetic oligonucleotide
  Sense strand starting at position 3250 of SEQ ID NO: 586795
cauguaauacucgagacua

SEQ ID NO: 744925 - RNA, 19 nt, Artificial Sequence
  Description of Artificial Sequence: Synthetic oligonucleotide
  Antisense strand to SEQ ID NO: 744924
uagucucgaguauuacaug

SEQ ID NO: 744926 - RNA, 19 nt, Artificial Sequence
  Description of Artificial Sequence: Synthetic oligonucleotide
  Sense strand starting at position 3252 of SEQ ID NO: 586795
uguaauacucgagacuauu

SEQ ID NO: 744927 - RNA, 19 nt, Artificial Sequence
  Description of Artificial Sequence: Synthetic oligonucleotide
  Antisense strand to SEQ ID NO: 744926
aauagucucgaguauuaca

SEQ ID NO: 744928 - RNA, 19 nt, Artificial Sequence
  Description of Artificial Sequence: Synthetic oligonucleotide
  Sense strand starting at position 3258 of SEQ ID NO: 586795
acucgagacuauucuauga

SEQ ID NO: 744929 - RNA, 19 nt, Artificial Sequence
  Description of Artificial Sequence: Synthetic oligonucleotide
  Antisense strand to SEQ ID NO: 744928
ucauagaauagucucgagu

SEQ ID NO: 744930 - RNA, 19 nt, Artificial Sequence
  Description of Artificial Sequence: Synthetic oligonucleotide
  Sense strand starting at position 3262 of SEQ ID NO: 586795
gagacuauucuaugaggua

SEQ ID NO: 744931 - RNA, 19 nt, Artificial Sequence
  Description of Artificial Sequence: Synthetic oligonucleotide
  Antisense strand to SEQ ID NO: 744930
uaccucauagaauagucuc

SEQ ID NO: 744932 - RNA, 19 nt, Artificial Sequence
  Description of Artificial Sequence: Synthetic oligonucleotide
  Sense strand starting at position 3371 of SEQ ID NO: 586795
aagaccagaguuugaguua

SEQ ID NO: 744933 - RNA, 19 nt, Artificial Sequence
  Description of Artificial Sequence: Synthetic oligonucleotide
  Antisense strand to SEQ ID NO: 744932
uaacucaaacucuggucuu

SEQ ID NO: 744934 - RNA, 19 nt, Artificial Sequence
  Description of Artificial Sequence: Synthetic oligonucleotide
  Sense strand starting at position 3376 of SEQ ID NO: 586795
cagaguuugaguuauggcu

SEQ ID NO: 744935 - RNA, 19 nt, Artificial Sequence
  Description of Artificial Sequence: Synthetic oligonucleotide
  Antisense strand to SEQ ID NO: 744934
agccauaacucaaacucug

SEQ ID NO: 744936 - RNA, 19 nt, Artificial Sequence
  Description of Artificial Sequence: Synthetic oligonucleotide
  Sense strand starting at position 3382 of SEQ ID NO: 586795
uugaguuauggcugauuac

SEQ ID NO: 744937 - RNA, 19 nt, Artificial Sequence
  Description of Artificial Sequence: Synthetic oligonucleotide
  Antisense strand to SEQ ID NO: 744936
guaaucagccauaacucaa

SEQ ID NO: 744938 - RNA, 19 nt, Artificial Sequence
  Description of Artificial Sequence: Synthetic oligonucleotide
  Sense strand starting at position 3385 of SEQ ID NO: 586795
aguuauggcugauuaccuu

SEQ ID NO: 744939 - RNA, 19 nt, Artificial Sequence
  Description of Artificial Sequence: Synthetic oligonucleotide
  Antisense strand to SEQ ID NO: 744938
aagguaaucagccauaacu

SEQ ID NO: 744940 - RNA, 19 nt, Artificial Sequence
  Description of Artificial Sequence: Synthetic oligonucleotide
  Sense strand starting at position 3391 of SEQ ID NO: 586795
ggcugauuaccuuauccua

SEQ ID NO: 744941 - RNA, 19 nt, Artificial Sequence
  Description of Artificial Sequence: Synthetic oligonucleotide
  Antisense strand to SEQ ID NO: 744940
uaggauaagguaaucagcc

SEQ ID NO: 744942 - RNA, 19 nt, Artificial Sequence
  Description of Artificial Sequence: Synthetic oligonucleotide
  Sense strand starting at position 3585 of SEQ ID NO: 586795
augucauaguuucucuaag

SEQ ID NO: 744943 - RNA, 19 nt, Artificial Sequence
  Description of Artificial Sequence: Synthetic oligonucleotide
  Antisense strand to SEQ ID NO: 744942
cuuagagaaacuaugacau

SEQ ID NO: 744944 - RNA, 19 nt, Artificial Sequence
  Description of Artificial Sequence: Synthetic oligonucleotide
  Sense strand starting at position 3587 of SEQ ID NO: 586795
gucauaguuucucuaagua

SEQ ID NO: 744945 - RNA, 19 nt, Artificial Sequence
  Description of Artificial Sequence: Synthetic oligonucleotide
  Antisense strand to SEQ ID NO: 744944
uacuuagagaaacuaugac

SEQ ID NO: 744946 - RNA, 19 nt, Artificial Sequence
  Description of Artificial Sequence: Synthetic oligonucleotide
  Sense strand starting at position 3602 of SEQ ID NO: 586795
aguacuggccuaggaugaa

SEQ ID NO: 744947 - RNA, 19 nt, Artificial Sequence
  Description of Artificial Sequence: Synthetic oligonucleotide
  Antisense strand to SEQ ID NO: 744946
uucauccuaggccaguacu

SEQ ID NO: 744948 - RNA, 19 nt, Artificial Sequence
  Description of Artificial Sequence: Synthetic oligonucleotide
  Sense strand starting at position 3683 of SEQ ID NO: 586795
uuccuacucuuaguggaau

SEQ ID NO: 744949 - RNA, 19 nt, Artificial Sequence
  Description of Artificial Sequence: Synthetic oligonucleotide
  Antisense strand to SEQ ID NO: 744948
auuccacuaagaguaggaa

SEQ ID NO: 744950 - RNA, 19 nt, Artificial Sequence
  Description of Artificial Sequence: Synthetic oligonucleotide
  Sense strand starting at position 3903 of SEQ ID NO: 586795
ccauaauagucuuuagagc

SEQ ID NO: 744951 - RNA, 19 nt, Artificial Sequence
  Description of Artificial Sequence: Synthetic oligonucleotide
  Antisense strand to SEQ ID NO: 744950
gcucuaaagacuauuaugg

SEQ ID NO: 744952 - RNA, 19 nt, Artificial Sequence
  Description of Artificial Sequence: Synthetic oligonucleotide
  Sense strand starting at position 294 of SEQ ID NO: 586796
agggaaagcgaggguuaaa

SEQ ID NO: 744953 - RNA, 19 nt, Artificial Sequence
  Description of Artificial Sequence: Synthetic oligonucleotide
  Antisense strand to SEQ ID NO: 744952
uuuaacccucgcuuucccu

SEQ ID NO: 744954 - RNA, 19 nt, Artificial Sequence
  Description of Artificial Sequence: Synthetic oligonucleotide
  Sense strand starting at position 297 of SEQ ID NO: 586796
gaaagcgaggguuaaacuu

SEQ ID NO: 744955 - RNA, 19 nt, Artificial Sequence
  Description of Artificial Sequence: Synthetic oligonucleotide
  Antisense strand to SEQ ID NO: 744954
aaguuuaacccucgcuuuc

SEQ ID NO: 744956 - RNA, 19 nt, Artificial Sequence
  Description of Artificial Sequence: Synthetic oligonucleotide
  Sense strand starting at position 931 of SEQ ID NO: 586796
cacacuuaggcauggcaga

SEQ ID NO: 744957 - RNA, 19 nt, Artificial Sequence
  Description of Artificial Sequence: Synthetic oligonucleotide
  Antisense strand to SEQ ID NO: 744956
ucugccaugccuaagugug

SEQ ID NO: 744958 - RNA, 19 nt, Artificial Sequence
  Description of Artificial Sequence: Synthetic oligonucleotide
  Sense strand starting at position 932 of SEQ ID NO: 586796
acacuuaggcauggcagaa

SEQ ID NO: 744959 - RNA, 19 nt, Artificial Sequence
  Description of Artificial Sequence: Synthetic oligonucleotide
  Antisense strand to SEQ ID NO: 744958
uucugccaugccuaagugu

SEQ ID NO: 744960 - RNA, 19 nt, Artificial Sequence
  Description of Artificial Sequence: Synthetic oligonucleotide
  Sense strand starting at position 1111 of SEQ ID NO: 586796
gcgagguauccgcagccga

SEQ ID NO: 744961 - RNA, 19 nt, Artificial Sequence
  Description of Artificial Sequence: Synthetic oligonucleotide
  Antisense strand to SEQ ID NO: 744960
ucggcugcggauaccucgc

SEQ ID NO: 744962 - RNA, 19 nt, Artificial Sequence
  Description of Artificial Sequence: Synthetic oligonucleotide
  Sense strand starting at position 1221 of SEQ ID NO: 586796
ucuccuguggcggcgaaau

SEQ ID NO: 744963 - RNA, 19 nt, Artificial Sequence
  Description of Artificial Sequence: Synthetic oligonucleotide
  Antisense strand to SEQ ID NO: 744962
auuucgccgccacaggaga

SEQ ID NO: 744964 - RNA, 19 nt, Artificial Sequence
  Description of Artificial Sequence: Synthetic oligonucleotide
  Sense strand starting at position 1231 of SEQ ID NO: 586796
cggcgaaauucaguaccau

SEQ ID NO: 744965 - RNA, 19 nt, Artificial Sequence
  Description of Artificial Sequence: Synthetic oligonucleotide
  Antisense strand to SEQ ID NO: 744964
augguacugaauuucgccg

SEQ ID NO: 744966 - RNA, 19 nt, Artificial Sequence
  Description of Artificial Sequence: Synthetic oligonucleotide
  Sense strand starting at position 1526 of SEQ ID NO: 586796
gccgguaauucugcauauu

SEQ ID NO: 744967 - RNA, 19 nt, Artificial Sequence
  Description of Artificial Sequence: Synthetic oligonucleotide
  Antisense strand to SEQ ID NO: 744966
aauaugcagaauuaccggc

SEQ ID NO: 744968 - RNA, 19 nt, Artificial Sequence
  Description of Artificial Sequence: Synthetic oligonucleotide
  Sense strand starting at position 1535 of SEQ ID NO: 586796
ucugcauauuugcggacau

SEQ ID NO: 744969 - RNA, 19 nt, Artificial Sequence
  Description of Artificial Sequence: Synthetic oligonucleotide
  Antisense strand to SEQ ID NO: 744968
auguccgcaaauaugcaga

SEQ ID NO: 744970 - RNA, 19 nt, Artificial Sequence
  Description of Artificial Sequence: Synthetic oligonucleotide
  Sense strand starting at position 36 of SEQ ID NO: 586797
gaguuugaggcuuaaguaa

SEQ ID NO: 744971 - RNA, 19 nt, Artificial Sequence
  Description of Artificial Sequence: Synthetic oligonucleotide
  Antisense strand to SEQ ID NO: 744970
uuacuuaagccucaaacuc

SEQ ID NO: 744972 - RNA, 19 nt, Artificial Sequence
  Description of Artificial Sequence: Synthetic oligonucleotide
  Sense strand starting at position 47 of SEQ ID NO: 586797
uuaaguaagccaugaucag

SEQ ID NO: 744973 - RNA, 19 nt, Artificial Sequence
  Description of Artificial Sequence: Synthetic oligonucleotide
  Antisense strand to SEQ ID NO: 744972
cugaucauggcuuacuuaa

SEQ ID NO: 744974 - RNA, 19 nt, Artificial Sequence
  Description of Artificial Sequence: Synthetic oligonucleotide
  Sense strand starting at position 94 of SEQ ID NO: 586797
gcguaaccuuaucuaggaa

SEQ ID NO: 744975 - RNA, 19 nt, Artificial Sequence
  Description of Artificial Sequence: Synthetic oligonucleotide
  Antisense strand to SEQ ID NO: 744974
uuccuagauaagguuacgc

SEQ ID NO: 744976 - RNA, 19 nt, Artificial Sequence
  Description of Artificial Sequence: Synthetic oligonucleotide
  Sense strand starting at position 212 of SEQ ID NO: 586797
agggacucuucuguguuaa

SEQ ID NO: 744977 - RNA, 19 nt, Artificial Sequence
  Description of Artificial Sequence: Synthetic oligonucleotide
  Antisense strand to SEQ ID NO: 744976
uuaacacagaagagucccu

SEQ ID NO: 744978 - RNA, 19 nt, Artificial Sequence
  Description of Artificial Sequence: Synthetic oligonucleotide
  Sense strand starting at position 213 of SEQ ID NO: 586797
gggacucuucuguguuaaa

SEQ ID NO: 744979 - RNA, 19 nt, Artificial Sequence
  Description of Artificial Sequence: Synthetic oligonucleotide
  Antisense strand to SEQ ID NO: 744978
uuuaacacagaagaguccc

SEQ ID NO: 744980 - RNA, 19 nt, Artificial Sequence
  Description of Artificial Sequence: Synthetic oligonucleotide
  Sense strand starting at position 214 of SEQ ID NO: 586797
ggacucuucuguguuaaag

SEQ ID NO: 744981 - RNA, 19 nt, Artificial Sequence
  Description of Artificial Sequence: Synthetic oligonucleotide
  Antisense strand to SEQ ID NO: 744980
cuuuaacacagaagagucc

SEQ ID NO: 744982 - RNA, 19 nt, Artificial Sequence
  Description of Artificial Sequence: Synthetic oligonucleotide
  Sense strand starting at position 248 of SEQ ID NO: 586797
gauaaacuugcugguccua

SEQ ID NO: 744983 - RNA, 19 nt, Artificial Sequence
  Description of Artificial Sequence: Synthetic oligonucleotide
  Antisense strand to SEQ ID NO: 744982
uaggaccagcaaguuuauc

SEQ ID NO: 744984 - RNA, 19 nt, Artificial Sequence
  Description of Artificial Sequence: Synthetic oligonucleotide
  Sense strand starting at position 337 of SEQ ID NO: 586797
aagacagugcuauaugcuu

SEQ ID NO: 744985 - RNA, 19 nt, Artificial Sequence
  Description of Artificial Sequence: Synthetic oligonucleotide
  Antisense strand to SEQ ID NO: 744984
aagcauauagcacugucuu

SEQ ID NO: 744986 - RNA, 19 nt, Artificial Sequence
  Description of Artificial Sequence: Synthetic oligonucleotide
  Sense strand starting at position 421 of SEQ ID NO: 586797
aguuaauucuaugucucaa

SEQ ID NO: 744987 - RNA, 19 nt, Artificial Sequence
  Description of Artificial Sequence: Synthetic oligonucleotide
  Antisense strand to SEQ ID NO: 744986
uugagacauagaauuaacu

SEQ ID NO: 744988 - RNA, 19 nt, Artificial Sequence
  Description of Artificial Sequence: Synthetic oligonucleotide
  Sense strand starting at position 535 of SEQ ID NO: 586797
caaacaugauuuggguaaa

SEQ ID NO: 744989 - RNA, 19 nt, Artificial Sequence
  Description of Artificial Sequence: Synthetic oligonucleotide
  Antisense strand to SEQ ID NO: 744988
uuuacccaaaucauguuug

SEQ ID NO: 744990 - RNA, 19 nt, Artificial Sequence
  Description of Artificial Sequence: Synthetic oligonucleotide
  Sense strand starting at position 536 of SEQ ID NO: 586797
aaacaugauuuggguaaag

SEQ ID NO: 744991 - RNA, 19 nt, Artificial Sequence
  Description of Artificial Sequence: Synthetic oligonucleotide
  Antisense strand to SEQ ID NO: 744990
cuuuacccaaaucauguuu

SEQ ID NO: 744992 - RNA, 19 nt, Artificial Sequence
  Description of Artificial Sequence: Synthetic oligonucleotide
  Sense strand starting at position 688 of SEQ ID NO: 586797
guuacucaaucuguuugaa

SEQ ID NO: 744993 - RNA, 19 nt, Artificial Sequence
  Description of Artificial Sequence: Synthetic oligonucleotide
  Antisense strand to SEQ ID NO: 744992
uucaaacagauugaguaac

SEQ ID NO: 744994 - RNA, 19 nt, Artificial Sequence
  Description of Artificial Sequence: Synthetic oligonucleotide
  Sense strand starting at position 691 of SEQ ID NO: 586797
acucaaucuguuugaaaga

SEQ ID NO: 744995 - RNA, 19 nt, Artificial Sequence
  Description of Artificial Sequence: Synthetic oligonucleotide
  Antisense strand to SEQ ID NO: 744994
ucuuucaaacagauugagu

SEQ ID NO: 744996 - RNA, 19 nt, Artificial Sequence
  Description of Artificial Sequence: Synthetic oligonucleotide
  Sense strand starting at position 844 of SEQ ID NO: 586797
gaugccuuauucucuagga

SEQ ID NO: 744997 - RNA, 19 nt, Artificial Sequence
  Description of Artificial Sequence: Synthetic oligonucleotide
  Antisense strand to SEQ ID NO: 744996
uccuagagaauaaggcauc

SEQ ID NO: 744998 - RNA, 19 nt, Artificial Sequence
  Description of Artificial Sequence: Synthetic oligonucleotide
  Sense strand starting at position 845 of SEQ ID NO: 586797
augccuuauucucuaggaa

SEQ ID NO: 744999 - RNA, 19 nt, Artificial Sequence
  Description of Artificial Sequence: Synthetic oligonucleotide
  Antisense strand to SEQ ID NO: 744998
uuccuagagaauaaggcau

SEQ ID NO: 745000 - RNA, 19 nt, Artificial Sequence
  Description of Artificial Sequence: Synthetic oligonucleotide
  Sense strand starting at position 846 of SEQ ID NO: 586797
ugccuuauucucuaggaau

SEQ ID NO: 745001 - RNA, 19 nt, Artificial Sequence
  Description of Artificial Sequence: Synthetic oligonucleotide
  Antisense strand to SEQ ID NO: 745000
auuccuagagaauaaggca

SEQ ID NO: 745002 - RNA, 19 nt, Artificial Sequence
  Description of Artificial Sequence: Synthetic oligonucleotide
  Sense strand starting at position 948 of SEQ ID NO: 586797
ccaugaaguaguuguuacu

SEQ ID NO: 745003 - RNA, 19 nt, Artificial Sequence
  Description of Artificial Sequence: Synthetic oligonucleotide
  Antisense strand to SEQ ID NO: 745002
aguaacaacuacuucaugg

SEQ ID NO: 745004 - RNA, 19 nt, Artificial Sequence
  Description of Artificial Sequence: Synthetic oligonucleotide
  Sense strand starting at position 1069 of SEQ ID NO: 586797
aaggaaugguaucucuagu

SEQ ID NO: 745005 - RNA, 19 nt, Artificial Sequence
  Description of Artificial Sequence: Synthetic oligonucleotide
  Antisense strand to SEQ ID NO: 745004
acuagagauaccauuccuu

SEQ ID NO: 745006 - RNA, 19 nt, Artificial Sequence
  Description of Artificial Sequence: Synthetic oligonucleotide
  Sense strand starting at position 1277 of SEQ ID NO: 586797
ggaguuagccuggaccuga

SEQ ID NO: 745007 - RNA, 19 nt, Artificial Sequence
  Description of Artificial Sequence: Synthetic oligonucleotide
  Antisense strand to SEQ ID NO: 745006
ucagguccaggcuaacucc

SEQ ID NO: 745008 - RNA, 19 nt, Artificial Sequence
  Description of Artificial Sequence: Synthetic oligonucleotide
  Sense strand starting at position 1304 of SEQ ID NO: 586797
uguaaauuaaggcgaagga

SEQ ID NO: 745009 - RNA, 19 nt, Artificial Sequence
  Description of Artificial Sequence: Synthetic oligonucleotide
  Antisense strand to SEQ ID NO: 745008
uccuucgccuuaauuuaca

SEQ ID NO: 745010 - RNA, 19 nt, Artificial Sequence
  Description of Artificial Sequence: Synthetic oligonucleotide
  Sense strand starting at position 1511 of SEQ ID NO: 586797
ucacuaguucuggagcuga

SEQ ID NO: 745011 - RNA, 19 nt, Artificial Sequence
  Description of Artificial Sequence: Synthetic oligonucleotide
  Antisense strand to SEQ ID NO: 745010
ucagcuccagaacuaguga

SEQ ID NO: 745012 - RNA, 19 nt, Artificial Sequence
  Description of Artificial Sequence: Synthetic oligonucleotide
  Sense strand starting at position 2258 of SEQ ID NO: 586797
cgaacuuggcaguaagaac

SEQ ID NO: 745013 - RNA, 19 nt, Artificial Sequence
  Description of Artificial Sequence: Synthetic oligonucleotide
  Antisense strand to SEQ ID NO: 745012
guucuuacugccaaguucg

SEQ ID NO: 745014 - RNA, 19 nt, Artificial Sequence
  Description of Artificial Sequence: Synthetic oligonucleotide
  Sense strand starting at position 2421 of SEQ ID NO: 586797
guucguggccuucuuaauu

SEQ ID NO: 745015 - RNA, 19 nt, Artificial Sequence
  Description of Artificial Sequence: Synthetic oligonucleotide
  Antisense strand to SEQ ID NO: 745014
aauuaagaaggccacgaac

SEQ ID NO: 745016 - RNA, 19 nt, Artificial Sequence
  Description of Artificial Sequence: Synthetic oligonucleotide
  Sense strand starting at position 2560 of SEQ ID NO: 586797
uugcaucucggagaaacaa

SEQ ID NO: 745017 - RNA, 19 nt, Artificial Sequence
  Description of Artificial Sequence: Synthetic oligonucleotide
  Antisense strand to SEQ ID NO: 745016
uuguuucuccgagaugcaa

SEQ ID NO: 745018 - RNA, 19 nt, Artificial Sequence
  Description of Artificial Sequence: Synthetic oligonucleotide
  Sense strand starting at position 2603 of SEQ ID NO: 586797
ugccucgucuuauuuaguu

SEQ ID NO: 745019 - RNA, 19 nt, Artificial Sequence
  Description of Artificial Sequence: Synthetic oligonucleotide
  Antisense strand to SEQ ID NO: 745018
aacuaaauaagacgaggca

SEQ ID NO: 745020 - RNA, 19 nt, Artificial Sequence
  Description of Artificial Sequence: Synthetic oligonucleotide
  Sense strand starting at position 2660 of SEQ ID NO: 586797
aaucuagugguuuacauag

SEQ ID NO: 745021 - RNA, 19 nt, Artificial Sequence
  Description of Artificial Sequence: Synthetic oligonucleotide
  Antisense strand to SEQ ID NO: 745020
cuauguaaaccacuagauu

SEQ ID NO: 745022 - RNA, 19 nt, Artificial Sequence
  Description of Artificial Sequence: Synthetic oligonucleotide
  Sense strand starting at position 2666 of SEQ ID NO: 586797
gugguuuacauagaucuga

SEQ ID NO: 745023 - RNA, 19 nt, Artificial Sequence
  Description of Artificial Sequence: Synthetic oligonucleotide
  Antisense strand to SEQ ID NO: 745022
ucagaucuauguaaaccac

SEQ ID NO: 745024 - RNA, 19 nt, Artificial Sequence
  Description of Artificial Sequence: Synthetic oligonucleotide
  Sense strand starting at position 2706 of SEQ ID NO: 586797
ucuugaccacuuuggagaa

SEQ ID NO: 745025 - RNA, 19 nt, Artificial Sequence
  Description of Artificial Sequence: Synthetic oligonucleotide
  Antisense strand to SEQ ID NO: 745024
uucuccaaaguggucaaga

SEQ ID NO: 745026 - RNA, 19 nt, Artificial Sequence
  Description of Artificial Sequence: Synthetic oligonucleotide
  Sense strand starting at position 2771 of SEQ ID NO: 586797
uguaaugugcauuaaguuu

SEQ ID NO: 745027 - RNA, 19 nt, Artificial Sequence
  Description of Artificial Sequence: Synthetic oligonucleotide
  Antisense strand to SEQ ID NO: 745026
aaacuuaaugcacauuaca

SEQ ID NO: 745028 - RNA, 19 nt, Artificial Sequence
  Description of Artificial Sequence: Synthetic oligonucleotide
  Sense strand starting at position 2811 of SEQ ID NO: 586797
ggaguuugagaaggcaaau

SEQ ID NO: 745029 - RNA, 19 nt, Artificial Sequence
  Description of Artificial Sequence: Synthetic oligonucleotide
  Antisense strand to SEQ ID NO: 745028
auuugccuucucaaacucc

SEQ ID NO: 745030 - RNA, 19 nt, Artificial Sequence
  Description of Artificial Sequence: Synthetic oligonucleotide
  Sense strand starting at position 2882 of SEQ ID NO: 586797
gcagauuauuacgugagga

SEQ ID NO: 745031 - RNA, 19 nt, Artificial Sequence
  Description of Artificial Sequence: Synthetic oligonucleotide
  Antisense strand to SEQ ID NO: 745030
uccucacguaauaaucugc

SEQ ID NO: 745032 - RNA, 19 nt, Artificial Sequence
  Description of Artificial Sequence: Synthetic oligonucleotide
  Sense strand starting at position 2951 of SEQ ID NO: 586797
uuuguugaaugccuauuaa

SEQ ID NO: 745033 - RNA, 19 nt, Artificial Sequence
  Description of Artificial Sequence: Synthetic oligonucleotide
  Antisense strand to SEQ ID NO: 745032
uuaauaggcauucaacaaa

SEQ ID NO: 745034 - RNA, 19 nt, Artificial Sequence
  Description of Artificial Sequence: Synthetic oligonucleotide
  Sense strand starting at position 3030 of SEQ ID NO: 586797
auuagagugcuaugaaugu

SEQ ID NO: 745035 - RNA, 19 nt, Artificial Sequence
  Description of Artificial Sequence: Synthetic oligonucleotide
  Antisense strand to SEQ ID NO: 745034
acauucauagcacucuaau

SEQ ID NO: 745036 - RNA, 19 nt, Artificial Sequence
  Description of Artificial Sequence: Synthetic oligonucleotide
  Sense strand starting at position 3055 of SEQ ID NO: 586797
ccagacaguucgguaucau

SEQ ID NO: 745037 - RNA, 19 nt, Artificial Sequence
  Description of Artificial Sequence: Synthetic oligonucleotide
  Antisense strand to SEQ ID NO: 745036
augauaccgaacugucugg

SEQ ID NO: 745038 - RNA, 19 nt, Artificial Sequence
  Description of Artificial Sequence: Synthetic oligonucleotide
  Sense strand starting at position 3056 of SEQ ID NO: 586797
cagacaguucgguaucaug

SEQ ID NO: 745039 - RNA, 19 nt, Artificial Sequence
  Description of Artificial Sequence: Synthetic oligonucleotide
  Antisense strand to SEQ ID NO: 745038
caugauaccgaacugucug

SEQ ID NO: 745040 - RNA, 19 nt, Artificial Sequence
  Description of Artificial Sequence: Synthetic oligonucleotide
  Sense strand starting at position 3438 of SEQ ID NO: 586797
ucuuguuuccuaugacacu

SEQ ID NO: 745041 - RNA, 19 nt, Artificial Sequence
  Description of Artificial Sequence: Synthetic oligonucleotide
  Antisense strand to SEQ ID NO: 745040
agugucauaggaaacaaga

SEQ ID NO: 745042 - RNA, 19 nt, Artificial Sequence
  Description of Artificial Sequence: Synthetic oligonucleotide
  Sense strand starting at position 3486 of SEQ ID NO: 586797
ugcucaguggugggagaaa

SEQ ID NO: 745043 - RNA, 19 nt, Artificial Sequence
  Description of Artificial Sequence: Synthetic oligonucleotide
  Antisense strand to SEQ ID NO: 745042
uuucucccaccacugagca

SEQ ID NO: 745044 - RNA, 19 nt, Artificial Sequence
  Description of Artificial Sequence: Synthetic oligonucleotide
  Sense strand starting at position 3633 of SEQ ID NO: 586797
aggguauagcuauagaagu

SEQ ID NO: 745045 - RNA, 19 nt, Artificial Sequence
  Description of Artificial Sequence: Synthetic oligonucleotide
  Antisense strand to SEQ ID NO: 745044
acuucuauagcuauacccu

SEQ ID NO: 745046 - RNA, 19 nt, Artificial Sequence
  Description of Artificial Sequence: Synthetic oligonucleotide
  Sense strand starting at position 3743 of SEQ ID NO: 586797
cacuguguugagggucaga

SEQ ID NO: 745047 - RNA, 19 nt, Artificial Sequence
  Description of Artificial Sequence: Synthetic oligonucleotide
  Antisense strand to SEQ ID NO: 745046
ucugacccucaacacagug

SEQ ID NO: 745048 - RNA, 19 nt, Artificial Sequence
  Description of Artificial Sequence: Synthetic oligonucleotide
  Sense strand starting at position 3831 of SEQ ID NO: 586797
uagagaggcugucugucaa

SEQ ID NO: 745049 - RNA, 19 nt, Artificial Sequence
  Description of Artificial Sequence: Synthetic oligonucleotide
  Antisense strand to SEQ ID NO: 745048
uugacagacagccucucua

SEQ ID NO: 745050 - RNA, 19 nt, Artificial Sequence
  Description of Artificial Sequence: Synthetic oligonucleotide
  Sense strand starting at position 8 of SEQ ID NO: 586798
aucacuuuguaaguuacaa

SEQ ID NO: 745051 - RNA, 19 nt, Artificial Sequence
  Description of Artificial Sequence: Synthetic oligonucleotide
  Antisense strand to SEQ ID NO: 745050
uuguaacuuacaaagugau

SEQ ID NO: 745052 - RNA, 19 nt, Artificial Sequence
  Description of Artificial Sequence: Synthetic oligonucleotide
  Sense strand starting at position 52 of SEQ ID NO: 586798
ucaugugaauugguuucua

SEQ ID NO: 745053 - RNA, 19 nt, Artificial Sequence
  Description of Artificial Sequence: Synthetic oligonucleotide
  Antisense strand to SEQ ID NO: 745052
uagaaaccaauucacauga

SEQ ID NO: 745054 - RNA, 19 nt, Artificial Sequence
  Description of Artificial Sequence: Synthetic oligonucleotide
  Sense strand starting at position 61 of SEQ ID NO: 586798
uugguuucuaggcauagga

SEQ ID NO: 745055 - RNA, 19 nt, Artificial Sequence
  Description of Artificial Sequence: Synthetic oligonucleotide
  Antisense strand to SEQ ID NO: 745054
uccuaugccuagaaaccaa

SEQ ID NO: 745056 - RNA, 19 nt, Artificial Sequence
  Description of Artificial Sequence: Synthetic oligonucleotide
  Sense strand starting at position 63 of SEQ ID NO: 586798
gguuucuaggcauaggauu

SEQ ID NO: 745057 - RNA, 19 nt, Artificial Sequence
  Description of Artificial Sequence: Synthetic oligonucleotide
  Antisense strand to SEQ ID NO: 745056
aauccuaugccuagaaacc

SEQ ID NO: 745058 - RNA, 19 nt, Artificial Sequence
  Description of Artificial Sequence: Synthetic oligonucleotide
  Sense strand starting at position 588 of SEQ ID NO: 586798
gugugucuaaaugauauau

SEQ ID NO: 745059 - RNA, 19 nt, Artificial Sequence
  Description of Artificial Sequence: Synthetic oligonucleotide
  Antisense strand to SEQ ID NO: 745058
auauaucauuuagacacac

SEQ ID NO: 745060 - RNA, 19 nt, Artificial Sequence
  Description of Artificial Sequence: Synthetic oligonucleotide
  Sense strand starting at position 674 of SEQ ID NO: 586798
gguuacuguuaaucgauaa

SEQ ID NO: 745061 - RNA, 19 nt, Artificial Sequence
  Description of Artificial Sequence: Synthetic oligonucleotide
  Antisense strand to SEQ ID NO: 745060
uuaucgauuaacaguaacc

SEQ ID NO: 745062 - RNA, 19 nt, Artificial Sequence
  Description of Artificial Sequence: Synthetic oligonucleotide
  Sense strand starting at position 773 of SEQ ID NO: 586798
auaggagaauuauugucuu

SEQ ID NO: 745063 - RNA, 19 nt, Artificial Sequence
  Description of Artificial Sequence: Synthetic oligonucleotide
  Antisense strand to SEQ ID NO: 745062
aagacaauaauucuccuau

SEQ ID NO: 745064 - RNA, 19 nt, Artificial Sequence
  Description of Artificial Sequence: Synthetic oligonucleotide
  Sense strand starting at position 776 of SEQ ID NO: 586798
ggagaauuauugucuucuc

SEQ ID NO: 745065 - RNA, 19 nt, Artificial Sequence
  Description of Artificial Sequence: Synthetic oligonucleotide
  Antisense strand to SEQ ID NO: 745064
gagaagacaauaauucucc

SEQ ID NO: 745066 - RNA, 19 nt, Artificial Sequence
  Description of Artificial Sequence: Synthetic oligonucleotide
  Sense strand starting at position 861 of SEQ ID NO: 586798
gcaggauucggucacacca

SEQ ID NO: 745067 - RNA, 19 nt, Artificial Sequence
  Description of Artificial Sequence: Synthetic oligonucleotide
  Antisense strand to SEQ ID NO: 745066
uggugugaccgaauccugc

SEQ ID NO: 745068 - RNA, 19 nt, Artificial Sequence
  Description of Artificial Sequence: Synthetic oligonucleotide
  Sense strand starting at position 1013 of SEQ ID NO: 586798
agauuacugcaacaaaugu

SEQ ID NO: 745069 - RNA, 19 nt, Artificial Sequence
  Description of Artificial Sequence: Synthetic oligonucleotide
  Antisense strand to SEQ ID NO: 745068
acauuuguugcaguaaucu

SEQ ID NO: 745070 - RNA, 19 nt, Artificial Sequence
  Description of Artificial Sequence: Synthetic oligonucleotide
  Sense strand starting at position 1021 of SEQ ID NO: 586798
gcaacaaauguguaaauau

SEQ ID NO: 745071 - RNA, 19 nt, Artificial Sequence
  Description of Artificial Sequence: Synthetic oligonucleotide
  Antisense strand to SEQ ID NO: 745070
auauuuacacauuuguugc

SEQ ID NO: 745072 - RNA, 19 nt, Artificial Sequence
  Description of Artificial Sequence: Synthetic oligonucleotide
  Sense strand starting at position 1110 of SEQ ID NO: 586798
agagauguacccuguggaa

SEQ ID NO: 745073 - RNA, 19 nt, Artificial Sequence
  Description of Artificial Sequence: Synthetic oligonucleotide
  Antisense strand to SEQ ID NO: 745072
uuccacaggguacaucucu

SEQ ID NO: 745074 - RNA, 19 nt, Artificial Sequence
  Description of Artificial Sequence: Synthetic oligonucleotide
  Sense strand starting at position 1202 of SEQ ID NO: 586798
aguacuaugcugugaagga

SEQ ID NO: 745075 - RNA, 19 nt, Artificial Sequence
  Description of Artificial Sequence: Synthetic oligonucleotide
  Antisense strand to SEQ ID NO: 745074
uccuucacagcauaguacu

SEQ ID NO: 745076 - RNA, 19 nt, Artificial Sequence
  Description of Artificial Sequence: Synthetic oligonucleotide
  Sense strand starting at position 1294 of SEQ ID NO: 586798
gaaagaagagugugcagau

SEQ ID NO: 745077 - RNA, 19 nt, Artificial Sequence
  Description of Artificial Sequence: Synthetic oligonucleotide
  Antisense strand to SEQ ID NO: 745076
aucugcacacucuucuuuc

SEQ ID NO: 745078 - RNA, 19 nt, Artificial Sequence
  Description of Artificial Sequence: Synthetic oligonucleotide
  Sense strand starting at position 1587 of SEQ ID NO: 586798
ggcuguagcgcgagaaaug

SEQ ID NO: 745079 - RNA, 19 nt, Artificial Sequence
  Description of Artificial Sequence: Synthetic oligonucleotide
  Antisense strand to SEQ ID NO: 745078
cauuucucgcgcuacagcc

SEQ ID NO: 745080 - RNA, 19 nt, Artificial Sequence
  Description of Artificial Sequence: Synthetic oligonucleotide
  Sense strand starting at position 1597 of SEQ ID NO: 586798
cgagaaaugcuccaccucu

SEQ ID NO: 745081 - RNA, 19 nt, Artificial Sequence
  Description of Artificial Sequence: Synthetic oligonucleotide
  Antisense strand to SEQ ID NO: 745080
agagguggagcauuucucg

SEQ ID NO: 745082 - RNA, 19 nt, Artificial Sequence
  Description of Artificial Sequence: Synthetic oligonucleotide
  Sense strand starting at position 1848 of SEQ ID NO: 586798
ugaagagucugggcagagu

SEQ ID NO: 745083 - RNA, 19 nt, Artificial Sequence
  Description of Artificial Sequence: Synthetic oligonucleotide
  Antisense strand to SEQ ID NO: 745082
acucugcccagacucuuca

SEQ ID NO: 745084 - RNA, 19 nt, Artificial Sequence
  Description of Artificial Sequence: Synthetic oligonucleotide
  Sense strand starting at position 1969 of SEQ ID NO: 586798
ggaggagucacuggaacuu

SEQ ID NO: 745085 - RNA, 19 nt, Artificial Sequence
  Description of Artificial Sequence: Synthetic oligonucleotide
  Antisense strand to SEQ ID NO: 745084
aaguuccagugacuccucc

SEQ ID NO: 745086 - RNA, 19 nt, Artificial Sequence
  Description of Artificial Sequence: Synthetic oligonucleotide
  Sense strand starting at position 2304 of SEQ ID NO: 586798
aacuguuuccaagaguuug

SEQ ID NO: 745087 - RNA, 19 nt, Artificial Sequence
  Description of Artificial Sequence: Synthetic oligonucleotide
  Antisense strand to SEQ ID NO: 745086
caaacucuuggaaacaguu

SEQ ID NO: 745088 - RNA, 19 nt, Artificial Sequence
  Description of Artificial Sequence: Synthetic oligonucleotide
  Sense strand starting at position 2702 of SEQ ID NO: 586798
cacucugcccuguacgaaa

SEQ ID NO: 745089 - RNA, 19 nt, Artificial Sequence
  Description of Artificial Sequence: Synthetic oligonucleotide
  Antisense strand to SEQ ID NO: 745088
uuucguacagggcagagug

SEQ ID NO: 745090 - RNA, 19 nt, Artificial Sequence
  Description of Artificial Sequence: Synthetic oligonucleotide
  Sense strand starting at position 2715 of SEQ ID NO: 586798
acgaaauguccuuacucca

SEQ ID NO: 745091 - RNA, 19 nt, Artificial Sequence
  Description of Artificial Sequence: Synthetic oligonucleotide
  Antisense strand to SEQ ID NO: 745090
uggaguaaggacauuucgu

SEQ ID NO: 745092 - RNA, 19 nt, Artificial Sequence
  Description of Artificial Sequence: Synthetic oligonucleotide
  Sense strand starting at position 2829 of SEQ ID NO: 586798
caaauaaggccuuggucuu

SEQ ID NO: 745093 - RNA, 19 nt, Artificial Sequence
  Description of Artificial Sequence: Synthetic oligonucleotide
  Antisense strand to SEQ ID NO: 745092
aagaccaaggccuuauuug

SEQ ID NO: 745094 - RNA, 19 nt, Artificial Sequence
  Description of Artificial Sequence: Synthetic oligonucleotide
  Sense strand starting at position 2852 of SEQ ID NO: 586798
gguacuauucuauagcuau

SEQ ID NO: 745095 - RNA, 19 nt, Artificial Sequence
  Description of Artificial Sequence: Synthetic oligonucleotide
  Antisense strand to SEQ ID NO: 745094
auagcuauagaauaguacc

SEQ ID NO: 745096 - RNA, 19 nt, Artificial Sequence
  Description of Artificial Sequence: Synthetic oligonucleotide
  Sense strand starting at position 2986 of SEQ ID NO: 586798
aauuaaugacagugguuga

SEQ ID NO: 745097 - RNA, 19 nt, Artificial Sequence
  Description of Artificial Sequence: Synthetic oligonucleotide
  Antisense strand to SEQ ID NO: 745096
ucaaccacugucauuaauu

SEQ ID NO: 745098 - RNA, 19 nt, Artificial Sequence
  Description of Artificial Sequence: Synthetic oligonucleotide
  Sense strand starting at position 2990 of SEQ ID NO: 586798
aaugacagugguugagaca

SEQ ID NO: 745099 - RNA, 19 nt, Artificial Sequence
  Description of Artificial Sequence: Synthetic oligonucleotide
  Antisense strand to SEQ ID NO: 745098
ugucucaaccacugucauu

SEQ ID NO: 745100 - RNA, 19 nt, Artificial Sequence
  Description of Artificial Sequence: Synthetic oligonucleotide
  Sense strand starting at position 3095 of SEQ ID NO: 586798
gaguaagagaguugguuac

SEQ ID NO: 745101 - RNA, 19 nt, Artificial Sequence
  Description of Artificial Sequence: Synthetic oligonucleotide
  Antisense strand to SEQ ID NO: 745100
guaaccaacucucuuacuc

SEQ ID NO: 745102 - RNA, 19 nt, Artificial Sequence
  Description of Artificial Sequence: Synthetic oligonucleotide
  Sense strand starting at position 3097 of SEQ ID NO: 586798
guaagagaguugguuacaa

SEQ ID NO: 745103 - RNA, 19 nt, Artificial Sequence
  Description of Artificial Sequence: Synthetic oligonucleotide
  Antisense strand to SEQ ID NO: 745102
uuguaaccaacucucuuac

SEQ ID NO: 745104 - RNA, 19 nt, Artificial Sequence
  Description of Artificial Sequence: Synthetic oligonucleotide
  Sense strand starting at position 3118 of SEQ ID NO: 586798
guaauagaaugggaauuua

SEQ ID NO: 745105 - RNA, 19 nt, Artificial Sequence
  Description of Artificial Sequence: Synthetic oligonucleotide
  Antisense strand to SEQ ID NO: 745104
uaaauucccauucuauuac

SEQ ID NO: 745106 - RNA, 19 nt, Artificial Sequence
  Description of Artificial Sequence: Synthetic oligonucleotide
  Sense strand starting at position 3126 of SEQ ID NO: 586798
augggaauuuaugaggugu

SEQ ID NO: 745107 - RNA, 19 nt, Artificial Sequence
  Description of Artificial Sequence: Synthetic oligonucleotide
  Antisense strand to SEQ ID NO: 745106
acaccucauaaauucccau

SEQ ID NO: 745108 - RNA, 19 nt, Artificial Sequence
  Description of Artificial Sequence: Synthetic oligonucleotide
  Sense strand starting at position 3550 of SEQ ID NO: 586798
gaaagucaugagugauccu

SEQ ID NO: 745109 - RNA, 19 nt, Artificial Sequence
  Description of Artificial Sequence: Synthetic oligonucleotide
  Antisense strand to SEQ ID NO: 745108
aggaucacucaugacuuuc

SEQ ID NO: 745110 - RNA, 19 nt, Artificial Sequence
  Description of Artificial Sequence: Synthetic oligonucleotide
  Sense strand starting at position 3665 of SEQ ID NO: 586798
agagccagauucuccuauu

SEQ ID NO: 745111 - RNA, 19 nt, Artificial Sequence
  Description of Artificial Sequence: Synthetic oligonucleotide
  Antisense strand to SEQ ID NO: 745110
aauaggagaaucuggcucu

SEQ ID NO: 745112 - RNA, 19 nt, Artificial Sequence
  Description of Artificial Sequence: Synthetic oligonucleotide
  Sense strand starting at position 3710 of SEQ ID NO: 586798
ggaugucuaauagguauca

SEQ ID NO: 745113 - RNA, 19 nt, Artificial Sequence
  Description of Artificial Sequence: Synthetic oligonucleotide
  Antisense strand to SEQ ID NO: 745112
ugauaccuauuagacaucc

SEQ ID NO: 745114 - RNA, 19 nt, Artificial Sequence
  Description of Artificial Sequence: Synthetic oligonucleotide
  Sense strand starting at position 3711 of SEQ ID NO: 586798
gaugucuaauagguaucaa

SEQ ID NO: 745115 - RNA, 19 nt, Artificial Sequence
  Description of Artificial Sequence: Synthetic oligonucleotide
  Antisense strand to SEQ ID NO: 745114
uugauaccuauuagacauc

SEQ ID NO: 745116 - RNA, 19 nt, Artificial Sequence
  Description of Artificial Sequence: Synthetic oligonucleotide
  Sense strand starting at position 3791 of SEQ ID NO: 586798
gucaguuauguggccuguu

SEQ ID NO: 745117 - RNA, 19 nt, Artificial Sequence
  Description of Artificial Sequence: Synthetic oligonucleotide
  Antisense strand to SEQ ID NO: 745116
aacaggccacauaacugac

SEQ ID NO: 745118 - RNA, 19 nt, Artificial Sequence
  Description of Artificial Sequence: Synthetic oligonucleotide
  Sense strand starting at position 3860 of SEQ ID NO: 586798
accuauagauggucgagaa

SEQ ID NO: 745119 - RNA, 19 nt, Artificial Sequence
  Description of Artificial Sequence: Synthetic oligonucleotide
  Antisense strand to SEQ ID NO: 745118
uucucgaccaucuauaggu

SEQ ID NO: 745120 - RNA, 19 nt, Artificial Sequence
  Description of Artificial Sequence: Synthetic oligonucleotide
  Sense strand starting at position 3861 of SEQ ID NO: 586798
ccuauagauggucgagaau

SEQ ID NO: 745121 - RNA, 19 nt, Artificial Sequence
  Description of Artificial Sequence: Synthetic oligonucleotide
  Antisense strand to SEQ ID NO: 745120
auucucgaccaucuauagg

SEQ ID NO: 745122 - RNA, 19 nt, Artificial Sequence
  Description of Artificial Sequence: Synthetic oligonucleotide
  Sense strand starting at position 3870 of SEQ ID NO: 586798
ggucgagaauuugagacuu

SEQ ID NO: 745123 - RNA, 19 nt, Artificial Sequence
  Description of Artificial Sequence: Synthetic oligonucleotide
  Antisense strand to SEQ ID NO: 745122
aagucucaaauucucgacc

SEQ ID NO: 745124 - RNA, 19 nt, Artificial Sequence
  Description of Artificial Sequence: Synthetic oligonucleotide
  Sense strand starting at position 3922 of SEQ ID NO: 586798
gagaaacagcuaugugaag

SEQ ID NO: 745125 - RNA, 19 nt, Artificial Sequence
  Description of Artificial Sequence: Synthetic oligonucleotide
  Antisense strand to SEQ ID NO: 745124
cuucacauagcuguuucuc

SEQ ID NO: 745126 - RNA, 19 nt, Artificial Sequence
  Description of Artificial Sequence: Synthetic oligonucleotide
  Sense strand starting at position 3923 of SEQ ID NO: 586798
agaaacagcuaugugaaga

SEQ ID NO: 745127 - RNA, 19 nt, Artificial Sequence
  Description of Artificial Sequence: Synthetic oligonucleotide
  Antisense strand to SEQ ID NO: 745126
ucuucacauagcuguuucu

SEQ ID NO: 745128 - RNA, 19 nt, Artificial Sequence
  Description of Artificial Sequence: Synthetic oligonucleotide
  Sense strand starting at position 3977 of SEQ ID NO: 586798
gggccuggguucuuagaga

SEQ ID NO: 745129 - RNA, 19 nt, Artificial Sequence
  Description of Artificial Sequence: Synthetic oligonucleotide
  Antisense strand to SEQ ID NO: 745128
ucucuaagaacccaggccc

SEQ ID NO: 745130 - RNA, 19 nt, Artificial Sequence
  Description of Artificial Sequence: Synthetic oligonucleotide
  Sense strand starting at position 98 of SEQ ID NO: 586799
ggcaguucaccucagagga

SEQ ID NO: 745131 - RNA, 19 nt, Artificial Sequence
  Description of Artificial Sequence: Synthetic oligonucleotide
  Antisense strand to SEQ ID NO: 745130
uccucugaggugaacugcc

SEQ ID NO: 745132 - RNA, 19 nt, Artificial Sequence
  Description of Artificial Sequence: Synthetic oligonucleotide
  Sense strand starting at position 954 of SEQ ID NO: 586799
gaggaauuguacuccgcag

SEQ ID NO: 745133 - RNA, 19 nt, Artificial Sequence
  Description of Artificial Sequence: Synthetic oligonucleotide
  Antisense strand to SEQ ID NO: 745132
cugcggaguacaauuccuc

SEQ ID NO: 745134 - RNA, 19 nt, Artificial Sequence
  Description of Artificial Sequence: Synthetic oligonucleotide
  Sense strand starting at position 1053 of SEQ ID NO: 586799
agugcaucuuaggugugaa

SEQ ID NO: 745135 - RNA, 19 nt, Artificial Sequence
  Description of Artificial Sequence: Synthetic oligonucleotide
  Antisense strand to SEQ ID NO: 745134
uucacaccuaagaugcacu

SEQ ID NO: 745136 - RNA, 19 nt, Artificial Sequence
  Description of Artificial Sequence: Synthetic oligonucleotide
  Sense strand starting at position 1054 of SEQ ID NO: 586799
gugcaucuuaggugugaau

SEQ ID NO: 745137 - RNA, 19 nt, Artificial Sequence
  Description of Artificial Sequence: Synthetic oligonucleotide
  Antisense strand to SEQ ID NO: 745136
auucacaccuaagaugcac

SEQ ID NO: 745138 - RNA, 19 nt, Artificial Sequence
  Description of Artificial Sequence: Synthetic oligonucleotide
  Sense strand starting at position 1056 of SEQ ID NO: 586799
gcaucuuaggugugaauug

SEQ ID NO: 745139 - RNA, 19 nt, Artificial Sequence
  Description of Artificial Sequence: Synthetic oligonucleotide
  Antisense strand to SEQ ID NO: 745138
caauucacaccuaagaugc

SEQ ID NO: 745140 - RNA, 19 nt, Artificial Sequence
  Description of Artificial Sequence: Synthetic oligonucleotide
  Sense strand starting at position 1068 of SEQ ID NO: 586799
ugaauuguuccgcagcuca

SEQ ID NO: 745141 - RNA, 19 nt, Artificial Sequence
  Description of Artificial Sequence: Synthetic oligonucleotide
  Antisense strand to SEQ ID NO: 745140
ugagcugcggaacaauuca

SEQ ID NO: 745142 - RNA, 19 nt, Artificial Sequence
  Description of Artificial Sequence: Synthetic oligonucleotide
  Sense strand starting at position 1255 of SEQ ID NO: 586799
cuccucguucuggauugua

SEQ ID NO: 745143 - RNA, 19 nt, Artificial Sequence
  Description of Artificial Sequence: Synthetic oligonucleotide
  Antisense strand to SEQ ID NO: 745142
uacaauccagaacgaggag

SEQ ID NO: 745144 - RNA, 19 nt, Artificial Sequence
  Description of Artificial Sequence: Synthetic oligonucleotide
  Sense strand starting at position 1323 of SEQ ID NO: 586799
caguuuauagcgcaaugaa

SEQ ID NO: 745145 - RNA, 19 nt, Artificial Sequence
  Description of Artificial Sequence: Synthetic oligonucleotide
  Antisense strand to SEQ ID NO: 745144
uucauugcgcuauaaacug

SEQ ID NO: 745146 - RNA, 19 nt, Artificial Sequence
  Description of Artificial Sequence: Synthetic oligonucleotide
  Sense strand starting at position 1374 of SEQ ID NO: 586799
cgcgugaagcgugcuugua

SEQ ID NO: 745147 - RNA, 19 nt, Artificial Sequence
  Description of Artificial Sequence: Synthetic oligonucleotide
  Antisense strand to SEQ ID NO: 745146
uacaagcacgcuucacgcg

SEQ ID NO: 745148 - RNA, 19 nt, Artificial Sequence
  Description of Artificial Sequence: Synthetic oligonucleotide
  Sense strand starting at position 1421 of SEQ ID NO: 586799
auuugaagcgcuuaucugu

SEQ ID NO: 745149 - RNA, 19 nt, Artificial Sequence
  Description of Artificial Sequence: Synthetic oligonucleotide
  Antisense strand to SEQ ID NO: 745148
acagauaagcgcuucaaau

SEQ ID NO: 745150 - RNA, 19 nt, Artificial Sequence
  Description of Artificial Sequence: Synthetic oligonucleotide
  Sense strand starting at position 1427 of SEQ ID NO: 586799
agcgcuuaucuguuuguaa

SEQ ID NO: 745151 - RNA, 19 nt, Artificial Sequence
  Description of Artificial Sequence: Synthetic oligonucleotide
  Antisense strand to SEQ ID NO: 745150
uuacaaacagauaagcgcu

SEQ ID NO: 745152 - RNA, 19 nt, Artificial Sequence
  Description of Artificial Sequence: Synthetic oligonucleotide
  Sense strand starting at position 1621 of SEQ ID NO: 586799
cagugaaggcgugacaagu

SEQ ID NO: 745153 - RNA, 19 nt, Artificial Sequence
  Description of Artificial Sequence: Synthetic oligonucleotide
  Antisense strand to SEQ ID NO: 745152
acuugucacgccuucacug

SEQ ID NO: 745154 - RNA, 19 nt, Artificial Sequence
  Description of Artificial Sequence: Synthetic oligonucleotide
  Sense strand starting at position 1697 of SEQ ID NO: 586799
gggaaugaacgugaucuuu

SEQ ID NO: 745155 - RNA, 19 nt, Artificial Sequence
  Description of Artificial Sequence: Synthetic oligonucleotide
  Antisense strand to SEQ ID NO: 745154
aaagaucacguucauuccc

SEQ ID NO: 745156 - RNA, 19 nt, Artificial Sequence
  Description of Artificial Sequence: Synthetic oligonucleotide
  Sense strand starting at position 1699 of SEQ ID NO: 586799
gaaugaacgugaucuuuaa

SEQ ID NO: 745157 - RNA, 19 nt, Artificial Sequence
  Description of Artificial Sequence: Synthetic oligonucleotide
  Antisense strand to SEQ ID NO: 745156
uuaaagaucacguucauuc

SEQ ID NO: 745158 - RNA, 19 nt, Artificial Sequence
  Description of Artificial Sequence: Synthetic oligonucleotide
  Sense strand starting at position 2656 of SEQ ID NO: 586799
ucccgaucccuguagcaaa

SEQ ID NO: 745159 - RNA, 19 nt, Artificial Sequence
  Description of Artificial Sequence: Synthetic oligonucleotide
  Antisense strand to SEQ ID NO: 745158
uuugcuacagggaucggga

SEQ ID NO: 745160 - RNA, 19 nt, Artificial Sequence
  Description of Artificial Sequence: Synthetic oligonucleotide
  Sense strand starting at position 2872 of SEQ ID NO: 586799
ugcauuucucggugacgga

SEQ ID NO: 745161 - RNA, 19 nt, Artificial Sequence
  Description of Artificial Sequence: Synthetic oligonucleotide
  Antisense strand to SEQ ID NO: 745160
uccgucaccgagaaaugca

SEQ ID NO: 745162 - RNA, 19 nt, Artificial Sequence
  Description of Artificial Sequence: Synthetic oligonucleotide
  Sense strand starting at position 2933 of SEQ ID NO: 586799
caugaaaugcugggagcua

SEQ ID NO: 745163 - RNA, 19 nt, Artificial Sequence
  Description of Artificial Sequence: Synthetic oligonucleotide
  Antisense strand to SEQ ID NO: 745162
uagcucccagcauuucaug

SEQ ID NO: 745164 - RNA, 19 nt, Artificial Sequence
  Description of Artificial Sequence: Synthetic oligonucleotide
  Sense strand starting at position 3066 of SEQ ID NO: 586799
guguuuggcgggcuuugaa

SEQ ID NO: 745165 - RNA, 19 nt, Artificial Sequence
  Description of Artificial Sequence: Synthetic oligonucleotide
  Antisense strand to SEQ ID NO: 745164
uucaaagcccgccaaacac

SEQ ID NO: 745166 - RNA, 19 nt, Artificial Sequence
  Description of Artificial Sequence: Synthetic oligonucleotide
  Sense strand starting at position 3108 of SEQ ID NO: 586799
uggcgauuacgagguuuac

SEQ ID NO: 745167 - RNA, 19 nt, Artificial Sequence
  Description of Artificial Sequence: Synthetic oligonucleotide
  Antisense strand to SEQ ID NO: 745166
guaaaccucguaaucgcca

SEQ ID NO: 745168 - RNA, 19 nt, Artificial Sequence
  Description of Artificial Sequence: Synthetic oligonucleotide
  Sense strand starting at position 3163 of SEQ ID NO: 586799
cuaaaucuuguagggugaa

SEQ ID NO: 745169 - RNA, 19 nt, Artificial Sequence
  Description of Artificial Sequence: Synthetic oligonucleotide
  Antisense strand to SEQ ID NO: 745168
uucacccuacaagauuuag

SEQ ID NO: 745170 - RNA, 19 nt, Artificial Sequence
  Description of Artificial Sequence: Synthetic oligonucleotide
  Sense strand starting at position 3166 of SEQ ID NO: 586799
aaucuuguagggugaauga

SEQ ID NO: 745171 - RNA, 19 nt, Artificial Sequence
  Description of Artificial Sequence: Synthetic oligonucleotide
  Antisense strand to SEQ ID NO: 745170
ucauucacccuacaagauu

SEQ ID NO: 745172 - RNA, 19 nt, Artificial Sequence
  Description of Artificial Sequence: Synthetic oligonucleotide
  Sense strand starting at position 3176 of SEQ ID NO: 586799
ggugaaugaaugcguuuag

SEQ ID NO: 745173 - RNA, 19 nt, Artificial Sequence
  Description of Artificial Sequence: Synthetic oligonucleotide
  Antisense strand to SEQ ID NO: 745172
cuaaacgcauucauucacc

SEQ ID NO: 745174 - RNA, 19 nt, Artificial Sequence
  Description of Artificial Sequence: Synthetic oligonucleotide
  Sense strand starting at position 3198 of SEQ ID NO: 586799
cggcaaccgcacguuuaau

SEQ ID NO: 745175 - RNA, 19 nt, Artificial Sequence
  Description of Artificial Sequence: Synthetic oligonucleotide
  Antisense strand to SEQ ID NO: 745174
auuaaacgugcgguugccg

SEQ ID NO: 745176 - RNA, 19 nt, Artificial Sequence
  Description of Artificial Sequence: Synthetic oligonucleotide
  Sense strand starting at position 3231 of SEQ ID NO: 586799
ugccgagauucggccacaa

SEQ ID NO: 745177 - RNA, 19 nt, Artificial Sequence
  Description of Artificial Sequence: Synthetic oligonucleotide
  Antisense strand to SEQ ID NO: 745176
uuguggccgaaucucggca

SEQ ID NO: 745178 - RNA, 19 nt, Artificial Sequence
  Description of Artificial Sequence: Synthetic oligonucleotide
  Sense strand starting at position 3233 of SEQ ID NO: 586799
ccgagauucggccacaaau

SEQ ID NO: 745179 - RNA, 19 nt, Artificial Sequence
  Description of Artificial Sequence: Synthetic oligonucleotide
  Antisense strand to SEQ ID NO: 745178
auuuguggccgaaucucgg

SEQ ID NO: 745180 - RNA, 19 nt, Artificial Sequence
  Description of Artificial Sequence: Synthetic oligonucleotide
  Sense strand starting at position 3235 of SEQ ID NO: 586799
gagauucggccacaaauau

SEQ ID NO: 745181 - RNA, 19 nt, Artificial Sequence
  Description of Artificial Sequence: Synthetic oligonucleotide
  Antisense strand to SEQ ID NO: 745180
auauuuguggccgaaucuc

SEQ ID NO: 745182 - RNA, 19 nt, Artificial Sequence
  Description of Artificial Sequence: Synthetic oligonucleotide
  Sense strand starting at position 3246 of SEQ ID NO: 586799
acaaauauuugcgugcauu

SEQ ID NO: 745183 - RNA, 19 nt, Artificial Sequence
  Description of Artificial Sequence: Synthetic oligonucleotide
  Antisense strand to SEQ ID NO: 745182
aaugcacgcaaauauuugu

SEQ ID NO: 745184 - RNA, 19 nt, Artificial Sequence
  Description of Artificial Sequence: Synthetic oligonucleotide
  Sense strand starting at position 3300 of SEQ ID NO: 586799
auugcaguggcugauaaga

SEQ ID NO: 745185 - RNA, 19 nt, Artificial Sequence
  Description of Artificial Sequence: Synthetic oligonucleotide
  Antisense strand to SEQ ID NO: 745184
ucuuaucagccacugcaau

SEQ ID NO: 745186 - RNA, 19 nt, Artificial Sequence
  Description of Artificial Sequence: Synthetic oligonucleotide
  Sense strand starting at position 3386 of SEQ ID NO: 586799
gugucaggugcuugggaaa

SEQ ID NO: 745187 - RNA, 19 nt, Artificial Sequence
  Description of Artificial Sequence: Synthetic oligonucleotide
  Antisense strand to SEQ ID NO: 745186
uuucccaagcaccugacac

SEQ ID NO: 745188 - RNA, 19 nt, Artificial Sequence
  Description of Artificial Sequence: Synthetic oligonucleotide
  Sense strand starting at position 3411 of SEQ ID NO: 586799
aucuguugaugaucuuagu

SEQ ID NO: 745189 - RNA, 19 nt, Artificial Sequence
  Description of Artificial Sequence: Synthetic oligonucleotide
  Antisense strand to SEQ ID NO: 745188
acuaagaucaucaacagau

SEQ ID NO: 745190 - RNA, 19 nt, Artificial Sequence
  Description of Artificial Sequence: Synthetic oligonucleotide
  Sense strand starting at position 3457 of SEQ ID NO: 586799
ccaaauugucuacagcuga

SEQ ID NO: 745191 - RNA, 19 nt, Artificial Sequence
  Description of Artificial Sequence: Synthetic oligonucleotide
  Antisense strand to SEQ ID NO: 745190
ucagcuguagacaauuugg

SEQ ID NO: 745192 - RNA, 19 nt, Artificial Sequence
  Description of Artificial Sequence: Synthetic oligonucleotide
  Sense strand starting at position 3473 of SEQ ID NO: 586799
ugaguuagguuucugaaac

SEQ ID NO: 745193 - RNA, 19 nt, Artificial Sequence
  Description of Artificial Sequence: Synthetic oligonucleotide
  Antisense strand to SEQ ID NO: 745192
guuucagaaaccuaacuca

SEQ ID NO: 745194 - RNA, 19 nt, Artificial Sequence
  Description of Artificial Sequence: Synthetic oligonucleotide
  Sense strand starting at position 3540 of SEQ ID NO: 586799
guaacauugcuacggauua

SEQ ID NO: 745195 - RNA, 19 nt, Artificial Sequence
  Description of Artificial Sequence: Synthetic oligonucleotide
  Antisense strand to SEQ ID NO: 745194
uaauccguagcaauguuac

SEQ ID NO: 745196 - RNA, 19 nt, Artificial Sequence
  Description of Artificial Sequence: Synthetic oligonucleotide
  Sense strand starting at position 3628 of SEQ ID NO: 586799
aagagagccuuucuaggaa

SEQ ID NO: 745197 - RNA, 19 nt, Artificial Sequence
  Description of Artificial Sequence: Synthetic oligonucleotide
  Antisense strand to SEQ ID NO: 745196
uuccuagaaaggcucucuu

SEQ ID NO: 745198 - RNA, 19 nt, Artificial Sequence
  Description of Artificial Sequence: Synthetic oligonucleotide
  Sense strand starting at position 3631 of SEQ ID NO: 586799
agagccuuucuaggaauaa

SEQ ID NO: 745199 - RNA, 19 nt, Artificial Sequence
  Description of Artificial Sequence: Synthetic oligonucleotide
  Antisense strand to SEQ ID NO: 745198
uuauuccuagaaaggcucu

SEQ ID NO: 745200 - RNA, 19 nt, Artificial Sequence
  Description of Artificial Sequence: Synthetic oligonucleotide
  Sense strand starting at position 3822 of SEQ ID NO: 586799
ccucuucugcaagauagaa

SEQ ID NO: 745201 - RNA, 19 nt, Artificial Sequence
  Description of Artificial Sequence: Synthetic oligonucleotide
  Antisense strand to SEQ ID NO: 745200
uucuaucuugcagaagagg

SEQ ID NO: 745202 - RNA, 19 nt, Artificial Sequence
  Description of Artificial Sequence: Synthetic oligonucleotide
  Sense strand starting at position 3835 of SEQ ID NO: 586799
auagaauaauuccaggauu

SEQ ID NO: 745203 - RNA, 19 nt, Artificial Sequence
  Description of Artificial Sequence: Synthetic oligonucleotide
  Antisense strand to SEQ ID NO: 745202
aauccuggaauuauucuau

SEQ ID NO: 745204 - RNA, 19 nt, Artificial Sequence
  Description of Artificial Sequence: Synthetic oligonucleotide
  Sense strand starting at position 3852 of SEQ ID NO: 586799
uuucuuaugcuugguagag

SEQ ID NO: 745205 - RNA, 19 nt, Artificial Sequence
  Description of Artificial Sequence: Synthetic oligonucleotide
  Antisense strand to SEQ ID NO: 745204
cucuaccaagcauaagaaa

SEQ ID NO: 745206 - RNA, 19 nt, Artificial Sequence
  Description of Artificial Sequence: Synthetic oligonucleotide
  Sense strand starting at position 3853 of SEQ ID NO: 586799
uucuuaugcuugguagagu

SEQ ID NO: 745207 - RNA, 19 nt, Artificial Sequence
  Description of Artificial Sequence: Synthetic oligonucleotide
  Antisense strand to SEQ ID NO: 745206
acucuaccaagcauaagaa

SEQ ID NO: 745208 - RNA, 19 nt, Artificial Sequence
  Description of Artificial Sequence: Synthetic oligonucleotide
  Sense strand starting at position 3890 of SEQ ID NO: 586799
gucaaauucuuaccaguuu

SEQ ID NO: 745209 - RNA, 19 nt, Artificial Sequence
  Description of Artificial Sequence: Synthetic oligonucleotide
  Antisense strand to SEQ ID NO: 745208
aaacugguaagaauuugac

SEQ ID NO: 745210 - RNA, 19 nt, Artificial Sequence
  Description of Artificial Sequence: Synthetic oligonucleotide
  Sense strand starting at position 289 of SEQ ID NO: 586800
acuggaagauuugauccaa

SEQ ID NO: 745211 - RNA, 19 nt, Artificial Sequence
  Description of Artificial Sequence: Synthetic oligonucleotide
  Antisense strand to SEQ ID NO: 745210
uuggaucaaaucuuccagu

SEQ ID NO: 745212 - RNA, 19 nt, Artificial Sequence
  Description of Artificial Sequence: Synthetic oligonucleotide
  Sense strand starting at position 304 of SEQ ID NO: 586800
ccaaacugucaacauuagu

SEQ ID NO: 745213 - RNA, 19 nt, Artificial Sequence
  Description of Artificial Sequence: Synthetic oligonucleotide
  Antisense strand to SEQ ID NO: 745212
acuaauguugacaguuugg

SEQ ID NO: 745214 - RNA, 19 nt, Artificial Sequence
  Description of Artificial Sequence: Synthetic oligonucleotide
  Sense strand starting at position 326 of SEQ ID NO: 586800
cucuaaguucugggauuau

SEQ ID NO: 745215 - RNA, 19 nt, Artificial Sequence
  Description of Artificial Sequence: Synthetic oligonucleotide
  Antisense strand to SEQ ID NO: 745214
auaaucccagaacuuagag

SEQ ID NO: 745216 - RNA, 19 nt, Artificial Sequence
  Description of Artificial Sequence: Synthetic oligonucleotide
  Sense strand starting at position 335 of SEQ ID NO: 586800
cugggauuauggguaacuu

SEQ ID NO: 745217 - RNA, 19 nt, Artificial Sequence
  Description of Artificial Sequence: Synthetic oligonucleotide
  Antisense strand to SEQ ID NO: 745216
aaguuacccauaaucccag

SEQ ID NO: 745218 - RNA, 19 nt, Artificial Sequence
  Description of Artificial Sequence: Synthetic oligonucleotide
  Sense strand starting at position 659 of SEQ ID NO: 586800
cagugaugaauguaaggua

SEQ ID NO: 745219 - RNA, 19 nt, Artificial Sequence
  Description of Artificial Sequence: Synthetic oligonucleotide
  Antisense strand to SEQ ID NO: 745218
uaccuuacauucaucacug

SEQ ID NO: 745220 - RNA, 19 nt, Artificial Sequence
  Description of Artificial Sequence: Synthetic oligonucleotide
  Sense strand starting at position 697 of SEQ ID NO: 586800
aaauuagaguuacuguaag

SEQ ID NO: 745221 - RNA, 19 nt, Artificial Sequence
  Description of Artificial Sequence: Synthetic oligonucleotide
  Antisense strand to SEQ ID NO: 745220
cuuacaguaacucuaauuu

SEQ ID NO: 745222 - RNA, 19 nt, Artificial Sequence
  Description of Artificial Sequence: Synthetic oligonucleotide
  Sense strand starting at position 819 of SEQ ID NO: 586800
acugauuugucucuagcca

SEQ ID NO: 745223 - RNA, 19 nt, Artificial Sequence
  Description of Artificial Sequence: Synthetic oligonucleotide
  Antisense strand to SEQ ID NO: 745222
uggcuagagacaaaucagu

SEQ ID NO: 745224 - RNA, 19 nt, Artificial Sequence
  Description of Artificial Sequence: Synthetic oligonucleotide
  Sense strand starting at position 861 of SEQ ID NO: 586800
auugucuacuuagugguaa

SEQ ID NO: 745225 - RNA, 19 nt, Artificial Sequence
  Description of Artificial Sequence: Synthetic oligonucleotide
  Antisense strand to SEQ ID NO: 745224
uuaccacuaaguagacaau

SEQ ID NO: 745226 - RNA, 19 nt, Artificial Sequence
  Description of Artificial Sequence: Synthetic oligonucleotide
  Sense strand starting at position 1112 of SEQ ID NO: 586800
gagaccaugugccucuauu

SEQ ID NO: 745227 - RNA, 19 nt, Artificial Sequence
  Description of Artificial Sequence: Synthetic oligonucleotide
  Antisense strand to SEQ ID NO: 745226
aauagaggcacauggucuc

SEQ ID NO: 745228 - RNA, 19 nt, Artificial Sequence
  Description of Artificial Sequence: Synthetic oligonucleotide
  Sense strand starting at position 1166 of SEQ ID NO: 586800
agugguuagaacugugaaa

SEQ ID NO: 745229 - RNA, 19 nt, Artificial Sequence
  Description of Artificial Sequence: Synthetic oligonucleotide
  Antisense strand to SEQ ID NO: 745228
uuucacaguucuaaccacu

SEQ ID NO: 745230 - RNA, 19 nt, Artificial Sequence
  Description of Artificial Sequence: Synthetic oligonucleotide
  Sense strand starting at position 1168 of SEQ ID NO: 586800
ugguuagaacugugaaaca

SEQ ID NO: 745231 - RNA, 19 nt, Artificial Sequence
  Description of Artificial Sequence: Synthetic oligonucleotide
  Antisense strand to SEQ ID NO: 745230
uguuucacaguucuaacca

SEQ ID NO: 745232 - RNA, 19 nt, Artificial Sequence
  Description of Artificial Sequence: Synthetic oligonucleotide
  Sense strand starting at position 1230 of SEQ ID NO: 586800
aagugaucuuaacuacguu

SEQ ID NO: 745233 - RNA, 19 nt, Artificial Sequence
  Description of Artificial Sequence: Synthetic oligonucleotide
  Antisense strand to SEQ ID NO: 745232
aacguaguuaagaucacuu

SEQ ID NO: 745234 - RNA, 19 nt, Artificial Sequence
  Description of Artificial Sequence: Synthetic oligonucleotide
  Sense strand starting at position 1296 of SEQ ID NO: 586800
gcagaaccaucauuguauu

SEQ ID NO: 745235 - RNA, 19 nt, Artificial Sequence
  Description of Artificial Sequence: Synthetic oligonucleotide
  Antisense strand to SEQ ID NO: 745234
aauacaaugaugguucugc

SEQ ID NO: 745236 - RNA, 19 nt, Artificial Sequence
  Description of Artificial Sequence: Synthetic oligonucleotide
  Sense strand starting at position 1529 of SEQ ID NO: 586800
agaauauuaggacguuucu

SEQ ID NO: 745237 - RNA, 19 nt, Artificial Sequence
  Description of Artificial Sequence: Synthetic oligonucleotide
  Antisense strand to SEQ ID NO: 745236
agaaacguccuaauauucu

SEQ ID NO: 745238 - RNA, 19 nt, Artificial Sequence
  Description of Artificial Sequence: Synthetic oligonucleotide
  Sense strand starting at position 2119 of SEQ ID NO: 586800
gcggcaccucguucaucaa

SEQ ID NO: 745239 - RNA, 19 nt, Artificial Sequence
  Description of Artificial Sequence: Synthetic oligonucleotide
  Antisense strand to SEQ ID NO: 745238
uugaugaacgaggugccgc

SEQ ID NO: 745240 - RNA, 19 nt, Artificial Sequence
  Description of Artificial Sequence: Synthetic oligonucleotide
  Sense strand starting at position 2437 of SEQ ID NO: 586800
gugagugcuagcgccauau

SEQ ID NO: 745241 - RNA, 19 nt, Artificial Sequence
  Description of Artificial Sequence: Synthetic oligonucleotide
  Antisense strand to SEQ ID NO: 745240
auauggcgcuagcacucac

SEQ ID NO: 745242 - RNA, 19 nt, Artificial Sequence
  Description of Artificial Sequence: Synthetic oligonucleotide
  Sense strand starting at position 2483 of SEQ ID NO: 586800
caaggcuuccgucagaucu

SEQ ID NO: 745243 - RNA, 19 nt, Artificial Sequence
  Description of Artificial Sequence: Synthetic oligonucleotide
  Antisense strand to SEQ ID NO: 745242
agaucugacggaagccuug

SEQ ID NO: 745244 - RNA, 19 nt, Artificial Sequence
  Description of Artificial Sequence: Synthetic oligonucleotide
  Sense strand starting at position 2507 of SEQ ID NO: 586800
ucguuagagcuggcgugaa

SEQ ID NO: 745245 - RNA, 19 nt, Artificial Sequence
  Description of Artificial Sequence: Synthetic oligonucleotide
  Antisense strand to SEQ ID NO: 745244
uucacgccagcucuaacga

SEQ ID NO: 745246 - RNA, 19 nt, Artificial Sequence
  Description of Artificial Sequence: Synthetic oligonucleotide
  Sense strand starting at position 2522 of SEQ ID NO: 586800
ugaagaacccucggucagu

SEQ ID NO: 745247 - RNA, 19 nt, Artificial Sequence
  Description of Artificial Sequence: Synthetic oligonucleotide
  Antisense strand to SEQ ID NO: 745246
acugaccgaggguucuuca

SEQ ID NO: 745248 - RNA, 19 nt, Artificial Sequence
  Description of Artificial Sequence: Synthetic oligonucleotide
  Sense strand starting at position 2523 of SEQ ID NO: 586800
gaagaacccucggucaguu

SEQ ID NO: 745249 - RNA, 19 nt, Artificial Sequence
  Description of Artificial Sequence: Synthetic oligonucleotide
  Antisense strand to SEQ ID NO: 745248
aacugaccgaggguucuuc

SEQ ID NO: 745250 - RNA, 19 nt, Artificial Sequence
  Description of Artificial Sequence: Synthetic oligonucleotide
  Sense strand starting at position 2531 of SEQ ID NO: 586800
cucggucaguuaccaaaga

SEQ ID NO: 745251 - RNA, 19 nt, Artificial Sequence
  Description of Artificial Sequence: Synthetic oligonucleotide
  Antisense strand to SEQ ID NO: 745250
ucuuugguaacugaccgag

SEQ ID NO: 745252 - RNA, 19 nt, Artificial Sequence
  Description of Artificial Sequence: Synthetic oligonucleotide
  Sense strand starting at position 2580 of SEQ ID NO: 586800
acaucaacuccacgagaau

SEQ ID NO: 745253 - RNA, 19 nt, Artificial Sequence
  Description of Artificial Sequence: Synthetic oligonucleotide
  Antisense strand to SEQ ID NO: 745252
auucucguggaguugaugu

SEQ ID NO: 745254 - RNA, 19 nt, Artificial Sequence
  Description of Artificial Sequence: Synthetic oligonucleotide
  Sense strand starting at position 2616 of SEQ ID NO: 586800
auuggaucuucuguguuua

SEQ ID NO: 745255 - RNA, 19 nt, Artificial Sequence
  Description of Artificial Sequence: Synthetic oligonucleotide
  Antisense strand to SEQ ID NO: 745254
uaaacacagaagauccaau

SEQ ID NO: 745256 - RNA, 19 nt, Artificial Sequence
  Description of Artificial Sequence: Synthetic oligonucleotide
  Sense strand starting at position 2618 of SEQ ID NO: 586800
uggaucuucuguguuuaca

SEQ ID NO: 745257 - RNA, 19 nt, Artificial Sequence
  Description of Artificial Sequence: Synthetic oligonucleotide
  Antisense strand to SEQ ID NO: 745256
uguaaacacagaagaucca

SEQ ID NO: 745258 - RNA, 19 nt, Artificial Sequence
  Description of Artificial Sequence: Synthetic oligonucleotide
  Sense strand starting at position 2621 of SEQ ID NO: 586800
aucuucuguguuuacagua

SEQ ID NO: 745259 - RNA, 19 nt, Artificial Sequence
  Description of Artificial Sequence: Synthetic oligonucleotide
  Antisense strand to SEQ ID NO: 745258
uacuguaaacacagaagau

SEQ ID NO: 745260 - RNA, 19 nt, Artificial Sequence
  Description of Artificial Sequence: Synthetic oligonucleotide
  Sense strand starting at position 2626 of SEQ ID NO: 586800
cuguguuuacaguacuacu

SEQ ID NO: 745261 - RNA, 19 nt, Artificial Sequence
  Description of Artificial Sequence: Synthetic oligonucleotide
  Antisense strand to SEQ ID NO: 745260
aguaguacuguaaacacag

SEQ ID NO: 745262 - RNA, 19 nt, Artificial Sequence
  Description of Artificial Sequence: Synthetic oligonucleotide
  Sense strand starting at position 2660 of SEQ ID NO: 586800
cucagugaauauucguuga

SEQ ID NO: 745263 - RNA, 19 nt, Artificial Sequence
  Description of Artificial Sequence: Synthetic oligonucleotide
  Antisense strand to SEQ ID NO: 745262
ucaacgaauauucacugag

SEQ ID NO: 745264 - RNA, 19 nt, Artificial Sequence
  Description of Artificial Sequence: Synthetic oligonucleotide
  Sense strand starting at position 2665 of SEQ ID NO: 586800
ugaauauucguugagugau

SEQ ID NO: 745265 - RNA, 19 nt, Artificial Sequence
  Description of Artificial Sequence: Synthetic oligonucleotide
  Antisense strand to SEQ ID NO: 745264
aucacucaacgaauauuca

SEQ ID NO: 745266 - RNA, 19 nt, Artificial Sequence
  Description of Artificial Sequence: Synthetic oligonucleotide
  Sense strand starting at position 2667 of SEQ ID NO: 586800
aauauucguugagugauug

SEQ ID NO: 745267 - RNA, 19 nt, Artificial Sequence
  Description of Artificial Sequence: Synthetic oligonucleotide
  Antisense strand to SEQ ID NO: 745266
caaucacucaacgaauauu

SEQ ID NO: 745268 - RNA, 19 nt, Artificial Sequence
  Description of Artificial Sequence: Synthetic oligonucleotide
  Sense strand starting at position 2677 of SEQ ID NO: 586800
gagugauuguucccaguga

SEQ ID NO: 745269 - RNA, 19 nt, Artificial Sequence
  Description of Artificial Sequence: Synthetic oligonucleotide
  Antisense strand to SEQ ID NO: 745268
ucacugggaacaaucacuc

SEQ ID NO: 745270 - RNA, 19 nt, Artificial Sequence
  Description of Artificial Sequence: Synthetic oligonucleotide
  Sense strand starting at position 2729 of SEQ ID NO: 586800
gacugaagguagucuguua

SEQ ID NO: 745271 - RNA, 19 nt, Artificial Sequence
  Description of Artificial Sequence: Synthetic oligonucleotide
  Antisense strand to SEQ ID NO: 745270
uaacagacuaccuucaguc

SEQ ID NO: 745272 - RNA, 19 nt, Artificial Sequence
  Description of Artificial Sequence: Synthetic oligonucleotide
  Sense strand starting at position 2743 of SEQ ID NO: 586800
uguuauaugccuuagguag

SEQ ID NO: 745273 - RNA, 19 nt, Artificial Sequence
  Description of Artificial Sequence: Synthetic oligonucleotide
  Antisense strand to SEQ ID NO: 745272
cuaccuaaggcauauaaca

SEQ ID NO: 745274 - RNA, 19 nt, Artificial Sequence
  Description of Artificial Sequence: Synthetic oligonucleotide
  Sense strand starting at position 2764 of SEQ ID NO: 586800
ucucacauggacuguuauu

SEQ ID NO: 745275 - RNA, 19 nt, Artificial Sequence
  Description of Artificial Sequence: Synthetic oligonucleotide
  Antisense strand to SEQ ID NO: 745274
aauaacaguccaugugaga

SEQ ID NO: 745276 - RNA, 19 nt, Artificial Sequence
  Description of Artificial Sequence: Synthetic oligonucleotide
  Sense strand starting at position 2770 of SEQ ID NO: 586800
auggacuguuauucuuuau

SEQ ID NO: 745277 - RNA, 19 nt, Artificial Sequence
  Description of Artificial Sequence: Synthetic oligonucleotide
  Antisense strand to SEQ ID NO: 745276
auaaagaauaacaguccau

SEQ ID NO: 745278 - RNA, 19 nt, Artificial Sequence
  Description of Artificial Sequence: Synthetic oligonucleotide
  Sense strand starting at position 2898 of SEQ ID NO: 586800
cuaggcuuauuugcgaaau

SEQ ID NO: 745279 - RNA, 19 nt, Artificial Sequence
  Description of Artificial Sequence: Synthetic oligonucleotide
  Antisense strand to SEQ ID NO: 745278
auuucgcaaauaagccuag

SEQ ID NO: 745280 - RNA, 19 nt, Artificial Sequence
  Description of Artificial Sequence: Synthetic oligonucleotide
  Sense strand starting at position 2904 of SEQ ID NO: 586800
uuauuugcgaaauacguuu

SEQ ID NO: 745281 - RNA, 19 nt, Artificial Sequence
  Description of Artificial Sequence: Synthetic oligonucleotide
  Antisense strand to SEQ ID NO: 745280
aaacguauuucgcaaauaa

SEQ ID NO: 745282 - RNA, 19 nt, Artificial Sequence
  Description of Artificial Sequence: Synthetic oligonucleotide
  Sense strand starting at position 2906 of SEQ ID NO: 586800
auuugcgaaauacguuuaa

SEQ ID NO: 745283 - RNA, 19 nt, Artificial Sequence
  Description of Artificial Sequence: Synthetic oligonucleotide
  Antisense strand to SEQ ID NO: 745282
uuaaacguauuucgcaaau

SEQ ID NO: 745284 - RNA, 19 nt, Artificial Sequence
  Description of Artificial Sequence: Synthetic oligonucleotide
  Sense strand starting at position 2910 of SEQ ID NO: 586800
gcgaaauacguuuaauaac

SEQ ID NO: 745285 - RNA, 19 nt, Artificial Sequence
  Description of Artificial Sequence: Synthetic oligonucleotide
  Antisense strand to SEQ ID NO: 745284
guuauuaaacguauuucgc

SEQ ID NO: 745286 - RNA, 19 nt, Artificial Sequence
  Description of Artificial Sequence: Synthetic oligonucleotide
  Sense strand starting at position 3132 of SEQ ID NO: 586800
caagguaaugugcaaguua

SEQ ID NO: 745287 - RNA, 19 nt, Artificial Sequence
  Description of Artificial Sequence: Synthetic oligonucleotide
  Antisense strand to SEQ ID NO: 745286
uaacuugcacauuaccuug

SEQ ID NO: 745288 - RNA, 19 nt, Artificial Sequence
  Description of Artificial Sequence: Synthetic oligonucleotide
  Sense strand starting at position 3630 of SEQ ID NO: 586800
gagggaagcucugccucaa

SEQ ID NO: 745289 - RNA, 19 nt, Artificial Sequence
  Description of Artificial Sequence: Synthetic oligonucleotide
  Antisense strand to SEQ ID NO: 745288
uugaggcagagcuucccuc

SEQ ID NO: 745290 - RNA, 19 nt, Artificial Sequence
  Description of Artificial Sequence: Synthetic oligonucleotide
  Sense strand starting at position 704 of SEQ ID NO: 586801
uuugauuggucuuuccuuu

SEQ ID NO: 745291 - RNA, 19 nt, Artificial Sequence
  Description of Artificial Sequence: Synthetic oligonucleotide
  Antisense strand to SEQ ID NO: 745290
aaaggaaagaccaaucaaa

SEQ ID NO: 745292 - RNA, 19 nt, Artificial Sequence
  Description of Artificial Sequence: Synthetic oligonucleotide
  Sense strand starting at position 711 of SEQ ID NO: 586801
ggucuuuccuuugcccaga

SEQ ID NO: 745293 - RNA, 19 nt, Artificial Sequence
  Description of Artificial Sequence: Synthetic oligonucleotide
  Antisense strand to SEQ ID NO: 745292
ucugggcaaaggaaagacc

SEQ ID NO: 745294 - RNA, 19 nt, Artificial Sequence
  Description of Artificial Sequence: Synthetic oligonucleotide
  Sense strand starting at position 905 of SEQ ID NO: 586801
cccacaguaaguugggauu

SEQ ID NO: 745295 - RNA, 19 nt, Artificial Sequence
  Description of Artificial Sequence: Synthetic oligonucleotide
  Antisense strand to SEQ ID NO: 745294
aaucccaacuuacuguggg

SEQ ID NO: 745296 - RNA, 19 nt, Artificial Sequence
  Description of Artificial Sequence: Synthetic oligonucleotide
  Sense strand starting at position 1144 of SEQ ID NO: 586801
ccuagaaagccugguccau

SEQ ID NO: 745297 - RNA, 19 nt, Artificial Sequence
  Description of Artificial Sequence: Synthetic oligonucleotide
  Antisense strand to SEQ ID NO: 745296
auggaccaggcuuucuagg

SEQ ID NO: 745298 - RNA, 19 nt, Artificial Sequence
  Description of Artificial Sequence: Synthetic oligonucleotide
  Sense strand starting at position 1165 of SEQ ID NO: 586801
gcgagagacuuugcugaga

SEQ ID NO: 745299 - RNA, 19 nt, Artificial Sequence
  Description of Artificial Sequence: Synthetic oligonucleotide
  Antisense strand to SEQ ID NO: 745298
ucucagcaaagucucucgc

SEQ ID NO: 745300 - RNA, 19 nt, Artificial Sequence
  Description of Artificial Sequence: Synthetic oligonucleotide
  Sense strand starting at position 1245 of SEQ ID NO: 586801
cuuccaggugcuugacaau

SEQ ID NO: 745301 - RNA, 19 nt, Artificial Sequence
  Description of Artificial Sequence: Synthetic oligonucleotide
  Antisense strand to SEQ ID NO: 745300
auugucaagcaccuggaag

SEQ ID NO: 745302 - RNA, 19 nt, Artificial Sequence
  Description of Artificial Sequence: Synthetic oligonucleotide
  Sense strand starting at position 1325 of SEQ ID NO: 586801
acaaucuccucguuccaga

SEQ ID NO: 745303 - RNA, 19 nt, Artificial Sequence
  Description of Artificial Sequence: Synthetic oligonucleotide
  Antisense strand to SEQ ID NO: 745302
ucuggaacgaggagauugu

SEQ ID NO: 745304 - RNA, 19 nt, Artificial Sequence
  Description of Artificial Sequence: Synthetic oligonucleotide
  Sense strand starting at position 1531 of SEQ ID NO: 586801
ugcuaauggaguuguagua

SEQ ID NO: 745305 - RNA, 19 nt, Artificial Sequence
  Description of Artificial Sequence: Synthetic oligonucleotide
  Antisense strand to SEQ ID NO: 745304
uacuacaacuccauuagca

SEQ ID NO: 745306 - RNA, 19 nt, Artificial Sequence
  Description of Artificial Sequence: Synthetic oligonucleotide
  Sense strand starting at position 1632 of SEQ ID NO: 586801
gccguuucugccuuguuga

SEQ ID NO: 745307 - RNA, 19 nt, Artificial Sequence
  Description of Artificial Sequence: Synthetic oligonucleotide
  Antisense strand to SEQ ID NO: 745306
ucaacaaggcagaaacggc

SEQ ID NO: 745308 - RNA, 19 nt, Artificial Sequence
  Description of Artificial Sequence: Synthetic oligonucleotide
  Sense strand starting at position 1665 of SEQ ID NO: 586801
ccguaaugccgcucauuga

SEQ ID NO: 745309 - RNA, 19 nt, Artificial Sequence
  Description of Artificial Sequence: Synthetic oligonucleotide
  Antisense strand to SEQ ID NO: 745308
ucaaugagcggcauuacgg

SEQ ID NO: 745310 - RNA, 19 nt, Artificial Sequence
  Description of Artificial Sequence: Synthetic oligonucleotide
  Sense strand starting at position 2005 of SEQ ID NO: 586801
uuauaauagugucuuccca

SEQ ID NO: 745311 - RNA, 19 nt, Artificial Sequence
  Description of Artificial Sequence: Synthetic oligonucleotide
  Antisense strand to SEQ ID NO: 745310
ugggaagacacuauuauaa

SEQ ID NO: 745312 - RNA, 19 nt, Artificial Sequence
  Description of Artificial Sequence: Synthetic oligonucleotide
  Sense strand starting at position 2124 of SEQ ID NO: 586801
ccaagaggcugugcuuaaa

SEQ ID NO: 745313 - RNA, 19 nt, Artificial Sequence
  Description of Artificial Sequence: Synthetic oligonucleotide
  Antisense strand to SEQ ID NO: 745312
uuuaagcacagccucuugg

SEQ ID NO: 745314 - RNA, 19 nt, Artificial Sequence
  Description of Artificial Sequence: Synthetic oligonucleotide
  Sense strand starting at position 2182 of SEQ ID NO: 586801
guggcaugucuauaaccag

SEQ ID NO: 745315 - RNA, 19 nt, Artificial Sequence
  Description of Artificial Sequence: Synthetic oligonucleotide
  Antisense strand to SEQ ID NO: 745314
cugguuauagacaugccac

SEQ ID NO: 745316 - RNA, 19 nt, Artificial Sequence
  Description of Artificial Sequence: Synthetic oligonucleotide
  Sense strand starting at position 2332 of SEQ ID NO: 586801
gccauucucugcucagaca

SEQ ID NO: 745317 - RNA, 19 nt, Artificial Sequence
  Description of Artificial Sequence: Synthetic oligonucleotide
  Antisense strand to SEQ ID NO: 745316
ugucugagcagagaauggc

SEQ ID NO: 745318 - RNA, 19 nt, Artificial Sequence
  Description of Artificial Sequence: Synthetic oligonucleotide
  Sense strand starting at position 2457 of SEQ ID NO: 586801
cagcuuuguggagaggagu

SEQ ID NO: 745319 - RNA, 19 nt, Artificial Sequence
  Description of Artificial Sequence: Synthetic oligonucleotide
  Antisense strand to SEQ ID NO: 745318
acuccucuccacaaagcug

SEQ ID NO: 745320 - RNA, 19 nt, Artificial Sequence
  Description of Artificial Sequence: Synthetic oligonucleotide
  Sense strand starting at position 2471 of SEQ ID NO: 586801
ggagucuggccuuguggaa

SEQ ID NO: 745321 - RNA, 19 nt, Artificial Sequence
  Description of Artificial Sequence: Synthetic oligonucleotide
  Antisense strand to SEQ ID NO: 745320
uuccacaaggccagacucc

SEQ ID NO: 745322 - RNA, 19 nt, Artificial Sequence
  Description of Artificial Sequence: Synthetic oligonucleotide
  Sense strand starting at position 2534 of SEQ ID NO: 586801
ccggguuuccaggacaaag

SEQ ID NO: 745323 - RNA, 19 nt, Artificial Sequence
  Description of Artificial Sequence: Synthetic oligonucleotide
  Antisense strand to SEQ ID NO: 745322
cuuuguccuggaaacccgg

SEQ ID NO: 745324 - RNA, 19 nt, Artificial Sequence
  Description of Artificial Sequence: Synthetic oligonucleotide
  Sense strand starting at position 2583 of SEQ ID NO: 586801
ucccuuugucaaggucuca

SEQ ID NO: 745325 - RNA, 19 nt, Artificial Sequence
  Description of Artificial Sequence: Synthetic oligonucleotide
  Antisense strand to SEQ ID NO: 745324
ugagaccuugacaaaggga

SEQ ID NO: 745326 - RNA, 19 nt, Artificial Sequence
  Description of Artificial Sequence: Synthetic oligonucleotide
  Sense strand starting at position 2721 of SEQ ID NO: 586801
gucagaagucuugauuguu

SEQ ID NO: 745327 - RNA, 19 nt, Artificial Sequence
  Description of Artificial Sequence: Synthetic oligonucleotide
  Antisense strand to SEQ ID NO: 745326
aacaaucaagacuucugac

SEQ ID NO: 745328 - RNA, 19 nt, Artificial Sequence
  Description of Artificial Sequence: Synthetic oligonucleotide
  Sense strand starting at position 2726 of SEQ ID NO: 586801
aagucuugauuguuaggua

SEQ ID NO: 745329 - RNA, 19 nt, Artificial Sequence
  Description of Artificial Sequence: Synthetic oligonucleotide
  Antisense strand to SEQ ID NO: 745328
uaccuaacaaucaagacuu

SEQ ID NO: 745330 - RNA, 19 nt, Artificial Sequence
  Description of Artificial Sequence: Synthetic oligonucleotide
  Sense strand starting at position 2730 of SEQ ID NO: 586801
cuugauuguuagguaaaug

SEQ ID NO: 745331 - RNA, 19 nt, Artificial Sequence
  Description of Artificial Sequence: Synthetic oligonucleotide
  Antisense strand to SEQ ID NO: 745330
cauuuaccuaacaaucaag

SEQ ID NO: 745332 - RNA, 19 nt, Artificial Sequence
  Description of Artificial Sequence: Synthetic oligonucleotide
  Sense strand starting at position 2738 of SEQ ID NO: 586801
uuagguaaaugcucagcuu

SEQ ID NO: 745333 - RNA, 19 nt, Artificial Sequence
  Description of Artificial Sequence: Synthetic oligonucleotide
  Antisense strand to SEQ ID NO: 745332
aagcugagcauuuaccuaa

SEQ ID NO: 745334 - RNA, 19 nt, Artificial Sequence
  Description of Artificial Sequence: Synthetic oligonucleotide
  Sense strand starting at position 2739 of SEQ ID NO: 586801
uagguaaaugcucagcuua

SEQ ID NO: 745335 - RNA, 19 nt, Artificial Sequence
  Description of Artificial Sequence: Synthetic oligonucleotide
  Antisense strand to SEQ ID NO: 745334
uaagcugagcauuuaccua

SEQ ID NO: 745336 - RNA, 19 nt, Artificial Sequence
  Description of Artificial Sequence: Synthetic oligonucleotide
  Sense strand starting at position 2855 of SEQ ID NO: 586801
ggaagagacuaugagcaau

SEQ ID NO: 745337 - RNA, 19 nt, Artificial Sequence
  Description of Artificial Sequence: Synthetic oligonucleotide
  Antisense strand to SEQ ID NO: 745336
auugcucauagucucuucc

SEQ ID NO: 745338 - RNA, 19 nt, Artificial Sequence
  Description of Artificial Sequence: Synthetic oligonucleotide
  Sense strand starting at position 3040 of SEQ ID NO: 586801
gagacuuggaucugagugu

SEQ ID NO: 745339 - RNA, 19 nt, Artificial Sequence
  Description of Artificial Sequence: Synthetic oligonucleotide
  Antisense strand to SEQ ID NO: 745338
acacucagauccaagucuc

SEQ ID NO: 745340 - RNA, 19 nt, Artificial Sequence
  Description of Artificial Sequence: Synthetic oligonucleotide
  Sense strand starting at position 3044 of SEQ ID NO: 586801
cuuggaucugagugugcaa

SEQ ID NO: 745341 - RNA, 19 nt, Artificial Sequence
  Description of Artificial Sequence: Synthetic oligonucleotide
  Antisense strand to SEQ ID NO: 745340
uugcacacucagauccaag

SEQ ID NO: 745342 - RNA, 19 nt, Artificial Sequence
  Description of Artificial Sequence: Synthetic oligonucleotide
  Sense strand starting at position 3046 of SEQ ID NO: 586801
uggaucugagugugcaaga

SEQ ID NO: 745343 - RNA, 19 nt, Artificial Sequence
  Description of Artificial Sequence: Synthetic oligonucleotide
  Antisense strand to SEQ ID NO: 745342
ucuugcacacucagaucca

SEQ ID NO: 745344 - RNA, 19 nt, Artificial Sequence
  Description of Artificial Sequence: Synthetic oligonucleotide
  Sense strand starting at position 3047 of SEQ ID NO: 586801
ggaucugagugugcaagaa

SEQ ID NO: 745345 - RNA, 19 nt, Artificial Sequence
  Description of Artificial Sequence: Synthetic oligonucleotide
  Antisense strand to SEQ ID NO: 745344
uucuugcacacucagaucc

SEQ ID NO: 745346 - RNA, 19 nt, Artificial Sequence
  Description of Artificial Sequence: Synthetic oligonucleotide
  Sense strand starting at position 3256 of SEQ ID NO: 586801
cucacuguuccacacugau

SEQ ID NO: 745347 - RNA, 19 nt, Artificial Sequence
  Description of Artificial Sequence: Synthetic oligonucleotide
  Antisense strand to SEQ ID NO: 745346
aucaguguggaacagugag

SEQ ID NO: 745348 - RNA, 19 nt, Artificial Sequence
  Description of Artificial Sequence: Synthetic oligonucleotide
  Sense strand starting at position 3262 of SEQ ID NO: 586801
guuccacacugauccugau

SEQ ID NO: 745349 - RNA, 19 nt, Artificial Sequence
  Description of Artificial Sequence: Synthetic oligonucleotide
  Antisense strand to SEQ ID NO: 745348
aucaggaucaguguggaac

SEQ ID NO: 745350 - RNA, 19 nt, Artificial Sequence
  Description of Artificial Sequence: Synthetic oligonucleotide
  Sense strand starting at position 3307 of SEQ ID NO: 586801
ugucccuuugaccaagagu

SEQ ID NO: 745351 - RNA, 19 nt, Artificial Sequence
  Description of Artificial Sequence: Synthetic oligonucleotide
  Antisense strand to SEQ ID NO: 745350
acucuuggucaaagggaca

SEQ ID NO: 745352 - RNA, 19 nt, Artificial Sequence
  Description of Artificial Sequence: Synthetic oligonucleotide
  Sense strand starting at position 3528 of SEQ ID NO: 586801
gugacaugugaguggaaag

SEQ ID NO: 745353 - RNA, 19 nt, Artificial Sequence
  Description of Artificial Sequence: Synthetic oligonucleotide
  Antisense strand to SEQ ID NO: 745352
cuuuccacucacaugucac

SEQ ID NO: 745354 - RNA, 19 nt, Artificial Sequence
  Description of Artificial Sequence: Synthetic oligonucleotide
  Sense strand starting at position 3529 of SEQ ID NO: 586801
ugacaugugaguggaaaga

SEQ ID NO: 745355 - RNA, 19 nt, Artificial Sequence
  Description of Artificial Sequence: Synthetic oligonucleotide
  Antisense strand to SEQ ID NO: 745354
ucuuuccacucacauguca

SEQ ID NO: 745356 - RNA, 19 nt, Artificial Sequence
  Description of Artificial Sequence: Synthetic oligonucleotide
  Sense strand starting at position 3553 of SEQ ID NO: 586801
gugcaaaggccucagcuau

SEQ ID NO: 745357 - RNA, 19 nt, Artificial Sequence
  Description of Artificial Sequence: Synthetic oligonucleotide
  Antisense strand to SEQ ID NO: 745356
auagcugaggccuuugcac

SEQ ID NO: 745358 - RNA, 19 nt, Artificial Sequence
  Description of Artificial Sequence: Synthetic oligonucleotide
  Sense strand starting at position 3703 of SEQ ID NO: 586801
gugggaaucacuggagacu

SEQ ID NO: 745359 - RNA, 19 nt, Artificial Sequence
  Description of Artificial Sequence: Synthetic oligonucleotide
  Antisense strand to SEQ ID NO: 745358
agucuccagugauucccac

SEQ ID NO: 745360 - RNA, 19 nt, Artificial Sequence
  Description of Artificial Sequence: Synthetic oligonucleotide
  Sense strand starting at position 3718 of SEQ ID NO: 586801
gacuuugaagcauggucau

SEQ ID NO: 745361 - RNA, 19 nt, Artificial Sequence
  Description of Artificial Sequence: Synthetic oligonucleotide
  Antisense strand to SEQ ID NO: 745360
augaccaugcuucaaaguc

SEQ ID NO: 745362 - RNA, 19 nt, Artificial Sequence
  Description of Artificial Sequence: Synthetic oligonucleotide
  Sense strand starting at position 3721 of SEQ ID NO: 586801
uuugaagcauggucauauu

SEQ ID NO: 745363 - RNA, 19 nt, Artificial Sequence
  Description of Artificial Sequence: Synthetic oligonucleotide
  Antisense strand to SEQ ID NO: 745362
aauaugaccaugcuucaaa

SEQ ID NO: 745364 - RNA, 19 nt, Artificial Sequence
  Description of Artificial Sequence: Synthetic oligonucleotide
  Sense strand starting at position 3756 of SEQ ID NO: 586801
cuguguaggaguggaagua

SEQ ID NO: 745365 - RNA, 19 nt, Artificial Sequence
  Description of Artificial Sequence: Synthetic oligonucleotide
  Antisense strand to SEQ ID NO: 745364
uacuuccacuccuacacag

SEQ ID NO: 745366 - RNA, 19 nt, Artificial Sequence
  Description of Artificial Sequence: Synthetic oligonucleotide
  Sense strand starting at position 3799 of SEQ ID NO: 586801
ggcagcuuugaugagaaca

SEQ ID NO: 745367 - RNA, 19 nt, Artificial Sequence
  Description of Artificial Sequence: Synthetic oligonucleotide
  Antisense strand to SEQ ID NO: 745366
uguucucaucaaagcugcc

SEQ ID NO: 745368 - RNA, 19 nt, Artificial Sequence
  Description of Artificial Sequence: Synthetic oligonucleotide
  Sense strand starting at position 3979 of SEQ ID NO: 586801
gcuugacuuuccuuugauu

SEQ ID NO: 745369 - RNA, 19 nt, Artificial Sequence
  Description of Artificial Sequence: Synthetic oligonucleotide
  Antisense strand to SEQ ID NO: 745368
aaucaaaggaaagucaagc

SEQ ID NO: 745370 - RNA, 19 nt, Artificial Sequence
  Description of Artificial Sequence: Synthetic oligonucleotide
  Sense strand starting at position 40 of SEQ ID NO: 586802
gcaaacucucuggaaguau

SEQ ID NO: 745371 - RNA, 19 nt, Artificial Sequence
  Description of Artificial Sequence: Synthetic oligonucleotide
  Antisense strand to SEQ ID NO: 745370
auacuuccagagaguuugc

SEQ ID NO: 745372 - RNA, 19 nt, Artificial Sequence
  Description of Artificial Sequence: Synthetic oligonucleotide
  Sense strand starting at position 320 of SEQ ID NO: 586802
aguuuaguacaaugugaau

SEQ ID NO: 745373 - RNA, 19 nt, Artificial Sequence
  Description of Artificial Sequence: Synthetic oligonucleotide
  Antisense strand to SEQ ID NO: 745372
auucacauuguacuaaacu

SEQ ID NO: 745374 - RNA, 19 nt, Artificial Sequence
  Description of Artificial Sequence: Synthetic oligonucleotide
  Sense strand starting at position 326 of SEQ ID NO: 586802
guacaaugugaauauacga

SEQ ID NO: 745375 - RNA, 19 nt, Artificial Sequence
  Description of Artificial Sequence: Synthetic oligonucleotide
  Antisense strand to SEQ ID NO: 745374
ucguauauucacauuguac

SEQ ID NO: 745376 - RNA, 19 nt, Artificial Sequence
  Description of Artificial Sequence: Synthetic oligonucleotide
  Sense strand starting at position 372 of SEQ ID NO: 586802
aaauauagugagcaagcau

SEQ ID NO: 745377 - RNA, 19 nt, Artificial Sequence
  Description of Artificial Sequence: Synthetic oligonucleotide
  Antisense strand to SEQ ID NO: 745376
augcuugcucacuauauuu

SEQ ID NO: 745378 - RNA, 19 nt, Artificial Sequence
  Description of Artificial Sequence: Synthetic oligonucleotide
  Sense strand starting at position 383 of SEQ ID NO: 586802
gcaagcaugcaugacuuau

SEQ ID NO: 745379 - RNA, 19 nt, Artificial Sequence
  Description of Artificial Sequence: Synthetic oligonucleotide
  Antisense strand to SEQ ID NO: 745378
auaagucaugcaugcuugc

SEQ ID NO: 745380 - RNA, 19 nt, Artificial Sequence
  Description of Artificial Sequence: Synthetic oligonucleotide
  Sense strand starting at position 532 of SEQ ID NO: 586802
gagauugucaagugaucug

SEQ ID NO: 745381 - RNA, 19 nt, Artificial Sequence
  Description of Artificial Sequence: Synthetic oligonucleotide
  Antisense strand to SEQ ID NO: 745380
cagaucacuugacaaucuc

SEQ ID NO: 745382 - RNA, 19 nt, Artificial Sequence
  Description of Artificial Sequence: Synthetic oligonucleotide
  Sense strand starting at position 535 of SEQ ID NO: 586802
auugucaagugaucugaaa

SEQ ID NO: 745383 - RNA, 19 nt, Artificial Sequence
  Description of Artificial Sequence: Synthetic oligonucleotide
  Antisense strand to SEQ ID NO: 745382
uuucagaucacuugacaau

SEQ ID NO: 745384 - RNA, 19 nt, Artificial Sequence
  Description of Artificial Sequence: Synthetic oligonucleotide
  Sense strand starting at position 565 of SEQ ID NO: 586802
cugcucagggacuauuaau

SEQ ID NO: 745385 - RNA, 19 nt, Artificial Sequence
  Description of Artificial Sequence: Synthetic oligonucleotide
  Antisense strand to SEQ ID NO: 745384
auuaauagucccugagcag

SEQ ID NO: 745386 - RNA, 19 nt, Artificial Sequence
  Description of Artificial Sequence: Synthetic oligonucleotide
  Sense strand starting at position 608 of SEQ ID NO: 586802
uuucuacuucgggauaucu

SEQ ID NO: 745387 - RNA, 19 nt, Artificial Sequence
  Description of Artificial Sequence: Synthetic oligonucleotide
  Antisense strand to SEQ ID NO: 745386
agauaucccgaaguagaaa

SEQ ID NO: 745388 - RNA, 19 nt, Artificial Sequence
  Description of Artificial Sequence: Synthetic oligonucleotide
  Sense strand starting at position 610 of SEQ ID NO: 586802
ucuacuucgggauaucuuu

SEQ ID NO: 745389 - RNA, 19 nt, Artificial Sequence
  Description of Artificial Sequence: Synthetic oligonucleotide
  Antisense strand to SEQ ID NO: 745388
aaagauaucccgaaguaga

SEQ ID NO: 745390 - RNA, 19 nt, Artificial Sequence
  Description of Artificial Sequence: Synthetic oligonucleotide
  Sense strand starting at position 722 of SEQ ID NO: 586802
ugcuaauuaucucugagga

SEQ ID NO: 745391 - RNA, 19 nt, Artificial Sequence
  Description of Artificial Sequence: Synthetic oligonucleotide
  Antisense strand to SEQ ID NO: 745390
uccucagagauaauuagca

SEQ ID NO: 745392 - RNA, 19 nt, Artificial Sequence
  Description of Artificial Sequence: Synthetic oligonucleotide
  Sense strand starting at position 723 of SEQ ID NO: 586802
gcuaauuaucucugaggaa

SEQ ID NO: 745393 - RNA, 19 nt, Artificial Sequence
  Description of Artificial Sequence: Synthetic oligonucleotide
  Antisense strand to SEQ ID NO: 745392
uuccucagagauaauuagc

SEQ ID NO: 745394 - RNA, 19 nt, Artificial Sequence
  Description of Artificial Sequence: Synthetic oligonucleotide
  Sense strand starting at position 747 of SEQ ID NO: 586802
aagcaauuauaggucuagu

SEQ ID NO: 745395 - RNA, 19 nt, Artificial Sequence
  Description of Artificial Sequence: Synthetic oligonucleotide
  Antisense strand to SEQ ID NO: 745394
acuagaccuauaauugcuu

SEQ ID NO: 745396 - RNA, 19 nt, Artificial Sequence
  Description of Artificial Sequence: Synthetic oligonucleotide
  Sense strand starting at position 750 of SEQ ID NO: 586802
caauuauaggucuagugac

SEQ ID NO: 745397 - RNA, 19 nt, Artificial Sequence
  Description of Artificial Sequence: Synthetic oligonucleotide
  Antisense strand to SEQ ID NO: 745396
gucacuagaccuauaauug

SEQ ID NO: 745398 - RNA, 19 nt, Artificial Sequence
  Description of Artificial Sequence: Synthetic oligonucleotide
  Sense strand starting at position 758 of SEQ ID NO: 586802
ggucuagugacaggaucua

SEQ ID NO: 745399 - RNA, 19 nt, Artificial Sequence
  Description of Artificial Sequence: Synthetic oligonucleotide
  Antisense strand to SEQ ID NO: 745398
uagauccugucacuagacc

SEQ ID NO: 745400 - RNA, 19 nt, Artificial Sequence
  Description of Artificial Sequence: Synthetic oligonucleotide
  Sense strand starting at position 878 of SEQ ID NO: 586802
agccuaacuccagaaagcu

SEQ ID NO: 745401 - RNA, 19 nt, Artificial Sequence
  Description of Artificial Sequence: Synthetic oligonucleotide
  Antisense strand to SEQ ID NO: 745400
agcuuucuggaguuaggcu

SEQ ID NO: 745402 - RNA, 19 nt, Artificial Sequence
  Description of Artificial Sequence: Synthetic oligonucleotide
  Sense strand starting at position 1145 of SEQ ID NO: 586802
cuaacugaguucucagcaa

SEQ ID NO: 745403 - RNA, 19 nt, Artificial Sequence
  Description of Artificial Sequence: Synthetic oligonucleotide
  Antisense strand to SEQ ID NO: 745402
uugcugagaacucaguuag

SEQ ID NO: 745404 - RNA, 19 nt, Artificial Sequence
  Description of Artificial Sequence: Synthetic oligonucleotide
  Sense strand starting at position 1343 of SEQ ID NO: 586802
ccacuuagacaucguaaca

SEQ ID NO: 745405 - RNA, 19 nt, Artificial Sequence
  Description of Artificial Sequence: Synthetic oligonucleotide
  Antisense strand to SEQ ID NO: 745404
uguuacgaugucuaagugg

SEQ ID NO: 745406 - RNA, 19 nt, Artificial Sequence
  Description of Artificial Sequence: Synthetic oligonucleotide
  Sense strand starting at position 1492 of SEQ ID NO: 586802
ugacuucuagaauggcuga

SEQ ID NO: 745407 - RNA, 19 nt, Artificial Sequence
  Description of Artificial Sequence: Synthetic oligonucleotide
  Antisense strand to SEQ ID NO: 745406
ucagccauucuagaaguca

SEQ ID NO: 745408 - RNA, 19 nt, Artificial Sequence
  Description of Artificial Sequence: Synthetic oligonucleotide
  Sense strand starting at position 2359 of SEQ ID NO: 586802
gauauugucaccgguagag

SEQ ID NO: 745409 - RNA, 19 nt, Artificial Sequence
  Description of Artificial Sequence: Synthetic oligonucleotide
  Antisense strand to SEQ ID NO: 745408
cucuaccggugacaauauc

SEQ ID NO: 745410 - RNA, 19 nt, Artificial Sequence
  Description of Artificial Sequence: Synthetic oligonucleotide
  Sense strand starting at position 2361 of SEQ ID NO: 586802
uauugucaccgguagagga

SEQ ID NO: 745411 - RNA, 19 nt, Artificial Sequence
  Description of Artificial Sequence: Synthetic oligonucleotide
  Antisense strand to SEQ ID NO: 745410
uccucuaccggugacaaua

SEQ ID NO: 745412 - RNA, 19 nt, Artificial Sequence
  Description of Artificial Sequence: Synthetic oligonucleotide
  Sense strand starting at position 2625 of SEQ ID NO: 586802
acgcgcaaucagucugauu

SEQ ID NO: 745413 - RNA, 19 nt, Artificial Sequence
  Description of Artificial Sequence: Synthetic oligonucleotide
  Antisense strand to SEQ ID NO: 745412
aaucagacugauugcgcgu

SEQ ID NO: 745414 - RNA, 19 nt, Artificial Sequence
  Description of Artificial Sequence: Synthetic oligonucleotide
  Sense strand starting at position 2626 of SEQ ID NO: 586802
cgcgcaaucagucugauug

SEQ ID NO: 745415 - RNA, 19 nt, Artificial Sequence
  Description of Artificial Sequence: Synthetic oligonucleotide
  Antisense strand to SEQ ID NO: 745414
caaucagacugauugcgcg

SEQ ID NO: 745416 - RNA, 19 nt, Artificial Sequence
  Description of Artificial Sequence: Synthetic oligonucleotide
  Sense strand starting at position 2754 of SEQ ID NO: 586802
gugguauaccucuaugcaa

SEQ ID NO: 745417 - RNA, 19 nt, Artificial Sequence
  Description of Artificial Sequence: Synthetic oligonucleotide
  Antisense strand to SEQ ID NO: 745416
uugcauagagguauaccac

SEQ ID NO: 745418 - RNA, 19 nt, Artificial Sequence
  Description of Artificial Sequence: Synthetic oligonucleotide
  Sense strand starting at position 2756 of SEQ ID NO: 586802
gguauaccucuaugcaaag

SEQ ID NO: 745419 - RNA, 19 nt, Artificial Sequence
  Description of Artificial Sequence: Synthetic oligonucleotide
  Antisense strand to SEQ ID NO: 745418
cuuugcauagagguauacc

SEQ ID NO: 745420 - RNA, 19 nt, Artificial Sequence
  Description of Artificial Sequence: Synthetic oligonucleotide
  Sense strand starting at position 2786 of SEQ ID NO: 586802
cugcaaucaguuugauuuc

SEQ ID NO: 745421 - RNA, 19 nt, Artificial Sequence
  Description of Artificial Sequence: Synthetic oligonucleotide
  Antisense strand to SEQ ID NO: 745420
gaaaucaaacugauugcag

SEQ ID NO: 745422 - RNA, 19 nt, Artificial Sequence
  Description of Artificial Sequence: Synthetic oligonucleotide
  Sense strand starting at position 2827 of SEQ ID NO: 586802
gugauacuucuaugcaaag

SEQ ID NO: 745423 - RNA, 19 nt, Artificial Sequence
  Description of Artificial Sequence: Synthetic oligonucleotide
  Antisense strand to SEQ ID NO: 745422
cuuugcauagaaguaucac

SEQ ID NO: 745424 - RNA, 19 nt, Artificial Sequence
  Description of Artificial Sequence: Synthetic oligonucleotide
  Sense strand starting at position 2984 of SEQ ID NO: 586802
caauuuaguucuuaggaag

SEQ ID NO: 745425 - RNA, 19 nt, Artificial Sequence
  Description of Artificial Sequence: Synthetic oligonucleotide
  Antisense strand to SEQ ID NO: 745424
cuuccuaagaacuaaauug

SEQ ID NO: 745426 - RNA, 19 nt, Artificial Sequence
  Description of Artificial Sequence: Synthetic oligonucleotide
  Sense strand starting at position 3002 of SEQ ID NO: 586802
gucggagugacacauccuu

SEQ ID NO: 745427 - RNA, 19 nt, Artificial Sequence
  Description of Artificial Sequence: Synthetic oligonucleotide
  Antisense strand to SEQ ID NO: 745426
aaggaugugucacuccgac

SEQ ID NO: 745428 - RNA, 19 nt, Artificial Sequence
  Description of Artificial Sequence: Synthetic oligonucleotide
  Sense strand starting at position 3007 of SEQ ID NO: 586802
agugacacauccuuagguu

SEQ ID NO: 745429 - RNA, 19 nt, Artificial Sequence
  Description of Artificial Sequence: Synthetic oligonucleotide
  Antisense strand to SEQ ID NO: 745428
aaccuaaggaugugucacu

SEQ ID NO: 745430 - RNA, 19 nt, Artificial Sequence
  Description of Artificial Sequence: Synthetic oligonucleotide
  Sense strand starting at position 3008 of SEQ ID NO: 586802
gugacacauccuuagguuc

SEQ ID NO: 745431 - RNA, 19 nt, Artificial Sequence
  Description of Artificial Sequence: Synthetic oligonucleotide
  Antisense strand to SEQ ID NO: 745430
gaaccuaaggaugugucac

SEQ ID NO: 745432 - RNA, 19 nt, Artificial Sequence
  Description of Artificial Sequence: Synthetic oligonucleotide
  Sense strand starting at position 3099 of SEQ ID NO: 586802
ucuauugugcuauagaaac

SEQ ID NO: 745433 - RNA, 19 nt, Artificial Sequence
  Description of Artificial Sequence: Synthetic oligonucleotide
  Antisense strand to SEQ ID NO: 745432
guuucuauagcacaauaga

SEQ ID NO: 745434 - RNA, 19 nt, Artificial Sequence
  Description of Artificial Sequence: Synthetic oligonucleotide
  Sense strand starting at position 3131 of SEQ ID NO: 586802
uguauaaccuacuuaguaa

SEQ ID NO: 745435 - RNA, 19 nt, Artificial Sequence
  Description of Artificial Sequence: Synthetic oligonucleotide
  Antisense strand to SEQ ID NO: 745434
uuacuaaguagguuauaca

SEQ ID NO: 745436 - RNA, 19 nt, Artificial Sequence
  Description of Artificial Sequence: Synthetic oligonucleotide
  Sense strand starting at position 3403 of SEQ ID NO: 586802
cauaucauggacugauagu

SEQ ID NO: 745437 - RNA, 19 nt, Artificial Sequence
  Description of Artificial Sequence: Synthetic oligonucleotide
  Antisense strand to SEQ ID NO: 745436
acuaucaguccaugauaug

SEQ ID NO: 745438 - RNA, 19 nt, Artificial Sequence
  Description of Artificial Sequence: Synthetic oligonucleotide
  Sense strand starting at position 3414 of SEQ ID NO: 586802
cugauagucuuaucuauga

SEQ ID NO: 745439 - RNA, 19 nt, Artificial Sequence
  Description of Artificial Sequence: Synthetic oligonucleotide
  Antisense strand to SEQ ID NO: 745438
ucauagauaagacuaucag

SEQ ID NO: 745440 - RNA, 19 nt, Artificial Sequence
  Description of Artificial Sequence: Synthetic oligonucleotide
  Sense strand starting at position 3473 of SEQ ID NO: 586802
uuagauuuauuuggagcaa

SEQ ID NO: 745441 - RNA, 19 nt, Artificial Sequence
  Description of Artificial Sequence: Synthetic oligonucleotide
  Antisense strand to SEQ ID NO: 745440
uugcuccaaauaaaucuaa

SEQ ID NO: 745442 - RNA, 19 nt, Artificial Sequence
  Description of Artificial Sequence: Synthetic oligonucleotide
  Sense strand starting at position 3484 of SEQ ID NO: 586802
uggagcaauuaugcugaau

SEQ ID NO: 745443 - RNA, 19 nt, Artificial Sequence
  Description of Artificial Sequence: Synthetic oligonucleotide
  Antisense strand to SEQ ID NO: 745442
auucagcauaauugcucca

SEQ ID NO: 745444 - RNA, 19 nt, Artificial Sequence
  Description of Artificial Sequence: Synthetic oligonucleotide
  Sense strand starting at position 3487 of SEQ ID NO: 586802
agcaauuaugcugaaucau

SEQ ID NO: 745445 - RNA, 19 nt, Artificial Sequence
  Description of Artificial Sequence: Synthetic oligonucleotide
  Antisense strand to SEQ ID NO: 745444
augauucagcauaauugcu

SEQ ID NO: 745446 - RNA, 19 nt, Artificial Sequence
  Description of Artificial Sequence: Synthetic oligonucleotide
  Sense strand starting at position 3526 of SEQ ID NO: 586802
cuggcauucguguuuaugu

SEQ ID NO: 745447 - RNA, 19 nt, Artificial Sequence
  Description of Artificial Sequence: Synthetic oligonucleotide
  Antisense strand to SEQ ID NO: 745446
acauaaacacgaaugccag

SEQ ID NO: 745448 - RNA, 19 nt, Artificial Sequence
  Description of Artificial Sequence: Synthetic oligonucleotide
  Sense strand starting at position 3610 of SEQ ID NO: 586802
acaccuaguugcucuagaa

SEQ ID NO: 745449 - RNA, 19 nt, Artificial Sequence
  Description of Artificial Sequence: Synthetic oligonucleotide
  Antisense strand to SEQ ID NO: 745448
uucuagagcaacuaggugu

SEQ ID NO: 745450 - RNA, 19 nt, Artificial Sequence
  Description of Artificial Sequence: Synthetic oligonucleotide
  Sense strand starting at position 552 of SEQ ID NO: 586803
gaugcaggauuugaggaau

SEQ ID NO: 745451 - RNA, 19 nt, Artificial Sequence
  Description of Artificial Sequence: Synthetic oligonucleotide
  Antisense strand to SEQ ID NO: 745450
auuccucaaauccugcauc

SEQ ID NO: 745452 - RNA, 19 nt, Artificial Sequence
  Description of Artificial Sequence: Synthetic oligonucleotide
  Sense strand starting at position 674 of SEQ ID NO: 586803
cuaagaaggccuggucuca

SEQ ID NO: 745453 - RNA, 19 nt, Artificial Sequence
  Description of Artificial Sequence: Synthetic oligonucleotide
  Antisense strand to SEQ ID NO: 745452
ugagaccaggccuucuuag

SEQ ID NO: 745454 - RNA, 19 nt, Artificial Sequence
  Description of Artificial Sequence: Synthetic oligonucleotide
  Sense strand starting at position 787 of SEQ ID NO: 586803
gugccugguuaccagaaga

SEQ ID NO: 745455 - RNA, 19 nt, Artificial Sequence
  Description of Artificial Sequence: Synthetic oligonucleotide
  Antisense strand to SEQ ID NO: 745454
ucuucugguaaccaggcac

SEQ ID NO: 745456 - RNA, 19 nt, Artificial Sequence
  Description of Artificial Sequence: Synthetic oligonucleotide
  Sense strand starting at position 801 of SEQ ID NO: 586803
gaagaagguuuagaauaac

SEQ ID NO: 745457 - RNA, 19 nt, Artificial Sequence
  Description of Artificial Sequence: Synthetic oligonucleotide
  Antisense strand to SEQ ID NO: 745456
guuauucuaaaccuucuuc

SEQ ID NO: 745458 - RNA, 19 nt, Artificial Sequence
  Description of Artificial Sequence: Synthetic oligonucleotide
  Sense strand starting at position 904 of SEQ ID NO: 586803
gggacugucuguuucccau

SEQ ID NO: 745459 - RNA, 19 nt, Artificial Sequence
  Description of Artificial Sequence: Synthetic oligonucleotide
  Antisense strand to SEQ ID NO: 745458
augggaaacagacaguccc

SEQ ID NO: 745460 - RNA, 19 nt, Artificial Sequence
  Description of Artificial Sequence: Synthetic oligonucleotide
  Sense strand starting at position 907 of SEQ ID NO: 586803
acugucuguuucccauaaa

SEQ ID NO: 745461 - RNA, 19 nt, Artificial Sequence
  Description of Artificial Sequence: Synthetic oligonucleotide
  Antisense strand to SEQ ID NO: 745460
uuuaugggaaacagacagu

SEQ ID NO: 745462 - RNA, 19 nt, Artificial Sequence
  Description of Artificial Sequence: Synthetic oligonucleotide
  Sense strand starting at position 930 of SEQ ID NO: 586803
agcccauuugcugguaagu

SEQ ID NO: 745463 - RNA, 19 nt, Artificial Sequence
  Description of Artificial Sequence: Synthetic oligonucleotide
  Antisense strand to SEQ ID NO: 745462
acuuaccagcaaaugggcu

SEQ ID NO: 745464 - RNA, 19 nt, Artificial Sequence
  Description of Artificial Sequence: Synthetic oligonucleotide
  Sense strand starting at position 946 of SEQ ID NO: 586803
aguccuaaguccucacaau

SEQ ID NO: 745465 - RNA, 19 nt, Artificial Sequence
  Description of Artificial Sequence: Synthetic oligonucleotide
  Antisense strand to SEQ ID NO: 745464
auugugaggacuuaggacu

SEQ ID NO: 745466 - RNA, 19 nt, Artificial Sequence
  Description of Artificial Sequence: Synthetic oligonucleotide
  Sense strand starting at position 947 of SEQ ID NO: 586803
guccuaaguccucacaaug

SEQ ID NO: 745467 - RNA, 19 nt, Artificial Sequence
  Description of Artificial Sequence: Synthetic oligonucleotide
  Antisense strand to SEQ ID NO: 745466
cauugugaggacuuaggac

SEQ ID NO: 745468 - RNA, 19 nt, Artificial Sequence
  Description of Artificial Sequence: Synthetic oligonucleotide
  Sense strand starting at position 1027 of SEQ ID NO: 586803
ccuccaugagcagaaagua

SEQ ID NO: 745469 - RNA, 19 nt, Artificial Sequence
  Description of Artificial Sequence: Synthetic oligonucleotide
  Antisense strand to SEQ ID NO: 745468
uacuuucugcucauggagg

SEQ ID NO: 745470 - RNA, 19 nt, Artificial Sequence
  Description of Artificial Sequence: Synthetic oligonucleotide
  Sense strand starting at position 1827 of SEQ ID NO: 586803
gcuagcuacucacgguuaa

SEQ ID NO: 745471 - RNA, 19 nt, Artificial Sequence
  Description of Artificial Sequence: Synthetic oligonucleotide
  Antisense strand to SEQ ID NO: 745470
uuaaccgugaguagcuagc

SEQ ID NO: 745472 - RNA, 19 nt, Artificial Sequence
  Description of Artificial Sequence: Synthetic oligonucleotide
  Sense strand starting at position 1862 of SEQ ID NO: 586803
gaaggagcuugacaagaau

SEQ ID NO: 745473 - RNA, 19 nt, Artificial Sequence
  Description of Artificial Sequence: Synthetic oligonucleotide
  Antisense strand to SEQ ID NO: 745472
auucuugucaagcuccuuc

SEQ ID NO: 745474 - RNA, 19 nt, Artificial Sequence
  Description of Artificial Sequence: Synthetic oligonucleotide
  Sense strand starting at position 1930 of SEQ ID NO: 586803
cgagcagacacuuggaaga

SEQ ID NO: 745475 - RNA, 19 nt, Artificial Sequence
  Description of Artificial Sequence: Synthetic oligonucleotide
  Antisense strand to SEQ ID NO: 745474
ucuuccaagugucugcucg

SEQ ID NO: 745476 - RNA, 19 nt, Artificial Sequence
  Description of Artificial Sequence: Synthetic oligonucleotide
  Sense strand starting at position 1932 of SEQ ID NO: 586803
agcagacacuuggaagaua

SEQ ID NO: 745477 - RNA, 19 nt, Artificial Sequence
  Description of Artificial Sequence: Synthetic oligonucleotide
  Antisense strand to SEQ ID NO: 745476
uaucuuccaagugucugcu

SEQ ID NO: 745478 - RNA, 19 nt, Artificial Sequence
  Description of Artificial Sequence: Synthetic oligonucleotide
  Sense strand starting at position 1947 of SEQ ID NO: 586803
gauaucaucugcuguuguu

SEQ ID NO: 745479 - RNA, 19 nt, Artificial Sequence
  Description of Artificial Sequence: Synthetic oligonucleotide
  Antisense strand to SEQ ID NO: 745478
aacaacagcagaugauauc

SEQ ID NO: 745480 - RNA, 19 nt, Artificial Sequence
  Description of Artificial Sequence: Synthetic oligonucleotide
  Sense strand starting at position 2115 of SEQ ID NO: 586803
aagcuuguguggccugaga

SEQ ID NO: 745481 - RNA, 19 nt, Artificial Sequence
  Description of Artificial Sequence: Synthetic oligonucleotide
  Antisense strand to SEQ ID NO: 745480
ucucaggccacacaagcuu

SEQ ID NO: 745482 - RNA, 19 nt, Artificial Sequence
  Description of Artificial Sequence: Synthetic oligonucleotide
  Sense strand starting at position 2146 of SEQ ID NO: 586803
ggauguaagagugaucagu

SEQ ID NO: 745483 - RNA, 19 nt, Artificial Sequence
  Description of Artificial Sequence: Synthetic oligonucleotide
  Antisense strand to SEQ ID NO: 745482
acugaucacucuuacaucc

SEQ ID NO: 745484 - RNA, 19 nt, Artificial Sequence
  Description of Artificial Sequence: Synthetic oligonucleotide
  Sense strand starting at position 2148 of SEQ ID NO: 586803
auguaagagugaucagucu

SEQ ID NO: 745485 - RNA, 19 nt, Artificial Sequence
  Description of Artificial Sequence: Synthetic oligonucleotide
  Antisense strand to SEQ ID NO: 745484
agacugaucacucuuacau

SEQ ID NO: 745486 - RNA, 19 nt, Artificial Sequence
  Description of Artificial Sequence: Synthetic oligonucleotide
  Sense strand starting at position 2231 of SEQ ID NO: 586803
cuugcuucucugggagcaa

SEQ ID NO: 745487 - RNA, 19 nt, Artificial Sequence
  Description of Artificial Sequence: Synthetic oligonucleotide
  Antisense strand to SEQ ID NO: 745486
uugcucccagagaagcaag

SEQ ID NO: 745488 - RNA, 19 nt, Artificial Sequence
  Description of Artificial Sequence: Synthetic oligonucleotide
  Sense strand starting at position 2232 of SEQ ID NO: 586803
uugcuucucugggagcaau

SEQ ID NO: 745489 - RNA, 19 nt, Artificial Sequence
  Description of Artificial Sequence: Synthetic oligonucleotide
  Antisense strand to SEQ ID NO: 745488
auugcucccagagaagcaa

SEQ ID NO: 745490 - RNA, 19 nt, Artificial Sequence
  Description of Artificial Sequence: Synthetic oligonucleotide
  Sense strand starting at position 2281 of SEQ ID NO: 586803
ccuggagacuuucucaaug

SEQ ID NO: 745491 - RNA, 19 nt, Artificial Sequence
  Description of Artificial Sequence: Synthetic oligonucleotide
  Antisense strand to SEQ ID NO: 745490
cauugagaaagucuccagg

SEQ ID NO: 745492 - RNA, 19 nt, Artificial Sequence
  Description of Artificial Sequence: Synthetic oligonucleotide
  Sense strand starting at position 2283 of SEQ ID NO: 586803
uggagacuuucucaaugca

SEQ ID NO: 745493 - RNA, 19 nt, Artificial Sequence
  Description of Artificial Sequence: Synthetic oligonucleotide
  Antisense strand to SEQ ID NO: 745492
ugcauugagaaagucucca

SEQ ID NO: 745494 - RNA, 19 nt, Artificial Sequence
  Description of Artificial Sequence: Synthetic oligonucleotide
  Sense strand starting at position 2286 of SEQ ID NO: 586803
agacuuucucaaugcauga

SEQ ID NO: 745495 - RNA, 19 nt, Artificial Sequence
  Description of Artificial Sequence: Synthetic oligonucleotide
  Antisense strand to SEQ ID NO: 745494
ucaugcauugagaaagucu

SEQ ID NO: 745496 - RNA, 19 nt, Artificial Sequence
  Description of Artificial Sequence: Synthetic oligonucleotide
  Sense strand starting at position 2430 of SEQ ID NO: 586803
gcgggaggauuguuuaagu

SEQ ID NO: 745497 - RNA, 19 nt, Artificial Sequence
  Description of Artificial Sequence: Synthetic oligonucleotide
  Antisense strand to SEQ ID NO: 745496
acuuaaacaauccucccgc

SEQ ID NO: 745498 - RNA, 19 nt, Artificial Sequence
  Description of Artificial Sequence: Synthetic oligonucleotide
  Sense strand starting at position 2438 of SEQ ID NO: 586803
auuguuuaaguccaagagu

SEQ ID NO: 745499 - RNA, 19 nt, Artificial Sequence
  Description of Artificial Sequence: Synthetic oligonucleotide
  Antisense strand to SEQ ID NO: 745498
acucuuggacuuaaacaau

SEQ ID NO: 745500 - RNA, 19 nt, Artificial Sequence
  Description of Artificial Sequence: Synthetic oligonucleotide
  Sense strand starting at position 2441 of SEQ ID NO: 586803
guuuaaguccaagaguuug

SEQ ID NO: 745501 - RNA, 19 nt, Artificial Sequence
  Description of Artificial Sequence: Synthetic oligonucleotide
  Antisense strand to SEQ ID NO: 745500
caaacucuuggacuuaaac

SEQ ID NO: 745502 - RNA, 19 nt, Artificial Sequence
  Description of Artificial Sequence: Synthetic oligonucleotide
  Sense strand starting at position 2644 of SEQ ID NO: 586803
agagacucagucugaauca

SEQ ID NO: 745503 - RNA, 19 nt, Artificial Sequence
  Description of Artificial Sequence: Synthetic oligonucleotide
  Antisense strand to SEQ ID NO: 745502
ugauucagacugagucucu

SEQ ID NO: 745504 - RNA, 19 nt, Artificial Sequence
  Description of Artificial Sequence: Synthetic oligonucleotide
  Sense strand starting at position 2645 of SEQ ID NO: 586803
gagacucagucugaaucaa

SEQ ID NO: 745505 - RNA, 19 nt, Artificial Sequence
  Description of Artificial Sequence: Synthetic oligonucleotide
  Antisense strand to SEQ ID NO: 745504
uugauucagacugagucuc

SEQ ID NO: 745506 - RNA, 19 nt, Artificial Sequence
  Description of Artificial Sequence: Synthetic oligonucleotide
  Sense strand starting at position 2695 of SEQ ID NO: 586803
ggaauccaccucugaucua

SEQ ID NO: 745507 - RNA, 19 nt, Artificial Sequence
  Description of Artificial Sequence: Synthetic oligonucleotide
  Antisense strand to SEQ ID NO: 745506
uagaucagagguggauucc

SEQ ID NO: 745508 - RNA, 19 nt, Artificial Sequence
  Description of Artificial Sequence: Synthetic oligonucleotide
  Sense strand starting at position 28 of SEQ ID NO: 586804
guaaaugacccuuggauaa

SEQ ID NO: 745509 - RNA, 19 nt, Artificial Sequence
  Description of Artificial Sequence: Synthetic oligonucleotide
  Antisense strand to SEQ ID NO: 745508
uuauccaagggucauuuac

SEQ ID NO: 745510 - RNA, 19 nt, Artificial Sequence
  Description of Artificial Sequence: Synthetic oligonucleotide
  Sense strand starting at position 38 of SEQ ID NO: 586804
cuuggauaagagggucauu

SEQ ID NO: 745511 - RNA, 19 nt, Artificial Sequence
  Description of Artificial Sequence: Synthetic oligonucleotide
  Antisense strand to SEQ ID NO: 745510
aaugacccucuuauccaag

SEQ ID NO: 745512 - RNA, 19 nt, Artificial Sequence
  Description of Artificial Sequence: Synthetic oligonucleotide
  Sense strand starting at position 135 of SEQ ID NO: 586804
gucaaucaaguauguucua

SEQ ID NO: 745513 - RNA, 19 nt, Artificial Sequence
  Description of Artificial Sequence: Synthetic oligonucleotide
  Antisense strand to SEQ ID NO: 745512
uagaacauacuugauugac

SEQ ID NO: 745514 - RNA, 19 nt, Artificial Sequence
  Description of Artificial Sequence: Synthetic oligonucleotide
  Sense strand starting at position 136 of SEQ ID NO: 586804
ucaaucaaguauguucuau

SEQ ID NO: 745515 - RNA, 19 nt, Artificial Sequence
  Description of Artificial Sequence: Synthetic oligonucleotide
  Antisense strand to SEQ ID NO: 745514
auagaacauacuugauuga

SEQ ID NO: 745516 - RNA, 19 nt, Artificial Sequence
  Description of Artificial Sequence: Synthetic oligonucleotide
  Sense strand starting at position 172 of SEQ ID NO: 586804
gucuaaaguguuuaaugua

SEQ ID NO: 745517 - RNA, 19 nt, Artificial Sequence
  Description of Artificial Sequence: Synthetic oligonucleotide
  Antisense strand to SEQ ID NO: 745516
uacauuaaacacuuuagac

SEQ ID NO: 745518 - RNA, 19 nt, Artificial Sequence
  Description of Artificial Sequence: Synthetic oligonucleotide
  Sense strand starting at position 213 of SEQ ID NO: 586804
uuauuacucccguagauag

SEQ ID NO: 745519 - RNA, 19 nt, Artificial Sequence
  Description of Artificial Sequence: Synthetic oligonucleotide
  Antisense strand to SEQ ID NO: 745518
cuaucuacgggaguaauaa

SEQ ID NO: 745520 - RNA, 19 nt, Artificial Sequence
  Description of Artificial Sequence: Synthetic oligonucleotide
  Sense strand starting at position 215 of SEQ ID NO: 586804
auuacucccguagauagaa

SEQ ID NO: 745521 - RNA, 19 nt, Artificial Sequence
  Description of Artificial Sequence: Synthetic oligonucleotide
  Antisense strand to SEQ ID NO: 745520
uucuaucuacgggaguaau

SEQ ID NO: 745522 - RNA, 19 nt, Artificial Sequence
  Description of Artificial Sequence: Synthetic oligonucleotide
  Sense strand starting at position 462 of SEQ ID NO: 586804
auuguauaccuauggcaug

SEQ ID NO: 745523 - RNA, 19 nt, Artificial Sequence
  Description of Artificial Sequence: Synthetic oligonucleotide
  Antisense strand to SEQ ID NO: 745522
caugccauagguauacaau

SEQ ID NO: 745524 - RNA, 19 nt, Artificial Sequence
  Description of Artificial Sequence: Synthetic oligonucleotide
  Sense strand starting at position 467 of SEQ ID NO: 586804
auaccuauggcauguucua

SEQ ID NO: 745525 - RNA, 19 nt, Artificial Sequence
  Description of Artificial Sequence: Synthetic oligonucleotide
  Antisense strand to SEQ ID NO: 745524
uagaacaugccauagguau

SEQ ID NO: 745526 - RNA, 19 nt, Artificial Sequence
  Description of Artificial Sequence: Synthetic oligonucleotide
  Sense strand starting at position 1244 of SEQ ID NO: 586804
gagcaaacaguuuauugua

SEQ ID NO: 745527 - RNA, 19 nt, Artificial Sequence
  Description of Artificial Sequence: Synthetic oligonucleotide
  Antisense strand to SEQ ID NO: 745526
uacaauaaacuguuugcuc

SEQ ID NO: 745528 - RNA, 19 nt, Artificial Sequence
  Description of Artificial Sequence: Synthetic oligonucleotide
  Sense strand starting at position 1315 of SEQ ID NO: 586804
ugguaaagcuuauucugaa

SEQ ID NO: 745529 - RNA, 19 nt, Artificial Sequence
  Description of Artificial Sequence: Synthetic oligonucleotide
  Antisense strand to SEQ ID NO: 745528
uucagaauaagcuuuacca

SEQ ID NO: 745530 - RNA, 19 nt, Artificial Sequence
  Description of Artificial Sequence: Synthetic oligonucleotide
  Sense strand starting at position 1316 of SEQ ID NO: 586804
gguaaagcuuauucugaaa

SEQ ID NO: 745531 - RNA, 19 nt, Artificial Sequence
  Description of Artificial Sequence: Synthetic oligonucleotide
  Antisense strand to SEQ ID NO: 745530
uuucagaauaagcuuuacc

SEQ ID NO: 745532 - RNA, 19 nt, Artificial Sequence
  Description of Artificial Sequence: Synthetic oligonucleotide
  Sense strand starting at position 1497 of SEQ ID NO: 586804
gauauaaguuauguaacag

SEQ ID NO: 745533 - RNA, 19 nt, Artificial Sequence
  Description of Artificial Sequence: Synthetic oligonucleotide
  Antisense strand to SEQ ID NO: 745532
cuguuacauaacuuauauc

SEQ ID NO: 745534 - RNA, 19 nt, Artificial Sequence
  Description of Artificial Sequence: Synthetic oligonucleotide
  Sense strand starting at position 1583 of SEQ ID NO: 586804
uuauccacuccuggagauu

SEQ ID NO: 745535 - RNA, 19 nt, Artificial Sequence
  Description of Artificial Sequence: Synthetic oligonucleotide
  Antisense strand to SEQ ID NO: 745534
aaucuccaggaguggauaa

SEQ ID NO: 745536 - RNA, 19 nt, Artificial Sequence
  Description of Artificial Sequence: Synthetic oligonucleotide
  Sense strand starting at position 1630 of SEQ ID NO: 586804
uuugcuauuguagaguaaa

SEQ ID NO: 745537 - RNA, 19 nt, Artificial Sequence
  Description of Artificial Sequence: Synthetic oligonucleotide
  Antisense strand to SEQ ID NO: 745536
uuuacucuacaauagcaaa

SEQ ID NO: 745538 - RNA, 19 nt, Artificial Sequence
  Description of Artificial Sequence: Synthetic oligonucleotide
  Sense strand starting at position 2013 of SEQ ID NO: 586804
gguguaugacgagacuuau

SEQ ID NO: 745539 - RNA, 19 nt, Artificial Sequence
  Description of Artificial Sequence: Synthetic oligonucleotide
  Antisense strand to SEQ ID NO: 745538
auaagucucgucauacacc

SEQ ID NO: 745540 - RNA, 19 nt, Artificial Sequence
  Description of Artificial Sequence: Synthetic oligonucleotide
  Sense strand starting at position 2064 of SEQ ID NO: 586804
agguucucuuaaguaaaca

SEQ ID NO: 745541 - RNA, 19 nt, Artificial Sequence
  Description of Artificial Sequence: Synthetic oligonucleotide
  Antisense strand to SEQ ID NO: 745540
uguuuacuuaagagaaccu

SEQ ID NO: 745542 - RNA, 19 nt, Artificial Sequence
  Description of Artificial Sequence: Synthetic oligonucleotide
  Sense strand starting at position 2297 of SEQ ID NO: 586804
uugcuaaaggauggcuuaa

SEQ ID NO: 745543 - RNA, 19 nt, Artificial Sequence
  Description of Artificial Sequence: Synthetic oligonucleotide
  Antisense strand to SEQ ID NO: 745542
uuaagccauccuuuagcaa

SEQ ID NO: 745544 - RNA, 19 nt, Artificial Sequence
  Description of Artificial Sequence: Synthetic oligonucleotide
  Sense strand starting at position 2299 of SEQ ID NO: 586804
gcuaaaggauggcuuaaca

SEQ ID NO: 745545 - RNA, 19 nt, Artificial Sequence
  Description of Artificial Sequence: Synthetic oligonucleotide
  Antisense strand to SEQ ID NO: 745544
uguuaagccauccuuuagc

SEQ ID NO: 745546 - RNA, 19 nt, Artificial Sequence
  Description of Artificial Sequence: Synthetic oligonucleotide
  Sense strand starting at position 2486 of SEQ ID NO: 586804
ugcuaacugucauuuaagu

SEQ ID NO: 745547 - RNA, 19 nt, Artificial Sequence
  Description of Artificial Sequence: Synthetic oligonucleotide
  Antisense strand to SEQ ID NO: 745546
acuuaaaugacaguuagca

SEQ ID NO: 745548 - RNA, 19 nt, Artificial Sequence
  Description of Artificial Sequence: Synthetic oligonucleotide
  Sense strand starting at position 2765 of SEQ ID NO: 586804
auuccuuaacccuagaggu

SEQ ID NO: 745549 - RNA, 19 nt, Artificial Sequence
  Description of Artificial Sequence: Synthetic oligonucleotide
  Antisense strand to SEQ ID NO: 745548
accucuaggguuaaggaau

SEQ ID NO: 745550 - RNA, 19 nt, Artificial Sequence
  Description of Artificial Sequence: Synthetic oligonucleotide
  Sense strand starting at position 2767 of SEQ ID NO: 586804
uccuuaacccuagagguua

SEQ ID NO: 745551 - RNA, 19 nt, Artificial Sequence
  Description of Artificial Sequence: Synthetic oligonucleotide
  Antisense strand to SEQ ID NO: 745550
uaaccucuaggguuaagga

SEQ ID NO: 745552 - RNA, 19 nt, Artificial Sequence
  Description of Artificial Sequence: Synthetic oligonucleotide
  Sense strand starting at position 2779 of SEQ ID NO: 586804
gagguuauuugagacugau

SEQ ID NO: 745553 - RNA, 19 nt, Artificial Sequence
  Description of Artificial Sequence: Synthetic oligonucleotide
  Antisense strand to SEQ ID NO: 745552
aucagucucaaauaaccuc

SEQ ID NO: 745554 - RNA, 19 nt, Artificial Sequence
  Description of Artificial Sequence: Synthetic oligonucleotide
  Sense strand starting at position 2828 of SEQ ID NO: 586804
acaagaugacacuggcaua

SEQ ID NO: 745555 - RNA, 19 nt, Artificial Sequence
  Description of Artificial Sequence: Synthetic oligonucleotide
  Antisense strand to SEQ ID NO: 745554
uaugccagugucaucuugu

SEQ ID NO: 745556 - RNA, 19 nt, Artificial Sequence
  Description of Artificial Sequence: Synthetic oligonucleotide
  Sense strand starting at position 2846 of SEQ ID NO: 586804
agagguuaccucuggucua

SEQ ID NO: 745557 - RNA, 19 nt, Artificial Sequence
  Description of Artificial Sequence: Synthetic oligonucleotide
  Antisense strand to SEQ ID NO: 745556
uagaccagagguaaccucu

SEQ ID NO: 745558 - RNA, 19 nt, Artificial Sequence
  Description of Artificial Sequence: Synthetic oligonucleotide
  Sense strand starting at position 2899 of SEQ ID NO: 586804
aguuauuggcugcagaacu

SEQ ID NO: 745559 - RNA, 19 nt, Artificial Sequence
  Description of Artificial Sequence: Synthetic oligonucleotide
  Antisense strand to SEQ ID NO: 745558
aguucugcagccaauaacu

SEQ ID NO: 745560 - RNA, 19 nt, Artificial Sequence
  Description of Artificial Sequence: Synthetic oligonucleotide
  Sense strand starting at position 2947 of SEQ ID NO: 586804
acaggaugaucucagggaa

SEQ ID NO: 745561 - RNA, 19 nt, Artificial Sequence
  Description of Artificial Sequence: Synthetic oligonucleotide
  Antisense strand to SEQ ID NO: 745560
uucccugagaucauccugu

SEQ ID NO: 745562 - RNA, 19 nt, Artificial Sequence
  Description of Artificial Sequence: Synthetic oligonucleotide
  Sense strand starting at position 3036 of SEQ ID NO: 586804
acuaguuugccucaguaaa

SEQ ID NO: 745563 - RNA, 19 nt, Artificial Sequence
  Description of Artificial Sequence: Synthetic oligonucleotide
  Antisense strand to SEQ ID NO: 745562
uuuacugaggcaaacuagu

SEQ ID NO: 745564 - RNA, 19 nt, Artificial Sequence
  Description of Artificial Sequence: Synthetic oligonucleotide
  Sense strand starting at position 3086 of SEQ ID NO: 586804
gggagcaugcaugaugagu

SEQ ID NO: 745565 - RNA, 19 nt, Artificial Sequence
  Description of Artificial Sequence: Synthetic oligonucleotide
  Antisense strand to SEQ ID NO: 745564
acucaucaugcaugcuccc

SEQ ID NO: 745566 - RNA, 19 nt, Artificial Sequence
  Description of Artificial Sequence: Synthetic oligonucleotide
  Sense strand starting at position 3094 of SEQ ID NO: 586804
gcaugaugagugggagcau

SEQ ID NO: 745567 - RNA, 19 nt, Artificial Sequence
  Description of Artificial Sequence: Synthetic oligonucleotide
  Antisense strand to SEQ ID NO: 745566
augcucccacucaucaugc

SEQ ID NO: 745568 - RNA, 19 nt, Artificial Sequence
  Description of Artificial Sequence: Synthetic oligonucleotide
  Sense strand starting at position 3186 of SEQ ID NO: 586804
auguuuagacgauaaaccu

SEQ ID NO: 745569 - RNA, 19 nt, Artificial Sequence
  Description of Artificial Sequence: Synthetic oligonucleotide
  Antisense strand to SEQ ID NO: 745568
agguuuaucgucuaaacau

SEQ ID NO: 745570 - RNA, 19 nt, Artificial Sequence
  Description of Artificial Sequence: Synthetic oligonucleotide
  Sense strand starting at position 3282 of SEQ ID NO: 586804
agauauuagugacucuaac

SEQ ID NO: 745571 - RNA, 19 nt, Artificial Sequence
  Description of Artificial Sequence: Synthetic oligonucleotide
  Antisense strand to SEQ ID NO: 745570
guuagagucacuaauaucu

SEQ ID NO: 745572 - RNA, 19 nt, Artificial Sequence
  Description of Artificial Sequence: Synthetic oligonucleotide
  Sense strand starting at position 3438 of SEQ ID NO: 586804
cggaauuucucucaaccug

SEQ ID NO: 745573 - RNA, 19 nt, Artificial Sequence
  Description of Artificial Sequence: Synthetic oligonucleotide
  Antisense strand to SEQ ID NO: 745572
cagguugagagaaauuccg

SEQ ID NO: 745574 - RNA, 19 nt, Artificial Sequence
  Description of Artificial Sequence: Synthetic oligonucleotide
  Sense strand starting at position 3500 of SEQ ID NO: 586804
cuuauaggaucuuuguaac

SEQ ID NO: 745575 - RNA, 19 nt, Artificial Sequence
  Description of Artificial Sequence: Synthetic oligonucleotide
  Antisense strand to SEQ ID NO: 745574
guuacaaagauccuauaag

SEQ ID NO: 745576 - RNA, 19 nt, Artificial Sequence
  Description of Artificial Sequence: Synthetic oligonucleotide
  Sense strand starting at position 3506 of SEQ ID NO: 586804
ggaucuuuguaaccaauaa

SEQ ID NO: 745577 - RNA, 19 nt, Artificial Sequence
  Description of Artificial Sequence: Synthetic oligonucleotide
  Antisense strand to SEQ ID NO: 745576
uuauugguuacaaagaucc

SEQ ID NO: 745578 - RNA, 19 nt, Artificial Sequence
  Description of Artificial Sequence: Synthetic oligonucleotide
  Sense strand starting at position 3532 of SEQ ID NO: 586804
auauaagaugccugccaca

SEQ ID NO: 745579 - RNA, 19 nt, Artificial Sequence
  Description of Artificial Sequence: Synthetic oligonucleotide
  Antisense strand to SEQ ID NO: 745578
uguggcaggcaucuuauau

SEQ ID NO: 745580 - RNA, 19 nt, Artificial Sequence
  Description of Artificial Sequence: Synthetic oligonucleotide
  Sense strand starting at position 3905 of SEQ ID NO: 586804
ccuggaagccuuugaguau

SEQ ID NO: 745581 - RNA, 19 nt, Artificial Sequence
  Description of Artificial Sequence: Synthetic oligonucleotide
  Antisense strand to SEQ ID NO: 745580
auacucaaaggcuuccagg

SEQ ID NO: 745582 - RNA, 19 nt, Artificial Sequence
  Description of Artificial Sequence: Synthetic oligonucleotide
  Sense strand starting at position 3908 of SEQ ID NO: 586804
ggaagccuuugaguaugau

SEQ ID NO: 745583 - RNA, 19 nt, Artificial Sequence
  Description of Artificial Sequence: Synthetic oligonucleotide
  Antisense strand to SEQ ID NO: 745582
aucauacucaaaggcuucc

SEQ ID NO: 745584 - RNA, 19 nt, Artificial Sequence
  Description of Artificial Sequence: Synthetic oligonucleotide
  Sense strand starting at position 3909 of SEQ ID NO: 586804
gaagccuuugaguaugauu

SEQ ID NO: 745585 - RNA, 19 nt, Artificial Sequence
  Description of Artificial Sequence: Synthetic oligonucleotide
  Antisense strand to SEQ ID NO: 745584
aaucauacucaaaggcuuc

SEQ ID NO: 745586 - RNA, 19 nt, Artificial Sequence
  Description of Artificial Sequence: Synthetic oligonucleotide
  Sense strand starting at position 3943 of SEQ ID NO: 586804
ccuuguaucccagagguuu

SEQ ID NO: 745587 - RNA, 19 nt, Artificial Sequence
  Description of Artificial Sequence: Synthetic oligonucleotide
  Antisense strand to SEQ ID NO: 745586
aaaccucugggauacaagg

SEQ ID NO: 745588 - RNA, 19 nt, Artificial Sequence
  Description of Artificial Sequence: Synthetic oligonucleotide
  Sense strand starting at position 245 of SEQ ID NO: 586805
aggcuugacuaucuaugca

SEQ ID NO: 745589 - RNA, 19 nt, Artificial Sequence
  Description of Artificial Sequence: Synthetic oligonucleotide
  Antisense strand to SEQ ID NO: 745588
ugcauagauagucaagccu

SEQ ID NO: 745590 - RNA, 19 nt, Artificial Sequence
  Description of Artificial Sequence: Synthetic oligonucleotide
  Sense strand starting at position 248 of SEQ ID NO: 586805
cuugacuaucuaugcaaga

SEQ ID NO: 745591 - RNA, 19 nt, Artificial Sequence
  Description of Artificial Sequence: Synthetic oligonucleotide
  Antisense strand to SEQ ID NO: 745590
ucuugcauagauagucaag

SEQ ID NO: 745592 - RNA, 19 nt, Artificial Sequence
  Description of Artificial Sequence: Synthetic oligonucleotide
  Sense strand starting at position 536 of SEQ ID NO: 586805
acugauaacgcauauccau

SEQ ID NO: 745593 - RNA, 19 nt, Artificial Sequence
  Description of Artificial Sequence: Synthetic oligonucleotide
  Antisense strand to SEQ ID NO: 745592
auggauaugcguuaucagu

SEQ ID NO: 745594 - RNA, 19 nt, Artificial Sequence
  Description of Artificial Sequence: Synthetic oligonucleotide
  Sense strand starting at position 624 of SEQ ID NO: 586805
gugacucuuuaggcuaaag

SEQ ID NO: 745595 - RNA, 19 nt, Artificial Sequence
  Description of Artificial Sequence: Synthetic oligonucleotide
  Antisense strand to SEQ ID NO: 745594
cuuuagccuaaagagucac

SEQ ID NO: 745596 - RNA, 19 nt, Artificial Sequence
  Description of Artificial Sequence: Synthetic oligonucleotide
  Sense strand starting at position 766 of SEQ ID NO: 586805
ugccaaagucuuggagaaa

SEQ ID NO: 745597 - RNA, 19 nt, Artificial Sequence
  Description of Artificial Sequence: Synthetic oligonucleotide
  Antisense strand to SEQ ID NO: 745596
uuucuccaagacuuuggca

SEQ ID NO: 745598 - RNA, 19 nt, Artificial Sequence
  Description of Artificial Sequence: Synthetic oligonucleotide
  Sense strand starting at position 945 of SEQ ID NO: 586805
aauuacuuggcauguaaag

SEQ ID NO: 745599 - RNA, 19 nt, Artificial Sequence
  Description of Artificial Sequence: Synthetic oligonucleotide
  Antisense strand to SEQ ID NO: 745598
cuuuacaugccaaguaauu

SEQ ID NO: 745600 - RNA, 19 nt, Artificial Sequence
  Description of Artificial Sequence: Synthetic oligonucleotide
  Sense strand starting at position 1068 of SEQ ID NO: 586805
gugacagaaugaucccuga

SEQ ID NO: 745601 - RNA, 19 nt, Artificial Sequence
  Description of Artificial Sequence: Synthetic oligonucleotide
  Antisense strand to SEQ ID NO: 745600
ucagggaucauucugucac

SEQ ID NO: 745602 - RNA, 19 nt, Artificial Sequence
  Description of Artificial Sequence: Synthetic oligonucleotide
  Sense strand starting at position 1071 of SEQ ID NO: 586805
acagaaugaucccugaagu

SEQ ID NO: 745603 - RNA, 19 nt, Artificial Sequence
  Description of Artificial Sequence: Synthetic oligonucleotide
  Antisense strand to SEQ ID NO: 745602
acuucagggaucauucugu

SEQ ID NO: 745604 - RNA, 19 nt, Artificial Sequence
  Description of Artificial Sequence: Synthetic oligonucleotide
  Sense strand starting at position 1072 of SEQ ID NO: 586805
cagaaugaucccugaaguu

SEQ ID NO: 745605 - RNA, 19 nt, Artificial Sequence
  Description of Artificial Sequence: Synthetic oligonucleotide
  Antisense strand to SEQ ID NO: 745604
aacuucagggaucauucug

SEQ ID NO: 745606 - RNA, 19 nt, Artificial Sequence
  Description of Artificial Sequence: Synthetic oligonucleotide
  Sense strand starting at position 1117 of SEQ ID NO: 586805
ccaugacucgaaggacaau

SEQ ID NO: 745607 - RNA, 19 nt, Artificial Sequence
  Description of Artificial Sequence: Synthetic oligonucleotide
  Antisense strand to SEQ ID NO: 745606
auuguccuucgagucaugg

SEQ ID NO: 745608 - RNA, 19 nt, Artificial Sequence
  Description of Artificial Sequence: Synthetic oligonucleotide
  Sense strand starting at position 1150 of SEQ ID NO: 586805
ugucaacacugggcagaua

SEQ ID NO: 745609 - RNA, 19 nt, Artificial Sequence
  Description of Artificial Sequence: Synthetic oligonucleotide
  Antisense strand to SEQ ID NO: 745608
uaucugcccaguguugaca

SEQ ID NO: 745610 - RNA, 19 nt, Artificial Sequence
  Description of Artificial Sequence: Synthetic oligonucleotide
  Sense strand starting at position 1194 of SEQ ID NO: 586805
gauggagcacgguauuguu

SEQ ID NO: 745611 - RNA, 19 nt, Artificial Sequence
  Description of Artificial Sequence: Synthetic oligonucleotide
  Antisense strand to SEQ ID NO: 745610
aacaauaccgugcuccauc

SEQ ID NO: 745612 - RNA, 19 nt, Artificial Sequence
  Description of Artificial Sequence: Synthetic oligonucleotide
  Sense strand starting at position 1741 of SEQ ID NO: 586805
cccgauccauccucgaaau

SEQ ID NO: 745613 - RNA, 19 nt, Artificial Sequence
  Description of Artificial Sequence: Synthetic oligonucleotide
  Antisense strand to SEQ ID NO: 745612
auuucgaggauggaucggg

SEQ ID NO: 745614 - RNA, 19 nt, Artificial Sequence
  Description of Artificial Sequence: Synthetic oligonucleotide
  Sense strand starting at position 1743 of SEQ ID NO: 586805
cgauccauccucgaaauuc

SEQ ID NO: 745615 - RNA, 19 nt, Artificial Sequence
  Description of Artificial Sequence: Synthetic oligonucleotide
  Antisense strand to SEQ ID NO: 745614
gaauuucgaggauggaucg

SEQ ID NO: 745616 - RNA, 19 nt, Artificial Sequence
  Description of Artificial Sequence: Synthetic oligonucleotide
  Sense strand starting at position 1751 of SEQ ID NO: 586805
ccucgaaauucugucagaa

SEQ ID NO: 745617 - RNA, 19 nt, Artificial Sequence
  Description of Artificial Sequence: Synthetic oligonucleotide
  Antisense strand to SEQ ID NO: 745616
uucugacagaauuucgagg

SEQ ID NO: 745618 - RNA, 19 nt, Artificial Sequence
  Description of Artificial Sequence: Synthetic oligonucleotide
  Sense strand starting at position 2122 of SEQ ID NO: 586805
uggacugacuucccuacua

SEQ ID NO: 745619 - RNA, 19 nt, Artificial Sequence
  Description of Artificial Sequence: Synthetic oligonucleotide
  Antisense strand to SEQ ID NO: 745618
uaguagggaagucagucca

SEQ ID NO: 745620 - RNA, 19 nt, Artificial Sequence
  Description of Artificial Sequence: Synthetic oligonucleotide
  Sense strand starting at position 2135 of SEQ ID NO: 586805
cuacuaacccgugacagua

SEQ ID NO: 745621 - RNA, 19 nt, Artificial Sequence
  Description of Artificial Sequence: Synthetic oligonucleotide
  Antisense strand to SEQ ID NO: 745620
uacugucacggguuaguag

SEQ ID NO: 745622 - RNA, 19 nt, Artificial Sequence
  Description of Artificial Sequence: Synthetic oligonucleotide
  Sense strand starting at position 2209 of SEQ ID NO: 586805
aaggaaaggucgguugguu

SEQ ID NO: 745623 - RNA, 19 nt, Artificial Sequence
  Description of Artificial Sequence: Synthetic oligonucleotide
  Antisense strand to SEQ ID NO: 745622
aaccaaccgaccuuuccuu

SEQ ID NO: 745624 - RNA, 19 nt, Artificial Sequence
  Description of Artificial Sequence: Synthetic oligonucleotide
  Sense strand starting at position 2235 of SEQ ID NO: 586805
gcggacaaaugguccaauu

SEQ ID NO: 745625 - RNA, 19 nt, Artificial Sequence
  Description of Artificial Sequence: Synthetic oligonucleotide
  Antisense strand to SEQ ID NO: 745624
aauuggaccauuuguccgc

SEQ ID NO: 745626 - RNA, 19 nt, Artificial Sequence
  Description of Artificial Sequence: Synthetic oligonucleotide
  Sense strand starting at position 2722 of SEQ ID NO: 586805
gggcuuacagcccaugaaa

SEQ ID NO: 745627 - RNA, 19 nt, Artificial Sequence
  Description of Artificial Sequence: Synthetic oligonucleotide
  Antisense strand to SEQ ID NO: 745626
uuucaugggcuguaagccc

SEQ ID NO: 745628 - RNA, 19 nt, Artificial Sequence
  Description of Artificial Sequence: Synthetic oligonucleotide
  Sense strand starting at position 2791 of SEQ ID NO: 586805
gggcaaguauaguuuagga

SEQ ID NO: 745629 - RNA, 19 nt, Artificial Sequence
  Description of Artificial Sequence: Synthetic oligonucleotide
  Antisense strand to SEQ ID NO: 745628
uccuaaacuauacuugccc

SEQ ID NO: 745630 - RNA, 19 nt, Artificial Sequence
  Description of Artificial Sequence: Synthetic oligonucleotide
  Sense strand starting at position 2931 of SEQ ID NO: 586805
aauaaauaugugggcucau

SEQ ID NO: 745631 - RNA, 19 nt, Artificial Sequence
  Description of Artificial Sequence: Synthetic oligonucleotide
  Antisense strand to SEQ ID NO: 745630
augagcccacauauuuauu

SEQ ID NO: 745632 - RNA, 19 nt, Artificial Sequence
  Description of Artificial Sequence: Synthetic oligonucleotide
  Sense strand starting at position 3056 of SEQ ID NO: 586805
ggcucuauauauguccaua

SEQ ID NO: 745633 - RNA, 19 nt, Artificial Sequence
  Description of Artificial Sequence: Synthetic oligonucleotide
  Antisense strand to SEQ ID NO: 745632
uauggacauauauagagcc

SEQ ID NO: 745634 - RNA, 19 nt, Artificial Sequence
  Description of Artificial Sequence: Synthetic oligonucleotide
  Sense strand starting at position 3136 of SEQ ID NO: 586805
uuccuagugccagaaauaa

SEQ ID NO: 745635 - RNA, 19 nt, Artificial Sequence
  Description of Artificial Sequence: Synthetic oligonucleotide
  Antisense strand to SEQ ID NO: 745634
uuauuucuggcacuaggaa

SEQ ID NO: 745636 - RNA, 19 nt, Artificial Sequence
  Description of Artificial Sequence: Synthetic oligonucleotide
  Sense strand starting at position 3219 of SEQ ID NO: 586805
uggagagaauaguaggaaa

SEQ ID NO: 745637 - RNA, 19 nt, Artificial Sequence
  Description of Artificial Sequence: Synthetic oligonucleotide
  Antisense strand to SEQ ID NO: 745636
uuuccuacuauucucucca

SEQ ID NO: 745638 - RNA, 19 nt, Artificial Sequence
  Description of Artificial Sequence: Synthetic oligonucleotide
  Sense strand starting at position 3364 of SEQ ID NO: 586805
gaggguauuuccgugcaag

SEQ ID NO: 745639 - RNA, 19 nt, Artificial Sequence
  Description of Artificial Sequence: Synthetic oligonucleotide
  Antisense strand to SEQ ID NO: 745638
cuugcacggaaauacccuc

SEQ ID NO: 745640 - RNA, 19 nt, Artificial Sequence
  Description of Artificial Sequence: Synthetic oligonucleotide
  Sense strand starting at position 3365 of SEQ ID NO: 586805
aggguauuuccgugcaaga

SEQ ID NO: 745641 - RNA, 19 nt, Artificial Sequence
  Description of Artificial Sequence: Synthetic oligonucleotide
  Antisense strand to SEQ ID NO: 745640
ucuugcacggaaauacccu

SEQ ID NO: 745642 - RNA, 19 nt, Artificial Sequence
  Description of Artificial Sequence: Synthetic oligonucleotide
  Sense strand starting at position 3398 of SEQ ID NO: 586805
uguugcaucccacauuaua

SEQ ID NO: 745643 - RNA, 19 nt, Artificial Sequence
  Description of Artificial Sequence: Synthetic oligonucleotide
  Antisense strand to SEQ ID NO: 745642
uauaaugugggaugcaaca

SEQ ID NO: 745644 - RNA, 19 nt, Artificial Sequence
  Description of Artificial Sequence: Synthetic oligonucleotide
  Sense strand starting at position 3414 of SEQ ID NO: 586805
auaaaucuuguaggcacaa

SEQ ID NO: 745645 - RNA, 19 nt, Artificial Sequence
  Description of Artificial Sequence: Synthetic oligonucleotide
  Antisense strand to SEQ ID NO: 745644
uugugccuacaagauuuau

SEQ ID NO: 745646 - RNA, 19 nt, Artificial Sequence
  Description of Artificial Sequence: Synthetic oligonucleotide
  Sense strand starting at position 3427 of SEQ ID NO: 586805
gcacaauaagauuguuacu

SEQ ID NO: 745647 - RNA, 19 nt, Artificial Sequence
  Description of Artificial Sequence: Synthetic oligonucleotide
  Antisense strand to SEQ ID NO: 745646
aguaacaaucuuauugugc

SEQ ID NO: 745648 - RNA, 19 nt, Artificial Sequence
  Description of Artificial Sequence: Synthetic oligonucleotide
  Sense strand starting at position 3429 of SEQ ID NO: 586805
acaauaagauuguuacuug

SEQ ID NO: 745649 - RNA, 19 nt, Artificial Sequence
  Description of Artificial Sequence: Synthetic oligonucleotide
  Antisense strand to SEQ ID NO: 745648
caaguaacaaucuuauugu

SEQ ID NO: 745650 - RNA, 19 nt, Artificial Sequence
  Description of Artificial Sequence: Synthetic oligonucleotide
  Sense strand starting at position 3432 of SEQ ID NO: 586805
auaagauuguuacuugcau

SEQ ID NO: 745651 - RNA, 19 nt, Artificial Sequence
  Description of Artificial Sequence: Synthetic oligonucleotide
  Antisense strand to SEQ ID NO: 745650
augcaaguaacaaucuuau

SEQ ID NO: 745652 - RNA, 19 nt, Artificial Sequence
  Description of Artificial Sequence: Synthetic oligonucleotide
  Sense strand starting at position 3516 of SEQ ID NO: 586805
ugucuuauccgauagcaga

SEQ ID NO: 745653 - RNA, 19 nt, Artificial Sequence
  Description of Artificial Sequence: Synthetic oligonucleotide
  Antisense strand to SEQ ID NO: 745652
ucugcuaucggauaagaca

SEQ ID NO: 745654 - RNA, 19 nt, Artificial Sequence
  Description of Artificial Sequence: Synthetic oligonucleotide
  Sense strand starting at position 3538 of SEQ ID NO: 586805
aacaguuagguuuaagcaa

SEQ ID NO: 745655 - RNA, 19 nt, Artificial Sequence
  Description of Artificial Sequence: Synthetic oligonucleotide
  Antisense strand to SEQ ID NO: 745654
uugcuuaaaccuaacuguu

SEQ ID NO: 745656 - RNA, 19 nt, Artificial Sequence
  Description of Artificial Sequence: Synthetic oligonucleotide
  Sense strand starting at position 3553 of SEQ ID NO: 586805
gcaaguguauaaucauaaa

SEQ ID NO: 745657 - RNA, 19 nt, Artificial Sequence
  Description of Artificial Sequence: Synthetic oligonucleotide
  Antisense strand to SEQ ID NO: 745656
uuuaugauuauacacuugc

SEQ ID NO: 745658 - RNA, 19 nt, Artificial Sequence
  Description of Artificial Sequence: Synthetic oligonucleotide
  Sense strand starting at position 3818 of SEQ ID NO: 586805
gugccacuagauggguaua

SEQ ID NO: 745659 - RNA, 19 nt, Artificial Sequence
  Description of Artificial Sequence: Synthetic oligonucleotide
  Antisense strand to SEQ ID NO: 745658
uauacccaucuaguggcac

SEQ ID NO: 745660 - RNA, 19 nt, Artificial Sequence
  Description of Artificial Sequence: Synthetic oligonucleotide
  Sense strand starting at position 3819 of SEQ ID NO: 586805
ugccacuagauggguauaa

SEQ ID NO: 745661 - RNA, 19 nt, Artificial Sequence
  Description of Artificial Sequence: Synthetic oligonucleotide
  Antisense strand to SEQ ID NO: 745660
uuauacccaucuaguggca

SEQ ID NO: 745662 - RNA, 19 nt, Artificial Sequence
  Description of Artificial Sequence: Synthetic oligonucleotide
  Sense strand starting at position 3934 of SEQ ID NO: 586805
agagauguugcacaguaca

SEQ ID NO: 745663 - RNA, 19 nt, Artificial Sequence
  Description of Artificial Sequence: Synthetic oligonucleotide
  Antisense strand to SEQ ID NO: 745662
uguacugugcaacaucucu

SEQ ID NO: 745664 - RNA, 19 nt, Artificial Sequence
  Description of Artificial Sequence: Synthetic oligonucleotide
  Sense strand starting at position 3942 of SEQ ID NO: 586805
ugcacaguacaucaaaguu

SEQ ID NO: 745665 - RNA, 19 nt, Artificial Sequence
  Description of Artificial Sequence: Synthetic oligonucleotide
  Antisense strand to SEQ ID NO: 745664
aacuuugauguacugugca

SEQ ID NO: 745666 - RNA, 19 nt, Artificial Sequence
  Description of Artificial Sequence: Synthetic oligonucleotide
  Sense strand starting at position 3950 of SEQ ID NO: 586805
acaucaaaguuaguucuaa

SEQ ID NO: 745667 - RNA, 19 nt, Artificial Sequence
  Description of Artificial Sequence: Synthetic oligonucleotide
  Antisense strand to SEQ ID NO: 745666
uuagaacuaacuuugaugu

SEQ ID NO: 745668 - RNA, 19 nt, Artificial Sequence
  Description of Artificial Sequence: Synthetic oligonucleotide
  Sense strand starting at position 144 of SEQ ID NO: 586806
acauuauaauggcucagaa

SEQ ID NO: 745669 - RNA, 19 nt, Artificial Sequence
  Description of Artificial Sequence: Synthetic oligonucleotide
  Antisense strand to SEQ ID NO: 745668
uucugagccauuauaaugu

SEQ ID NO: 745670 - RNA, 19 nt, Artificial Sequence
  Description of Artificial Sequence: Synthetic oligonucleotide
  Sense strand starting at position 163 of SEQ ID NO: 586806
uggacauuguucuuaaaca

SEQ ID NO: 745671 - RNA, 19 nt, Artificial Sequence
  Description of Artificial Sequence: Synthetic oligonucleotide
  Antisense strand to SEQ ID NO: 745670
uguuuaagaacaaugucca

SEQ ID NO: 745672 - RNA, 19 nt, Artificial Sequence
  Description of Artificial Sequence: Synthetic oligonucleotide
  Sense strand starting at position 563 of SEQ ID NO: 586806
gcuauauuagggcaguauc

SEQ ID NO: 745673 - RNA, 19 nt, Artificial Sequence
  Description of Artificial Sequence: Synthetic oligonucleotide
  Antisense strand to SEQ ID NO: 745672
gauacugcccuaauauagc

SEQ ID NO: 745674 - RNA, 19 nt, Artificial Sequence
  Description of Artificial Sequence: Synthetic oligonucleotide
  Sense strand starting at position 566 of SEQ ID NO: 586806
auauuagggcaguaucuua

SEQ ID NO: 745675 - RNA, 19 nt, Artificial Sequence
  Description of Artificial Sequence: Synthetic oligonucleotide
  Antisense strand to SEQ ID NO: 745674
uaagauacugcccuaauau

SEQ ID NO: 745676 - RNA, 19 nt, Artificial Sequence
  Description of Artificial Sequence: Synthetic oligonucleotide
  Sense strand starting at position 681 of SEQ ID NO: 586806
cuuaauaauggaggagcua

SEQ ID NO: 745677 - RNA, 19 nt, Artificial Sequence
  Description of Artificial Sequence: Synthetic oligonucleotide
  Antisense strand to SEQ ID NO: 745676
uagcuccuccauuauuaag

SEQ ID NO: 745678 - RNA, 19 nt, Artificial Sequence
  Description of Artificial Sequence: Synthetic oligonucleotide
  Sense strand starting at position 728 of SEQ ID NO: 586806
cagugaccuucuguuaaga

SEQ ID NO: 745679 - RNA, 19 nt, Artificial Sequence
  Description of Artificial Sequence: Synthetic oligonucleotide
  Antisense strand to SEQ ID NO: 745678
ucuuaacagaaggucacug

SEQ ID NO: 745680 - RNA, 19 nt, Artificial Sequence
  Description of Artificial Sequence: Synthetic oligonucleotide
  Sense strand starting at position 871 of SEQ ID NO: 586806
agcacuuauguauaaauag

SEQ ID NO: 745681 - RNA, 19 nt, Artificial Sequence
  Description of Artificial Sequence: Synthetic oligonucleotide
  Antisense strand to SEQ ID NO: 745680
cuauuuauacauaagugcu

SEQ ID NO: 745682 - RNA, 19 nt, Artificial Sequence
  Description of Artificial Sequence: Synthetic oligonucleotide
  Sense strand starting at position 977 of SEQ ID NO: 586806
uuaguaucacuacauugua

SEQ ID NO: 745683 - RNA, 19 nt, Artificial Sequence
  Description of Artificial Sequence: Synthetic oligonucleotide
  Antisense strand to SEQ ID NO: 745682
uacaauguagugauacuaa

SEQ ID NO: 745684 - RNA, 19 nt, Artificial Sequence
  Description of Artificial Sequence: Synthetic oligonucleotide
  Sense strand starting at position 980 of SEQ ID NO: 586806
guaucacuacauuguaaua

SEQ ID NO: 745685 - RNA, 19 nt, Artificial Sequence
  Description of Artificial Sequence: Synthetic oligonucleotide
  Antisense strand to SEQ ID NO: 745684
uauuacaauguagugauac

SEQ ID NO: 745686 - RNA, 19 nt, Artificial Sequence
  Description of Artificial Sequence: Synthetic oligonucleotide
  Sense strand starting at position 1106 of SEQ ID NO: 586806
uuaagaaauaguggagcau

SEQ ID NO: 745687 - RNA, 19 nt, Artificial Sequence
  Description of Artificial Sequence: Synthetic oligonucleotide
  Antisense strand to SEQ ID NO: 745686
augcuccacuauuucuuaa

SEQ ID NO: 745688 - RNA, 19 nt, Artificial Sequence
  Description of Artificial Sequence: Synthetic oligonucleotide
  Sense strand starting at position 1247 of SEQ ID NO: 586806
aaguuauacuuaguaagug

SEQ ID NO: 745689 - RNA, 19 nt, Artificial Sequence
  Description of Artificial Sequence: Synthetic oligonucleotide
  Antisense strand to SEQ ID NO: 745688
cacuuacuaaguauaacuu

SEQ ID NO: 745690 - RNA, 19 nt, Artificial Sequence
  Description of Artificial Sequence: Synthetic oligonucleotide
  Sense strand starting at position 1400 of SEQ ID NO: 586806
guccaaauuuaggcagcau

SEQ ID NO: 745691 - RNA, 19 nt, Artificial Sequence
  Description of Artificial Sequence: Synthetic oligonucleotide
  Antisense strand to SEQ ID NO: 745690
augcugccuaaauuuggac

SEQ ID NO: 745692 - RNA, 19 nt, Artificial Sequence
  Description of Artificial Sequence: Synthetic oligonucleotide
  Sense strand starting at position 2097 of SEQ ID NO: 586806
ggaguaugagacugagcaa

SEQ ID NO: 745693 - RNA, 19 nt, Artificial Sequence
  Description of Artificial Sequence: Synthetic oligonucleotide
  Antisense strand to SEQ ID NO: 745692
uugcucagucucauacucc

SEQ ID NO: 745694 - RNA, 19 nt, Artificial Sequence
  Description of Artificial Sequence: Synthetic oligonucleotide
  Sense strand starting at position 2100 of SEQ ID NO: 586806
guaugagacugagcaaugu

SEQ ID NO: 745695 - RNA, 19 nt, Artificial Sequence
  Description of Artificial Sequence: Synthetic oligonucleotide
  Antisense strand to SEQ ID NO: 745694
acauugcucagucucauac

SEQ ID NO: 745696 - RNA, 19 nt, Artificial Sequence
  Description of Artificial Sequence: Synthetic oligonucleotide
  Sense strand starting at position 2104 of SEQ ID NO: 586806
gagacugagcaauguuuac

SEQ ID NO: 745697 - RNA, 19 nt, Artificial Sequence
  Description of Artificial Sequence: Synthetic oligonucleotide
  Antisense strand to SEQ ID NO: 745696
guaaacauugcucagucuc

SEQ ID NO: 745698 - RNA, 19 nt, Artificial Sequence
  Description of Artificial Sequence: Synthetic oligonucleotide
  Sense strand starting at position 2258 of SEQ ID NO: 586806
uucuaagagccacaguauu

SEQ ID NO: 745699 - RNA, 19 nt, Artificial Sequence
  Description of Artificial Sequence: Synthetic oligonucleotide
  Antisense strand to SEQ ID NO: 745698
aauacuguggcucuuagaa

SEQ ID NO: 745700 - RNA, 19 nt, Artificial Sequence
  Description of Artificial Sequence: Synthetic oligonucleotide
  Sense strand starting at position 2271 of SEQ ID NO: 586806
aguauuagguauccuauua

SEQ ID NO: 745701 - RNA, 19 nt, Artificial Sequence
  Description of Artificial Sequence: Synthetic oligonucleotide
  Antisense strand to SEQ ID NO: 745700
uaauaggauaccuaauacu

SEQ ID NO: 745702 - RNA, 19 nt, Artificial Sequence
  Description of Artificial Sequence: Synthetic oligonucleotide
  Sense strand starting at position 2380 of SEQ ID NO: 586806
agagaaaccuagucaucuu

SEQ ID NO: 745703 - RNA, 19 nt, Artificial Sequence
  Description of Artificial Sequence: Synthetic oligonucleotide
  Antisense strand to SEQ ID NO: 745702
aagaugacuagguuucucu

SEQ ID NO: 745704 - RNA, 19 nt, Artificial Sequence
  Description of Artificial Sequence: Synthetic oligonucleotide
  Sense strand starting at position 2387 of SEQ ID NO: 586806
ccuagucaucuugaggacu

SEQ ID NO: 745705 - RNA, 19 nt, Artificial Sequence
  Description of Artificial Sequence: Synthetic oligonucleotide
  Antisense strand to SEQ ID NO: 745704
aguccucaagaugacuagg

SEQ ID NO: 745706 - RNA, 19 nt, Artificial Sequence
  Description of Artificial Sequence: Synthetic oligonucleotide
  Sense strand starting at position 2400 of SEQ ID NO: 586806
aggacuaaguuaucaagcu

SEQ ID NO: 745707 - RNA, 19 nt, Artificial Sequence
  Description of Artificial Sequence: Synthetic oligonucleotide
  Antisense strand to SEQ ID NO: 745706
agcuugauaacuuaguccu

SEQ ID NO: 745708 - RNA, 19 nt, Artificial Sequence
  Description of Artificial Sequence: Synthetic oligonucleotide
  Sense strand starting at position 2464 of SEQ ID NO: 586806
gugagagcuuucucuauuu

SEQ ID NO: 745709 - RNA, 19 nt, Artificial Sequence
  Description of Artificial Sequence: Synthetic oligonucleotide
  Antisense strand to SEQ ID NO: 745708
aaauagagaaagcucucac

SEQ ID NO: 745710 - RNA, 19 nt, Artificial Sequence
  Description of Artificial Sequence: Synthetic oligonucleotide
  Sense strand starting at position 2562 of SEQ ID NO: 586806
gacauacugcaguaaguaa

SEQ ID NO: 745711 - RNA, 19 nt, Artificial Sequence
  Description of Artificial Sequence: Synthetic oligonucleotide
  Antisense strand to SEQ ID NO: 745710
uuacuuacugcaguauguc

SEQ ID NO: 745712 - RNA, 19 nt, Artificial Sequence
  Description of Artificial Sequence: Synthetic oligonucleotide
  Sense strand starting at position 2659 of SEQ ID NO: 586806
guaccacuacauuguaaca

SEQ ID NO: 745713 - RNA, 19 nt, Artificial Sequence
  Description of Artificial Sequence: Synthetic oligonucleotide
  Antisense strand to SEQ ID NO: 745712
uguuacaauguagugguac

SEQ ID NO: 745714 - RNA, 19 nt, Artificial Sequence
  Description of Artificial Sequence: Synthetic oligonucleotide
  Sense strand starting at position 2761 of SEQ ID NO: 586806
gucagcaaugacugauuaa

SEQ ID NO: 745715 - RNA, 19 nt, Artificial Sequence
  Description of Artificial Sequence: Synthetic oligonucleotide
  Antisense strand to SEQ ID NO: 745714
uuaaucagucauugcugac

SEQ ID NO: 745716 - RNA, 19 nt, Artificial Sequence
  Description of Artificial Sequence: Synthetic oligonucleotide
  Sense strand starting at position 2764 of SEQ ID NO: 586806
agcaaugacugauuaauua

SEQ ID NO: 745717 - RNA, 19 nt, Artificial Sequence
  Description of Artificial Sequence: Synthetic oligonucleotide
  Antisense strand to SEQ ID NO: 745716
uaauuaaucagucauugcu

SEQ ID NO: 745718 - RNA, 19 nt, Artificial Sequence
  Description of Artificial Sequence: Synthetic oligonucleotide
  Sense strand starting at position 2772 of SEQ ID NO: 586806
cugauuaauuaacuguaga

SEQ ID NO: 745719 - RNA, 19 nt, Artificial Sequence
  Description of Artificial Sequence: Synthetic oligonucleotide
  Antisense strand to SEQ ID NO: 745718
ucuacaguuaauuaaucag

SEQ ID NO: 745720 - RNA, 19 nt, Artificial Sequence
  Description of Artificial Sequence: Synthetic oligonucleotide
  Sense strand starting at position 2831 of SEQ ID NO: 586806
ggagcugaacacuguuaca

SEQ ID NO: 745721 - RNA, 19 nt, Artificial Sequence
  Description of Artificial Sequence: Synthetic oligonucleotide
  Antisense strand to SEQ ID NO: 745720
uguaacaguguucagcucc

SEQ ID NO: 745722 - RNA, 19 nt, Artificial Sequence
  Description of Artificial Sequence: Synthetic oligonucleotide
  Sense strand starting at position 2881 of SEQ ID NO: 586806
cccugauuccuaugggagu

SEQ ID NO: 745723 - RNA, 19 nt, Artificial Sequence
  Description of Artificial Sequence: Synthetic oligonucleotide
  Antisense strand to SEQ ID NO: 745722
acucccauaggaaucaggg

SEQ ID NO: 745724 - RNA, 19 nt, Artificial Sequence
  Description of Artificial Sequence: Synthetic oligonucleotide
  Sense strand starting at position 3099 of SEQ ID NO: 586806
uggaguugaccucacaagu

SEQ ID NO: 745725 - RNA, 19 nt, Artificial Sequence
  Description of Artificial Sequence: Synthetic oligonucleotide
  Antisense strand to SEQ ID NO: 745724
acuugugaggucaacucca

SEQ ID NO: 745726 - RNA, 19 nt, Artificial Sequence
  Description of Artificial Sequence: Synthetic oligonucleotide
  Sense strand starting at position 3116 of SEQ ID NO: 586806
gucucuuggagguauguaa

SEQ ID NO: 745727 - RNA, 19 nt, Artificial Sequence
  Description of Artificial Sequence: Synthetic oligonucleotide
  Antisense strand to SEQ ID NO: 745726
uuacauaccuccaagagac

SEQ ID NO: 745728 - RNA, 19 nt, Artificial Sequence
  Description of Artificial Sequence: Synthetic oligonucleotide
  Sense strand starting at position 3124 of SEQ ID NO: 586806
gagguauguaauuaagagu

SEQ ID NO: 745729 - RNA, 19 nt, Artificial Sequence
  Description of Artificial Sequence: Synthetic oligonucleotide
  Antisense strand to SEQ ID NO: 745728
acucuuaauuacauaccuc

SEQ ID NO: 745730 - RNA, 19 nt, Artificial Sequence
  Description of Artificial Sequence: Synthetic oligonucleotide
  Sense strand starting at position 3230 of SEQ ID NO: 586806
gcacucuaauaguugacau

SEQ ID NO: 745731 - RNA, 19 nt, Artificial Sequence
  Description of Artificial Sequence: Synthetic oligonucleotide
  Antisense strand to SEQ ID NO: 745730
augucaacuauuagagugc

SEQ ID NO: 745732 - RNA, 19 nt, Artificial Sequence
  Description of Artificial Sequence: Synthetic oligonucleotide
  Sense strand starting at position 3242 of SEQ ID NO: 586806
uugacaucagcaggcaaau

SEQ ID NO: 745733 - RNA, 19 nt, Artificial Sequence
  Description of Artificial Sequence: Synthetic oligonucleotide
  Antisense strand to SEQ ID NO: 745732
auuugccugcugaugucaa

SEQ ID NO: 745734 - RNA, 19 nt, Artificial Sequence
  Description of Artificial Sequence: Synthetic oligonucleotide
  Sense strand starting at position 3385 of SEQ ID NO: 586806
uugguugguccugagggaa

SEQ ID NO: 745735 - RNA, 19 nt, Artificial Sequence
  Description of Artificial Sequence: Synthetic oligonucleotide
  Antisense strand to SEQ ID NO: 745734
uucccucaggaccaaccaa

SEQ ID NO: 745736 - RNA, 19 nt, Artificial Sequence
  Description of Artificial Sequence: Synthetic oligonucleotide
  Sense strand starting at position 3388 of SEQ ID NO: 586806
guugguccugagggaagau

SEQ ID NO: 745737 - RNA, 19 nt, Artificial Sequence
  Description of Artificial Sequence: Synthetic oligonucleotide
  Antisense strand to SEQ ID NO: 745736
aucuucccucaggaccaac

SEQ ID NO: 745738 - RNA, 19 nt, Artificial Sequence
  Description of Artificial Sequence: Synthetic oligonucleotide
  Sense strand starting at position 3710 of SEQ ID NO: 586806
aggaacuauuaagcuaagu

SEQ ID NO: 745739 - RNA, 19 nt, Artificial Sequence
  Description of Artificial Sequence: Synthetic oligonucleotide
  Antisense strand to SEQ ID NO: 745738
acuuagcuuaauaguuccu

SEQ ID NO: 745740 - RNA, 19 nt, Artificial Sequence
  Description of Artificial Sequence: Synthetic oligonucleotide
  Sense strand starting at position 3715 of SEQ ID NO: 586806
cuauuaagcuaaguuugau

SEQ ID NO: 745741 - RNA, 19 nt, Artificial Sequence
  Description of Artificial Sequence: Synthetic oligonucleotide
  Antisense strand to SEQ ID NO: 745740
aucaaacuuagcuuaauag

SEQ ID NO: 745742 - RNA, 19 nt, Artificial Sequence
  Description of Artificial Sequence: Synthetic oligonucleotide
  Sense strand starting at position 3846 of SEQ ID NO: 586806
uuugacuaucuguaguaaa

SEQ ID NO: 745743 - RNA, 19 nt, Artificial Sequence
  Description of Artificial Sequence: Synthetic oligonucleotide
  Antisense strand to SEQ ID NO: 745742
uuuacuacagauagucaaa

SEQ ID NO: 745744 - RNA, 19 nt, Artificial Sequence
  Description of Artificial Sequence: Synthetic oligonucleotide
  Sense strand starting at position 3924 of SEQ ID NO: 586806
agaggcauccuuuacgagu

SEQ ID NO: 745745 - RNA, 19 nt, Artificial Sequence
  Description of Artificial Sequence: Synthetic oligonucleotide
  Antisense strand to SEQ ID NO: 745744
acucguaaaggaugccucu

SEQ ID NO: 745746 - RNA, 19 nt, Artificial Sequence
  Description of Artificial Sequence: Synthetic oligonucleotide
  Sense strand starting at position 3930 of SEQ ID NO: 586806
auccuuuacgaguaagaau

SEQ ID NO: 745747 - RNA, 19 nt, Artificial Sequence
  Description of Artificial Sequence: Synthetic oligonucleotide
  Antisense strand to SEQ ID NO: 745746
auucuuacucguaaaggau

SEQ ID NO: 745748 - RNA, 19 nt, Artificial Sequence
  Description of Artificial Sequence: Synthetic oligonucleotide
  Sense strand starting at position 129 of SEQ ID NO: 586807
acuuacuuucugggugauu

SEQ ID NO: 745749 - RNA, 19 nt, Artificial Sequence
  Description of Artificial Sequence: Synthetic oligonucleotide
  Antisense strand to SEQ ID NO: 745748
aaucacccagaaaguaagu

SEQ ID NO: 745750 - RNA, 19 nt, Artificial Sequence
  Description of Artificial Sequence: Synthetic oligonucleotide
  Sense strand starting at position 141 of SEQ ID NO: 586807
ggugauuugggcugcuuaa

SEQ ID NO: 745751 - RNA, 19 nt, Artificial Sequence
  Description of Artificial Sequence: Synthetic oligonucleotide
  Antisense strand to SEQ ID NO: 745750
uuaagcagcccaaaucacc

SEQ ID NO: 745752 - RNA, 19 nt, Artificial Sequence
  Description of Artificial Sequence: Synthetic oligonucleotide
  Sense strand starting at position 180 of SEQ ID NO: 586807
cucucaaacugguuaguaa

SEQ ID NO: 745753 - RNA, 19 nt, Artificial Sequence
  Description of Artificial Sequence: Synthetic oligonucleotide
  Antisense strand to SEQ ID NO: 745752
uuacuaaccaguuugagag

SEQ ID NO: 745754 - RNA, 19 nt, Artificial Sequence
  Description of Artificial Sequence: Synthetic oligonucleotide
  Sense strand starting at position 181 of SEQ ID NO: 586807
ucucaaacugguuaguaau

SEQ ID NO: 745755 - RNA, 19 nt, Artificial Sequence
  Description of Artificial Sequence: Synthetic oligonucleotide
  Antisense strand to SEQ ID NO: 745754
auuacuaaccaguuugaga

SEQ ID NO: 745756 - RNA, 19 nt, Artificial Sequence
  Description of Artificial Sequence: Synthetic oligonucleotide
  Sense strand starting at position 183 of SEQ ID NO: 586807
ucaaacugguuaguaauga

SEQ ID NO: 745757 - RNA, 19 nt, Artificial Sequence
  Description of Artificial Sequence: Synthetic oligonucleotide
  Antisense strand to SEQ ID NO: 745756
ucauuacuaaccaguuuga

SEQ ID NO: 745758 - RNA, 19 nt, Artificial Sequence
  Description of Artificial Sequence: Synthetic oligonucleotide
  Sense strand starting at position 345 of SEQ ID NO: 586807
acauuauaauggcucagaa

SEQ ID NO: 745759 - RNA, 19 nt, Artificial Sequence
  Description of Artificial Sequence: Synthetic oligonucleotide
  Antisense strand to SEQ ID NO: 745758
uucugagccauuauaaugu

SEQ ID NO: 745760 - RNA, 19 nt, Artificial Sequence
  Description of Artificial Sequence: Synthetic oligonucleotide
  Sense strand starting at position 364 of SEQ ID NO: 586807
uggacauuguucuuaaaca

SEQ ID NO: 745761 - RNA, 19 nt, Artificial Sequence
  Description of Artificial Sequence: Synthetic oligonucleotide
  Antisense strand to SEQ ID NO: 745760
uguuuaagaacaaugucca

SEQ ID NO: 745762 - RNA, 19 nt, Artificial Sequence
  Description of Artificial Sequence: Synthetic oligonucleotide
  Sense strand starting at position 764 of SEQ ID NO: 586807
gcuauauuagggcaguauc

SEQ ID NO: 745763 - RNA, 19 nt, Artificial Sequence
  Description of Artificial Sequence: Synthetic oligonucleotide
  Antisense strand to SEQ ID NO: 745762
gauacugcccuaauauagc

SEQ ID NO: 745764 - RNA, 19 nt, Artificial Sequence
  Description of Artificial Sequence: Synthetic oligonucleotide
  Sense strand starting at position 767 of SEQ ID NO: 586807
auauuagggcaguaucuua

SEQ ID NO: 745765 - RNA, 19 nt, Artificial Sequence
  Description of Artificial Sequence: Synthetic oligonucleotide
  Antisense strand to SEQ ID NO: 745764
uaagauacugcccuaauau

SEQ ID NO: 745766 - RNA, 19 nt, Artificial Sequence
  Description of Artificial Sequence: Synthetic oligonucleotide
  Sense strand starting at position 882 of SEQ ID NO: 586807
cuuaauaauggaggagcua

SEQ ID NO: 745767 - RNA, 19 nt, Artificial Sequence
  Description of Artificial Sequence: Synthetic oligonucleotide
  Antisense strand to SEQ ID NO: 745766
uagcuccuccauuauuaag

SEQ ID NO: 745768 - RNA, 19 nt, Artificial Sequence
  Description of Artificial Sequence: Synthetic oligonucleotide
  Sense strand starting at position 929 of SEQ ID NO: 586807
cagugaccuucuguuaaga

SEQ ID NO: 745769 - RNA, 19 nt, Artificial Sequence
  Description of Artificial Sequence: Synthetic oligonucleotide
  Antisense strand to SEQ ID NO: 745768
ucuuaacagaaggucacug

SEQ ID NO: 745770 - RNA, 19 nt, Artificial Sequence
  Description of Artificial Sequence: Synthetic oligonucleotide
  Sense strand starting at position 1072 of SEQ ID NO: 586807
agcacuuauguauaaauag

SEQ ID NO: 745771 - RNA, 19 nt, Artificial Sequence
  Description of Artificial Sequence: Synthetic oligonucleotide
  Antisense strand to SEQ ID NO: 745770
cuauuuauacauaagugcu

SEQ ID NO: 745772 - RNA, 19 nt, Artificial Sequence
  Description of Artificial Sequence: Synthetic oligonucleotide
  Sense strand starting at position 1178 of SEQ ID NO: 586807
uuaguaucacuacauugua

SEQ ID NO: 745773 - RNA, 19 nt, Artificial Sequence
  Description of Artificial Sequence: Synthetic oligonucleotide
  Antisense strand to SEQ ID NO: 745772
uacaauguagugauacuaa

SEQ ID NO: 745774 - RNA, 19 nt, Artificial Sequence
  Description of Artificial Sequence: Synthetic oligonucleotide
  Sense strand starting at position 1181 of SEQ ID NO: 586807
guaucacuacauuguaaua

SEQ ID NO: 745775 - RNA, 19 nt, Artificial Sequence
  Description of Artificial Sequence: Synthetic oligonucleotide
  Antisense strand to SEQ ID NO: 745774
uauuacaauguagugauac

SEQ ID NO: 745776 - RNA, 19 nt, Artificial Sequence
  Description of Artificial Sequence: Synthetic oligonucleotide
  Sense strand starting at position 1307 of SEQ ID NO: 586807
uuaagaaauaguggagcau

SEQ ID NO: 745777 - RNA, 19 nt, Artificial Sequence
  Description of Artificial Sequence: Synthetic oligonucleotide
  Antisense strand to SEQ ID NO: 745776
augcuccacuauuucuuaa

SEQ ID NO: 745778 - RNA, 19 nt, Artificial Sequence
  Description of Artificial Sequence: Synthetic oligonucleotide
  Sense strand starting at position 1448 of SEQ ID NO: 586807
aaguuauacuuaguaagug

SEQ ID NO: 745779 - RNA, 19 nt, Artificial Sequence
  Description of Artificial Sequence: Synthetic oligonucleotide
  Antisense strand to SEQ ID NO: 745778
cacuuacuaaguauaacuu

SEQ ID NO: 745780 - RNA, 19 nt, Artificial Sequence
  Description of Artificial Sequence: Synthetic oligonucleotide
  Sense strand starting at position 1601 of SEQ ID NO: 586807
guccaaauuuaggcagcau

SEQ ID NO: 745781 - RNA, 19 nt, Artificial Sequence
  Description of Artificial Sequence: Synthetic oligonucleotide
  Antisense strand to SEQ ID NO: 745780
augcugccuaaauuuggac

SEQ ID NO: 745782 - RNA, 19 nt, Artificial Sequence
  Description of Artificial Sequence: Synthetic oligonucleotide
  Sense strand starting at position 2298 of SEQ ID NO: 586807
ggaguaugagacugagcaa

SEQ ID NO: 745783 - RNA, 19 nt, Artificial Sequence
  Description of Artificial Sequence: Synthetic oligonucleotide
  Antisense strand to SEQ ID NO: 745782
uugcucagucucauacucc

SEQ ID NO: 745784 - RNA, 19 nt, Artificial Sequence
  Description of Artificial Sequence: Synthetic oligonucleotide
  Sense strand starting at position 2301 of SEQ ID NO: 586807
guaugagacugagcaaugu

SEQ ID NO: 745785 - RNA, 19 nt, Artificial Sequence
  Description of Artificial Sequence: Synthetic oligonucleotide
  Antisense strand to SEQ ID NO: 745784
acauugcucagucucauac

SEQ ID NO: 745786 - RNA, 19 nt, Artificial Sequence
  Description of Artificial Sequence: Synthetic oligonucleotide
  Sense strand starting at position 2305 of SEQ ID NO: 586807
gagacugagcaauguuuac

SEQ ID NO: 745787 - RNA, 19 nt, Artificial Sequence
  Description of Artificial Sequence: Synthetic oligonucleotide
  Antisense strand to SEQ ID NO: 745786
guaaacauugcucagucuc

SEQ ID NO: 745788 - RNA, 19 nt, Artificial Sequence
  Description of Artificial Sequence: Synthetic oligonucleotide
  Sense strand starting at position 2459 of SEQ ID NO: 586807
uucuaagagccacaguauu

SEQ ID NO: 745789 - RNA, 19 nt, Artificial Sequence
  Description of Artificial Sequence: Synthetic oligonucleotide
  Antisense strand to SEQ ID NO: 745788
aauacuguggcucuuagaa

SEQ ID NO: 745790 - RNA, 19 nt, Artificial Sequence
  Description of Artificial Sequence: Synthetic oligonucleotide
  Sense strand starting at position 2472 of SEQ ID NO: 586807
aguauuagguauccuauua

SEQ ID NO: 745791 - RNA, 19 nt, Artificial Sequence
  Description of Artificial Sequence: Synthetic oligonucleotide
  Antisense strand to SEQ ID NO: 745790
uaauaggauaccuaauacu

SEQ ID NO: 745792 - RNA, 19 nt, Artificial Sequence
  Description of Artificial Sequence: Synthetic oligonucleotide
  Sense strand starting at position 2581 of SEQ ID NO: 586807
agagaaaccuagucaucuu

SEQ ID NO: 745793 - RNA, 19 nt, Artificial Sequence
  Description of Artificial Sequence: Synthetic oligonucleotide
  Antisense strand to SEQ ID NO: 745792
aagaugacuagguuucucu

SEQ ID NO: 745794 - RNA, 19 nt, Artificial Sequence
  Description of Artificial Sequence: Synthetic oligonucleotide
  Sense strand starting at position 2588 of SEQ ID NO: 586807
ccuagucaucuugaggacu

SEQ ID NO: 745795 - RNA, 19 nt, Artificial Sequence
  Description of Artificial Sequence: Synthetic oligonucleotide
  Antisense strand to SEQ ID NO: 745794
aguccucaagaugacuagg

SEQ ID NO: 745796 - RNA, 19 nt, Artificial Sequence
  Description of Artificial Sequence: Synthetic oligonucleotide
  Sense strand starting at position 2601 of SEQ ID NO: 586807
aggacuaaguuaucaagcu

SEQ ID NO: 745797 - RNA, 19 nt, Artificial Sequence
  Description of Artificial Sequence: Synthetic oligonucleotide
  Antisense strand to SEQ ID NO: 745796
agcuugauaacuuaguccu

SEQ ID NO: 745798 - RNA, 19 nt, Artificial Sequence
  Description of Artificial Sequence: Synthetic oligonucleotide
  Sense strand starting at position 2665 of SEQ ID NO: 586807
gugagagcuuucucuauuu

SEQ ID NO: 745799 - RNA, 19 nt, Artificial Sequence
  Description of Artificial Sequence: Synthetic oligonucleotide
  Antisense strand to SEQ ID NO: 745798
aaauagagaaagcucucac

SEQ ID NO: 745800 - RNA, 19 nt, Artificial Sequence
  Description of Artificial Sequence: Synthetic oligonucleotide
  Sense strand starting at position 2763 of SEQ ID NO: 586807
gacauacugcaguaaguaa

SEQ ID NO: 745801 - RNA, 19 nt, Artificial Sequence
  Description of Artificial Sequence: Synthetic oligonucleotide
  Antisense strand to SEQ ID NO: 745800
uuacuuacugcaguauguc

SEQ ID NO: 745802 - RNA, 19 nt, Artificial Sequence
  Description of Artificial Sequence: Synthetic oligonucleotide
  Sense strand starting at position 2860 of SEQ ID NO: 586807
guaccacuacauuguaaca

SEQ ID NO: 745803 - RNA, 19 nt, Artificial Sequence
  Description of Artificial Sequence: Synthetic oligonucleotide
  Antisense strand to SEQ ID NO: 745802
uguuacaauguagugguac

SEQ ID NO: 745804 - RNA, 19 nt, Artificial Sequence
  Description of Artificial Sequence: Synthetic oligonucleotide
  Sense strand starting at position 2962 of SEQ ID NO: 586807
gucagcaaugacugauuaa

SEQ ID NO: 745805 - RNA, 19 nt, Artificial Sequence
  Description of Artificial Sequence: Synthetic oligonucleotide
  Antisense strand to SEQ ID NO: 745804
uuaaucagucauugcugac

SEQ ID NO: 745806 - RNA, 19 nt, Artificial Sequence
  Description of Artificial Sequence: Synthetic oligonucleotide
  Sense strand starting at position 2965 of SEQ ID NO: 586807
agcaaugacugauuaauua

SEQ ID NO: 745807 - RNA, 19 nt, Artificial Sequence
  Description of Artificial Sequence: Synthetic oligonucleotide
  Antisense strand to SEQ ID NO: 745806
uaauuaaucagucauugcu

SEQ ID NO: 745808 - RNA, 19 nt, Artificial Sequence
  Description of Artificial Sequence: Synthetic oligonucleotide
  Sense strand starting at position 2973 of SEQ ID NO: 586807
cugauuaauuaacuguaga

SEQ ID NO: 745809 - RNA, 19 nt, Artificial Sequence
  Description of Artificial Sequence: Synthetic oligonucleotide
  Antisense strand to SEQ ID NO: 745808
ucuacaguuaauuaaucag

SEQ ID NO: 745810 - RNA, 19 nt, Artificial Sequence
  Description of Artificial Sequence: Synthetic oligonucleotide
  Sense strand starting at position 3032 of SEQ ID NO: 586807
ggagcugaacacuguuaca

SEQ ID NO: 745811 - RNA, 19 nt, Artificial Sequence
  Description of Artificial Sequence: Synthetic oligonucleotide
  Antisense strand to SEQ ID NO: 745810
uguaacaguguucagcucc

SEQ ID NO: 745812 - RNA, 19 nt, Artificial Sequence
  Description of Artificial Sequence: Synthetic oligonucleotide
  Sense strand starting at position 3082 of SEQ ID NO: 586807
cccugauuccuaugggagu

SEQ ID NO: 745813 - RNA, 19 nt, Artificial Sequence
  Description of Artificial Sequence: Synthetic oligonucleotide
  Antisense strand to SEQ ID NO: 745812
acucccauaggaaucaggg

SEQ ID NO: 745814 - RNA, 19 nt, Artificial Sequence
  Description of Artificial Sequence: Synthetic oligonucleotide
  Sense strand starting at position 3300 of SEQ ID NO: 586807
uggaguugaccucacaagu

SEQ ID NO: 745815 - RNA, 19 nt, Artificial Sequence
  Description of Artificial Sequence: Synthetic oligonucleotide
  Antisense strand to SEQ ID NO: 745814
acuugugaggucaacucca

SEQ ID NO: 745816 - RNA, 19 nt, Artificial Sequence
  Description of Artificial Sequence: Synthetic oligonucleotide
  Sense strand starting at position 3317 of SEQ ID NO: 586807
gucucuuggagguauguaa

SEQ ID NO: 745817 - RNA, 19 nt, Artificial Sequence
  Description of Artificial Sequence: Synthetic oligonucleotide
  Antisense strand to SEQ ID NO: 745816
uuacauaccuccaagagac

SEQ ID NO: 745818 - RNA, 19 nt, Artificial Sequence
  Description of Artificial Sequence: Synthetic oligonucleotide
  Sense strand starting at position 3325 of SEQ ID NO: 586807
gagguauguaauuaagagu

SEQ ID NO: 745819 - RNA, 19 nt, Artificial Sequence
  Description of Artificial Sequence: Synthetic oligonucleotide
  Antisense strand to SEQ ID NO: 745818
acucuuaauuacauaccuc

SEQ ID NO: 745820 - RNA, 19 nt, Artificial Sequence
  Description of Artificial Sequence: Synthetic oligonucleotide
  Sense strand starting at position 3443 of SEQ ID NO: 586807
uugacaucagcaggcaaau

SEQ ID NO: 745821 - RNA, 19 nt, Artificial Sequence
  Description of Artificial Sequence: Synthetic oligonucleotide
  Antisense strand to SEQ ID NO: 745820
auuugccugcugaugucaa

SEQ ID NO: 745822 - RNA, 19 nt, Artificial Sequence
  Description of Artificial Sequence: Synthetic oligonucleotide
  Sense strand starting at position 3586 of SEQ ID NO: 586807
uugguugguccugagggaa

SEQ ID NO: 745823 - RNA, 19 nt, Artificial Sequence
  Description of Artificial Sequence: Synthetic oligonucleotide
  Antisense strand to SEQ ID NO: 745822
uucccucaggaccaaccaa

SEQ ID NO: 745824 - RNA, 19 nt, Artificial Sequence
  Description of Artificial Sequence: Synthetic oligonucleotide
  Sense strand starting at position 3589 of SEQ ID NO: 586807
guugguccugagggaagau

SEQ ID NO: 745825 - RNA, 19 nt, Artificial Sequence
  Description of Artificial Sequence: Synthetic oligonucleotide
  Antisense strand to SEQ ID NO: 745824
aucuucccucaggaccaac

SEQ ID NO: 745826 - RNA, 19 nt, Artificial Sequence
  Description of Artificial Sequence: Synthetic oligonucleotide
  Sense strand starting at position 3911 of SEQ ID NO: 586807
aggaacuauuaagcuaagu

SEQ ID NO: 745827 - RNA, 19 nt, Artificial Sequence
  Description of Artificial Sequence: Synthetic oligonucleotide
  Antisense strand to SEQ ID NO: 745826
acuuagcuuaauaguuccu

SEQ ID NO: 745828 - RNA, 19 nt, Artificial Sequence
  Description of Artificial Sequence: Synthetic oligonucleotide
  Sense strand starting at position 23 of SEQ ID NO: 586808
gcaccacuagugugauguu

SEQ ID NO: 745829 - RNA, 19 nt, Artificial Sequence
  Description of Artificial Sequence: Synthetic oligonucleotide
  Antisense strand to SEQ ID NO: 745828
aacaucacacuaguggugc

SEQ ID NO: 745830 - RNA, 19 nt, Artificial Sequence
  Description of Artificial Sequence: Synthetic oligonucleotide
  Sense strand starting at position 32 of SEQ ID NO: 586808
gugugauguugggcacaga

SEQ ID NO: 745831 - RNA, 19 nt, Artificial Sequence
  Description of Artificial Sequence: Synthetic oligonucleotide
  Antisense strand to SEQ ID NO: 745830
ucugugcccaacaucacac

SEQ ID NO: 745832 - RNA, 19 nt, Artificial Sequence
  Description of Artificial Sequence: Synthetic oligonucleotide
  Sense strand starting at position 33 of SEQ ID NO: 586808
ugugauguugggcacagau

SEQ ID NO: 745833 - RNA, 19 nt, Artificial Sequence
  Description of Artificial Sequence: Synthetic oligonucleotide
  Antisense strand to SEQ ID NO: 745832
aucugugcccaacaucaca

SEQ ID NO: 745834 - RNA, 19 nt, Artificial Sequence
  Description of Artificial Sequence: Synthetic oligonucleotide
  Sense strand starting at position 35 of SEQ ID NO: 586808
ugauguugggcacagauau

SEQ ID NO: 745835 - RNA, 19 nt, Artificial Sequence
  Description of Artificial Sequence: Synthetic oligonucleotide
  Antisense strand to SEQ ID NO: 745834
auaucugugcccaacauca

SEQ ID NO: 745836 - RNA, 19 nt, Artificial Sequence
  Description of Artificial Sequence: Synthetic oligonucleotide
  Sense strand starting at position 56 of SEQ ID NO: 586808
aggcucuguuagccucaau

SEQ ID NO: 745837 - RNA, 19 nt, Artificial Sequence
  Description of Artificial Sequence: Synthetic oligonucleotide
  Antisense strand to SEQ ID NO: 745836
auugaggcuaacagagccu

SEQ ID NO: 745838 - RNA, 19 nt, Artificial Sequence
  Description of Artificial Sequence: Synthetic oligonucleotide
  Sense strand starting at position 111 of SEQ ID NO: 586808
cuuguuauuguggagucuu

SEQ ID NO: 745839 - RNA, 19 nt, Artificial Sequence
  Description of Artificial Sequence: Synthetic oligonucleotide
  Antisense strand to SEQ ID NO: 745838
aagacuccacaauaacaag

SEQ ID NO: 745840 - RNA, 19 nt, Artificial Sequence
  Description of Artificial Sequence: Synthetic oligonucleotide
  Sense strand starting at position 121 of SEQ ID NO: 586808
uggagucuuggugaggguu

SEQ ID NO: 745841 - RNA, 19 nt, Artificial Sequence
  Description of Artificial Sequence: Synthetic oligonucleotide
  Antisense strand to SEQ ID NO: 745840
aacccucaccaagacucca

SEQ ID NO: 745842 - RNA, 19 nt, Artificial Sequence
  Description of Artificial Sequence: Synthetic oligonucleotide
  Sense strand starting at position 123 of SEQ ID NO: 586808
gagucuuggugaggguuca

SEQ ID NO: 745843 - RNA, 19 nt, Artificial Sequence
  Description of Artificial Sequence: Synthetic oligonucleotide
  Antisense strand to SEQ ID NO: 745842
ugaacccucaccaagacuc

SEQ ID NO: 745844 - RNA, 19 nt, Artificial Sequence
  Description of Artificial Sequence: Synthetic oligonucleotide
  Sense strand starting at position 160 of SEQ ID NO: 586808
agcgauuugccagggccau

SEQ ID NO: 745845 - RNA, 19 nt, Artificial Sequence
  Description of Artificial Sequence: Synthetic oligonucleotide
  Antisense strand to SEQ ID NO: 745844
auggcccuggcaaaucgcu

SEQ ID NO: 745846 - RNA, 19 nt, Artificial Sequence
  Description of Artificial Sequence: Synthetic oligonucleotide
  Sense strand starting at position 212 of SEQ ID NO: 586808
cuugcuucugcagacacau

SEQ ID NO: 745847 - RNA, 19 nt, Artificial Sequence
  Description of Artificial Sequence: Synthetic oligonucleotide
  Antisense strand to SEQ ID NO: 745846
augugucugcagaagcaag

SEQ ID NO: 745848 - RNA, 19 nt, Artificial Sequence
  Description of Artificial Sequence: Synthetic oligonucleotide
  Sense strand starting at position 223 of SEQ ID NO: 586808
agacacaucccuuaguguu

SEQ ID NO: 745849 - RNA, 19 nt, Artificial Sequence
  Description of Artificial Sequence: Synthetic oligonucleotide
  Antisense strand to SEQ ID NO: 745848
aacacuaagggaugugucu

SEQ ID NO: 745850 - RNA, 19 nt, Artificial Sequence
  Description of Artificial Sequence: Synthetic oligonucleotide
  Sense strand starting at position 231 of SEQ ID NO: 586808
cccuuaguguugggaagga

SEQ ID NO: 745851 - RNA, 19 nt, Artificial Sequence
  Description of Artificial Sequence: Synthetic oligonucleotide
  Antisense strand to SEQ ID NO: 745850
uccuucccaacacuaaggg

SEQ ID NO: 745852 - RNA, 19 nt, Artificial Sequence
  Description of Artificial Sequence: Synthetic oligonucleotide
  Sense strand starting at position 235 of SEQ ID NO: 586808
uaguguugggaaggacaga

SEQ ID NO: 745853 - RNA, 19 nt, Artificial Sequence
  Description of Artificial Sequence: Synthetic oligonucleotide
  Antisense strand to SEQ ID NO: 745852
ucuguccuucccaacacua

SEQ ID NO: 745854 - RNA, 19 nt, Artificial Sequence
  Description of Artificial Sequence: Synthetic oligonucleotide
  Sense strand starting at position 304 of SEQ ID NO: 586808
gggcuugucagggaaagug

SEQ ID NO: 745855 - RNA, 19 nt, Artificial Sequence
  Description of Artificial Sequence: Synthetic oligonucleotide
  Antisense strand to SEQ ID NO: 745854
cacuuucccugacaagccc

SEQ ID NO: 745856 - RNA, 19 nt, Artificial Sequence
  Description of Artificial Sequence: Synthetic oligonucleotide
  Sense strand starting at position 426 of SEQ ID NO: 586808
gaaggacacuucugggaag

SEQ ID NO: 745857 - RNA, 19 nt, Artificial Sequence
  Description of Artificial Sequence: Synthetic oligonucleotide
  Antisense strand to SEQ ID NO: 745856
cuucccagaaguguccuuc

SEQ ID NO: 745858 - RNA, 19 nt, Artificial Sequence
  Description of Artificial Sequence: Synthetic oligonucleotide
  Sense strand starting at position 428 of SEQ ID NO: 586808
aggacacuucugggaagca

SEQ ID NO: 745859 - RNA, 19 nt, Artificial Sequence
  Description of Artificial Sequence: Synthetic oligonucleotide
  Antisense strand to SEQ ID NO: 745858
ugcuucccagaaguguccu

SEQ ID NO: 745860 - RNA, 19 nt, Artificial Sequence
  Description of Artificial Sequence: Synthetic oligonucleotide
  Sense strand starting at position 481 of SEQ ID NO: 586808
ggugauagggcuugaccca

SEQ ID NO: 745861 - RNA, 19 nt, Artificial Sequence
  Description of Artificial Sequence: Synthetic oligonucleotide
  Antisense strand to SEQ ID NO: 745860
ugggucaagcccuaucacc

SEQ ID NO: 745862 - RNA, 19 nt, Artificial Sequence
  Description of Artificial Sequence: Synthetic oligonucleotide
  Sense strand starting at position 554 of SEQ ID NO: 586808
ugagcuccugacugugaga

SEQ ID NO: 745863 - RNA, 19 nt, Artificial Sequence
  Description of Artificial Sequence: Synthetic oligonucleotide
  Antisense strand to SEQ ID NO: 745862
ucucacagucaggagcuca

SEQ ID NO: 745864 - RNA, 19 nt, Artificial Sequence
  Description of Artificial Sequence: Synthetic oligonucleotide
  Sense strand starting at position 556 of SEQ ID NO: 586808
agcuccugacugugagaga

SEQ ID NO: 745865 - RNA, 19 nt, Artificial Sequence
  Description of Artificial Sequence: Synthetic oligonucleotide
  Antisense strand to SEQ ID NO: 745864
ucucucacagucaggagcu

SEQ ID NO: 745866 - RNA, 19 nt, Artificial Sequence
  Description of Artificial Sequence: Synthetic oligonucleotide
  Sense strand starting at position 557 of SEQ ID NO: 586808
gcuccugacugugagagau

SEQ ID NO: 745867 - RNA, 19 nt, Artificial Sequence
  Description of Artificial Sequence: Synthetic oligonucleotide
  Antisense strand to SEQ ID NO: 745866
aucucucacagucaggagc

SEQ ID NO: 745868 - RNA, 19 nt, Artificial Sequence
  Description of Artificial Sequence: Synthetic oligonucleotide
  Sense strand starting at position 565 of SEQ ID NO: 586808
cugugagagaugcaaggua

SEQ ID NO: 745869 - RNA, 19 nt, Artificial Sequence
  Description of Artificial Sequence: Synthetic oligonucleotide
  Antisense strand to SEQ ID NO: 745868
uaccuugcaucucucacag

SEQ ID NO: 745870 - RNA, 19 nt, Artificial Sequence
  Description of Artificial Sequence: Synthetic oligonucleotide
  Sense strand starting at position 645 of SEQ ID NO: 586808
gagccacauccuggagaga

SEQ ID NO: 745871 - RNA, 19 nt, Artificial Sequence
  Description of Artificial Sequence: Synthetic oligonucleotide
  Antisense strand to SEQ ID NO: 745870
ucucuccaggauguggcuc

SEQ ID NO: 745872 - RNA, 19 nt, Artificial Sequence
  Description of Artificial Sequence: Synthetic oligonucleotide
  Sense strand starting at position 820 of SEQ ID NO: 586808
cagaucaguuguggagaca

SEQ ID NO: 745873 - RNA, 19 nt, Artificial Sequence
  Description of Artificial Sequence: Synthetic oligonucleotide
  Antisense strand to SEQ ID NO: 745872
ugucuccacaacugaucug

SEQ ID NO: 745874 - RNA, 19 nt, Artificial Sequence
  Description of Artificial Sequence: Synthetic oligonucleotide
  Sense strand starting at position 941 of SEQ ID NO: 586808
ggacgaugucaccagugau

SEQ ID NO: 745875 - RNA, 19 nt, Artificial Sequence
  Description of Artificial Sequence: Synthetic oligonucleotide
  Antisense strand to SEQ ID NO: 745874
aucacuggugacaucgucc

SEQ ID NO: 745876 - RNA, 19 nt, Artificial Sequence
  Description of Artificial Sequence: Synthetic oligonucleotide
  Sense strand starting at position 944 of SEQ ID NO: 586808
cgaugucaccagugaucau

SEQ ID NO: 745877 - RNA, 19 nt, Artificial Sequence
  Description of Artificial Sequence: Synthetic oligonucleotide
  Antisense strand to SEQ ID NO: 745876
augaucacuggugacaucg

SEQ ID NO: 745878 - RNA, 19 nt, Artificial Sequence
  Description of Artificial Sequence: Synthetic oligonucleotide
  Sense strand starting at position 947 of SEQ ID NO: 586808
ugucaccagugaucauaaa

SEQ ID NO: 745879 - RNA, 19 nt, Artificial Sequence
  Description of Artificial Sequence: Synthetic oligonucleotide
  Antisense strand to SEQ ID NO: 745878
uuuaugaucacuggugaca

SEQ ID NO: 745880 - RNA, 19 nt, Artificial Sequence
  Description of Artificial Sequence: Synthetic oligonucleotide
  Sense strand starting at position 1721 of SEQ ID NO: 586808
cucacuaggcugcagaaau

SEQ ID NO: 745881 - RNA, 19 nt, Artificial Sequence
  Description of Artificial Sequence: Synthetic oligonucleotide
  Antisense strand to SEQ ID NO: 745880
auuucugcagccuagugag

SEQ ID NO: 745882 - RNA, 19 nt, Artificial Sequence
  Description of Artificial Sequence: Synthetic oligonucleotide
  Sense strand starting at position 2687 of SEQ ID NO: 586808
guggaaucucugggccuca

SEQ ID NO: 745883 - RNA, 19 nt, Artificial Sequence
  Description of Artificial Sequence: Synthetic oligonucleotide
  Antisense strand to SEQ ID NO: 745882
ugaggcccagagauuccac

SEQ ID NO: 745884 - RNA, 19 nt, Artificial Sequence
  Description of Artificial Sequence: Synthetic oligonucleotide
  Sense strand starting at position 2703 of SEQ ID NO: 586808
ucaacuucugagugcagga

SEQ ID NO: 745885 - RNA, 19 nt, Artificial Sequence
  Description of Artificial Sequence: Synthetic oligonucleotide
  Antisense strand to SEQ ID NO: 745884
uccugcacucagaaguuga

SEQ ID NO: 745886 - RNA, 19 nt, Artificial Sequence
  Description of Artificial Sequence: Synthetic oligonucleotide
  Sense strand starting at position 2775 of SEQ ID NO: 586808
gcccuuggcugauccagaa

SEQ ID NO: 745887 - RNA, 19 nt, Artificial Sequence
  Description of Artificial Sequence: Synthetic oligonucleotide
  Antisense strand to SEQ ID NO: 745886
uucuggaucagccaagggc

SEQ ID NO: 745888 - RNA, 19 nt, Artificial Sequence
  Description of Artificial Sequence: Synthetic oligonucleotide
  Sense strand starting at position 2779 of SEQ ID NO: 586808
uuggcugauccagaagcuu

SEQ ID NO: 745889 - RNA, 19 nt, Artificial Sequence
  Description of Artificial Sequence: Synthetic oligonucleotide
  Antisense strand to SEQ ID NO: 745888
aagcuucuggaucagccaa

SEQ ID NO: 745890 - RNA, 19 nt, Artificial Sequence
  Description of Artificial Sequence: Synthetic oligonucleotide
  Sense strand starting at position 2788 of SEQ ID NO: 586808
ccagaagcuuccuuggaca

SEQ ID NO: 745891 - RNA, 19 nt, Artificial Sequence
  Description of Artificial Sequence: Synthetic oligonucleotide
  Antisense strand to SEQ ID NO: 745890
uguccaaggaagcuucugg

SEQ ID NO: 745892 - RNA, 19 nt, Artificial Sequence
  Description of Artificial Sequence: Synthetic oligonucleotide
  Sense strand starting at position 2790 of SEQ ID NO: 586808
agaagcuuccuuggacaca

SEQ ID NO: 745893 - RNA, 19 nt, Artificial Sequence
  Description of Artificial Sequence: Synthetic oligonucleotide
  Antisense strand to SEQ ID NO: 745892
uguguccaaggaagcuucu

SEQ ID NO: 745894 - RNA, 19 nt, Artificial Sequence
  Description of Artificial Sequence: Synthetic oligonucleotide
  Sense strand starting at position 3149 of SEQ ID NO: 586808
ccuuuacaggccugaggaa

SEQ ID NO: 745895 - RNA, 19 nt, Artificial Sequence
  Description of Artificial Sequence: Synthetic oligonucleotide
  Antisense strand to SEQ ID NO: 745894
uuccucaggccuguaaagg

SEQ ID NO: 745896 - RNA, 19 nt, Artificial Sequence
  Description of Artificial Sequence: Synthetic oligonucleotide
  Sense strand starting at position 3235 of SEQ ID NO: 586808
acaacauucugaggugaca

SEQ ID NO: 745897 - RNA, 19 nt, Artificial Sequence
  Description of Artificial Sequence: Synthetic oligonucleotide
  Antisense strand to SEQ ID NO: 745896
ugucaccucagaauguugu

SEQ ID NO: 745898 - RNA, 19 nt, Artificial Sequence
  Description of Artificial Sequence: Synthetic oligonucleotide
  Sense strand starting at position 3407 of SEQ ID NO: 586808
gcugaaaggucaccugcuu

SEQ ID NO: 745899 - RNA, 19 nt, Artificial Sequence
  Description of Artificial Sequence: Synthetic oligonucleotide
  Antisense strand to SEQ ID NO: 745898
aagcaggugaccuuucagc

SEQ ID NO: 745900 - RNA, 19 nt, Artificial Sequence
  Description of Artificial Sequence: Synthetic oligonucleotide
  Sense strand starting at position 3515 of SEQ ID NO: 586808
cgugcagucuccuuagaug

SEQ ID NO: 745901 - RNA, 19 nt, Artificial Sequence
  Description of Artificial Sequence: Synthetic oligonucleotide
  Antisense strand to SEQ ID NO: 745900
caucuaaggagacugcacg

SEQ ID NO: 745902 - RNA, 19 nt, Artificial Sequence
  Description of Artificial Sequence: Synthetic oligonucleotide
  Sense strand starting at position 3518 of SEQ ID NO: 586808
gcagucuccuuagaugcaa

SEQ ID NO: 745903 - RNA, 19 nt, Artificial Sequence
  Description of Artificial Sequence: Synthetic oligonucleotide
  Antisense strand to SEQ ID NO: 745902
uugcaucuaaggagacugc

SEQ ID NO: 745904 - RNA, 19 nt, Artificial Sequence
  Description of Artificial Sequence: Synthetic oligonucleotide
  Sense strand starting at position 3531 of SEQ ID NO: 586808
augcaacaugcauguuuau

SEQ ID NO: 745905 - RNA, 19 nt, Artificial Sequence
  Description of Artificial Sequence: Synthetic oligonucleotide
  Antisense strand to SEQ ID NO: 745904
auaaacaugcauguugcau

SEQ ID NO: 745906 - RNA, 19 nt, Artificial Sequence
  Description of Artificial Sequence: Synthetic oligonucleotide
  Sense strand starting at position 3587 of SEQ ID NO: 586808
ggagauuccuucuguguca

SEQ ID NO: 745907 - RNA, 19 nt, Artificial Sequence
  Description of Artificial Sequence: Synthetic oligonucleotide
  Antisense strand to SEQ ID NO: 745906
ugacacagaaggaaucucc

SEQ ID NO: 745908 - RNA, 19 nt, Artificial Sequence
  Description of Artificial Sequence: Synthetic oligonucleotide
  Sense strand starting at position 374 of SEQ ID NO: 586809
gucugcauauuucugaagu

SEQ ID NO: 745909 - RNA, 19 nt, Artificial Sequence
  Description of Artificial Sequence: Synthetic oligonucleotide
  Antisense strand to SEQ ID NO: 745908
acuucagaaauaugcagac

SEQ ID NO: 745910 - RNA, 19 nt, Artificial Sequence
  Description of Artificial Sequence: Synthetic oligonucleotide
  Sense strand starting at position 375 of SEQ ID NO: 586809
ucugcauauuucugaaguc

SEQ ID NO: 745911 - RNA, 19 nt, Artificial Sequence
  Description of Artificial Sequence: Synthetic oligonucleotide
  Antisense strand to SEQ ID NO: 745910
gacuucagaaauaugcaga

SEQ ID NO: 745912 - RNA, 19 nt, Artificial Sequence
  Description of Artificial Sequence: Synthetic oligonucleotide
  Sense strand starting at position 657 of SEQ ID NO: 586809
gguugugacagcuggaaga

SEQ ID NO: 745913 - RNA, 19 nt, Artificial Sequence
  Description of Artificial Sequence: Synthetic oligonucleotide
  Antisense strand to SEQ ID NO: 745912
ucuuccagcugucacaacc

SEQ ID NO: 745914 - RNA, 19 nt, Artificial Sequence
  Description of Artificial Sequence: Synthetic oligonucleotide
  Sense strand starting at position 729 of SEQ ID NO: 586809
cauggugugcugcuuucua

SEQ ID NO: 745915 - RNA, 19 nt, Artificial Sequence
  Description of Artificial Sequence: Synthetic oligonucleotide
  Antisense strand to SEQ ID NO: 745914
uagaaagcagcacaccaug

SEQ ID NO: 745916 - RNA, 19 nt, Artificial Sequence
  Description of Artificial Sequence: Synthetic oligonucleotide
  Sense strand starting at position 733 of SEQ ID NO: 586809
gugugcugcuuucuagauu

SEQ ID NO: 745917 - RNA, 19 nt, Artificial Sequence
  Description of Artificial Sequence: Synthetic oligonucleotide
  Antisense strand to SEQ ID NO: 745916
aaucuagaaagcagcacac

SEQ ID NO: 745918 - RNA, 19 nt, Artificial Sequence
  Description of Artificial Sequence: Synthetic oligonucleotide
  Sense strand starting at position 766 of SEQ ID NO: 586809
ugagcaagcugcucucaga

SEQ ID NO: 745919 - RNA, 19 nt, Artificial Sequence
  Description of Artificial Sequence: Synthetic oligonucleotide
  Antisense strand to SEQ ID NO: 745918
ucugagagcagcuugcuca

SEQ ID NO: 745920 - RNA, 19 nt, Artificial Sequence
  Description of Artificial Sequence: Synthetic oligonucleotide
  Sense strand starting at position 834 of SEQ ID NO: 586809
ccagaccacuggguuuaaa

SEQ ID NO: 745921 - RNA, 19 nt, Artificial Sequence
  Description of Artificial Sequence: Synthetic oligonucleotide
  Antisense strand to SEQ ID NO: 745920
uuuaaacccaguggucugg

SEQ ID NO: 745922 - RNA, 19 nt, Artificial Sequence
  Description of Artificial Sequence: Synthetic oligonucleotide
  Sense strand starting at position 843 of SEQ ID NO: 586809
uggguuuaaaugugaagac

SEQ ID NO: 745923 - RNA, 19 nt, Artificial Sequence
  Description of Artificial Sequence: Synthetic oligonucleotide
  Antisense strand to SEQ ID NO: 745922
gucuucacauuuaaaccca

SEQ ID NO: 745924 - RNA, 19 nt, Artificial Sequence
  Description of Artificial Sequence: Synthetic oligonucleotide
  Sense strand starting at position 844 of SEQ ID NO: 586809
ggguuuaaaugugaagaca

SEQ ID NO: 745925 - RNA, 19 nt, Artificial Sequence
  Description of Artificial Sequence: Synthetic oligonucleotide
  Antisense strand to SEQ ID NO: 745924
ugucuucacauuuaaaccc

SEQ ID NO: 745926 - RNA, 19 nt, Artificial Sequence
  Description of Artificial Sequence: Synthetic oligonucleotide
  Sense strand starting at position 858 of SEQ ID NO: 586809
agacaucaguggucaccaa

SEQ ID NO: 745927 - RNA, 19 nt, Artificial Sequence
  Description of Artificial Sequence: Synthetic oligonucleotide
  Antisense strand to SEQ ID NO: 745926
uuggugaccacugaugucu

SEQ ID NO: 745928 - RNA, 19 nt, Artificial Sequence
  Description of Artificial Sequence: Synthetic oligonucleotide
  Sense strand starting at position 2162 of SEQ ID NO: 586809
guuccugaucuuggaggca

SEQ ID NO: 745929 - RNA, 19 nt, Artificial Sequence
  Description of Artificial Sequence: Synthetic oligonucleotide
  Antisense strand to SEQ ID NO: 745928
ugccuccaagaucaggaac

SEQ ID NO: 745930 - RNA, 19 nt, Artificial Sequence
  Description of Artificial Sequence: Synthetic oligonucleotide
  Sense strand starting at position 2276 of SEQ ID NO: 586809
ccugguuuguggaguguuu

SEQ ID NO: 745931 - RNA, 19 nt, Artificial Sequence
  Description of Artificial Sequence: Synthetic oligonucleotide
  Antisense strand to SEQ ID NO: 745930
aaacacuccacaaaccagg

SEQ ID NO: 745932 - RNA, 19 nt, Artificial Sequence
  Description of Artificial Sequence: Synthetic oligonucleotide
  Sense strand starting at position 2747 of SEQ ID NO: 586809
ggaccacagucuugcucaa

SEQ ID NO: 745933 - RNA, 19 nt, Artificial Sequence
  Description of Artificial Sequence: Synthetic oligonucleotide
  Antisense strand to SEQ ID NO: 745932
uugagcaagacuguggucc

SEQ ID NO: 745934 - RNA, 19 nt, Artificial Sequence
  Description of Artificial Sequence: Synthetic oligonucleotide
  Sense strand starting at position 3019 of SEQ ID NO: 586809
ggagguuguucccucauac

SEQ ID NO: 745935 - RNA, 19 nt, Artificial Sequence
  Description of Artificial Sequence: Synthetic oligonucleotide
  Antisense strand to SEQ ID NO: 745934
guaugagggaacaaccucc

SEQ ID NO: 745936 - RNA, 19 nt, Artificial Sequence
  Description of Artificial Sequence: Synthetic oligonucleotide
  Sense strand starting at position 3398 of SEQ ID NO: 586809
gcccauccucuccagagua

SEQ ID NO: 745937 - RNA, 19 nt, Artificial Sequence
  Description of Artificial Sequence: Synthetic oligonucleotide
  Antisense strand to SEQ ID NO: 745936
uacucuggagaggaugggc

SEQ ID NO: 745938 - RNA, 19 nt, Artificial Sequence
  Description of Artificial Sequence: Synthetic oligonucleotide
  Sense strand starting at position 303 of SEQ ID NO: 586810
ggagguauuuguaggagca

SEQ ID NO: 745939 - RNA, 19 nt, Artificial Sequence
  Description of Artificial Sequence: Synthetic oligonucleotide
  Antisense strand to SEQ ID NO: 745938
ugcuccuacaaauaccucc

SEQ ID NO: 745940 - RNA, 19 nt, Artificial Sequence
  Description of Artificial Sequence: Synthetic oligonucleotide
  Sense strand starting at position 313 of SEQ ID NO: 586810
guaggagcaucuuugaaga

SEQ ID NO: 745941 - RNA, 19 nt, Artificial Sequence
  Description of Artificial Sequence: Synthetic oligonucleotide
  Antisense strand to SEQ ID NO: 745940
ucuucaaagaugcuccuac

SEQ ID NO: 745942 - RNA, 19 nt, Artificial Sequence
  Description of Artificial Sequence: Synthetic oligonucleotide
  Sense strand starting at position 386 of SEQ ID NO: 586810
uuaggaaauuuggacauau

SEQ ID NO: 745943 - RNA, 19 nt, Artificial Sequence
  Description of Artificial Sequence: Synthetic oligonucleotide
  Antisense strand to SEQ ID NO: 745942
auauguccaaauuuccuaa

SEQ ID NO: 745944 - RNA, 19 nt, Artificial Sequence
  Description of Artificial Sequence: Synthetic oligonucleotide
  Sense strand starting at position 396 of SEQ ID NO: 586810
uggacauauggccauguuu

SEQ ID NO: 745945 - RNA, 19 nt, Artificial Sequence
  Description of Artificial Sequence: Synthetic oligonucleotide
  Antisense strand to SEQ ID NO: 745944
aaacauggccauaugucca

SEQ ID NO: 745946 - RNA, 19 nt, Artificial Sequence
  Description of Artificial Sequence: Synthetic oligonucleotide
  Sense strand starting at position 607 of SEQ ID NO: 586810
uugagauucuuagcccaca

SEQ ID NO: 745947 - RNA, 19 nt, Artificial Sequence
  Description of Artificial Sequence: Synthetic oligonucleotide
  Antisense strand to SEQ ID NO: 745946
ugugggcuaagaaucucaa

SEQ ID NO: 745948 - RNA, 19 nt, Artificial Sequence
  Description of Artificial Sequence: Synthetic oligonucleotide
  Sense strand starting at position 718 of SEQ ID NO: 586810
ggguauaaauaccuaagca

SEQ ID NO: 745949 - RNA, 19 nt, Artificial Sequence
  Description of Artificial Sequence: Synthetic oligonucleotide
  Antisense strand to SEQ ID NO: 745948
ugcuuagguauuuauaccc

SEQ ID NO: 745950 - RNA, 19 nt, Artificial Sequence
  Description of Artificial Sequence: Synthetic oligonucleotide
  Sense strand starting at position 763 of SEQ ID NO: 586810
ugaguuucagauugauagg

SEQ ID NO: 745951 - RNA, 19 nt, Artificial Sequence
  Description of Artificial Sequence: Synthetic oligonucleotide
  Antisense strand to SEQ ID NO: 745950
ccuaucaaucugaaacuca

SEQ ID NO: 745952 - RNA, 19 nt, Artificial Sequence
  Description of Artificial Sequence: Synthetic oligonucleotide
  Sense strand starting at position 790 of SEQ ID NO: 586810
cuuaguucgagugacuaac

SEQ ID NO: 745953 - RNA, 19 nt, Artificial Sequence
  Description of Artificial Sequence: Synthetic oligonucleotide
  Antisense strand to SEQ ID NO: 745952
guuagucacucgaacuaag

SEQ ID NO: 745954 - RNA, 19 nt, Artificial Sequence
  Description of Artificial Sequence: Synthetic oligonucleotide
  Sense strand starting at position 813 of SEQ ID NO: 586810
ucaguuuacccaggacuga

SEQ ID NO: 745955 - RNA, 19 nt, Artificial Sequence
  Description of Artificial Sequence: Synthetic oligonucleotide
  Antisense strand to SEQ ID NO: 745954
ucaguccuggguaaacuga

SEQ ID NO: 745956 - RNA, 19 nt, Artificial Sequence
  Description of Artificial Sequence: Synthetic oligonucleotide
  Sense strand starting at position 893 of SEQ ID NO: 586810
aggaaaguucugggcaaau

SEQ ID NO: 745957 - RNA, 19 nt, Artificial Sequence
  Description of Artificial Sequence: Synthetic oligonucleotide
  Antisense strand to SEQ ID NO: 745956
auuugcccagaacuuuccu

SEQ ID NO: 745958 - RNA, 19 nt, Artificial Sequence
  Description of Artificial Sequence: Synthetic oligonucleotide
  Sense strand starting at position 919 of SEQ ID NO: 586810
gaugguugauaaccuaauu

SEQ ID NO: 745959 - RNA, 19 nt, Artificial Sequence
  Description of Artificial Sequence: Synthetic oligonucleotide
  Antisense strand to SEQ ID NO: 745958
aauuagguuaucaaccauc

SEQ ID NO: 745960 - RNA, 19 nt, Artificial Sequence
  Description of Artificial Sequence: Synthetic oligonucleotide
  Sense strand starting at position 1078 of SEQ ID NO: 586810
ugaacaguuuccuccagga

SEQ ID NO: 745961 - RNA, 19 nt, Artificial Sequence
  Description of Artificial Sequence: Synthetic oligonucleotide
  Antisense strand to SEQ ID NO: 745960
uccuggaggaaacuguuca

SEQ ID NO: 745962 - RNA, 19 nt, Artificial Sequence
  Description of Artificial Sequence: Synthetic oligonucleotide
  Sense strand starting at position 1272 of SEQ ID NO: 586810
acacauguguucucaauaa

SEQ ID NO: 745963 - RNA, 19 nt, Artificial Sequence
  Description of Artificial Sequence: Synthetic oligonucleotide
  Antisense strand to SEQ ID NO: 745962
uuauugagaacacaugugu

SEQ ID NO: 745964 - RNA, 19 nt, Artificial Sequence
  Description of Artificial Sequence: Synthetic oligonucleotide
  Sense strand starting at position 1276 of SEQ ID NO: 586810
auguguucucaauaaguug

SEQ ID NO: 745965 - RNA, 19 nt, Artificial Sequence
  Description of Artificial Sequence: Synthetic oligonucleotide
  Antisense strand to SEQ ID NO: 745964
caacuuauugagaacacau

SEQ ID NO: 745966 - RNA, 19 nt, Artificial Sequence
  Description of Artificial Sequence: Synthetic oligonucleotide
  Sense strand starting at position 1335 of SEQ ID NO: 586810
gcaagaggucaucauauuc

SEQ ID NO: 745967 - RNA, 19 nt, Artificial Sequence
  Description of Artificial Sequence: Synthetic oligonucleotide
  Antisense strand to SEQ ID NO: 745966
gaauaugaugaccucuugc

SEQ ID NO: 745968 - RNA, 19 nt, Artificial Sequence
  Description of Artificial Sequence: Synthetic oligonucleotide
  Sense strand starting at position 1533 of SEQ ID NO: 586810
aaaguuuacugagcagaaa

SEQ ID NO: 745969 - RNA, 19 nt, Artificial Sequence
  Description of Artificial Sequence: Synthetic oligonucleotide
  Antisense strand to SEQ ID NO: 745968
uuucugcucaguaaacuuu

SEQ ID NO: 745970 - RNA, 19 nt, Artificial Sequence
  Description of Artificial Sequence: Synthetic oligonucleotide
  Sense strand starting at position 1536 of SEQ ID NO: 586810
guuuacugagcagaaaucu

SEQ ID NO: 745971 - RNA, 19 nt, Artificial Sequence
  Description of Artificial Sequence: Synthetic oligonucleotide
  Antisense strand to SEQ ID NO: 745970
agauuucugcucaguaaac

SEQ ID NO: 745972 - RNA, 19 nt, Artificial Sequence
  Description of Artificial Sequence: Synthetic oligonucleotide
  Sense strand starting at position 1757 of SEQ ID NO: 586810
acuagaguucugggaaguu

SEQ ID NO: 745973 - RNA, 19 nt, Artificial Sequence
  Description of Artificial Sequence: Synthetic oligonucleotide
  Antisense strand to SEQ ID NO: 745972
aacuucccagaacucuagu

SEQ ID NO: 745974 - RNA, 19 nt, Artificial Sequence
  Description of Artificial Sequence: Synthetic oligonucleotide
  Sense strand starting at position 1984 of SEQ ID NO: 586810
caaugugucccagagaagu

SEQ ID NO: 745975 - RNA, 19 nt, Artificial Sequence
  Description of Artificial Sequence: Synthetic oligonucleotide
  Antisense strand to SEQ ID NO: 745974
acuucucugggacacauug

SEQ ID NO: 745976 - RNA, 19 nt, Artificial Sequence
  Description of Artificial Sequence: Synthetic oligonucleotide
  Sense strand starting at position 2174 of SEQ ID NO: 586810
cagcguuugagagaggagu

SEQ ID NO: 745977 - RNA, 19 nt, Artificial Sequence
  Description of Artificial Sequence: Synthetic oligonucleotide
  Antisense strand to SEQ ID NO: 745976
acuccucucucaaacgcug

SEQ ID NO: 745978 - RNA, 19 nt, Artificial Sequence
  Description of Artificial Sequence: Synthetic oligonucleotide
  Sense strand starting at position 2300 of SEQ ID NO: 586810
uccuaauuugccugucuga

SEQ ID NO: 745979 - RNA, 19 nt, Artificial Sequence
  Description of Artificial Sequence: Synthetic oligonucleotide
  Antisense strand to SEQ ID NO: 745978
ucagacaggcaaauuagga

SEQ ID NO: 745980 - RNA, 19 nt, Artificial Sequence
  Description of Artificial Sequence: Synthetic oligonucleotide
  Sense strand starting at position 2303 of SEQ ID NO: 586810
uaauuugccugucugaagu

SEQ ID NO: 745981 - RNA, 19 nt, Artificial Sequence
  Description of Artificial Sequence: Synthetic oligonucleotide
  Antisense strand to SEQ ID NO: 745980
acuucagacaggcaaauua

SEQ ID NO: 745982 - RNA, 19 nt, Artificial Sequence
  Description of Artificial Sequence: Synthetic oligonucleotide
  Sense strand starting at position 2410 of SEQ ID NO: 586810
auagaacaucuuugcuuga

SEQ ID NO: 745983 - RNA, 19 nt, Artificial Sequence
  Description of Artificial Sequence: Synthetic oligonucleotide
  Antisense strand to SEQ ID NO: 745982
ucaagcaaagauguucuau

SEQ ID NO: 745984 - RNA, 19 nt, Artificial Sequence
  Description of Artificial Sequence: Synthetic oligonucleotide
  Sense strand starting at position 2412 of SEQ ID NO: 586810
agaacaucuuugcuugauc

SEQ ID NO: 745985 - RNA, 19 nt, Artificial Sequence
  Description of Artificial Sequence: Synthetic oligonucleotide
  Antisense strand to SEQ ID NO: 745984
gaucaagcaaagauguucu

SEQ ID NO: 745986 - RNA, 19 nt, Artificial Sequence
  Description of Artificial Sequence: Synthetic oligonucleotide
  Sense strand starting at position 2491 of SEQ ID NO: 586810
ucaggacuucccuagcagu

SEQ ID NO: 745987 - RNA, 19 nt, Artificial Sequence
  Description of Artificial Sequence: Synthetic oligonucleotide
  Antisense strand to SEQ ID NO: 745986
acugcuagggaaguccuga

SEQ ID NO: 745988 - RNA, 19 nt, Artificial Sequence
  Description of Artificial Sequence: Synthetic oligonucleotide
  Sense strand starting at position 2587 of SEQ ID NO: 586810
gggugauguaaagauguuu

SEQ ID NO: 745989 - RNA, 19 nt, Artificial Sequence
  Description of Artificial Sequence: Synthetic oligonucleotide
  Antisense strand to SEQ ID NO: 745988
aaacaucuuuacaucaccc

SEQ ID NO: 745990 - RNA, 19 nt, Artificial Sequence
  Description of Artificial Sequence: Synthetic oligonucleotide
  Sense strand starting at position 2746 of SEQ ID NO: 586810
ucagacuucuuggcaccaa

SEQ ID NO: 745991 - RNA, 19 nt, Artificial Sequence
  Description of Artificial Sequence: Synthetic oligonucleotide
  Antisense strand to SEQ ID NO: 745990
uuggugccaagaagucuga

SEQ ID NO: 745992 - RNA, 19 nt, Artificial Sequence
  Description of Artificial Sequence: Synthetic oligonucleotide
  Sense strand starting at position 2849 of SEQ ID NO: 586810
aggauuccuucugugagaa

SEQ ID NO: 745993 - RNA, 19 nt, Artificial Sequence
  Description of Artificial Sequence: Synthetic oligonucleotide
  Antisense strand to SEQ ID NO: 745992
uucucacagaaggaauccu

SEQ ID NO: 745994 - RNA, 19 nt, Artificial Sequence
  Description of Artificial Sequence: Synthetic oligonucleotide
  Sense strand starting at position 2850 of SEQ ID NO: 586810
ggauuccuucugugagaau

SEQ ID NO: 745995 - RNA, 19 nt, Artificial Sequence
  Description of Artificial Sequence: Synthetic oligonucleotide
  Antisense strand to SEQ ID NO: 745994
auucucacagaaggaaucc

SEQ ID NO: 745996 - RNA, 19 nt, Artificial Sequence
  Description of Artificial Sequence: Synthetic oligonucleotide
  Sense strand starting at position 2874 of SEQ ID NO: 586810
ccacauuauguccaguaga

SEQ ID NO: 745997 - RNA, 19 nt, Artificial Sequence
  Description of Artificial Sequence: Synthetic oligonucleotide
  Antisense strand to SEQ ID NO: 745996
ucuacuggacauaaugugg

SEQ ID NO: 745998 - RNA, 19 nt, Artificial Sequence
  Description of Artificial Sequence: Synthetic oligonucleotide
  Sense strand starting at position 2908 of SEQ ID NO: 586810
auuccucuccuugggauga

SEQ ID NO: 745999 - RNA, 19 nt, Artificial Sequence
  Description of Artificial Sequence: Synthetic oligonucleotide
  Antisense strand to SEQ ID NO: 745998
ucaucccaaggagaggaau

SEQ ID NO: 746000 - RNA, 19 nt, Artificial Sequence
  Description of Artificial Sequence: Synthetic oligonucleotide
  Sense strand starting at position 2957 of SEQ ID NO: 586810
uuguguuauuucuccuuau

SEQ ID NO: 746001 - RNA, 19 nt, Artificial Sequence
  Description of Artificial Sequence: Synthetic oligonucleotide
  Antisense strand to SEQ ID NO: 746000
auaaggagaaauaacacaa

SEQ ID NO: 746002 - RNA, 19 nt, Artificial Sequence
  Description of Artificial Sequence: Synthetic oligonucleotide
  Sense strand starting at position 2958 of SEQ ID NO: 586810
uguguuauuucuccuuaug

SEQ ID NO: 746003 - RNA, 19 nt, Artificial Sequence
  Description of Artificial Sequence: Synthetic oligonucleotide
  Antisense strand to SEQ ID NO: 746002
cauaaggagaaauaacaca

SEQ ID NO: 746004 - RNA, 19 nt, Artificial Sequence
  Description of Artificial Sequence: Synthetic oligonucleotide
  Sense strand starting at position 3004 of SEQ ID NO: 586810
cuuacaauacuaugggauu

SEQ ID NO: 746005 - RNA, 19 nt, Artificial Sequence
  Description of Artificial Sequence: Synthetic oligonucleotide
  Antisense strand to SEQ ID NO: 746004
aaucccauaguauuguaag

SEQ ID NO: 746006 - RNA, 19 nt, Artificial Sequence
  Description of Artificial Sequence: Synthetic oligonucleotide
  Sense strand starting at position 3022 of SEQ ID NO: 586810
uuguuucuaucauuugcau

SEQ ID NO: 746007 - RNA, 19 nt, Artificial Sequence
  Description of Artificial Sequence: Synthetic oligonucleotide
  Antisense strand to SEQ ID NO: 746006
augcaaaugauagaaacaa

SEQ ID NO: 746008 - RNA, 19 nt, Artificial Sequence
  Description of Artificial Sequence: Synthetic oligonucleotide
  Sense strand starting at position 3028 of SEQ ID NO: 586810
cuaucauuugcauggcaca

SEQ ID NO: 746009 - RNA, 19 nt, Artificial Sequence
  Description of Artificial Sequence: Synthetic oligonucleotide
  Antisense strand to SEQ ID NO: 746008
ugugccaugcaaaugauag

SEQ ID NO: 746010 - RNA, 19 nt, Artificial Sequence
  Description of Artificial Sequence: Synthetic oligonucleotide
  Sense strand starting at position 3086 of SEQ ID NO: 586810
aucagaguucuaggaguua

SEQ ID NO: 746011 - RNA, 19 nt, Artificial Sequence
  Description of Artificial Sequence: Synthetic oligonucleotide
  Antisense strand to SEQ ID NO: 746010
uaacuccuagaacucugau

SEQ ID NO: 746012 - RNA, 19 nt, Artificial Sequence
  Description of Artificial Sequence: Synthetic oligonucleotide
  Sense strand starting at position 3111 of SEQ ID NO: 586810
cuguauguugcuuuagcca

SEQ ID NO: 746013 - RNA, 19 nt, Artificial Sequence
  Description of Artificial Sequence: Synthetic oligonucleotide
  Antisense strand to SEQ ID NO: 746012
uggcuaaagcaacauacag

SEQ ID NO: 746014 - RNA, 19 nt, Artificial Sequence
  Description of Artificial Sequence: Synthetic oligonucleotide
  Sense strand starting at position 3275 of SEQ ID NO: 586810
agcuguucucaugaucaca

SEQ ID NO: 746015 - RNA, 19 nt, Artificial Sequence
  Description of Artificial Sequence: Synthetic oligonucleotide
  Antisense strand to SEQ ID NO: 746014
ugugaucaugagaacagcu

SEQ ID NO: 746016 - RNA, 19 nt, Artificial Sequence
  Description of Artificial Sequence: Synthetic oligonucleotide
  Sense strand starting at position 3607 of SEQ ID NO: 586810
auggguuaagagcaucuau

SEQ ID NO: 746017 - RNA, 19 nt, Artificial Sequence
  Description of Artificial Sequence: Synthetic oligonucleotide
  Antisense strand to SEQ ID NO: 746016
auagaugcucuuaacccau

SEQ ID NO: 746018 - RNA, 19 nt, Artificial Sequence
  Description of Artificial Sequence: Synthetic oligonucleotide
  Sense strand starting at position 219 of SEQ ID NO: 586811
ggccuaacuccaugaaaug

SEQ ID NO: 746019 - RNA, 19 nt, Artificial Sequence
  Description of Artificial Sequence: Synthetic oligonucleotide
  Antisense strand to SEQ ID NO: 746018
cauuucauggaguuaggcc

SEQ ID NO: 746020 - RNA, 19 nt, Artificial Sequence
  Description of Artificial Sequence: Synthetic oligonucleotide
  Sense strand starting at position 228 of SEQ ID NO: 586811
ccaugaaaugagggcuaca

SEQ ID NO: 746021 - RNA, 19 nt, Artificial Sequence
  Description of Artificial Sequence: Synthetic oligonucleotide
  Antisense strand to SEQ ID NO: 746020
uguagcccucauuucaugg

SEQ ID NO: 746022 - RNA, 19 nt, Artificial Sequence
  Description of Artificial Sequence: Synthetic oligonucleotide
  Sense strand starting at position 382 of SEQ ID NO: 586811
ugaacuaguuggucugcaa

SEQ ID NO: 746023 - RNA, 19 nt, Artificial Sequence
  Description of Artificial Sequence: Synthetic oligonucleotide
  Antisense strand to SEQ ID NO: 746022
uugcagaccaacuaguuca

SEQ ID NO: 746024 - RNA, 19 nt, Artificial Sequence
  Description of Artificial Sequence: Synthetic oligonucleotide
  Sense strand starting at position 395 of SEQ ID NO: 586811
cugcaaguacaagauguau

SEQ ID NO: 746025 - RNA, 19 nt, Artificial Sequence
  Description of Artificial Sequence: Synthetic oligonucleotide
  Antisense strand to SEQ ID NO: 746024
auacaucuuguacuugcag

SEQ ID NO: 746026 - RNA, 19 nt, Artificial Sequence
  Description of Artificial Sequence: Synthetic oligonucleotide
  Sense strand starting at position 496 of SEQ ID NO: 586811
cuugcaauucccugacuga

SEQ ID NO: 746027 - RNA, 19 nt, Artificial Sequence
  Description of Artificial Sequence: Synthetic oligonucleotide
  Antisense strand to SEQ ID NO: 746026
ucagucagggaauugcaag

SEQ ID NO: 746028 - RNA, 19 nt, Artificial Sequence
  Description of Artificial Sequence: Synthetic oligonucleotide
  Sense strand starting at position 497 of SEQ ID NO: 586811
uugcaauucccugacugau

SEQ ID NO: 746029 - RNA, 19 nt, Artificial Sequence
  Description of Artificial Sequence: Synthetic oligonucleotide
  Antisense strand to SEQ ID NO: 746028
aucagucagggaauugcaa

SEQ ID NO: 746030 - RNA, 19 nt, Artificial Sequence
  Description of Artificial Sequence: Synthetic oligonucleotide
  Sense strand starting at position 499 of SEQ ID NO: 586811
gcaauucccugacugauaa

SEQ ID NO: 746031 - RNA, 19 nt, Artificial Sequence
  Description of Artificial Sequence: Synthetic oligonucleotide
  Antisense strand to SEQ ID NO: 746030
uuaucagucagggaauugc

SEQ ID NO: 746032 - RNA, 19 nt, Artificial Sequence
  Description of Artificial Sequence: Synthetic oligonucleotide
  Sense strand starting at position 509 of SEQ ID NO: 586811
gacugauaagagugaaggu

SEQ ID NO: 746033 - RNA, 19 nt, Artificial Sequence
  Description of Artificial Sequence: Synthetic oligonucleotide
  Antisense strand to SEQ ID NO: 746032
accuucacucuuaucaguc

SEQ ID NO: 746034 - RNA, 19 nt, Artificial Sequence
  Description of Artificial Sequence: Synthetic oligonucleotide
  Sense strand starting at position 650 of SEQ ID NO: 586811
gcagcagugagugacauaa

SEQ ID NO: 746035 - RNA, 19 nt, Artificial Sequence
  Description of Artificial Sequence: Synthetic oligonucleotide
  Antisense strand to SEQ ID NO: 746034
uuaugucacucacugcugc

SEQ ID NO: 746036 - RNA, 19 nt, Artificial Sequence
  Description of Artificial Sequence: Synthetic oligonucleotide
  Sense strand starting at position 799 of SEQ ID NO: 586811
ggcagaaaugcugacagca

SEQ ID NO: 746037 - RNA, 19 nt, Artificial Sequence
  Description of Artificial Sequence: Synthetic oligonucleotide
  Antisense strand to SEQ ID NO: 746036
ugcugucagcauuucugcc

SEQ ID NO: 746038 - RNA, 19 nt, Artificial Sequence
  Description of Artificial Sequence: Synthetic oligonucleotide
  Sense strand starting at position 851 of SEQ ID NO: 586811
cccucuggaguuuacagau

SEQ ID NO: 746039 - RNA, 19 nt, Artificial Sequence
  Description of Artificial Sequence: Synthetic oligonucleotide
  Antisense strand to SEQ ID NO: 746038
aucuguaaacuccagaggg

SEQ ID NO: 746040 - RNA, 19 nt, Artificial Sequence
  Description of Artificial Sequence: Synthetic oligonucleotide
  Sense strand starting at position 857 of SEQ ID NO: 586811
ggaguuuacagaugugaca

SEQ ID NO: 746041 - RNA, 19 nt, Artificial Sequence
  Description of Artificial Sequence: Synthetic oligonucleotide
  Antisense strand to SEQ ID NO: 746040
ugucacaucuguaaacucc

SEQ ID NO: 746042 - RNA, 19 nt, Artificial Sequence
  Description of Artificial Sequence: Synthetic oligonucleotide
  Sense strand starting at position 1080 of SEQ ID NO: 586811
ggagguuugcaccauguca

SEQ ID NO: 746043 - RNA, 19 nt, Artificial Sequence
  Description of Artificial Sequence: Synthetic oligonucleotide
  Antisense strand to SEQ ID NO: 746042
ugacauggugcaaaccucc

SEQ ID NO: 746044 - RNA, 19 nt, Artificial Sequence
  Description of Artificial Sequence: Synthetic oligonucleotide
  Sense strand starting at position 1095 of SEQ ID NO: 586811
gucacacugccaugagaca

SEQ ID NO: 746045 - RNA, 19 nt, Artificial Sequence
  Description of Artificial Sequence: Synthetic oligonucleotide
  Antisense strand to SEQ ID NO: 746044
ugucucauggcagugugac

SEQ ID NO: 746046 - RNA, 19 nt, Artificial Sequence
  Description of Artificial Sequence: Synthetic oligonucleotide
  Sense strand starting at position 1619 of SEQ ID NO: 586811
agcagaaaguccucgaacu

SEQ ID NO: 746047 - RNA, 19 nt, Artificial Sequence
  Description of Artificial Sequence: Synthetic oligonucleotide
  Antisense strand to SEQ ID NO: 746046
aguucgaggacuuucugcu

SEQ ID NO: 746048 - RNA, 19 nt, Artificial Sequence
  Description of Artificial Sequence: Synthetic oligonucleotide
  Sense strand starting at position 1620 of SEQ ID NO: 586811
gcagaaaguccucgaacuu

SEQ ID NO: 746049 - RNA, 19 nt, Artificial Sequence
  Description of Artificial Sequence: Synthetic oligonucleotide
  Antisense strand to SEQ ID NO: 746048
aaguucgaggacuuucugc

SEQ ID NO: 746050 - RNA, 19 nt, Artificial Sequence
  Description of Artificial Sequence: Synthetic oligonucleotide
  Sense strand starting at position 1621 of SEQ ID NO: 586811
cagaaaguccucgaacuug

SEQ ID NO: 746051 - RNA, 19 nt, Artificial Sequence
  Description of Artificial Sequence: Synthetic oligonucleotide
  Antisense strand to SEQ ID NO: 746050
caaguucgaggacuuucug

SEQ ID NO: 746052 - RNA, 19 nt, Artificial Sequence
  Description of Artificial Sequence: Synthetic oligonucleotide
  Sense strand starting at position 1636 of SEQ ID NO: 586811
cuuggaagguauccugcau

SEQ ID NO: 746053 - RNA, 19 nt, Artificial Sequence
  Description of Artificial Sequence: Synthetic oligonucleotide
  Antisense strand to SEQ ID NO: 746052
augcaggauaccuuccaag

SEQ ID NO: 746054 - RNA, 19 nt, Artificial Sequence
  Description of Artificial Sequence: Synthetic oligonucleotide
  Sense strand starting at position 1672 of SEQ ID NO: 586811
agcacuucucauggcugaa

SEQ ID NO: 746055 - RNA, 19 nt, Artificial Sequence
  Description of Artificial Sequence: Synthetic oligonucleotide
  Antisense strand to SEQ ID NO: 746054
uucagccaugagaagugcu

SEQ ID NO: 746056 - RNA, 19 nt, Artificial Sequence
  Description of Artificial Sequence: Synthetic oligonucleotide
  Sense strand starting at position 1900 of SEQ ID NO: 586811
cucugagaacagugauaac

SEQ ID NO: 746057 - RNA, 19 nt, Artificial Sequence
  Description of Artificial Sequence: Synthetic oligonucleotide
  Antisense strand to SEQ ID NO: 746056
guuaucacuguucucagag

SEQ ID NO: 746058 - RNA, 19 nt, Artificial Sequence
  Description of Artificial Sequence: Synthetic oligonucleotide
  Sense strand starting at position 1921 of SEQ ID NO: 586811
accuuuccuggucaucaga

SEQ ID NO: 746059 - RNA, 19 nt, Artificial Sequence
  Description of Artificial Sequence: Synthetic oligonucleotide
  Antisense strand to SEQ ID NO: 746058
ucugaugaccaggaaaggu

SEQ ID NO: 746060 - RNA, 19 nt, Artificial Sequence
  Description of Artificial Sequence: Synthetic oligonucleotide
  Sense strand starting at position 1924 of SEQ ID NO: 586811
uuuccuggucaucagaaau

SEQ ID NO: 746061 - RNA, 19 nt, Artificial Sequence
  Description of Artificial Sequence: Synthetic oligonucleotide
  Antisense strand to SEQ ID NO: 746060
auuucugaugaccaggaaa

SEQ ID NO: 746062 - RNA, 19 nt, Artificial Sequence
  Description of Artificial Sequence: Synthetic oligonucleotide
  Sense strand starting at position 1978 of SEQ ID NO: 586811
gcuggucacaaguaugaca

SEQ ID NO: 746063 - RNA, 19 nt, Artificial Sequence
  Description of Artificial Sequence: Synthetic oligonucleotide
  Antisense strand to SEQ ID NO: 746062
ugucauacuugugaccagc

SEQ ID NO: 746064 - RNA, 19 nt, Artificial Sequence
  Description of Artificial Sequence: Synthetic oligonucleotide
  Sense strand starting at position 2015 of SEQ ID NO: 586811
uccuacauccucuggaaga

SEQ ID NO: 746065 - RNA, 19 nt, Artificial Sequence
  Description of Artificial Sequence: Synthetic oligonucleotide
  Antisense strand to SEQ ID NO: 746064
ucuuccagaggauguagga

SEQ ID NO: 746066 - RNA, 19 nt, Artificial Sequence
  Description of Artificial Sequence: Synthetic oligonucleotide
  Sense strand starting at position 2037 of SEQ ID NO: 586811
agaaauagagcuuaaugcu

SEQ ID NO: 746067 - RNA, 19 nt, Artificial Sequence
  Description of Artificial Sequence: Synthetic oligonucleotide
  Antisense strand to SEQ ID NO: 746066
agcauuaagcucuauuucu

SEQ ID NO: 746068 - RNA, 19 nt, Artificial Sequence
  Description of Artificial Sequence: Synthetic oligonucleotide
  Sense strand starting at position 2379 of SEQ ID NO: 586811
aggcucaggcgagagaauu

SEQ ID NO: 746069 - RNA, 19 nt, Artificial Sequence
  Description of Artificial Sequence: Synthetic oligonucleotide
  Antisense strand to SEQ ID NO: 746068
aauucucucgccugagccu

SEQ ID NO: 746070 - RNA, 19 nt, Artificial Sequence
  Description of Artificial Sequence: Synthetic oligonucleotide
  Sense strand starting at position 2582 of SEQ ID NO: 586811
agagaagucugagaauaaa

SEQ ID NO: 746071 - RNA, 19 nt, Artificial Sequence
  Description of Artificial Sequence: Synthetic oligonucleotide
  Antisense strand to SEQ ID NO: 746070
uuuauucucagacuucucu

SEQ ID NO: 746072 - RNA, 19 nt, Artificial Sequence
  Description of Artificial Sequence: Synthetic oligonucleotide
  Sense strand starting at position 2918 of SEQ ID NO: 586811
gcuguaacuguccacaacu

SEQ ID NO: 746073 - RNA, 19 nt, Artificial Sequence
  Description of Artificial Sequence: Synthetic oligonucleotide
  Antisense strand to SEQ ID NO: 746072
aguuguggacaguuacagc

SEQ ID NO: 746074 - RNA, 19 nt, Artificial Sequence
  Description of Artificial Sequence: Synthetic oligonucleotide
  Sense strand starting at position 3018 of SEQ ID NO: 586811
ugucuuacggcagaaccua

SEQ ID NO: 746075 - RNA, 19 nt, Artificial Sequence
  Description of Artificial Sequence: Synthetic oligonucleotide
  Antisense strand to SEQ ID NO: 746074
uagguucugccguaagaca

SEQ ID NO: 746076 - RNA, 19 nt, Artificial Sequence
  Description of Artificial Sequence: Synthetic oligonucleotide
  Sense strand starting at position 3098 of SEQ ID NO: 586811
aguucucuccauuacgaaa

SEQ ID NO: 746077 - RNA, 19 nt, Artificial Sequence
  Description of Artificial Sequence: Synthetic oligonucleotide
  Antisense strand to SEQ ID NO: 746076
uuucguaauggagagaacu

SEQ ID NO: 746078 - RNA, 19 nt, Artificial Sequence
  Description of Artificial Sequence: Synthetic oligonucleotide
  Sense strand starting at position 3152 of SEQ ID NO: 586811
gucuuaguucuuuauacca

SEQ ID NO: 746079 - RNA, 19 nt, Artificial Sequence
  Description of Artificial Sequence: Synthetic oligonucleotide
  Antisense strand to SEQ ID NO: 746078
ugguauaaagaacuaagac

SEQ ID NO: 746080 - RNA, 19 nt, Artificial Sequence
  Description of Artificial Sequence: Synthetic oligonucleotide
  Sense strand starting at position 3381 of SEQ ID NO: 586811
cugccaaugaggugaguaa

SEQ ID NO: 746081 - RNA, 19 nt, Artificial Sequence
  Description of Artificial Sequence: Synthetic oligonucleotide
  Antisense strand to SEQ ID NO: 746080
uuacucaccucauuggcag

SEQ ID NO: 746082 - RNA, 19 nt, Artificial Sequence
  Description of Artificial Sequence: Synthetic oligonucleotide
  Sense strand starting at position 3530 of SEQ ID NO: 586811
gugaguaaaucucagauuu

SEQ ID NO: 746083 - RNA, 19 nt, Artificial Sequence
  Description of Artificial Sequence: Synthetic oligonucleotide
  Antisense strand to SEQ ID NO: 746082
aaaucugagauuuacucac

SEQ ID NO: 746084 - RNA, 19 nt, Artificial Sequence
  Description of Artificial Sequence: Synthetic oligonucleotide
  Sense strand starting at position 3532 of SEQ ID NO: 586811
gaguaaaucucagauuugg

SEQ ID NO: 746085 - RNA, 19 nt, Artificial Sequence
  Description of Artificial Sequence: Synthetic oligonucleotide
  Antisense strand to SEQ ID NO: 746084
ccaaaucugagauuuacuc

SEQ ID NO: 746086 - RNA, 19 nt, Artificial Sequence
  Description of Artificial Sequence: Synthetic oligonucleotide
  Sense strand starting at position 3552 of SEQ ID NO: 586811
ggaaaugcauacuuuccaa

SEQ ID NO: 746087 - RNA, 19 nt, Artificial Sequence
  Description of Artificial Sequence: Synthetic oligonucleotide
  Antisense strand to SEQ ID NO: 746086
uuggaaaguaugcauuucc

SEQ ID NO: 746088 - RNA, 19 nt, Artificial Sequence
  Description of Artificial Sequence: Synthetic oligonucleotide
  Sense strand starting at position 3595 of SEQ ID NO: 586811
ugcgccugugaccaagaaa

SEQ ID NO: 746089 - RNA, 19 nt, Artificial Sequence
  Description of Artificial Sequence: Synthetic oligonucleotide
  Antisense strand to SEQ ID NO: 746088
uuucuuggucacaggcgca

SEQ ID NO: 746090 - RNA, 19 nt, Artificial Sequence
  Description of Artificial Sequence: Synthetic oligonucleotide
  Sense strand starting at position 3631 of SEQ ID NO: 586811
gcaguuuguaaacgaacaa

SEQ ID NO: 746091 - RNA, 19 nt, Artificial Sequence
  Description of Artificial Sequence: Synthetic oligonucleotide
  Antisense strand to SEQ ID NO: 746090
uuguucguuuacaaacugc

SEQ ID NO: 746092 - RNA, 19 nt, Artificial Sequence
  Description of Artificial Sequence: Synthetic oligonucleotide
  Sense strand starting at position 3672 of SEQ ID NO: 586811
ugugauuugcucugacacc

SEQ ID NO: 746093 - RNA, 19 nt, Artificial Sequence
  Description of Artificial Sequence: Synthetic oligonucleotide
  Antisense strand to SEQ ID NO: 746092
ggugucagagcaaaucaca

SEQ ID NO: 746094 - RNA, 19 nt, Artificial Sequence
  Description of Artificial Sequence: Synthetic oligonucleotide
  Sense strand starting at position 3706 of SEQ ID NO: 586811
aacagaguccacuggguaa

SEQ ID NO: 746095 - RNA, 19 nt, Artificial Sequence
  Description of Artificial Sequence: Synthetic oligonucleotide
  Antisense strand to SEQ ID NO: 746094
uuacccaguggacucuguu

SEQ ID NO: 746096 - RNA, 19 nt, Artificial Sequence
  Description of Artificial Sequence: Synthetic oligonucleotide
  Sense strand starting at position 3720 of SEQ ID NO: 586811
gguaaagacaccugugcaa

SEQ ID NO: 746097 - RNA, 19 nt, Artificial Sequence
  Description of Artificial Sequence: Synthetic oligonucleotide
  Antisense strand to SEQ ID NO: 746096
uugcacaggugucuuuacc

SEQ ID NO: 746098 - RNA, 19 nt, Artificial Sequence
  Description of Artificial Sequence: Synthetic oligonucleotide
  Sense strand starting at position 142 of SEQ ID NO: 586812
guguaauggaaaggaguga

SEQ ID NO: 746099 - RNA, 19 nt, Artificial Sequence
  Description of Artificial Sequence: Synthetic oligonucleotide
  Antisense strand to SEQ ID NO: 746098
ucacuccuuuccauuacac

SEQ ID NO: 746100 - RNA, 19 nt, Artificial Sequence
  Description of Artificial Sequence: Synthetic oligonucleotide
  Sense strand starting at position 416 of SEQ ID NO: 586812
aggugaacucacugcuaau

SEQ ID NO: 746101 - RNA, 19 nt, Artificial Sequence
  Description of Artificial Sequence: Synthetic oligonucleotide
  Antisense strand to SEQ ID NO: 746100
auuagcagugaguucaccu

SEQ ID NO: 746102 - RNA, 19 nt, Artificial Sequence
  Description of Artificial Sequence: Synthetic oligonucleotide
  Sense strand starting at position 496 of SEQ ID NO: 586812
ugugaccuccucgaaguua

SEQ ID NO: 746103 - RNA, 19 nt, Artificial Sequence
  Description of Artificial Sequence: Synthetic oligonucleotide
  Antisense strand to SEQ ID NO: 746102
uaacuucgaggaggucaca

SEQ ID NO: 746104 - RNA, 19 nt, Artificial Sequence
  Description of Artificial Sequence: Synthetic oligonucleotide
  Sense strand starting at position 564 of SEQ ID NO: 586812
ggcgcauuaccauacuaca

SEQ ID NO: 746105 - RNA, 19 nt, Artificial Sequence
  Description of Artificial Sequence: Synthetic oligonucleotide
  Antisense strand to SEQ ID NO: 746104
uguaguaugguaaugcgcc

SEQ ID NO: 746106 - RNA, 19 nt, Artificial Sequence
  Description of Artificial Sequence: Synthetic oligonucleotide
  Sense strand starting at position 982 of SEQ ID NO: 586812
ggaaaugcucaacgagaaa

SEQ ID NO: 746107 - RNA, 19 nt, Artificial Sequence
  Description of Artificial Sequence: Synthetic oligonucleotide
  Antisense strand to SEQ ID NO: 746106
uuucucguugagcauuucc

SEQ ID NO: 746108 - RNA, 19 nt, Artificial Sequence
  Description of Artificial Sequence: Synthetic oligonucleotide
  Sense strand starting at position 1087 of SEQ ID NO: 586812
aagggaaaguguuugcacu

SEQ ID NO: 746109 - RNA, 19 nt, Artificial Sequence
  Description of Artificial Sequence: Synthetic oligonucleotide
  Antisense strand to SEQ ID NO: 746108
agugcaaacacuuucccuu

SEQ ID NO: 746110 - RNA, 19 nt, Artificial Sequence
  Description of Artificial Sequence: Synthetic oligonucleotide
  Sense strand starting at position 1089 of SEQ ID NO: 586812
gggaaaguguuugcacuga

SEQ ID NO: 746111 - RNA, 19 nt, Artificial Sequence
  Description of Artificial Sequence: Synthetic oligonucleotide
  Antisense strand to SEQ ID NO: 746110
ucagugcaaacacuuuccc

SEQ ID NO: 746112 - RNA, 19 nt, Artificial Sequence
  Description of Artificial Sequence: Synthetic oligonucleotide
  Sense strand starting at position 1094 of SEQ ID NO: 586812
aguguuugcacugaggacu

SEQ ID NO: 746113 - RNA, 19 nt, Artificial Sequence
  Description of Artificial Sequence: Synthetic oligonucleotide
  Antisense strand to SEQ ID NO: 746112
aguccucagugcaaacacu

SEQ ID NO: 746114 - RNA, 19 nt, Artificial Sequence
  Description of Artificial Sequence: Synthetic oligonucleotide
  Sense strand starting at position 1133 of SEQ ID NO: 586812
uguggaauuccagguuacu

SEQ ID NO: 746115 - RNA, 19 nt, Artificial Sequence
  Description of Artificial Sequence: Synthetic oligonucleotide
  Antisense strand to SEQ ID NO: 746114
aguaaccuggaauuccaca

SEQ ID NO: 746116 - RNA, 19 nt, Artificial Sequence
  Description of Artificial Sequence: Synthetic oligonucleotide
  Sense strand starting at position 2213 of SEQ ID NO: 586812
acgauaccuccugaguucu

SEQ ID NO: 746117 - RNA, 19 nt, Artificial Sequence
  Description of Artificial Sequence: Synthetic oligonucleotide
  Antisense strand to SEQ ID NO: 746116
agaacucaggagguaucgu

SEQ ID NO: 746118 - RNA, 19 nt, Artificial Sequence
  Description of Artificial Sequence: Synthetic oligonucleotide
  Sense strand starting at position 2226 of SEQ ID NO: 586812
aguucuagucccuauucuu

SEQ ID NO: 746119 - RNA, 19 nt, Artificial Sequence
  Description of Artificial Sequence: Synthetic oligonucleotide
  Antisense strand to SEQ ID NO: 746118
aagaauagggacuagaacu

SEQ ID NO: 746120 - RNA, 19 nt, Artificial Sequence
  Description of Artificial Sequence: Synthetic oligonucleotide
  Sense strand starting at position 2247 of SEQ ID NO: 586812
uccaaagcugccuaauuga

SEQ ID NO: 746121 - RNA, 19 nt, Artificial Sequence
  Description of Artificial Sequence: Synthetic oligonucleotide
  Antisense strand to SEQ ID NO: 746120
ucaauuaggcagcuuugga

SEQ ID NO: 746122 - RNA, 19 nt, Artificial Sequence
  Description of Artificial Sequence: Synthetic oligonucleotide
  Sense strand starting at position 2296 of SEQ ID NO: 586812
gcguaaagagauuauugga

SEQ ID NO: 746123 - RNA, 19 nt, Artificial Sequence
  Description of Artificial Sequence: Synthetic oligonucleotide
  Antisense strand to SEQ ID NO: 746122
uccaauaaucucuuuacgc

SEQ ID NO: 746124 - RNA, 19 nt, Artificial Sequence
  Description of Artificial Sequence: Synthetic oligonucleotide
  Sense strand starting at position 2309 of SEQ ID NO: 586812
auuggaauuucaggguaga

SEQ ID NO: 746125 - RNA, 19 nt, Artificial Sequence
  Description of Artificial Sequence: Synthetic oligonucleotide
  Antisense strand to SEQ ID NO: 746124
ucuacccugaaauuccaau

SEQ ID NO: 746126 - RNA, 19 nt, Artificial Sequence
  Description of Artificial Sequence: Synthetic oligonucleotide
  Sense strand starting at position 2347 of SEQ ID NO: 586812
aacagauguuguccagacu

SEQ ID NO: 746127 - RNA, 19 nt, Artificial Sequence
  Description of Artificial Sequence: Synthetic oligonucleotide
  Antisense strand to SEQ ID NO: 746126
agucuggacaacaucuguu

SEQ ID NO: 746128 - RNA, 19 nt, Artificial Sequence
  Description of Artificial Sequence: Synthetic oligonucleotide
  Sense strand starting at position 2350 of SEQ ID NO: 586812
agauguuguccagacucua

SEQ ID NO: 746129 - RNA, 19 nt, Artificial Sequence
  Description of Artificial Sequence: Synthetic oligonucleotide
  Antisense strand to SEQ ID NO: 746128
uagagucuggacaacaucu

SEQ ID NO: 746130 - RNA, 19 nt, Artificial Sequence
  Description of Artificial Sequence: Synthetic oligonucleotide
  Sense strand starting at position 2368 of SEQ ID NO: 586812
aaggucucacuauggaagu

SEQ ID NO: 746131 - RNA, 19 nt, Artificial Sequence
  Description of Artificial Sequence: Synthetic oligonucleotide
  Antisense strand to SEQ ID NO: 746130
acuuccauagugagaccuu

SEQ ID NO: 746132 - RNA, 19 nt, Artificial Sequence
  Description of Artificial Sequence: Synthetic oligonucleotide
  Sense strand starting at position 2374 of SEQ ID NO: 586812
ucacuauggaaguguugau

SEQ ID NO: 746133 - RNA, 19 nt, Artificial Sequence
  Description of Artificial Sequence: Synthetic oligonucleotide
  Antisense strand to SEQ ID NO: 746132
aucaacacuuccauaguga

SEQ ID NO: 746134 - RNA, 19 nt, Artificial Sequence
  Description of Artificial Sequence: Synthetic oligonucleotide
  Sense strand starting at position 2535 of SEQ ID NO: 586812
cuguguuaagguuauuaga

SEQ ID NO: 746135 - RNA, 19 nt, Artificial Sequence
  Description of Artificial Sequence: Synthetic oligonucleotide
  Antisense strand to SEQ ID NO: 746134
ucuaauaaccuuaacacag

SEQ ID NO: 746136 - RNA, 19 nt, Artificial Sequence
  Description of Artificial Sequence: Synthetic oligonucleotide
  Sense strand starting at position 2602 of SEQ ID NO: 586812
agacuacaauacgauuuaa

SEQ ID NO: 746137 - RNA, 19 nt, Artificial Sequence
  Description of Artificial Sequence: Synthetic oligonucleotide
  Antisense strand to SEQ ID NO: 746136
uuaaaucguauuguagucu

SEQ ID NO: 746138 - RNA, 19 nt, Artificial Sequence
  Description of Artificial Sequence: Synthetic oligonucleotide
  Sense strand starting at position 2710 of SEQ ID NO: 586812
cuuuaaaguugccugauuu

SEQ ID NO: 746139 - RNA, 19 nt, Artificial Sequence
  Description of Artificial Sequence: Synthetic oligonucleotide
  Antisense strand to SEQ ID NO: 746138
aaaucaggcaacuuuaaag

SEQ ID NO: 746140 - RNA, 19 nt, Artificial Sequence
  Description of Artificial Sequence: Synthetic oligonucleotide
  Sense strand starting at position 2747 of SEQ ID NO: 586812
accauuauucguuauguau

SEQ ID NO: 746141 - RNA, 19 nt, Artificial Sequence
  Description of Artificial Sequence: Synthetic oligonucleotide
  Antisense strand to SEQ ID NO: 746140
auacauaacgaauaauggu

SEQ ID NO: 746142 - RNA, 19 nt, Artificial Sequence
  Description of Artificial Sequence: Synthetic oligonucleotide
  Sense strand starting at position 2802 of SEQ ID NO: 586812
cuggaaaucuuacuuuagu

SEQ ID NO: 746143 - RNA, 19 nt, Artificial Sequence
  Description of Artificial Sequence: Synthetic oligonucleotide
  Antisense strand to SEQ ID NO: 746142
acuaaaguaagauuuccag

SEQ ID NO: 746144 - RNA, 19 nt, Artificial Sequence
  Description of Artificial Sequence: Synthetic oligonucleotide
  Sense strand starting at position 2803 of SEQ ID NO: 586812
uggaaaucuuacuuuagug

SEQ ID NO: 746145 - RNA, 19 nt, Artificial Sequence
  Description of Artificial Sequence: Synthetic oligonucleotide
  Antisense strand to SEQ ID NO: 746144
cacuaaaguaagauuucca

SEQ ID NO: 746146 - RNA, 19 nt, Artificial Sequence
  Description of Artificial Sequence: Synthetic oligonucleotide
  Sense strand starting at position 3039 of SEQ ID NO: 586812
ggugcuguggaaugaauca

SEQ ID NO: 746147 - RNA, 19 nt, Artificial Sequence
  Description of Artificial Sequence: Synthetic oligonucleotide
  Antisense strand to SEQ ID NO: 746146
ugauucauuccacagcacc

SEQ ID NO: 746148 - RNA, 19 nt, Artificial Sequence
  Description of Artificial Sequence: Synthetic oligonucleotide
  Sense strand starting at position 3051 of SEQ ID NO: 586812
ugaaucagaccugguuuga

SEQ ID NO: 746149 - RNA, 19 nt, Artificial Sequence
  Description of Artificial Sequence: Synthetic oligonucleotide
  Antisense strand to SEQ ID NO: 746148
ucaaaccaggucugauuca

SEQ ID NO: 746150 - RNA, 19 nt, Artificial Sequence
  Description of Artificial Sequence: Synthetic oligonucleotide
  Sense strand starting at position 3117 of SEQ ID NO: 586812
uuaauaucuccugguguaa

SEQ ID NO: 746151 - RNA, 19 nt, Artificial Sequence
  Description of Artificial Sequence: Synthetic oligonucleotide
  Antisense strand to SEQ ID NO: 746150
uuacaccaggagauauuaa

SEQ ID NO: 746152 - RNA, 19 nt, Artificial Sequence
  Description of Artificial Sequence: Synthetic oligonucleotide
  Sense strand starting at position 3181 of SEQ ID NO: 586812
uguagugagguucaugcaa

SEQ ID NO: 746153 - RNA, 19 nt, Artificial Sequence
  Description of Artificial Sequence: Synthetic oligonucleotide
  Antisense strand to SEQ ID NO: 746152
uugcaugaaccucacuaca

SEQ ID NO: 746154 - RNA, 19 nt, Artificial Sequence
  Description of Artificial Sequence: Synthetic oligonucleotide
  Sense strand starting at position 3200 of SEQ ID NO: 586812
cgggaacgcgcuuugugaa

SEQ ID NO: 746155 - RNA, 19 nt, Artificial Sequence
  Description of Artificial Sequence: Synthetic oligonucleotide
  Antisense strand to SEQ ID NO: 746154
uucacaaagcgcguucccg

SEQ ID NO: 746156 - RNA, 19 nt, Artificial Sequence
  Description of Artificial Sequence: Synthetic oligonucleotide
  Sense strand starting at position 3246 of SEQ ID NO: 586812
guuuauaagcaauagcaaa

SEQ ID NO: 746157 - RNA, 19 nt, Artificial Sequence
  Description of Artificial Sequence: Synthetic oligonucleotide
  Antisense strand to SEQ ID NO: 746156
uuugcuauugcuuauaaac

SEQ ID NO: 746158 - RNA, 19 nt, Artificial Sequence
  Description of Artificial Sequence: Synthetic oligonucleotide
  Sense strand starting at position 3313 of SEQ ID NO: 586812
aaacgagucuuuccuggaa

SEQ ID NO: 746159 - RNA, 19 nt, Artificial Sequence
  Description of Artificial Sequence: Synthetic oligonucleotide
  Antisense strand to SEQ ID NO: 746158
uuccaggaaagacucguuu

SEQ ID NO: 746160 - RNA, 19 nt, Artificial Sequence
  Description of Artificial Sequence: Synthetic oligonucleotide
  Sense strand starting at position 3393 of SEQ ID NO: 586812
agauaaaucagccggagga

SEQ ID NO: 746161 - RNA, 19 nt, Artificial Sequence
  Description of Artificial Sequence: Synthetic oligonucleotide
  Antisense strand to SEQ ID NO: 746160
uccuccggcugauuuaucu

SEQ ID NO: 746162 - RNA, 19 nt, Artificial Sequence
  Description of Artificial Sequence: Synthetic oligonucleotide
  Sense strand starting at position 3395 of SEQ ID NO: 586812
auaaaucagccggaggagu

SEQ ID NO: 746163 - RNA, 19 nt, Artificial Sequence
  Description of Artificial Sequence: Synthetic oligonucleotide
  Antisense strand to SEQ ID NO: 746162
acuccuccggcugauuuau

SEQ ID NO: 746164 - RNA, 19 nt, Artificial Sequence
  Description of Artificial Sequence: Synthetic oligonucleotide
  Sense strand starting at position 3397 of SEQ ID NO: 586812
aaaucagccggaggaguuu

SEQ ID NO: 746165 - RNA, 19 nt, Artificial Sequence
  Description of Artificial Sequence: Synthetic oligonucleotide
  Antisense strand to SEQ ID NO: 746164
aaacuccuccggcugauuu

SEQ ID NO: 746166 - RNA, 19 nt, Artificial Sequence
  Description of Artificial Sequence: Synthetic oligonucleotide
  Sense strand starting at position 3567 of SEQ ID NO: 586812
uugagagcugccugaagga

SEQ ID NO: 746167 - RNA, 19 nt, Artificial Sequence
  Description of Artificial Sequence: Synthetic oligonucleotide
  Antisense strand to SEQ ID NO: 746166
uccuucaggcagcucucaa

SEQ ID NO: 746168 - RNA, 19 nt, Artificial Sequence
  Description of Artificial Sequence: Synthetic oligonucleotide
  Sense strand starting at position 3658 of SEQ ID NO: 586812
gggcuuaacucuuuaaagg

SEQ ID NO: 746169 - RNA, 19 nt, Artificial Sequence
  Description of Artificial Sequence: Synthetic oligonucleotide
  Antisense strand to SEQ ID NO: 746168
ccuuuaaagaguuaagccc

SEQ ID NO: 746170 - RNA, 19 nt, Artificial Sequence
  Description of Artificial Sequence: Synthetic oligonucleotide
  Sense strand starting at position 3659 of SEQ ID NO: 586812
ggcuuaacucuuuaaaggu

SEQ ID NO: 746171 - RNA, 19 nt, Artificial Sequence
  Description of Artificial Sequence: Synthetic oligonucleotide
  Antisense strand to SEQ ID NO: 746170
accuuuaaagaguuaagcc

SEQ ID NO: 746172 - RNA, 19 nt, Artificial Sequence
  Description of Artificial Sequence: Synthetic oligonucleotide
  Sense strand starting at position 3776 of SEQ ID NO: 586812
ugaacuacguucuuaaauc

SEQ ID NO: 746173 - RNA, 19 nt, Artificial Sequence
  Description of Artificial Sequence: Synthetic oligonucleotide
  Antisense strand to SEQ ID NO: 746172
gauuuaagaacguaguuca

SEQ ID NO: 746174 - RNA, 19 nt, Artificial Sequence
  Description of Artificial Sequence: Synthetic oligonucleotide
  Sense strand starting at position 3910 of SEQ ID NO: 586812
ggcuuugaucccugaacca

SEQ ID NO: 746175 - RNA, 19 nt, Artificial Sequence
  Description of Artificial Sequence: Synthetic oligonucleotide
  Antisense strand to SEQ ID NO: 746174
ugguucagggaucaaagcc

SEQ ID NO: 746176 - RNA, 19 nt, Artificial Sequence
  Description of Artificial Sequence: Synthetic oligonucleotide
  Sense strand starting at position 3940 of SEQ ID NO: 586812
ugaaguucuccagaagcca

SEQ ID NO: 746177 - RNA, 19 nt, Artificial Sequence
  Description of Artificial Sequence: Synthetic oligonucleotide
  Antisense strand to SEQ ID NO: 746176
uggcuucuggagaacuuca

SEQ ID NO: 746178 - RNA, 19 nt, Artificial Sequence
  Description of Artificial Sequence: Synthetic oligonucleotide
  Sense strand starting at position 195 of SEQ ID NO: 586813
gguagagccguguguagaa

SEQ ID NO: 746179 - RNA, 19 nt, Artificial Sequence
  Description of Artificial Sequence: Synthetic oligonucleotide
  Antisense strand to SEQ ID NO: 746178
uucuacacacggcucuacc

SEQ ID NO: 746180 - RNA, 19 nt, Artificial Sequence
  Description of Artificial Sequence: Synthetic oligonucleotide
  Sense strand starting at position 222 of SEQ ID NO: 586813
cgucgucaucauccuugua

SEQ ID NO: 746181 - RNA, 19 nt, Artificial Sequence
  Description of Artificial Sequence: Synthetic oligonucleotide
  Antisense strand to SEQ ID NO: 746180
uacaaggaugaugacgacg

SEQ ID NO: 746182 - RNA, 19 nt, Artificial Sequence
  Description of Artificial Sequence: Synthetic oligonucleotide
  Sense strand starting at position 224 of SEQ ID NO: 586813
ucgucaucauccuuguacu

SEQ ID NO: 746183 - RNA, 19 nt, Artificial Sequence
  Description of Artificial Sequence: Synthetic oligonucleotide
  Antisense strand to SEQ ID NO: 746182
aguacaaggaugaugacga

SEQ ID NO: 746184 - RNA, 19 nt, Artificial Sequence
  Description of Artificial Sequence: Synthetic oligonucleotide
  Sense strand starting at position 225 of SEQ ID NO: 586813
cgucaucauccuuguacuu

SEQ ID NO: 746185 - RNA, 19 nt, Artificial Sequence
  Description of Artificial Sequence: Synthetic oligonucleotide
  Antisense strand to SEQ ID NO: 746184
aaguacaaggaugaugacg

SEQ ID NO: 746186 - RNA, 19 nt, Artificial Sequence
  Description of Artificial Sequence: Synthetic oligonucleotide
  Sense strand starting at position 252 of SEQ ID NO: 586813
gcacgauuugguggauggu

SEQ ID NO: 746187 - RNA, 19 nt, Artificial Sequence
  Description of Artificial Sequence: Synthetic oligonucleotide
  Antisense strand to SEQ ID NO: 746186
accauccaccaaaucgugc

SEQ ID NO: 746188 - RNA, 19 nt, Artificial Sequence
  Description of Artificial Sequence: Synthetic oligonucleotide
  Sense strand starting at position 305 of SEQ ID NO: 586813
gaguguugaccucgagacu

SEQ ID NO: 746189 - RNA, 19 nt, Artificial Sequence
  Description of Artificial Sequence: Synthetic oligonucleotide
  Antisense strand to SEQ ID NO: 746188
agucucgaggucaacacuc

SEQ ID NO: 746190 - RNA, 19 nt, Artificial Sequence
  Description of Artificial Sequence: Synthetic oligonucleotide
  Sense strand starting at position 502 of SEQ ID NO: 586813
agcagaagcucucugcaga

SEQ ID NO: 746191 - RNA, 19 nt, Artificial Sequence
  Description of Artificial Sequence: Synthetic oligonucleotide
  Antisense strand to SEQ ID NO: 746190
ucugcagagagcuucugcu

SEQ ID NO: 746192 - RNA, 19 nt, Artificial Sequence
  Description of Artificial Sequence: Synthetic oligonucleotide
  Sense strand starting at position 505 of SEQ ID NO: 586813
agaagcucucugcagagaa

SEQ ID NO: 746193 - RNA, 19 nt, Artificial Sequence
  Description of Artificial Sequence: Synthetic oligonucleotide
  Antisense strand to SEQ ID NO: 746192
uucucugcagagagcuucu

SEQ ID NO: 746194 - RNA, 19 nt, Artificial Sequence
  Description of Artificial Sequence: Synthetic oligonucleotide
  Sense strand starting at position 507 of SEQ ID NO: 586813
aagcucucugcagagaaga

SEQ ID NO: 746195 - RNA, 19 nt, Artificial Sequence
  Description of Artificial Sequence: Synthetic oligonucleotide
  Antisense strand to SEQ ID NO: 746194
ucuucucugcagagagcuu

SEQ ID NO: 746196 - RNA, 19 nt, Artificial Sequence
  Description of Artificial Sequence: Synthetic oligonucleotide
  Sense strand starting at position 966 of SEQ ID NO: 586813
cgcacaguguaguugaaga

SEQ ID NO: 746197 - RNA, 19 nt, Artificial Sequence
  Description of Artificial Sequence: Synthetic oligonucleotide
  Antisense strand to SEQ ID NO: 746196
ucuucaacuacacugugcg

SEQ ID NO: 746198 - RNA, 19 nt, Artificial Sequence
  Description of Artificial Sequence: Synthetic oligonucleotide
  Sense strand starting at position 1056 of SEQ ID NO: 586813
ucuguuaccagagggaaau

SEQ ID NO: 746199 - RNA, 19 nt, Artificial Sequence
  Description of Artificial Sequence: Synthetic oligonucleotide
  Antisense strand to SEQ ID NO: 746198
auuucccucugguaacaga

SEQ ID NO: 746200 - RNA, 19 nt, Artificial Sequence
  Description of Artificial Sequence: Synthetic oligonucleotide
  Sense strand starting at position 1214 of SEQ ID NO: 586813
gggaguggugcccaggaau

SEQ ID NO: 746201 - RNA, 19 nt, Artificial Sequence
  Description of Artificial Sequence: Synthetic oligonucleotide
  Antisense strand to SEQ ID NO: 746200
auuccugggcaccacuccc

SEQ ID NO: 746202 - RNA, 19 nt, Artificial Sequence
  Description of Artificial Sequence: Synthetic oligonucleotide
  Sense strand starting at position 1265 of SEQ ID NO: 586813
cccaguucaggguagugau

SEQ ID NO: 746203 - RNA, 19 nt, Artificial Sequence
  Description of Artificial Sequence: Synthetic oligonucleotide
  Antisense strand to SEQ ID NO: 746202
aucacuacccugaacuggg

SEQ ID NO: 746204 - RNA, 19 nt, Artificial Sequence
  Description of Artificial Sequence: Synthetic oligonucleotide
  Sense strand starting at position 1751 of SEQ ID NO: 586813
gaggauugucccgggcgca

SEQ ID NO: 746205 - RNA, 19 nt, Artificial Sequence
  Description of Artificial Sequence: Synthetic oligonucleotide
  Antisense strand to SEQ ID NO: 746204
ugcgcccgggacaauccuc

SEQ ID NO: 746206 - RNA, 19 nt, Artificial Sequence
  Description of Artificial Sequence: Synthetic oligonucleotide
  Sense strand starting at position 1837 of SEQ ID NO: 586813
ccgcuugacacauguggaa

SEQ ID NO: 746207 - RNA, 19 nt, Artificial Sequence
  Description of Artificial Sequence: Synthetic oligonucleotide
  Antisense strand to SEQ ID NO: 746206
uuccacaugugucaagcgg

SEQ ID NO: 746208 - RNA, 19 nt, Artificial Sequence
  Description of Artificial Sequence: Synthetic oligonucleotide
  Sense strand starting at position 2524 of SEQ ID NO: 586813
ccaagucaguccuagaauu

SEQ ID NO: 746209 - RNA, 19 nt, Artificial Sequence
  Description of Artificial Sequence: Synthetic oligonucleotide
  Antisense strand to SEQ ID NO: 746208
aauucuaggacugacuugg

SEQ ID NO: 746210 - RNA, 19 nt, Artificial Sequence
  Description of Artificial Sequence: Synthetic oligonucleotide
  Sense strand starting at position 2627 of SEQ ID NO: 586813
ucgauuuccugggaucaaa

SEQ ID NO: 746211 - RNA, 19 nt, Artificial Sequence
  Description of Artificial Sequence: Synthetic oligonucleotide
  Antisense strand to SEQ ID NO: 746210
uuugaucccaggaaaucga

SEQ ID NO: 746212 - RNA, 19 nt, Artificial Sequence
  Description of Artificial Sequence: Synthetic oligonucleotide
  Sense strand starting at position 2845 of SEQ ID NO: 586813
cccagcuauuccucguaaa

SEQ ID NO: 746213 - RNA, 19 nt, Artificial Sequence
  Description of Artificial Sequence: Synthetic oligonucleotide
  Antisense strand to SEQ ID NO: 746212
uuuacgaggaauagcuggg

SEQ ID NO: 746214 - RNA, 19 nt, Artificial Sequence
  Description of Artificial Sequence: Synthetic oligonucleotide
  Sense strand starting at position 2846 of SEQ ID NO: 586813
ccagcuauuccucguaaau

SEQ ID NO: 746215 - RNA, 19 nt, Artificial Sequence
  Description of Artificial Sequence: Synthetic oligonucleotide
  Antisense strand to SEQ ID NO: 746214
auuuacgaggaauagcugg

SEQ ID NO: 746216 - RNA, 19 nt, Artificial Sequence
  Description of Artificial Sequence: Synthetic oligonucleotide
  Sense strand starting at position 2848 of SEQ ID NO: 586813
agcuauuccucguaaaucc

SEQ ID NO: 746217 - RNA, 19 nt, Artificial Sequence
  Description of Artificial Sequence: Synthetic oligonucleotide
  Antisense strand to SEQ ID NO: 746216
ggauuuacgaggaauagcu

SEQ ID NO: 746218 - RNA, 19 nt, Artificial Sequence
  Description of Artificial Sequence: Synthetic oligonucleotide
  Sense strand starting at position 3033 of SEQ ID NO: 586813
auuugugauuugugcuaug

SEQ ID NO: 746219 - RNA, 19 nt, Artificial Sequence
  Description of Artificial Sequence: Synthetic oligonucleotide
  Antisense strand to SEQ ID NO: 746218
cauagcacaaaucacaaau

SEQ ID NO: 746220 - RNA, 19 nt, Artificial Sequence
  Description of Artificial Sequence: Synthetic oligonucleotide
  Sense strand starting at position 3038 of SEQ ID NO: 586813
ugauuugugcuauggcaga

SEQ ID NO: 746221 - RNA, 19 nt, Artificial Sequence
  Description of Artificial Sequence: Synthetic oligonucleotide
  Antisense strand to SEQ ID NO: 746220
ucugccauagcacaaauca

SEQ ID NO: 746222 - RNA, 19 nt, Artificial Sequence
  Description of Artificial Sequence: Synthetic oligonucleotide
  Sense strand starting at position 3043 of SEQ ID NO: 586813
ugugcuauggcagagggaa

SEQ ID NO: 746223 - RNA, 19 nt, Artificial Sequence
  Description of Artificial Sequence: Synthetic oligonucleotide
  Antisense strand to SEQ ID NO: 746222
uucccucugccauagcaca

SEQ ID NO: 746224 - RNA, 19 nt, Artificial Sequence
  Description of Artificial Sequence: Synthetic oligonucleotide
  Sense strand starting at position 3153 of SEQ ID NO: 586813
ugaauugagucuugaaagu

SEQ ID NO: 746225 - RNA, 19 nt, Artificial Sequence
  Description of Artificial Sequence: Synthetic oligonucleotide
  Antisense strand to SEQ ID NO: 746224
acuuucaagacucaauuca

SEQ ID NO: 746226 - RNA, 19 nt, Artificial Sequence
  Description of Artificial Sequence: Synthetic oligonucleotide
  Sense strand starting at position 3164 of SEQ ID NO: 586813
uugaaagucuaguuagggu

SEQ ID NO: 746227 - RNA, 19 nt, Artificial Sequence
  Description of Artificial Sequence: Synthetic oligonucleotide
  Antisense strand to SEQ ID NO: 746226
acccuaacuagacuuucaa

SEQ ID NO: 746228 - RNA, 19 nt, Artificial Sequence
  Description of Artificial Sequence: Synthetic oligonucleotide
  Sense strand starting at position 3179 of SEQ ID NO: 586813
ggguuucucucagugggaa

SEQ ID NO: 746229 - RNA, 19 nt, Artificial Sequence
  Description of Artificial Sequence: Synthetic oligonucleotide
  Antisense strand to SEQ ID NO: 746228
uucccacugagagaaaccc

SEQ ID NO: 746230 - RNA, 19 nt, Artificial Sequence
  Description of Artificial Sequence: Synthetic oligonucleotide
  Sense strand starting at position 3180 of SEQ ID NO: 586813
gguuucucucagugggaac

SEQ ID NO: 746231 - RNA, 19 nt, Artificial Sequence
  Description of Artificial Sequence: Synthetic oligonucleotide
  Antisense strand to SEQ ID NO: 746230
guucccacugagagaaacc

SEQ ID NO: 746232 - RNA, 19 nt, Artificial Sequence
  Description of Artificial Sequence: Synthetic oligonucleotide
  Sense strand starting at position 3256 of SEQ ID NO: 586813
caguuuggaucuuacagag

SEQ ID NO: 746233 - RNA, 19 nt, Artificial Sequence
  Description of Artificial Sequence: Synthetic oligonucleotide
  Antisense strand to SEQ ID NO: 746232
cucuguaagauccaaacug

SEQ ID NO: 746234 - RNA, 19 nt, Artificial Sequence
  Description of Artificial Sequence: Synthetic oligonucleotide
  Sense strand starting at position 3266 of SEQ ID NO: 586813
cuuacagaguaauaagaaa

SEQ ID NO: 746235 - RNA, 19 nt, Artificial Sequence
  Description of Artificial Sequence: Synthetic oligonucleotide
  Antisense strand to SEQ ID NO: 746234
uuucuuauuacucuguaag

SEQ ID NO: 746236 - RNA, 19 nt, Artificial Sequence
  Description of Artificial Sequence: Synthetic oligonucleotide
  Sense strand starting at position 3342 of SEQ ID NO: 586813
guuugaacucuguagggaa

SEQ ID NO: 746237 - RNA, 19 nt, Artificial Sequence
  Description of Artificial Sequence: Synthetic oligonucleotide
  Antisense strand to SEQ ID NO: 746236
uucccuacagaguucaaac

SEQ ID NO: 746238 - RNA, 19 nt, Artificial Sequence
  Description of Artificial Sequence: Synthetic oligonucleotide
  Sense strand starting at position 3345 of SEQ ID NO: 586813
ugaacucuguagggaaaca

SEQ ID NO: 746239 - RNA, 19 nt, Artificial Sequence
  Description of Artificial Sequence: Synthetic oligonucleotide
  Antisense strand to SEQ ID NO: 746238
uguuucccuacagaguuca

SEQ ID NO: 746240 - RNA, 19 nt, Artificial Sequence
  Description of Artificial Sequence: Synthetic oligonucleotide
  Sense strand starting at position 3558 of SEQ ID NO: 586813
uguugagaugggugucuca

SEQ ID NO: 746241 - RNA, 19 nt, Artificial Sequence
  Description of Artificial Sequence: Synthetic oligonucleotide
  Antisense strand to SEQ ID NO: 746240
ugagacacccaucucaaca

SEQ ID NO: 746242 - RNA, 19 nt, Artificial Sequence
  Description of Artificial Sequence: Synthetic oligonucleotide
  Sense strand starting at position 3561 of SEQ ID NO: 586813
ugagaugggugucucacua

SEQ ID NO: 746243 - RNA, 19 nt, Artificial Sequence
  Description of Artificial Sequence: Synthetic oligonucleotide
  Antisense strand to SEQ ID NO: 746242
uagugagacacccaucuca

SEQ ID NO: 746244 - RNA, 19 nt, Artificial Sequence
  Description of Artificial Sequence: Synthetic oligonucleotide
  Sense strand starting at position 3808 of SEQ ID NO: 586813
ggccucagcuucuggagua

SEQ ID NO: 746245 - RNA, 19 nt, Artificial Sequence
  Description of Artificial Sequence: Synthetic oligonucleotide
  Antisense strand to SEQ ID NO: 746244
uacuccagaagcugaggcc

SEQ ID NO: 746246 - RNA, 19 nt, Artificial Sequence
  Description of Artificial Sequence: Synthetic oligonucleotide
  Sense strand starting at position 58 of SEQ ID NO: 586814
gggucucuccauugugaga

SEQ ID NO: 746247 - RNA, 19 nt, Artificial Sequence
  Description of Artificial Sequence: Synthetic oligonucleotide
  Antisense strand to SEQ ID NO: 746246
ucucacaauggagagaccc

SEQ ID NO: 746248 - RNA, 19 nt, Artificial Sequence
  Description of Artificial Sequence: Synthetic oligonucleotide
  Sense strand starting at position 63 of SEQ ID NO: 586814
ucuccauugugagagauuu

SEQ ID NO: 746249 - RNA, 19 nt, Artificial Sequence
  Description of Artificial Sequence: Synthetic oligonucleotide
  Antisense strand to SEQ ID NO: 746248
aaaucucucacaauggaga

SEQ ID NO: 746250 - RNA, 19 nt, Artificial Sequence
  Description of Artificial Sequence: Synthetic oligonucleotide
  Sense strand starting at position 186 of SEQ ID NO: 586814
gccagagaccuuugcagga

SEQ ID NO: 746251 - RNA, 19 nt, Artificial Sequence
  Description of Artificial Sequence: Synthetic oligonucleotide
  Antisense strand to SEQ ID NO: 746250
uccugcaaaggucucuggc

SEQ ID NO: 746252 - RNA, 19 nt, Artificial Sequence
  Description of Artificial Sequence: Synthetic oligonucleotide
  Sense strand starting at position 345 of SEQ ID NO: 586814
cuuccaucauguucuguaa

SEQ ID NO: 746253 - RNA, 19 nt, Artificial Sequence
  Description of Artificial Sequence: Synthetic oligonucleotide
  Antisense strand to SEQ ID NO: 746252
uuacagaacaugauggaag

SEQ ID NO: 746254 - RNA, 19 nt, Artificial Sequence
  Description of Artificial Sequence: Synthetic oligonucleotide
  Sense strand starting at position 349 of SEQ ID NO: 586814
caucauguucuguaaggcu

SEQ ID NO: 746255 - RNA, 19 nt, Artificial Sequence
  Description of Artificial Sequence: Synthetic oligonucleotide
  Antisense strand to SEQ ID NO: 746254
agccuuacagaacaugaug

SEQ ID NO: 746256 - RNA, 19 nt, Artificial Sequence
  Description of Artificial Sequence: Synthetic oligonucleotide
  Sense strand starting at position 386 of SEQ ID NO: 586814
cuggugggucugugggaua

SEQ ID NO: 746257 - RNA, 19 nt, Artificial Sequence
  Description of Artificial Sequence: Synthetic oligonucleotide
  Antisense strand to SEQ ID NO: 746256
uaucccacagacccaccag

SEQ ID NO: 746258 - RNA, 19 nt, Artificial Sequence
  Description of Artificial Sequence: Synthetic oligonucleotide
  Sense strand starting at position 465 of SEQ ID NO: 586814
augaucauguugccuagaa

SEQ ID NO: 746259 - RNA, 19 nt, Artificial Sequence
  Description of Artificial Sequence: Synthetic oligonucleotide
  Antisense strand to SEQ ID NO: 746258
uucuaggcaacaugaucau

SEQ ID NO: 746260 - RNA, 19 nt, Artificial Sequence
  Description of Artificial Sequence: Synthetic oligonucleotide
  Sense strand starting at position 467 of SEQ ID NO: 586814
gaucauguugccuagaaag

SEQ ID NO: 746261 - RNA, 19 nt, Artificial Sequence
  Description of Artificial Sequence: Synthetic oligonucleotide
  Antisense strand to SEQ ID NO: 746260
cuuucuaggcaacaugauc

SEQ ID NO: 746262 - RNA, 19 nt, Artificial Sequence
  Description of Artificial Sequence: Synthetic oligonucleotide
  Sense strand starting at position 469 of SEQ ID NO: 586814
ucauguugccuagaaagcu

SEQ ID NO: 746263 - RNA, 19 nt, Artificial Sequence
  Description of Artificial Sequence: Synthetic oligonucleotide
  Antisense strand to SEQ ID NO: 746262
agcuuucuaggcaacauga

SEQ ID NO: 746264 - RNA, 19 nt, Artificial Sequence
  Description of Artificial Sequence: Synthetic oligonucleotide
  Sense strand starting at position 562 of SEQ ID NO: 586814
uguucuucucccuaugaca

SEQ ID NO: 746265 - RNA, 19 nt, Artificial Sequence
  Description of Artificial Sequence: Synthetic oligonucleotide
  Antisense strand to SEQ ID NO: 746264
ugucauagggagaagaaca

SEQ ID NO: 746266 - RNA, 19 nt, Artificial Sequence
  Description of Artificial Sequence: Synthetic oligonucleotide
  Sense strand starting at position 680 of SEQ ID NO: 586814
aaaugagcagccugugaaa

SEQ ID NO: 746267 - RNA, 19 nt, Artificial Sequence
  Description of Artificial Sequence: Synthetic oligonucleotide
  Antisense strand to SEQ ID NO: 746266
uuucacaggcugcucauuu

SEQ ID NO: 746268 - RNA, 19 nt, Artificial Sequence
  Description of Artificial Sequence: Synthetic oligonucleotide
  Sense strand starting at position 682 of SEQ ID NO: 586814
augagcagccugugaaauu

SEQ ID NO: 746269 - RNA, 19 nt, Artificial Sequence
  Description of Artificial Sequence: Synthetic oligonucleotide
  Antisense strand to SEQ ID NO: 746268
aauuucacaggcugcucau

SEQ ID NO: 746270 - RNA, 19 nt, Artificial Sequence
  Description of Artificial Sequence: Synthetic oligonucleotide
  Sense strand starting at position 941 of SEQ ID NO: 586814
ccacgaaaggcaugugaca

SEQ ID NO: 746271 - RNA, 19 nt, Artificial Sequence
  Description of Artificial Sequence: Synthetic oligonucleotide
  Antisense strand to SEQ ID NO: 746270
ugucacaugccuuucgugg

SEQ ID NO: 746272 - RNA, 19 nt, Artificial Sequence
  Description of Artificial Sequence: Synthetic oligonucleotide
  Sense strand starting at position 1125 of SEQ ID NO: 586814
ccguaccuucccuagacaa

SEQ ID NO: 746273 - RNA, 19 nt, Artificial Sequence
  Description of Artificial Sequence: Synthetic oligonucleotide
  Antisense strand to SEQ ID NO: 746272
uugucuagggaagguacgg

SEQ ID NO: 746274 - RNA, 19 nt, Artificial Sequence
  Description of Artificial Sequence: Synthetic oligonucleotide
  Sense strand starting at position 1170 of SEQ ID NO: 586814
cgcuuucugccugaaaucu

SEQ ID NO: 746275 - RNA, 19 nt, Artificial Sequence
  Description of Artificial Sequence: Synthetic oligonucleotide
  Antisense strand to SEQ ID NO: 746274
agauuucaggcagaaagcg

SEQ ID NO: 746276 - RNA, 19 nt, Artificial Sequence
  Description of Artificial Sequence: Synthetic oligonucleotide
  Sense strand starting at position 1228 of SEQ ID NO: 586814
gcguuugugcugccucuua

SEQ ID NO: 746277 - RNA, 19 nt, Artificial Sequence
  Description of Artificial Sequence: Synthetic oligonucleotide
  Antisense strand to SEQ ID NO: 746276
uaagaggcagcacaaacgc

SEQ ID NO: 746278 - RNA, 19 nt, Artificial Sequence
  Description of Artificial Sequence: Synthetic oligonucleotide
  Sense strand starting at position 1230 of SEQ ID NO: 586814
guuugugcugccucuuacu

SEQ ID NO: 746279 - RNA, 19 nt, Artificial Sequence
  Description of Artificial Sequence: Synthetic oligonucleotide
  Antisense strand to SEQ ID NO: 746278
aguaagaggcagcacaaac

SEQ ID NO: 746280 - RNA, 19 nt, Artificial Sequence
  Description of Artificial Sequence: Synthetic oligonucleotide
  Sense strand starting at position 1345 of SEQ ID NO: 586814
cuccaaauaugcguccgaa

SEQ ID NO: 746281 - RNA, 19 nt, Artificial Sequence
  Description of Artificial Sequence: Synthetic oligonucleotide
  Antisense strand to SEQ ID NO: 746280
uucggacgcauauuuggag

SEQ ID NO: 746282 - RNA, 19 nt, Artificial Sequence
  Description of Artificial Sequence: Synthetic oligonucleotide
  Sense strand starting at position 1348 of SEQ ID NO: 586814
caaauaugcguccgaauau

SEQ ID NO: 746283 - RNA, 19 nt, Artificial Sequence
  Description of Artificial Sequence: Synthetic oligonucleotide
  Antisense strand to SEQ ID NO: 746282
auauucggacgcauauuug

SEQ ID NO: 746284 - RNA, 19 nt, Artificial Sequence
  Description of Artificial Sequence: Synthetic oligonucleotide
  Sense strand starting at position 1358 of SEQ ID NO: 586814
uccgaauaucugugggucu

SEQ ID NO: 746285 - RNA, 19 nt, Artificial Sequence
  Description of Artificial Sequence: Synthetic oligonucleotide
  Antisense strand to SEQ ID NO: 746284
agacccacagauauucgga

SEQ ID NO: 746286 - RNA, 19 nt, Artificial Sequence
  Description of Artificial Sequence: Synthetic oligonucleotide
  Sense strand starting at position 1360 of SEQ ID NO: 586814
cgaauaucugugggucugu

SEQ ID NO: 746287 - RNA, 19 nt, Artificial Sequence
  Description of Artificial Sequence: Synthetic oligonucleotide
  Antisense strand to SEQ ID NO: 746286
acagacccacagauauucg

SEQ ID NO: 746288 - RNA, 19 nt, Artificial Sequence
  Description of Artificial Sequence: Synthetic oligonucleotide
  Sense strand starting at position 1374 of SEQ ID NO: 586814
ucugucucccguugaaauc

SEQ ID NO: 746289 - RNA, 19 nt, Artificial Sequence
  Description of Artificial Sequence: Synthetic oligonucleotide
  Antisense strand to SEQ ID NO: 746288
gauuucaacgggagacaga

SEQ ID NO: 746290 - RNA, 19 nt, Artificial Sequence
  Description of Artificial Sequence: Synthetic oligonucleotide
  Sense strand starting at position 1428 of SEQ ID NO: 586814
cuggguaggucuccggaaa

SEQ ID NO: 746291 - RNA, 19 nt, Artificial Sequence
  Description of Artificial Sequence: Synthetic oligonucleotide
  Antisense strand to SEQ ID NO: 746290
uuuccggagaccuacccag

SEQ ID NO: 746292 - RNA, 19 nt, Artificial Sequence
  Description of Artificial Sequence: Synthetic oligonucleotide
  Sense strand starting at position 1429 of SEQ ID NO: 586814
uggguaggucuccggaaac

SEQ ID NO: 746293 - RNA, 19 nt, Artificial Sequence
  Description of Artificial Sequence: Synthetic oligonucleotide
  Antisense strand to SEQ ID NO: 746292
guuuccggagaccuaccca

SEQ ID NO: 746294 - RNA, 19 nt, Artificial Sequence
  Description of Artificial Sequence: Synthetic oligonucleotide
  Sense strand starting at position 1567 of SEQ ID NO: 586814
ccgaaagucccgggaaaga

SEQ ID NO: 746295 - RNA, 19 nt, Artificial Sequence
  Description of Artificial Sequence: Synthetic oligonucleotide
  Antisense strand to SEQ ID NO: 746294
ucuuucccgggacuuucgg

SEQ ID NO: 746296 - RNA, 19 nt, Artificial Sequence
  Description of Artificial Sequence: Synthetic oligonucleotide
  Sense strand starting at position 1894 of SEQ ID NO: 586814
ccgcauugacacugcagau

SEQ ID NO: 746297 - RNA, 19 nt, Artificial Sequence
  Description of Artificial Sequence: Synthetic oligonucleotide
  Antisense strand to SEQ ID NO: 746296
aucugcagugucaaugcgg

SEQ ID NO: 746298 - RNA, 19 nt, Artificial Sequence
  Description of Artificial Sequence: Synthetic oligonucleotide
  Sense strand starting at position 2105 of SEQ ID NO: 586814
gggcguaauguccaacaaa

SEQ ID NO: 746299 - RNA, 19 nt, Artificial Sequence
  Description of Artificial Sequence: Synthetic oligonucleotide
  Antisense strand to SEQ ID NO: 746298
uuuguuggacauuacgccc

SEQ ID NO: 746300 - RNA, 19 nt, Artificial Sequence
  Description of Artificial Sequence: Synthetic oligonucleotide
  Sense strand starting at position 2640 of SEQ ID NO: 586814
cgggcugcucgcaaaguuu

SEQ ID NO: 746301 - RNA, 19 nt, Artificial Sequence
  Description of Artificial Sequence: Synthetic oligonucleotide
  Antisense strand to SEQ ID NO: 746300
aaacuuugcgagcagcccg

SEQ ID NO: 746302 - RNA, 19 nt, Artificial Sequence
  Description of Artificial Sequence: Synthetic oligonucleotide
  Sense strand starting at position 3261 of SEQ ID NO: 586814
acccauugcuagucagaac

SEQ ID NO: 746303 - RNA, 19 nt, Artificial Sequence
  Description of Artificial Sequence: Synthetic oligonucleotide
  Antisense strand to SEQ ID NO: 746302
guucugacuagcaaugggu

SEQ ID NO: 746304 - RNA, 19 nt, Artificial Sequence
  Description of Artificial Sequence: Synthetic oligonucleotide
  Sense strand starting at position 3508 of SEQ ID NO: 586814
guuucugaagcccaaagaa

SEQ ID NO: 746305 - RNA, 19 nt, Artificial Sequence
  Description of Artificial Sequence: Synthetic oligonucleotide
  Antisense strand to SEQ ID NO: 746304
uucuuugggcuucagaaac

SEQ ID NO: 746306 - RNA, 19 nt, Artificial Sequence
  Description of Artificial Sequence: Synthetic oligonucleotide
  Sense strand starting at position 3546 of SEQ ID NO: 586814
ugguuuaggcagugaagau

SEQ ID NO: 746307 - RNA, 19 nt, Artificial Sequence
  Description of Artificial Sequence: Synthetic oligonucleotide
  Antisense strand to SEQ ID NO: 746306
aucuucacugccuaaacca

SEQ ID NO: 746308 - RNA, 19 nt, Artificial Sequence
  Description of Artificial Sequence: Synthetic oligonucleotide
  Sense strand starting at position 3547 of SEQ ID NO: 586814
gguuuaggcagugaagaug

SEQ ID NO: 746309 - RNA, 19 nt, Artificial Sequence
  Description of Artificial Sequence: Synthetic oligonucleotide
  Antisense strand to SEQ ID NO: 746308
caucuucacugccuaaacc

SEQ ID NO: 746310 - RNA, 19 nt, Artificial Sequence
  Description of Artificial Sequence: Synthetic oligonucleotide
  Sense strand starting at position 3703 of SEQ ID NO: 586814
ccaccauagucugagggaa

SEQ ID NO: 746311 - RNA, 19 nt, Artificial Sequence
  Description of Artificial Sequence: Synthetic oligonucleotide
  Antisense strand to SEQ ID NO: 746310
uucccucagacuauggugg

SEQ ID NO: 746312 - RNA, 19 nt, Artificial Sequence
  Description of Artificial Sequence: Synthetic oligonucleotide
  Sense strand starting at position 3733 of SEQ ID NO: 586814
agcagaguccaguaagcau

SEQ ID NO: 746313 - RNA, 19 nt, Artificial Sequence
  Description of Artificial Sequence: Synthetic oligonucleotide
  Antisense strand to SEQ ID NO: 746312
augcuuacuggacucugcu

SEQ ID NO: 746314 - RNA, 19 nt, Artificial Sequence
  Description of Artificial Sequence: Synthetic oligonucleotide
  Sense strand starting at position 3744 of SEQ ID NO: 586814
guaagcauucccugggaua

SEQ ID NO: 746315 - RNA, 19 nt, Artificial Sequence
  Description of Artificial Sequence: Synthetic oligonucleotide
  Antisense strand to SEQ ID NO: 746314
uaucccagggaaugcuuac

SEQ ID NO: 746316 - RNA, 19 nt, Artificial Sequence
  Description of Artificial Sequence: Synthetic oligonucleotide
  Sense strand starting at position 3745 of SEQ ID NO: 586814
uaagcauucccugggauag

SEQ ID NO: 746317 - RNA, 19 nt, Artificial Sequence
  Description of Artificial Sequence: Synthetic oligonucleotide
  Antisense strand to SEQ ID NO: 746316
cuaucccagggaaugcuua

SEQ ID NO: 746318 - RNA, 19 nt, Artificial Sequence
  Description of Artificial Sequence: Synthetic oligonucleotide
  Sense strand starting at position 3930 of SEQ ID NO: 586814
ggcuuaaaugccuauaccu

SEQ ID NO: 746319 - RNA, 19 nt, Artificial Sequence
  Description of Artificial Sequence: Synthetic oligonucleotide
  Antisense strand to SEQ ID NO: 746318
agguauaggcauuuaagcc

SEQ ID NO: 746320 - RNA, 19 nt, Artificial Sequence
  Description of Artificial Sequence: Synthetic oligonucleotide
  Sense strand starting at position 3972 of SEQ ID NO: 586814
agaaaucgaaguuguguga

SEQ ID NO: 746321 - RNA, 19 nt, Artificial Sequence
  Description of Artificial Sequence: Synthetic oligonucleotide
  Antisense strand to SEQ ID NO: 746320
ucacacaacuucgauuucu

SEQ ID NO: 746322 - RNA, 19 nt, Artificial Sequence
  Description of Artificial Sequence: Synthetic oligonucleotide
  Sense strand starting at position 3975 of SEQ ID NO: 586814
aaucgaaguugugugaauu

SEQ ID NO: 746323 - RNA, 19 nt, Artificial Sequence
  Description of Artificial Sequence: Synthetic oligonucleotide
  Antisense strand to SEQ ID NO: 746322
aauucacacaacuucgauu

SEQ ID NO: 746324 - RNA, 19 nt, Artificial Sequence
  Description of Artificial Sequence: Synthetic oligonucleotide
  Sense strand starting at position 3976 of SEQ ID NO: 586814
aucgaaguugugugaauug

SEQ ID NO: 746325 - RNA, 19 nt, Artificial Sequence
  Description of Artificial Sequence: Synthetic oligonucleotide
  Antisense strand to SEQ ID NO: 746324
caauucacacaacuucgau

SEQ ID NO: 746326 - RNA, 19 nt, Artificial Sequence
  Description of Artificial Sequence: Synthetic oligonucleotide
  Sense strand starting at position 45 of SEQ ID NO: 586815
gaggauauuugagauguag

SEQ ID NO: 746327 - RNA, 19 nt, Artificial Sequence
  Description of Artificial Sequence: Synthetic oligonucleotide
  Antisense strand to SEQ ID NO: 746326
cuacaucucaaauauccuc

SEQ ID NO: 746328 - RNA, 19 nt, Artificial Sequence
  Description of Artificial Sequence: Synthetic oligonucleotide
  Sense strand starting at position 57 of SEQ ID NO: 586815
gauguagaguuguugaaug

SEQ ID NO: 746329 - RNA, 19 nt, Artificial Sequence
  Description of Artificial Sequence: Synthetic oligonucleotide
  Antisense strand to SEQ ID NO: 746328
cauucaacaacucuacauc

SEQ ID NO: 746330 - RNA, 19 nt, Artificial Sequence
  Description of Artificial Sequence: Synthetic oligonucleotide
  Sense strand starting at position 59 of SEQ ID NO: 586815
uguagaguuguugaaugca

SEQ ID NO: 746331 - RNA, 19 nt, Artificial Sequence
  Description of Artificial Sequence: Synthetic oligonucleotide
  Antisense strand to SEQ ID NO: 746330
ugcauucaacaacucuaca

SEQ ID NO: 746332 - RNA, 19 nt, Artificial Sequence
  Description of Artificial Sequence: Synthetic oligonucleotide
  Sense strand starting at position 62 of SEQ ID NO: 586815
agaguuguugaaugcauga

SEQ ID NO: 746333 - RNA, 19 nt, Artificial Sequence
  Description of Artificial Sequence: Synthetic oligonucleotide
  Antisense strand to SEQ ID NO: 746332
ucaugcauucaacaacucu

SEQ ID NO: 746334 - RNA, 19 nt, Artificial Sequence
  Description of Artificial Sequence: Synthetic oligonucleotide
  Sense strand starting at position 64 of SEQ ID NO: 586815
aguuguugaaugcaugaaa

SEQ ID NO: 746335 - RNA, 19 nt, Artificial Sequence
  Description of Artificial Sequence: Synthetic oligonucleotide
  Antisense strand to SEQ ID NO: 746334
uuucaugcauucaacaacu

SEQ ID NO: 746336 - RNA, 19 nt, Artificial Sequence
  Description of Artificial Sequence: Synthetic oligonucleotide
  Sense strand starting at position 67 of SEQ ID NO: 586815
uguugaaugcaugaaacua

SEQ ID NO: 746337 - RNA, 19 nt, Artificial Sequence
  Description of Artificial Sequence: Synthetic oligonucleotide
  Antisense strand to SEQ ID NO: 746336
uaguuucaugcauucaaca

SEQ ID NO: 746338 - RNA, 19 nt, Artificial Sequence
  Description of Artificial Sequence: Synthetic oligonucleotide
  Sense strand starting at position 1391 of SEQ ID NO: 586815
ucacaaacucagugucaua

SEQ ID NO: 746339 - RNA, 19 nt, Artificial Sequence
  Description of Artificial Sequence: Synthetic oligonucleotide
  Antisense strand to SEQ ID NO: 746338
uaugacacugaguuuguga

SEQ ID NO: 746340 - RNA, 19 nt, Artificial Sequence
  Description of Artificial Sequence: Synthetic oligonucleotide
  Sense strand starting at position 1541 of SEQ ID NO: 586815
cguguauguccuucuaagc

SEQ ID NO: 746341 - RNA, 19 nt, Artificial Sequence
  Description of Artificial Sequence: Synthetic oligonucleotide
  Antisense strand to SEQ ID NO: 746340
gcuuagaaggacauacacg

SEQ ID NO: 746342 - RNA, 19 nt, Artificial Sequence
  Description of Artificial Sequence: Synthetic oligonucleotide
  Sense strand starting at position 1835 of SEQ ID NO: 586815
guaauuaaagcagaagcau

SEQ ID NO: 746343 - RNA, 19 nt, Artificial Sequence
  Description of Artificial Sequence: Synthetic oligonucleotide
  Antisense strand to SEQ ID NO: 746342
augcuucugcuuuaauuac

SEQ ID NO: 746344 - RNA, 19 nt, Artificial Sequence
  Description of Artificial Sequence: Synthetic oligonucleotide
  Sense strand starting at position 1899 of SEQ ID NO: 586815
gggaaauacuggucugauu

SEQ ID NO: 746345 - RNA, 19 nt, Artificial Sequence
  Description of Artificial Sequence: Synthetic oligonucleotide
  Antisense strand to SEQ ID NO: 746344
aaucagaccaguauuuccc

SEQ ID NO: 746346 - RNA, 19 nt, Artificial Sequence
  Description of Artificial Sequence: Synthetic oligonucleotide
  Sense strand starting at position 1954 of SEQ ID NO: 586815
gggcaagaucuccaugcau

SEQ ID NO: 746347 - RNA, 19 nt, Artificial Sequence
  Description of Artificial Sequence: Synthetic oligonucleotide
  Antisense strand to SEQ ID NO: 746346
augcauggagaucuugccc

SEQ ID NO: 746348 - RNA, 19 nt, Artificial Sequence
  Description of Artificial Sequence: Synthetic oligonucleotide
  Sense strand starting at position 1956 of SEQ ID NO: 586815
gcaagaucuccaugcauua

SEQ ID NO: 746349 - RNA, 19 nt, Artificial Sequence
  Description of Artificial Sequence: Synthetic oligonucleotide
  Antisense strand to SEQ ID NO: 746348
uaaugcauggagaucuugc

SEQ ID NO: 746350 - RNA, 19 nt, Artificial Sequence
  Description of Artificial Sequence: Synthetic oligonucleotide
  Sense strand starting at position 1989 of SEQ ID NO: 586815
ucugcaucucaugauuaga

SEQ ID NO: 746351 - RNA, 19 nt, Artificial Sequence
  Description of Artificial Sequence: Synthetic oligonucleotide
  Antisense strand to SEQ ID NO: 746350
ucuaaucaugagaugcaga

SEQ ID NO: 746352 - RNA, 19 nt, Artificial Sequence
  Description of Artificial Sequence: Synthetic oligonucleotide
  Sense strand starting at position 1991 of SEQ ID NO: 586815
ugcaucucaugauuagacu

SEQ ID NO: 746353 - RNA, 19 nt, Artificial Sequence
  Description of Artificial Sequence: Synthetic oligonucleotide
  Antisense strand to SEQ ID NO: 746352
agucuaaucaugagaugca

SEQ ID NO: 746354 - RNA, 19 nt, Artificial Sequence
  Description of Artificial Sequence: Synthetic oligonucleotide
  Sense strand starting at position 2506 of SEQ ID NO: 586815
ccaggccuagccuauauua

SEQ ID NO: 746355 - RNA, 19 nt, Artificial Sequence
  Description of Artificial Sequence: Synthetic oligonucleotide
  Antisense strand to SEQ ID NO: 746354
uaauauaggcuaggccugg

SEQ ID NO: 746356 - RNA, 19 nt, Artificial Sequence
  Description of Artificial Sequence: Synthetic oligonucleotide
  Sense strand starting at position 2508 of SEQ ID NO: 586815
aggccuagccuauauuaca

SEQ ID NO: 746357 - RNA, 19 nt, Artificial Sequence
  Description of Artificial Sequence: Synthetic oligonucleotide
  Antisense strand to SEQ ID NO: 746356
uguaauauaggcuaggccu

SEQ ID NO: 746358 - RNA, 19 nt, Artificial Sequence
  Description of Artificial Sequence: Synthetic oligonucleotide
  Sense strand starting at position 2563 of SEQ ID NO: 586815
uggugaguugcucagggaa

SEQ ID NO: 746359 - RNA, 19 nt, Artificial Sequence
  Description of Artificial Sequence: Synthetic oligonucleotide
  Antisense strand to SEQ ID NO: 746358
uucccugagcaacucacca

SEQ ID NO: 746360 - RNA, 19 nt, Artificial Sequence
  Description of Artificial Sequence: Synthetic oligonucleotide
  Sense strand starting at position 2615 of SEQ ID NO: 586815
guuuauuaggugcagacau

SEQ ID NO: 746361 - RNA, 19 nt, Artificial Sequence
  Description of Artificial Sequence: Synthetic oligonucleotide
  Antisense strand to SEQ ID NO: 746360
augucugcaccuaauaaac

SEQ ID NO: 746362 - RNA, 19 nt, Artificial Sequence
  Description of Artificial Sequence: Synthetic oligonucleotide
  Sense strand starting at position 2635 of SEQ ID NO: 586815
ccagauaagagcugaguua

SEQ ID NO: 746363 - RNA, 19 nt, Artificial Sequence
  Description of Artificial Sequence: Synthetic oligonucleotide
  Antisense strand to SEQ ID NO: 746362
uaacucagcucuuaucugg

SEQ ID NO: 746364 - RNA, 19 nt, Artificial Sequence
  Description of Artificial Sequence: Synthetic oligonucleotide
  Sense strand starting at position 2742 of SEQ ID NO: 586815
agucuaagaucugugcaaa

SEQ ID NO: 746365 - RNA, 19 nt, Artificial Sequence
  Description of Artificial Sequence: Synthetic oligonucleotide
  Antisense strand to SEQ ID NO: 746364
uuugcacagaucuuagacu

SEQ ID NO: 746366 - RNA, 19 nt, Artificial Sequence
  Description of Artificial Sequence: Synthetic oligonucleotide
  Sense strand starting at position 2883 of SEQ ID NO: 586815
cgaaucacuucugcagaga

SEQ ID NO: 746367 - RNA, 19 nt, Artificial Sequence
  Description of Artificial Sequence: Synthetic oligonucleotide
  Antisense strand to SEQ ID NO: 746366
ucucugcagaagugauucg

SEQ ID NO: 746368 - RNA, 19 nt, Artificial Sequence
  Description of Artificial Sequence: Synthetic oligonucleotide
  Sense strand starting at position 3037 of SEQ ID NO: 586815
uucugagcucucugaaccu

SEQ ID NO: 746369 - RNA, 19 nt, Artificial Sequence
  Description of Artificial Sequence: Synthetic oligonucleotide
  Antisense strand to SEQ ID NO: 746368
agguucagagagcucagaa

SEQ ID NO: 746370 - RNA, 19 nt, Artificial Sequence
  Description of Artificial Sequence: Synthetic oligonucleotide
  Sense strand starting at position 3044 of SEQ ID NO: 586815
cucucugaaccugaugagu

SEQ ID NO: 746371 - RNA, 19 nt, Artificial Sequence
  Description of Artificial Sequence: Synthetic oligonucleotide
  Antisense strand to SEQ ID NO: 746370
acucaucagguucagagag

SEQ ID NO: 746372 - RNA, 19 nt, Artificial Sequence
  Description of Artificial Sequence: Synthetic oligonucleotide
  Sense strand starting at position 3063 of SEQ ID NO: 586815
gaaggacagcuccagcaau

SEQ ID NO: 746373 - RNA, 19 nt, Artificial Sequence
  Description of Artificial Sequence: Synthetic oligonucleotide
  Antisense strand to SEQ ID NO: 746372
auugcuggagcuguccuuc

SEQ ID NO: 746374 - RNA, 19 nt, Artificial Sequence
  Description of Artificial Sequence: Synthetic oligonucleotide
  Sense strand starting at position 3103 of SEQ ID NO: 586815
ccugguacaucacugcaaa

SEQ ID NO: 746375 - RNA, 19 nt, Artificial Sequence
  Description of Artificial Sequence: Synthetic oligonucleotide
  Antisense strand to SEQ ID NO: 746374
uuugcagugauguaccagg

SEQ ID NO: 746376 - RNA, 19 nt, Artificial Sequence
  Description of Artificial Sequence: Synthetic oligonucleotide
  Sense strand starting at position 3297 of SEQ ID NO: 586815
gcagcuggugagugaaaga

SEQ ID NO: 746377 - RNA, 19 nt, Artificial Sequence
  Description of Artificial Sequence: Synthetic oligonucleotide
  Antisense strand to SEQ ID NO: 746376
ucuuucacucaccagcugc

SEQ ID NO: 746378 - RNA, 19 nt, Artificial Sequence
  Description of Artificial Sequence: Synthetic oligonucleotide
  Sense strand starting at position 3340 of SEQ ID NO: 586815
acuccaggucucugcaaga

SEQ ID NO: 746379 - RNA, 19 nt, Artificial Sequence
  Description of Artificial Sequence: Synthetic oligonucleotide
  Antisense strand to SEQ ID NO: 746378
ucuugcagagaccuggagu

SEQ ID NO: 746380 - RNA, 19 nt, Artificial Sequence
  Description of Artificial Sequence: Synthetic oligonucleotide
  Sense strand starting at position 3407 of SEQ ID NO: 586815
gccuuuguugaaggacuga

SEQ ID NO: 746381 - RNA, 19 nt, Artificial Sequence
  Description of Artificial Sequence: Synthetic oligonucleotide
  Antisense strand to SEQ ID NO: 746380
ucaguccuucaacaaaggc

SEQ ID NO: 746382 - RNA, 19 nt, Artificial Sequence
  Description of Artificial Sequence: Synthetic oligonucleotide
  Sense strand starting at position 3552 of SEQ ID NO: 586815
ucauuuguuuagcuguuua

SEQ ID NO: 746383 - RNA, 19 nt, Artificial Sequence
  Description of Artificial Sequence: Synthetic oligonucleotide
  Antisense strand to SEQ ID NO: 746382
uaaacagcuaaacaaauga

SEQ ID NO: 746384 - RNA, 19 nt, Artificial Sequence
  Description of Artificial Sequence: Synthetic oligonucleotide
  Sense strand starting at position 3674 of SEQ ID NO: 586815
auagcuauuguauagauga

SEQ ID NO: 746385 - RNA, 19 nt, Artificial Sequence
  Description of Artificial Sequence: Synthetic oligonucleotide
  Antisense strand to SEQ ID NO: 746384
ucaucuauacaauagcuau

SEQ ID NO: 746386 - RNA, 19 nt, Artificial Sequence
  Description of Artificial Sequence: Synthetic oligonucleotide
  Sense strand starting at position 3676 of SEQ ID NO: 586815
agcuauuguauagaugagu

SEQ ID NO: 746387 - RNA, 19 nt, Artificial Sequence
  Description of Artificial Sequence: Synthetic oligonucleotide
  Antisense strand to SEQ ID NO: 746386
acucaucuauacaauagcu

SEQ ID NO: 746388 - RNA, 19 nt, Artificial Sequence
  Description of Artificial Sequence: Synthetic oligonucleotide
  Sense strand starting at position 3681 of SEQ ID NO: 586815
uuguauagaugaguaaaug

SEQ ID NO: 746389 - RNA, 19 nt, Artificial Sequence
  Description of Artificial Sequence: Synthetic oligonucleotide
  Antisense strand to SEQ ID NO: 746388
cauuuacucaucuauacaa

SEQ ID NO: 746390 - RNA, 19 nt, Artificial Sequence
  Description of Artificial Sequence: Synthetic oligonucleotide
  Sense strand starting at position 3699 of SEQ ID NO: 586815
ggacucuucccauacccga

SEQ ID NO: 746391 - RNA, 19 nt, Artificial Sequence
  Description of Artificial Sequence: Synthetic oligonucleotide
  Antisense strand to SEQ ID NO: 746390
ucggguaugggaagagucc

SEQ ID NO: 746392 - RNA, 19 nt, Artificial Sequence
  Description of Artificial Sequence: Synthetic oligonucleotide
  Sense strand starting at position 3720 of SEQ ID NO: 586815
ugucucugaccuuguauuu

SEQ ID NO: 746393 - RNA, 19 nt, Artificial Sequence
  Description of Artificial Sequence: Synthetic oligonucleotide
  Antisense strand to SEQ ID NO: 746392
aaauacaaggucagagaca

SEQ ID NO: 746394 - RNA, 19 nt, Artificial Sequence
  Description of Artificial Sequence: Synthetic oligonucleotide
  Sense strand starting at position 3749 of SEQ ID NO: 586815
gagcuauuccuagaugcau

SEQ ID NO: 746395 - RNA, 19 nt, Artificial Sequence
  Description of Artificial Sequence: Synthetic oligonucleotide
  Antisense strand to SEQ ID NO: 746394
augcaucuaggaauagcuc

SEQ ID NO: 746396 - RNA, 19 nt, Artificial Sequence
  Description of Artificial Sequence: Synthetic oligonucleotide
  Sense strand starting at position 3770 of SEQ ID NO: 586815
cagagucuguuugucaaga

SEQ ID NO: 746397 - RNA, 19 nt, Artificial Sequence
  Description of Artificial Sequence: Synthetic oligonucleotide
  Antisense strand to SEQ ID NO: 746396
ucuugacaaacagacucug

SEQ ID NO: 746398 - RNA, 19 nt, Artificial Sequence
  Description of Artificial Sequence: Synthetic oligonucleotide
  Sense strand starting at position 3771 of SEQ ID NO: 586815
agagucuguuugucaagaa

SEQ ID NO: 746399 - RNA, 19 nt, Artificial Sequence
  Description of Artificial Sequence: Synthetic oligonucleotide
  Antisense strand to SEQ ID NO: 746398
uucuugacaaacagacucu

SEQ ID NO: 746400 - RNA, 19 nt, Artificial Sequence
  Description of Artificial Sequence: Synthetic oligonucleotide
  Sense strand starting at position 3972 of SEQ ID NO: 586815
gauauccuguccuugggua

SEQ ID NO: 746401 - RNA, 19 nt, Artificial Sequence
  Description of Artificial Sequence: Synthetic oligonucleotide
  Antisense strand to SEQ ID NO: 746400
uacccaaggacaggauauc

SEQ ID NO: 746402 - RNA, 19 nt, Artificial Sequence
  Description of Artificial Sequence: Synthetic oligonucleotide
  Sense strand starting at position 3973 of SEQ ID NO: 586815
auauccuguccuuggguaa

SEQ ID NO: 746403 - RNA, 19 nt, Artificial Sequence
  Description of Artificial Sequence: Synthetic oligonucleotide
  Antisense strand to SEQ ID NO: 746402
uuacccaaggacaggauau

SEQ ID NO: 746404 - RNA, 19 nt, Artificial Sequence
  Description of Artificial Sequence: Synthetic oligonucleotide
  Sense strand starting at position 3974 of SEQ ID NO: 586815
uauccuguccuuggguaaa

SEQ ID NO: 746405 - RNA, 19 nt, Artificial Sequence
  Description of Artificial Sequence: Synthetic oligonucleotide
  Antisense strand to SEQ ID NO: 746404
uuuacccaaggacaggaua

SEQ ID NO: 746406 - RNA, 19 nt, Artificial Sequence
  Description of Artificial Sequence: Synthetic oligonucleotide
  Sense strand starting at position 41 of SEQ ID NO: 586816
ggaacagucuccuuccuuu

SEQ ID NO: 746407 - RNA, 19 nt, Artificial Sequence
  Description of Artificial Sequence: Synthetic oligonucleotide
  Antisense strand to SEQ ID NO: 746406
aaaggaaggagacuguucc

SEQ ID NO: 746408 - RNA, 19 nt, Artificial Sequence
  Description of Artificial Sequence: Synthetic oligonucleotide
  Sense strand starting at position 64 of SEQ ID NO: 586816
gacaaaugcuuucuggucu

SEQ ID NO: 746409 - RNA, 19 nt, Artificial Sequence
  Description of Artificial Sequence: Synthetic oligonucleotide
  Antisense strand to SEQ ID NO: 746408
agaccagaaagcauuuguc

SEQ ID NO: 746410 - RNA, 19 nt, Artificial Sequence
  Description of Artificial Sequence: Synthetic oligonucleotide
  Sense strand starting at position 97 of SEQ ID NO: 586816
ucuugaccugagugaauug

SEQ ID NO: 746411 - RNA, 19 nt, Artificial Sequence
  Description of Artificial Sequence: Synthetic oligonucleotide
  Antisense strand to SEQ ID NO: 746410
caauucacucaggucaaga

SEQ ID NO: 746412 - RNA, 19 nt, Artificial Sequence
  Description of Artificial Sequence: Synthetic oligonucleotide
  Sense strand starting at position 102 of SEQ ID NO: 586816
accugagugaauugauagu

SEQ ID NO: 746413 - RNA, 19 nt, Artificial Sequence
  Description of Artificial Sequence: Synthetic oligonucleotide
  Antisense strand to SEQ ID NO: 746412
acuaucaauucacucaggu

SEQ ID NO: 746414 - RNA, 19 nt, Artificial Sequence
  Description of Artificial Sequence: Synthetic oligonucleotide
  Sense strand starting at position 125 of SEQ ID NO: 586816
uccugugaacuaugagauu

SEQ ID NO: 746415 - RNA, 19 nt, Artificial Sequence
  Description of Artificial Sequence: Synthetic oligonucleotide
  Antisense strand to SEQ ID NO: 746414
aaucucauaguucacagga

SEQ ID NO: 746416 - RNA, 19 nt, Artificial Sequence
  Description of Artificial Sequence: Synthetic oligonucleotide
  Sense strand starting at position 128 of SEQ ID NO: 586816
ugugaacuaugagauuuaa

SEQ ID NO: 746417 - RNA, 19 nt, Artificial Sequence
  Description of Artificial Sequence: Synthetic oligonucleotide
  Antisense strand to SEQ ID NO: 746416
uuaaaucucauaguucaca

SEQ ID NO: 746418 - RNA, 19 nt, Artificial Sequence
  Description of Artificial Sequence: Synthetic oligonucleotide
  Sense strand starting at position 201 of SEQ ID NO: 586816
ugaggauucuuugcccaac

SEQ ID NO: 746419 - RNA, 19 nt, Artificial Sequence
  Description of Artificial Sequence: Synthetic oligonucleotide
  Antisense strand to SEQ ID NO: 746418
guugggcaaagaauccuca

SEQ ID NO: 746420 - RNA, 19 nt, Artificial Sequence
  Description of Artificial Sequence: Synthetic oligonucleotide
  Sense strand starting at position 204 of SEQ ID NO: 586816
ggauucuuugcccaacuca

SEQ ID NO: 746421 - RNA, 19 nt, Artificial Sequence
  Description of Artificial Sequence: Synthetic oligonucleotide
  Antisense strand to SEQ ID NO: 746420
ugaguugggcaaagaaucc

SEQ ID NO: 746422 - RNA, 19 nt, Artificial Sequence
  Description of Artificial Sequence: Synthetic oligonucleotide
  Sense strand starting at position 302 of SEQ ID NO: 586816
cauguauuagcugaguuac

SEQ ID NO: 746423 - RNA, 19 nt, Artificial Sequence
  Description of Artificial Sequence: Synthetic oligonucleotide
  Antisense strand to SEQ ID NO: 746422
guaacucagcuaauacaug

SEQ ID NO: 746424 - RNA, 19 nt, Artificial Sequence
  Description of Artificial Sequence: Synthetic oligonucleotide
  Sense strand starting at position 304 of SEQ ID NO: 586816
uguauuagcugaguuaccu

SEQ ID NO: 746425 - RNA, 19 nt, Artificial Sequence
  Description of Artificial Sequence: Synthetic oligonucleotide
  Antisense strand to SEQ ID NO: 746424
agguaacucagcuaauaca

SEQ ID NO: 746426 - RNA, 19 nt, Artificial Sequence
  Description of Artificial Sequence: Synthetic oligonucleotide
  Sense strand starting at position 663 of SEQ ID NO: 586816
acaauuugcuacgcuaaau

SEQ ID NO: 746427 - RNA, 19 nt, Artificial Sequence
  Description of Artificial Sequence: Synthetic oligonucleotide
  Antisense strand to SEQ ID NO: 746426
auuuagcguagcaaauugu

SEQ ID NO: 746428 - RNA, 19 nt, Artificial Sequence
  Description of Artificial Sequence: Synthetic oligonucleotide
  Sense strand starting at position 693 of SEQ ID NO: 586816
uagagaagguugccugagu

SEQ ID NO: 746429 - RNA, 19 nt, Artificial Sequence
  Description of Artificial Sequence: Synthetic oligonucleotide
  Antisense strand to SEQ ID NO: 746428
acucaggcaaccuucucua

SEQ ID NO: 746430 - RNA, 19 nt, Artificial Sequence
  Description of Artificial Sequence: Synthetic oligonucleotide
  Sense strand starting at position 998 of SEQ ID NO: 586816
gagaucucugccuggccua

SEQ ID NO: 746431 - RNA, 19 nt, Artificial Sequence
  Description of Artificial Sequence: Synthetic oligonucleotide
  Antisense strand to SEQ ID NO: 746430
uaggccaggcagagaucuc

SEQ ID NO: 746432 - RNA, 19 nt, Artificial Sequence
  Description of Artificial Sequence: Synthetic oligonucleotide
  Sense strand starting at position 1005 of SEQ ID NO: 586816
cugccuggccuagaaacau

SEQ ID NO: 746433 - RNA, 19 nt, Artificial Sequence
  Description of Artificial Sequence: Synthetic oligonucleotide
  Antisense strand to SEQ ID NO: 746432
auguuucuaggccaggcag

SEQ ID NO: 746434 - RNA, 19 nt, Artificial Sequence
  Description of Artificial Sequence: Synthetic oligonucleotide
  Sense strand starting at position 1048 of SEQ ID NO: 586816
ccagcaacguguuuauaaa

SEQ ID NO: 746435 - RNA, 19 nt, Artificial Sequence
  Description of Artificial Sequence: Synthetic oligonucleotide
  Antisense strand to SEQ ID NO: 746434
uuuauaaacacguugcugg

SEQ ID NO: 746436 - RNA, 19 nt, Artificial Sequence
  Description of Artificial Sequence: Synthetic oligonucleotide
  Sense strand starting at position 1049 of SEQ ID NO: 586816
cagcaacguguuuauaaac

SEQ ID NO: 746437 - RNA, 19 nt, Artificial Sequence
  Description of Artificial Sequence: Synthetic oligonucleotide
  Antisense strand to SEQ ID NO: 746436
guuuauaaacacguugcug

SEQ ID NO: 746438 - RNA, 19 nt, Artificial Sequence
  Description of Artificial Sequence: Synthetic oligonucleotide
  Sense strand starting at position 1271 of SEQ ID NO: 586816
aggguuuggaaaugguuaa

SEQ ID NO: 746439 - RNA, 19 nt, Artificial Sequence
  Description of Artificial Sequence: Synthetic oligonucleotide
  Antisense strand to SEQ ID NO: 746438
uuaaccauuuccaaacccu

SEQ ID NO: 746440 - RNA, 19 nt, Artificial Sequence
  Description of Artificial Sequence: Synthetic oligonucleotide
  Sense strand starting at position 1272 of SEQ ID NO: 586816
ggguuuggaaaugguuaaa

SEQ ID NO: 746441 - RNA, 19 nt, Artificial Sequence
  Description of Artificial Sequence: Synthetic oligonucleotide
  Antisense strand to SEQ ID NO: 746440
uuuaaccauuuccaaaccc

SEQ ID NO: 746442 - RNA, 19 nt, Artificial Sequence
  Description of Artificial Sequence: Synthetic oligonucleotide
  Sense strand starting at position 1311 of SEQ ID NO: 586816
aggaagaugggucgauguu

SEQ ID NO: 746443 - RNA, 19 nt, Artificial Sequence
  Description of Artificial Sequence: Synthetic oligonucleotide
  Antisense strand to SEQ ID NO: 746442
aacaucgacccaucuuccu

SEQ ID NO: 746444 - RNA, 19 nt, Artificial Sequence
  Description of Artificial Sequence: Synthetic oligonucleotide
  Sense strand starting at position 1312 of SEQ ID NO: 586816
ggaagaugggucgauguuc

SEQ ID NO: 746445 - RNA, 19 nt, Artificial Sequence
  Description of Artificial Sequence: Synthetic oligonucleotide
  Antisense strand to SEQ ID NO: 746444
gaacaucgacccaucuucc

SEQ ID NO: 746446 - RNA, 19 nt, Artificial Sequence
  Description of Artificial Sequence: Synthetic oligonucleotide
  Sense strand starting at position 1426 of SEQ ID NO: 586816
gucagaggcucucucauga

SEQ ID NO: 746447 - RNA, 19 nt, Artificial Sequence
  Description of Artificial Sequence: Synthetic oligonucleotide
  Antisense strand to SEQ ID NO: 746446
ucaugagagagccucugac

SEQ ID NO: 746448 - RNA, 19 nt, Artificial Sequence
  Description of Artificial Sequence: Synthetic oligonucleotide
  Sense strand starting at position 1510 of SEQ ID NO: 586816
ggacgaaguucagucuuag

SEQ ID NO: 746449 - RNA, 19 nt, Artificial Sequence
  Description of Artificial Sequence: Synthetic oligonucleotide
  Antisense strand to SEQ ID NO: 746448
cuaagacugaacuucgucc

SEQ ID NO: 746450 - RNA, 19 nt, Artificial Sequence
  Description of Artificial Sequence: Synthetic oligonucleotide
  Sense strand starting at position 1826 of SEQ ID NO: 586816
uggcgagaucucgaggaca

SEQ ID NO: 746451 - RNA, 19 nt, Artificial Sequence
  Description of Artificial Sequence: Synthetic oligonucleotide
  Antisense strand to SEQ ID NO: 746450
uguccucgagaucucgcca

SEQ ID NO: 746452 - RNA, 19 nt, Artificial Sequence
  Description of Artificial Sequence: Synthetic oligonucleotide
  Sense strand starting at position 2058 of SEQ ID NO: 586816
ccgugaugggaaugacacu

SEQ ID NO: 746453 - RNA, 19 nt, Artificial Sequence
  Description of Artificial Sequence: Synthetic oligonucleotide
  Antisense strand to SEQ ID NO: 746452
agugucauucccaucacgg

SEQ ID NO: 746454 - RNA, 19 nt, Artificial Sequence
  Description of Artificial Sequence: Synthetic oligonucleotide
  Sense strand starting at position 2119 of SEQ ID NO: 586816
cugagcggucuuuaccaaa

SEQ ID NO: 746455 - RNA, 19 nt, Artificial Sequence
  Description of Artificial Sequence: Synthetic oligonucleotide
  Antisense strand to SEQ ID NO: 746454
uuugguaaagaccgcucag

SEQ ID NO: 746456 - RNA, 19 nt, Artificial Sequence
  Description of Artificial Sequence: Synthetic oligonucleotide
  Sense strand starting at position 2205 of SEQ ID NO: 586816
gcacaaaugcgguggaaug

SEQ ID NO: 746457 - RNA, 19 nt, Artificial Sequence
  Description of Artificial Sequence: Synthetic oligonucleotide
  Antisense strand to SEQ ID NO: 746456
cauuccaccgcauuugugc

SEQ ID NO: 746458 - RNA, 19 nt, Artificial Sequence
  Description of Artificial Sequence: Synthetic oligonucleotide
  Sense strand starting at position 2240 of SEQ ID NO: 586816
aauauaucucacuggugga

SEQ ID NO: 746459 - RNA, 19 nt, Artificial Sequence
  Description of Artificial Sequence: Synthetic oligonucleotide
  Antisense strand to SEQ ID NO: 746458
uccaccagugagauauauu

SEQ ID NO: 746460 - RNA, 19 nt, Artificial Sequence
  Description of Artificial Sequence: Synthetic oligonucleotide
  Sense strand starting at position 2346 of SEQ ID NO: 586816
gaggaaacgauguauccgu

SEQ ID NO: 746461 - RNA, 19 nt, Artificial Sequence
  Description of Artificial Sequence: Synthetic oligonucleotide
  Antisense strand to SEQ ID NO: 746460
acggauacaucguuuccuc

SEQ ID NO: 746462 - RNA, 19 nt, Artificial Sequence
  Description of Artificial Sequence: Synthetic oligonucleotide
  Sense strand starting at position 2418 of SEQ ID NO: 586816
agaaauugcccuugguaag

SEQ ID NO: 746463 - RNA, 19 nt, Artificial Sequence
  Description of Artificial Sequence: Synthetic oligonucleotide
  Antisense strand to SEQ ID NO: 746462
cuuaccaagggcaauuucu

SEQ ID NO: 746464 - RNA, 19 nt, Artificial Sequence
  Description of Artificial Sequence: Synthetic oligonucleotide
  Sense strand starting at position 2429 of SEQ ID NO: 586816
uugguaaggucacuaauug

SEQ ID NO: 746465 - RNA, 19 nt, Artificial Sequence
  Description of Artificial Sequence: Synthetic oligonucleotide
  Antisense strand to SEQ ID NO: 746464
caauuagugaccuuaccaa

SEQ ID NO: 746466 - RNA, 19 nt, Artificial Sequence
  Description of Artificial Sequence: Synthetic oligonucleotide
  Sense strand starting at position 2502 of SEQ ID NO: 586816
auuguuggcuucuuugaaa

SEQ ID NO: 746467 - RNA, 19 nt, Artificial Sequence
  Description of Artificial Sequence: Synthetic oligonucleotide
  Antisense strand to SEQ ID NO: 746466
uuucaaagaagccaacaau

SEQ ID NO: 746468 - RNA, 19 nt, Artificial Sequence
  Description of Artificial Sequence: Synthetic oligonucleotide
  Sense strand starting at position 3047 of SEQ ID NO: 586816
aagacugugcugugaaaca

SEQ ID NO: 746469 - RNA, 19 nt, Artificial Sequence
  Description of Artificial Sequence: Synthetic oligonucleotide
  Antisense strand to SEQ ID NO: 746468
uguuucacagcacagucuu

SEQ ID NO: 746470 - RNA, 19 nt, Artificial Sequence
  Description of Artificial Sequence: Synthetic oligonucleotide
  Sense strand starting at position 3087 of SEQ ID NO: 586816
gguguuugccaggacucua

SEQ ID NO: 746471 - RNA, 19 nt, Artificial Sequence
  Description of Artificial Sequence: Synthetic oligonucleotide
  Antisense strand to SEQ ID NO: 746470
uagaguccuggcaaacacc

SEQ ID NO: 746472 - RNA, 19 nt, Artificial Sequence
  Description of Artificial Sequence: Synthetic oligonucleotide
  Sense strand starting at position 3520 of SEQ ID NO: 586816
gggagcccuuggucacaau

SEQ ID NO: 746473 - RNA, 19 nt, Artificial Sequence
  Description of Artificial Sequence: Synthetic oligonucleotide
  Antisense strand to SEQ ID NO: 746472
auugugaccaagggcuccc

SEQ ID NO: 746474 - RNA, 19 nt, Artificial Sequence
  Description of Artificial Sequence: Synthetic oligonucleotide
  Sense strand starting at position 3521 of SEQ ID NO: 586816
ggagcccuuggucacaaua

SEQ ID NO: 746475 - RNA, 19 nt, Artificial Sequence
  Description of Artificial Sequence: Synthetic oligonucleotide
  Antisense strand to SEQ ID NO: 746474
uauugugaccaagggcucc

SEQ ID NO: 746476 - RNA, 19 nt, Artificial Sequence
  Description of Artificial Sequence: Synthetic oligonucleotide
  Sense strand starting at position 3541 of SEQ ID NO: 586816
aguaaaggguccuuagcau

SEQ ID NO: 746477 - RNA, 19 nt, Artificial Sequence
  Description of Artificial Sequence: Synthetic oligonucleotide
  Antisense strand to SEQ ID NO: 746476
augcuaaggacccuuuacu

SEQ ID NO: 746478 - RNA, 19 nt, Artificial Sequence
  Description of Artificial Sequence: Synthetic oligonucleotide
  Sense strand starting at position 3772 of SEQ ID NO: 586816
uagguauaaucacaggaag

SEQ ID NO: 746479 - RNA, 19 nt, Artificial Sequence
  Description of Artificial Sequence: Synthetic oligonucleotide
  Antisense strand to SEQ ID NO: 746478
cuuccugugauuauaccua

SEQ ID NO: 746480 - RNA, 19 nt, Artificial Sequence
  Description of Artificial Sequence: Synthetic oligonucleotide
  Sense strand starting at position 3774 of SEQ ID NO: 586816
gguauaaucacaggaagca

SEQ ID NO: 746481 - RNA, 19 nt, Artificial Sequence
  Description of Artificial Sequence: Synthetic oligonucleotide
  Antisense strand to SEQ ID NO: 746480
ugcuuccugugauuauacc

SEQ ID NO: 746482 - RNA, 19 nt, Artificial Sequence
  Description of Artificial Sequence: Synthetic oligonucleotide
  Sense strand starting at position 3855 of SEQ ID NO: 586816
agucauuauuuacagucaa

SEQ ID NO: 746483 - RNA, 19 nt, Artificial Sequence
  Description of Artificial Sequence: Synthetic oligonucleotide
  Antisense strand to SEQ ID NO: 746482
uugacuguaaauaaugacu

SEQ ID NO: 746484 - RNA, 19 nt, Artificial Sequence
  Description of Artificial Sequence: Synthetic oligonucleotide
  Sense strand starting at position 3899 of SEQ ID NO: 586816
aauuaagugcaccagagua

SEQ ID NO: 746485 - RNA, 19 nt, Artificial Sequence
  Description of Artificial Sequence: Synthetic oligonucleotide
  Antisense strand to SEQ ID NO: 746484
uacucuggugcacuuaauu

SEQ ID NO: 746486 - RNA, 19 nt, Artificial Sequence
  Description of Artificial Sequence: Synthetic oligonucleotide
  Sense strand starting at position 310 of SEQ ID NO: 586817
uauauuguagcacagugaa

SEQ ID NO: 746487 - RNA, 19 nt, Artificial Sequence
  Description of Artificial Sequence: Synthetic oligonucleotide
  Antisense strand to SEQ ID NO: 746486
uucacugugcuacaauaua

SEQ ID NO: 746488 - RNA, 19 nt, Artificial Sequence
  Description of Artificial Sequence: Synthetic oligonucleotide
  Sense strand starting at position 344 of SEQ ID NO: 586817
ucacaagcucuuugagaca

SEQ ID NO: 746489 - RNA, 19 nt, Artificial Sequence
  Description of Artificial Sequence: Synthetic oligonucleotide
  Antisense strand to SEQ ID NO: 746488
ugucucaaagagcuuguga

SEQ ID NO: 746490 - RNA, 19 nt, Artificial Sequence
  Description of Artificial Sequence: Synthetic oligonucleotide
  Sense strand starting at position 357 of SEQ ID NO: 586817
gagacacuacaguguauaa

SEQ ID NO: 746491 - RNA, 19 nt, Artificial Sequence
  Description of Artificial Sequence: Synthetic oligonucleotide
  Antisense strand to SEQ ID NO: 746490
uuauacacuguagugucuc

SEQ ID NO: 746492 - RNA, 19 nt, Artificial Sequence
  Description of Artificial Sequence: Synthetic oligonucleotide
  Sense strand starting at position 536 of SEQ ID NO: 586817
cuggguauuuccuacagca

SEQ ID NO: 746493 - RNA, 19 nt, Artificial Sequence
  Description of Artificial Sequence: Synthetic oligonucleotide
  Antisense strand to SEQ ID NO: 746492
ugcuguaggaaauacccag

SEQ ID NO: 746494 - RNA, 19 nt, Artificial Sequence
  Description of Artificial Sequence: Synthetic oligonucleotide
  Sense strand starting at position 563 of SEQ ID NO: 586817
aucguaggccuuuaauaaa

SEQ ID NO: 746495 - RNA, 19 nt, Artificial Sequence
  Description of Artificial Sequence: Synthetic oligonucleotide
  Antisense strand to SEQ ID NO: 746494
uuuauuaaaggccuacgau

SEQ ID NO: 746496 - RNA, 19 nt, Artificial Sequence
  Description of Artificial Sequence: Synthetic oligonucleotide
  Sense strand starting at position 707 of SEQ ID NO: 586817
aaguuuauuuggcagcaca

SEQ ID NO: 746497 - RNA, 19 nt, Artificial Sequence
  Description of Artificial Sequence: Synthetic oligonucleotide
  Antisense strand to SEQ ID NO: 746496
ugugcugccaaauaaacuu

SEQ ID NO: 746498 - RNA, 19 nt, Artificial Sequence
  Description of Artificial Sequence: Synthetic oligonucleotide
  Sense strand starting at position 774 of SEQ ID NO: 586817
gaccgagucuugcugcguu

SEQ ID NO: 746499 - RNA, 19 nt, Artificial Sequence
  Description of Artificial Sequence: Synthetic oligonucleotide
  Antisense strand to SEQ ID NO: 746498
aacgcagcaagacucgguc

SEQ ID NO: 746500 - RNA, 19 nt, Artificial Sequence
  Description of Artificial Sequence: Synthetic oligonucleotide
  Sense strand starting at position 1197 of SEQ ID NO: 586817
auggaaugcaaaugugcua

SEQ ID NO: 746501 - RNA, 19 nt, Artificial Sequence
  Description of Artificial Sequence: Synthetic oligonucleotide
  Antisense strand to SEQ ID NO: 746500
uagcacauuugcauuccau

SEQ ID NO: 746502 - RNA, 19 nt, Artificial Sequence
  Description of Artificial Sequence: Synthetic oligonucleotide
  Sense strand starting at position 1261 of SEQ ID NO: 586817
cagguagaaacguauugca

SEQ ID NO: 746503 - RNA, 19 nt, Artificial Sequence
  Description of Artificial Sequence: Synthetic oligonucleotide
  Antisense strand to SEQ ID NO: 746502
ugcaauacguuucuaccug

SEQ ID NO: 746504 - RNA, 19 nt, Artificial Sequence
  Description of Artificial Sequence: Synthetic oligonucleotide
  Sense strand starting at position 1264 of SEQ ID NO: 586817
guagaaacguauugcauuu

SEQ ID NO: 746505 - RNA, 19 nt, Artificial Sequence
  Description of Artificial Sequence: Synthetic oligonucleotide
  Antisense strand to SEQ ID NO: 746504
aaaugcaauacguuucuac

SEQ ID NO: 746506 - RNA, 19 nt, Artificial Sequence
  Description of Artificial Sequence: Synthetic oligonucleotide
  Sense strand starting at position 1372 of SEQ ID NO: 586817
ggugcaucaugccuuuaau

SEQ ID NO: 746507 - RNA, 19 nt, Artificial Sequence
  Description of Artificial Sequence: Synthetic oligonucleotide
  Antisense strand to SEQ ID NO: 746506
auuaaaggcaugaugcacc

SEQ ID NO: 746508 - RNA, 19 nt, Artificial Sequence
  Description of Artificial Sequence: Synthetic oligonucleotide
  Sense strand starting at position 1726 of SEQ ID NO: 586817
gcacgagaucgcugcaaca

SEQ ID NO: 746509 - RNA, 19 nt, Artificial Sequence
  Description of Artificial Sequence: Synthetic oligonucleotide
  Antisense strand to SEQ ID NO: 746508
uguugcagcgaucucgugc

SEQ ID NO: 746510 - RNA, 19 nt, Artificial Sequence
  Description of Artificial Sequence: Synthetic oligonucleotide
  Sense strand starting at position 1728 of SEQ ID NO: 586817
acgagaucgcugcaacacu

SEQ ID NO: 746511 - RNA, 19 nt, Artificial Sequence
  Description of Artificial Sequence: Synthetic oligonucleotide
  Antisense strand to SEQ ID NO: 746510
aguguugcagcgaucucgu

SEQ ID NO: 746512 - RNA, 19 nt, Artificial Sequence
  Description of Artificial Sequence: Synthetic oligonucleotide
  Sense strand starting at position 2066 of SEQ ID NO: 586817
cgccuauuggcucugucaa

SEQ ID NO: 746513 - RNA, 19 nt, Artificial Sequence
  Description of Artificial Sequence: Synthetic oligonucleotide
  Antisense strand to SEQ ID NO: 746512
uugacagagccaauaggcg

SEQ ID NO: 746514 - RNA, 19 nt, Artificial Sequence
  Description of Artificial Sequence: Synthetic oligonucleotide
  Sense strand starting at position 2067 of SEQ ID NO: 586817
gccuauuggcucugucaaa

SEQ ID NO: 746515 - RNA, 19 nt, Artificial Sequence
  Description of Artificial Sequence: Synthetic oligonucleotide
  Antisense strand to SEQ ID NO: 746514
uuugacagagccaauaggc

SEQ ID NO: 746516 - RNA, 19 nt, Artificial Sequence
  Description of Artificial Sequence: Synthetic oligonucleotide
  Sense strand starting at position 2068 of SEQ ID NO: 586817
ccuauuggcucugucaaag

SEQ ID NO: 746517 - RNA, 19 nt, Artificial Sequence
  Description of Artificial Sequence: Synthetic oligonucleotide
  Antisense strand to SEQ ID NO: 746516
cuuugacagagccaauagg

SEQ ID NO: 746518 - RNA, 19 nt, Artificial Sequence
  Description of Artificial Sequence: Synthetic oligonucleotide
  Sense strand starting at position 2088 of SEQ ID NO: 586817
ucgacuucgugacgucaaa

SEQ ID NO: 746519 - RNA, 19 nt, Artificial Sequence
  Description of Artificial Sequence: Synthetic oligonucleotide
  Antisense strand to SEQ ID NO: 746518
uuugacgucacgaagucga

SEQ ID NO: 746520 - RNA, 19 nt, Artificial Sequence
  Description of Artificial Sequence: Synthetic oligonucleotide
  Sense strand starting at position 2706 of SEQ ID NO: 586817
guggugaggcgccuguaau

SEQ ID NO: 746521 - RNA, 19 nt, Artificial Sequence
  Description of Artificial Sequence: Synthetic oligonucleotide
  Antisense strand to SEQ ID NO: 746520
auuacaggcgccucaccac

SEQ ID NO: 746522 - RNA, 19 nt, Artificial Sequence
  Description of Artificial Sequence: Synthetic oligonucleotide
  Sense strand starting at position 2707 of SEQ ID NO: 586817
uggugaggcgccuguaauc

SEQ ID NO: 746523 - RNA, 19 nt, Artificial Sequence
  Description of Artificial Sequence: Synthetic oligonucleotide
  Antisense strand to SEQ ID NO: 746522
gauuacaggcgccucacca

SEQ ID NO: 746524 - RNA, 19 nt, Artificial Sequence
  Description of Artificial Sequence: Synthetic oligonucleotide
  Sense strand starting at position 2887 of SEQ ID NO: 586817
guauguaucuuuccagguc

SEQ ID NO: 746525 - RNA, 19 nt, Artificial Sequence
  Description of Artificial Sequence: Synthetic oligonucleotide
  Antisense strand to SEQ ID NO: 746524
gaccuggaaagauacauac

SEQ ID NO: 746526 - RNA, 19 nt, Artificial Sequence
  Description of Artificial Sequence: Synthetic oligonucleotide
  Sense strand starting at position 2923 of SEQ ID NO: 586817
ccuggagucucagcgcuuu

SEQ ID NO: 746527 - RNA, 19 nt, Artificial Sequence
  Description of Artificial Sequence: Synthetic oligonucleotide
  Antisense strand to SEQ ID NO: 746526
aaagcgcugagacuccagg

SEQ ID NO: 746528 - RNA, 19 nt, Artificial Sequence
  Description of Artificial Sequence: Synthetic oligonucleotide
  Sense strand starting at position 2929 of SEQ ID NO: 586817
gucucagcgcuuugggaga

SEQ ID NO: 746529 - RNA, 19 nt, Artificial Sequence
  Description of Artificial Sequence: Synthetic oligonucleotide
  Antisense strand to SEQ ID NO: 746528
ucucccaaagcgcugagac

SEQ ID NO: 746530 - RNA, 19 nt, Artificial Sequence
  Description of Artificial Sequence: Synthetic oligonucleotide
  Sense strand starting at position 2962 of SEQ ID NO: 586817
ucaauugaaucccaagagu

SEQ ID NO: 746531 - RNA, 19 nt, Artificial Sequence
  Description of Artificial Sequence: Synthetic oligonucleotide
  Antisense strand to SEQ ID NO: 746530
acucuugggauucaauuga

SEQ ID NO: 746532 - RNA, 19 nt, Artificial Sequence
  Description of Artificial Sequence: Synthetic oligonucleotide
  Sense strand starting at position 3076 of SEQ ID NO: 586817
auauaugguugcuuaaaca

SEQ ID NO: 746533 - RNA, 19 nt, Artificial Sequence
  Description of Artificial Sequence: Synthetic oligonucleotide
  Antisense strand to SEQ ID NO: 746532
uguuuaagcaaccauauau

SEQ ID NO: 746534 - RNA, 19 nt, Artificial Sequence
  Description of Artificial Sequence: Synthetic oligonucleotide
  Sense strand starting at position 3270 of SEQ ID NO: 586817
ugguaauuaugucuugcuu

SEQ ID NO: 746535 - RNA, 19 nt, Artificial Sequence
  Description of Artificial Sequence: Synthetic oligonucleotide
  Antisense strand to SEQ ID NO: 746534
aagcaagacauaauuacca

SEQ ID NO: 746536 - RNA, 19 nt, Artificial Sequence
  Description of Artificial Sequence: Synthetic oligonucleotide
  Sense strand starting at position 3272 of SEQ ID NO: 586817
guaauuaugucuugcuugu

SEQ ID NO: 746537 - RNA, 19 nt, Artificial Sequence
  Description of Artificial Sequence: Synthetic oligonucleotide
  Antisense strand to SEQ ID NO: 746536
acaagcaagacauaauuac

SEQ ID NO: 746538 - RNA, 19 nt, Artificial Sequence
  Description of Artificial Sequence: Synthetic oligonucleotide
  Sense strand starting at position 3281 of SEQ ID NO: 586817
ucuugcuugucucuauuau

SEQ ID NO: 746539 - RNA, 19 nt, Artificial Sequence
  Description of Artificial Sequence: Synthetic oligonucleotide
  Antisense strand to SEQ ID NO: 746538
auaauagagacaagcaaga

SEQ ID NO: 746540 - RNA, 19 nt, Artificial Sequence
  Description of Artificial Sequence: Synthetic oligonucleotide
  Sense strand starting at position 3282 of SEQ ID NO: 586817
cuugcuugucucuauuauu

SEQ ID NO: 746541 - RNA, 19 nt, Artificial Sequence
  Description of Artificial Sequence: Synthetic oligonucleotide
  Antisense strand to SEQ ID NO: 746540
aauaauagagacaagcaag

SEQ ID NO: 746542 - RNA, 19 nt, Artificial Sequence
  Description of Artificial Sequence: Synthetic oligonucleotide
  Sense strand starting at position 3676 of SEQ ID NO: 586817
agcguauagucugaugugu

SEQ ID NO: 746543 - RNA, 19 nt, Artificial Sequence
  Description of Artificial Sequence: Synthetic oligonucleotide
  Antisense strand to SEQ ID NO: 746542
acacaucagacuauacgcu

SEQ ID NO: 746544 - RNA, 19 nt, Artificial Sequence
  Description of Artificial Sequence: Synthetic oligonucleotide
  Sense strand starting at position 3678 of SEQ ID NO: 586817
cguauagucugaugugucu

SEQ ID NO: 746545 - RNA, 19 nt, Artificial Sequence
  Description of Artificial Sequence: Synthetic oligonucleotide
  Antisense strand to SEQ ID NO: 746544
agacacaucagacuauacg

SEQ ID NO: 746546 - RNA, 19 nt, Artificial Sequence
  Description of Artificial Sequence: Synthetic oligonucleotide
  Sense strand starting at position 3684 of SEQ ID NO: 586817
gucugaugugucugggugu

SEQ ID NO: 746547 - RNA, 19 nt, Artificial Sequence
  Description of Artificial Sequence: Synthetic oligonucleotide
  Antisense strand to SEQ ID NO: 746546
acacccagacacaucagac

SEQ ID NO: 746548 - RNA, 19 nt, Artificial Sequence
  Description of Artificial Sequence: Synthetic oligonucleotide
  Sense strand starting at position 3685 of SEQ ID NO: 586817
ucugaugugucuggguguu

SEQ ID NO: 746549 - RNA, 19 nt, Artificial Sequence
  Description of Artificial Sequence: Synthetic oligonucleotide
  Antisense strand to SEQ ID NO: 746548
aacacccagacacaucaga

SEQ ID NO: 746550 - RNA, 19 nt, Artificial Sequence
  Description of Artificial Sequence: Synthetic oligonucleotide
  Sense strand starting at position 3765 of SEQ ID NO: 586817
gacccaagguggucucaau

SEQ ID NO: 746551 - RNA, 19 nt, Artificial Sequence
  Description of Artificial Sequence: Synthetic oligonucleotide
  Antisense strand to SEQ ID NO: 746550
auugagaccaccuuggguc

SEQ ID NO: 746552 - RNA, 19 nt, Artificial Sequence
  Description of Artificial Sequence: Synthetic oligonucleotide
  Sense strand starting at position 3941 of SEQ ID NO: 586817
cguucuauugcaugacucu

SEQ ID NO: 746553 - RNA, 19 nt, Artificial Sequence
  Description of Artificial Sequence: Synthetic oligonucleotide
  Antisense strand to SEQ ID NO: 746552
agagucaugcaauagaacg

SEQ ID NO: 746554 - RNA, 19 nt, Artificial Sequence
  Description of Artificial Sequence: Synthetic oligonucleotide
  Sense strand starting at position 197 of SEQ ID NO: 586818
agagaaagauaagaacuaa

SEQ ID NO: 746555 - RNA, 19 nt, Artificial Sequence
  Description of Artificial Sequence: Synthetic oligonucleotide
  Antisense strand to SEQ ID NO: 746554
uuaguucuuaucuuucucu

SEQ ID NO: 746556 - RNA, 19 nt, Artificial Sequence
  Description of Artificial Sequence: Synthetic oligonucleotide
  Sense strand starting at position 327 of SEQ ID NO: 586818
ggaaacccgucucuacuua

SEQ ID NO: 746557 - RNA, 19 nt, Artificial Sequence
  Description of Artificial Sequence: Synthetic oligonucleotide
  Antisense strand to SEQ ID NO: 746556
uaaguagagacggguuucc

SEQ ID NO: 746558 - RNA, 19 nt, Artificial Sequence
  Description of Artificial Sequence: Synthetic oligonucleotide
  Sense strand starting at position 559 of SEQ ID NO: 586818
auauuccaugagugaagca

SEQ ID NO: 746559 - RNA, 19 nt, Artificial Sequence
  Description of Artificial Sequence: Synthetic oligonucleotide
  Antisense strand to SEQ ID NO: 746558
ugcuucacucauggaauau

SEQ ID NO: 746560 - RNA, 19 nt, Artificial Sequence
  Description of Artificial Sequence: Synthetic oligonucleotide
  Sense strand starting at position 666 of SEQ ID NO: 586818
acaagugaauagcuaaacu

SEQ ID NO: 746561 - RNA, 19 nt, Artificial Sequence
  Description of Artificial Sequence: Synthetic oligonucleotide
  Antisense strand to SEQ ID NO: 746560
aguuuagcuauucacuugu

SEQ ID NO: 746562 - RNA, 19 nt, Artificial Sequence
  Description of Artificial Sequence: Synthetic oligonucleotide
  Sense strand starting at position 1041 of SEQ ID NO: 586818
auuauaugauagucccuua

SEQ ID NO: 746563 - RNA, 19 nt, Artificial Sequence
  Description of Artificial Sequence: Synthetic oligonucleotide
  Antisense strand to SEQ ID NO: 746562
uaagggacuaucauauaau

SEQ ID NO: 746564 - RNA, 19 nt, Artificial Sequence
  Description of Artificial Sequence: Synthetic oligonucleotide
  Sense strand starting at position 1044 of SEQ ID NO: 586818
auaugauagucccuuaugu

SEQ ID NO: 746565 - RNA, 19 nt, Artificial Sequence
  Description of Artificial Sequence: Synthetic oligonucleotide
  Antisense strand to SEQ ID NO: 746564
acauaagggacuaucauau

SEQ ID NO: 746566 - RNA, 19 nt, Artificial Sequence
  Description of Artificial Sequence: Synthetic oligonucleotide
  Sense strand starting at position 1046 of SEQ ID NO: 586818
augauagucccuuauguca

SEQ ID NO: 746567 - RNA, 19 nt, Artificial Sequence
  Description of Artificial Sequence: Synthetic oligonucleotide
  Antisense strand to SEQ ID NO: 746566
ugacauaagggacuaucau

SEQ ID NO: 746568 - RNA, 19 nt, Artificial Sequence
  Description of Artificial Sequence: Synthetic oligonucleotide
  Sense strand starting at position 1060 of SEQ ID NO: 586818
ugucacaacucuccugagu

SEQ ID NO: 746569 - RNA, 19 nt, Artificial Sequence
  Description of Artificial Sequence: Synthetic oligonucleotide
  Antisense strand to SEQ ID NO: 746568
acucaggagaguugugaca

SEQ ID NO: 746570 - RNA, 19 nt, Artificial Sequence
  Description of Artificial Sequence: Synthetic oligonucleotide
  Sense strand starting at position 1113 of SEQ ID NO: 586818
guauuaggcguggaaagca

SEQ ID NO: 746571 - RNA, 19 nt, Artificial Sequence
  Description of Artificial Sequence: Synthetic oligonucleotide
  Antisense strand to SEQ ID NO: 746570
ugcuuuccacgccuaauac

SEQ ID NO: 746572 - RNA, 19 nt, Artificial Sequence
  Description of Artificial Sequence: Synthetic oligonucleotide
  Sense strand starting at position 1308 of SEQ ID NO: 586818
gacagucgagaaugaugua

SEQ ID NO: 746573 - RNA, 19 nt, Artificial Sequence
  Description of Artificial Sequence: Synthetic oligonucleotide
  Antisense strand to SEQ ID NO: 746572
uacaucauucucgacuguc

SEQ ID NO: 746574 - RNA, 19 nt, Artificial Sequence
  Description of Artificial Sequence: Synthetic oligonucleotide
  Sense strand starting at position 1341 of SEQ ID NO: 586818
uccugagagugaccaguua

SEQ ID NO: 746575 - RNA, 19 nt, Artificial Sequence
  Description of Artificial Sequence: Synthetic oligonucleotide
  Antisense strand to SEQ ID NO: 746574
uaacuggucacucucagga

SEQ ID NO: 746576 - RNA, 19 nt, Artificial Sequence
  Description of Artificial Sequence: Synthetic oligonucleotide
  Sense strand starting at position 1975 of SEQ ID NO: 586818
ccgagauaugcgcaauaga

SEQ ID NO: 746577 - RNA, 19 nt, Artificial Sequence
  Description of Artificial Sequence: Synthetic oligonucleotide
  Antisense strand to SEQ ID NO: 746576
ucuauugcgcauaucucgg

SEQ ID NO: 746578 - RNA, 19 nt, Artificial Sequence
  Description of Artificial Sequence: Synthetic oligonucleotide
  Sense strand starting at position 2392 of SEQ ID NO: 586818
uguauuggaaguuagcaua

SEQ ID NO: 746579 - RNA, 19 nt, Artificial Sequence
  Description of Artificial Sequence: Synthetic oligonucleotide
  Antisense strand to SEQ ID NO: 746578
uaugcuaacuuccaauaca

SEQ ID NO: 746580 - RNA, 19 nt, Artificial Sequence
  Description of Artificial Sequence: Synthetic oligonucleotide
  Sense strand starting at position 2589 of SEQ ID NO: 586818
agaugacaauuauaugaca

SEQ ID NO: 746581 - RNA, 19 nt, Artificial Sequence
  Description of Artificial Sequence: Synthetic oligonucleotide
  Antisense strand to SEQ ID NO: 746580
ugucauauaauugucaucu

SEQ ID NO: 746582 - RNA, 19 nt, Artificial Sequence
  Description of Artificial Sequence: Synthetic oligonucleotide
  Sense strand starting at position 2609 of SEQ ID NO: 586818
ucauauuugugucugcuuu

SEQ ID NO: 746583 - RNA, 19 nt, Artificial Sequence
  Description of Artificial Sequence: Synthetic oligonucleotide
  Antisense strand to SEQ ID NO: 746582
aaagcagacacaaauauga

SEQ ID NO: 746584 - RNA, 19 nt, Artificial Sequence
  Description of Artificial Sequence: Synthetic oligonucleotide
  Sense strand starting at position 2750 of SEQ ID NO: 586818
uuacguugaggucgggaaa

SEQ ID NO: 746585 - RNA, 19 nt, Artificial Sequence
  Description of Artificial Sequence: Synthetic oligonucleotide
  Antisense strand to SEQ ID NO: 746584
uuucccgaccucaacguaa

SEQ ID NO: 746586 - RNA, 19 nt, Artificial Sequence
  Description of Artificial Sequence: Synthetic oligonucleotide
  Sense strand starting at position 2881 of SEQ ID NO: 586818
auuguaaaguccuuaagga

SEQ ID NO: 746587 - RNA, 19 nt, Artificial Sequence
  Description of Artificial Sequence: Synthetic oligonucleotide
  Antisense strand to SEQ ID NO: 746586
uccuuaaggacuuuacaau

SEQ ID NO: 746588 - RNA, 19 nt, Artificial Sequence
  Description of Artificial Sequence: Synthetic oligonucleotide
  Sense strand starting at position 2902 of SEQ ID NO: 586818
gggauucuuugaccuguca

SEQ ID NO: 746589 - RNA, 19 nt, Artificial Sequence
  Description of Artificial Sequence: Synthetic oligonucleotide
  Antisense strand to SEQ ID NO: 746588
ugacaggucaaagaauccc

SEQ ID NO: 746590 - RNA, 19 nt, Artificial Sequence
  Description of Artificial Sequence: Synthetic oligonucleotide
  Sense strand starting at position 2918 of SEQ ID NO: 586818
ucaaauguaguggauguua

SEQ ID NO: 746591 - RNA, 19 nt, Artificial Sequence
  Description of Artificial Sequence: Synthetic oligonucleotide
  Antisense strand to SEQ ID NO: 746590
uaacauccacuacauuuga

SEQ ID NO: 746592 - RNA, 19 nt, Artificial Sequence
  Description of Artificial Sequence: Synthetic oligonucleotide
  Sense strand starting at position 2926 of SEQ ID NO: 586818
aguggauguuacccugaua

SEQ ID NO: 746593 - RNA, 19 nt, Artificial Sequence
  Description of Artificial Sequence: Synthetic oligonucleotide
  Antisense strand to SEQ ID NO: 746592
uaucaggguaacauccacu

SEQ ID NO: 746594 - RNA, 19 nt, Artificial Sequence
  Description of Artificial Sequence: Synthetic oligonucleotide
  Sense strand starting at position 2929 of SEQ ID NO: 586818
ggauguuacccugauaguu

SEQ ID NO: 746595 - RNA, 19 nt, Artificial Sequence
  Description of Artificial Sequence: Synthetic oligonucleotide
  Antisense strand to SEQ ID NO: 746594
aacuaucaggguaacaucc

SEQ ID NO: 746596 - RNA, 19 nt, Artificial Sequence
  Description of Artificial Sequence: Synthetic oligonucleotide
  Sense strand starting at position 3002 of SEQ ID NO: 586818
gggacacagugucuggauu

SEQ ID NO: 746597 - RNA, 19 nt, Artificial Sequence
  Description of Artificial Sequence: Synthetic oligonucleotide
  Antisense strand to SEQ ID NO: 746596
aauccagacacuguguccc

SEQ ID NO: 746598 - RNA, 19 nt, Artificial Sequence
  Description of Artificial Sequence: Synthetic oligonucleotide
  Sense strand starting at position 3003 of SEQ ID NO: 586818
ggacacagugucuggauua

SEQ ID NO: 746599 - RNA, 19 nt, Artificial Sequence
  Description of Artificial Sequence: Synthetic oligonucleotide
  Antisense strand to SEQ ID NO: 746598
uaauccagacacugugucc

SEQ ID NO: 746600 - RNA, 19 nt, Artificial Sequence
  Description of Artificial Sequence: Synthetic oligonucleotide
  Sense strand starting at position 3025 of SEQ ID NO: 586818
acaucauaaugccugguaa

SEQ ID NO: 746601 - RNA, 19 nt, Artificial Sequence
  Description of Artificial Sequence: Synthetic oligonucleotide
  Antisense strand to SEQ ID NO: 746600
uuaccaggcauuaugaugu

SEQ ID NO: 746602 - RNA, 19 nt, Artificial Sequence
  Description of Artificial Sequence: Synthetic oligonucleotide
  Sense strand starting at position 3027 of SEQ ID NO: 586818
aucauaaugccugguaaac

SEQ ID NO: 746603 - RNA, 19 nt, Artificial Sequence
  Description of Artificial Sequence: Synthetic oligonucleotide
  Antisense strand to SEQ ID NO: 746602
guuuaccaggcauuaugau

SEQ ID NO: 746604 - RNA, 19 nt, Artificial Sequence
  Description of Artificial Sequence: Synthetic oligonucleotide
  Sense strand starting at position 3053 of SEQ ID NO: 586818
guggauaagccagacaugu

SEQ ID NO: 746605 - RNA, 19 nt, Artificial Sequence
  Description of Artificial Sequence: Synthetic oligonucleotide
  Antisense strand to SEQ ID NO: 746604
acaugucuggcuuauccac

SEQ ID NO: 746606 - RNA, 19 nt, Artificial Sequence
  Description of Artificial Sequence: Synthetic oligonucleotide
  Sense strand starting at position 3095 of SEQ ID NO: 586818
agauguaugcaccaauuaa

SEQ ID NO: 746607 - RNA, 19 nt, Artificial Sequence
  Description of Artificial Sequence: Synthetic oligonucleotide
  Antisense strand to SEQ ID NO: 746606
uuaauuggugcauacaucu

SEQ ID NO: 746608 - RNA, 19 nt, Artificial Sequence
  Description of Artificial Sequence: Synthetic oligonucleotide
  Sense strand starting at position 3148 of SEQ ID NO: 586818
gagacagauuccuccuugu

SEQ ID NO: 746609 - RNA, 19 nt, Artificial Sequence
  Description of Artificial Sequence: Synthetic oligonucleotide
  Antisense strand to SEQ ID NO: 746608
acaaggaggaaucugucuc

SEQ ID NO: 746610 - RNA, 19 nt, Artificial Sequence
  Description of Artificial Sequence: Synthetic oligonucleotide
  Sense strand starting at position 3370 of SEQ ID NO: 586818
gggauauucuuguuaaagu

SEQ ID NO: 746611 - RNA, 19 nt, Artificial Sequence
  Description of Artificial Sequence: Synthetic oligonucleotide
  Antisense strand to SEQ ID NO: 746610
acuuuaacaagaauauccc

SEQ ID NO: 746612 - RNA, 19 nt, Artificial Sequence
  Description of Artificial Sequence: Synthetic oligonucleotide
  Sense strand starting at position 3379 of SEQ ID NO: 586818
uuguuaaagugacuuacaa

SEQ ID NO: 746613 - RNA, 19 nt, Artificial Sequence
  Description of Artificial Sequence: Synthetic oligonucleotide
  Antisense strand to SEQ ID NO: 746612
uuguaagucacuuuaacaa

SEQ ID NO: 746614 - RNA, 19 nt, Artificial Sequence
  Description of Artificial Sequence: Synthetic oligonucleotide
  Sense strand starting at position 3391 of SEQ ID NO: 586818
cuuacaagauucuugcuga

SEQ ID NO: 746615 - RNA, 19 nt, Artificial Sequence
  Description of Artificial Sequence: Synthetic oligonucleotide
  Antisense strand to SEQ ID NO: 746614
ucagcaagaaucuuguaag

SEQ ID NO: 746616 - RNA, 19 nt, Artificial Sequence
  Description of Artificial Sequence: Synthetic oligonucleotide
  Sense strand starting at position 3430 of SEQ ID NO: 586818
uuaucaaggcuaggagaua

SEQ ID NO: 746617 - RNA, 19 nt, Artificial Sequence
  Description of Artificial Sequence: Synthetic oligonucleotide
  Antisense strand to SEQ ID NO: 746616
uaucuccuagccuugauaa

SEQ ID NO: 746618 - RNA, 19 nt, Artificial Sequence
  Description of Artificial Sequence: Synthetic oligonucleotide
  Sense strand starting at position 3453 of SEQ ID NO: 586818
cuaaacugacuuugcaaga

SEQ ID NO: 746619 - RNA, 19 nt, Artificial Sequence
  Description of Artificial Sequence: Synthetic oligonucleotide
  Antisense strand to SEQ ID NO: 746618
ucuugcaaagucaguuuag

SEQ ID NO: 746620 - RNA, 19 nt, Artificial Sequence
  Description of Artificial Sequence: Synthetic oligonucleotide
  Sense strand starting at position 3552 of SEQ ID NO: 586818
cuaacuaaaguauggucaa

SEQ ID NO: 746621 - RNA, 19 nt, Artificial Sequence
  Description of Artificial Sequence: Synthetic oligonucleotide
  Antisense strand to SEQ ID NO: 746620
uugaccauacuuuaguuag

SEQ ID NO: 746622 - RNA, 19 nt, Artificial Sequence
  Description of Artificial Sequence: Synthetic oligonucleotide
  Sense strand starting at position 3555 of SEQ ID NO: 586818
acuaaaguauggucaagga

SEQ ID NO: 746623 - RNA, 19 nt, Artificial Sequence
  Description of Artificial Sequence: Synthetic oligonucleotide
  Antisense strand to SEQ ID NO: 746622
uccuugaccauacuuuagu

SEQ ID NO: 746624 - RNA, 19 nt, Artificial Sequence
  Description of Artificial Sequence: Synthetic oligonucleotide
  Sense strand starting at position 3616 of SEQ ID NO: 586818
cuaauuuagucagauguua

SEQ ID NO: 746625 - RNA, 19 nt, Artificial Sequence
  Description of Artificial Sequence: Synthetic oligonucleotide
  Antisense strand to SEQ ID NO: 746624
uaacaucugacuaaauuag

SEQ ID NO: 746626 - RNA, 19 nt, Artificial Sequence
  Description of Artificial Sequence: Synthetic oligonucleotide
  Sense strand starting at position 3741 of SEQ ID NO: 586818
uuaaucagucaugaagucu

SEQ ID NO: 746627 - RNA, 19 nt, Artificial Sequence
  Description of Artificial Sequence: Synthetic oligonucleotide
  Antisense strand to SEQ ID NO: 746626
agacuucaugacugauuaa

SEQ ID NO: 746628 - RNA, 19 nt, Artificial Sequence
  Description of Artificial Sequence: Synthetic oligonucleotide
  Sense strand starting at position 3807 of SEQ ID NO: 586818
ucgcauuuccacugcucua

SEQ ID NO: 746629 - RNA, 19 nt, Artificial Sequence
  Description of Artificial Sequence: Synthetic oligonucleotide
  Antisense strand to SEQ ID NO: 746628
uagagcaguggaaaugcga

SEQ ID NO: 746630 - RNA, 19 nt, Artificial Sequence
  Description of Artificial Sequence: Synthetic oligonucleotide
  Sense strand starting at position 3911 of SEQ ID NO: 586818
gugcaaccacgguaaucuu

SEQ ID NO: 746631 - RNA, 19 nt, Artificial Sequence
  Description of Artificial Sequence: Synthetic oligonucleotide
  Antisense strand to SEQ ID NO: 746630
aagauuaccgugguugcac

SEQ ID NO: 746632 - RNA, 19 nt, Artificial Sequence
  Description of Artificial Sequence: Synthetic oligonucleotide
  Sense strand starting at position 3936 of SEQ ID NO: 586818
gugcaaguccaaucguguu

SEQ ID NO: 746633 - RNA, 19 nt, Artificial Sequence
  Description of Artificial Sequence: Synthetic oligonucleotide
  Antisense strand to SEQ ID NO: 746632
aacacgauuggacuugcac

SEQ ID NO: 746634 - RNA, 19 nt, Artificial Sequence
  Description of Artificial Sequence: Synthetic oligonucleotide
  Sense strand starting at position 132 of SEQ ID NO: 586819
ccgagauaugcgcaauaga

SEQ ID NO: 746635 - RNA, 19 nt, Artificial Sequence
  Description of Artificial Sequence: Synthetic oligonucleotide
  Antisense strand to SEQ ID NO: 746634
ucuauugcgcauaucucgg

SEQ ID NO: 746636 - RNA, 19 nt, Artificial Sequence
  Description of Artificial Sequence: Synthetic oligonucleotide
  Sense strand starting at position 549 of SEQ ID NO: 586819
uguauuggaaguuagcaua

SEQ ID NO: 746637 - RNA, 19 nt, Artificial Sequence
  Description of Artificial Sequence: Synthetic oligonucleotide
  Antisense strand to SEQ ID NO: 746636
uaugcuaacuuccaauaca

SEQ ID NO: 746638 - RNA, 19 nt, Artificial Sequence
  Description of Artificial Sequence: Synthetic oligonucleotide
  Sense strand starting at position 746 of SEQ ID NO: 586819
agaugacaauuauaugaca

SEQ ID NO: 746639 - RNA, 19 nt, Artificial Sequence
  Description of Artificial Sequence: Synthetic oligonucleotide
  Antisense strand to SEQ ID NO: 746638
ugucauauaauugucaucu

SEQ ID NO: 746640 - RNA, 19 nt, Artificial Sequence
  Description of Artificial Sequence: Synthetic oligonucleotide
  Sense strand starting at position 766 of SEQ ID NO: 586819
ucauauuugugucugcuuu

SEQ ID NO: 746641 - RNA, 19 nt, Artificial Sequence
  Description of Artificial Sequence: Synthetic oligonucleotide
  Antisense strand to SEQ ID NO: 746640
aaagcagacacaaauauga

SEQ ID NO: 746642 - RNA, 19 nt, Artificial Sequence
  Description of Artificial Sequence: Synthetic oligonucleotide
  Sense strand starting at position 1038 of SEQ ID NO: 586819
auuguaaaguccuuaagga

SEQ ID NO: 746643 - RNA, 19 nt, Artificial Sequence
  Description of Artificial Sequence: Synthetic oligonucleotide
  Antisense strand to SEQ ID NO: 746642
uccuuaaggacuuuacaau

SEQ ID NO: 746644 - RNA, 19 nt, Artificial Sequence
  Description of Artificial Sequence: Synthetic oligonucleotide
  Sense strand starting at position 1059 of SEQ ID NO: 586819
gggauucuuugaccuguca

SEQ ID NO: 746645 - RNA, 19 nt, Artificial Sequence
  Description of Artificial Sequence: Synthetic oligonucleotide
  Antisense strand to SEQ ID NO: 746644
ugacaggucaaagaauccc

SEQ ID NO: 746646 - RNA, 19 nt, Artificial Sequence
  Description of Artificial Sequence: Synthetic oligonucleotide
  Sense strand starting at position 1075 of SEQ ID NO: 586819
ucaaauguaguggauguua

SEQ ID NO: 746647 - RNA, 19 nt, Artificial Sequence
  Description of Artificial Sequence: Synthetic oligonucleotide
  Antisense strand to SEQ ID NO: 746646
uaacauccacuacauuuga

SEQ ID NO: 746648 - RNA, 19 nt, Artificial Sequence
  Description of Artificial Sequence: Synthetic oligonucleotide
  Sense strand starting at position 1083 of SEQ ID NO: 586819
aguggauguuacccugaua

SEQ ID NO: 746649 - RNA, 19 nt, Artificial Sequence
  Description of Artificial Sequence: Synthetic oligonucleotide
  Antisense strand to SEQ ID NO: 746648
uaucaggguaacauccacu

SEQ ID NO: 746650 - RNA, 19 nt, Artificial Sequence
  Description of Artificial Sequence: Synthetic oligonucleotide
  Sense strand starting at position 1086 of SEQ ID NO: 586819
ggauguuacccugauaguu

SEQ ID NO: 746651 - RNA, 19 nt, Artificial Sequence
  Description of Artificial Sequence: Synthetic oligonucleotide
  Antisense strand to SEQ ID NO: 746650
aacuaucaggguaacaucc

SEQ ID NO: 746652 - RNA, 19 nt, Artificial Sequence
  Description of Artificial Sequence: Synthetic oligonucleotide
  Sense strand starting at position 1159 of SEQ ID NO: 586819
gggacacagugucuggauu

SEQ ID NO: 746653 - RNA, 19 nt, Artificial Sequence
  Description of Artificial Sequence: Synthetic oligonucleotide
  Antisense strand to SEQ ID NO: 746652
aauccagacacuguguccc

SEQ ID NO: 746654 - RNA, 19 nt, Artificial Sequence
  Description of Artificial Sequence: Synthetic oligonucleotide
  Sense strand starting at position 1160 of SEQ ID NO: 586819
ggacacagugucuggauua

SEQ ID NO: 746655 - RNA, 19 nt, Artificial Sequence
  Description of Artificial Sequence: Synthetic oligonucleotide
  Antisense strand to SEQ ID NO: 746654
uaauccagacacugugucc

SEQ ID NO: 746656 - RNA, 19 nt, Artificial Sequence
  Description of Artificial Sequence: Synthetic oligonucleotide
  Sense strand starting at position 1182 of SEQ ID NO: 586819
acaucauaaugccugguaa

SEQ ID NO: 746657 - RNA, 19 nt, Artificial Sequence
  Description of Artificial Sequence: Synthetic oligonucleotide
  Antisense strand to SEQ ID NO: 746656
uuaccaggcauuaugaugu

SEQ ID NO: 746658 - RNA, 19 nt, Artificial Sequence
  Description of Artificial Sequence: Synthetic oligonucleotide
  Sense strand starting at position 1184 of SEQ ID NO: 586819
aucauaaugccugguaaac

SEQ ID NO: 746659 - RNA, 19 nt, Artificial Sequence
  Description of Artificial Sequence: Synthetic oligonucleotide
  Antisense strand to SEQ ID NO: 746658
guuuaccaggcauuaugau

SEQ ID NO: 746660 - RNA, 19 nt, Artificial Sequence
  Description of Artificial Sequence: Synthetic oligonucleotide
  Sense strand starting at position 1210 of SEQ ID NO: 586819
guggauaagccagacaugu

SEQ ID NO: 746661 - RNA, 19 nt, Artificial Sequence
  Description of Artificial Sequence: Synthetic oligonucleotide
  Antisense strand to SEQ ID NO: 746660
acaugucuggcuuauccac

SEQ ID NO: 746662 - RNA, 19 nt, Artificial Sequence
  Description of Artificial Sequence: Synthetic oligonucleotide
  Sense strand starting at position 1252 of SEQ ID NO: 586819
agauguaugcaccaauuaa

SEQ ID NO: 746663 - RNA, 19 nt, Artificial Sequence
  Description of Artificial Sequence: Synthetic oligonucleotide
  Antisense strand to SEQ ID NO: 746662
uuaauuggugcauacaucu

SEQ ID NO: 746664 - RNA, 19 nt, Artificial Sequence
  Description of Artificial Sequence: Synthetic oligonucleotide
  Sense strand starting at position 1305 of SEQ ID NO: 586819
gagacagauuccuccuugu

SEQ ID NO: 746665 - RNA, 19 nt, Artificial Sequence
  Description of Artificial Sequence: Synthetic oligonucleotide
  Antisense strand to SEQ ID NO: 746664
acaaggaggaaucugucuc

SEQ ID NO: 746666 - RNA, 19 nt, Artificial Sequence
  Description of Artificial Sequence: Synthetic oligonucleotide
  Sense strand starting at position 1527 of SEQ ID NO: 586819
gggauauucuuguuaaagu

SEQ ID NO: 746667 - RNA, 19 nt, Artificial Sequence
  Description of Artificial Sequence: Synthetic oligonucleotide
  Antisense strand to SEQ ID NO: 746666
acuuuaacaagaauauccc

SEQ ID NO: 746668 - RNA, 19 nt, Artificial Sequence
  Description of Artificial Sequence: Synthetic oligonucleotide
  Sense strand starting at position 1536 of SEQ ID NO: 586819
uuguuaaagugacuuacaa

SEQ ID NO: 746669 - RNA, 19 nt, Artificial Sequence
  Description of Artificial Sequence: Synthetic oligonucleotide
  Antisense strand to SEQ ID NO: 746668
uuguaagucacuuuaacaa

SEQ ID NO: 746670 - RNA, 19 nt, Artificial Sequence
  Description of Artificial Sequence: Synthetic oligonucleotide
  Sense strand starting at position 1548 of SEQ ID NO: 586819
cuuacaagauucuugcuga

SEQ ID NO: 746671 - RNA, 19 nt, Artificial Sequence
  Description of Artificial Sequence: Synthetic oligonucleotide
  Antisense strand to SEQ ID NO: 746670
ucagcaagaaucuuguaag

SEQ ID NO: 746672 - RNA, 19 nt, Artificial Sequence
  Description of Artificial Sequence: Synthetic oligonucleotide
  Sense strand starting at position 1587 of SEQ ID NO: 586819
uuaucaaggcuaggagaua

SEQ ID NO: 746673 - RNA, 19 nt, Artificial Sequence
  Description of Artificial Sequence: Synthetic oligonucleotide
  Antisense strand to SEQ ID NO: 746672
uaucuccuagccuugauaa

SEQ ID NO: 746674 - RNA, 19 nt, Artificial Sequence
  Description of Artificial Sequence: Synthetic oligonucleotide
  Sense strand starting at position 1610 of SEQ ID NO: 586819
cuaaacugacuuugcaaga

SEQ ID NO: 746675 - RNA, 19 nt, Artificial Sequence
  Description of Artificial Sequence: Synthetic oligonucleotide
  Antisense strand to SEQ ID NO: 746674
ucuugcaaagucaguuuag

SEQ ID NO: 746676 - RNA, 19 nt, Artificial Sequence
  Description of Artificial Sequence: Synthetic oligonucleotide
  Sense strand starting at position 1709 of SEQ ID NO: 586819
cuaacuaaaguauggucaa

SEQ ID NO: 746677 - RNA, 19 nt, Artificial Sequence
  Description of Artificial Sequence: Synthetic oligonucleotide
  Antisense strand to SEQ ID NO: 746676
uugaccauacuuuaguuag

SEQ ID NO: 746678 - RNA, 19 nt, Artificial Sequence
  Description of Artificial Sequence: Synthetic oligonucleotide
  Sense strand starting at position 1712 of SEQ ID NO: 586819
acuaaaguauggucaagga

SEQ ID NO: 746679 - RNA, 19 nt, Artificial Sequence
  Description of Artificial Sequence: Synthetic oligonucleotide
  Antisense strand to SEQ ID NO: 746678
uccuugaccauacuuuagu

SEQ ID NO: 746680 - RNA, 19 nt, Artificial Sequence
  Description of Artificial Sequence: Synthetic oligonucleotide
  Sense strand starting at position 1898 of SEQ ID NO: 586819
uuaaucagucaugaagucu

SEQ ID NO: 746681 - RNA, 19 nt, Artificial Sequence
  Description of Artificial Sequence: Synthetic oligonucleotide
  Antisense strand to SEQ ID NO: 746680
agacuucaugacugauuaa

SEQ ID NO: 746682 - RNA, 19 nt, Artificial Sequence
  Description of Artificial Sequence: Synthetic oligonucleotide
  Sense strand starting at position 1964 of SEQ ID NO: 586819
ucgcauuuccacugcucua

SEQ ID NO: 746683 - RNA, 19 nt, Artificial Sequence
  Description of Artificial Sequence: Synthetic oligonucleotide
  Antisense strand to SEQ ID NO: 746682
uagagcaguggaaaugcga

SEQ ID NO: 746684 - RNA, 19 nt, Artificial Sequence
  Description of Artificial Sequence: Synthetic oligonucleotide
  Sense strand starting at position 2093 of SEQ ID NO: 586819
gugcaaguccaaucguguu

SEQ ID NO: 746685 - RNA, 19 nt, Artificial Sequence
  Description of Artificial Sequence: Synthetic oligonucleotide
  Antisense strand to SEQ ID NO: 746684
aacacgauuggacuugcac

SEQ ID NO: 746686 - RNA, 19 nt, Artificial Sequence
  Description of Artificial Sequence: Synthetic oligonucleotide
  Sense strand starting at position 2164 of SEQ ID NO: 586819
augaaauuauagguucuga

SEQ ID NO: 746687 - RNA, 19 nt, Artificial Sequence
  Description of Artificial Sequence: Synthetic oligonucleotide
  Antisense strand to SEQ ID NO: 746686
ucagaaccuauaauuucau

SEQ ID NO: 746688 - RNA, 19 nt, Artificial Sequence
  Description of Artificial Sequence: Synthetic oligonucleotide
  Sense strand starting at position 2454 of SEQ ID NO: 586819
guuuauaugccugccaguu

SEQ ID NO: 746689 - RNA, 19 nt, Artificial Sequence
  Description of Artificial Sequence: Synthetic oligonucleotide
  Antisense strand to SEQ ID NO: 746688
aacuggcaggcauauaaac

SEQ ID NO: 746690 - RNA, 19 nt, Artificial Sequence
  Description of Artificial Sequence: Synthetic oligonucleotide
  Sense strand starting at position 2496 of SEQ ID NO: 586819
uaaacuguauugucuggau

SEQ ID NO: 746691 - RNA, 19 nt, Artificial Sequence
  Description of Artificial Sequence: Synthetic oligonucleotide
  Antisense strand to SEQ ID NO: 746690
auccagacaauacaguuua

SEQ ID NO: 746692 - RNA, 19 nt, Artificial Sequence
  Description of Artificial Sequence: Synthetic oligonucleotide
  Sense strand starting at position 2498 of SEQ ID NO: 586819
aacuguauugucuggaucu

SEQ ID NO: 746693 - RNA, 19 nt, Artificial Sequence
  Description of Artificial Sequence: Synthetic oligonucleotide
  Antisense strand to SEQ ID NO: 746692
agauccagacaauacaguu

SEQ ID NO: 746694 - RNA, 19 nt, Artificial Sequence
  Description of Artificial Sequence: Synthetic oligonucleotide
  Sense strand starting at position 2500 of SEQ ID NO: 586819
cuguauugucuggaucuag

SEQ ID NO: 746695 - RNA, 19 nt, Artificial Sequence
  Description of Artificial Sequence: Synthetic oligonucleotide
  Antisense strand to SEQ ID NO: 746694
cuagauccagacaauacag

SEQ ID NO: 746696 - RNA, 19 nt, Artificial Sequence
  Description of Artificial Sequence: Synthetic oligonucleotide
  Sense strand starting at position 2509 of SEQ ID NO: 586819
cuggaucuagcguaacauc

SEQ ID NO: 746697 - RNA, 19 nt, Artificial Sequence
  Description of Artificial Sequence: Synthetic oligonucleotide
  Antisense strand to SEQ ID NO: 746696
gauguuacgcuagauccag

SEQ ID NO: 746698 - RNA, 19 nt, Artificial Sequence
  Description of Artificial Sequence: Synthetic oligonucleotide
  Sense strand starting at position 2586 of SEQ ID NO: 586819
agauuacuaguuugauaag

SEQ ID NO: 746699 - RNA, 19 nt, Artificial Sequence
  Description of Artificial Sequence: Synthetic oligonucleotide
  Antisense strand to SEQ ID NO: 746698
cuuaucaaacuaguaaucu

SEQ ID NO: 746700 - RNA, 19 nt, Artificial Sequence
  Description of Artificial Sequence: Synthetic oligonucleotide
  Sense strand starting at position 2725 of SEQ ID NO: 586819
uguauaauagcagacuaau

SEQ ID NO: 746701 - RNA, 19 nt, Artificial Sequence
  Description of Artificial Sequence: Synthetic oligonucleotide
  Antisense strand to SEQ ID NO: 746700
auuagucugcuauuauaca

SEQ ID NO: 746702 - RNA, 19 nt, Artificial Sequence
  Description of Artificial Sequence: Synthetic oligonucleotide
  Sense strand starting at position 2775 of SEQ ID NO: 586819
ugcuaaauacaguaauugu

SEQ ID NO: 746703 - RNA, 19 nt, Artificial Sequence
  Description of Artificial Sequence: Synthetic oligonucleotide
  Antisense strand to SEQ ID NO: 746702
acaauuacuguauuuagca

SEQ ID NO: 746704 - RNA, 19 nt, Artificial Sequence
  Description of Artificial Sequence: Synthetic oligonucleotide
  Sense strand starting at position 2797 of SEQ ID NO: 586819
acgcuauauucuuuggaag

SEQ ID NO: 746705 - RNA, 19 nt, Artificial Sequence
  Description of Artificial Sequence: Synthetic oligonucleotide
  Antisense strand to SEQ ID NO: 746704
cuuccaaagaauauagcgu

SEQ ID NO: 746706 - RNA, 19 nt, Artificial Sequence
  Description of Artificial Sequence: Synthetic oligonucleotide
  Sense strand starting at position 3018 of SEQ ID NO: 586819
gccauauuggugcaagaua

SEQ ID NO: 746707 - RNA, 19 nt, Artificial Sequence
  Description of Artificial Sequence: Synthetic oligonucleotide
  Antisense strand to SEQ ID NO: 746706
uaucuugcaccaauauggc

SEQ ID NO: 746708 - RNA, 19 nt, Artificial Sequence
  Description of Artificial Sequence: Synthetic oligonucleotide
  Sense strand starting at position 3104 of SEQ ID NO: 586819
gcugaagaauggccuucua

SEQ ID NO: 746709 - RNA, 19 nt, Artificial Sequence
  Description of Artificial Sequence: Synthetic oligonucleotide
  Antisense strand to SEQ ID NO: 746708
uagaaggccauucuucagc

SEQ ID NO: 746710 - RNA, 19 nt, Artificial Sequence
  Description of Artificial Sequence: Synthetic oligonucleotide
  Sense strand starting at position 3281 of SEQ ID NO: 586819
ucaguacagauguggcaaa

SEQ ID NO: 746711 - RNA, 19 nt, Artificial Sequence
  Description of Artificial Sequence: Synthetic oligonucleotide
  Antisense strand to SEQ ID NO: 746710
uuugccacaucuguacuga

SEQ ID NO: 746712 - RNA, 19 nt, Artificial Sequence
  Description of Artificial Sequence: Synthetic oligonucleotide
  Sense strand starting at position 3579 of SEQ ID NO: 586819
ccuacagaacugugacaua

SEQ ID NO: 746713 - RNA, 19 nt, Artificial Sequence
  Description of Artificial Sequence: Synthetic oligonucleotide
  Antisense strand to SEQ ID NO: 746712
uaugucacaguucuguagg

SEQ ID NO: 746714 - RNA, 19 nt, Artificial Sequence
  Description of Artificial Sequence: Synthetic oligonucleotide
  Sense strand starting at position 165 of SEQ ID NO: 586820
cuaagaggcuucccaacaa

SEQ ID NO: 746715 - RNA, 19 nt, Artificial Sequence
  Description of Artificial Sequence: Synthetic oligonucleotide
  Antisense strand to SEQ ID NO: 746714
uuguugggaagccucuuag

SEQ ID NO: 746716 - RNA, 19 nt, Artificial Sequence
  Description of Artificial Sequence: Synthetic oligonucleotide
  Sense strand starting at position 302 of SEQ ID NO: 586820
ucugaaagcuguucugacu

SEQ ID NO: 746717 - RNA, 19 nt, Artificial Sequence
  Description of Artificial Sequence: Synthetic oligonucleotide
  Antisense strand to SEQ ID NO: 746716
agucagaacagcuuucaga

SEQ ID NO: 746718 - RNA, 19 nt, Artificial Sequence
  Description of Artificial Sequence: Synthetic oligonucleotide
  Sense strand starting at position 314 of SEQ ID NO: 586820
ucugacuguuccucacacu

SEQ ID NO: 746719 - RNA, 19 nt, Artificial Sequence
  Description of Artificial Sequence: Synthetic oligonucleotide
  Antisense strand to SEQ ID NO: 746718
agugugaggaacagucaga

SEQ ID NO: 746720 - RNA, 19 nt, Artificial Sequence
  Description of Artificial Sequence: Synthetic oligonucleotide
  Sense strand starting at position 864 of SEQ ID NO: 586820
uuucuaaggugugucuaaa

SEQ ID NO: 746721 - RNA, 19 nt, Artificial Sequence
  Description of Artificial Sequence: Synthetic oligonucleotide
  Antisense strand to SEQ ID NO: 746720
uuuagacacaccuuagaaa

SEQ ID NO: 746722 - RNA, 19 nt, Artificial Sequence
  Description of Artificial Sequence: Synthetic oligonucleotide
  Sense strand starting at position 888 of SEQ ID NO: 586820
gcccaauccuauucuacga

SEQ ID NO: 746723 - RNA, 19 nt, Artificial Sequence
  Description of Artificial Sequence: Synthetic oligonucleotide
  Antisense strand to SEQ ID NO: 746722
ucguagaauaggauugggc

SEQ ID NO: 746724 - RNA, 19 nt, Artificial Sequence
  Description of Artificial Sequence: Synthetic oligonucleotide
  Sense strand starting at position 911 of SEQ ID NO: 586820
gaaguucccguuugaacaa

SEQ ID NO: 746725 - RNA, 19 nt, Artificial Sequence
  Description of Artificial Sequence: Synthetic oligonucleotide
  Antisense strand to SEQ ID NO: 746724
uuguucaaacgggaacuuc

SEQ ID NO: 746726 - RNA, 19 nt, Artificial Sequence
  Description of Artificial Sequence: Synthetic oligonucleotide
  Sense strand starting at position 927 of SEQ ID NO: 586820
caaguucccguuugaacaa

SEQ ID NO: 746727 - RNA, 19 nt, Artificial Sequence
  Description of Artificial Sequence: Synthetic oligonucleotide
  Antisense strand to SEQ ID NO: 746726
uuguucaaacgggaacuug

SEQ ID NO: 746728 - RNA, 19 nt, Artificial Sequence
  Description of Artificial Sequence: Synthetic oligonucleotide
  Sense strand starting at position 980 of SEQ ID NO: 586820
gcacuaagaagcgauuguu

SEQ ID NO: 746729 - RNA, 19 nt, Artificial Sequence
  Description of Artificial Sequence: Synthetic oligonucleotide
  Antisense strand to SEQ ID NO: 746728
aacaaucgcuucuuagugc

SEQ ID NO: 746730 - RNA, 19 nt, Artificial Sequence
  Description of Artificial Sequence: Synthetic oligonucleotide
  Sense strand starting at position 1219 of SEQ ID NO: 586820
ccucuuugccuggaauuaa

SEQ ID NO: 746731 - RNA, 19 nt, Artificial Sequence
  Description of Artificial Sequence: Synthetic oligonucleotide
  Antisense strand to SEQ ID NO: 746730
uuaauuccaggcaaagagg

SEQ ID NO: 746732 - RNA, 19 nt, Artificial Sequence
  Description of Artificial Sequence: Synthetic oligonucleotide
  Sense strand starting at position 2612 of SEQ ID NO: 586820
guagguuccuuaccuguga

SEQ ID NO: 746733 - RNA, 19 nt, Artificial Sequence
  Description of Artificial Sequence: Synthetic oligonucleotide
  Antisense strand to SEQ ID NO: 746732
ucacagguaaggaaccuac

SEQ ID NO: 746734 - RNA, 19 nt, Artificial Sequence
  Description of Artificial Sequence: Synthetic oligonucleotide
  Sense strand starting at position 2613 of SEQ ID NO: 586820
uagguuccuuaccugugaa

SEQ ID NO: 746735 - RNA, 19 nt, Artificial Sequence
  Description of Artificial Sequence: Synthetic oligonucleotide
  Antisense strand to SEQ ID NO: 746734
uucacagguaaggaaccua

SEQ ID NO: 746736 - RNA, 19 nt, Artificial Sequence
  Description of Artificial Sequence: Synthetic oligonucleotide
  Sense strand starting at position 2820 of SEQ ID NO: 586820
cugccucugagagaaguuu

SEQ ID NO: 746737 - RNA, 19 nt, Artificial Sequence
  Description of Artificial Sequence: Synthetic oligonucleotide
  Antisense strand to SEQ ID NO: 746736
aaacuucucucagaggcag

SEQ ID NO: 746738 - RNA, 19 nt, Artificial Sequence
  Description of Artificial Sequence: Synthetic oligonucleotide
  Sense strand starting at position 2828 of SEQ ID NO: 586820
gagagaaguuuggagaaau

SEQ ID NO: 746739 - RNA, 19 nt, Artificial Sequence
  Description of Artificial Sequence: Synthetic oligonucleotide
  Antisense strand to SEQ ID NO: 746738
auuucuccaaacuucucuc

SEQ ID NO: 746740 - RNA, 19 nt, Artificial Sequence
  Description of Artificial Sequence: Synthetic oligonucleotide
  Sense strand starting at position 2863 of SEQ ID NO: 586820
ggaauauaguaauugcucu

SEQ ID NO: 746741 - RNA, 19 nt, Artificial Sequence
  Description of Artificial Sequence: Synthetic oligonucleotide
  Antisense strand to SEQ ID NO: 746740
agagcaauuacuauauucc

SEQ ID NO: 746742 - RNA, 19 nt, Artificial Sequence
  Description of Artificial Sequence: Synthetic oligonucleotide
  Sense strand starting at position 2869 of SEQ ID NO: 586820
uaguaauugcucugcaagg

SEQ ID NO: 746743 - RNA, 19 nt, Artificial Sequence
  Description of Artificial Sequence: Synthetic oligonucleotide
  Antisense strand to SEQ ID NO: 746742
ccuugcagagcaauuacua

SEQ ID NO: 746744 - RNA, 19 nt, Artificial Sequence
  Description of Artificial Sequence: Synthetic oligonucleotide
  Sense strand starting at position 2870 of SEQ ID NO: 586820
aguaauugcucugcaagga

SEQ ID NO: 746745 - RNA, 19 nt, Artificial Sequence
  Description of Artificial Sequence: Synthetic oligonucleotide
  Antisense strand to SEQ ID NO: 746744
uccuugcagagcaauuacu

SEQ ID NO: 746746 - RNA, 19 nt, Artificial Sequence
  Description of Artificial Sequence: Synthetic oligonucleotide
  Sense strand starting at position 2871 of SEQ ID NO: 586820
guaauugcucugcaaggag

SEQ ID NO: 746747 - RNA, 19 nt, Artificial Sequence
  Description of Artificial Sequence: Synthetic oligonucleotide
  Antisense strand to SEQ ID NO: 746746
cuccuugcagagcaauuac

SEQ ID NO: 746748 - RNA, 19 nt, Artificial Sequence
  Description of Artificial Sequence: Synthetic oligonucleotide
  Sense strand starting at position 2879 of SEQ ID NO: 586820
ucugcaaggagugguuauu

SEQ ID NO: 746749 - RNA, 19 nt, Artificial Sequence
  Description of Artificial Sequence: Synthetic oligonucleotide
  Antisense strand to SEQ ID NO: 746748
aauaaccacuccuugcaga

SEQ ID NO: 746750 - RNA, 19 nt, Artificial Sequence
  Description of Artificial Sequence: Synthetic oligonucleotide
  Sense strand starting at position 2888 of SEQ ID NO: 586820
agugguuauuacucuuauu

SEQ ID NO: 746751 - RNA, 19 nt, Artificial Sequence
  Description of Artificial Sequence: Synthetic oligonucleotide
  Antisense strand to SEQ ID NO: 746750
aauaagaguaauaaccacu

SEQ ID NO: 746752 - RNA, 19 nt, Artificial Sequence
  Description of Artificial Sequence: Synthetic oligonucleotide
  Sense strand starting at position 3011 of SEQ ID NO: 586820
agcuauucucaguaccuca

SEQ ID NO: 746753 - RNA, 19 nt, Artificial Sequence
  Description of Artificial Sequence: Synthetic oligonucleotide
  Antisense strand to SEQ ID NO: 746752
ugagguacugagaauagcu

SEQ ID NO: 746754 - RNA, 19 nt, Artificial Sequence
  Description of Artificial Sequence: Synthetic oligonucleotide
  Sense strand starting at position 3139 of SEQ ID NO: 586820
agucucaaugaaugaagua

SEQ ID NO: 746755 - RNA, 19 nt, Artificial Sequence
  Description of Artificial Sequence: Synthetic oligonucleotide
  Antisense strand to SEQ ID NO: 746754
uacuucauucauugagacu

SEQ ID NO: 746756 - RNA, 19 nt, Artificial Sequence
  Description of Artificial Sequence: Synthetic oligonucleotide
  Sense strand starting at position 3154 of SEQ ID NO: 586820
aguaguucgcccuccaagu

SEQ ID NO: 746757 - RNA, 19 nt, Artificial Sequence
  Description of Artificial Sequence: Synthetic oligonucleotide
  Antisense strand to SEQ ID NO: 746756
acuuggagggcgaacuacu

SEQ ID NO: 746758 - RNA, 19 nt, Artificial Sequence
  Description of Artificial Sequence: Synthetic oligonucleotide
  Sense strand starting at position 3169 of SEQ ID NO: 586820
aagugaggaucagagauau

SEQ ID NO: 746759 - RNA, 19 nt, Artificial Sequence
  Description of Artificial Sequence: Synthetic oligonucleotide
  Antisense strand to SEQ ID NO: 746758
auaucucugauccucacuu

SEQ ID NO: 746760 - RNA, 19 nt, Artificial Sequence
  Description of Artificial Sequence: Synthetic oligonucleotide
  Sense strand starting at position 3223 of SEQ ID NO: 586820
uccguaaacugaguuuauc

SEQ ID NO: 746761 - RNA, 19 nt, Artificial Sequence
  Description of Artificial Sequence: Synthetic oligonucleotide
  Antisense strand to SEQ ID NO: 746760
gauaaacucaguuuacgga

SEQ ID NO: 746762 - RNA, 19 nt, Artificial Sequence
  Description of Artificial Sequence: Synthetic oligonucleotide
  Sense strand starting at position 3229 of SEQ ID NO: 586820
aacugaguuuauccgguga

SEQ ID NO: 746763 - RNA, 19 nt, Artificial Sequence
  Description of Artificial Sequence: Synthetic oligonucleotide
  Antisense strand to SEQ ID NO: 746762
ucaccggauaaacucaguu

SEQ ID NO: 746764 - RNA, 19 nt, Artificial Sequence
  Description of Artificial Sequence: Synthetic oligonucleotide
  Sense strand starting at position 3233 of SEQ ID NO: 586820
gaguuuauccggugaaaga

SEQ ID NO: 746765 - RNA, 19 nt, Artificial Sequence
  Description of Artificial Sequence: Synthetic oligonucleotide
  Antisense strand to SEQ ID NO: 746764
ucuuucaccggauaaacuc

SEQ ID NO: 746766 - RNA, 19 nt, Artificial Sequence
  Description of Artificial Sequence: Synthetic oligonucleotide
  Sense strand starting at position 3234 of SEQ ID NO: 586820
aguuuauccggugaaagaa

SEQ ID NO: 746767 - RNA, 19 nt, Artificial Sequence
  Description of Artificial Sequence: Synthetic oligonucleotide
  Antisense strand to SEQ ID NO: 746766
uucuuucaccggauaaacu

SEQ ID NO: 746768 - RNA, 19 nt, Artificial Sequence
  Description of Artificial Sequence: Synthetic oligonucleotide
  Sense strand starting at position 3383 of SEQ ID NO: 586820
ggugauuaaccuuggaacc

SEQ ID NO: 746769 - RNA, 19 nt, Artificial Sequence
  Description of Artificial Sequence: Synthetic oligonucleotide
  Antisense strand to SEQ ID NO: 746768
gguuccaagguuaaucacc

SEQ ID NO: 746770 - RNA, 19 nt, Artificial Sequence
  Description of Artificial Sequence: Synthetic oligonucleotide
  Sense strand starting at position 3401 of SEQ ID NO: 586820
ccggguacggcguaaauuu

SEQ ID NO: 746771 - RNA, 19 nt, Artificial Sequence
  Description of Artificial Sequence: Synthetic oligonucleotide
  Antisense strand to SEQ ID NO: 746770
aaauuuacgccguacccgg

SEQ ID NO: 746772 - RNA, 19 nt, Artificial Sequence
  Description of Artificial Sequence: Synthetic oligonucleotide
  Sense strand starting at position 3410 of SEQ ID NO: 586820
gcguaaauuuggcucacgu

SEQ ID NO: 746773 - RNA, 19 nt, Artificial Sequence
  Description of Artificial Sequence: Synthetic oligonucleotide
  Antisense strand to SEQ ID NO: 746772
acgugagccaaauuuacgc

SEQ ID NO: 746774 - RNA, 19 nt, Artificial Sequence
  Description of Artificial Sequence: Synthetic oligonucleotide
  Sense strand starting at position 3438 of SEQ ID NO: 586820
guugcuaaucuggagucua

SEQ ID NO: 746775 - RNA, 19 nt, Artificial Sequence
  Description of Artificial Sequence: Synthetic oligonucleotide
  Antisense strand to SEQ ID NO: 746774
uagacuccagauuagcaac

SEQ ID NO: 746776 - RNA, 19 nt, Artificial Sequence
  Description of Artificial Sequence: Synthetic oligonucleotide
  Sense strand starting at position 3448 of SEQ ID NO: 586820
uggagucuaucugccagau

SEQ ID NO: 746777 - RNA, 19 nt, Artificial Sequence
  Description of Artificial Sequence: Synthetic oligonucleotide
  Antisense strand to SEQ ID NO: 746776
aucuggcagauagacucca

SEQ ID NO: 746778 - RNA, 19 nt, Artificial Sequence
  Description of Artificial Sequence: Synthetic oligonucleotide
  Sense strand starting at position 3728 of SEQ ID NO: 586820
gaggguguucccuaugaau

SEQ ID NO: 746779 - RNA, 19 nt, Artificial Sequence
  Description of Artificial Sequence: Synthetic oligonucleotide
  Antisense strand to SEQ ID NO: 746778
auucauagggaacacccuc

SEQ ID NO: 746780 - RNA, 19 nt, Artificial Sequence
  Description of Artificial Sequence: Synthetic oligonucleotide
  Sense strand starting at position 3730 of SEQ ID NO: 586820
ggguguucccuaugaauac

SEQ ID NO: 746781 - RNA, 19 nt, Artificial Sequence
  Description of Artificial Sequence: Synthetic oligonucleotide
  Antisense strand to SEQ ID NO: 746780
guauucauagggaacaccc

SEQ ID NO: 746782 - RNA, 19 nt, Artificial Sequence
  Description of Artificial Sequence: Synthetic oligonucleotide
  Sense strand starting at position 3742 of SEQ ID NO: 586820
ugaauacucugggauauuu

SEQ ID NO: 746783 - RNA, 19 nt, Artificial Sequence
  Description of Artificial Sequence: Synthetic oligonucleotide
  Antisense strand to SEQ ID NO: 746782
aaauaucccagaguauuca

SEQ ID NO: 746784 - RNA, 19 nt, Artificial Sequence
  Description of Artificial Sequence: Synthetic oligonucleotide
  Sense strand starting at position 3763 of SEQ ID NO: 586820
gugugugacuaucuuugau

SEQ ID NO: 746785 - RNA, 19 nt, Artificial Sequence
  Description of Artificial Sequence: Synthetic oligonucleotide
  Antisense strand to SEQ ID NO: 746784
aucaaagauagucacacac

SEQ ID NO: 746786 - RNA, 19 nt, Artificial Sequence
  Description of Artificial Sequence: Synthetic oligonucleotide
  Sense strand starting at position 3765 of SEQ ID NO: 586820
gugugacuaucuuugaugu

SEQ ID NO: 746787 - RNA, 19 nt, Artificial Sequence
  Description of Artificial Sequence: Synthetic oligonucleotide
  Antisense strand to SEQ ID NO: 746786
acaucaaagauagucacac

SEQ ID NO: 746788 - RNA, 19 nt, Artificial Sequence
  Description of Artificial Sequence: Synthetic oligonucleotide
  Sense strand starting at position 3766 of SEQ ID NO: 586820
ugugacuaucuuugauguu

SEQ ID NO: 746789 - RNA, 19 nt, Artificial Sequence
  Description of Artificial Sequence: Synthetic oligonucleotide
  Antisense strand to SEQ ID NO: 746788
aacaucaaagauagucaca

SEQ ID NO: 746790 - RNA, 19 nt, Artificial Sequence
  Description of Artificial Sequence: Synthetic oligonucleotide
  Sense strand starting at position 3823 of SEQ ID NO: 586820
gcuuguuucucuucugaaa

SEQ ID NO: 746791 - RNA, 19 nt, Artificial Sequence
  Description of Artificial Sequence: Synthetic oligonucleotide
  Antisense strand to SEQ ID NO: 746790
uuucagaagagaaacaagc

SEQ ID NO: 746792 - RNA, 19 nt, Artificial Sequence
  Description of Artificial Sequence: Synthetic oligonucleotide
  Sense strand starting at position 3892 of SEQ ID NO: 586820
uguaucgcacucugauuua

SEQ ID NO: 746793 - RNA, 19 nt, Artificial Sequence
  Description of Artificial Sequence: Synthetic oligonucleotide
  Antisense strand to SEQ ID NO: 746792
uaaaucagagugcgauaca

SEQ ID NO: 746794 - RNA, 19 nt, Artificial Sequence
  Description of Artificial Sequence: Synthetic oligonucleotide
  Sense strand starting at position 320 of SEQ ID NO: 586821
gcauaaaugugggcauacu

SEQ ID NO: 746795 - RNA, 19 nt, Artificial Sequence
  Description of Artificial Sequence: Synthetic oligonucleotide
  Antisense strand to SEQ ID NO: 746794
aguaugcccacauuuaugc

SEQ ID NO: 746796 - RNA, 19 nt, Artificial Sequence
  Description of Artificial Sequence: Synthetic oligonucleotide
  Sense strand starting at position 461 of SEQ ID NO: 586821
ugggcagccugcucagaaa

SEQ ID NO: 746797 - RNA, 19 nt, Artificial Sequence
  Description of Artificial Sequence: Synthetic oligonucleotide
  Antisense strand to SEQ ID NO: 746796
uuucugagcaggcugccca

SEQ ID NO: 746798 - RNA, 19 nt, Artificial Sequence
  Description of Artificial Sequence: Synthetic oligonucleotide
  Sense strand starting at position 638 of SEQ ID NO: 586821
ggagaacagcuguaguuga

SEQ ID NO: 746799 - RNA, 19 nt, Artificial Sequence
  Description of Artificial Sequence: Synthetic oligonucleotide
  Antisense strand to SEQ ID NO: 746798
ucaacuacagcuguucucc

SEQ ID NO: 746800 - RNA, 19 nt, Artificial Sequence
  Description of Artificial Sequence: Synthetic oligonucleotide
  Sense strand starting at position 648 of SEQ ID NO: 586821
uguaguugacaccagacau

SEQ ID NO: 746801 - RNA, 19 nt, Artificial Sequence
  Description of Artificial Sequence: Synthetic oligonucleotide
  Antisense strand to SEQ ID NO: 746800
augucuggugucaacuaca

SEQ ID NO: 746802 - RNA, 19 nt, Artificial Sequence
  Description of Artificial Sequence: Synthetic oligonucleotide
  Sense strand starting at position 667 of SEQ ID NO: 586821
uguguccacuuggaaauuu

SEQ ID NO: 746803 - RNA, 19 nt, Artificial Sequence
  Description of Artificial Sequence: Synthetic oligonucleotide
  Antisense strand to SEQ ID NO: 746802
aaauuuccaaguggacaca

SEQ ID NO: 746804 - RNA, 19 nt, Artificial Sequence
  Description of Artificial Sequence: Synthetic oligonucleotide
  Sense strand starting at position 681 of SEQ ID NO: 586821
aauuuaucgugccuggaua

SEQ ID NO: 746805 - RNA, 19 nt, Artificial Sequence
  Description of Artificial Sequence: Synthetic oligonucleotide
  Antisense strand to SEQ ID NO: 746804
uauccaggcacgauaaauu

SEQ ID NO: 746806 - RNA, 19 nt, Artificial Sequence
  Description of Artificial Sequence: Synthetic oligonucleotide
  Sense strand starting at position 692 of SEQ ID NO: 586821
ccuggauaccgaugucuca

SEQ ID NO: 746807 - RNA, 19 nt, Artificial Sequence
  Description of Artificial Sequence: Synthetic oligonucleotide
  Antisense strand to SEQ ID NO: 746806
ugagacaucgguauccagg

SEQ ID NO: 746808 - RNA, 19 nt, Artificial Sequence
  Description of Artificial Sequence: Synthetic oligonucleotide
  Sense strand starting at position 711 of SEQ ID NO: 586821
cccuguagcggucauccaa

SEQ ID NO: 746809 - RNA, 19 nt, Artificial Sequence
  Description of Artificial Sequence: Synthetic oligonucleotide
  Antisense strand to SEQ ID NO: 746808
uuggaugaccgcuacaggg

SEQ ID NO: 746810 - RNA, 19 nt, Artificial Sequence
  Description of Artificial Sequence: Synthetic oligonucleotide
  Sense strand starting at position 741 of SEQ ID NO: 586821
gaaagcuaggaguguuugu

SEQ ID NO: 746811 - RNA, 19 nt, Artificial Sequence
  Description of Artificial Sequence: Synthetic oligonucleotide
  Antisense strand to SEQ ID NO: 746810
acaaacacuccuagcuuuc

SEQ ID NO: 746812 - RNA, 19 nt, Artificial Sequence
  Description of Artificial Sequence: Synthetic oligonucleotide
  Sense strand starting at position 748 of SEQ ID NO: 586821
aggaguguuugucccaucu

SEQ ID NO: 746813 - RNA, 19 nt, Artificial Sequence
  Description of Artificial Sequence: Synthetic oligonucleotide
  Antisense strand to SEQ ID NO: 746812
agaugggacaaacacuccu

SEQ ID NO: 746814 - RNA, 19 nt, Artificial Sequence
  Description of Artificial Sequence: Synthetic oligonucleotide
  Sense strand starting at position 767 of SEQ ID NO: 586821
ggaguucuucccgaacccu

SEQ ID NO: 746815 - RNA, 19 nt, Artificial Sequence
  Description of Artificial Sequence: Synthetic oligonucleotide
  Antisense strand to SEQ ID NO: 746814
aggguucgggaagaacucc

SEQ ID NO: 746816 - RNA, 19 nt, Artificial Sequence
  Description of Artificial Sequence: Synthetic oligonucleotide
  Sense strand starting at position 903 of SEQ ID NO: 586821
agacaagaggucugccuua

SEQ ID NO: 746817 - RNA, 19 nt, Artificial Sequence
  Description of Artificial Sequence: Synthetic oligonucleotide
  Antisense strand to SEQ ID NO: 746816
uaaggcagaccucuugucu

SEQ ID NO: 746818 - RNA, 19 nt, Artificial Sequence
  Description of Artificial Sequence: Synthetic oligonucleotide
  Sense strand starting at position 908 of SEQ ID NO: 586821
agaggucugccuuauuaaa

SEQ ID NO: 746819 - RNA, 19 nt, Artificial Sequence
  Description of Artificial Sequence: Synthetic oligonucleotide
  Antisense strand to SEQ ID NO: 746818
uuuaauaaggcagaccucu

SEQ ID NO: 746820 - RNA, 19 nt, Artificial Sequence
  Description of Artificial Sequence: Synthetic oligonucleotide
  Sense strand starting at position 910 of SEQ ID NO: 586821
aggucugccuuauuaaaua

SEQ ID NO: 746821 - RNA, 19 nt, Artificial Sequence
  Description of Artificial Sequence: Synthetic oligonucleotide
  Antisense strand to SEQ ID NO: 746820
uauuuaauaaggcagaccu

SEQ ID NO: 746822 - RNA, 19 nt, Artificial Sequence
  Description of Artificial Sequence: Synthetic oligonucleotide
  Sense strand starting at position 937 of SEQ ID NO: 586821
gugaaauaauaagccuauu

SEQ ID NO: 746823 - RNA, 19 nt, Artificial Sequence
  Description of Artificial Sequence: Synthetic oligonucleotide
  Antisense strand to SEQ ID NO: 746822
aauaggcuuauuauuucac

SEQ ID NO: 746824 - RNA, 19 nt, Artificial Sequence
  Description of Artificial Sequence: Synthetic oligonucleotide
  Sense strand starting at position 1019 of SEQ ID NO: 586821
ucuccaaaguguccucauu

SEQ ID NO: 746825 - RNA, 19 nt, Artificial Sequence
  Description of Artificial Sequence: Synthetic oligonucleotide
  Antisense strand to SEQ ID NO: 746824
aaugaggacacuuuggaga

SEQ ID NO: 746826 - RNA, 19 nt, Artificial Sequence
  Description of Artificial Sequence: Synthetic oligonucleotide
  Sense strand starting at position 1060 of SEQ ID NO: 586821
cuuacaacugccuaugaga

SEQ ID NO: 746827 - RNA, 19 nt, Artificial Sequence
  Description of Artificial Sequence: Synthetic oligonucleotide
  Antisense strand to SEQ ID NO: 746826
ucucauaggcaguuguaag

SEQ ID NO: 746828 - RNA, 19 nt, Artificial Sequence
  Description of Artificial Sequence: Synthetic oligonucleotide
  Sense strand starting at position 1293 of SEQ ID NO: 586821
guuauuguuguuuacaaca

SEQ ID NO: 746829 - RNA, 19 nt, Artificial Sequence
  Description of Artificial Sequence: Synthetic oligonucleotide
  Antisense strand to SEQ ID NO: 746828
uguuguaaacaacaauaac

SEQ ID NO: 746830 - RNA, 19 nt, Artificial Sequence
  Description of Artificial Sequence: Synthetic oligonucleotide
  Sense strand starting at position 1446 of SEQ ID NO: 586821
ugaguccaacugugauguu

SEQ ID NO: 746831 - RNA, 19 nt, Artificial Sequence
  Description of Artificial Sequence: Synthetic oligonucleotide
  Antisense strand to SEQ ID NO: 746830
aacaucacaguuggacuca

SEQ ID NO: 746832 - RNA, 19 nt, Artificial Sequence
  Description of Artificial Sequence: Synthetic oligonucleotide
  Sense strand starting at position 1459 of SEQ ID NO: 586821
gauguuuggguuggacaca

SEQ ID NO: 746833 - RNA, 19 nt, Artificial Sequence
  Description of Artificial Sequence: Synthetic oligonucleotide
  Antisense strand to SEQ ID NO: 746832
uguguccaacccaaacauc

SEQ ID NO: 746834 - RNA, 19 nt, Artificial Sequence
  Description of Artificial Sequence: Synthetic oligonucleotide
  Sense strand starting at position 1480 of SEQ ID NO: 586821
auggauuucuaagaauagu

SEQ ID NO: 746835 - RNA, 19 nt, Artificial Sequence
  Description of Artificial Sequence: Synthetic oligonucleotide
  Antisense strand to SEQ ID NO: 746834
acuauucuuagaaauccau

SEQ ID NO: 746836 - RNA, 19 nt, Artificial Sequence
  Description of Artificial Sequence: Synthetic oligonucleotide
  Sense strand starting at position 1569 of SEQ ID NO: 586821
ccaauugauuuguuucguu

SEQ ID NO: 746837 - RNA, 19 nt, Artificial Sequence
  Description of Artificial Sequence: Synthetic oligonucleotide
  Antisense strand to SEQ ID NO: 746836
aacgaaacaaaucaauugg

SEQ ID NO: 746838 - RNA, 19 nt, Artificial Sequence
  Description of Artificial Sequence: Synthetic oligonucleotide
  Sense strand starting at position 1599 of SEQ ID NO: 586821
guacaccuacuagaaaguu

SEQ ID NO: 746839 - RNA, 19 nt, Artificial Sequence
  Description of Artificial Sequence: Synthetic oligonucleotide
  Antisense strand to SEQ ID NO: 746838
aacuuucuaguagguguac

SEQ ID NO: 746840 - RNA, 19 nt, Artificial Sequence
  Description of Artificial Sequence: Synthetic oligonucleotide
  Sense strand starting at position 1638 of SEQ ID NO: 586821
gcaaucuaucuccacggga

SEQ ID NO: 746841 - RNA, 19 nt, Artificial Sequence
  Description of Artificial Sequence: Synthetic oligonucleotide
  Antisense strand to SEQ ID NO: 746840
ucccguggagauagauugc

SEQ ID NO: 746842 - RNA, 19 nt, Artificial Sequence
  Description of Artificial Sequence: Synthetic oligonucleotide
  Sense strand starting at position 1696 of SEQ ID NO: 586821
acgagugacucguuaggag

SEQ ID NO: 746843 - RNA, 19 nt, Artificial Sequence
  Description of Artificial Sequence: Synthetic oligonucleotide
  Antisense strand to SEQ ID NO: 746842
cuccuaacgagucacucgu

SEQ ID NO: 746844 - RNA, 19 nt, Artificial Sequence
  Description of Artificial Sequence: Synthetic oligonucleotide
  Sense strand starting at position 2460 of SEQ ID NO: 586821
agaaguaacucuuccugaa

SEQ ID NO: 746845 - RNA, 19 nt, Artificial Sequence
  Description of Artificial Sequence: Synthetic oligonucleotide
  Antisense strand to SEQ ID NO: 746844
uucaggaagaguuacuucu

SEQ ID NO: 746846 - RNA, 19 nt, Artificial Sequence
  Description of Artificial Sequence: Synthetic oligonucleotide
  Sense strand starting at position 2868 of SEQ ID NO: 586821
uccacaacgaguggauauu

SEQ ID NO: 746847 - RNA, 19 nt, Artificial Sequence
  Description of Artificial Sequence: Synthetic oligonucleotide
  Antisense strand to SEQ ID NO: 746846
aauauccacucguugugga

SEQ ID NO: 746848 - RNA, 19 nt, Artificial Sequence
  Description of Artificial Sequence: Synthetic oligonucleotide
  Sense strand starting at position 3298 of SEQ ID NO: 586821
cugcuuugagguuaugaca

SEQ ID NO: 746849 - RNA, 19 nt, Artificial Sequence
  Description of Artificial Sequence: Synthetic oligonucleotide
  Antisense strand to SEQ ID NO: 746848
ugucauaaccucaaagcag

SEQ ID NO: 746850 - RNA, 19 nt, Artificial Sequence
  Description of Artificial Sequence: Synthetic oligonucleotide
  Sense strand starting at position 3334 of SEQ ID NO: 586821
cucaaauaauccuuugggu

SEQ ID NO: 746851 - RNA, 19 nt, Artificial Sequence
  Description of Artificial Sequence: Synthetic oligonucleotide
  Antisense strand to SEQ ID NO: 746850
acccaaaggauuauuugag

SEQ ID NO: 746852 - RNA, 19 nt, Artificial Sequence
  Description of Artificial Sequence: Synthetic oligonucleotide
  Sense strand starting at position 3518 of SEQ ID NO: 586821
accuuugaagcaugaacua

SEQ ID NO: 746853 - RNA, 19 nt, Artificial Sequence
  Description of Artificial Sequence: Synthetic oligonucleotide
  Antisense strand to SEQ ID NO: 746852
uaguucaugcuucaaaggu

SEQ ID NO: 746854 - RNA, 19 nt, Artificial Sequence
  Description of Artificial Sequence: Synthetic oligonucleotide
  Sense strand starting at position 3588 of SEQ ID NO: 586821
gagaucauguagcuaguga

SEQ ID NO: 746855 - RNA, 19 nt, Artificial Sequence
  Description of Artificial Sequence: Synthetic oligonucleotide
  Antisense strand to SEQ ID NO: 746854
ucacuagcuacaugaucuc

SEQ ID NO: 746856 - RNA, 19 nt, Artificial Sequence
  Description of Artificial Sequence: Synthetic oligonucleotide
  Sense strand starting at position 3603 of SEQ ID NO: 586821
gugaguaauagcugggauu

SEQ ID NO: 746857 - RNA, 19 nt, Artificial Sequence
  Description of Artificial Sequence: Synthetic oligonucleotide
  Antisense strand to SEQ ID NO: 746856
aaucccagcuauuacucac

SEQ ID NO: 746858 - RNA, 19 nt, Artificial Sequence
  Description of Artificial Sequence: Synthetic oligonucleotide
  Sense strand starting at position 3604 of SEQ ID NO: 586821
ugaguaauagcugggauuc

SEQ ID NO: 746859 - RNA, 19 nt, Artificial Sequence
  Description of Artificial Sequence: Synthetic oligonucleotide
  Antisense strand to SEQ ID NO: 746858
gaaucccagcuauuacuca

SEQ ID NO: 746860 - RNA, 19 nt, Artificial Sequence
  Description of Artificial Sequence: Synthetic oligonucleotide
  Sense strand starting at position 3634 of SEQ ID NO: 586821
gcaggacucuugcugguaa

SEQ ID NO: 746861 - RNA, 19 nt, Artificial Sequence
  Description of Artificial Sequence: Synthetic oligonucleotide
  Antisense strand to SEQ ID NO: 746860
uuaccagcaagaguccugc

SEQ ID NO: 746862 - RNA, 19 nt, Artificial Sequence
  Description of Artificial Sequence: Synthetic oligonucleotide
  Sense strand starting at position 3678 of SEQ ID NO: 586821
ugaaacauuguacauguau

SEQ ID NO: 746863 - RNA, 19 nt, Artificial Sequence
  Description of Artificial Sequence: Synthetic oligonucleotide
  Antisense strand to SEQ ID NO: 746862
auacauguacaauguuuca

SEQ ID NO: 746864 - RNA, 19 nt, Artificial Sequence
  Description of Artificial Sequence: Synthetic oligonucleotide
  Sense strand starting at position 3686 of SEQ ID NO: 586821
uguacauguauugggcaaa

SEQ ID NO: 746865 - RNA, 19 nt, Artificial Sequence
  Description of Artificial Sequence: Synthetic oligonucleotide
  Antisense strand to SEQ ID NO: 746864
uuugcccaauacauguaca

SEQ ID NO: 746866 - RNA, 19 nt, Artificial Sequence
  Description of Artificial Sequence: Synthetic oligonucleotide
  Sense strand starting at position 3760 of SEQ ID NO: 586821
accugauuacucuggcuag

SEQ ID NO: 746867 - RNA, 19 nt, Artificial Sequence
  Description of Artificial Sequence: Synthetic oligonucleotide
  Antisense strand to SEQ ID NO: 746866
cuagccagaguaaucaggu

SEQ ID NO: 746868 - RNA, 19 nt, Artificial Sequence
  Description of Artificial Sequence: Synthetic oligonucleotide
  Sense strand starting at position 3785 of SEQ ID NO: 586821
ccauacuauguugaguaga

SEQ ID NO: 746869 - RNA, 19 nt, Artificial Sequence
  Description of Artificial Sequence: Synthetic oligonucleotide
  Antisense strand to SEQ ID NO: 746868
ucuacucaacauaguaugg

SEQ ID NO: 746870 - RNA, 19 nt, Artificial Sequence
  Description of Artificial Sequence: Synthetic oligonucleotide
  Sense strand starting at position 3825 of SEQ ID NO: 586821
ugucuuauuccggaucuua

SEQ ID NO: 746871 - RNA, 19 nt, Artificial Sequence
  Description of Artificial Sequence: Synthetic oligonucleotide
  Antisense strand to SEQ ID NO: 746870
uaagauccggaauaagaca

SEQ ID NO: 746872 - RNA, 19 nt, Artificial Sequence
  Description of Artificial Sequence: Synthetic oligonucleotide
  Sense strand starting at position 3865 of SEQ ID NO: 586821
agcauuaaauauguugcua

SEQ ID NO: 746873 - RNA, 19 nt, Artificial Sequence
  Description of Artificial Sequence: Synthetic oligonucleotide
  Antisense strand to SEQ ID NO: 746872
uagcaacauauuuaaugcu

SEQ ID NO: 746874 - RNA, 19 nt, Artificial Sequence
  Description of Artificial Sequence: Synthetic oligonucleotide
  Sense strand starting at position 24 of SEQ ID NO: 586822
ccugaauaaucugcacuga

SEQ ID NO: 746875 - RNA, 19 nt, Artificial Sequence
  Description of Artificial Sequence: Synthetic oligonucleotide
  Antisense strand to SEQ ID NO: 746874
ucagugcagauuauucagg

SEQ ID NO: 746876 - RNA, 19 nt, Artificial Sequence
  Description of Artificial Sequence: Synthetic oligonucleotide
  Sense strand starting at position 382 of SEQ ID NO: 586822
gcauaaaugugggcauacu

SEQ ID NO: 746877 - RNA, 19 nt, Artificial Sequence
  Description of Artificial Sequence: Synthetic oligonucleotide
  Antisense strand to SEQ ID NO: 746876
aguaugcccacauuuaugc

SEQ ID NO: 746878 - RNA, 19 nt, Artificial Sequence
  Description of Artificial Sequence: Synthetic oligonucleotide
  Sense strand starting at position 523 of SEQ ID NO: 586822
ugggcagccugcucagaaa

SEQ ID NO: 746879 - RNA, 19 nt, Artificial Sequence
  Description of Artificial Sequence: Synthetic oligonucleotide
  Antisense strand to SEQ ID NO: 746878
uuucugagcaggcugccca

SEQ ID NO: 746880 - RNA, 19 nt, Artificial Sequence
  Description of Artificial Sequence: Synthetic oligonucleotide
  Sense strand starting at position 700 of SEQ ID NO: 586822
ggagaacagcuguaguuga

SEQ ID NO: 746881 - RNA, 19 nt, Artificial Sequence
  Description of Artificial Sequence: Synthetic oligonucleotide
  Antisense strand to SEQ ID NO: 746880
ucaacuacagcuguucucc

SEQ ID NO: 746882 - RNA, 19 nt, Artificial Sequence
  Description of Artificial Sequence: Synthetic oligonucleotide
  Sense strand starting at position 710 of SEQ ID NO: 586822
uguaguugacaccagacau

SEQ ID NO: 746883 - RNA, 19 nt, Artificial Sequence
  Description of Artificial Sequence: Synthetic oligonucleotide
  Antisense strand to SEQ ID NO: 746882
augucuggugucaacuaca

SEQ ID NO: 746884 - RNA, 19 nt, Artificial Sequence
  Description of Artificial Sequence: Synthetic oligonucleotide
  Sense strand starting at position 743 of SEQ ID NO: 586822
aauuuaucgugccuggaua

SEQ ID NO: 746885 - RNA, 19 nt, Artificial Sequence
  Description of Artificial Sequence: Synthetic oligonucleotide
  Antisense strand to SEQ ID NO: 746884
uauccaggcacgauaaauu

SEQ ID NO: 746886 - RNA, 19 nt, Artificial Sequence
  Description of Artificial Sequence: Synthetic oligonucleotide
  Sense strand starting at position 754 of SEQ ID NO: 586822
ccuggauaccgaugucuca

SEQ ID NO: 746887 - RNA, 19 nt, Artificial Sequence
  Description of Artificial Sequence: Synthetic oligonucleotide
  Antisense strand to SEQ ID NO: 746886
ugagacaucgguauccagg

SEQ ID NO: 746888 - RNA, 19 nt, Artificial Sequence
  Description of Artificial Sequence: Synthetic oligonucleotide
  Sense strand starting at position 773 of SEQ ID NO: 586822
cccuguagcggucauccaa

SEQ ID NO: 746889 - RNA, 19 nt, Artificial Sequence
  Description of Artificial Sequence: Synthetic oligonucleotide
  Antisense strand to SEQ ID NO: 746888
uuggaugaccgcuacaggg

SEQ ID NO: 746890 - RNA, 19 nt, Artificial Sequence
  Description of Artificial Sequence: Synthetic oligonucleotide
  Sense strand starting at position 803 of SEQ ID NO: 586822
gaaagcuaggaguguuugu

SEQ ID NO: 746891 - RNA, 19 nt, Artificial Sequence
  Description of Artificial Sequence: Synthetic oligonucleotide
  Antisense strand to SEQ ID NO: 746890
acaaacacuccuagcuuuc

SEQ ID NO: 746892 - RNA, 19 nt, Artificial Sequence
  Description of Artificial Sequence: Synthetic oligonucleotide
  Sense strand starting at position 810 of SEQ ID NO: 586822
aggaguguuugucccaucu

SEQ ID NO: 746893 - RNA, 19 nt, Artificial Sequence
  Description of Artificial Sequence: Synthetic oligonucleotide
  Antisense strand to SEQ ID NO: 746892
agaugggacaaacacuccu

SEQ ID NO: 746894 - RNA, 19 nt, Artificial Sequence
  Description of Artificial Sequence: Synthetic oligonucleotide
  Sense strand starting at position 829 of SEQ ID NO: 586822
ggaguucuucccgaacccu

SEQ ID NO: 746895 - RNA, 19 nt, Artificial Sequence
  Description of Artificial Sequence: Synthetic oligonucleotide
  Antisense strand to SEQ ID NO: 746894
aggguucgggaagaacucc

SEQ ID NO: 746896 - RNA, 19 nt, Artificial Sequence
  Description of Artificial Sequence: Synthetic oligonucleotide
  Sense strand starting at position 965 of SEQ ID NO: 586822
agacaagaggucugccuua

SEQ ID NO: 746897 - RNA, 19 nt, Artificial Sequence
  Description of Artificial Sequence: Synthetic oligonucleotide
  Antisense strand to SEQ ID NO: 746896
uaaggcagaccucuugucu

SEQ ID NO: 746898 - RNA, 19 nt, Artificial Sequence
  Description of Artificial Sequence: Synthetic oligonucleotide
  Sense strand starting at position 970 of SEQ ID NO: 586822
agaggucugccuuauuaaa

SEQ ID NO: 746899 - RNA, 19 nt, Artificial Sequence
  Description of Artificial Sequence: Synthetic oligonucleotide
  Antisense strand to SEQ ID NO: 746898
uuuaauaaggcagaccucu

SEQ ID NO: 746900 - RNA, 19 nt, Artificial Sequence
  Description of Artificial Sequence: Synthetic oligonucleotide
  Sense strand starting at position 972 of SEQ ID NO: 586822
aggucugccuuauuaaaua

SEQ ID NO: 746901 - RNA, 19 nt, Artificial Sequence
  Description of Artificial Sequence: Synthetic oligonucleotide
  Antisense strand to SEQ ID NO: 746900
uauuuaauaaggcagaccu

SEQ ID NO: 746902 - RNA, 19 nt, Artificial Sequence
  Description of Artificial Sequence: Synthetic oligonucleotide
  Sense strand starting at position 999 of SEQ ID NO: 586822
gugaaauaauaagccuauu

SEQ ID NO: 746903 - RNA, 19 nt, Artificial Sequence
  Description of Artificial Sequence: Synthetic oligonucleotide
  Antisense strand to SEQ ID NO: 746902
aauaggcuuauuauuucac

SEQ ID NO: 746904 - RNA, 19 nt, Artificial Sequence
  Description of Artificial Sequence: Synthetic oligonucleotide
  Sense strand starting at position 1081 of SEQ ID NO: 586822
ucuccaaaguguccucauu

SEQ ID NO: 746905 - RNA, 19 nt, Artificial Sequence
  Description of Artificial Sequence: Synthetic oligonucleotide
  Antisense strand to SEQ ID NO: 746904
aaugaggacacuuuggaga

SEQ ID NO: 746906 - RNA, 19 nt, Artificial Sequence
  Description of Artificial Sequence: Synthetic oligonucleotide
  Sense strand starting at position 1122 of SEQ ID NO: 586822
cuuacaacugccuaugaga

SEQ ID NO: 746907 - RNA, 19 nt, Artificial Sequence
  Description of Artificial Sequence: Synthetic oligonucleotide
  Antisense strand to SEQ ID NO: 746906
ucucauaggcaguuguaag

SEQ ID NO: 746908 - RNA, 19 nt, Artificial Sequence
  Description of Artificial Sequence: Synthetic oligonucleotide
  Sense strand starting at position 1355 of SEQ ID NO: 586822
guuauuguuguuuacaaca

SEQ ID NO: 746909 - RNA, 19 nt, Artificial Sequence
  Description of Artificial Sequence: Synthetic oligonucleotide
  Antisense strand to SEQ ID NO: 746908
uguuguaaacaacaauaac

SEQ ID NO: 746910 - RNA, 19 nt, Artificial Sequence
  Description of Artificial Sequence: Synthetic oligonucleotide
  Sense strand starting at position 1508 of SEQ ID NO: 586822
ugaguccaacugugauguu

SEQ ID NO: 746911 - RNA, 19 nt, Artificial Sequence
  Description of Artificial Sequence: Synthetic oligonucleotide
  Antisense strand to SEQ ID NO: 746910
aacaucacaguuggacuca

SEQ ID NO: 746912 - RNA, 19 nt, Artificial Sequence
  Description of Artificial Sequence: Synthetic oligonucleotide
  Sense strand starting at position 1521 of SEQ ID NO: 586822
gauguuuggguuggacaca

SEQ ID NO: 746913 - RNA, 19 nt, Artificial Sequence
  Description of Artificial Sequence: Synthetic oligonucleotide
  Antisense strand to SEQ ID NO: 746912
uguguccaacccaaacauc

SEQ ID NO: 746914 - RNA, 19 nt, Artificial Sequence
  Description of Artificial Sequence: Synthetic oligonucleotide
  Sense strand starting at position 1542 of SEQ ID NO: 586822
auggauuucuaagaauagu

SEQ ID NO: 746915 - RNA, 19 nt, Artificial Sequence
  Description of Artificial Sequence: Synthetic oligonucleotide
  Antisense strand to SEQ ID NO: 746914
acuauucuuagaaauccau

SEQ ID NO: 746916 - RNA, 19 nt, Artificial Sequence
  Description of Artificial Sequence: Synthetic oligonucleotide
  Sense strand starting at position 1631 of SEQ ID NO: 586822
ccaauugauuuguuucguu

SEQ ID NO: 746917 - RNA, 19 nt, Artificial Sequence
  Description of Artificial Sequence: Synthetic oligonucleotide
  Antisense strand to SEQ ID NO: 746916
aacgaaacaaaucaauugg

SEQ ID NO: 746918 - RNA, 19 nt, Artificial Sequence
  Description of Artificial Sequence: Synthetic oligonucleotide
  Sense strand starting at position 1661 of SEQ ID NO: 586822
guacaccuacuagaaaguu

SEQ ID NO: 746919 - RNA, 19 nt, Artificial Sequence
  Description of Artificial Sequence: Synthetic oligonucleotide
  Antisense strand to SEQ ID NO: 746918
aacuuucuaguagguguac

SEQ ID NO: 746920 - RNA, 19 nt, Artificial Sequence
  Description of Artificial Sequence: Synthetic oligonucleotide
  Sense strand starting at position 1700 of SEQ ID NO: 586822
gcaaucuaucuccacggga

SEQ ID NO: 746921 - RNA, 19 nt, Artificial Sequence
  Description of Artificial Sequence: Synthetic oligonucleotide
  Antisense strand to SEQ ID NO: 746920
ucccguggagauagauugc

SEQ ID NO: 746922 - RNA, 19 nt, Artificial Sequence
  Description of Artificial Sequence: Synthetic oligonucleotide
  Sense strand starting at position 1758 of SEQ ID NO: 586822
acgagugacucguuaggag

SEQ ID NO: 746923 - RNA, 19 nt, Artificial Sequence
  Description of Artificial Sequence: Synthetic oligonucleotide
  Antisense strand to SEQ ID NO: 746922
cuccuaacgagucacucgu

SEQ ID NO: 746924 - RNA, 19 nt, Artificial Sequence
  Description of Artificial Sequence: Synthetic oligonucleotide
  Sense strand starting at position 2522 of SEQ ID NO: 586822
agaaguaacucuuccugaa

SEQ ID NO: 746925 - RNA, 19 nt, Artificial Sequence
  Description of Artificial Sequence: Synthetic oligonucleotide
  Antisense strand to SEQ ID NO: 746924
uucaggaagaguuacuucu

SEQ ID NO: 746926 - RNA, 19 nt, Artificial Sequence
  Description of Artificial Sequence: Synthetic oligonucleotide
  Sense strand starting at position 2930 of SEQ ID NO: 586822
uccacaacgaguggauauu

SEQ ID NO: 746927 - RNA, 19 nt, Artificial Sequence
  Description of Artificial Sequence: Synthetic oligonucleotide
  Antisense strand to SEQ ID NO: 746926
aauauccacucguugugga

SEQ ID NO: 746928 - RNA, 19 nt, Artificial Sequence
  Description of Artificial Sequence: Synthetic oligonucleotide
  Sense strand starting at position 3360 of SEQ ID NO: 586822
cugcuuugagguuaugaca

SEQ ID NO: 746929 - RNA, 19 nt, Artificial Sequence
  Description of Artificial Sequence: Synthetic oligonucleotide
  Antisense strand to SEQ ID NO: 746928
ugucauaaccucaaagcag

SEQ ID NO: 746930 - RNA, 19 nt, Artificial Sequence
  Description of Artificial Sequence: Synthetic oligonucleotide
  Sense strand starting at position 3396 of SEQ ID NO: 586822
cucaaauaauccuuugggu

SEQ ID NO: 746931 - RNA, 19 nt, Artificial Sequence
  Description of Artificial Sequence: Synthetic oligonucleotide
  Antisense strand to SEQ ID NO: 746930
acccaaaggauuauuugag

SEQ ID NO: 746932 - RNA, 19 nt, Artificial Sequence
  Description of Artificial Sequence: Synthetic oligonucleotide
  Sense strand starting at position 3580 of SEQ ID NO: 586822
accuuugaagcaugaacua

SEQ ID NO: 746933 - RNA, 19 nt, Artificial Sequence
  Description of Artificial Sequence: Synthetic oligonucleotide
  Antisense strand to SEQ ID NO: 746932
uaguucaugcuucaaaggu

SEQ ID NO: 746934 - RNA, 19 nt, Artificial Sequence
  Description of Artificial Sequence: Synthetic oligonucleotide
  Sense strand starting at position 3650 of SEQ ID NO: 586822
gagaucauguagcuaguga

SEQ ID NO: 746935 - RNA, 19 nt, Artificial Sequence
  Description of Artificial Sequence: Synthetic oligonucleotide
  Antisense strand to SEQ ID NO: 746934
ucacuagcuacaugaucuc

SEQ ID NO: 746936 - RNA, 19 nt, Artificial Sequence
  Description of Artificial Sequence: Synthetic oligonucleotide
  Sense strand starting at position 3665 of SEQ ID NO: 586822
gugaguaauagcugggauu

SEQ ID NO: 746937 - RNA, 19 nt, Artificial Sequence
  Description of Artificial Sequence: Synthetic oligonucleotide
  Antisense strand to SEQ ID NO: 746936
aaucccagcuauuacucac

SEQ ID NO: 746938 - RNA, 19 nt, Artificial Sequence
  Description of Artificial Sequence: Synthetic oligonucleotide
  Sense strand starting at position 3666 of SEQ ID NO: 586822
ugaguaauagcugggauuc

SEQ ID NO: 746939 - RNA, 19 nt, Artificial Sequence
  Description of Artificial Sequence: Synthetic oligonucleotide
  Antisense strand to SEQ ID NO: 746938
gaaucccagcuauuacuca

SEQ ID NO: 746940 - RNA, 19 nt, Artificial Sequence
  Description of Artificial Sequence: Synthetic oligonucleotide
  Sense strand starting at position 3696 of SEQ ID NO: 586822
gcaggacucuugcugguaa

SEQ ID NO: 746941 - RNA, 19 nt, Artificial Sequence
  Description of Artificial Sequence: Synthetic oligonucleotide
  Antisense strand to SEQ ID NO: 746940
uuaccagcaagaguccugc

SEQ ID NO: 746942 - RNA, 19 nt, Artificial Sequence
  Description of Artificial Sequence: Synthetic oligonucleotide
  Sense strand starting at position 3740 of SEQ ID NO: 586822
ugaaacauuguacauguau

SEQ ID NO: 746943 - RNA, 19 nt, Artificial Sequence
  Description of Artificial Sequence: Synthetic oligonucleotide
  Antisense strand to SEQ ID NO: 746942
auacauguacaauguuuca

SEQ ID NO: 746944 - RNA, 19 nt, Artificial Sequence
  Description of Artificial Sequence: Synthetic oligonucleotide
  Sense strand starting at position 3748 of SEQ ID NO: 586822
uguacauguauugggcaaa

SEQ ID NO: 746945 - RNA, 19 nt, Artificial Sequence
  Description of Artificial Sequence: Synthetic oligonucleotide
  Antisense strand to SEQ ID NO: 746944
uuugcccaauacauguaca

SEQ ID NO: 746946 - RNA, 19 nt, Artificial Sequence
  Description of Artificial Sequence: Synthetic oligonucleotide
  Sense strand starting at position 3822 of SEQ ID NO: 586822
accugauuacucuggcuag

SEQ ID NO: 746947 - RNA, 19 nt, Artificial Sequence
  Description of Artificial Sequence: Synthetic oligonucleotide
  Antisense strand to SEQ ID NO: 746946
cuagccagaguaaucaggu

SEQ ID NO: 746948 - RNA, 19 nt, Artificial Sequence
  Description of Artificial Sequence: Synthetic oligonucleotide
  Sense strand starting at position 3847 of SEQ ID NO: 586822
ccauacuauguugaguaga

SEQ ID NO: 746949 - RNA, 19 nt, Artificial Sequence
  Description of Artificial Sequence: Synthetic oligonucleotide
  Antisense strand to SEQ ID NO: 746948
ucuacucaacauaguaugg

SEQ ID NO: 746950 - RNA, 19 nt, Artificial Sequence
  Description of Artificial Sequence: Synthetic oligonucleotide
  Sense strand starting at position 3887 of SEQ ID NO: 586822
ugucuuauuccggaucuua

SEQ ID NO: 746951 - RNA, 19 nt, Artificial Sequence
  Description of Artificial Sequence: Synthetic oligonucleotide
  Antisense strand to SEQ ID NO: 746950
uaagauccggaauaagaca

SEQ ID NO: 746952 - RNA, 19 nt, Artificial Sequence
  Description of Artificial Sequence: Synthetic oligonucleotide
  Sense strand starting at position 3927 of SEQ ID NO: 586822
agcauuaaauauguugcua

SEQ ID NO: 746953 - RNA, 19 nt, Artificial Sequence
  Description of Artificial Sequence: Synthetic oligonucleotide
  Antisense strand to SEQ ID NO: 746952
uagcaacauauuuaaugcu

SEQ ID NO: 746954 - RNA, 19 nt, Artificial Sequence
  Description of Artificial Sequence: Synthetic oligonucleotide
  Sense strand starting at position 51 of SEQ ID NO: 586823
uggugaucuggguagaguc

SEQ ID NO: 746955 - RNA, 19 nt, Artificial Sequence
  Description of Artificial Sequence: Synthetic oligonucleotide
  Antisense strand to SEQ ID NO: 746954
gacucuacccagaucacca

SEQ ID NO: 746956 - RNA, 19 nt, Artificial Sequence
  Description of Artificial Sequence: Synthetic oligonucleotide
  Sense strand starting at position 234 of SEQ ID NO: 586823
cucccaggcucucuguuaa

SEQ ID NO: 746957 - RNA, 19 nt, Artificial Sequence
  Description of Artificial Sequence: Synthetic oligonucleotide
  Antisense strand to SEQ ID NO: 746956
uuaacagagagccugggag

SEQ ID NO: 746958 - RNA, 19 nt, Artificial Sequence
  Description of Artificial Sequence: Synthetic oligonucleotide
  Sense strand starting at position 253 of SEQ ID NO: 586823
ccagcuuauguccagcaga

SEQ ID NO: 746959 - RNA, 19 nt, Artificial Sequence
  Description of Artificial Sequence: Synthetic oligonucleotide
  Antisense strand to SEQ ID NO: 746958
ucugcuggacauaagcugg

SEQ ID NO: 746960 - RNA, 19 nt, Artificial Sequence
  Description of Artificial Sequence: Synthetic oligonucleotide
  Sense strand starting at position 256 of SEQ ID NO: 586823
gcuuauguccagcagagcu

SEQ ID NO: 746961 - RNA, 19 nt, Artificial Sequence
  Description of Artificial Sequence: Synthetic oligonucleotide
  Antisense strand to SEQ ID NO: 746960
agcucugcuggacauaagc

SEQ ID NO: 746962 - RNA, 19 nt, Artificial Sequence
  Description of Artificial Sequence: Synthetic oligonucleotide
  Sense strand starting at position 713 of SEQ ID NO: 586823
gagccuguuugggucugaa

SEQ ID NO: 746963 - RNA, 19 nt, Artificial Sequence
  Description of Artificial Sequence: Synthetic oligonucleotide
  Antisense strand to SEQ ID NO: 746962
uucagacccaaacaggcuc

SEQ ID NO: 746964 - RNA, 19 nt, Artificial Sequence
  Description of Artificial Sequence: Synthetic oligonucleotide
  Sense strand starting at position 768 of SEQ ID NO: 586823
gggcaagccacgugucuau

SEQ ID NO: 746965 - RNA, 19 nt, Artificial Sequence
  Description of Artificial Sequence: Synthetic oligonucleotide
  Antisense strand to SEQ ID NO: 746964
auagacacguggcuugccc

SEQ ID NO: 746966 - RNA, 19 nt, Artificial Sequence
  Description of Artificial Sequence: Synthetic oligonucleotide
  Sense strand starting at position 777 of SEQ ID NO: 586823
acgugucuauacuuugauu

SEQ ID NO: 746967 - RNA, 19 nt, Artificial Sequence
  Description of Artificial Sequence: Synthetic oligonucleotide
  Antisense strand to SEQ ID NO: 746966
aaucaaaguauagacacgu

SEQ ID NO: 746968 - RNA, 19 nt, Artificial Sequence
  Description of Artificial Sequence: Synthetic oligonucleotide
  Sense strand starting at position 779 of SEQ ID NO: 586823
gugucuauacuuugauuuc

SEQ ID NO: 746969 - RNA, 19 nt, Artificial Sequence
  Description of Artificial Sequence: Synthetic oligonucleotide
  Antisense strand to SEQ ID NO: 746968
gaaaucaaaguauagacac

SEQ ID NO: 746970 - RNA, 19 nt, Artificial Sequence
  Description of Artificial Sequence: Synthetic oligonucleotide
  Sense strand starting at position 848 of SEQ ID NO: 586823
aagauagugccuuguacac

SEQ ID NO: 746971 - RNA, 19 nt, Artificial Sequence
  Description of Artificial Sequence: Synthetic oligonucleotide
  Antisense strand to SEQ ID NO: 746970
guguacaaggcacuaucuu

SEQ ID NO: 746972 - RNA, 19 nt, Artificial Sequence
  Description of Artificial Sequence: Synthetic oligonucleotide
  Sense strand starting at position 876 of SEQ ID NO: 586823
cuaucauccucuccugagu

SEQ ID NO: 746973 - RNA, 19 nt, Artificial Sequence
  Description of Artificial Sequence: Synthetic oligonucleotide
  Antisense strand to SEQ ID NO: 746972
acucaggagaggaugauag

SEQ ID NO: 746974 - RNA, 19 nt, Artificial Sequence
  Description of Artificial Sequence: Synthetic oligonucleotide
  Sense strand starting at position 906 of SEQ ID NO: 586823
acuacugaucccugguaau

SEQ ID NO: 746975 - RNA, 19 nt, Artificial Sequence
  Description of Artificial Sequence: Synthetic oligonucleotide
  Antisense strand to SEQ ID NO: 746974
auuaccagggaucaguagu

SEQ ID NO: 746976 - RNA, 19 nt, Artificial Sequence
  Description of Artificial Sequence: Synthetic oligonucleotide
  Sense strand starting at position 967 of SEQ ID NO: 586823
guucguuugcucucucaac

SEQ ID NO: 746977 - RNA, 19 nt, Artificial Sequence
  Description of Artificial Sequence: Synthetic oligonucleotide
  Antisense strand to SEQ ID NO: 746976
guugagagagcaaacgaac

SEQ ID NO: 746978 - RNA, 19 nt, Artificial Sequence
  Description of Artificial Sequence: Synthetic oligonucleotide
  Sense strand starting at position 1074 of SEQ ID NO: 586823
agagcuucucagucguguu

SEQ ID NO: 746979 - RNA, 19 nt, Artificial Sequence
  Description of Artificial Sequence: Synthetic oligonucleotide
  Antisense strand to SEQ ID NO: 746978
aacacgacugagaagcucu

SEQ ID NO: 746980 - RNA, 19 nt, Artificial Sequence
  Description of Artificial Sequence: Synthetic oligonucleotide
  Sense strand starting at position 1076 of SEQ ID NO: 586823
agcuucucagucguguuau

SEQ ID NO: 746981 - RNA, 19 nt, Artificial Sequence
  Description of Artificial Sequence: Synthetic oligonucleotide
  Antisense strand to SEQ ID NO: 746980
auaacacgacugagaagcu

SEQ ID NO: 746982 - RNA, 19 nt, Artificial Sequence
  Description of Artificial Sequence: Synthetic oligonucleotide
  Sense strand starting at position 1090 of SEQ ID NO: 586823
guuauuuacucaggccuga

SEQ ID NO: 746983 - RNA, 19 nt, Artificial Sequence
  Description of Artificial Sequence: Synthetic oligonucleotide
  Antisense strand to SEQ ID NO: 746982
ucaggccugaguaaauaac

SEQ ID NO: 746984 - RNA, 19 nt, Artificial Sequence
  Description of Artificial Sequence: Synthetic oligonucleotide
  Sense strand starting at position 1499 of SEQ ID NO: 586823
ccggccuacugcuuauuaa

SEQ ID NO: 746985 - RNA, 19 nt, Artificial Sequence
  Description of Artificial Sequence: Synthetic oligonucleotide
  Antisense strand to SEQ ID NO: 746984
uuaauaagcaguaggccgg

SEQ ID NO: 746986 - RNA, 19 nt, Artificial Sequence
  Description of Artificial Sequence: Synthetic oligonucleotide
  Sense strand starting at position 1500 of SEQ ID NO: 586823
cggccuacugcuuauuaau

SEQ ID NO: 746987 - RNA, 19 nt, Artificial Sequence
  Description of Artificial Sequence: Synthetic oligonucleotide
  Antisense strand to SEQ ID NO: 746986
auuaauaagcaguaggccg

SEQ ID NO: 746988 - RNA, 19 nt, Artificial Sequence
  Description of Artificial Sequence: Synthetic oligonucleotide
  Sense strand starting at position 1538 of SEQ ID NO: 586823
ugauucucgcagugauccu

SEQ ID NO: 746989 - RNA, 19 nt, Artificial Sequence
  Description of Artificial Sequence: Synthetic oligonucleotide
  Antisense strand to SEQ ID NO: 746988
aggaucacugcgagaauca

SEQ ID NO: 746990 - RNA, 19 nt, Artificial Sequence
  Description of Artificial Sequence: Synthetic oligonucleotide
  Sense strand starting at position 2181 of SEQ ID NO: 586823
uuaaauuaaugucucggaa

SEQ ID NO: 746991 - RNA, 19 nt, Artificial Sequence
  Description of Artificial Sequence: Synthetic oligonucleotide
  Antisense strand to SEQ ID NO: 746990
uuccgagacauuaauuuaa

SEQ ID NO: 746992 - RNA, 19 nt, Artificial Sequence
  Description of Artificial Sequence: Synthetic oligonucleotide
  Sense strand starting at position 2184 of SEQ ID NO: 586823
aauuaaugucucggaaagc

SEQ ID NO: 746993 - RNA, 19 nt, Artificial Sequence
  Description of Artificial Sequence: Synthetic oligonucleotide
  Antisense strand to SEQ ID NO: 746992
gcuuuccgagacauuaauu

SEQ ID NO: 746994 - RNA, 19 nt, Artificial Sequence
  Description of Artificial Sequence: Synthetic oligonucleotide
  Sense strand starting at position 2537 of SEQ ID NO: 586823
gucgaauggcauuaggaca

SEQ ID NO: 746995 - RNA, 19 nt, Artificial Sequence
  Description of Artificial Sequence: Synthetic oligonucleotide
  Antisense strand to SEQ ID NO: 746994
uguccuaaugccauucgac

SEQ ID NO: 746996 - RNA, 19 nt, Artificial Sequence
  Description of Artificial Sequence: Synthetic oligonucleotide
  Sense strand starting at position 2779 of SEQ ID NO: 586823
aaauuagagucagaagaua

SEQ ID NO: 746997 - RNA, 19 nt, Artificial Sequence
  Description of Artificial Sequence: Synthetic oligonucleotide
  Antisense strand to SEQ ID NO: 746996
uaucuucugacucuaauuu

SEQ ID NO: 746998 - RNA, 19 nt, Artificial Sequence
  Description of Artificial Sequence: Synthetic oligonucleotide
  Sense strand starting at position 2792 of SEQ ID NO: 586823
aagauaaacugggauaaag

SEQ ID NO: 746999 - RNA, 19 nt, Artificial Sequence
  Description of Artificial Sequence: Synthetic oligonucleotide
  Antisense strand to SEQ ID NO: 746998
cuuuaucccaguuuaucuu

SEQ ID NO: 747000 - RNA, 19 nt, Artificial Sequence
  Description of Artificial Sequence: Synthetic oligonucleotide
  Sense strand starting at position 2801 of SEQ ID NO: 586823
ugggauaaagugugagaua

SEQ ID NO: 747001 - RNA, 19 nt, Artificial Sequence
  Description of Artificial Sequence: Synthetic oligonucleotide
  Antisense strand to SEQ ID NO: 747000
uaucucacacuuuauccca

SEQ ID NO: 747002 - RNA, 19 nt, Artificial Sequence
  Description of Artificial Sequence: Synthetic oligonucleotide
  Sense strand starting at position 2802 of SEQ ID NO: 586823
gggauaaagugugagauau

SEQ ID NO: 747003 - RNA, 19 nt, Artificial Sequence
  Description of Artificial Sequence: Synthetic oligonucleotide
  Antisense strand to SEQ ID NO: 747002
auaucucacacuuuauccc

SEQ ID NO: 747004 - RNA, 19 nt, Artificial Sequence
  Description of Artificial Sequence: Synthetic oligonucleotide
  Sense strand starting at position 2804 of SEQ ID NO: 586823
gauaaagugugagauauuu

SEQ ID NO: 747005 - RNA, 19 nt, Artificial Sequence
  Description of Artificial Sequence: Synthetic oligonucleotide
  Antisense strand to SEQ ID NO: 747004
aaauaucucacacuuuauc

SEQ ID NO: 747006 - RNA, 19 nt, Artificial Sequence
  Description of Artificial Sequence: Synthetic oligonucleotide
  Sense strand starting at position 2912 of SEQ ID NO: 586823
cguagaugauucuuagaag

SEQ ID NO: 747007 - RNA, 19 nt, Artificial Sequence
  Description of Artificial Sequence: Synthetic oligonucleotide
  Antisense strand to SEQ ID NO: 747006
cuucuaagaaucaucuacg

SEQ ID NO: 747008 - RNA, 19 nt, Artificial Sequence
  Description of Artificial Sequence: Synthetic oligonucleotide
  Sense strand starting at position 2913 of SEQ ID NO: 586823
guagaugauucuuagaaga

SEQ ID NO: 747009 - RNA, 19 nt, Artificial Sequence
  Description of Artificial Sequence: Synthetic oligonucleotide
  Antisense strand to SEQ ID NO: 747008
ucuucuaagaaucaucuac

SEQ ID NO: 747010 - RNA, 19 nt, Artificial Sequence
  Description of Artificial Sequence: Synthetic oligonucleotide
  Sense strand starting at position 2915 of SEQ ID NO: 586823
agaugauucuuagaagaaa

SEQ ID NO: 747011 - RNA, 19 nt, Artificial Sequence
  Description of Artificial Sequence: Synthetic oligonucleotide
  Antisense strand to SEQ ID NO: 747010
uuucuucuaagaaucaucu

SEQ ID NO: 747012 - RNA, 19 nt, Artificial Sequence
  Description of Artificial Sequence: Synthetic oligonucleotide
  Sense strand starting at position 2968 of SEQ ID NO: 586823
ccuguccagucguuacaga

SEQ ID NO: 747013 - RNA, 19 nt, Artificial Sequence
  Description of Artificial Sequence: Synthetic oligonucleotide
  Antisense strand to SEQ ID NO: 747012
ucuguaacgacuggacagg

SEQ ID NO: 747014 - RNA, 19 nt, Artificial Sequence
  Description of Artificial Sequence: Synthetic oligonucleotide
  Sense strand starting at position 2969 of SEQ ID NO: 586823
cuguccagucguuacagaa

SEQ ID NO: 747015 - RNA, 19 nt, Artificial Sequence
  Description of Artificial Sequence: Synthetic oligonucleotide
  Antisense strand to SEQ ID NO: 747014
uucuguaacgacuggacag

SEQ ID NO: 747016 - RNA, 19 nt, Artificial Sequence
  Description of Artificial Sequence: Synthetic oligonucleotide
  Sense strand starting at position 2976 of SEQ ID NO: 586823
gucguuacagaauaccuaa

SEQ ID NO: 747017 - RNA, 19 nt, Artificial Sequence
  Description of Artificial Sequence: Synthetic oligonucleotide
  Antisense strand to SEQ ID NO: 747016
uuagguauucuguaacgac

SEQ ID NO: 747018 - RNA, 19 nt, Artificial Sequence
  Description of Artificial Sequence: Synthetic oligonucleotide
  Sense strand starting at position 3051 of SEQ ID NO: 586823
guugaaggugcgagguaau

SEQ ID NO: 747019 - RNA, 19 nt, Artificial Sequence
  Description of Artificial Sequence: Synthetic oligonucleotide
  Antisense strand to SEQ ID NO: 747018
auuaccucgcaccuucaac

SEQ ID NO: 747020 - RNA, 19 nt, Artificial Sequence
  Description of Artificial Sequence: Synthetic oligonucleotide
  Sense strand starting at position 3058 of SEQ ID NO: 586823
gugcgagguaauuggcaau

SEQ ID NO: 747021 - RNA, 19 nt, Artificial Sequence
  Description of Artificial Sequence: Synthetic oligonucleotide
  Antisense strand to SEQ ID NO: 747020
auugccaauuaccucgcac

SEQ ID NO: 747022 - RNA, 19 nt, Artificial Sequence
  Description of Artificial Sequence: Synthetic oligonucleotide
  Sense strand starting at position 3205 of SEQ ID NO: 586823
gaaaucugaugucuugaua

SEQ ID NO: 747023 - RNA, 19 nt, Artificial Sequence
  Description of Artificial Sequence: Synthetic oligonucleotide
  Antisense strand to SEQ ID NO: 747022
uaucaagacaucagauuuc

SEQ ID NO: 747024 - RNA, 19 nt, Artificial Sequence
  Description of Artificial Sequence: Synthetic oligonucleotide
  Sense strand starting at position 3678 of SEQ ID NO: 586823
agggucuucgucuguggau

SEQ ID NO: 747025 - RNA, 19 nt, Artificial Sequence
  Description of Artificial Sequence: Synthetic oligonucleotide
  Antisense strand to SEQ ID NO: 747024
auccacagacgaagacccu

SEQ ID NO: 747026 - RNA, 19 nt, Artificial Sequence
  Description of Artificial Sequence: Synthetic oligonucleotide
  Sense strand starting at position 3717 of SEQ ID NO: 586823
ggaggaggcucugcccaaa

SEQ ID NO: 747027 - RNA, 19 nt, Artificial Sequence
  Description of Artificial Sequence: Synthetic oligonucleotide
  Antisense strand to SEQ ID NO: 747026
uuugggcagagccuccucc

SEQ ID NO: 747028 - RNA, 19 nt, Artificial Sequence
  Description of Artificial Sequence: Synthetic oligonucleotide
  Sense strand starting at position 3720 of SEQ ID NO: 586823
ggaggcucugcccaaauau

SEQ ID NO: 747029 - RNA, 19 nt, Artificial Sequence
  Description of Artificial Sequence: Synthetic oligonucleotide
  Antisense strand to SEQ ID NO: 747028
auauuugggcagagccucc

SEQ ID NO: 747030 - RNA, 19 nt, Artificial Sequence
  Description of Artificial Sequence: Synthetic oligonucleotide
  Sense strand starting at position 3912 of SEQ ID NO: 586823
auguuugugcaaggaaucu

SEQ ID NO: 747031 - RNA, 19 nt, Artificial Sequence
  Description of Artificial Sequence: Synthetic oligonucleotide
  Antisense strand to SEQ ID NO: 747030
agauuccuugcacaaacau

SEQ ID NO: 747032 - RNA, 19 nt, Artificial Sequence
  Description of Artificial Sequence: Synthetic oligonucleotide
  Sense strand starting at position 3946 of SEQ ID NO: 586823
ggaagaaacugccuagcuu

SEQ ID NO: 747033 - RNA, 19 nt, Artificial Sequence
  Description of Artificial Sequence: Synthetic oligonucleotide
  Antisense strand to SEQ ID NO: 747032
aagcuaggcaguuucuucc

SEQ ID NO: 747034 - RNA, 19 nt, Artificial Sequence
  Description of Artificial Sequence: Synthetic oligonucleotide
  Sense strand starting at position 679 of SEQ ID NO: 586824
ccaauaauguucuguuauu

SEQ ID NO: 747035 - RNA, 19 nt, Artificial Sequence
  Description of Artificial Sequence: Synthetic oligonucleotide
  Antisense strand to SEQ ID NO: 747034
aauaacagaacauuauugg

SEQ ID NO: 747036 - RNA, 19 nt, Artificial Sequence
  Description of Artificial Sequence: Synthetic oligonucleotide
  Sense strand starting at position 688 of SEQ ID NO: 586824
uucuguuauugccacaugu

SEQ ID NO: 747037 - RNA, 19 nt, Artificial Sequence
  Description of Artificial Sequence: Synthetic oligonucleotide
  Antisense strand to SEQ ID NO: 747036
acauguggcaauaacagaa

SEQ ID NO: 747038 - RNA, 19 nt, Artificial Sequence
  Description of Artificial Sequence: Synthetic oligonucleotide
  Sense strand starting at position 2309 of SEQ ID NO: 586824
ccuugaucuuucuuuggaa

SEQ ID NO: 747039 - RNA, 19 nt, Artificial Sequence
  Description of Artificial Sequence: Synthetic oligonucleotide
  Antisense strand to SEQ ID NO: 747038
uuccaaagaaagaucaagg

SEQ ID NO: 747040 - RNA, 19 nt, Artificial Sequence
  Description of Artificial Sequence: Synthetic oligonucleotide
  Sense strand starting at position 2310 of SEQ ID NO: 586824
cuugaucuuucuuuggaaa

SEQ ID NO: 747041 - RNA, 19 nt, Artificial Sequence
  Description of Artificial Sequence: Synthetic oligonucleotide
  Antisense strand to SEQ ID NO: 747040
uuuccaaagaaagaucaag

SEQ ID NO: 747042 - RNA, 19 nt, Artificial Sequence
  Description of Artificial Sequence: Synthetic oligonucleotide
  Sense strand starting at position 2311 of SEQ ID NO: 586824
uugaucuuucuuuggaaac

SEQ ID NO: 747043 - RNA, 19 nt, Artificial Sequence
  Description of Artificial Sequence: Synthetic oligonucleotide
  Antisense strand to SEQ ID NO: 747042
guuuccaaagaaagaucaa

SEQ ID NO: 747044 - RNA, 19 nt, Artificial Sequence
  Description of Artificial Sequence: Synthetic oligonucleotide
  Sense strand starting at position 2313 of SEQ ID NO: 586824
gaucuuucuuuggaaacgu

SEQ ID NO: 747045 - RNA, 19 nt, Artificial Sequence
  Description of Artificial Sequence: Synthetic oligonucleotide
  Antisense strand to SEQ ID NO: 747044
acguuuccaaagaaagauc

SEQ ID NO: 747046 - RNA, 19 nt, Artificial Sequence
  Description of Artificial Sequence: Synthetic oligonucleotide
  Sense strand starting at position 3325 of SEQ ID NO: 586824
gggaguguacagugagauc

SEQ ID NO: 747047 - RNA, 19 nt, Artificial Sequence
  Description of Artificial Sequence: Synthetic oligonucleotide
  Antisense strand to SEQ ID NO: 747046
gaucucacuguacacuccc

SEQ ID NO: 747048 - RNA, 19 nt, Artificial Sequence
  Description of Artificial Sequence: Synthetic oligonucleotide
  Sense strand starting at position 1 of SEQ ID NO: 586825
gccuguuccuuucuucuua

SEQ ID NO: 747049 - RNA, 19 nt, Artificial Sequence
  Description of Artificial Sequence: Synthetic oligonucleotide
  Antisense strand to SEQ ID NO: 747048
uaagaagaaaggaacaggc

SEQ ID NO: 747050 - RNA, 19 nt, Artificial Sequence
  Description of Artificial Sequence: Synthetic oligonucleotide
  Sense strand starting at position 328 of SEQ ID NO: 586827
guuagacucucauggguag

SEQ ID NO: 747051 - RNA, 19 nt, Artificial Sequence
  Description of Artificial Sequence: Synthetic oligonucleotide
  Antisense strand to SEQ ID NO: 747050
cuacccaugagagucuaac

SEQ ID NO: 747052 - RNA, 19 nt, Artificial Sequence
  Description of Artificial Sequence: Synthetic oligonucleotide
  Sense strand starting at position 914 of SEQ ID NO: 586827
gaacacuggccuggaagau

SEQ ID NO: 747053 - RNA, 19 nt, Artificial Sequence
  Description of Artificial Sequence: Synthetic oligonucleotide
  Antisense strand to SEQ ID NO: 747052
aucuuccaggccaguguuc

SEQ ID NO: 747054 - RNA, 19 nt, Artificial Sequence
  Description of Artificial Sequence: Synthetic oligonucleotide
  Sense strand starting at position 927 of SEQ ID NO: 586827
gaagauaagucuccugggu

SEQ ID NO: 747055 - RNA, 19 nt, Artificial Sequence
  Description of Artificial Sequence: Synthetic oligonucleotide
  Antisense strand to SEQ ID NO: 747054
acccaggagacuuaucuuc

SEQ ID NO: 747056 - RNA, 19 nt, Artificial Sequence
  Description of Artificial Sequence: Synthetic oligonucleotide
  Sense strand starting at position 1039 of SEQ ID NO: 586827
agcagagaaucccugcaga

SEQ ID NO: 747057 - RNA, 19 nt, Artificial Sequence
  Description of Artificial Sequence: Synthetic oligonucleotide
  Antisense strand to SEQ ID NO: 747056
ucugcagggauucucugcu

SEQ ID NO: 747058 - RNA, 19 nt, Artificial Sequence
  Description of Artificial Sequence: Synthetic oligonucleotide
  Sense strand starting at position 1100 of SEQ ID NO: 586827
gggugaucagcagacacuu

SEQ ID NO: 747059 - RNA, 19 nt, Artificial Sequence
  Description of Artificial Sequence: Synthetic oligonucleotide
  Antisense strand to SEQ ID NO: 747058
aagugucugcugaucaccc

SEQ ID NO: 747060 - RNA, 19 nt, Artificial Sequence
  Description of Artificial Sequence: Synthetic oligonucleotide
  Sense strand starting at position 1157 of SEQ ID NO: 586827
ggucgaaaucuggagcaca

SEQ ID NO: 747061 - RNA, 19 nt, Artificial Sequence
  Description of Artificial Sequence: Synthetic oligonucleotide
  Antisense strand to SEQ ID NO: 747060
ugugcuccagauuucgacc

SEQ ID NO: 747062 - RNA, 19 nt, Artificial Sequence
  Description of Artificial Sequence: Synthetic oligonucleotide
  Sense strand starting at position 2084 of SEQ ID NO: 586827
cgccguucccaggacaagu

SEQ ID NO: 747063 - RNA, 19 nt, Artificial Sequence
  Description of Artificial Sequence: Synthetic oligonucleotide
  Antisense strand to SEQ ID NO: 747062
acuuguccugggaacggcg

SEQ ID NO: 747064 - RNA, 19 nt, Artificial Sequence
  Description of Artificial Sequence: Synthetic oligonucleotide
  Sense strand starting at position 2701 of SEQ ID NO: 586827
auuccauccuggcgacaaa

SEQ ID NO: 747065 - RNA, 19 nt, Artificial Sequence
  Description of Artificial Sequence: Synthetic oligonucleotide
  Antisense strand to SEQ ID NO: 747064
uuugucgccaggauggaau

SEQ ID NO: 747066 - RNA, 19 nt, Artificial Sequence
  Description of Artificial Sequence: Synthetic oligonucleotide
  Sense strand starting at position 2964 of SEQ ID NO: 586827
agcccaaagugauuggguu

SEQ ID NO: 747067 - RNA, 19 nt, Artificial Sequence
  Description of Artificial Sequence: Synthetic oligonucleotide
  Antisense strand to SEQ ID NO: 747066
aacccaaucacuuugggcu

SEQ ID NO: 747068 - RNA, 19 nt, Artificial Sequence
  Description of Artificial Sequence: Synthetic oligonucleotide
  Sense strand starting at position 2965 of SEQ ID NO: 586827
gcccaaagugauuggguua

SEQ ID NO: 747069 - RNA, 19 nt, Artificial Sequence
  Description of Artificial Sequence: Synthetic oligonucleotide
  Antisense strand to SEQ ID NO: 747068
uaacccaaucacuuugggc

SEQ ID NO: 747070 - RNA, 19 nt, Artificial Sequence
  Description of Artificial Sequence: Synthetic oligonucleotide
  Sense strand starting at position 2970 of SEQ ID NO: 586827
aagugauuggguuacagcu

SEQ ID NO: 747071 - RNA, 19 nt, Artificial Sequence
  Description of Artificial Sequence: Synthetic oligonucleotide
  Antisense strand to SEQ ID NO: 747070
agcuguaacccaaucacuu

SEQ ID NO: 747072 - RNA, 19 nt, Artificial Sequence
  Description of Artificial Sequence: Synthetic oligonucleotide
  Sense strand starting at position 3034 of SEQ ID NO: 586827
aaaucaauacacgggaagu

SEQ ID NO: 747073 - RNA, 19 nt, Artificial Sequence
  Description of Artificial Sequence: Synthetic oligonucleotide
  Antisense strand to SEQ ID NO: 747072
acuucccguguauugauuu

SEQ ID NO: 747074 - RNA, 19 nt, Artificial Sequence
  Description of Artificial Sequence: Synthetic oligonucleotide
  Sense strand starting at position 3808 of SEQ ID NO: 586827
gucagagucugguuggaga

SEQ ID NO: 747075 - RNA, 19 nt, Artificial Sequence
  Description of Artificial Sequence: Synthetic oligonucleotide
  Antisense strand to SEQ ID NO: 747074
ucuccaaccagacucugac

SEQ ID NO: 747076 - RNA, 19 nt, Artificial Sequence
  Description of Artificial Sequence: Synthetic oligonucleotide
  Sense strand starting at position 20 of SEQ ID NO: 586828
auguauuaucucggcaagu

SEQ ID NO: 747077 - RNA, 19 nt, Artificial Sequence
  Description of Artificial Sequence: Synthetic oligonucleotide
  Antisense strand to SEQ ID NO: 747076
acuugccgagauaauacau

SEQ ID NO: 747078 - RNA, 19 nt, Artificial Sequence
  Description of Artificial Sequence: Synthetic oligonucleotide
  Sense strand starting at position 21 of SEQ ID NO: 586828
uguauuaucucggcaagug

SEQ ID NO: 747079 - RNA, 19 nt, Artificial Sequence
  Description of Artificial Sequence: Synthetic oligonucleotide
  Antisense strand to SEQ ID NO: 747078
cacuugccgagauaauaca

SEQ ID NO: 747080 - RNA, 19 nt, Artificial Sequence
  Description of Artificial Sequence: Synthetic oligonucleotide
  Sense strand starting at position 22 of SEQ ID NO: 586828
guauuaucucggcaaguga

SEQ ID NO: 747081 - RNA, 19 nt, Artificial Sequence
  Description of Artificial Sequence: Synthetic oligonucleotide
  Antisense strand to SEQ ID NO: 747080
ucacuugccgagauaauac

SEQ ID NO: 747082 - RNA, 19 nt, Artificial Sequence
  Description of Artificial Sequence: Synthetic oligonucleotide
  Sense strand starting at position 31 of SEQ ID NO: 586828
cggcaagugaaaugcagau

SEQ ID NO: 747083 - RNA, 19 nt, Artificial Sequence
  Description of Artificial Sequence: Synthetic oligonucleotide
  Antisense strand to SEQ ID NO: 747082
aucugcauuucacuugccg

SEQ ID NO: 747084 - RNA, 19 nt, Artificial Sequence
  Description of Artificial Sequence: Synthetic oligonucleotide
  Sense strand starting at position 320 of SEQ ID NO: 586828
acugcuauauugucaagua

SEQ ID NO: 747085 - RNA, 19 nt, Artificial Sequence
  Description of Artificial Sequence: Synthetic oligonucleotide
  Antisense strand to SEQ ID NO: 747084
uacuugacaauauagcagu

SEQ ID NO: 747086 - RNA, 19 nt, Artificial Sequence
  Description of Artificial Sequence: Synthetic oligonucleotide
  Sense strand starting at position 605 of SEQ ID NO: 586828
acagacaggucauaaauga

SEQ ID NO: 747087 - RNA, 19 nt, Artificial Sequence
  Description of Artificial Sequence: Synthetic oligonucleotide
  Antisense strand to SEQ ID NO: 747086
ucauuuaugaccugucugu

SEQ ID NO: 747088 - RNA, 19 nt, Artificial Sequence
  Description of Artificial Sequence: Synthetic oligonucleotide
  Sense strand starting at position 1246 of SEQ ID NO: 586828
cucuaauggugagggagua

SEQ ID NO: 747089 - RNA, 19 nt, Artificial Sequence
  Description of Artificial Sequence: Synthetic oligonucleotide
  Antisense strand to SEQ ID NO: 747088
uacucccucaccauuagag

SEQ ID NO: 747090 - RNA, 19 nt, Artificial Sequence
  Description of Artificial Sequence: Synthetic oligonucleotide
  Sense strand starting at position 1247 of SEQ ID NO: 586828
ucuaauggugagggaguaa

SEQ ID NO: 747091 - RNA, 19 nt, Artificial Sequence
  Description of Artificial Sequence: Synthetic oligonucleotide
  Antisense strand to SEQ ID NO: 747090
uuacucccucaccauuaga

SEQ ID NO: 747092 - RNA, 19 nt, Artificial Sequence
  Description of Artificial Sequence: Synthetic oligonucleotide
  Sense strand starting at position 1259 of SEQ ID NO: 586828
ggaguaaauaagugaccga

SEQ ID NO: 747093 - RNA, 19 nt, Artificial Sequence
  Description of Artificial Sequence: Synthetic oligonucleotide
  Antisense strand to SEQ ID NO: 747092
ucggucacuuauuuacucc

SEQ ID NO: 747094 - RNA, 19 nt, Artificial Sequence
  Description of Artificial Sequence: Synthetic oligonucleotide
  Sense strand starting at position 1262 of SEQ ID NO: 586828
guaaauaagugaccgauaa

SEQ ID NO: 747095 - RNA, 19 nt, Artificial Sequence
  Description of Artificial Sequence: Synthetic oligonucleotide
  Antisense strand to SEQ ID NO: 747094
uuaucggucacuuauuuac

SEQ ID NO: 747096 - RNA, 19 nt, Artificial Sequence
  Description of Artificial Sequence: Synthetic oligonucleotide
  Sense strand starting at position 1266 of SEQ ID NO: 586828
auaagugaccgauaaugcu

SEQ ID NO: 747097 - RNA, 19 nt, Artificial Sequence
  Description of Artificial Sequence: Synthetic oligonucleotide
  Antisense strand to SEQ ID NO: 747096
agcauuaucggucacuuau

SEQ ID NO: 747098 - RNA, 19 nt, Artificial Sequence
  Description of Artificial Sequence: Synthetic oligonucleotide
  Sense strand starting at position 1272 of SEQ ID NO: 586828
gaccgauaaugcuggagga

SEQ ID NO: 747099 - RNA, 19 nt, Artificial Sequence
  Description of Artificial Sequence: Synthetic oligonucleotide
  Antisense strand to SEQ ID NO: 747098
uccuccagcauuaucgguc

SEQ ID NO: 747100 - RNA, 19 nt, Artificial Sequence
  Description of Artificial Sequence: Synthetic oligonucleotide
  Sense strand starting at position 1273 of SEQ ID NO: 586828
accgauaaugcuggaggaa

SEQ ID NO: 747101 - RNA, 19 nt, Artificial Sequence
  Description of Artificial Sequence: Synthetic oligonucleotide
  Antisense strand to SEQ ID NO: 747100
uuccuccagcauuaucggu

SEQ ID NO: 747102 - RNA, 19 nt, Artificial Sequence
  Description of Artificial Sequence: Synthetic oligonucleotide
  Sense strand starting at position 1311 of SEQ ID NO: 586828
caguauagguuagaaugaa

SEQ ID NO: 747103 - RNA, 19 nt, Artificial Sequence
  Description of Artificial Sequence: Synthetic oligonucleotide
  Antisense strand to SEQ ID NO: 747102
uucauucuaaccuauacug

SEQ ID NO: 747104 - RNA, 19 nt, Artificial Sequence
  Description of Artificial Sequence: Synthetic oligonucleotide
  Sense strand starting at position 1375 of SEQ ID NO: 586828
ucauguaugugugcaggaa

SEQ ID NO: 747105 - RNA, 19 nt, Artificial Sequence
  Description of Artificial Sequence: Synthetic oligonucleotide
  Antisense strand to SEQ ID NO: 747104
uuccugcacacauacauga

SEQ ID NO: 747106 - RNA, 19 nt, Artificial Sequence
  Description of Artificial Sequence: Synthetic oligonucleotide
  Sense strand starting at position 1379 of SEQ ID NO: 586828
guaugugugcaggaaggaa

SEQ ID NO: 747107 - RNA, 19 nt, Artificial Sequence
  Description of Artificial Sequence: Synthetic oligonucleotide
  Antisense strand to SEQ ID NO: 747106
uuccuuccugcacacauac

SEQ ID NO: 747108 - RNA, 19 nt, Artificial Sequence
  Description of Artificial Sequence: Synthetic oligonucleotide
  Sense strand starting at position 1796 of SEQ ID NO: 586828
gguguugucacuuauuucu

SEQ ID NO: 747109 - RNA, 19 nt, Artificial Sequence
  Description of Artificial Sequence: Synthetic oligonucleotide
  Antisense strand to SEQ ID NO: 747108
agaaauaagugacaacacc

SEQ ID NO: 747110 - RNA, 19 nt, Artificial Sequence
  Description of Artificial Sequence: Synthetic oligonucleotide
  Sense strand starting at position 2062 of SEQ ID NO: 586828
uacaaagcucacuggugaa

SEQ ID NO: 747111 - RNA, 19 nt, Artificial Sequence
  Description of Artificial Sequence: Synthetic oligonucleotide
  Antisense strand to SEQ ID NO: 747110
uucaccagugagcuuugua

SEQ ID NO: 747112 - RNA, 19 nt, Artificial Sequence
  Description of Artificial Sequence: Synthetic oligonucleotide
  Sense strand starting at position 2066 of SEQ ID NO: 586828
aagcucacuggugaaguua

SEQ ID NO: 747113 - RNA, 19 nt, Artificial Sequence
  Description of Artificial Sequence: Synthetic oligonucleotide
  Antisense strand to SEQ ID NO: 747112
uaacuucaccagugagcuu

SEQ ID NO: 747114 - RNA, 19 nt, Artificial Sequence
  Description of Artificial Sequence: Synthetic oligonucleotide
  Sense strand starting at position 2074 of SEQ ID NO: 586828
uggugaaguuaaccaugaa

SEQ ID NO: 747115 - RNA, 19 nt, Artificial Sequence
  Description of Artificial Sequence: Synthetic oligonucleotide
  Antisense strand to SEQ ID NO: 747114
uucaugguuaacuucacca

SEQ ID NO: 747116 - RNA, 19 nt, Artificial Sequence
  Description of Artificial Sequence: Synthetic oligonucleotide
  Sense strand starting at position 2510 of SEQ ID NO: 586828
uggcuaucugcaugacuga

SEQ ID NO: 747117 - RNA, 19 nt, Artificial Sequence
  Description of Artificial Sequence: Synthetic oligonucleotide
  Antisense strand to SEQ ID NO: 747116
ucagucaugcagauagcca

SEQ ID NO: 747118 - RNA, 19 nt, Artificial Sequence
  Description of Artificial Sequence: Synthetic oligonucleotide
  Sense strand starting at position 2511 of SEQ ID NO: 586828
ggcuaucugcaugacugau

SEQ ID NO: 747119 - RNA, 19 nt, Artificial Sequence
  Description of Artificial Sequence: Synthetic oligonucleotide
  Antisense strand to SEQ ID NO: 747118
aucagucaugcagauagcc

SEQ ID NO: 747120 - RNA, 19 nt, Artificial Sequence
  Description of Artificial Sequence: Synthetic oligonucleotide
  Sense strand starting at position 2640 of SEQ ID NO: 586828
ggaucaaauuaguuuaacu

SEQ ID NO: 747121 - RNA, 19 nt, Artificial Sequence
  Description of Artificial Sequence: Synthetic oligonucleotide
  Antisense strand to SEQ ID NO: 747120
aguuaaacuaauuugaucc

SEQ ID NO: 747122 - RNA, 19 nt, Artificial Sequence
  Description of Artificial Sequence: Synthetic oligonucleotide
  Sense strand starting at position 3229 of SEQ ID NO: 586828
ggaagugcccaauaagcau

SEQ ID NO: 747123 - RNA, 19 nt, Artificial Sequence
  Description of Artificial Sequence: Synthetic oligonucleotide
  Antisense strand to SEQ ID NO: 747122
augcuuauugggcacuucc

SEQ ID NO: 747124 - RNA, 19 nt, Artificial Sequence
  Description of Artificial Sequence: Synthetic oligonucleotide
  Sense strand starting at position 3406 of SEQ ID NO: 586828
ggccaaaggagcugauaaa

SEQ ID NO: 747125 - RNA, 19 nt, Artificial Sequence
  Description of Artificial Sequence: Synthetic oligonucleotide
  Antisense strand to SEQ ID NO: 747124
uuuaucagcuccuuuggcc

SEQ ID NO: 747126 - RNA, 19 nt, Artificial Sequence
  Description of Artificial Sequence: Synthetic oligonucleotide
  Sense strand starting at position 3438 of SEQ ID NO: 586828
aguaauaacuuucuggguu

SEQ ID NO: 747127 - RNA, 19 nt, Artificial Sequence
  Description of Artificial Sequence: Synthetic oligonucleotide
  Antisense strand to SEQ ID NO: 747126
aacccagaaaguuauuacu

SEQ ID NO: 747128 - RNA, 19 nt, Artificial Sequence
  Description of Artificial Sequence: Synthetic oligonucleotide
  Sense strand starting at position 3442 of SEQ ID NO: 586828
auaacuuucuggguuaagu

SEQ ID NO: 747129 - RNA, 19 nt, Artificial Sequence
  Description of Artificial Sequence: Synthetic oligonucleotide
  Antisense strand to SEQ ID NO: 747128
acuuaacccagaaaguuau

SEQ ID NO: 747130 - RNA, 19 nt, Artificial Sequence
  Description of Artificial Sequence: Synthetic oligonucleotide
  Sense strand starting at position 3444 of SEQ ID NO: 586828
aacuuucuggguuaaguua

SEQ ID NO: 747131 - RNA, 19 nt, Artificial Sequence
  Description of Artificial Sequence: Synthetic oligonucleotide
  Antisense strand to SEQ ID NO: 747130
uaacuuaacccagaaaguu

SEQ ID NO: 747132 - RNA, 19 nt, Artificial Sequence
  Description of Artificial Sequence: Synthetic oligonucleotide
  Sense strand starting at position 3456 of SEQ ID NO: 586828
uaaguuaguccagaaagca

SEQ ID NO: 747133 - RNA, 19 nt, Artificial Sequence
  Description of Artificial Sequence: Synthetic oligonucleotide
  Antisense strand to SEQ ID NO: 747132
ugcuuucuggacuaacuua

SEQ ID NO: 747134 - RNA, 19 nt, Artificial Sequence
  Description of Artificial Sequence: Synthetic oligonucleotide
  Sense strand starting at position 3648 of SEQ ID NO: 586828
cuaguuuaauacuuggaaa

SEQ ID NO: 747135 - RNA, 19 nt, Artificial Sequence
  Description of Artificial Sequence: Synthetic oligonucleotide
  Antisense strand to SEQ ID NO: 747134
uuuccaaguauuaaacuag

SEQ ID NO: 747136 - RNA, 19 nt, Artificial Sequence
  Description of Artificial Sequence: Synthetic oligonucleotide
  Sense strand starting at position 3650 of SEQ ID NO: 586828
aguuuaauacuuggaaauc

SEQ ID NO: 747137 - RNA, 19 nt, Artificial Sequence
  Description of Artificial Sequence: Synthetic oligonucleotide
  Antisense strand to SEQ ID NO: 747136
gauuuccaaguauuaaacu

SEQ ID NO: 747138 - RNA, 19 nt, Artificial Sequence
  Description of Artificial Sequence: Synthetic oligonucleotide
  Sense strand starting at position 3651 of SEQ ID NO: 586828
guuuaauacuuggaaaucu

SEQ ID NO: 747139 - RNA, 19 nt, Artificial Sequence
  Description of Artificial Sequence: Synthetic oligonucleotide
  Antisense strand to SEQ ID NO: 747138
agauuuccaaguauuaaac

SEQ ID NO: 747140 - RNA, 19 nt, Artificial Sequence
  Description of Artificial Sequence: Synthetic oligonucleotide
  Sense strand starting at position 3851 of SEQ ID NO: 586828
augccauaguacguaugau

SEQ ID NO: 747141 - RNA, 19 nt, Artificial Sequence
  Description of Artificial Sequence: Synthetic oligonucleotide
  Antisense strand to SEQ ID NO: 747140
aucauacguacuauggcau

SEQ ID NO: 747142 - RNA, 19 nt, Artificial Sequence
  Description of Artificial Sequence: Synthetic oligonucleotide
  Sense strand starting at position 3852 of SEQ ID NO: 586828
ugccauaguacguaugaua

SEQ ID NO: 747143 - RNA, 19 nt, Artificial Sequence
  Description of Artificial Sequence: Synthetic oligonucleotide
  Antisense strand to SEQ ID NO: 747142
uaucauacguacuauggca

SEQ ID NO: 747144 - RNA, 19 nt, Artificial Sequence
  Description of Artificial Sequence: Synthetic oligonucleotide
  Sense strand starting at position 3859 of SEQ ID NO: 586828
guacguaugauaugugaca

SEQ ID NO: 747145 - RNA, 19 nt, Artificial Sequence
  Description of Artificial Sequence: Synthetic oligonucleotide
  Antisense strand to SEQ ID NO: 747144
ugucacauaucauacguac

SEQ ID NO: 747146 - RNA, 19 nt, Artificial Sequence
  Description of Artificial Sequence: Synthetic oligonucleotide
  Sense strand starting at position 3860 of SEQ ID NO: 586828
uacguaugauaugugacau

SEQ ID NO: 747147 - RNA, 19 nt, Artificial Sequence
  Description of Artificial Sequence: Synthetic oligonucleotide
  Antisense strand to SEQ ID NO: 747146
augucacauaucauacgua

SEQ ID NO: 747148 - RNA, 19 nt, Artificial Sequence
  Description of Artificial Sequence: Synthetic oligonucleotide
  Sense strand starting at position 3861 of SEQ ID NO: 586828
acguaugauaugugacaua

SEQ ID NO: 747149 - RNA, 19 nt, Artificial Sequence
  Description of Artificial Sequence: Synthetic oligonucleotide
  Antisense strand to SEQ ID NO: 747148
uaugucacauaucauacgu

SEQ ID NO: 747150 - RNA, 19 nt, Artificial Sequence
  Description of Artificial Sequence: Synthetic oligonucleotide
  Sense strand starting at position 3909 of SEQ ID NO: 586828
uacaguuuguguguauaca

SEQ ID NO: 747151 - RNA, 19 nt, Artificial Sequence
  Description of Artificial Sequence: Synthetic oligonucleotide
  Antisense strand to SEQ ID NO: 747150
uguauacacacaaacugua

SEQ ID NO: 747152 - RNA, 19 nt, Artificial Sequence
  Description of Artificial Sequence: Synthetic oligonucleotide
  Sense strand starting at position 3962 of SEQ ID NO: 586828
ucagucuucucgguccgaa

SEQ ID NO: 747153 - RNA, 19 nt, Artificial Sequence
  Description of Artificial Sequence: Synthetic oligonucleotide
  Antisense strand to SEQ ID NO: 747152
uucggaccgagaagacuga

SEQ ID NO: 747154 - RNA, 19 nt, Artificial Sequence
  Description of Artificial Sequence: Synthetic oligonucleotide
  Sense strand starting at position 3965 of SEQ ID NO: 586828
gucuucucgguccgaaagu

SEQ ID NO: 747155 - RNA, 19 nt, Artificial Sequence
  Description of Artificial Sequence: Synthetic oligonucleotide
  Antisense strand to SEQ ID NO: 747154
acuuucggaccgagaagac

SEQ ID NO: 747156 - RNA, 19 nt, Artificial Sequence
  Description of Artificial Sequence: Synthetic oligonucleotide
  Sense strand starting at position 337 of SEQ ID NO: 586829
cgcuguugcauuccagacu

SEQ ID NO: 747157 - RNA, 19 nt, Artificial Sequence
  Description of Artificial Sequence: Synthetic oligonucleotide
  Antisense strand to SEQ ID NO: 747156
agucuggaaugcaacagcg

SEQ ID NO: 747158 - RNA, 19 nt, Artificial Sequence
  Description of Artificial Sequence: Synthetic oligonucleotide
  Sense strand starting at position 441 of SEQ ID NO: 586829
guaguaauuagaugaguua

SEQ ID NO: 747159 - RNA, 19 nt, Artificial Sequence
  Description of Artificial Sequence: Synthetic oligonucleotide
  Antisense strand to SEQ ID NO: 747158
uaacucaucuaauuacuac

SEQ ID NO: 747160 - RNA, 19 nt, Artificial Sequence
  Description of Artificial Sequence: Synthetic oligonucleotide
  Sense strand starting at position 444 of SEQ ID NO: 586829
guaauuagaugaguuagac

SEQ ID NO: 747161 - RNA, 19 nt, Artificial Sequence
  Description of Artificial Sequence: Synthetic oligonucleotide
  Antisense strand to SEQ ID NO: 747160
gucuaacucaucuaauuac

SEQ ID NO: 747162 - RNA, 19 nt, Artificial Sequence
  Description of Artificial Sequence: Synthetic oligonucleotide
  Sense strand starting at position 542 of SEQ ID NO: 586829
cauuauacggcucauguuu

SEQ ID NO: 747163 - RNA, 19 nt, Artificial Sequence
  Description of Artificial Sequence: Synthetic oligonucleotide
  Antisense strand to SEQ ID NO: 747162
aaacaugagccguauaaug

SEQ ID NO: 747164 - RNA, 19 nt, Artificial Sequence
  Description of Artificial Sequence: Synthetic oligonucleotide
  Sense strand starting at position 563 of SEQ ID NO: 586829
ugugguuuguugguugaga

SEQ ID NO: 747165 - RNA, 19 nt, Artificial Sequence
  Description of Artificial Sequence: Synthetic oligonucleotide
  Antisense strand to SEQ ID NO: 747164
ucucaaccaacaaaccaca

SEQ ID NO: 747166 - RNA, 19 nt, Artificial Sequence
  Description of Artificial Sequence: Synthetic oligonucleotide
  Sense strand starting at position 564 of SEQ ID NO: 586829
gugguuuguugguugagac

SEQ ID NO: 747167 - RNA, 19 nt, Artificial Sequence
  Description of Artificial Sequence: Synthetic oligonucleotide
  Antisense strand to SEQ ID NO: 747166
gucucaaccaacaaaccac

SEQ ID NO: 747168 - RNA, 19 nt, Artificial Sequence
  Description of Artificial Sequence: Synthetic oligonucleotide
  Sense strand starting at position 565 of SEQ ID NO: 586829
ugguuuguugguugagaca

SEQ ID NO: 747169 - RNA, 19 nt, Artificial Sequence
  Description of Artificial Sequence: Synthetic oligonucleotide
  Antisense strand to SEQ ID NO: 747168
ugucucaaccaacaaacca

SEQ ID NO: 747170 - RNA, 19 nt, Artificial Sequence
  Description of Artificial Sequence: Synthetic oligonucleotide
  Sense strand starting at position 899 of SEQ ID NO: 586829
agccauaggaauugaguau

SEQ ID NO: 747171 - RNA, 19 nt, Artificial Sequence
  Description of Artificial Sequence: Synthetic oligonucleotide
  Antisense strand to SEQ ID NO: 747170
auacucaauuccuauggcu

SEQ ID NO: 747172 - RNA, 19 nt, Artificial Sequence
  Description of Artificial Sequence: Synthetic oligonucleotide
  Sense strand starting at position 906 of SEQ ID NO: 586829
ggaauugaguaugugagcu

SEQ ID NO: 747173 - RNA, 19 nt, Artificial Sequence
  Description of Artificial Sequence: Synthetic oligonucleotide
  Antisense strand to SEQ ID NO: 747172
agcucacauacucaauucc

SEQ ID NO: 747174 - RNA, 19 nt, Artificial Sequence
  Description of Artificial Sequence: Synthetic oligonucleotide
  Sense strand starting at position 910 of SEQ ID NO: 586829
uugaguaugugagcucuca

SEQ ID NO: 747175 - RNA, 19 nt, Artificial Sequence
  Description of Artificial Sequence: Synthetic oligonucleotide
  Antisense strand to SEQ ID NO: 747174
ugagagcucacauacucaa

SEQ ID NO: 747176 - RNA, 19 nt, Artificial Sequence
  Description of Artificial Sequence: Synthetic oligonucleotide
  Sense strand starting at position 1054 of SEQ ID NO: 586829
ggagauaagucuccugggu

SEQ ID NO: 747177 - RNA, 19 nt, Artificial Sequence
  Description of Artificial Sequence: Synthetic oligonucleotide
  Antisense strand to SEQ ID NO: 747176
acccaggagacuuaucucc

SEQ ID NO: 747178 - RNA, 19 nt, Artificial Sequence
  Description of Artificial Sequence: Synthetic oligonucleotide
  Sense strand starting at position 1058 of SEQ ID NO: 586829
auaagucuccuggguucua

SEQ ID NO: 747179 - RNA, 19 nt, Artificial Sequence
  Description of Artificial Sequence: Synthetic oligonucleotide
  Antisense strand to SEQ ID NO: 747178
uagaacccaggagacuuau

SEQ ID NO: 747180 - RNA, 19 nt, Artificial Sequence
  Description of Artificial Sequence: Synthetic oligonucleotide
  Sense strand starting at position 1163 of SEQ ID NO: 586829
agcagagaaucccugcaga

SEQ ID NO: 747181 - RNA, 19 nt, Artificial Sequence
  Description of Artificial Sequence: Synthetic oligonucleotide
  Antisense strand to SEQ ID NO: 747180
ucugcagggauucucugcu

SEQ ID NO: 747182 - RNA, 19 nt, Artificial Sequence
  Description of Artificial Sequence: Synthetic oligonucleotide
  Sense strand starting at position 1238 of SEQ ID NO: 586829
acacuuaagugagagaaua

SEQ ID NO: 747183 - RNA, 19 nt, Artificial Sequence
  Description of Artificial Sequence: Synthetic oligonucleotide
  Antisense strand to SEQ ID NO: 747182
uauucucucacuuaagugu

SEQ ID NO: 747184 - RNA, 19 nt, Artificial Sequence
  Description of Artificial Sequence: Synthetic oligonucleotide
  Sense strand starting at position 1457 of SEQ ID NO: 586829
acacaugucucuccggcaa

SEQ ID NO: 747185 - RNA, 19 nt, Artificial Sequence
  Description of Artificial Sequence: Synthetic oligonucleotide
  Antisense strand to SEQ ID NO: 747184
uugccggagagacaugugu

SEQ ID NO: 747186 - RNA, 19 nt, Artificial Sequence
  Description of Artificial Sequence: Synthetic oligonucleotide
  Sense strand starting at position 1932 of SEQ ID NO: 586829
gugauucucguccacuaga

SEQ ID NO: 747187 - RNA, 19 nt, Artificial Sequence
  Description of Artificial Sequence: Synthetic oligonucleotide
  Antisense strand to SEQ ID NO: 747186
ucuaguggacgagaaucac

SEQ ID NO: 747188 - RNA, 19 nt, Artificial Sequence
  Description of Artificial Sequence: Synthetic oligonucleotide
  Sense strand starting at position 2333 of SEQ ID NO: 586829
cggaguuucccauaaggag

SEQ ID NO: 747189 - RNA, 19 nt, Artificial Sequence
  Description of Artificial Sequence: Synthetic oligonucleotide
  Antisense strand to SEQ ID NO: 747188
cuccuuaugggaaacuccg

SEQ ID NO: 747190 - RNA, 19 nt, Artificial Sequence
  Description of Artificial Sequence: Synthetic oligonucleotide
  Sense strand starting at position 2372 of SEQ ID NO: 586829
cauggucacugcucugaaa

SEQ ID NO: 747191 - RNA, 19 nt, Artificial Sequence
  Description of Artificial Sequence: Synthetic oligonucleotide
  Antisense strand to SEQ ID NO: 747190
uuucagagcagugaccaug

SEQ ID NO: 747192 - RNA, 19 nt, Artificial Sequence
  Description of Artificial Sequence: Synthetic oligonucleotide
  Sense strand starting at position 2374 of SEQ ID NO: 586829
uggucacugcucugaaaug

SEQ ID NO: 747193 - RNA, 19 nt, Artificial Sequence
  Description of Artificial Sequence: Synthetic oligonucleotide
  Antisense strand to SEQ ID NO: 747192
cauuucagagcagugacca

SEQ ID NO: 747194 - RNA, 19 nt, Artificial Sequence
  Description of Artificial Sequence: Synthetic oligonucleotide
  Sense strand starting at position 2383 of SEQ ID NO: 586829
cucugaaaugcugagaagu

SEQ ID NO: 747195 - RNA, 19 nt, Artificial Sequence
  Description of Artificial Sequence: Synthetic oligonucleotide
  Antisense strand to SEQ ID NO: 747194
acuucucagcauuucagag

SEQ ID NO: 747196 - RNA, 19 nt, Artificial Sequence
  Description of Artificial Sequence: Synthetic oligonucleotide
  Sense strand starting at position 2825 of SEQ ID NO: 586829
aagagauaccugugauccu

SEQ ID NO: 747197 - RNA, 19 nt, Artificial Sequence
  Description of Artificial Sequence: Synthetic oligonucleotide
  Antisense strand to SEQ ID NO: 747196
aggaucacagguaucucuu

SEQ ID NO: 747198 - RNA, 19 nt, Artificial Sequence
  Description of Artificial Sequence: Synthetic oligonucleotide
  Sense strand starting at position 2854 of SEQ ID NO: 586829
ggaggauuauguuuagggu

SEQ ID NO: 747199 - RNA, 19 nt, Artificial Sequence
  Description of Artificial Sequence: Synthetic oligonucleotide
  Antisense strand to SEQ ID NO: 747198
acccuaaacauaauccucc

SEQ ID NO: 747200 - RNA, 19 nt, Artificial Sequence
  Description of Artificial Sequence: Synthetic oligonucleotide
  Sense strand starting at position 2855 of SEQ ID NO: 586829
gaggauuauguuuaggguu

SEQ ID NO: 747201 - RNA, 19 nt, Artificial Sequence
  Description of Artificial Sequence: Synthetic oligonucleotide
  Antisense strand to SEQ ID NO: 747200
aacccuaaacauaauccuc

SEQ ID NO: 747202 - RNA, 19 nt, Artificial Sequence
  Description of Artificial Sequence: Synthetic oligonucleotide
  Sense strand starting at position 2861 of SEQ ID NO: 586829
uauguuuaggguuagguua

SEQ ID NO: 747203 - RNA, 19 nt, Artificial Sequence
  Description of Artificial Sequence: Synthetic oligonucleotide
  Antisense strand to SEQ ID NO: 747202
uaaccuaacccuaaacaua

SEQ ID NO: 747204 - RNA, 19 nt, Artificial Sequence
  Description of Artificial Sequence: Synthetic oligonucleotide
  Sense strand starting at position 2872 of SEQ ID NO: 586829
uuagguuauguugaccaaa

SEQ ID NO: 747205 - RNA, 19 nt, Artificial Sequence
  Description of Artificial Sequence: Synthetic oligonucleotide
  Antisense strand to SEQ ID NO: 747204
uuuggucaacauaaccuaa

SEQ ID NO: 747206 - RNA, 19 nt, Artificial Sequence
  Description of Artificial Sequence: Synthetic oligonucleotide
  Sense strand starting at position 2983 of SEQ ID NO: 586829
gcccaaaguaguuggguua

SEQ ID NO: 747207 - RNA, 19 nt, Artificial Sequence
  Description of Artificial Sequence: Synthetic oligonucleotide
  Antisense strand to SEQ ID NO: 747206
uaacccaacuacuuugggc

SEQ ID NO: 747208 - RNA, 19 nt, Artificial Sequence
  Description of Artificial Sequence: Synthetic oligonucleotide
  Sense strand starting at position 3054 of SEQ ID NO: 586829
aucaauacaugggaaguau

SEQ ID NO: 747209 - RNA, 19 nt, Artificial Sequence
  Description of Artificial Sequence: Synthetic oligonucleotide
  Antisense strand to SEQ ID NO: 747208
auacuucccauguauugau

SEQ ID NO: 747210 - RNA, 19 nt, Artificial Sequence
  Description of Artificial Sequence: Synthetic oligonucleotide
  Sense strand starting at position 3137 of SEQ ID NO: 586829
gaguuaaguguuggcugaa

SEQ ID NO: 747211 - RNA, 19 nt, Artificial Sequence
  Description of Artificial Sequence: Synthetic oligonucleotide
  Antisense strand to SEQ ID NO: 747210
uucagccaacacuuaacuc

SEQ ID NO: 747212 - RNA, 19 nt, Artificial Sequence
  Description of Artificial Sequence: Synthetic oligonucleotide
  Sense strand starting at position 3138 of SEQ ID NO: 586829
aguuaaguguuggcugaac

SEQ ID NO: 747213 - RNA, 19 nt, Artificial Sequence
  Description of Artificial Sequence: Synthetic oligonucleotide
  Antisense strand to SEQ ID NO: 747212
guucagccaacacuuaacu

SEQ ID NO: 747214 - RNA, 19 nt, Artificial Sequence
  Description of Artificial Sequence: Synthetic oligonucleotide
  Sense strand starting at position 3140 of SEQ ID NO: 586829
uuaaguguuggcugaacag

SEQ ID NO: 747215 - RNA, 19 nt, Artificial Sequence
  Description of Artificial Sequence: Synthetic oligonucleotide
  Antisense strand to SEQ ID NO: 747214
cuguucagccaacacuuaa

SEQ ID NO: 747216 - RNA, 19 nt, Artificial Sequence
  Description of Artificial Sequence: Synthetic oligonucleotide
  Sense strand starting at position 3797 of SEQ ID NO: 586829
gggacugcuaucugucaug

SEQ ID NO: 747217 - RNA, 19 nt, Artificial Sequence
  Description of Artificial Sequence: Synthetic oligonucleotide
  Antisense strand to SEQ ID NO: 747216
caugacagauagcaguccc

SEQ ID NO: 747218 - RNA, 19 nt, Artificial Sequence
  Description of Artificial Sequence: Synthetic oligonucleotide
  Sense strand starting at position 3825 of SEQ ID NO: 586829
aucagagucugguuggaga

SEQ ID NO: 747219 - RNA, 19 nt, Artificial Sequence
  Description of Artificial Sequence: Synthetic oligonucleotide
  Antisense strand to SEQ ID NO: 747218
ucuccaaccagacucugau

SEQ ID NO: 747220 - RNA, 19 nt, Artificial Sequence
  Description of Artificial Sequence: Synthetic oligonucleotide
  Sense strand starting at position 3832 of SEQ ID NO: 586829
ucugguuggagauggguau

SEQ ID NO: 747221 - RNA, 19 nt, Artificial Sequence
  Description of Artificial Sequence: Synthetic oligonucleotide
  Antisense strand to SEQ ID NO: 747220
auacccaucuccaaccaga

SEQ ID NO: 747222 - RNA, 19 nt, Artificial Sequence
  Description of Artificial Sequence: Synthetic oligonucleotide
  Sense strand starting at position 3836 of SEQ ID NO: 586829
guuggagauggguaucuua

SEQ ID NO: 747223 - RNA, 19 nt, Artificial Sequence
  Description of Artificial Sequence: Synthetic oligonucleotide
  Antisense strand to SEQ ID NO: 747222
uaagauacccaucuccaac

SEQ ID NO: 747224 - RNA, 19 nt, Artificial Sequence
  Description of Artificial Sequence: Synthetic oligonucleotide
  Sense strand starting at position 3843 of SEQ ID NO: 586829
auggguaucuuacugauaa

SEQ ID NO: 747225 - RNA, 19 nt, Artificial Sequence
  Description of Artificial Sequence: Synthetic oligonucleotide
  Antisense strand to SEQ ID NO: 747224
uuaucaguaagauacccau

SEQ ID NO: 747226 - RNA, 19 nt, Artificial Sequence
  Description of Artificial Sequence: Synthetic oligonucleotide
  Sense strand starting at position 3874 of SEQ ID NO: 586829
uugucaguccuaugauguc

SEQ ID NO: 747227 - RNA, 19 nt, Artificial Sequence
  Description of Artificial Sequence: Synthetic oligonucleotide
  Antisense strand to SEQ ID NO: 747226
gacaucauaggacugacaa

SEQ ID NO: 747228 - RNA, 19 nt, Artificial Sequence
  Description of Artificial Sequence: Synthetic oligonucleotide
  Sense strand starting at position 3880 of SEQ ID NO: 586829
guccuaugaugucuauucu

SEQ ID NO: 747229 - RNA, 19 nt, Artificial Sequence
  Description of Artificial Sequence: Synthetic oligonucleotide
  Antisense strand to SEQ ID NO: 747228
agaauagacaucauaggac

SEQ ID NO: 747230 - RNA, 19 nt, Artificial Sequence
  Description of Artificial Sequence: Synthetic oligonucleotide
  Sense strand starting at position 3881 of SEQ ID NO: 586829
uccuaugaugucuauucua

SEQ ID NO: 747231 - RNA, 19 nt, Artificial Sequence
  Description of Artificial Sequence: Synthetic oligonucleotide
  Antisense strand to SEQ ID NO: 747230
uagaauagacaucauagga

SEQ ID NO: 747232 - RNA, 19 nt, Artificial Sequence
  Description of Artificial Sequence: Synthetic oligonucleotide
  Sense strand starting at position 3942 of SEQ ID NO: 586829
ggaggagaauuaugacaag

SEQ ID NO: 747233 - RNA, 19 nt, Artificial Sequence
  Description of Artificial Sequence: Synthetic oligonucleotide
  Antisense strand to SEQ ID NO: 747232
cuugucauaauucuccucc

SEQ ID NO: 747234 - RNA, 19 nt, Artificial Sequence
  Description of Artificial Sequence: Synthetic oligonucleotide
  Sense strand starting at position 3945 of SEQ ID NO: 586829
ggagaauuaugacaaggca

SEQ ID NO: 747235 - RNA, 19 nt, Artificial Sequence
  Description of Artificial Sequence: Synthetic oligonucleotide
  Antisense strand to SEQ ID NO: 747234
ugccuugucauaauucucc

SEQ ID NO: 747236 - RNA, 19 nt, Artificial Sequence
  Description of Artificial Sequence: Synthetic oligonucleotide
  Sense strand starting at position 109 of SEQ ID NO: 586830
uuuguuguuguagagaaca

SEQ ID NO: 747237 - RNA, 19 nt, Artificial Sequence
  Description of Artificial Sequence: Synthetic oligonucleotide
  Antisense strand to SEQ ID NO: 747236
uguucucuacaacaacaaa

SEQ ID NO: 747238 - RNA, 19 nt, Artificial Sequence
  Description of Artificial Sequence: Synthetic oligonucleotide
  Sense strand starting at position 121 of SEQ ID NO: 586830
gagaacacgcccugaacaa

SEQ ID NO: 747239 - RNA, 19 nt, Artificial Sequence
  Description of Artificial Sequence: Synthetic oligonucleotide
  Antisense strand to SEQ ID NO: 747238
uuguucagggcguguucuc

SEQ ID NO: 747240 - RNA, 19 nt, Artificial Sequence
  Description of Artificial Sequence: Synthetic oligonucleotide
  Sense strand starting at position 176 of SEQ ID NO: 586830
aguguccaucccgauaaau

SEQ ID NO: 747241 - RNA, 19 nt, Artificial Sequence
  Description of Artificial Sequence: Synthetic oligonucleotide
  Antisense strand to SEQ ID NO: 747240
auuuaucgggauggacacu

SEQ ID NO: 747242 - RNA, 19 nt, Artificial Sequence
  Description of Artificial Sequence: Synthetic oligonucleotide
  Sense strand starting at position 178 of SEQ ID NO: 586830
uguccaucccgauaaauga

SEQ ID NO: 747243 - RNA, 19 nt, Artificial Sequence
  Description of Artificial Sequence: Synthetic oligonucleotide
  Antisense strand to SEQ ID NO: 747242
ucauuuaucgggauggaca

SEQ ID NO: 747244 - RNA, 19 nt, Artificial Sequence
  Description of Artificial Sequence: Synthetic oligonucleotide
  Sense strand starting at position 308 of SEQ ID NO: 586830
accucaaacuugucuguau

SEQ ID NO: 747245 - RNA, 19 nt, Artificial Sequence
  Description of Artificial Sequence: Synthetic oligonucleotide
  Antisense strand to SEQ ID NO: 747244
auacagacaaguuugaggu

SEQ ID NO: 747246 - RNA, 19 nt, Artificial Sequence
  Description of Artificial Sequence: Synthetic oligonucleotide
  Sense strand starting at position 322 of SEQ ID NO: 586830
uguauccuuccagauguag

SEQ ID NO: 747247 - RNA, 19 nt, Artificial Sequence
  Description of Artificial Sequence: Synthetic oligonucleotide
  Antisense strand to SEQ ID NO: 747246
cuacaucuggaaggauaca

SEQ ID NO: 747248 - RNA, 19 nt, Artificial Sequence
  Description of Artificial Sequence: Synthetic oligonucleotide
  Sense strand starting at position 406 of SEQ ID NO: 586830
uuccauuuccauugcugua

SEQ ID NO: 747249 - RNA, 19 nt, Artificial Sequence
  Description of Artificial Sequence: Synthetic oligonucleotide
  Antisense strand to SEQ ID NO: 747248
uacagcaauggaaauggaa

SEQ ID NO: 747250 - RNA, 19 nt, Artificial Sequence
  Description of Artificial Sequence: Synthetic oligonucleotide
  Sense strand starting at position 513 of SEQ ID NO: 586830
gucccaaugccuuauagua

SEQ ID NO: 747251 - RNA, 19 nt, Artificial Sequence
  Description of Artificial Sequence: Synthetic oligonucleotide
  Antisense strand to SEQ ID NO: 747250
uacuauaaggcauugggac

SEQ ID NO: 747252 - RNA, 19 nt, Artificial Sequence
  Description of Artificial Sequence: Synthetic oligonucleotide
  Sense strand starting at position 2138 of SEQ ID NO: 586830
caaguuugccucuggagag

SEQ ID NO: 747253 - RNA, 19 nt, Artificial Sequence
  Description of Artificial Sequence: Synthetic oligonucleotide
  Antisense strand to SEQ ID NO: 747252
cucuccagaggcaaacuug

SEQ ID NO: 747254 - RNA, 19 nt, Artificial Sequence
  Description of Artificial Sequence: Synthetic oligonucleotide
  Sense strand starting at position 2303 of SEQ ID NO: 586830
ugugaugucguucauauac

SEQ ID NO: 747255 - RNA, 19 nt, Artificial Sequence
  Description of Artificial Sequence: Synthetic oligonucleotide
  Antisense strand to SEQ ID NO: 747254
guauaugaacgacaucaca

SEQ ID NO: 747256 - RNA, 19 nt, Artificial Sequence
  Description of Artificial Sequence: Synthetic oligonucleotide
  Sense strand starting at position 2332 of SEQ ID NO: 586830
agcaacuugaaguguagaa

SEQ ID NO: 747257 - RNA, 19 nt, Artificial Sequence
  Description of Artificial Sequence: Synthetic oligonucleotide
  Antisense strand to SEQ ID NO: 747256
uucuacacuucaaguugcu

SEQ ID NO: 747258 - RNA, 19 nt, Artificial Sequence
  Description of Artificial Sequence: Synthetic oligonucleotide
  Sense strand starting at position 2428 of SEQ ID NO: 586830
ggaagaagcuuuguacccu

SEQ ID NO: 747259 - RNA, 19 nt, Artificial Sequence
  Description of Artificial Sequence: Synthetic oligonucleotide
  Antisense strand to SEQ ID NO: 747258
aggguacaaagcuucuucc

SEQ ID NO: 747260 - RNA, 19 nt, Artificial Sequence
  Description of Artificial Sequence: Synthetic oligonucleotide
  Sense strand starting at position 2551 of SEQ ID NO: 586830
uggcaucacuuagcaugau

SEQ ID NO: 747261 - RNA, 19 nt, Artificial Sequence
  Description of Artificial Sequence: Synthetic oligonucleotide
  Antisense strand to SEQ ID NO: 747260
aucaugcuaagugaugcca

SEQ ID NO: 747262 - RNA, 19 nt, Artificial Sequence
  Description of Artificial Sequence: Synthetic oligonucleotide
  Sense strand starting at position 2555 of SEQ ID NO: 586830
aucacuuagcaugaugauu

SEQ ID NO: 747263 - RNA, 19 nt, Artificial Sequence
  Description of Artificial Sequence: Synthetic oligonucleotide
  Antisense strand to SEQ ID NO: 747262
aaucaucaugcuaagugau

SEQ ID NO: 747264 - RNA, 19 nt, Artificial Sequence
  Description of Artificial Sequence: Synthetic oligonucleotide
  Sense strand starting at position 2696 of SEQ ID NO: 586830
gcauguuugggcuaucaug

SEQ ID NO: 747265 - RNA, 19 nt, Artificial Sequence
  Description of Artificial Sequence: Synthetic oligonucleotide
  Antisense strand to SEQ ID NO: 747264
caugauagcccaaacaugc

SEQ ID NO: 747266 - RNA, 19 nt, Artificial Sequence
  Description of Artificial Sequence: Synthetic oligonucleotide
  Sense strand starting at position 2783 of SEQ ID NO: 586830
ugcagcugggaguagaauu

SEQ ID NO: 747267 - RNA, 19 nt, Artificial Sequence
  Description of Artificial Sequence: Synthetic oligonucleotide
  Antisense strand to SEQ ID NO: 747266
aauucuacucccagcugca

SEQ ID NO: 747268 - RNA, 19 nt, Artificial Sequence
  Description of Artificial Sequence: Synthetic oligonucleotide
  Sense strand starting at position 2805 of SEQ ID NO: 586830
gggucugugguuaguccau

SEQ ID NO: 747269 - RNA, 19 nt, Artificial Sequence
  Description of Artificial Sequence: Synthetic oligonucleotide
  Antisense strand to SEQ ID NO: 747268
auggacuaaccacagaccc

SEQ ID NO: 747270 - RNA, 19 nt, Artificial Sequence
  Description of Artificial Sequence: Synthetic oligonucleotide
  Sense strand starting at position 2814 of SEQ ID NO: 586830
guuaguccauguuuaagag

SEQ ID NO: 747271 - RNA, 19 nt, Artificial Sequence
  Description of Artificial Sequence: Synthetic oligonucleotide
  Antisense strand to SEQ ID NO: 747270
cucuuaaacauggacuaac

SEQ ID NO: 747272 - RNA, 19 nt, Artificial Sequence
  Description of Artificial Sequence: Synthetic oligonucleotide
  Sense strand starting at position 2879 of SEQ ID NO: 586830
ccagcauguugcucuauuu

SEQ ID NO: 747273 - RNA, 19 nt, Artificial Sequence
  Description of Artificial Sequence: Synthetic oligonucleotide
  Antisense strand to SEQ ID NO: 747272
aaauagagcaacaugcugg

SEQ ID NO: 747274 - RNA, 19 nt, Artificial Sequence
  Description of Artificial Sequence: Synthetic oligonucleotide
  Sense strand starting at position 2923 of SEQ ID NO: 586830
guauaauaauaccugcaga

SEQ ID NO: 747275 - RNA, 19 nt, Artificial Sequence
  Description of Artificial Sequence: Synthetic oligonucleotide
  Antisense strand to SEQ ID NO: 747274
ucugcagguauuauuauac

SEQ ID NO: 747276 - RNA, 19 nt, Artificial Sequence
  Description of Artificial Sequence: Synthetic oligonucleotide
  Sense strand starting at position 3063 of SEQ ID NO: 586830
uuuauucuucuagaauggu

SEQ ID NO: 747277 - RNA, 19 nt, Artificial Sequence
  Description of Artificial Sequence: Synthetic oligonucleotide
  Antisense strand to SEQ ID NO: 747276
accauucuagaagaauaaa

SEQ ID NO: 747278 - RNA, 19 nt, Artificial Sequence
  Description of Artificial Sequence: Synthetic oligonucleotide
  Sense strand starting at position 3066 of SEQ ID NO: 586830
auucuucuagaaugguuau

SEQ ID NO: 747279 - RNA, 19 nt, Artificial Sequence
  Description of Artificial Sequence: Synthetic oligonucleotide
  Antisense strand to SEQ ID NO: 747278
auaaccauucuagaagaau

SEQ ID NO: 747280 - RNA, 19 nt, Artificial Sequence
  Description of Artificial Sequence: Synthetic oligonucleotide
  Sense strand starting at position 3069 of SEQ ID NO: 586830
cuucuagaaugguuauuaa

SEQ ID NO: 747281 - RNA, 19 nt, Artificial Sequence
  Description of Artificial Sequence: Synthetic oligonucleotide
  Antisense strand to SEQ ID NO: 747280
uuaauaaccauucuagaag

SEQ ID NO: 747282 - RNA, 19 nt, Artificial Sequence
  Description of Artificial Sequence: Synthetic oligonucleotide
  Sense strand starting at position 3072 of SEQ ID NO: 586830
cuagaaugguuauuaaugu

SEQ ID NO: 747283 - RNA, 19 nt, Artificial Sequence
  Description of Artificial Sequence: Synthetic oligonucleotide
  Antisense strand to SEQ ID NO: 747282
acauuaauaaccauucuag

SEQ ID NO: 747284 - RNA, 19 nt, Artificial Sequence
  Description of Artificial Sequence: Synthetic oligonucleotide
  Sense strand starting at position 3114 of SEQ ID NO: 586830
aggaaaugguguuuguaca

SEQ ID NO: 747285 - RNA, 19 nt, Artificial Sequence
  Description of Artificial Sequence: Synthetic oligonucleotide
  Antisense strand to SEQ ID NO: 747284
uguacaaacaccauuuccu

SEQ ID NO: 747286 - RNA, 19 nt, Artificial Sequence
  Description of Artificial Sequence: Synthetic oligonucleotide
  Sense strand starting at position 3115 of SEQ ID NO: 586830
ggaaaugguguuuguacac

SEQ ID NO: 747287 - RNA, 19 nt, Artificial Sequence
  Description of Artificial Sequence: Synthetic oligonucleotide
  Antisense strand to SEQ ID NO: 747286
guguacaaacaccauuucc

SEQ ID NO: 747288 - RNA, 19 nt, Artificial Sequence
  Description of Artificial Sequence: Synthetic oligonucleotide
  Sense strand starting at position 3122 of SEQ ID NO: 586830
guguuuguacaccacaacu

SEQ ID NO: 747289 - RNA, 19 nt, Artificial Sequence
  Description of Artificial Sequence: Synthetic oligonucleotide
  Antisense strand to SEQ ID NO: 747288
aguugugguguacaaacac

SEQ ID NO: 747290 - RNA, 19 nt, Artificial Sequence
  Description of Artificial Sequence: Synthetic oligonucleotide
  Sense strand starting at position 3124 of SEQ ID NO: 586830
guuuguacaccacaacuua

SEQ ID NO: 747291 - RNA, 19 nt, Artificial Sequence
  Description of Artificial Sequence: Synthetic oligonucleotide
  Antisense strand to SEQ ID NO: 747290
uaaguugugguguacaaac

SEQ ID NO: 747292 - RNA, 19 nt, Artificial Sequence
  Description of Artificial Sequence: Synthetic oligonucleotide
  Sense strand starting at position 3135 of SEQ ID NO: 586830
acaacuuauguuugagaac

SEQ ID NO: 747293 - RNA, 19 nt, Artificial Sequence
  Description of Artificial Sequence: Synthetic oligonucleotide
  Antisense strand to SEQ ID NO: 747292
guucucaaacauaaguugu

SEQ ID NO: 747294 - RNA, 19 nt, Artificial Sequence
  Description of Artificial Sequence: Synthetic oligonucleotide
  Sense strand starting at position 3264 of SEQ ID NO: 586830
cuuguaauauguguauaug

SEQ ID NO: 747295 - RNA, 19 nt, Artificial Sequence
  Description of Artificial Sequence: Synthetic oligonucleotide
  Antisense strand to SEQ ID NO: 747294
cauauacacauauuacaag

SEQ ID NO: 747296 - RNA, 19 nt, Artificial Sequence
  Description of Artificial Sequence: Synthetic oligonucleotide
  Sense strand starting at position 3267 of SEQ ID NO: 586830
guaauauguguauauggag

SEQ ID NO: 747297 - RNA, 19 nt, Artificial Sequence
  Description of Artificial Sequence: Synthetic oligonucleotide
  Antisense strand to SEQ ID NO: 747296
cuccauauacacauauuac

SEQ ID NO: 747298 - RNA, 19 nt, Artificial Sequence
  Description of Artificial Sequence: Synthetic oligonucleotide
  Sense strand starting at position 3274 of SEQ ID NO: 586830
guguauauggaguagaaug

SEQ ID NO: 747299 - RNA, 19 nt, Artificial Sequence
  Description of Artificial Sequence: Synthetic oligonucleotide
  Antisense strand to SEQ ID NO: 747298
cauucuacuccauauacac

SEQ ID NO: 747300 - RNA, 19 nt, Artificial Sequence
  Description of Artificial Sequence: Synthetic oligonucleotide
  Sense strand starting at position 3406 of SEQ ID NO: 586830
gacagacugcucuggagag

SEQ ID NO: 747301 - RNA, 19 nt, Artificial Sequence
  Description of Artificial Sequence: Synthetic oligonucleotide
  Antisense strand to SEQ ID NO: 747300
cucuccagagcagucuguc

SEQ ID NO: 747302 - RNA, 19 nt, Artificial Sequence
  Description of Artificial Sequence: Synthetic oligonucleotide
  Sense strand starting at position 3450 of SEQ ID NO: 586830
acacuugaguggguccaau

SEQ ID NO: 747303 - RNA, 19 nt, Artificial Sequence
  Description of Artificial Sequence: Synthetic oligonucleotide
  Antisense strand to SEQ ID NO: 747302
auuggacccacucaagugu

SEQ ID NO: 747304 - RNA, 19 nt, Artificial Sequence
  Description of Artificial Sequence: Synthetic oligonucleotide
  Sense strand starting at position 3596 of SEQ ID NO: 586830
cacgaaaguucuguacuuc

SEQ ID NO: 747305 - RNA, 19 nt, Artificial Sequence
  Description of Artificial Sequence: Synthetic oligonucleotide
  Antisense strand to SEQ ID NO: 747304
gaaguacagaacuuucgug

SEQ ID NO: 747306 - RNA, 19 nt, Artificial Sequence
  Description of Artificial Sequence: Synthetic oligonucleotide
  Sense strand starting at position 3622 of SEQ ID NO: 586830
ggcugauuaucagcugaaa

SEQ ID NO: 747307 - RNA, 19 nt, Artificial Sequence
  Description of Artificial Sequence: Synthetic oligonucleotide
  Antisense strand to SEQ ID NO: 747306
uuucagcugauaaucagcc

SEQ ID NO: 747308 - RNA, 19 nt, Artificial Sequence
  Description of Artificial Sequence: Synthetic oligonucleotide
  Sense strand starting at position 3795 of SEQ ID NO: 586830
gucauuucuugauaaagau

SEQ ID NO: 747309 - RNA, 19 nt, Artificial Sequence
  Description of Artificial Sequence: Synthetic oligonucleotide
  Antisense strand to SEQ ID NO: 747308
aucuuuaucaagaaaugac

SEQ ID NO: 747310 - RNA, 19 nt, Artificial Sequence
  Description of Artificial Sequence: Synthetic oligonucleotide
  Sense strand starting at position 3838 of SEQ ID NO: 586830
gccucuuuagaugguauua

SEQ ID NO: 747311 - RNA, 19 nt, Artificial Sequence
  Description of Artificial Sequence: Synthetic oligonucleotide
  Antisense strand to SEQ ID NO: 747310
uaauaccaucuaaagaggc

SEQ ID NO: 747312 - RNA, 19 nt, Artificial Sequence
  Description of Artificial Sequence: Synthetic oligonucleotide
  Sense strand starting at position 3848 of SEQ ID NO: 586830
augguauuaucauuggagu

SEQ ID NO: 747313 - RNA, 19 nt, Artificial Sequence
  Description of Artificial Sequence: Synthetic oligonucleotide
  Antisense strand to SEQ ID NO: 747312
acuccaaugauaauaccau

SEQ ID NO: 747314 - RNA, 19 nt, Artificial Sequence
  Description of Artificial Sequence: Synthetic oligonucleotide
  Sense strand starting at position 3849 of SEQ ID NO: 586830
ugguauuaucauuggagug

SEQ ID NO: 747315 - RNA, 19 nt, Artificial Sequence
  Description of Artificial Sequence: Synthetic oligonucleotide
  Antisense strand to SEQ ID NO: 747314
cacuccaaugauaauacca

SEQ ID NO: 747316 - RNA, 19 nt, Artificial Sequence
  Description of Artificial Sequence: Synthetic oligonucleotide
  Sense strand starting at position 41 of SEQ ID NO: 586831
ccuugaaaugaucagcauu

SEQ ID NO: 747317 - RNA, 19 nt, Artificial Sequence
  Description of Artificial Sequence: Synthetic oligonucleotide
  Antisense strand to SEQ ID NO: 747316
aaugcugaucauuucaagg

SEQ ID NO: 747318 - RNA, 19 nt, Artificial Sequence
  Description of Artificial Sequence: Synthetic oligonucleotide
  Sense strand starting at position 43 of SEQ ID NO: 586831
uugaaaugaucagcauuaa

SEQ ID NO: 747319 - RNA, 19 nt, Artificial Sequence
  Description of Artificial Sequence: Synthetic oligonucleotide
  Antisense strand to SEQ ID NO: 747318
uuaaugcugaucauuucaa

SEQ ID NO: 747320 - RNA, 19 nt, Artificial Sequence
  Description of Artificial Sequence: Synthetic oligonucleotide
  Sense strand starting at position 65 of SEQ ID NO: 586831
cccuguuauuagguucuuu

SEQ ID NO: 747321 - RNA, 19 nt, Artificial Sequence
  Description of Artificial Sequence: Synthetic oligonucleotide
  Antisense strand to SEQ ID NO: 747320
aaagaaccuaauaacaggg

SEQ ID NO: 747322 - RNA, 19 nt, Artificial Sequence
  Description of Artificial Sequence: Synthetic oligonucleotide
  Sense strand starting at position 393 of SEQ ID NO: 586831
acaggauucuagcaguaag

SEQ ID NO: 747323 - RNA, 19 nt, Artificial Sequence
  Description of Artificial Sequence: Synthetic oligonucleotide
  Antisense strand to SEQ ID NO: 747322
cuuacugcuagaauccugu

SEQ ID NO: 747324 - RNA, 19 nt, Artificial Sequence
  Description of Artificial Sequence: Synthetic oligonucleotide
  Sense strand starting at position 3745 of SEQ ID NO: 586831
ggguacagauguccugaaa

SEQ ID NO: 747325 - RNA, 19 nt, Artificial Sequence
  Description of Artificial Sequence: Synthetic oligonucleotide
  Antisense strand to SEQ ID NO: 747324
uuucaggacaucuguaccc

SEQ ID NO: 747326 - RNA, 19 nt, Artificial Sequence
  Description of Artificial Sequence: Synthetic oligonucleotide
  Sense strand starting at position 231 of SEQ ID NO: 586832
ggaacucucucaguucuuu

SEQ ID NO: 747327 - RNA, 19 nt, Artificial Sequence
  Description of Artificial Sequence: Synthetic oligonucleotide
  Antisense strand to SEQ ID NO: 747326
aaagaacugagagaguucc

SEQ ID NO: 747328 - RNA, 19 nt, Artificial Sequence
  Description of Artificial Sequence: Synthetic oligonucleotide
  Sense strand starting at position 405 of SEQ ID NO: 586832
ggauuuggcuugcuccuga

SEQ ID NO: 747329 - RNA, 19 nt, Artificial Sequence
  Description of Artificial Sequence: Synthetic oligonucleotide
  Antisense strand to SEQ ID NO: 747328
ucaggagcaagccaaaucc

SEQ ID NO: 747330 - RNA, 19 nt, Artificial Sequence
  Description of Artificial Sequence: Synthetic oligonucleotide
  Sense strand starting at position 421 of SEQ ID NO: 586832
ugaugcaggccucaugaua

SEQ ID NO: 747331 - RNA, 19 nt, Artificial Sequence
  Description of Artificial Sequence: Synthetic oligonucleotide
  Antisense strand to SEQ ID NO: 747330
uaucaugaggccugcauca

SEQ ID NO: 747332 - RNA, 19 nt, Artificial Sequence
  Description of Artificial Sequence: Synthetic oligonucleotide
  Sense strand starting at position 489 of SEQ ID NO: 586832
cagggaguuuguuccauga

SEQ ID NO: 747333 - RNA, 19 nt, Artificial Sequence
  Description of Artificial Sequence: Synthetic oligonucleotide
  Antisense strand to SEQ ID NO: 747332
ucauggaacaaacucccug

SEQ ID NO: 747334 - RNA, 19 nt, Artificial Sequence
  Description of Artificial Sequence: Synthetic oligonucleotide
  Sense strand starting at position 568 of SEQ ID NO: 586832
cuaggugaugcucaggcau

SEQ ID NO: 747335 - RNA, 19 nt, Artificial Sequence
  Description of Artificial Sequence: Synthetic oligonucleotide
  Antisense strand to SEQ ID NO: 747334
augccugagcaucaccuag

SEQ ID NO: 747336 - RNA, 19 nt, Artificial Sequence
  Description of Artificial Sequence: Synthetic oligonucleotide
  Sense strand starting at position 741 of SEQ ID NO: 586832
ccaccagcacugugauuaa

SEQ ID NO: 747337 - RNA, 19 nt, Artificial Sequence
  Description of Artificial Sequence: Synthetic oligonucleotide
  Antisense strand to SEQ ID NO: 747336
uuaaucacagugcuggugg

SEQ ID NO: 747338 - RNA, 19 nt, Artificial Sequence
  Description of Artificial Sequence: Synthetic oligonucleotide
  Sense strand starting at position 744 of SEQ ID NO: 586832
ccagcacugugauuaauaa

SEQ ID NO: 747339 - RNA, 19 nt, Artificial Sequence
  Description of Artificial Sequence: Synthetic oligonucleotide
  Antisense strand to SEQ ID NO: 747338
uuauuaaucacagugcugg

SEQ ID NO: 747340 - RNA, 19 nt, Artificial Sequence
  Description of Artificial Sequence: Synthetic oligonucleotide
  Sense strand starting at position 1000 of SEQ ID NO: 586832
cuaggaugaucuguagacu

SEQ ID NO: 747341 - RNA, 19 nt, Artificial Sequence
  Description of Artificial Sequence: Synthetic oligonucleotide
  Antisense strand to SEQ ID NO: 747340
agucuacagaucauccuag

SEQ ID NO: 747342 - RNA, 19 nt, Artificial Sequence
  Description of Artificial Sequence: Synthetic oligonucleotide
  Sense strand starting at position 1165 of SEQ ID NO: 586832
guguauuacuauuuccagu

SEQ ID NO: 747343 - RNA, 19 nt, Artificial Sequence
  Description of Artificial Sequence: Synthetic oligonucleotide
  Antisense strand to SEQ ID NO: 747342
acuggaaauaguaauacac

SEQ ID NO: 747344 - RNA, 19 nt, Artificial Sequence
  Description of Artificial Sequence: Synthetic oligonucleotide
  Sense strand starting at position 1524 of SEQ ID NO: 586832
agaagugaaucuguagcca

SEQ ID NO: 747345 - RNA, 19 nt, Artificial Sequence
  Description of Artificial Sequence: Synthetic oligonucleotide
  Antisense strand to SEQ ID NO: 747344
uggcuacagauucacuucu

SEQ ID NO: 747346 - RNA, 19 nt, Artificial Sequence
  Description of Artificial Sequence: Synthetic oligonucleotide
  Sense strand starting at position 1885 of SEQ ID NO: 586832
gcgcaaucagcuucgccau

SEQ ID NO: 747347 - RNA, 19 nt, Artificial Sequence
  Description of Artificial Sequence: Synthetic oligonucleotide
  Antisense strand to SEQ ID NO: 747346
auggcgaagcugauugcgc

SEQ ID NO: 747348 - RNA, 19 nt, Artificial Sequence
  Description of Artificial Sequence: Synthetic oligonucleotide
  Sense strand starting at position 2201 of SEQ ID NO: 586832
aguaaauugccaugggaaa

SEQ ID NO: 747349 - RNA, 19 nt, Artificial Sequence
  Description of Artificial Sequence: Synthetic oligonucleotide
  Antisense strand to SEQ ID NO: 747348
uuucccauggcaauuuacu

SEQ ID NO: 747350 - RNA, 19 nt, Artificial Sequence
  Description of Artificial Sequence: Synthetic oligonucleotide
  Sense strand starting at position 2202 of SEQ ID NO: 586832
guaaauugccaugggaaag

SEQ ID NO: 747351 - RNA, 19 nt, Artificial Sequence
  Description of Artificial Sequence: Synthetic oligonucleotide
  Antisense strand to SEQ ID NO: 747350
cuuucccauggcaauuuac

SEQ ID NO: 747352 - RNA, 19 nt, Artificial Sequence
  Description of Artificial Sequence: Synthetic oligonucleotide
  Sense strand starting at position 2266 of SEQ ID NO: 586832
uugcgucucagagagauuc

SEQ ID NO: 747353 - RNA, 19 nt, Artificial Sequence
  Description of Artificial Sequence: Synthetic oligonucleotide
  Antisense strand to SEQ ID NO: 747352
gaaucucucugagacgcaa

SEQ ID NO: 747354 - RNA, 19 nt, Artificial Sequence
  Description of Artificial Sequence: Synthetic oligonucleotide
  Sense strand starting at position 2287 of SEQ ID NO: 586832
uagcuugaucauggugaca

SEQ ID NO: 747355 - RNA, 19 nt, Artificial Sequence
  Description of Artificial Sequence: Synthetic oligonucleotide
  Antisense strand to SEQ ID NO: 747354
ugucaccaugaucaagcua

SEQ ID NO: 747356 - RNA, 19 nt, Artificial Sequence
  Description of Artificial Sequence: Synthetic oligonucleotide
  Sense strand starting at position 2425 of SEQ ID NO: 586832
ccacucugacuuuagaguu

SEQ ID NO: 747357 - RNA, 19 nt, Artificial Sequence
  Description of Artificial Sequence: Synthetic oligonucleotide
  Antisense strand to SEQ ID NO: 747356
aacucuaaagucagagugg

SEQ ID NO: 747358 - RNA, 19 nt, Artificial Sequence
  Description of Artificial Sequence: Synthetic oligonucleotide
  Sense strand starting at position 2616 of SEQ ID NO: 586832
gucacuguggcauauauaa

SEQ ID NO: 747359 - RNA, 19 nt, Artificial Sequence
  Description of Artificial Sequence: Synthetic oligonucleotide
  Antisense strand to SEQ ID NO: 747358
uuauauaugccacagugac

SEQ ID NO: 747360 - RNA, 19 nt, Artificial Sequence
  Description of Artificial Sequence: Synthetic oligonucleotide
  Sense strand starting at position 2628 of SEQ ID NO: 586832
uauauaaugcucuagguga

SEQ ID NO: 747361 - RNA, 19 nt, Artificial Sequence
  Description of Artificial Sequence: Synthetic oligonucleotide
  Antisense strand to SEQ ID NO: 747360
ucaccuagagcauuauaua

SEQ ID NO: 747362 - RNA, 19 nt, Artificial Sequence
  Description of Artificial Sequence: Synthetic oligonucleotide
  Sense strand starting at position 2630 of SEQ ID NO: 586832
uauaaugcucuaggugaug

SEQ ID NO: 747363 - RNA, 19 nt, Artificial Sequence
  Description of Artificial Sequence: Synthetic oligonucleotide
  Antisense strand to SEQ ID NO: 747362
caucaccuagagcauuaua

SEQ ID NO: 747364 - RNA, 19 nt, Artificial Sequence
  Description of Artificial Sequence: Synthetic oligonucleotide
  Sense strand starting at position 2657 of SEQ ID NO: 586832
uguuauggauaugcacaua

SEQ ID NO: 747365 - RNA, 19 nt, Artificial Sequence
  Description of Artificial Sequence: Synthetic oligonucleotide
  Antisense strand to SEQ ID NO: 747364
uaugugcauauccauaaca

SEQ ID NO: 747366 - RNA, 19 nt, Artificial Sequence
  Description of Artificial Sequence: Synthetic oligonucleotide
  Sense strand starting at position 2660 of SEQ ID NO: 586832
uauggauaugcacauaugu

SEQ ID NO: 747367 - RNA, 19 nt, Artificial Sequence
  Description of Artificial Sequence: Synthetic oligonucleotide
  Antisense strand to SEQ ID NO: 747366
acauaugugcauauccaua

SEQ ID NO: 747368 - RNA, 19 nt, Artificial Sequence
  Description of Artificial Sequence: Synthetic oligonucleotide
  Sense strand starting at position 2713 of SEQ ID NO: 586832
aggaauacccucugcugaa

SEQ ID NO: 747369 - RNA, 19 nt, Artificial Sequence
  Description of Artificial Sequence: Synthetic oligonucleotide
  Antisense strand to SEQ ID NO: 747368
uucagcagaggguauuccu

SEQ ID NO: 747370 - RNA, 19 nt, Artificial Sequence
  Description of Artificial Sequence: Synthetic oligonucleotide
  Sense strand starting at position 2714 of SEQ ID NO: 586832
ggaauacccucugcugaag

SEQ ID NO: 747371 - RNA, 19 nt, Artificial Sequence
  Description of Artificial Sequence: Synthetic oligonucleotide
  Antisense strand to SEQ ID NO: 747370
cuucagcagaggguauucc

SEQ ID NO: 747372 - RNA, 19 nt, Artificial Sequence
  Description of Artificial Sequence: Synthetic oligonucleotide
  Sense strand starting at position 2717 of SEQ ID NO: 586832
auacccucugcugaagaau

SEQ ID NO: 747373 - RNA, 19 nt, Artificial Sequence
  Description of Artificial Sequence: Synthetic oligonucleotide
  Antisense strand to SEQ ID NO: 747372
auucuucagcagaggguau

SEQ ID NO: 747374 - RNA, 19 nt, Artificial Sequence
  Description of Artificial Sequence: Synthetic oligonucleotide
  Sense strand starting at position 2922 of SEQ ID NO: 586832
ucaucucuuguggaauauu

SEQ ID NO: 747375 - RNA, 19 nt, Artificial Sequence
  Description of Artificial Sequence: Synthetic oligonucleotide
  Antisense strand to SEQ ID NO: 747374
aauauuccacaagagauga

SEQ ID NO: 747376 - RNA, 19 nt, Artificial Sequence
  Description of Artificial Sequence: Synthetic oligonucleotide
  Sense strand starting at position 3239 of SEQ ID NO: 586832
acugaauaccacuggcuaa

SEQ ID NO: 747377 - RNA, 19 nt, Artificial Sequence
  Description of Artificial Sequence: Synthetic oligonucleotide
  Antisense strand to SEQ ID NO: 747376
uuagccagugguauucagu

SEQ ID NO: 747378 - RNA, 19 nt, Artificial Sequence
  Description of Artificial Sequence: Synthetic oligonucleotide
  Sense strand starting at position 3349 of SEQ ID NO: 586832
gaaugaugaucugugucca

SEQ ID NO: 747379 - RNA, 19 nt, Artificial Sequence
  Description of Artificial Sequence: Synthetic oligonucleotide
  Antisense strand to SEQ ID NO: 747378
uggacacagaucaucauuc

SEQ ID NO: 747380 - RNA, 19 nt, Artificial Sequence
  Description of Artificial Sequence: Synthetic oligonucleotide
  Sense strand starting at position 3350 of SEQ ID NO: 586832
aaugaugaucuguguccaa

SEQ ID NO: 747381 - RNA, 19 nt, Artificial Sequence
  Description of Artificial Sequence: Synthetic oligonucleotide
  Antisense strand to SEQ ID NO: 747380
uuggacacagaucaucauu

SEQ ID NO: 747382 - RNA, 19 nt, Artificial Sequence
  Description of Artificial Sequence: Synthetic oligonucleotide
  Sense strand starting at position 3374 of SEQ ID NO: 586832
cuaugaguugaguaugcuu

SEQ ID NO: 747383 - RNA, 19 nt, Artificial Sequence
  Description of Artificial Sequence: Synthetic oligonucleotide
  Antisense strand to SEQ ID NO: 747382
aagcauacucaacucauag

SEQ ID NO: 747384 - RNA, 19 nt, Artificial Sequence
  Description of Artificial Sequence: Synthetic oligonucleotide
  Sense strand starting at position 3387 of SEQ ID NO: 586832
augcuuauggcagagaagu

SEQ ID NO: 747385 - RNA, 19 nt, Artificial Sequence
  Description of Artificial Sequence: Synthetic oligonucleotide
  Antisense strand to SEQ ID NO: 747384
acuucucugccauaagcau

SEQ ID NO: 747386 - RNA, 19 nt, Artificial Sequence
  Description of Artificial Sequence: Synthetic oligonucleotide
  Sense strand starting at position 3389 of SEQ ID NO: 586832
gcuuauggcagagaaguaa

SEQ ID NO: 747387 - RNA, 19 nt, Artificial Sequence
  Description of Artificial Sequence: Synthetic oligonucleotide
  Antisense strand to SEQ ID NO: 747386
uuacuucucugccauaagc

SEQ ID NO: 747388 - RNA, 19 nt, Artificial Sequence
  Description of Artificial Sequence: Synthetic oligonucleotide
  Sense strand starting at position 3427 of SEQ ID NO: 586832
ggauacaauaggugguuua

SEQ ID NO: 747389 - RNA, 19 nt, Artificial Sequence
  Description of Artificial Sequence: Synthetic oligonucleotide
  Antisense strand to SEQ ID NO: 747388
uaaaccaccuauuguaucc

SEQ ID NO: 747390 - RNA, 19 nt, Artificial Sequence
  Description of Artificial Sequence: Synthetic oligonucleotide
  Sense strand starting at position 3428 of SEQ ID NO: 586832
gauacaauaggugguuuaa

SEQ ID NO: 747391 - RNA, 19 nt, Artificial Sequence
  Description of Artificial Sequence: Synthetic oligonucleotide
  Antisense strand to SEQ ID NO: 747390
uuaaaccaccuauuguauc

SEQ ID NO: 747392 - RNA, 19 nt, Artificial Sequence
  Description of Artificial Sequence: Synthetic oligonucleotide
  Sense strand starting at position 3430 of SEQ ID NO: 586832
uacaauaggugguuuaaua

SEQ ID NO: 747393 - RNA, 19 nt, Artificial Sequence
  Description of Artificial Sequence: Synthetic oligonucleotide
  Antisense strand to SEQ ID NO: 747392
uauuaaaccaccuauugua

SEQ ID NO: 747394 - RNA, 19 nt, Artificial Sequence
  Description of Artificial Sequence: Synthetic oligonucleotide
  Sense strand starting at position 3482 of SEQ ID NO: 586832
accauauuagaauggguua

SEQ ID NO: 747395 - RNA, 19 nt, Artificial Sequence
  Description of Artificial Sequence: Synthetic oligonucleotide
  Antisense strand to SEQ ID NO: 747394
uaacccauucuaauauggu

SEQ ID NO: 747396 - RNA, 19 nt, Artificial Sequence
  Description of Artificial Sequence: Synthetic oligonucleotide
  Sense strand starting at position 3508 of SEQ ID NO: 586832
aauggaagauuggagauau

SEQ ID NO: 747397 - RNA, 19 nt, Artificial Sequence
  Description of Artificial Sequence: Synthetic oligonucleotide
  Antisense strand to SEQ ID NO: 747396
auaucuccaaucuuccauu

SEQ ID NO: 747398 - RNA, 19 nt, Artificial Sequence
  Description of Artificial Sequence: Synthetic oligonucleotide
  Sense strand starting at position 3607 of SEQ ID NO: 586832
caggcuaccugguugacau

SEQ ID NO: 747399 - RNA, 19 nt, Artificial Sequence
  Description of Artificial Sequence: Synthetic oligonucleotide
  Antisense strand to SEQ ID NO: 747398
augucaaccagguagccug

SEQ ID NO: 747400 - RNA, 19 nt, Artificial Sequence
  Description of Artificial Sequence: Synthetic oligonucleotide
  Sense strand starting at position 3798 of SEQ ID NO: 586832
acagaucagucaguccuau

SEQ ID NO: 747401 - RNA, 19 nt, Artificial Sequence
  Description of Artificial Sequence: Synthetic oligonucleotide
  Antisense strand to SEQ ID NO: 747400
auaggacugacugaucugu

SEQ ID NO: 747402 - RNA, 19 nt, Artificial Sequence
  Description of Artificial Sequence: Synthetic oligonucleotide
  Sense strand starting at position 3829 of SEQ ID NO: 586832
guauuaguuaucguaugcu

SEQ ID NO: 747403 - RNA, 19 nt, Artificial Sequence
  Description of Artificial Sequence: Synthetic oligonucleotide
  Antisense strand to SEQ ID NO: 747402
agcauacgauaacuaauac

SEQ ID NO: 747404 - RNA, 19 nt, Artificial Sequence
  Description of Artificial Sequence: Synthetic oligonucleotide
  Sense strand starting at position 3834 of SEQ ID NO: 586832
aguuaucguaugcugcaua

SEQ ID NO: 747405 - RNA, 19 nt, Artificial Sequence
  Description of Artificial Sequence: Synthetic oligonucleotide
  Antisense strand to SEQ ID NO: 747404
uaugcagcauacgauaacu

SEQ ID NO: 747406 - RNA, 19 nt, Artificial Sequence
  Description of Artificial Sequence: Synthetic oligonucleotide
  Sense strand starting at position 131 of SEQ ID NO: 586833
guagguagacaccauaguu

SEQ ID NO: 747407 - RNA, 19 nt, Artificial Sequence
  Description of Artificial Sequence: Synthetic oligonucleotide
  Antisense strand to SEQ ID NO: 747406
aacuauggugucuaccuac

SEQ ID NO: 747408 - RNA, 19 nt, Artificial Sequence
  Description of Artificial Sequence: Synthetic oligonucleotide
  Sense strand starting at position 274 of SEQ ID NO: 586833
ggcuuaggccuccaacagu

SEQ ID NO: 747409 - RNA, 19 nt, Artificial Sequence
  Description of Artificial Sequence: Synthetic oligonucleotide
  Antisense strand to SEQ ID NO: 747408
acuguuggaggccuaagcc

SEQ ID NO: 747410 - RNA, 19 nt, Artificial Sequence
  Description of Artificial Sequence: Synthetic oligonucleotide
  Sense strand starting at position 817 of SEQ ID NO: 586833
ucauuugugucuguccuua

SEQ ID NO: 747411 - RNA, 19 nt, Artificial Sequence
  Description of Artificial Sequence: Synthetic oligonucleotide
  Antisense strand to SEQ ID NO: 747410
uaaggacagacacaaauga

SEQ ID NO: 747412 - RNA, 19 nt, Artificial Sequence
  Description of Artificial Sequence: Synthetic oligonucleotide
  Sense strand starting at position 819 of SEQ ID NO: 586833
auuugugucuguccuuaga

SEQ ID NO: 747413 - RNA, 19 nt, Artificial Sequence
  Description of Artificial Sequence: Synthetic oligonucleotide
  Antisense strand to SEQ ID NO: 747412
ucuaaggacagacacaaau

SEQ ID NO: 747414 - RNA, 19 nt, Artificial Sequence
  Description of Artificial Sequence: Synthetic oligonucleotide
  Sense strand starting at position 822 of SEQ ID NO: 586833
ugugucuguccuuagaaca

SEQ ID NO: 747415 - RNA, 19 nt, Artificial Sequence
  Description of Artificial Sequence: Synthetic oligonucleotide
  Antisense strand to SEQ ID NO: 747414
uguucuaaggacagacaca

SEQ ID NO: 747416 - RNA, 19 nt, Artificial Sequence
  Description of Artificial Sequence: Synthetic oligonucleotide
  Sense strand starting at position 899 of SEQ ID NO: 586833
agggucguacucuacuaua

SEQ ID NO: 747417 - RNA, 19 nt, Artificial Sequence
  Description of Artificial Sequence: Synthetic oligonucleotide
  Antisense strand to SEQ ID NO: 747416
uauaguagaguacgacccu

SEQ ID NO: 747418 - RNA, 19 nt, Artificial Sequence
  Description of Artificial Sequence: Synthetic oligonucleotide
  Sense strand starting at position 1146 of SEQ ID NO: 586833
aacguugaguugguaauuu

SEQ ID NO: 747419 - RNA, 19 nt, Artificial Sequence
  Description of Artificial Sequence: Synthetic oligonucleotide
  Antisense strand to SEQ ID NO: 747418
aaauuaccaacucaacguu

SEQ ID NO: 747420 - RNA, 19 nt, Artificial Sequence
  Description of Artificial Sequence: Synthetic oligonucleotide
  Sense strand starting at position 1167 of SEQ ID NO: 586833
aaacgaugaugucuaccua

SEQ ID NO: 747421 - RNA, 19 nt, Artificial Sequence
  Description of Artificial Sequence: Synthetic oligonucleotide
  Antisense strand to SEQ ID NO: 747420
uagguagacaucaucguuu

SEQ ID NO: 747422 - RNA, 19 nt, Artificial Sequence
  Description of Artificial Sequence: Synthetic oligonucleotide
  Sense strand starting at position 1252 of SEQ ID NO: 586833
ucaggcuucccuggugaau

SEQ ID NO: 747423 - RNA, 19 nt, Artificial Sequence
  Description of Artificial Sequence: Synthetic oligonucleotide
  Antisense strand to SEQ ID NO: 747422
auucaccagggaagccuga

SEQ ID NO: 747424 - RNA, 19 nt, Artificial Sequence
  Description of Artificial Sequence: Synthetic oligonucleotide
  Sense strand starting at position 1255 of SEQ ID NO: 586833
ggcuucccuggugaauaaa

SEQ ID NO: 747425 - RNA, 19 nt, Artificial Sequence
  Description of Artificial Sequence: Synthetic oligonucleotide
  Antisense strand to SEQ ID NO: 747424
uuuauucaccagggaagcc

SEQ ID NO: 747426 - RNA, 19 nt, Artificial Sequence
  Description of Artificial Sequence: Synthetic oligonucleotide
  Sense strand starting at position 1304 of SEQ ID NO: 586833
aagugucuuugaucuacag

SEQ ID NO: 747427 - RNA, 19 nt, Artificial Sequence
  Description of Artificial Sequence: Synthetic oligonucleotide
  Antisense strand to SEQ ID NO: 747426
cuguagaucaaagacacuu

SEQ ID NO: 747428 - RNA, 19 nt, Artificial Sequence
  Description of Artificial Sequence: Synthetic oligonucleotide
  Sense strand starting at position 1308 of SEQ ID NO: 586833
gucuuugaucuacagcuga

SEQ ID NO: 747429 - RNA, 19 nt, Artificial Sequence
  Description of Artificial Sequence: Synthetic oligonucleotide
  Antisense strand to SEQ ID NO: 747428
ucagcuguagaucaaagac

SEQ ID NO: 747430 - RNA, 19 nt, Artificial Sequence
  Description of Artificial Sequence: Synthetic oligonucleotide
  Sense strand starting at position 1313 of SEQ ID NO: 586833
ugaucuacagcugaagagu

SEQ ID NO: 747431 - RNA, 19 nt, Artificial Sequence
  Description of Artificial Sequence: Synthetic oligonucleotide
  Antisense strand to SEQ ID NO: 747430
acucuucagcuguagauca

SEQ ID NO: 747432 - RNA, 19 nt, Artificial Sequence
  Description of Artificial Sequence: Synthetic oligonucleotide
  Sense strand starting at position 1322 of SEQ ID NO: 586833
gcugaagaguuucucaaac

SEQ ID NO: 747433 - RNA, 19 nt, Artificial Sequence
  Description of Artificial Sequence: Synthetic oligonucleotide
  Antisense strand to SEQ ID NO: 747432
guuugagaaacucuucagc

SEQ ID NO: 747434 - RNA, 19 nt, Artificial Sequence
  Description of Artificial Sequence: Synthetic oligonucleotide
  Sense strand starting at position 1343 of SEQ ID NO: 586833
ugcagaaauggguggagaa

SEQ ID NO: 747435 - RNA, 19 nt, Artificial Sequence
  Description of Artificial Sequence: Synthetic oligonucleotide
  Antisense strand to SEQ ID NO: 747434
uucuccacccauuucugca

SEQ ID NO: 747436 - RNA, 19 nt, Artificial Sequence
  Description of Artificial Sequence: Synthetic oligonucleotide
  Sense strand starting at position 1441 of SEQ ID NO: 586833
gguuucaaugcaugaguag

SEQ ID NO: 747437 - RNA, 19 nt, Artificial Sequence
  Description of Artificial Sequence: Synthetic oligonucleotide
  Antisense strand to SEQ ID NO: 747436
cuacucaugcauugaaacc

SEQ ID NO: 747438 - RNA, 19 nt, Artificial Sequence
  Description of Artificial Sequence: Synthetic oligonucleotide
  Sense strand starting at position 1535 of SEQ ID NO: 586833
aagagaacuuuguuagcag

SEQ ID NO: 747439 - RNA, 19 nt, Artificial Sequence
  Description of Artificial Sequence: Synthetic oligonucleotide
  Antisense strand to SEQ ID NO: 747438
cugcuaacaaaguucucuu

SEQ ID NO: 747440 - RNA, 19 nt, Artificial Sequence
  Description of Artificial Sequence: Synthetic oligonucleotide
  Sense strand starting at position 1538 of SEQ ID NO: 586833
agaacuuuguuagcagcaa

SEQ ID NO: 747441 - RNA, 19 nt, Artificial Sequence
  Description of Artificial Sequence: Synthetic oligonucleotide
  Antisense strand to SEQ ID NO: 747440
uugcugcuaacaaaguucu

SEQ ID NO: 747442 - RNA, 19 nt, Artificial Sequence
  Description of Artificial Sequence: Synthetic oligonucleotide
  Sense strand starting at position 1550 of SEQ ID NO: 586833
gcagcaagggcuuauaaac

SEQ ID NO: 747443 - RNA, 19 nt, Artificial Sequence
  Description of Artificial Sequence: Synthetic oligonucleotide
  Antisense strand to SEQ ID NO: 747442
guuuauaagcccuugcugc

SEQ ID NO: 747444 - RNA, 19 nt, Artificial Sequence
  Description of Artificial Sequence: Synthetic oligonucleotide
  Sense strand starting at position 2041 of SEQ ID NO: 586833
uggucuuuguccucacaaa

SEQ ID NO: 747445 - RNA, 19 nt, Artificial Sequence
  Description of Artificial Sequence: Synthetic oligonucleotide
  Antisense strand to SEQ ID NO: 747444
uuugugaggacaaagacca

SEQ ID NO: 747446 - RNA, 19 nt, Artificial Sequence
  Description of Artificial Sequence: Synthetic oligonucleotide
  Sense strand starting at position 2042 of SEQ ID NO: 586833
ggucuuuguccucacaaac

SEQ ID NO: 747447 - RNA, 19 nt, Artificial Sequence
  Description of Artificial Sequence: Synthetic oligonucleotide
  Antisense strand to SEQ ID NO: 747446
guuugugaggacaaagacc

SEQ ID NO: 747448 - RNA, 19 nt, Artificial Sequence
  Description of Artificial Sequence: Synthetic oligonucleotide
  Sense strand starting at position 2089 of SEQ ID NO: 586833
ccggacacgccuuacauua

SEQ ID NO: 747449 - RNA, 19 nt, Artificial Sequence
  Description of Artificial Sequence: Synthetic oligonucleotide
  Antisense strand to SEQ ID NO: 747448
uaauguaaggcguguccgg

SEQ ID NO: 747450 - RNA, 19 nt, Artificial Sequence
  Description of Artificial Sequence: Synthetic oligonucleotide
  Sense strand starting at position 2100 of SEQ ID NO: 586833
uuacauuaggcucaugaug

SEQ ID NO: 747451 - RNA, 19 nt, Artificial Sequence
  Description of Artificial Sequence: Synthetic oligonucleotide
  Antisense strand to SEQ ID NO: 747450
caucaugagccuaauguaa

SEQ ID NO: 747452 - RNA, 19 nt, Artificial Sequence
  Description of Artificial Sequence: Synthetic oligonucleotide
  Sense strand starting at position 2107 of SEQ ID NO: 586833
aggcucaugaugugaaacu

SEQ ID NO: 747453 - RNA, 19 nt, Artificial Sequence
  Description of Artificial Sequence: Synthetic oligonucleotide
  Antisense strand to SEQ ID NO: 747452
aguuucacaucaugagccu

SEQ ID NO: 747454 - RNA, 19 nt, Artificial Sequence
  Description of Artificial Sequence: Synthetic oligonucleotide
  Sense strand starting at position 2224 of SEQ ID NO: 586833
ucgcuauuccagugagaaa

SEQ ID NO: 747455 - RNA, 19 nt, Artificial Sequence
  Description of Artificial Sequence: Synthetic oligonucleotide
  Antisense strand to SEQ ID NO: 747454
uuucucacuggaauagcga

SEQ ID NO: 747456 - RNA, 19 nt, Artificial Sequence
  Description of Artificial Sequence: Synthetic oligonucleotide
  Sense strand starting at position 2225 of SEQ ID NO: 586833
cgcuauuccagugagaaac

SEQ ID NO: 747457 - RNA, 19 nt, Artificial Sequence
  Description of Artificial Sequence: Synthetic oligonucleotide
  Antisense strand to SEQ ID NO: 747456
guuucucacuggaauagcg

SEQ ID NO: 747458 - RNA, 19 nt, Artificial Sequence
  Description of Artificial Sequence: Synthetic oligonucleotide
  Sense strand starting at position 2299 of SEQ ID NO: 586833
acgggaugcgucguguaaa

SEQ ID NO: 747459 - RNA, 19 nt, Artificial Sequence
  Description of Artificial Sequence: Synthetic oligonucleotide
  Antisense strand to SEQ ID NO: 747458
uuuacacgacgcaucccgu

SEQ ID NO: 747460 - RNA, 19 nt, Artificial Sequence
  Description of Artificial Sequence: Synthetic oligonucleotide
  Sense strand starting at position 2354 of SEQ ID NO: 586833
cguaguugcgaauaaauaa

SEQ ID NO: 747461 - RNA, 19 nt, Artificial Sequence
  Description of Artificial Sequence: Synthetic oligonucleotide
  Antisense strand to SEQ ID NO: 747460
uuauuuauucgcaacuacg

SEQ ID NO: 747462 - RNA, 19 nt, Artificial Sequence
  Description of Artificial Sequence: Synthetic oligonucleotide
  Sense strand starting at position 2743 of SEQ ID NO: 586833
aggacuuagacacgucuuu

SEQ ID NO: 747463 - RNA, 19 nt, Artificial Sequence
  Description of Artificial Sequence: Synthetic oligonucleotide
  Antisense strand to SEQ ID NO: 747462
aaagacgugucuaaguccu

SEQ ID NO: 747464 - RNA, 19 nt, Artificial Sequence
  Description of Artificial Sequence: Synthetic oligonucleotide
  Sense strand starting at position 2822 of SEQ ID NO: 586833
ccguaacaugaaggaauaa

SEQ ID NO: 747465 - RNA, 19 nt, Artificial Sequence
  Description of Artificial Sequence: Synthetic oligonucleotide
  Antisense strand to SEQ ID NO: 747464
uuauuccuucauguuacgg

SEQ ID NO: 747466 - RNA, 19 nt, Artificial Sequence
  Description of Artificial Sequence: Synthetic oligonucleotide
  Sense strand starting at position 2956 of SEQ ID NO: 586833
cuacaauauguaggcagaa

SEQ ID NO: 747467 - RNA, 19 nt, Artificial Sequence
  Description of Artificial Sequence: Synthetic oligonucleotide
  Antisense strand to SEQ ID NO: 747466
uucugccuacauauuguag

SEQ ID NO: 747468 - RNA, 19 nt, Artificial Sequence
  Description of Artificial Sequence: Synthetic oligonucleotide
  Sense strand starting at position 2957 of SEQ ID NO: 586833
uacaauauguaggcagaaa

SEQ ID NO: 747469 - RNA, 19 nt, Artificial Sequence
  Description of Artificial Sequence: Synthetic oligonucleotide
  Antisense strand to SEQ ID NO: 747468
uuucugccuacauauugua

SEQ ID NO: 747470 - RNA, 19 nt, Artificial Sequence
  Description of Artificial Sequence: Synthetic oligonucleotide
  Sense strand starting at position 2968 of SEQ ID NO: 586833
ggcagaaauggucacacuu

SEQ ID NO: 747471 - RNA, 19 nt, Artificial Sequence
  Description of Artificial Sequence: Synthetic oligonucleotide
  Antisense strand to SEQ ID NO: 747470
aagugugaccauuucugcc

SEQ ID NO: 747472 - RNA, 19 nt, Artificial Sequence
  Description of Artificial Sequence: Synthetic oligonucleotide
  Sense strand starting at position 3177 of SEQ ID NO: 586833
aaaguuguccuuugaaagc

SEQ ID NO: 747473 - RNA, 19 nt, Artificial Sequence
  Description of Artificial Sequence: Synthetic oligonucleotide
  Antisense strand to SEQ ID NO: 747472
gcuuucaaaggacaacuuu

SEQ ID NO: 747474 - RNA, 19 nt, Artificial Sequence
  Description of Artificial Sequence: Synthetic oligonucleotide
  Sense strand starting at position 3249 of SEQ ID NO: 586833
guggauaacuucuuagaau

SEQ ID NO: 747475 - RNA, 19 nt, Artificial Sequence
  Description of Artificial Sequence: Synthetic oligonucleotide
  Antisense strand to SEQ ID NO: 747474
auucuaagaaguuauccac

SEQ ID NO: 747476 - RNA, 19 nt, Artificial Sequence
  Description of Artificial Sequence: Synthetic oligonucleotide
  Sense strand starting at position 3363 of SEQ ID NO: 586833
aaauguauagauugcaaag

SEQ ID NO: 747477 - RNA, 19 nt, Artificial Sequence
  Description of Artificial Sequence: Synthetic oligonucleotide
  Antisense strand to SEQ ID NO: 747476
cuuugcaaucuauacauuu

SEQ ID NO: 747478 - RNA, 19 nt, Artificial Sequence
  Description of Artificial Sequence: Synthetic oligonucleotide
  Sense strand starting at position 3428 of SEQ ID NO: 586833
agcuuugugagguaugcaa

SEQ ID NO: 747479 - RNA, 19 nt, Artificial Sequence
  Description of Artificial Sequence: Synthetic oligonucleotide
  Antisense strand to SEQ ID NO: 747478
uugcauaccucacaaagcu

SEQ ID NO: 747480 - RNA, 19 nt, Artificial Sequence
  Description of Artificial Sequence: Synthetic oligonucleotide
  Sense strand starting at position 3458 of SEQ ID NO: 586833
cccagagcgacaugaguau

SEQ ID NO: 747481 - RNA, 19 nt, Artificial Sequence
  Description of Artificial Sequence: Synthetic oligonucleotide
  Antisense strand to SEQ ID NO: 747480
auacucaugucgcucuggg

SEQ ID NO: 747482 - RNA, 19 nt, Artificial Sequence
  Description of Artificial Sequence: Synthetic oligonucleotide
  Sense strand starting at position 3464 of SEQ ID NO: 586833
gcgacaugaguaugggacu

SEQ ID NO: 747483 - RNA, 19 nt, Artificial Sequence
  Description of Artificial Sequence: Synthetic oligonucleotide
  Antisense strand to SEQ ID NO: 747482
agucccauacucaugucgc

SEQ ID NO: 747484 - RNA, 19 nt, Artificial Sequence
  Description of Artificial Sequence: Synthetic oligonucleotide
  Sense strand starting at position 3870 of SEQ ID NO: 586833
auguaaugugugcaacauu

SEQ ID NO: 747485 - RNA, 19 nt, Artificial Sequence
  Description of Artificial Sequence: Synthetic oligonucleotide
  Antisense strand to SEQ ID NO: 747484
aauguugcacacauuacau

SEQ ID NO: 747486 - RNA, 19 nt, Artificial Sequence
  Description of Artificial Sequence: Synthetic oligonucleotide
  Sense strand starting at position 20 of SEQ ID NO: 586834
gggaguggucaaugacauu

SEQ ID NO: 747487 - RNA, 19 nt, Artificial Sequence
  Description of Artificial Sequence: Synthetic oligonucleotide
  Antisense strand to SEQ ID NO: 747486
aaugucauugaccacuccc

SEQ ID NO: 747488 - RNA, 19 nt, Artificial Sequence
  Description of Artificial Sequence: Synthetic oligonucleotide
  Sense strand starting at position 33 of SEQ ID NO: 586834
gacauucuuuagguaaugu

SEQ ID NO: 747489 - RNA, 19 nt, Artificial Sequence
  Description of Artificial Sequence: Synthetic oligonucleotide
  Antisense strand to SEQ ID NO: 747488
acauuaccuaaagaauguc

SEQ ID NO: 747490 - RNA, 19 nt, Artificial Sequence
  Description of Artificial Sequence: Synthetic oligonucleotide
  Sense strand starting at position 57 of SEQ ID NO: 586834
gaugucaguaaggaaaugu

SEQ ID NO: 747491 - RNA, 19 nt, Artificial Sequence
  Description of Artificial Sequence: Synthetic oligonucleotide
  Antisense strand to SEQ ID NO: 747490
acauuuccuuacugacauc

SEQ ID NO: 747492 - RNA, 19 nt, Artificial Sequence
  Description of Artificial Sequence: Synthetic oligonucleotide
  Sense strand starting at position 183 of SEQ ID NO: 586834
guaauuaaaugagcuggua

SEQ ID NO: 747493 - RNA, 19 nt, Artificial Sequence
  Description of Artificial Sequence: Synthetic oligonucleotide
  Antisense strand to SEQ ID NO: 747492
uaccagcucauuuaauuac

SEQ ID NO: 747494 - RNA, 19 nt, Artificial Sequence
  Description of Artificial Sequence: Synthetic oligonucleotide
  Sense strand starting at position 310 of SEQ ID NO: 586834
uccacuucucgagaggcau

SEQ ID NO: 747495 - RNA, 19 nt, Artificial Sequence
  Description of Artificial Sequence: Synthetic oligonucleotide
  Antisense strand to SEQ ID NO: 747494
augccucucgagaagugga

SEQ ID NO: 747496 - RNA, 19 nt, Artificial Sequence
  Description of Artificial Sequence: Synthetic oligonucleotide
  Sense strand starting at position 331 of SEQ ID NO: 586834
acccuuucucuguagaaga

SEQ ID NO: 747497 - RNA, 19 nt, Artificial Sequence
  Description of Artificial Sequence: Synthetic oligonucleotide
  Antisense strand to SEQ ID NO: 747496
ucuucuacagagaaagggu

SEQ ID NO: 747498 - RNA, 19 nt, Artificial Sequence
  Description of Artificial Sequence: Synthetic oligonucleotide
  Sense strand starting at position 333 of SEQ ID NO: 586834
ccuuucucuguagaagaua

SEQ ID NO: 747499 - RNA, 19 nt, Artificial Sequence
  Description of Artificial Sequence: Synthetic oligonucleotide
  Antisense strand to SEQ ID NO: 747498
uaucuucuacagagaaagg

SEQ ID NO: 747500 - RNA, 19 nt, Artificial Sequence
  Description of Artificial Sequence: Synthetic oligonucleotide
  Sense strand starting at position 622 of SEQ ID NO: 586834
uaguaugaguaauugaaca

SEQ ID NO: 747501 - RNA, 19 nt, Artificial Sequence
  Description of Artificial Sequence: Synthetic oligonucleotide
  Antisense strand to SEQ ID NO: 747500
uguucaauuacucauacua

SEQ ID NO: 747502 - RNA, 19 nt, Artificial Sequence
  Description of Artificial Sequence: Synthetic oligonucleotide
  Sense strand starting at position 765 of SEQ ID NO: 586834
ucaacagggucuccuaaua

SEQ ID NO: 747503 - RNA, 19 nt, Artificial Sequence
  Description of Artificial Sequence: Synthetic oligonucleotide
  Antisense strand to SEQ ID NO: 747502
uauuaggagacccuguuga

SEQ ID NO: 747504 - RNA, 19 nt, Artificial Sequence
  Description of Artificial Sequence: Synthetic oligonucleotide
  Sense strand starting at position 773 of SEQ ID NO: 586834
gucuccuaauagucaaacu

SEQ ID NO: 747505 - RNA, 19 nt, Artificial Sequence
  Description of Artificial Sequence: Synthetic oligonucleotide
  Antisense strand to SEQ ID NO: 747504
aguuugacuauuaggagac

SEQ ID NO: 747506 - RNA, 19 nt, Artificial Sequence
  Description of Artificial Sequence: Synthetic oligonucleotide
  Sense strand starting at position 1155 of SEQ ID NO: 586834
acagauucuagacgugauc

SEQ ID NO: 747507 - RNA, 19 nt, Artificial Sequence
  Description of Artificial Sequence: Synthetic oligonucleotide
  Antisense strand to SEQ ID NO: 747506
gaucacgucuagaaucugu

SEQ ID NO: 747508 - RNA, 19 nt, Artificial Sequence
  Description of Artificial Sequence: Synthetic oligonucleotide
  Sense strand starting at position 1157 of SEQ ID NO: 586834
agauucuagacgugauccu

SEQ ID NO: 747509 - RNA, 19 nt, Artificial Sequence
  Description of Artificial Sequence: Synthetic oligonucleotide
  Antisense strand to SEQ ID NO: 747508
aggaucacgucuagaaucu

SEQ ID NO: 747510 - RNA, 19 nt, Artificial Sequence
  Description of Artificial Sequence: Synthetic oligonucleotide
  Sense strand starting at position 1253 of SEQ ID NO: 586834
acucaugaauguguauuau

SEQ ID NO: 747511 - RNA, 19 nt, Artificial Sequence
  Description of Artificial Sequence: Synthetic oligonucleotide
  Antisense strand to SEQ ID NO: 747510
auaauacacauucaugagu

SEQ ID NO: 747512 - RNA, 19 nt, Artificial Sequence
  Description of Artificial Sequence: Synthetic oligonucleotide
  Sense strand starting at position 1262 of SEQ ID NO: 586834
uguguauuaucacuuaaag

SEQ ID NO: 747513 - RNA, 19 nt, Artificial Sequence
  Description of Artificial Sequence: Synthetic oligonucleotide
  Antisense strand to SEQ ID NO: 747512
cuuuaagugauaauacaca

SEQ ID NO: 747514 - RNA, 19 nt, Artificial Sequence
  Description of Artificial Sequence: Synthetic oligonucleotide
  Sense strand starting at position 1609 of SEQ ID NO: 586834
ggucaucacguucagaaag

SEQ ID NO: 747515 - RNA, 19 nt, Artificial Sequence
  Description of Artificial Sequence: Synthetic oligonucleotide
  Antisense strand to SEQ ID NO: 747514
cuuucugaacgugaugacc

SEQ ID NO: 747516 - RNA, 19 nt, Artificial Sequence
  Description of Artificial Sequence: Synthetic oligonucleotide
  Sense strand starting at position 2360 of SEQ ID NO: 586834
ggacuucugcaaggccaga

SEQ ID NO: 747517 - RNA, 19 nt, Artificial Sequence
  Description of Artificial Sequence: Synthetic oligonucleotide
  Antisense strand to SEQ ID NO: 747516
ucuggccuugcagaagucc

SEQ ID NO: 747518 - RNA, 19 nt, Artificial Sequence
  Description of Artificial Sequence: Synthetic oligonucleotide
  Sense strand starting at position 2432 of SEQ ID NO: 586834
agcgaagagcuuuaacuca

SEQ ID NO: 747519 - RNA, 19 nt, Artificial Sequence
  Description of Artificial Sequence: Synthetic oligonucleotide
  Antisense strand to SEQ ID NO: 747518
ugaguuaaagcucuucgcu

SEQ ID NO: 747520 - RNA, 19 nt, Artificial Sequence
  Description of Artificial Sequence: Synthetic oligonucleotide
  Sense strand starting at position 2518 of SEQ ID NO: 586834
cccagacggacuugugaau

SEQ ID NO: 747521 - RNA, 19 nt, Artificial Sequence
  Description of Artificial Sequence: Synthetic oligonucleotide
  Antisense strand to SEQ ID NO: 747520
auucacaaguccgucuggg

SEQ ID NO: 747522 - RNA, 19 nt, Artificial Sequence
  Description of Artificial Sequence: Synthetic oligonucleotide
  Sense strand starting at position 2550 of SEQ ID NO: 586834
cccauaguuaacgggagaa

SEQ ID NO: 747523 - RNA, 19 nt, Artificial Sequence
  Description of Artificial Sequence: Synthetic oligonucleotide
  Antisense strand to SEQ ID NO: 747522
uucucccguuaacuauggg

SEQ ID NO: 747524 - RNA, 19 nt, Artificial Sequence
  Description of Artificial Sequence: Synthetic oligonucleotide
  Sense strand starting at position 2681 of SEQ ID NO: 586834
guuccugccaggcaagaaa

SEQ ID NO: 747525 - RNA, 19 nt, Artificial Sequence
  Description of Artificial Sequence: Synthetic oligonucleotide
  Antisense strand to SEQ ID NO: 747524
uuucuugccuggcaggaac

SEQ ID NO: 747526 - RNA, 19 nt, Artificial Sequence
  Description of Artificial Sequence: Synthetic oligonucleotide
  Sense strand starting at position 2840 of SEQ ID NO: 586834
uuagguuccaccgaguaaa

SEQ ID NO: 747527 - RNA, 19 nt, Artificial Sequence
  Description of Artificial Sequence: Synthetic oligonucleotide
  Antisense strand to SEQ ID NO: 747526
uuuacucgguggaaccuaa

SEQ ID NO: 747528 - RNA, 19 nt, Artificial Sequence
  Description of Artificial Sequence: Synthetic oligonucleotide
  Sense strand starting at position 2843 of SEQ ID NO: 586834
gguuccaccgaguaaacua

SEQ ID NO: 747529 - RNA, 19 nt, Artificial Sequence
  Description of Artificial Sequence: Synthetic oligonucleotide
  Antisense strand to SEQ ID NO: 747528
uaguuuacucgguggaacc

SEQ ID NO: 747530 - RNA, 19 nt, Artificial Sequence
  Description of Artificial Sequence: Synthetic oligonucleotide
  Sense strand starting at position 2910 of SEQ ID NO: 586834
aaagguggucccugaccua

SEQ ID NO: 747531 - RNA, 19 nt, Artificial Sequence
  Description of Artificial Sequence: Synthetic oligonucleotide
  Antisense strand to SEQ ID NO: 747530
uaggucagggaccaccuuu

SEQ ID NO: 747532 - RNA, 19 nt, Artificial Sequence
  Description of Artificial Sequence: Synthetic oligonucleotide
  Sense strand starting at position 2917 of SEQ ID NO: 586834
gucccugaccuaugggaua

SEQ ID NO: 747533 - RNA, 19 nt, Artificial Sequence
  Description of Artificial Sequence: Synthetic oligonucleotide
  Antisense strand to SEQ ID NO: 747532
uaucccauaggucagggac

SEQ ID NO: 747534 - RNA, 19 nt, Artificial Sequence
  Description of Artificial Sequence: Synthetic oligonucleotide
  Sense strand starting at position 2929 of SEQ ID NO: 586834
ugggauacaugauucuagu

SEQ ID NO: 747535 - RNA, 19 nt, Artificial Sequence
  Description of Artificial Sequence: Synthetic oligonucleotide
  Antisense strand to SEQ ID NO: 747534
acuagaaucauguauccca

SEQ ID NO: 747536 - RNA, 19 nt, Artificial Sequence
  Description of Artificial Sequence: Synthetic oligonucleotide
  Sense strand starting at position 2937 of SEQ ID NO: 586834
augauucuaguaugaauac

SEQ ID NO: 747537 - RNA, 19 nt, Artificial Sequence
  Description of Artificial Sequence: Synthetic oligonucleotide
  Antisense strand to SEQ ID NO: 747536
guauucauacuagaaucau

SEQ ID NO: 747538 - RNA, 19 nt, Artificial Sequence
  Description of Artificial Sequence: Synthetic oligonucleotide
  Sense strand starting at position 3265 of SEQ ID NO: 586834
agauuagaguucuuguuaa

SEQ ID NO: 747539 - RNA, 19 nt, Artificial Sequence
  Description of Artificial Sequence: Synthetic oligonucleotide
  Antisense strand to SEQ ID NO: 747538
uuaacaagaacucuaaucu

SEQ ID NO: 747540 - RNA, 19 nt, Artificial Sequence
  Description of Artificial Sequence: Synthetic oligonucleotide
  Sense strand starting at position 3277 of SEQ ID NO: 586834
uuguuaagaugacuaaugu

SEQ ID NO: 747541 - RNA, 19 nt, Artificial Sequence
  Description of Artificial Sequence: Synthetic oligonucleotide
  Antisense strand to SEQ ID NO: 747540
acauuagucaucuuaacaa

SEQ ID NO: 747542 - RNA, 19 nt, Artificial Sequence
  Description of Artificial Sequence: Synthetic oligonucleotide
  Sense strand starting at position 3278 of SEQ ID NO: 586834
uguuaagaugacuaauguu

SEQ ID NO: 747543 - RNA, 19 nt, Artificial Sequence
  Description of Artificial Sequence: Synthetic oligonucleotide
  Antisense strand to SEQ ID NO: 747542
aacauuagucaucuuaaca

SEQ ID NO: 747544 - RNA, 19 nt, Artificial Sequence
  Description of Artificial Sequence: Synthetic oligonucleotide
  Sense strand starting at position 3500 of SEQ ID NO: 586834
augugauaaugagugucaa

SEQ ID NO: 747545 - RNA, 19 nt, Artificial Sequence
  Description of Artificial Sequence: Synthetic oligonucleotide
  Antisense strand to SEQ ID NO: 747544
uugacacucauuaucacau

SEQ ID NO: 747546 - RNA, 19 nt, Artificial Sequence
  Description of Artificial Sequence: Synthetic oligonucleotide
  Sense strand starting at position 3501 of SEQ ID NO: 586834
ugugauaaugagugucaag

SEQ ID NO: 747547 - RNA, 19 nt, Artificial Sequence
  Description of Artificial Sequence: Synthetic oligonucleotide
  Antisense strand to SEQ ID NO: 747546
cuugacacucauuaucaca

SEQ ID NO: 747548 - RNA, 19 nt, Artificial Sequence
  Description of Artificial Sequence: Synthetic oligonucleotide
  Sense strand starting at position 3512 of SEQ ID NO: 586834
gugucaagugcucugcacu

SEQ ID NO: 747549 - RNA, 19 nt, Artificial Sequence
  Description of Artificial Sequence: Synthetic oligonucleotide
  Antisense strand to SEQ ID NO: 747548
agugcagagcacuugacac

SEQ ID NO: 747550 - RNA, 19 nt, Artificial Sequence
  Description of Artificial Sequence: Synthetic oligonucleotide
  Sense strand starting at position 3578 of SEQ ID NO: 586834
uucugaacuuugcuugaga

SEQ ID NO: 747551 - RNA, 19 nt, Artificial Sequence
  Description of Artificial Sequence: Synthetic oligonucleotide
  Antisense strand to SEQ ID NO: 747550
ucucaagcaaaguucagaa

SEQ ID NO: 747552 - RNA, 19 nt, Artificial Sequence
  Description of Artificial Sequence: Synthetic oligonucleotide
  Sense strand starting at position 3579 of SEQ ID NO: 586834
ucugaacuuugcuugagau

SEQ ID NO: 747553 - RNA, 19 nt, Artificial Sequence
  Description of Artificial Sequence: Synthetic oligonucleotide
  Antisense strand to SEQ ID NO: 747552
aucucaagcaaaguucaga

SEQ ID NO: 747554 - RNA, 19 nt, Artificial Sequence
  Description of Artificial Sequence: Synthetic oligonucleotide
  Sense strand starting at position 3580 of SEQ ID NO: 586834
cugaacuuugcuugagauu

SEQ ID NO: 747555 - RNA, 19 nt, Artificial Sequence
  Description of Artificial Sequence: Synthetic oligonucleotide
  Antisense strand to SEQ ID NO: 747554
aaucucaagcaaaguucag

SEQ ID NO: 747556 - RNA, 19 nt, Artificial Sequence
  Description of Artificial Sequence: Synthetic oligonucleotide
  Sense strand starting at position 3581 of SEQ ID NO: 586834
ugaacuuugcuugagauug

SEQ ID NO: 747557 - RNA, 19 nt, Artificial Sequence
  Description of Artificial Sequence: Synthetic oligonucleotide
  Antisense strand to SEQ ID NO: 747556
caaucucaagcaaaguuca

SEQ ID NO: 747558 - RNA, 19 nt, Artificial Sequence
  Description of Artificial Sequence: Synthetic oligonucleotide
  Sense strand starting at position 3657 of SEQ ID NO: 586834
auagaacuuugugcuuaau

SEQ ID NO: 747559 - RNA, 19 nt, Artificial Sequence
  Description of Artificial Sequence: Synthetic oligonucleotide
  Antisense strand to SEQ ID NO: 747558
auuaagcacaaaguucuau

SEQ ID NO: 747560 - RNA, 19 nt, Artificial Sequence
  Description of Artificial Sequence: Synthetic oligonucleotide
  Sense strand starting at position 3659 of SEQ ID NO: 586834
agaacuuugugcuuaauaa

SEQ ID NO: 747561 - RNA, 19 nt, Artificial Sequence
  Description of Artificial Sequence: Synthetic oligonucleotide
  Antisense strand to SEQ ID NO: 747560
uuauuaagcacaaaguucu

SEQ ID NO: 747562 - RNA, 19 nt, Artificial Sequence
  Description of Artificial Sequence: Synthetic oligonucleotide
  Sense strand starting at position 3692 of SEQ ID NO: 586834
ugauuagauggauggaugu

SEQ ID NO: 747563 - RNA, 19 nt, Artificial Sequence
  Description of Artificial Sequence: Synthetic oligonucleotide
  Antisense strand to SEQ ID NO: 747562
acauccauccaucuaauca

SEQ ID NO: 747564 - RNA, 19 nt, Artificial Sequence
  Description of Artificial Sequence: Synthetic oligonucleotide
  Sense strand starting at position 3874 of SEQ ID NO: 586834
gcaaguuugaugggacuaa

SEQ ID NO: 747565 - RNA, 19 nt, Artificial Sequence
  Description of Artificial Sequence: Synthetic oligonucleotide
  Antisense strand to SEQ ID NO: 747564
uuagucccaucaaacuugc

SEQ ID NO: 747566 - RNA, 19 nt, Artificial Sequence
  Description of Artificial Sequence: Synthetic oligonucleotide
  Sense strand starting at position 147 of SEQ ID NO: 586835
ucgagaacaucccugcuaa

SEQ ID NO: 747567 - RNA, 19 nt, Artificial Sequence
  Description of Artificial Sequence: Synthetic oligonucleotide
  Antisense strand to SEQ ID NO: 747566
uuagcagggauguucucga

SEQ ID NO: 747568 - RNA, 19 nt, Artificial Sequence
  Description of Artificial Sequence: Synthetic oligonucleotide
  Sense strand starting at position 148 of SEQ ID NO: 586835
cgagaacaucccugcuaac

SEQ ID NO: 747569 - RNA, 19 nt, Artificial Sequence
  Description of Artificial Sequence: Synthetic oligonucleotide
  Antisense strand to SEQ ID NO: 747568
guuagcagggauguucucg

SEQ ID NO: 747570 - RNA, 19 nt, Artificial Sequence
  Description of Artificial Sequence: Synthetic oligonucleotide
  Sense strand starting at position 478 of SEQ ID NO: 586835
ccuagauaccuguagcguu

SEQ ID NO: 747571 - RNA, 19 nt, Artificial Sequence
  Description of Artificial Sequence: Synthetic oligonucleotide
  Antisense strand to SEQ ID NO: 747570
aacgcuacagguaucuagg

SEQ ID NO: 747572 - RNA, 19 nt, Artificial Sequence
  Description of Artificial Sequence: Synthetic oligonucleotide
  Sense strand starting at position 537 of SEQ ID NO: 586835
gaaagaaucaguggcagug

SEQ ID NO: 747573 - RNA, 19 nt, Artificial Sequence
  Description of Artificial Sequence: Synthetic oligonucleotide
  Antisense strand to SEQ ID NO: 747572
cacugccacugauucuuuc

SEQ ID NO: 747574 - RNA, 19 nt, Artificial Sequence
  Description of Artificial Sequence: Synthetic oligonucleotide
  Sense strand starting at position 2019 of SEQ ID NO: 586835
ugcgcgaggcguuugagaa

SEQ ID NO: 747575 - RNA, 19 nt, Artificial Sequence
  Description of Artificial Sequence: Synthetic oligonucleotide
  Antisense strand to SEQ ID NO: 747574
uucucaaacgccucgcgca

SEQ ID NO: 747576 - RNA, 19 nt, Artificial Sequence
  Description of Artificial Sequence: Synthetic oligonucleotide
  Sense strand starting at position 2020 of SEQ ID NO: 586835
gcgcgaggcguuugagaaa

SEQ ID NO: 747577 - RNA, 19 nt, Artificial Sequence
  Description of Artificial Sequence: Synthetic oligonucleotide
  Antisense strand to SEQ ID NO: 747576
uuucucaaacgccucgcgc

SEQ ID NO: 747578 - RNA, 19 nt, Artificial Sequence
  Description of Artificial Sequence: Synthetic oligonucleotide
  Sense strand starting at position 2040 of SEQ ID NO: 586835
gcgagacuuccgggcguga

SEQ ID NO: 747579 - RNA, 19 nt, Artificial Sequence
  Description of Artificial Sequence: Synthetic oligonucleotide
  Antisense strand to SEQ ID NO: 747578
ucacgcccggaagucucgc

SEQ ID NO: 747580 - RNA, 19 nt, Artificial Sequence
  Description of Artificial Sequence: Synthetic oligonucleotide
  Sense strand starting at position 2653 of SEQ ID NO: 586835
gccggauucguggcucuca

SEQ ID NO: 747581 - RNA, 19 nt, Artificial Sequence
  Description of Artificial Sequence: Synthetic oligonucleotide
  Antisense strand to SEQ ID NO: 747580
ugagagccacgaauccggc

SEQ ID NO: 747582 - RNA, 19 nt, Artificial Sequence
  Description of Artificial Sequence: Synthetic oligonucleotide
  Sense strand starting at position 2700 of SEQ ID NO: 586835
ugggcauaguuucugcaga

SEQ ID NO: 747583 - RNA, 19 nt, Artificial Sequence
  Description of Artificial Sequence: Synthetic oligonucleotide
  Antisense strand to SEQ ID NO: 747582
ucugcagaaacuaugccca

SEQ ID NO: 747584 - RNA, 19 nt, Artificial Sequence
  Description of Artificial Sequence: Synthetic oligonucleotide
  Sense strand starting at position 2702 of SEQ ID NO: 586835
ggcauaguuucugcagagu

SEQ ID NO: 747585 - RNA, 19 nt, Artificial Sequence
  Description of Artificial Sequence: Synthetic oligonucleotide
  Antisense strand to SEQ ID NO: 747584
acucugcagaaacuaugcc

SEQ ID NO: 747586 - RNA, 19 nt, Artificial Sequence
  Description of Artificial Sequence: Synthetic oligonucleotide
  Sense strand starting at position 2716 of SEQ ID NO: 586835
agaguucccuucugaaaug

SEQ ID NO: 747587 - RNA, 19 nt, Artificial Sequence
  Description of Artificial Sequence: Synthetic oligonucleotide
  Antisense strand to SEQ ID NO: 747586
cauuucagaagggaacucu

SEQ ID NO: 747588 - RNA, 19 nt, Artificial Sequence
  Description of Artificial Sequence: Synthetic oligonucleotide
  Sense strand starting at position 2834 of SEQ ID NO: 586835
uugaauggcuagcuguaua

SEQ ID NO: 747589 - RNA, 19 nt, Artificial Sequence
  Description of Artificial Sequence: Synthetic oligonucleotide
  Antisense strand to SEQ ID NO: 747588
uauacagcuagccauucaa

SEQ ID NO: 747590 - RNA, 19 nt, Artificial Sequence
  Description of Artificial Sequence: Synthetic oligonucleotide
  Sense strand starting at position 2845 of SEQ ID NO: 586835
gcuguauagcuucugucua

SEQ ID NO: 747591 - RNA, 19 nt, Artificial Sequence
  Description of Artificial Sequence: Synthetic oligonucleotide
  Antisense strand to SEQ ID NO: 747590
uagacagaagcuauacagc

SEQ ID NO: 747592 - RNA, 19 nt, Artificial Sequence
  Description of Artificial Sequence: Synthetic oligonucleotide
  Sense strand starting at position 2847 of SEQ ID NO: 586835
uguauagcuucugucuaca

SEQ ID NO: 747593 - RNA, 19 nt, Artificial Sequence
  Description of Artificial Sequence: Synthetic oligonucleotide
  Antisense strand to SEQ ID NO: 747592
uguagacagaagcuauaca

SEQ ID NO: 747594 - RNA, 19 nt, Artificial Sequence
  Description of Artificial Sequence: Synthetic oligonucleotide
  Sense strand starting at position 3202 of SEQ ID NO: 586835
agaaguuaauccuugguau

SEQ ID NO: 747595 - RNA, 19 nt, Artificial Sequence
  Description of Artificial Sequence: Synthetic oligonucleotide
  Antisense strand to SEQ ID NO: 747594
auaccaaggauuaacuucu

SEQ ID NO: 747596 - RNA, 19 nt, Artificial Sequence
  Description of Artificial Sequence: Synthetic oligonucleotide
  Sense strand starting at position 3203 of SEQ ID NO: 586835
gaaguuaauccuugguauu

SEQ ID NO: 747597 - RNA, 19 nt, Artificial Sequence
  Description of Artificial Sequence: Synthetic oligonucleotide
  Antisense strand to SEQ ID NO: 747596
aauaccaaggauuaacuuc

SEQ ID NO: 747598 - RNA, 19 nt, Artificial Sequence
  Description of Artificial Sequence: Synthetic oligonucleotide
  Sense strand starting at position 3204 of SEQ ID NO: 586835
aaguuaauccuugguauug

SEQ ID NO: 747599 - RNA, 19 nt, Artificial Sequence
  Description of Artificial Sequence: Synthetic oligonucleotide
  Antisense strand to SEQ ID NO: 747598
caauaccaaggauuaacuu

SEQ ID NO: 747600 - RNA, 19 nt, Artificial Sequence
  Description of Artificial Sequence: Synthetic oligonucleotide
  Sense strand starting at position 3205 of SEQ ID NO: 586835
aguuaauccuugguauuga

SEQ ID NO: 747601 - RNA, 19 nt, Artificial Sequence
  Description of Artificial Sequence: Synthetic oligonucleotide
  Antisense strand to SEQ ID NO: 747600
ucaauaccaaggauuaacu

SEQ ID NO: 747602 - RNA, 19 nt, Artificial Sequence
  Description of Artificial Sequence: Synthetic oligonucleotide
  Sense strand starting at position 3206 of SEQ ID NO: 586835
guuaauccuugguauugaa

SEQ ID NO: 747603 - RNA, 19 nt, Artificial Sequence
  Description of Artificial Sequence: Synthetic oligonucleotide
  Antisense strand to SEQ ID NO: 747602
uucaauaccaaggauuaac

SEQ ID NO: 747604 - RNA, 19 nt, Artificial Sequence
  Description of Artificial Sequence: Synthetic oligonucleotide
  Sense strand starting at position 3553 of SEQ ID NO: 586835
acauaauuguugggagcga

SEQ ID NO: 747605 - RNA, 19 nt, Artificial Sequence
  Description of Artificial Sequence: Synthetic oligonucleotide
  Antisense strand to SEQ ID NO: 747604
ucgcucccaacaauuaugu

SEQ ID NO: 747606 - RNA, 19 nt, Artificial Sequence
  Description of Artificial Sequence: Synthetic oligonucleotide
  Sense strand starting at position 3554 of SEQ ID NO: 586835
cauaauuguugggagcgau

SEQ ID NO: 747607 - RNA, 19 nt, Artificial Sequence
  Description of Artificial Sequence: Synthetic oligonucleotide
  Antisense strand to SEQ ID NO: 747606
aucgcucccaacaauuaug

SEQ ID NO: 747608 - RNA, 19 nt, Artificial Sequence
  Description of Artificial Sequence: Synthetic oligonucleotide
  Sense strand starting at position 3605 of SEQ ID NO: 586835
cccauauccuguuaauugu

SEQ ID NO: 747609 - RNA, 19 nt, Artificial Sequence
  Description of Artificial Sequence: Synthetic oligonucleotide
  Antisense strand to SEQ ID NO: 747608
acaauuaacaggauauggg

SEQ ID NO: 747610 - RNA, 19 nt, Artificial Sequence
  Description of Artificial Sequence: Synthetic oligonucleotide
  Sense strand starting at position 3631 of SEQ ID NO: 586835
gcgggcauuugcgaugaca

SEQ ID NO: 747611 - RNA, 19 nt, Artificial Sequence
  Description of Artificial Sequence: Synthetic oligonucleotide
  Antisense strand to SEQ ID NO: 747610
ugucaucgcaaaugcccgc

SEQ ID NO: 747612 - RNA, 19 nt, Artificial Sequence
  Description of Artificial Sequence: Synthetic oligonucleotide
  Sense strand starting at position 3668 of SEQ ID NO: 586835
acacuugaccuugaguacu

SEQ ID NO: 747613 - RNA, 19 nt, Artificial Sequence
  Description of Artificial Sequence: Synthetic oligonucleotide
  Antisense strand to SEQ ID NO: 747612
aguacucaaggucaagugu

SEQ ID NO: 747614 - RNA, 19 nt, Artificial Sequence
  Description of Artificial Sequence: Synthetic oligonucleotide
  Sense strand starting at position 3674 of SEQ ID NO: 586835
gaccuugaguacuggaaug

SEQ ID NO: 747615 - RNA, 19 nt, Artificial Sequence
  Description of Artificial Sequence: Synthetic oligonucleotide
  Antisense strand to SEQ ID NO: 747614
cauuccaguacucaagguc

SEQ ID NO: 747616 - RNA, 19 nt, Artificial Sequence
  Description of Artificial Sequence: Synthetic oligonucleotide
  Sense strand starting at position 3684 of SEQ ID NO: 586835
acuggaaugcucugagguc

SEQ ID NO: 747617 - RNA, 19 nt, Artificial Sequence
  Description of Artificial Sequence: Synthetic oligonucleotide
  Antisense strand to SEQ ID NO: 747616
gaccucagagcauuccagu

SEQ ID NO: 747618 - RNA, 19 nt, Artificial Sequence
  Description of Artificial Sequence: Synthetic oligonucleotide
  Sense strand starting at position 3685 of SEQ ID NO: 586835
cuggaaugcucugagguca

SEQ ID NO: 747619 - RNA, 19 nt, Artificial Sequence
  Description of Artificial Sequence: Synthetic oligonucleotide
  Antisense strand to SEQ ID NO: 747618
ugaccucagagcauuccag

SEQ ID NO: 747620 - RNA, 19 nt, Artificial Sequence
  Description of Artificial Sequence: Synthetic oligonucleotide
  Sense strand starting at position 3710 of SEQ ID NO: 586835
ugccacagugcuugagacu

SEQ ID NO: 747621 - RNA, 19 nt, Artificial Sequence
  Description of Artificial Sequence: Synthetic oligonucleotide
  Antisense strand to SEQ ID NO: 747620
agucucaagcacuguggca

SEQ ID NO: 747622 - RNA, 19 nt, Artificial Sequence
  Description of Artificial Sequence: Synthetic oligonucleotide
  Sense strand starting at position 3796 of SEQ ID NO: 586835
aauugcuaguuuccagaga

SEQ ID NO: 747623 - RNA, 19 nt, Artificial Sequence
  Description of Artificial Sequence: Synthetic oligonucleotide
  Antisense strand to SEQ ID NO: 747622
ucucuggaaacuagcaauu

SEQ ID NO: 747624 - RNA, 19 nt, Artificial Sequence
  Description of Artificial Sequence: Synthetic oligonucleotide
  Sense strand starting at position 3797 of SEQ ID NO: 586835
auugcuaguuuccagagau

SEQ ID NO: 747625 - RNA, 19 nt, Artificial Sequence
  Description of Artificial Sequence: Synthetic oligonucleotide
  Antisense strand to SEQ ID NO: 747624
aucucuggaaacuagcaau

SEQ ID NO: 747626 - RNA, 19 nt, Artificial Sequence
  Description of Artificial Sequence: Synthetic oligonucleotide
  Sense strand starting at position 3900 of SEQ ID NO: 586835
cucugccucugagguuaaa

SEQ ID NO: 747627 - RNA, 19 nt, Artificial Sequence
  Description of Artificial Sequence: Synthetic oligonucleotide
  Antisense strand to SEQ ID NO: 747626
uuuaaccucagaggcagag

SEQ ID NO: 747628 - RNA, 19 nt, Artificial Sequence
  Description of Artificial Sequence: Synthetic oligonucleotide
  Sense strand starting at position 60 of SEQ ID NO: 586836
ugaaauguuccauggacuu

SEQ ID NO: 747629 - RNA, 19 nt, Artificial Sequence
  Description of Artificial Sequence: Synthetic oligonucleotide
  Antisense strand to SEQ ID NO: 747628
aaguccauggaacauuuca

SEQ ID NO: 747630 - RNA, 19 nt, Artificial Sequence
  Description of Artificial Sequence: Synthetic oligonucleotide
  Sense strand starting at position 73 of SEQ ID NO: 586836
ggacuucacgaguaaaugu

SEQ ID NO: 747631 - RNA, 19 nt, Artificial Sequence
  Description of Artificial Sequence: Synthetic oligonucleotide
  Antisense strand to SEQ ID NO: 747630
acauuuacucgugaagucc

SEQ ID NO: 747632 - RNA, 19 nt, Artificial Sequence
  Description of Artificial Sequence: Synthetic oligonucleotide
  Sense strand starting at position 80 of SEQ ID NO: 586836
acgaguaaauguucuggau

SEQ ID NO: 747633 - RNA, 19 nt, Artificial Sequence
  Description of Artificial Sequence: Synthetic oligonucleotide
  Antisense strand to SEQ ID NO: 747632
auccagaacauuuacucgu

SEQ ID NO: 747634 - RNA, 19 nt, Artificial Sequence
  Description of Artificial Sequence: Synthetic oligonucleotide
  Sense strand starting at position 186 of SEQ ID NO: 586836
gguggaucaacccagaguu

SEQ ID NO: 747635 - RNA, 19 nt, Artificial Sequence
  Description of Artificial Sequence: Synthetic oligonucleotide
  Antisense strand to SEQ ID NO: 747634
aacucuggguugauccacc

SEQ ID NO: 747636 - RNA, 19 nt, Artificial Sequence
  Description of Artificial Sequence: Synthetic oligonucleotide
  Sense strand starting at position 331 of SEQ ID NO: 586836
ucaggaauaucccuggguu

SEQ ID NO: 747637 - RNA, 19 nt, Artificial Sequence
  Description of Artificial Sequence: Synthetic oligonucleotide
  Antisense strand to SEQ ID NO: 747636
aacccagggauauuccuga

SEQ ID NO: 747638 - RNA, 19 nt, Artificial Sequence
  Description of Artificial Sequence: Synthetic oligonucleotide
  Sense strand starting at position 332 of SEQ ID NO: 586836
caggaauaucccuggguug

SEQ ID NO: 747639 - RNA, 19 nt, Artificial Sequence
  Description of Artificial Sequence: Synthetic oligonucleotide
  Antisense strand to SEQ ID NO: 747638
caacccagggauauuccug

SEQ ID NO: 747640 - RNA, 19 nt, Artificial Sequence
  Description of Artificial Sequence: Synthetic oligonucleotide
  Sense strand starting at position 333 of SEQ ID NO: 586836
aggaauaucccuggguugu

SEQ ID NO: 747641 - RNA, 19 nt, Artificial Sequence
  Description of Artificial Sequence: Synthetic oligonucleotide
  Antisense strand to SEQ ID NO: 747640
acaacccagggauauuccu

SEQ ID NO: 747642 - RNA, 19 nt, Artificial Sequence
  Description of Artificial Sequence: Synthetic oligonucleotide
  Sense strand starting at position 334 of SEQ ID NO: 586836
ggaauaucccuggguuguu

SEQ ID NO: 747643 - RNA, 19 nt, Artificial Sequence
  Description of Artificial Sequence: Synthetic oligonucleotide
  Antisense strand to SEQ ID NO: 747642
aacaacccagggauauucc

SEQ ID NO: 747644 - RNA, 19 nt, Artificial Sequence
  Description of Artificial Sequence: Synthetic oligonucleotide
  Sense strand starting at position 335 of SEQ ID NO: 586836
gaauaucccuggguuguuu

SEQ ID NO: 747645 - RNA, 19 nt, Artificial Sequence
  Description of Artificial Sequence: Synthetic oligonucleotide
  Antisense strand to SEQ ID NO: 747644
aaacaacccagggauauuc

SEQ ID NO: 747646 - RNA, 19 nt, Artificial Sequence
  Description of Artificial Sequence: Synthetic oligonucleotide
  Sense strand starting at position 468 of SEQ ID NO: 586836
cugaaaugcggauguugua

SEQ ID NO: 747647 - RNA, 19 nt, Artificial Sequence
  Description of Artificial Sequence: Synthetic oligonucleotide
  Antisense strand to SEQ ID NO: 747646
uacaacauccgcauuucag

SEQ ID NO: 747648 - RNA, 19 nt, Artificial Sequence
  Description of Artificial Sequence: Synthetic oligonucleotide
  Sense strand starting at position 504 of SEQ ID NO: 586836
aagcuaucugcucagcgaa

SEQ ID NO: 747649 - RNA, 19 nt, Artificial Sequence
  Description of Artificial Sequence: Synthetic oligonucleotide
  Antisense strand to SEQ ID NO: 747648
uucgcugagcagauagcuu

SEQ ID NO: 747650 - RNA, 19 nt, Artificial Sequence
  Description of Artificial Sequence: Synthetic oligonucleotide
  Sense strand starting at position 516 of SEQ ID NO: 586836
cagcgaaaguuuccaacau

SEQ ID NO: 747651 - RNA, 19 nt, Artificial Sequence
  Description of Artificial Sequence: Synthetic oligonucleotide
  Antisense strand to SEQ ID NO: 747650
auguuggaaacuuucgcug

SEQ ID NO: 747652 - RNA, 19 nt, Artificial Sequence
  Description of Artificial Sequence: Synthetic oligonucleotide
  Sense strand starting at position 539 of SEQ ID NO: 586836
uggcaugaaggucauaagu

SEQ ID NO: 747653 - RNA, 19 nt, Artificial Sequence
  Description of Artificial Sequence: Synthetic oligonucleotide
  Antisense strand to SEQ ID NO: 747652
acuuaugaccuucaugcca

SEQ ID NO: 747654 - RNA, 19 nt, Artificial Sequence
  Description of Artificial Sequence: Synthetic oligonucleotide
  Sense strand starting at position 639 of SEQ ID NO: 586836
uggguucccugguuuacua

SEQ ID NO: 747655 - RNA, 19 nt, Artificial Sequence
  Description of Artificial Sequence: Synthetic oligonucleotide
  Antisense strand to SEQ ID NO: 747654
uaguaaaccagggaaccca

SEQ ID NO: 747656 - RNA, 19 nt, Artificial Sequence
  Description of Artificial Sequence: Synthetic oligonucleotide
  Sense strand starting at position 721 of SEQ ID NO: 586836
guagguagaacuugcaaau

SEQ ID NO: 747657 - RNA, 19 nt, Artificial Sequence
  Description of Artificial Sequence: Synthetic oligonucleotide
  Antisense strand to SEQ ID NO: 747656
auuugcaaguucuaccuac

SEQ ID NO: 747658 - RNA, 19 nt, Artificial Sequence
  Description of Artificial Sequence: Synthetic oligonucleotide
  Sense strand starting at position 730 of SEQ ID NO: 586836
acuugcaaaugguuaauga

SEQ ID NO: 747659 - RNA, 19 nt, Artificial Sequence
  Description of Artificial Sequence: Synthetic oligonucleotide
  Antisense strand to SEQ ID NO: 747658
ucauuaaccauuugcaagu

SEQ ID NO: 747660 - RNA, 19 nt, Artificial Sequence
  Description of Artificial Sequence: Synthetic oligonucleotide
  Sense strand starting at position 731 of SEQ ID NO: 586836
cuugcaaaugguuaaugaa

SEQ ID NO: 747661 - RNA, 19 nt, Artificial Sequence
  Description of Artificial Sequence: Synthetic oligonucleotide
  Antisense strand to SEQ ID NO: 747660
uucauuaaccauuugcaag

SEQ ID NO: 747662 - RNA, 19 nt, Artificial Sequence
  Description of Artificial Sequence: Synthetic oligonucleotide
  Sense strand starting at position 842 of SEQ ID NO: 586836
ugcuuacaaggaggauuaa

SEQ ID NO: 747663 - RNA, 19 nt, Artificial Sequence
  Description of Artificial Sequence: Synthetic oligonucleotide
  Antisense strand to SEQ ID NO: 747662
uuaauccuccuuguaagca

SEQ ID NO: 747664 - RNA, 19 nt, Artificial Sequence
  Description of Artificial Sequence: Synthetic oligonucleotide
  Sense strand starting at position 854 of SEQ ID NO: 586836
ggauuaaaguucucgaugc

SEQ ID NO: 747665 - RNA, 19 nt, Artificial Sequence
  Description of Artificial Sequence: Synthetic oligonucleotide
  Antisense strand to SEQ ID NO: 747664
gcaucgagaacuuuaaucc

SEQ ID NO: 747666 - RNA, 19 nt, Artificial Sequence
  Description of Artificial Sequence: Synthetic oligonucleotide
  Sense strand starting at position 856 of SEQ ID NO: 586836
auuaaaguucucgaugcca

SEQ ID NO: 747667 - RNA, 19 nt, Artificial Sequence
  Description of Artificial Sequence: Synthetic oligonucleotide
  Antisense strand to SEQ ID NO: 747666
uggcaucgagaacuuuaau

SEQ ID NO: 747668 - RNA, 19 nt, Artificial Sequence
  Description of Artificial Sequence: Synthetic oligonucleotide
  Sense strand starting at position 887 of SEQ ID NO: 586836
cugucuugauccucagaau

SEQ ID NO: 747669 - RNA, 19 nt, Artificial Sequence
  Description of Artificial Sequence: Synthetic oligonucleotide
  Antisense strand to SEQ ID NO: 747668
auucugaggaucaagacag

SEQ ID NO: 747670 - RNA, 19 nt, Artificial Sequence
  Description of Artificial Sequence: Synthetic oligonucleotide
  Sense strand starting at position 888 of SEQ ID NO: 586836
ugucuugauccucagaauc

SEQ ID NO: 747671 - RNA, 19 nt, Artificial Sequence
  Description of Artificial Sequence: Synthetic oligonucleotide
  Antisense strand to SEQ ID NO: 747670
gauucugaggaucaagaca

SEQ ID NO: 747672 - RNA, 19 nt, Artificial Sequence
  Description of Artificial Sequence: Synthetic oligonucleotide
  Sense strand starting at position 925 of SEQ ID NO: 586836
caggguggcugucuuacua

SEQ ID NO: 747673 - RNA, 19 nt, Artificial Sequence
  Description of Artificial Sequence: Synthetic oligonucleotide
  Antisense strand to SEQ ID NO: 747672
uaguaagacagccacccug

SEQ ID NO: 747674 - RNA, 19 nt, Artificial Sequence
  Description of Artificial Sequence: Synthetic oligonucleotide
  Sense strand starting at position 980 of SEQ ID NO: 586836
guaucuugcuugccaagaa

SEQ ID NO: 747675 - RNA, 19 nt, Artificial Sequence
  Description of Artificial Sequence: Synthetic oligonucleotide
  Antisense strand to SEQ ID NO: 747674
uucuuggcaagcaagauac

SEQ ID NO: 747676 - RNA, 19 nt, Artificial Sequence
  Description of Artificial Sequence: Synthetic oligonucleotide
  Sense strand starting at position 984 of SEQ ID NO: 586836
cuugcuugccaagaaucaa

SEQ ID NO: 747677 - RNA, 19 nt, Artificial Sequence
  Description of Artificial Sequence: Synthetic oligonucleotide
  Antisense strand to SEQ ID NO: 747676
uugauucuuggcaagcaag

SEQ ID NO: 747678 - RNA, 19 nt, Artificial Sequence
  Description of Artificial Sequence: Synthetic oligonucleotide
  Sense strand starting at position 1150 of SEQ ID NO: 586836
cuuauuaguggucaccagu

SEQ ID NO: 747679 - RNA, 19 nt, Artificial Sequence
  Description of Artificial Sequence: Synthetic oligonucleotide
  Antisense strand to SEQ ID NO: 747678
acuggugaccacuaauaag

SEQ ID NO: 747680 - RNA, 19 nt, Artificial Sequence
  Description of Artificial Sequence: Synthetic oligonucleotide
  Sense strand starting at position 1153 of SEQ ID NO: 586836
auuaguggucaccaguuua

SEQ ID NO: 747681 - RNA, 19 nt, Artificial Sequence
  Description of Artificial Sequence: Synthetic oligonucleotide
  Antisense strand to SEQ ID NO: 747680
uaaacuggugaccacuaau

SEQ ID NO: 747682 - RNA, 19 nt, Artificial Sequence
  Description of Artificial Sequence: Synthetic oligonucleotide
  Sense strand starting at position 1481 of SEQ ID NO: 586836
gcgccucucacguuaggua

SEQ ID NO: 747683 - RNA, 19 nt, Artificial Sequence
  Description of Artificial Sequence: Synthetic oligonucleotide
  Antisense strand to SEQ ID NO: 747682
uaccuaacgugagaggcgc

SEQ ID NO: 747684 - RNA, 19 nt, Artificial Sequence
  Description of Artificial Sequence: Synthetic oligonucleotide
  Sense strand starting at position 1897 of SEQ ID NO: 586836
gccgucgccgcgaaagaua

SEQ ID NO: 747685 - RNA, 19 nt, Artificial Sequence
  Description of Artificial Sequence: Synthetic oligonucleotide
  Antisense strand to SEQ ID NO: 747684
uaucuuucgcggcgacggc

SEQ ID NO: 747686 - RNA, 19 nt, Artificial Sequence
  Description of Artificial Sequence: Synthetic oligonucleotide
  Sense strand starting at position 2155 of SEQ ID NO: 586836
ccggcagagaaaugaaagu

SEQ ID NO: 747687 - RNA, 19 nt, Artificial Sequence
  Description of Artificial Sequence: Synthetic oligonucleotide
  Antisense strand to SEQ ID NO: 747686
acuuucauuucucugccgg

SEQ ID NO: 747688 - RNA, 19 nt, Artificial Sequence
  Description of Artificial Sequence: Synthetic oligonucleotide
  Sense strand starting at position 2333 of SEQ ID NO: 586836
uugcuugugaucgccacau

SEQ ID NO: 747689 - RNA, 19 nt, Artificial Sequence
  Description of Artificial Sequence: Synthetic oligonucleotide
  Antisense strand to SEQ ID NO: 747688
auguggcgaucacaagcaa

SEQ ID NO: 747690 - RNA, 19 nt, Artificial Sequence
  Description of Artificial Sequence: Synthetic oligonucleotide
  Sense strand starting at position 2379 of SEQ ID NO: 586836
ccugaaauuggcgaggcuu

SEQ ID NO: 747691 - RNA, 19 nt, Artificial Sequence
  Description of Artificial Sequence: Synthetic oligonucleotide
  Antisense strand to SEQ ID NO: 747690
aagccucgccaauuucagg

SEQ ID NO: 747692 - RNA, 19 nt, Artificial Sequence
  Description of Artificial Sequence: Synthetic oligonucleotide
  Sense strand starting at position 2381 of SEQ ID NO: 586836
ugaaauuggcgaggcuuca

SEQ ID NO: 747693 - RNA, 19 nt, Artificial Sequence
  Description of Artificial Sequence: Synthetic oligonucleotide
  Antisense strand to SEQ ID NO: 747692
ugaagccucgccaauuuca

SEQ ID NO: 747694 - RNA, 19 nt, Artificial Sequence
  Description of Artificial Sequence: Synthetic oligonucleotide
  Sense strand starting at position 2702 of SEQ ID NO: 586836
ucucaaagcgcugcgauua

SEQ ID NO: 747695 - RNA, 19 nt, Artificial Sequence
  Description of Artificial Sequence: Synthetic oligonucleotide
  Antisense strand to SEQ ID NO: 747694
uaaucgcagcgcuuugaga

SEQ ID NO: 747696 - RNA, 19 nt, Artificial Sequence
  Description of Artificial Sequence: Synthetic oligonucleotide
  Sense strand starting at position 2926 of SEQ ID NO: 586836
caugaagauuaagugguau

SEQ ID NO: 747697 - RNA, 19 nt, Artificial Sequence
  Description of Artificial Sequence: Synthetic oligonucleotide
  Antisense strand to SEQ ID NO: 747696
auaccacuuaaucuucaug

SEQ ID NO: 747698 - RNA, 19 nt, Artificial Sequence
  Description of Artificial Sequence: Synthetic oligonucleotide
  Sense strand starting at position 2928 of SEQ ID NO: 586836
ugaagauuaagugguauaa

SEQ ID NO: 747699 - RNA, 19 nt, Artificial Sequence
  Description of Artificial Sequence: Synthetic oligonucleotide
  Antisense strand to SEQ ID NO: 747698
uuauaccacuuaaucuuca

SEQ ID NO: 747700 - RNA, 19 nt, Artificial Sequence
  Description of Artificial Sequence: Synthetic oligonucleotide
  Sense strand starting at position 2932 of SEQ ID NO: 586836
gauuaagugguauaaccuu

SEQ ID NO: 747701 - RNA, 19 nt, Artificial Sequence
  Description of Artificial Sequence: Synthetic oligonucleotide
  Antisense strand to SEQ ID NO: 747700
aagguuauaccacuuaauc

SEQ ID NO: 747702 - RNA, 19 nt, Artificial Sequence
  Description of Artificial Sequence: Synthetic oligonucleotide
  Sense strand starting at position 2940 of SEQ ID NO: 586836
gguauaaccuuuguuccua

SEQ ID NO: 747703 - RNA, 19 nt, Artificial Sequence
  Description of Artificial Sequence: Synthetic oligonucleotide
  Antisense strand to SEQ ID NO: 747702
uaggaacaaagguuauacc

SEQ ID NO: 747704 - RNA, 19 nt, Artificial Sequence
  Description of Artificial Sequence: Synthetic oligonucleotide
  Sense strand starting at position 2941 of SEQ ID NO: 586836
guauaaccuuuguuccuaa

SEQ ID NO: 747705 - RNA, 19 nt, Artificial Sequence
  Description of Artificial Sequence: Synthetic oligonucleotide
  Antisense strand to SEQ ID NO: 747704
uuaggaacaaagguuauac

SEQ ID NO: 747706 - RNA, 19 nt, Artificial Sequence
  Description of Artificial Sequence: Synthetic oligonucleotide
  Sense strand starting at position 2977 of SEQ ID NO: 586836
auuacuaaguguucucauc

SEQ ID NO: 747707 - RNA, 19 nt, Artificial Sequence
  Description of Artificial Sequence: Synthetic oligonucleotide
  Antisense strand to SEQ ID NO: 747706
gaugagaacacuuaguaau

SEQ ID NO: 747708 - RNA, 19 nt, Artificial Sequence
  Description of Artificial Sequence: Synthetic oligonucleotide
  Sense strand starting at position 432 of SEQ ID NO: 586837
gucuguuaucccguaaguu

SEQ ID NO: 747709 - RNA, 19 nt, Artificial Sequence
  Description of Artificial Sequence: Synthetic oligonucleotide
  Antisense strand to SEQ ID NO: 747708
aacuuacgggauaacagac

SEQ ID NO: 747710 - RNA, 19 nt, Artificial Sequence
  Description of Artificial Sequence: Synthetic oligonucleotide
  Sense strand starting at position 540 of SEQ ID NO: 586837
gagaucaggugauugaucu

SEQ ID NO: 747711 - RNA, 19 nt, Artificial Sequence
  Description of Artificial Sequence: Synthetic oligonucleotide
  Antisense strand to SEQ ID NO: 747710
agaucaaucaccugaucuc

SEQ ID NO: 747712 - RNA, 19 nt, Artificial Sequence
  Description of Artificial Sequence: Synthetic oligonucleotide
  Sense strand starting at position 544 of SEQ ID NO: 586837
ucaggugauugaucuguca

SEQ ID NO: 747713 - RNA, 19 nt, Artificial Sequence
  Description of Artificial Sequence: Synthetic oligonucleotide
  Antisense strand to SEQ ID NO: 747712
ugacagaucaaucaccuga

SEQ ID NO: 747714 - RNA, 19 nt, Artificial Sequence
  Description of Artificial Sequence: Synthetic oligonucleotide
  Sense strand starting at position 546 of SEQ ID NO: 586837
aggugauugaucugucaga

SEQ ID NO: 747715 - RNA, 19 nt, Artificial Sequence
  Description of Artificial Sequence: Synthetic oligonucleotide
  Antisense strand to SEQ ID NO: 747714
ucugacagaucaaucaccu

SEQ ID NO: 747716 - RNA, 19 nt, Artificial Sequence
  Description of Artificial Sequence: Synthetic oligonucleotide
  Sense strand starting at position 547 of SEQ ID NO: 586837
ggugauugaucugucagac

SEQ ID NO: 747717 - RNA, 19 nt, Artificial Sequence
  Description of Artificial Sequence: Synthetic oligonucleotide
  Antisense strand to SEQ ID NO: 747716
gucugacagaucaaucacc

SEQ ID NO: 747718 - RNA, 19 nt, Artificial Sequence
  Description of Artificial Sequence: Synthetic oligonucleotide
  Sense strand starting at position 569 of SEQ ID NO: 586837
acagaaaugugauuaucuu

SEQ ID NO: 747719 - RNA, 19 nt, Artificial Sequence
  Description of Artificial Sequence: Synthetic oligonucleotide
  Antisense strand to SEQ ID NO: 747718
aagauaaucacauuucugu

SEQ ID NO: 747720 - RNA, 19 nt, Artificial Sequence
  Description of Artificial Sequence: Synthetic oligonucleotide
  Sense strand starting at position 575 of SEQ ID NO: 586837
augugauuaucuuuaguuc

SEQ ID NO: 747721 - RNA, 19 nt, Artificial Sequence
  Description of Artificial Sequence: Synthetic oligonucleotide
  Antisense strand to SEQ ID NO: 747720
gaacuaaagauaaucacau

SEQ ID NO: 747722 - RNA, 19 nt, Artificial Sequence
  Description of Artificial Sequence: Synthetic oligonucleotide
  Sense strand starting at position 645 of SEQ ID NO: 586837
acacacgaauuugauaauu

SEQ ID NO: 747723 - RNA, 19 nt, Artificial Sequence
  Description of Artificial Sequence: Synthetic oligonucleotide
  Antisense strand to SEQ ID NO: 747722
aauuaucaaauucgugugu

SEQ ID NO: 747724 - RNA, 19 nt, Artificial Sequence
  Description of Artificial Sequence: Synthetic oligonucleotide
  Sense strand starting at position 647 of SEQ ID NO: 586837
acacgaauuugauaauugu

SEQ ID NO: 747725 - RNA, 19 nt, Artificial Sequence
  Description of Artificial Sequence: Synthetic oligonucleotide
  Antisense strand to SEQ ID NO: 747724
acaauuaucaaauucgugu

SEQ ID NO: 747726 - RNA, 19 nt, Artificial Sequence
  Description of Artificial Sequence: Synthetic oligonucleotide
  Sense strand starting at position 653 of SEQ ID NO: 586837
auuugauaauuguucgcua

SEQ ID NO: 747727 - RNA, 19 nt, Artificial Sequence
  Description of Artificial Sequence: Synthetic oligonucleotide
  Antisense strand to SEQ ID NO: 747726
uagcgaacaauuaucaaau

SEQ ID NO: 747728 - RNA, 19 nt, Artificial Sequence
  Description of Artificial Sequence: Synthetic oligonucleotide
  Sense strand starting at position 657 of SEQ ID NO: 586837
gauaauuguucgcuaaaua

SEQ ID NO: 747729 - RNA, 19 nt, Artificial Sequence
  Description of Artificial Sequence: Synthetic oligonucleotide
  Antisense strand to SEQ ID NO: 747728
uauuuagcgaacaauuauc

SEQ ID NO: 747730 - RNA, 19 nt, Artificial Sequence
  Description of Artificial Sequence: Synthetic oligonucleotide
  Sense strand starting at position 803 of SEQ ID NO: 586837
aaagcauucugaguuauag

SEQ ID NO: 747731 - RNA, 19 nt, Artificial Sequence
  Description of Artificial Sequence: Synthetic oligonucleotide
  Antisense strand to SEQ ID NO: 747730
cuauaacucagaaugcuuu

SEQ ID NO: 747732 - RNA, 19 nt, Artificial Sequence
  Description of Artificial Sequence: Synthetic oligonucleotide
  Sense strand starting at position 864 of SEQ ID NO: 586837
gcuguagggauccgaaauc

SEQ ID NO: 747733 - RNA, 19 nt, Artificial Sequence
  Description of Artificial Sequence: Synthetic oligonucleotide
  Antisense strand to SEQ ID NO: 747732
gauuucggaucccuacagc

SEQ ID NO: 747734 - RNA, 19 nt, Artificial Sequence
  Description of Artificial Sequence: Synthetic oligonucleotide
  Sense strand starting at position 874 of SEQ ID NO: 586837
uccgaaaucuacuuuaugu

SEQ ID NO: 747735 - RNA, 19 nt, Artificial Sequence
  Description of Artificial Sequence: Synthetic oligonucleotide
  Antisense strand to SEQ ID NO: 747734
acauaaaguagauuucgga

SEQ ID NO: 747736 - RNA, 19 nt, Artificial Sequence
  Description of Artificial Sequence: Synthetic oligonucleotide
  Sense strand starting at position 876 of SEQ ID NO: 586837
cgaaaucuacuuuauguaa

SEQ ID NO: 747737 - RNA, 19 nt, Artificial Sequence
  Description of Artificial Sequence: Synthetic oligonucleotide
  Antisense strand to SEQ ID NO: 747736
uuacauaaaguagauuucg

SEQ ID NO: 747738 - RNA, 19 nt, Artificial Sequence
  Description of Artificial Sequence: Synthetic oligonucleotide
  Sense strand starting at position 1258 of SEQ ID NO: 586837
ucuguaacgucacuaacaa

SEQ ID NO: 747739 - RNA, 19 nt, Artificial Sequence
  Description of Artificial Sequence: Synthetic oligonucleotide
  Antisense strand to SEQ ID NO: 747738
uuguuagugacguuacaga

SEQ ID NO: 747740 - RNA, 19 nt, Artificial Sequence
  Description of Artificial Sequence: Synthetic oligonucleotide
  Sense strand starting at position 1259 of SEQ ID NO: 586837
cuguaacgucacuaacaaa

SEQ ID NO: 747741 - RNA, 19 nt, Artificial Sequence
  Description of Artificial Sequence: Synthetic oligonucleotide
  Antisense strand to SEQ ID NO: 747740
uuuguuagugacguuacag

SEQ ID NO: 747742 - RNA, 19 nt, Artificial Sequence
  Description of Artificial Sequence: Synthetic oligonucleotide
  Sense strand starting at position 1401 of SEQ ID NO: 586837
aucguacuccaacauguuu

SEQ ID NO: 747743 - RNA, 19 nt, Artificial Sequence
  Description of Artificial Sequence: Synthetic oligonucleotide
  Antisense strand to SEQ ID NO: 747742
aaacauguuggaguacgau

SEQ ID NO: 747744 - RNA, 19 nt, Artificial Sequence
  Description of Artificial Sequence: Synthetic oligonucleotide
  Sense strand starting at position 1478 of SEQ ID NO: 586837
gauuaacuucugcaucgua

SEQ ID NO: 747745 - RNA, 19 nt, Artificial Sequence
  Description of Artificial Sequence: Synthetic oligonucleotide
  Antisense strand to SEQ ID NO: 747744
uacgaugcagaaguuaauc

SEQ ID NO: 747746 - RNA, 19 nt, Artificial Sequence
  Description of Artificial Sequence: Synthetic oligonucleotide
  Sense strand starting at position 1534 of SEQ ID NO: 586837
cucacuagugucgauaucu

SEQ ID NO: 747747 - RNA, 19 nt, Artificial Sequence
  Description of Artificial Sequence: Synthetic oligonucleotide
  Antisense strand to SEQ ID NO: 747746
agauaucgacacuagugag

SEQ ID NO: 747748 - RNA, 19 nt, Artificial Sequence
  Description of Artificial Sequence: Synthetic oligonucleotide
  Sense strand starting at position 1539 of SEQ ID NO: 586837
uagugucgauaucuaauuu

SEQ ID NO: 747749 - RNA, 19 nt, Artificial Sequence
  Description of Artificial Sequence: Synthetic oligonucleotide
  Antisense strand to SEQ ID NO: 747748
aaauuagauaucgacacua

SEQ ID NO: 747750 - RNA, 19 nt, Artificial Sequence
  Description of Artificial Sequence: Synthetic oligonucleotide
  Sense strand starting at position 1665 of SEQ ID NO: 586837
cacagcaggcucgagauaa

SEQ ID NO: 747751 - RNA, 19 nt, Artificial Sequence
  Description of Artificial Sequence: Synthetic oligonucleotide
  Antisense strand to SEQ ID NO: 747750
uuaucucgagccugcugug

SEQ ID NO: 747752 - RNA, 19 nt, Artificial Sequence
  Description of Artificial Sequence: Synthetic oligonucleotide
  Sense strand starting at position 1700 of SEQ ID NO: 586837
guuucucugcgauaauuac

SEQ ID NO: 747753 - RNA, 19 nt, Artificial Sequence
  Description of Artificial Sequence: Synthetic oligonucleotide
  Antisense strand to SEQ ID NO: 747752
guaauuaucgcagagaaac

SEQ ID NO: 747754 - RNA, 19 nt, Artificial Sequence
  Description of Artificial Sequence: Synthetic oligonucleotide
  Sense strand starting at position 2101 of SEQ ID NO: 586837
gugacuuuccagcuuucgu

SEQ ID NO: 747755 - RNA, 19 nt, Artificial Sequence
  Description of Artificial Sequence: Synthetic oligonucleotide
  Antisense strand to SEQ ID NO: 747754
acgaaagcuggaaagucac

SEQ ID NO: 747756 - RNA, 19 nt, Artificial Sequence
  Description of Artificial Sequence: Synthetic oligonucleotide
  Sense strand starting at position 2372 of SEQ ID NO: 586837
ugauuaaccuugucauugu

SEQ ID NO: 747757 - RNA, 19 nt, Artificial Sequence
  Description of Artificial Sequence: Synthetic oligonucleotide
  Antisense strand to SEQ ID NO: 747756
acaaugacaagguuaauca

SEQ ID NO: 747758 - RNA, 19 nt, Artificial Sequence
  Description of Artificial Sequence: Synthetic oligonucleotide
  Sense strand starting at position 3067 of SEQ ID NO: 586837
aguuauaucccacgcagaa

SEQ ID NO: 747759 - RNA, 19 nt, Artificial Sequence
  Description of Artificial Sequence: Synthetic oligonucleotide
  Antisense strand to SEQ ID NO: 747758
uucugcgugggauauaacu

SEQ ID NO: 747760 - RNA, 19 nt, Artificial Sequence
  Description of Artificial Sequence: Synthetic oligonucleotide
  Sense strand starting at position 3114 of SEQ ID NO: 586837
agcuguccauuugaggaaa

SEQ ID NO: 747761 - RNA, 19 nt, Artificial Sequence
  Description of Artificial Sequence: Synthetic oligonucleotide
  Antisense strand to SEQ ID NO: 747760
uuuccucaaauggacagcu

SEQ ID NO: 747762 - RNA, 19 nt, Artificial Sequence
  Description of Artificial Sequence: Synthetic oligonucleotide
  Sense strand starting at position 3175 of SEQ ID NO: 586837
cugcauccggcugagaaau

SEQ ID NO: 747763 - RNA, 19 nt, Artificial Sequence
  Description of Artificial Sequence: Synthetic oligonucleotide
  Antisense strand to SEQ ID NO: 747762
auuucucagccggaugcag

SEQ ID NO: 747764 - RNA, 19 nt, Artificial Sequence
  Description of Artificial Sequence: Synthetic oligonucleotide
  Sense strand starting at position 3181 of SEQ ID NO: 586837
ccggcugagaaauacuauu

SEQ ID NO: 747765 - RNA, 19 nt, Artificial Sequence
  Description of Artificial Sequence: Synthetic oligonucleotide
  Antisense strand to SEQ ID NO: 747764
aauaguauuucucagccgg

SEQ ID NO: 747766 - RNA, 19 nt, Artificial Sequence
  Description of Artificial Sequence: Synthetic oligonucleotide
  Sense strand starting at position 3229 of SEQ ID NO: 586837
ggcuuuggacccugaccaa

SEQ ID NO: 747767 - RNA, 19 nt, Artificial Sequence
  Description of Artificial Sequence: Synthetic oligonucleotide
  Antisense strand to SEQ ID NO: 747766
uuggucaggguccaaagcc

SEQ ID NO: 747768 - RNA, 19 nt, Artificial Sequence
  Description of Artificial Sequence: Synthetic oligonucleotide
  Sense strand starting at position 3317 of SEQ ID NO: 586837
auucuuucccgucaccauu

SEQ ID NO: 747769 - RNA, 19 nt, Artificial Sequence
  Description of Artificial Sequence: Synthetic oligonucleotide
  Antisense strand to SEQ ID NO: 747768
aauggugacgggaaagaau

SEQ ID NO: 747770 - RNA, 19 nt, Artificial Sequence
  Description of Artificial Sequence: Synthetic oligonucleotide
  Sense strand starting at position 3553 of SEQ ID NO: 586837
cuccucuguggguacuaaa

SEQ ID NO: 747771 - RNA, 19 nt, Artificial Sequence
  Description of Artificial Sequence: Synthetic oligonucleotide
  Antisense strand to SEQ ID NO: 747770
uuuaguacccacagaggag

SEQ ID NO: 747772 - RNA, 19 nt, Artificial Sequence
  Description of Artificial Sequence: Synthetic oligonucleotide
  Sense strand starting at position 3603 of SEQ ID NO: 586837
cuguuuaucuuacuucuga

SEQ ID NO: 747773 - RNA, 19 nt, Artificial Sequence
  Description of Artificial Sequence: Synthetic oligonucleotide
  Antisense strand to SEQ ID NO: 747772
ucagaaguaagauaaacag

SEQ ID NO: 747774 - RNA, 19 nt, Artificial Sequence
  Description of Artificial Sequence: Synthetic oligonucleotide
  Sense strand starting at position 3692 of SEQ ID NO: 586837
ugaagaacucuuuauugcu

SEQ ID NO: 747775 - RNA, 19 nt, Artificial Sequence
  Description of Artificial Sequence: Synthetic oligonucleotide
  Antisense strand to SEQ ID NO: 747774
agcaauaaagaguucuuca

SEQ ID NO: 747776 - RNA, 19 nt, Artificial Sequence
  Description of Artificial Sequence: Synthetic oligonucleotide
  Sense strand starting at position 3844 of SEQ ID NO: 586837
ccauguucuguagaaugug

SEQ ID NO: 747777 - RNA, 19 nt, Artificial Sequence
  Description of Artificial Sequence: Synthetic oligonucleotide
  Antisense strand to SEQ ID NO: 747776
cacauucuacagaacaugg

SEQ ID NO: 747778 - RNA, 19 nt, Artificial Sequence
  Description of Artificial Sequence: Synthetic oligonucleotide
  Sense strand starting at position 3849 of SEQ ID NO: 586837
uucuguagaaugugaugaa

SEQ ID NO: 747779 - RNA, 19 nt, Artificial Sequence
  Description of Artificial Sequence: Synthetic oligonucleotide
  Antisense strand to SEQ ID NO: 747778
uucaucacauucuacagaa

SEQ ID NO: 747780 - RNA, 19 nt, Artificial Sequence
  Description of Artificial Sequence: Synthetic oligonucleotide
  Sense strand starting at position 3858 of SEQ ID NO: 586837
augugaugaagaugucuaa

SEQ ID NO: 747781 - RNA, 19 nt, Artificial Sequence
  Description of Artificial Sequence: Synthetic oligonucleotide
  Antisense strand to SEQ ID NO: 747780
uuagacaucuucaucacau

SEQ ID NO: 747782 - RNA, 19 nt, Artificial Sequence
  Description of Artificial Sequence: Synthetic oligonucleotide
  Sense strand starting at position 3871 of SEQ ID NO: 586837
gucuaauagagguauacgu

SEQ ID NO: 747783 - RNA, 19 nt, Artificial Sequence
  Description of Artificial Sequence: Synthetic oligonucleotide
  Antisense strand to SEQ ID NO: 747782
acguauaccucuauuagac

SEQ ID NO: 747784 - RNA, 19 nt, Artificial Sequence
  Description of Artificial Sequence: Synthetic oligonucleotide
  Sense strand starting at position 3873 of SEQ ID NO: 586837
cuaauagagguauacguaa

SEQ ID NO: 747785 - RNA, 19 nt, Artificial Sequence
  Description of Artificial Sequence: Synthetic oligonucleotide
  Antisense strand to SEQ ID NO: 747784
uuacguauaccucuauuag

SEQ ID NO: 747786 - RNA, 19 nt, Artificial Sequence
  Description of Artificial Sequence: Synthetic oligonucleotide
  Sense strand starting at position 3875 of SEQ ID NO: 586837
aauagagguauacguaagu

SEQ ID NO: 747787 - RNA, 19 nt, Artificial Sequence
  Description of Artificial Sequence: Synthetic oligonucleotide
  Antisense strand to SEQ ID NO: 747786
acuuacguauaccucuauu

SEQ ID NO: 747788 - RNA, 19 nt, Artificial Sequence
  Description of Artificial Sequence: Synthetic oligonucleotide
  Sense strand starting at position 116 of SEQ ID NO: 586838
acaagugacuuuccugauu

SEQ ID NO: 747789 - RNA, 19 nt, Artificial Sequence
  Description of Artificial Sequence: Synthetic oligonucleotide
  Antisense strand to SEQ ID NO: 747788
aaucaggaaagucacuugu

SEQ ID NO: 747790 - RNA, 19 nt, Artificial Sequence
  Description of Artificial Sequence: Synthetic oligonucleotide
  Sense strand starting at position 172 of SEQ ID NO: 586838
cuuauuagagauugaagua

SEQ ID NO: 747791 - RNA, 19 nt, Artificial Sequence
  Description of Artificial Sequence: Synthetic oligonucleotide
  Antisense strand to SEQ ID NO: 747790
uacuucaaucucuaauaag

SEQ ID NO: 747792 - RNA, 19 nt, Artificial Sequence
  Description of Artificial Sequence: Synthetic oligonucleotide
  Sense strand starting at position 380 of SEQ ID NO: 586838
uugauauauuugcucguca

SEQ ID NO: 747793 - RNA, 19 nt, Artificial Sequence
  Description of Artificial Sequence: Synthetic oligonucleotide
  Antisense strand to SEQ ID NO: 747792
ugacgagcaaauauaucaa

SEQ ID NO: 747794 - RNA, 19 nt, Artificial Sequence
  Description of Artificial Sequence: Synthetic oligonucleotide
  Sense strand starting at position 381 of SEQ ID NO: 586838
ugauauauuugcucgucag

SEQ ID NO: 747795 - RNA, 19 nt, Artificial Sequence
  Description of Artificial Sequence: Synthetic oligonucleotide
  Antisense strand to SEQ ID NO: 747794
cugacgagcaaauauauca

SEQ ID NO: 747796 - RNA, 19 nt, Artificial Sequence
  Description of Artificial Sequence: Synthetic oligonucleotide
  Sense strand starting at position 382 of SEQ ID NO: 586838
gauauauuugcucgucagu

SEQ ID NO: 747797 - RNA, 19 nt, Artificial Sequence
  Description of Artificial Sequence: Synthetic oligonucleotide
  Antisense strand to SEQ ID NO: 747796
acugacgagcaaauauauc

SEQ ID NO: 747798 - RNA, 19 nt, Artificial Sequence
  Description of Artificial Sequence: Synthetic oligonucleotide
  Sense strand starting at position 384 of SEQ ID NO: 586838
uauauuugcucgucaguga

SEQ ID NO: 747799 - RNA, 19 nt, Artificial Sequence
  Description of Artificial Sequence: Synthetic oligonucleotide
  Antisense strand to SEQ ID NO: 747798
ucacugacgagcaaauaua

SEQ ID NO: 747800 - RNA, 19 nt, Artificial Sequence
  Description of Artificial Sequence: Synthetic oligonucleotide
  Sense strand starting at position 768 of SEQ ID NO: 586838
ccagcuugucuugauugga

SEQ ID NO: 747801 - RNA, 19 nt, Artificial Sequence
  Description of Artificial Sequence: Synthetic oligonucleotide
  Antisense strand to SEQ ID NO: 747800
uccaaucaagacaagcugg

SEQ ID NO: 747802 - RNA, 19 nt, Artificial Sequence
  Description of Artificial Sequence: Synthetic oligonucleotide
  Sense strand starting at position 778 of SEQ ID NO: 586838
uugauuggaaaguguacaa

SEQ ID NO: 747803 - RNA, 19 nt, Artificial Sequence
  Description of Artificial Sequence: Synthetic oligonucleotide
  Antisense strand to SEQ ID NO: 747802
uuguacacuuuccaaucaa

SEQ ID NO: 747804 - RNA, 19 nt, Artificial Sequence
  Description of Artificial Sequence: Synthetic oligonucleotide
  Sense strand starting at position 812 of SEQ ID NO: 586838
ggaguuuauaaauauucgu

SEQ ID NO: 747805 - RNA, 19 nt, Artificial Sequence
  Description of Artificial Sequence: Synthetic oligonucleotide
  Antisense strand to SEQ ID NO: 747804
acgaauauuuauaaacucc

SEQ ID NO: 747806 - RNA, 19 nt, Artificial Sequence
  Description of Artificial Sequence: Synthetic oligonucleotide
  Sense strand starting at position 817 of SEQ ID NO: 586838
uuauaaauauucgugacca

SEQ ID NO: 747807 - RNA, 19 nt, Artificial Sequence
  Description of Artificial Sequence: Synthetic oligonucleotide
  Antisense strand to SEQ ID NO: 747806
uggucacgaauauuuauaa

SEQ ID NO: 747808 - RNA, 19 nt, Artificial Sequence
  Description of Artificial Sequence: Synthetic oligonucleotide
  Sense strand starting at position 832 of SEQ ID NO: 586838
accauagucugguuuauga

SEQ ID NO: 747809 - RNA, 19 nt, Artificial Sequence
  Description of Artificial Sequence: Synthetic oligonucleotide
  Antisense strand to SEQ ID NO: 747808
ucauaaaccagacuauggu

SEQ ID NO: 747810 - RNA, 19 nt, Artificial Sequence
  Description of Artificial Sequence: Synthetic oligonucleotide
  Sense strand starting at position 834 of SEQ ID NO: 586838
cauagucugguuuaugagu

SEQ ID NO: 747811 - RNA, 19 nt, Artificial Sequence
  Description of Artificial Sequence: Synthetic oligonucleotide
  Antisense strand to SEQ ID NO: 747810
acucauaaaccagacuaug

SEQ ID NO: 747812 - RNA, 19 nt, Artificial Sequence
  Description of Artificial Sequence: Synthetic oligonucleotide
  Sense strand starting at position 839 of SEQ ID NO: 586838
ucugguuuaugaguuaaca

SEQ ID NO: 747813 - RNA, 19 nt, Artificial Sequence
  Description of Artificial Sequence: Synthetic oligonucleotide
  Antisense strand to SEQ ID NO: 747812
uguuaacucauaaaccaga

SEQ ID NO: 747814 - RNA, 19 nt, Artificial Sequence
  Description of Artificial Sequence: Synthetic oligonucleotide
  Sense strand starting at position 1014 of SEQ ID NO: 586838
ccacuuuaguuaucugaag

SEQ ID NO: 747815 - RNA, 19 nt, Artificial Sequence
  Description of Artificial Sequence: Synthetic oligonucleotide
  Antisense strand to SEQ ID NO: 747814
cuucagauaacuaaagugg

SEQ ID NO: 747816 - RNA, 19 nt, Artificial Sequence
  Description of Artificial Sequence: Synthetic oligonucleotide
  Sense strand starting at position 1020 of SEQ ID NO: 586838
uaguuaucugaaggcaaau

SEQ ID NO: 747817 - RNA, 19 nt, Artificial Sequence
  Description of Artificial Sequence: Synthetic oligonucleotide
  Antisense strand to SEQ ID NO: 747816
auuugccuucagauaacua

SEQ ID NO: 747818 - RNA, 19 nt, Artificial Sequence
  Description of Artificial Sequence: Synthetic oligonucleotide
  Sense strand starting at position 1204 of SEQ ID NO: 586838
uugugaggccucugagaga

SEQ ID NO: 747819 - RNA, 19 nt, Artificial Sequence
  Description of Artificial Sequence: Synthetic oligonucleotide
  Antisense strand to SEQ ID NO: 747818
ucucucagaggccucacaa

SEQ ID NO: 747820 - RNA, 19 nt, Artificial Sequence
  Description of Artificial Sequence: Synthetic oligonucleotide
  Sense strand starting at position 1293 of SEQ ID NO: 586838
aauggagcuguuuauuaaa

SEQ ID NO: 747821 - RNA, 19 nt, Artificial Sequence
  Description of Artificial Sequence: Synthetic oligonucleotide
  Antisense strand to SEQ ID NO: 747820
uuuaauaaacagcuccauu

SEQ ID NO: 747822 - RNA, 19 nt, Artificial Sequence
  Description of Artificial Sequence: Synthetic oligonucleotide
  Sense strand starting at position 1320 of SEQ ID NO: 586838
gcuggauugcauuaggaag

SEQ ID NO: 747823 - RNA, 19 nt, Artificial Sequence
  Description of Artificial Sequence: Synthetic oligonucleotide
  Antisense strand to SEQ ID NO: 747822
cuuccuaaugcaauccagc

SEQ ID NO: 747824 - RNA, 19 nt, Artificial Sequence
  Description of Artificial Sequence: Synthetic oligonucleotide
  Sense strand starting at position 1442 of SEQ ID NO: 586838
acacauuaucuggguuaga

SEQ ID NO: 747825 - RNA, 19 nt, Artificial Sequence
  Description of Artificial Sequence: Synthetic oligonucleotide
  Antisense strand to SEQ ID NO: 747824
ucuaacccagauaaugugu

SEQ ID NO: 747826 - RNA, 19 nt, Artificial Sequence
  Description of Artificial Sequence: Synthetic oligonucleotide
  Sense strand starting at position 1443 of SEQ ID NO: 586838
cacauuaucuggguuagaa

SEQ ID NO: 747827 - RNA, 19 nt, Artificial Sequence
  Description of Artificial Sequence: Synthetic oligonucleotide
  Antisense strand to SEQ ID NO: 747826
uucuaacccagauaaugug

SEQ ID NO: 747828 - RNA, 19 nt, Artificial Sequence
  Description of Artificial Sequence: Synthetic oligonucleotide
  Sense strand starting at position 1445 of SEQ ID NO: 586838
cauuaucuggguuagaagu

SEQ ID NO: 747829 - RNA, 19 nt, Artificial Sequence
  Description of Artificial Sequence: Synthetic oligonucleotide
  Antisense strand to SEQ ID NO: 747828
acuucuaacccagauaaug

SEQ ID NO: 747830 - RNA, 19 nt, Artificial Sequence
  Description of Artificial Sequence: Synthetic oligonucleotide
  Sense strand starting at position 1888 of SEQ ID NO: 586838
augugaaucauauggugag

SEQ ID NO: 747831 - RNA, 19 nt, Artificial Sequence
  Description of Artificial Sequence: Synthetic oligonucleotide
  Antisense strand to SEQ ID NO: 747830
cucaccauaugauucacau

SEQ ID NO: 747832 - RNA, 19 nt, Artificial Sequence
  Description of Artificial Sequence: Synthetic oligonucleotide
  Sense strand starting at position 1900 of SEQ ID NO: 586838
uggugagacccuuguggaa

SEQ ID NO: 747833 - RNA, 19 nt, Artificial Sequence
  Description of Artificial Sequence: Synthetic oligonucleotide
  Antisense strand to SEQ ID NO: 747832
uuccacaagggucucacca

SEQ ID NO: 747834 - RNA, 19 nt, Artificial Sequence
  Description of Artificial Sequence: Synthetic oligonucleotide
  Sense strand starting at position 1925 of SEQ ID NO: 586838
ggaguugagaaauggcuga

SEQ ID NO: 747835 - RNA, 19 nt, Artificial Sequence
  Description of Artificial Sequence: Synthetic oligonucleotide
  Antisense strand to SEQ ID NO: 747834
ucagccauuucucaacucc

SEQ ID NO: 747836 - RNA, 19 nt, Artificial Sequence
  Description of Artificial Sequence: Synthetic oligonucleotide
  Sense strand starting at position 1932 of SEQ ID NO: 586838
agaaauggcugacuccaua

SEQ ID NO: 747837 - RNA, 19 nt, Artificial Sequence
  Description of Artificial Sequence: Synthetic oligonucleotide
  Antisense strand to SEQ ID NO: 747836
uauggagucagccauuucu

SEQ ID NO: 747838 - RNA, 19 nt, Artificial Sequence
  Description of Artificial Sequence: Synthetic oligonucleotide
  Sense strand starting at position 2131 of SEQ ID NO: 586838
gaaugaaaccgucauguga

SEQ ID NO: 747839 - RNA, 19 nt, Artificial Sequence
  Description of Artificial Sequence: Synthetic oligonucleotide
  Antisense strand to SEQ ID NO: 747838
ucacaugacgguuucauuc

SEQ ID NO: 747840 - RNA, 19 nt, Artificial Sequence
  Description of Artificial Sequence: Synthetic oligonucleotide
  Sense strand starting at position 2183 of SEQ ID NO: 586838
cuccacagagcguaagaau

SEQ ID NO: 747841 - RNA, 19 nt, Artificial Sequence
  Description of Artificial Sequence: Synthetic oligonucleotide
  Antisense strand to SEQ ID NO: 747840
auucuuacgcucuguggag

SEQ ID NO: 747842 - RNA, 19 nt, Artificial Sequence
  Description of Artificial Sequence: Synthetic oligonucleotide
  Sense strand starting at position 2284 of SEQ ID NO: 586838
aaacaugggcuguaaucuu

SEQ ID NO: 747843 - RNA, 19 nt, Artificial Sequence
  Description of Artificial Sequence: Synthetic oligonucleotide
  Antisense strand to SEQ ID NO: 747842
aagauuacagcccauguuu

SEQ ID NO: 747844 - RNA, 19 nt, Artificial Sequence
  Description of Artificial Sequence: Synthetic oligonucleotide
  Sense strand starting at position 2303 of SEQ ID NO: 586838
ccgcuaaagguuuaacaaa

SEQ ID NO: 747845 - RNA, 19 nt, Artificial Sequence
  Description of Artificial Sequence: Synthetic oligonucleotide
  Antisense strand to SEQ ID NO: 747844
uuuguuaaaccuuuagcgg

SEQ ID NO: 747846 - RNA, 19 nt, Artificial Sequence
  Description of Artificial Sequence: Synthetic oligonucleotide
  Sense strand starting at position 2388 of SEQ ID NO: 586838
aucucaaaugaguguccau

SEQ ID NO: 747847 - RNA, 19 nt, Artificial Sequence
  Description of Artificial Sequence: Synthetic oligonucleotide
  Antisense strand to SEQ ID NO: 747846
auggacacucauuugagau

SEQ ID NO: 747848 - RNA, 19 nt, Artificial Sequence
  Description of Artificial Sequence: Synthetic oligonucleotide
  Sense strand starting at position 2391 of SEQ ID NO: 586838
ucaaaugaguguccauuaa

SEQ ID NO: 747849 - RNA, 19 nt, Artificial Sequence
  Description of Artificial Sequence: Synthetic oligonucleotide
  Antisense strand to SEQ ID NO: 747848
uuaauggacacucauuuga

SEQ ID NO: 747850 - RNA, 19 nt, Artificial Sequence
  Description of Artificial Sequence: Synthetic oligonucleotide
  Sense strand starting at position 2395 of SEQ ID NO: 586838
augaguguccauuaagacu

SEQ ID NO: 747851 - RNA, 19 nt, Artificial Sequence
  Description of Artificial Sequence: Synthetic oligonucleotide
  Antisense strand to SEQ ID NO: 747850
agucuuaauggacacucau

SEQ ID NO: 747852 - RNA, 19 nt, Artificial Sequence
  Description of Artificial Sequence: Synthetic oligonucleotide
  Sense strand starting at position 2580 of SEQ ID NO: 586838
ugugaacugcuacauaaca

SEQ ID NO: 747853 - RNA, 19 nt, Artificial Sequence
  Description of Artificial Sequence: Synthetic oligonucleotide
  Antisense strand to SEQ ID NO: 747852
uguuauguagcaguucaca

SEQ ID NO: 747854 - RNA, 19 nt, Artificial Sequence
  Description of Artificial Sequence: Synthetic oligonucleotide
  Sense strand starting at position 2614 of SEQ ID NO: 586838
gugaauuggaaguggacau

SEQ ID NO: 747855 - RNA, 19 nt, Artificial Sequence
  Description of Artificial Sequence: Synthetic oligonucleotide
  Antisense strand to SEQ ID NO: 747854
auguccacuuccaauucac

SEQ ID NO: 747856 - RNA, 19 nt, Artificial Sequence
  Description of Artificial Sequence: Synthetic oligonucleotide
  Sense strand starting at position 2636 of SEQ ID NO: 586838
aaauaauccguguaaauga

SEQ ID NO: 747857 - RNA, 19 nt, Artificial Sequence
  Description of Artificial Sequence: Synthetic oligonucleotide
  Antisense strand to SEQ ID NO: 747856
ucauuuacacggauuauuu

SEQ ID NO: 747858 - RNA, 19 nt, Artificial Sequence
  Description of Artificial Sequence: Synthetic oligonucleotide
  Sense strand starting at position 2653 of SEQ ID NO: 586838
gaugaugaccacuguaaua

SEQ ID NO: 747859 - RNA, 19 nt, Artificial Sequence
  Description of Artificial Sequence: Synthetic oligonucleotide
  Antisense strand to SEQ ID NO: 747858
uauuacaguggucaucauc

SEQ ID NO: 747860 - RNA, 19 nt, Artificial Sequence
  Description of Artificial Sequence: Synthetic oligonucleotide
  Sense strand starting at position 2869 of SEQ ID NO: 586838
guuauuguuaagggugaaa

SEQ ID NO: 747861 - RNA, 19 nt, Artificial Sequence
  Description of Artificial Sequence: Synthetic oligonucleotide
  Antisense strand to SEQ ID NO: 747860
uuucacccuuaacaauaac

SEQ ID NO: 747862 - RNA, 19 nt, Artificial Sequence
  Description of Artificial Sequence: Synthetic oligonucleotide
  Sense strand starting at position 2912 of SEQ ID NO: 586838
accuucuuaggcuaaagau

SEQ ID NO: 747863 - RNA, 19 nt, Artificial Sequence
  Description of Artificial Sequence: Synthetic oligonucleotide
  Antisense strand to SEQ ID NO: 747862
aucuuuagccuaagaaggu

SEQ ID NO: 747864 - RNA, 19 nt, Artificial Sequence
  Description of Artificial Sequence: Synthetic oligonucleotide
  Sense strand starting at position 3018 of SEQ ID NO: 586838
uggcuuuguggcagugaag

SEQ ID NO: 747865 - RNA, 19 nt, Artificial Sequence
  Description of Artificial Sequence: Synthetic oligonucleotide
  Antisense strand to SEQ ID NO: 747864
cuucacugccacaaagcca

SEQ ID NO: 747866 - RNA, 19 nt, Artificial Sequence
  Description of Artificial Sequence: Synthetic oligonucleotide
  Sense strand starting at position 3206 of SEQ ID NO: 586838
ucggguagcaaugagaaau

SEQ ID NO: 747867 - RNA, 19 nt, Artificial Sequence
  Description of Artificial Sequence: Synthetic oligonucleotide
  Antisense strand to SEQ ID NO: 747866
auuucucauugcuacccga

SEQ ID NO: 747868 - RNA, 19 nt, Artificial Sequence
  Description of Artificial Sequence: Synthetic oligonucleotide
  Sense strand starting at position 56 of SEQ ID NO: 586839
cacagaugugacugaauua

SEQ ID NO: 747869 - RNA, 19 nt, Artificial Sequence
  Description of Artificial Sequence: Synthetic oligonucleotide
  Antisense strand to SEQ ID NO: 747868
uaauucagucacaucugug

SEQ ID NO: 747870 - RNA, 19 nt, Artificial Sequence
  Description of Artificial Sequence: Synthetic oligonucleotide
  Sense strand starting at position 78 of SEQ ID NO: 586839
acuaguauccgugugcacu

SEQ ID NO: 747871 - RNA, 19 nt, Artificial Sequence
  Description of Artificial Sequence: Synthetic oligonucleotide
  Antisense strand to SEQ ID NO: 747870
agugcacacggauacuagu

SEQ ID NO: 747872 - RNA, 19 nt, Artificial Sequence
  Description of Artificial Sequence: Synthetic oligonucleotide
  Sense strand starting at position 79 of SEQ ID NO: 586839
cuaguauccgugugcacuu

SEQ ID NO: 747873 - RNA, 19 nt, Artificial Sequence
  Description of Artificial Sequence: Synthetic oligonucleotide
  Antisense strand to SEQ ID NO: 747872
aagugcacacggauacuag

SEQ ID NO: 747874 - RNA, 19 nt, Artificial Sequence
  Description of Artificial Sequence: Synthetic oligonucleotide
  Sense strand starting at position 86 of SEQ ID NO: 586839
ccgugugcacuucucuuau

SEQ ID NO: 747875 - RNA, 19 nt, Artificial Sequence
  Description of Artificial Sequence: Synthetic oligonucleotide
  Antisense strand to SEQ ID NO: 747874
auaagagaagugcacacgg

SEQ ID NO: 747876 - RNA, 19 nt, Artificial Sequence
  Description of Artificial Sequence: Synthetic oligonucleotide
  Sense strand starting at position 90 of SEQ ID NO: 586839
gugcacuucucuuauagca

SEQ ID NO: 747877 - RNA, 19 nt, Artificial Sequence
  Description of Artificial Sequence: Synthetic oligonucleotide
  Antisense strand to SEQ ID NO: 747876
ugcuauaagagaagugcac

SEQ ID NO: 747878 - RNA, 19 nt, Artificial Sequence
  Description of Artificial Sequence: Synthetic oligonucleotide
  Sense strand starting at position 394 of SEQ ID NO: 586839
ccuagaauguauggucuuu

SEQ ID NO: 747879 - RNA, 19 nt, Artificial Sequence
  Description of Artificial Sequence: Synthetic oligonucleotide
  Antisense strand to SEQ ID NO: 747878
aaagaccauacauucuagg

SEQ ID NO: 747880 - RNA, 19 nt, Artificial Sequence
  Description of Artificial Sequence: Synthetic oligonucleotide
  Sense strand starting at position 396 of SEQ ID NO: 586839
uagaauguauggucuuucu

SEQ ID NO: 747881 - RNA, 19 nt, Artificial Sequence
  Description of Artificial Sequence: Synthetic oligonucleotide
  Antisense strand to SEQ ID NO: 747880
agaaagaccauacauucua

SEQ ID NO: 747882 - RNA, 19 nt, Artificial Sequence
  Description of Artificial Sequence: Synthetic oligonucleotide
  Sense strand starting at position 428 of SEQ ID NO: 586839
uucucagagcuuuauaguc

SEQ ID NO: 747883 - RNA, 19 nt, Artificial Sequence
  Description of Artificial Sequence: Synthetic oligonucleotide
  Antisense strand to SEQ ID NO: 747882
gacuauaaagcucugagaa

SEQ ID NO: 747884 - RNA, 19 nt, Artificial Sequence
  Description of Artificial Sequence: Synthetic oligonucleotide
  Sense strand starting at position 436 of SEQ ID NO: 586839
gcuuuauagucgguacguu

SEQ ID NO: 747885 - RNA, 19 nt, Artificial Sequence
  Description of Artificial Sequence: Synthetic oligonucleotide
  Antisense strand to SEQ ID NO: 747884
aacguaccgacuauaaagc

SEQ ID NO: 747886 - RNA, 19 nt, Artificial Sequence
  Description of Artificial Sequence: Synthetic oligonucleotide
  Sense strand starting at position 437 of SEQ ID NO: 586839
cuuuauagucgguacguuu

SEQ ID NO: 747887 - RNA, 19 nt, Artificial Sequence
  Description of Artificial Sequence: Synthetic oligonucleotide
  Antisense strand to SEQ ID NO: 747886
aaacguaccgacuauaaag

SEQ ID NO: 747888 - RNA, 19 nt, Artificial Sequence
  Description of Artificial Sequence: Synthetic oligonucleotide
  Sense strand starting at position 556 of SEQ ID NO: 586839
cccugaagcucuuugggua

SEQ ID NO: 747889 - RNA, 19 nt, Artificial Sequence
  Description of Artificial Sequence: Synthetic oligonucleotide
  Antisense strand to SEQ ID NO: 747888
uacccaaagagcuucaggg

SEQ ID NO: 747890 - RNA, 19 nt, Artificial Sequence
  Description of Artificial Sequence: Synthetic oligonucleotide
  Sense strand starting at position 557 of SEQ ID NO: 586839
ccugaagcucuuuggguaa

SEQ ID NO: 747891 - RNA, 19 nt, Artificial Sequence
  Description of Artificial Sequence: Synthetic oligonucleotide
  Antisense strand to SEQ ID NO: 747890
uuacccaaagagcuucagg

SEQ ID NO: 747892 - RNA, 19 nt, Artificial Sequence
  Description of Artificial Sequence: Synthetic oligonucleotide
  Sense strand starting at position 597 of SEQ ID NO: 586839
aggccaaguuuccacgaaa

SEQ ID NO: 747893 - RNA, 19 nt, Artificial Sequence
  Description of Artificial Sequence: Synthetic oligonucleotide
  Antisense strand to SEQ ID NO: 747892
uuucguggaaacuuggccu

SEQ ID NO: 747894 - RNA, 19 nt, Artificial Sequence
  Description of Artificial Sequence: Synthetic oligonucleotide
  Sense strand starting at position 609 of SEQ ID NO: 586839
cacgaaagcccuugucacu

SEQ ID NO: 747895 - RNA, 19 nt, Artificial Sequence
  Description of Artificial Sequence: Synthetic oligonucleotide
  Antisense strand to SEQ ID NO: 747894
agugacaagggcuuucgug

SEQ ID NO: 747896 - RNA, 19 nt, Artificial Sequence
  Description of Artificial Sequence: Synthetic oligonucleotide
  Sense strand starting at position 665 of SEQ ID NO: 586839
uggauuaacaugcaguguu

SEQ ID NO: 747897 - RNA, 19 nt, Artificial Sequence
  Description of Artificial Sequence: Synthetic oligonucleotide
  Antisense strand to SEQ ID NO: 747896
aacacugcauguuaaucca

SEQ ID NO: 747898 - RNA, 19 nt, Artificial Sequence
  Description of Artificial Sequence: Synthetic oligonucleotide
  Sense strand starting at position 727 of SEQ ID NO: 586839
ggaaaucgcucuguccuca

SEQ ID NO: 747899 - RNA, 19 nt, Artificial Sequence
  Description of Artificial Sequence: Synthetic oligonucleotide
  Antisense strand to SEQ ID NO: 747898
ugaggacagagcgauuucc

SEQ ID NO: 747900 - RNA, 19 nt, Artificial Sequence
  Description of Artificial Sequence: Synthetic oligonucleotide
  Sense strand starting at position 731 of SEQ ID NO: 586839
aucgcucuguccucacgaa

SEQ ID NO: 747901 - RNA, 19 nt, Artificial Sequence
  Description of Artificial Sequence: Synthetic oligonucleotide
  Antisense strand to SEQ ID NO: 747900
uucgugaggacagagcgau

SEQ ID NO: 747902 - RNA, 19 nt, Artificial Sequence
  Description of Artificial Sequence: Synthetic oligonucleotide
  Sense strand starting at position 735 of SEQ ID NO: 586839
cucuguccucacgaagacu

SEQ ID NO: 747903 - RNA, 19 nt, Artificial Sequence
  Description of Artificial Sequence: Synthetic oligonucleotide
  Antisense strand to SEQ ID NO: 747902
agucuucgugaggacagag

SEQ ID NO: 747904 - RNA, 19 nt, Artificial Sequence
  Description of Artificial Sequence: Synthetic oligonucleotide
  Sense strand starting at position 776 of SEQ ID NO: 586839
ggaauaagaucccaaacua

SEQ ID NO: 747905 - RNA, 19 nt, Artificial Sequence
  Description of Artificial Sequence: Synthetic oligonucleotide
  Antisense strand to SEQ ID NO: 747904
uaguuugggaucuuauucc

SEQ ID NO: 747906 - RNA, 19 nt, Artificial Sequence
  Description of Artificial Sequence: Synthetic oligonucleotide
  Sense strand starting at position 887 of SEQ ID NO: 586839
acggaaucguacucaauau

SEQ ID NO: 747907 - RNA, 19 nt, Artificial Sequence
  Description of Artificial Sequence: Synthetic oligonucleotide
  Antisense strand to SEQ ID NO: 747906
auauugaguacgauuccgu

SEQ ID NO: 747908 - RNA, 19 nt, Artificial Sequence
  Description of Artificial Sequence: Synthetic oligonucleotide
  Sense strand starting at position 888 of SEQ ID NO: 586839
cggaaucguacucaauauu

SEQ ID NO: 747909 - RNA, 19 nt, Artificial Sequence
  Description of Artificial Sequence: Synthetic oligonucleotide
  Antisense strand to SEQ ID NO: 747908
aauauugaguacgauuccg

SEQ ID NO: 747910 - RNA, 19 nt, Artificial Sequence
  Description of Artificial Sequence: Synthetic oligonucleotide
  Sense strand starting at position 922 of SEQ ID NO: 586839
gcgccaaguuuagauacua

SEQ ID NO: 747911 - RNA, 19 nt, Artificial Sequence
  Description of Artificial Sequence: Synthetic oligonucleotide
  Antisense strand to SEQ ID NO: 747910
uaguaucuaaacuuggcgc

SEQ ID NO: 747912 - RNA, 19 nt, Artificial Sequence
  Description of Artificial Sequence: Synthetic oligonucleotide
  Sense strand starting at position 993 of SEQ ID NO: 586839
uuagguaaucacugguaau

SEQ ID NO: 747913 - RNA, 19 nt, Artificial Sequence
  Description of Artificial Sequence: Synthetic oligonucleotide
  Antisense strand to SEQ ID NO: 747912
auuaccagugauuaccuaa

SEQ ID NO: 747914 - RNA, 19 nt, Artificial Sequence
  Description of Artificial Sequence: Synthetic oligonucleotide
  Sense strand starting at position 996 of SEQ ID NO: 586839
gguaaucacugguaaucca

SEQ ID NO: 747915 - RNA, 19 nt, Artificial Sequence
  Description of Artificial Sequence: Synthetic oligonucleotide
  Antisense strand to SEQ ID NO: 747914
uggauuaccagugauuacc

SEQ ID NO: 747916 - RNA, 19 nt, Artificial Sequence
  Description of Artificial Sequence: Synthetic oligonucleotide
  Sense strand starting at position 1343 of SEQ ID NO: 586839
gcgccucgauccuugagaa

SEQ ID NO: 747917 - RNA, 19 nt, Artificial Sequence
  Description of Artificial Sequence: Synthetic oligonucleotide
  Antisense strand to SEQ ID NO: 747916
uucucaaggaucgaggcgc

SEQ ID NO: 747918 - RNA, 19 nt, Artificial Sequence
  Description of Artificial Sequence: Synthetic oligonucleotide
  Sense strand starting at position 1344 of SEQ ID NO: 586839
cgccucgauccuugagaaa

SEQ ID NO: 747919 - RNA, 19 nt, Artificial Sequence
  Description of Artificial Sequence: Synthetic oligonucleotide
  Antisense strand to SEQ ID NO: 747918
uuucucaaggaucgaggcg

SEQ ID NO: 747920 - RNA, 19 nt, Artificial Sequence
  Description of Artificial Sequence: Synthetic oligonucleotide
  Sense strand starting at position 2045 of SEQ ID NO: 586839
ugcgacuucgccagaguga

SEQ ID NO: 747921 - RNA, 19 nt, Artificial Sequence
  Description of Artificial Sequence: Synthetic oligonucleotide
  Antisense strand to SEQ ID NO: 747920
ucacucuggcgaagucgca

SEQ ID NO: 747922 - RNA, 19 nt, Artificial Sequence
  Description of Artificial Sequence: Synthetic oligonucleotide
  Sense strand starting at position 2292 of SEQ ID NO: 586839
gcucuucggccguugucaa

SEQ ID NO: 747923 - RNA, 19 nt, Artificial Sequence
  Description of Artificial Sequence: Synthetic oligonucleotide
  Antisense strand to SEQ ID NO: 747922
uugacaacggccgaagagc

SEQ ID NO: 747924 - RNA, 19 nt, Artificial Sequence
  Description of Artificial Sequence: Synthetic oligonucleotide
  Sense strand starting at position 2299 of SEQ ID NO: 586839
ggccguugucaagcgauga

SEQ ID NO: 747925 - RNA, 19 nt, Artificial Sequence
  Description of Artificial Sequence: Synthetic oligonucleotide
  Antisense strand to SEQ ID NO: 747924
ucaucgcuugacaacggcc

SEQ ID NO: 747926 - RNA, 19 nt, Artificial Sequence
  Description of Artificial Sequence: Synthetic oligonucleotide
  Sense strand starting at position 2300 of SEQ ID NO: 586839
gccguugucaagcgaugag

SEQ ID NO: 747927 - RNA, 19 nt, Artificial Sequence
  Description of Artificial Sequence: Synthetic oligonucleotide
  Antisense strand to SEQ ID NO: 747926
cucaucgcuugacaacggc

SEQ ID NO: 747928 - RNA, 19 nt, Artificial Sequence
  Description of Artificial Sequence: Synthetic oligonucleotide
  Sense strand starting at position 2532 of SEQ ID NO: 586839
ggagguugccuuugagcau

SEQ ID NO: 747929 - RNA, 19 nt, Artificial Sequence
  Description of Artificial Sequence: Synthetic oligonucleotide
  Antisense strand to SEQ ID NO: 747928
augcucaaaggcaaccucc

SEQ ID NO: 747930 - RNA, 19 nt, Artificial Sequence
  Description of Artificial Sequence: Synthetic oligonucleotide
  Sense strand starting at position 2699 of SEQ ID NO: 586839
ggcucuuaccugugaagau

SEQ ID NO: 747931 - RNA, 19 nt, Artificial Sequence
  Description of Artificial Sequence: Synthetic oligonucleotide
  Antisense strand to SEQ ID NO: 747930
aucuucacagguaagagcc

SEQ ID NO: 747932 - RNA, 19 nt, Artificial Sequence
  Description of Artificial Sequence: Synthetic oligonucleotide
  Sense strand starting at position 2700 of SEQ ID NO: 586839
gcucuuaccugugaagaug

SEQ ID NO: 747933 - RNA, 19 nt, Artificial Sequence
  Description of Artificial Sequence: Synthetic oligonucleotide
  Antisense strand to SEQ ID NO: 747932
caucuucacagguaagagc

SEQ ID NO: 747934 - RNA, 19 nt, Artificial Sequence
  Description of Artificial Sequence: Synthetic oligonucleotide
  Sense strand starting at position 2815 of SEQ ID NO: 586839
gcugaauugugcuuugauu

SEQ ID NO: 747935 - RNA, 19 nt, Artificial Sequence
  Description of Artificial Sequence: Synthetic oligonucleotide
  Antisense strand to SEQ ID NO: 747934
aaucaaagcacaauucagc

SEQ ID NO: 747936 - RNA, 19 nt, Artificial Sequence
  Description of Artificial Sequence: Synthetic oligonucleotide
  Sense strand starting at position 3523 of SEQ ID NO: 586839
gcacuuaugugacuggugu

SEQ ID NO: 747937 - RNA, 19 nt, Artificial Sequence
  Description of Artificial Sequence: Synthetic oligonucleotide
  Antisense strand to SEQ ID NO: 747936
acaccagucacauaagugc

SEQ ID NO: 747938 - RNA, 19 nt, Artificial Sequence
  Description of Artificial Sequence: Synthetic oligonucleotide
  Sense strand starting at position 3524 of SEQ ID NO: 586839
cacuuaugugacugguguu

SEQ ID NO: 747939 - RNA, 19 nt, Artificial Sequence
  Description of Artificial Sequence: Synthetic oligonucleotide
  Antisense strand to SEQ ID NO: 747938
aacaccagucacauaagug

SEQ ID NO: 747940 - RNA, 19 nt, Artificial Sequence
  Description of Artificial Sequence: Synthetic oligonucleotide
  Sense strand starting at position 3525 of SEQ ID NO: 586839
acuuaugugacugguguuu

SEQ ID NO: 747941 - RNA, 19 nt, Artificial Sequence
  Description of Artificial Sequence: Synthetic oligonucleotide
  Antisense strand to SEQ ID NO: 747940
aaacaccagucacauaagu

SEQ ID NO: 747942 - RNA, 19 nt, Artificial Sequence
  Description of Artificial Sequence: Synthetic oligonucleotide
  Sense strand starting at position 3570 of SEQ ID NO: 586839
cauauauccugggcuguca

SEQ ID NO: 747943 - RNA, 19 nt, Artificial Sequence
  Description of Artificial Sequence: Synthetic oligonucleotide
  Antisense strand to SEQ ID NO: 747942
ugacagcccaggauauaug

SEQ ID NO: 747944 - RNA, 19 nt, Artificial Sequence
  Description of Artificial Sequence: Synthetic oligonucleotide
  Sense strand starting at position 3914 of SEQ ID NO: 586839
gcaccuggacguuguuuaa

SEQ ID NO: 747945 - RNA, 19 nt, Artificial Sequence
  Description of Artificial Sequence: Synthetic oligonucleotide
  Antisense strand to SEQ ID NO: 747944
uuaaacaacguccaggugc

SEQ ID NO: 747946 - RNA, 19 nt, Artificial Sequence
  Description of Artificial Sequence: Synthetic oligonucleotide
  Sense strand starting at position 3972 of SEQ ID NO: 586839
uaggguuguggugagacaa

SEQ ID NO: 747947 - RNA, 19 nt, Artificial Sequence
  Description of Artificial Sequence: Synthetic oligonucleotide
  Antisense strand to SEQ ID NO: 747946
uugucucaccacaacccua

SEQ ID NO: 747948 - RNA, 19 nt, Artificial Sequence
  Description of Artificial Sequence: Synthetic oligonucleotide
  Sense strand starting at position 69 of SEQ ID NO: 586840
aaaugaguuuguguugaac

SEQ ID NO: 747949 - RNA, 19 nt, Artificial Sequence
  Description of Artificial Sequence: Synthetic oligonucleotide
  Antisense strand to SEQ ID NO: 747948
guucaacacaaacucauuu

SEQ ID NO: 747950 - RNA, 19 nt, Artificial Sequence
  Description of Artificial Sequence: Synthetic oligonucleotide
  Sense strand starting at position 72 of SEQ ID NO: 586840
ugaguuuguguugaacuua

SEQ ID NO: 747951 - RNA, 19 nt, Artificial Sequence
  Description of Artificial Sequence: Synthetic oligonucleotide
  Antisense strand to SEQ ID NO: 747950
uaaguucaacacaaacuca

SEQ ID NO: 747952 - RNA, 19 nt, Artificial Sequence
  Description of Artificial Sequence: Synthetic oligonucleotide
  Sense strand starting at position 144 of SEQ ID NO: 586840
aagaguauugaucgaauua

SEQ ID NO: 747953 - RNA, 19 nt, Artificial Sequence
  Description of Artificial Sequence: Synthetic oligonucleotide
  Antisense strand to SEQ ID NO: 747952
uaauucgaucaauacucuu

SEQ ID NO: 747954 - RNA, 19 nt, Artificial Sequence
  Description of Artificial Sequence: Synthetic oligonucleotide
  Sense strand starting at position 176 of SEQ ID NO: 586840
gguuguuugacagaaugua

SEQ ID NO: 747955 - RNA, 19 nt, Artificial Sequence
  Description of Artificial Sequence: Synthetic oligonucleotide
  Antisense strand to SEQ ID NO: 747954
uacauucugucaaacaacc

SEQ ID NO: 747956 - RNA, 19 nt, Artificial Sequence
  Description of Artificial Sequence: Synthetic oligonucleotide
  Sense strand starting at position 194 of SEQ ID NO: 586840
agguauucaguguaguaug

SEQ ID NO: 747957 - RNA, 19 nt, Artificial Sequence
  Description of Artificial Sequence: Synthetic oligonucleotide
  Antisense strand to SEQ ID NO: 747956
cauacuacacugaauaccu

SEQ ID NO: 747958 - RNA, 19 nt, Artificial Sequence
  Description of Artificial Sequence: Synthetic oligonucleotide
  Sense strand starting at position 201 of SEQ ID NO: 586840
caguguaguaugcaagaga

SEQ ID NO: 747959 - RNA, 19 nt, Artificial Sequence
  Description of Artificial Sequence: Synthetic oligonucleotide
  Antisense strand to SEQ ID NO: 747958
ucucuugcauacuacacug

SEQ ID NO: 747960 - RNA, 19 nt, Artificial Sequence
  Description of Artificial Sequence: Synthetic oligonucleotide
  Sense strand starting at position 401 of SEQ ID NO: 586840
auacacagggauuguuaau

SEQ ID NO: 747961 - RNA, 19 nt, Artificial Sequence
  Description of Artificial Sequence: Synthetic oligonucleotide
  Antisense strand to SEQ ID NO: 747960
auuaacaaucccuguguau

SEQ ID NO: 747962 - RNA, 19 nt, Artificial Sequence
  Description of Artificial Sequence: Synthetic oligonucleotide
  Sense strand starting at position 606 of SEQ ID NO: 586840
uucucaguuggaugugaga

SEQ ID NO: 747963 - RNA, 19 nt, Artificial Sequence
  Description of Artificial Sequence: Synthetic oligonucleotide
  Antisense strand to SEQ ID NO: 747962
ucucacauccaacugagaa

SEQ ID NO: 747964 - RNA, 19 nt, Artificial Sequence
  Description of Artificial Sequence: Synthetic oligonucleotide
  Sense strand starting at position 608 of SEQ ID NO: 586840
cucaguuggaugugagaau

SEQ ID NO: 747965 - RNA, 19 nt, Artificial Sequence
  Description of Artificial Sequence: Synthetic oligonucleotide
  Antisense strand to SEQ ID NO: 747964
auucucacauccaacugag

SEQ ID NO: 747966 - RNA, 19 nt, Artificial Sequence
  Description of Artificial Sequence: Synthetic oligonucleotide
  Sense strand starting at position 623 of SEQ ID NO: 586840
gaauaugcgguuuaaauua

SEQ ID NO: 747967 - RNA, 19 nt, Artificial Sequence
  Description of Artificial Sequence: Synthetic oligonucleotide
  Antisense strand to SEQ ID NO: 747966
uaauuuaaaccgcauauuc

SEQ ID NO: 747968 - RNA, 19 nt, Artificial Sequence
  Description of Artificial Sequence: Synthetic oligonucleotide
  Sense strand starting at position 628 of SEQ ID NO: 586840
ugcgguuuaaauuauggga

SEQ ID NO: 747969 - RNA, 19 nt, Artificial Sequence
  Description of Artificial Sequence: Synthetic oligonucleotide
  Antisense strand to SEQ ID NO: 747968
ucccauaauuuaaaccgca

SEQ ID NO: 747970 - RNA, 19 nt, Artificial Sequence
  Description of Artificial Sequence: Synthetic oligonucleotide
  Sense strand starting at position 703 of SEQ ID NO: 586840
caacguuuggcugcuugua

SEQ ID NO: 747971 - RNA, 19 nt, Artificial Sequence
  Description of Artificial Sequence: Synthetic oligonucleotide
  Antisense strand to SEQ ID NO: 747970
uacaagcagccaaacguug

SEQ ID NO: 747972 - RNA, 19 nt, Artificial Sequence
  Description of Artificial Sequence: Synthetic oligonucleotide
  Sense strand starting at position 797 of SEQ ID NO: 586840
ggaagauaguggcucuucu

SEQ ID NO: 747973 - RNA, 19 nt, Artificial Sequence
  Description of Artificial Sequence: Synthetic oligonucleotide
  Antisense strand to SEQ ID NO: 747972
agaagagccacuaucuucc

SEQ ID NO: 747974 - RNA, 19 nt, Artificial Sequence
  Description of Artificial Sequence: Synthetic oligonucleotide
  Sense strand starting at position 868 of SEQ ID NO: 586840
gguccuacacacugauauu

SEQ ID NO: 747975 - RNA, 19 nt, Artificial Sequence
  Description of Artificial Sequence: Synthetic oligonucleotide
  Antisense strand to SEQ ID NO: 747974
aauaucaguguguaggacc

SEQ ID NO: 747976 - RNA, 19 nt, Artificial Sequence
  Description of Artificial Sequence: Synthetic oligonucleotide
  Sense strand starting at position 932 of SEQ ID NO: 586840
gugauuauaugucuaucua

SEQ ID NO: 747977 - RNA, 19 nt, Artificial Sequence
  Description of Artificial Sequence: Synthetic oligonucleotide
  Antisense strand to SEQ ID NO: 747976
uagauagacauauaaucac

SEQ ID NO: 747978 - RNA, 19 nt, Artificial Sequence
  Description of Artificial Sequence: Synthetic oligonucleotide
  Sense strand starting at position 1043 of SEQ ID NO: 586840
auuucuaaaucuugggaac

SEQ ID NO: 747979 - RNA, 19 nt, Artificial Sequence
  Description of Artificial Sequence: Synthetic oligonucleotide
  Antisense strand to SEQ ID NO: 747978
guucccaagauuuagaaau

SEQ ID NO: 747980 - RNA, 19 nt, Artificial Sequence
  Description of Artificial Sequence: Synthetic oligonucleotide
  Sense strand starting at position 1085 of SEQ ID NO: 586840
cgaguugacacuuagcuua

SEQ ID NO: 747981 - RNA, 19 nt, Artificial Sequence
  Description of Artificial Sequence: Synthetic oligonucleotide
  Antisense strand to SEQ ID NO: 747980
uaagcuaagugucaacucg

SEQ ID NO: 747982 - RNA, 19 nt, Artificial Sequence
  Description of Artificial Sequence: Synthetic oligonucleotide
  Sense strand starting at position 1109 of SEQ ID NO: 586840
cgguauucugaagaauauc

SEQ ID NO: 747983 - RNA, 19 nt, Artificial Sequence
  Description of Artificial Sequence: Synthetic oligonucleotide
  Antisense strand to SEQ ID NO: 747982
gauauucuucagaauaccg

SEQ ID NO: 747984 - RNA, 19 nt, Artificial Sequence
  Description of Artificial Sequence: Synthetic oligonucleotide
  Sense strand starting at position 1334 of SEQ ID NO: 586840
ggcaguauuccuggaggag

SEQ ID NO: 747985 - RNA, 19 nt, Artificial Sequence
  Description of Artificial Sequence: Synthetic oligonucleotide
  Antisense strand to SEQ ID NO: 747984
cuccuccaggaauacugcc

SEQ ID NO: 747986 - RNA, 19 nt, Artificial Sequence
  Description of Artificial Sequence: Synthetic oligonucleotide
  Sense strand starting at position 1335 of SEQ ID NO: 586840
gcaguauuccuggaggaga

SEQ ID NO: 747987 - RNA, 19 nt, Artificial Sequence
  Description of Artificial Sequence: Synthetic oligonucleotide
  Antisense strand to SEQ ID NO: 747986
ucuccuccaggaauacugc

SEQ ID NO: 747988 - RNA, 19 nt, Artificial Sequence
  Description of Artificial Sequence: Synthetic oligonucleotide
  Sense strand starting at position 1472 of SEQ ID NO: 586840
ucuugaaacuuugcaaaug

SEQ ID NO: 747989 - RNA, 19 nt, Artificial Sequence
  Description of Artificial Sequence: Synthetic oligonucleotide
  Antisense strand to SEQ ID NO: 747988
cauuugcaaaguuucaaga

SEQ ID NO: 747990 - RNA, 19 nt, Artificial Sequence
  Description of Artificial Sequence: Synthetic oligonucleotide
  Sense strand starting at position 1543 of SEQ ID NO: 586840
ugacuugaaagugguaacu

SEQ ID NO: 747991 - RNA, 19 nt, Artificial Sequence
  Description of Artificial Sequence: Synthetic oligonucleotide
  Antisense strand to SEQ ID NO: 747990
aguuaccacuuucaaguca

SEQ ID NO: 747992 - RNA, 19 nt, Artificial Sequence
  Description of Artificial Sequence: Synthetic oligonucleotide
  Sense strand starting at position 1642 of SEQ ID NO: 586840
cccaguaacugacuggaaa

SEQ ID NO: 747993 - RNA, 19 nt, Artificial Sequence
  Description of Artificial Sequence: Synthetic oligonucleotide
  Antisense strand to SEQ ID NO: 747992
uuuccagucaguuacuggg

SEQ ID NO: 747994 - RNA, 19 nt, Artificial Sequence
  Description of Artificial Sequence: Synthetic oligonucleotide
  Sense strand starting at position 1994 of SEQ ID NO: 586840
gugugcacaccagagaaau

SEQ ID NO: 747995 - RNA, 19 nt, Artificial Sequence
  Description of Artificial Sequence: Synthetic oligonucleotide
  Antisense strand to SEQ ID NO: 747994
auuucucuggugugcacac

SEQ ID NO: 747996 - RNA, 19 nt, Artificial Sequence
  Description of Artificial Sequence: Synthetic oligonucleotide
  Sense strand starting at position 2033 of SEQ ID NO: 586840
auugaauucccaugcgaua

SEQ ID NO: 747997 - RNA, 19 nt, Artificial Sequence
  Description of Artificial Sequence: Synthetic oligonucleotide
  Antisense strand to SEQ ID NO: 747996
uaucgcaugggaauucaau

SEQ ID NO: 747998 - RNA, 19 nt, Artificial Sequence
  Description of Artificial Sequence: Synthetic oligonucleotide
  Sense strand starting at position 2035 of SEQ ID NO: 586840
ugaauucccaugcgauaga

SEQ ID NO: 747999 - RNA, 19 nt, Artificial Sequence
  Description of Artificial Sequence: Synthetic oligonucleotide
  Antisense strand to SEQ ID NO: 747998
ucuaucgcaugggaauuca

SEQ ID NO: 748000 - RNA, 19 nt, Artificial Sequence
  Description of Artificial Sequence: Synthetic oligonucleotide
  Sense strand starting at position 2156 of SEQ ID NO: 586840
aguuuaaauccagaguacu

SEQ ID NO: 748001 - RNA, 19 nt, Artificial Sequence
  Description of Artificial Sequence: Synthetic oligonucleotide
  Antisense strand to SEQ ID NO: 748000
aguacucuggauuuaaacu

SEQ ID NO: 748002 - RNA, 19 nt, Artificial Sequence
  Description of Artificial Sequence: Synthetic oligonucleotide
  Sense strand starting at position 2325 of SEQ ID NO: 586840
ugagaugagcuacagucau

SEQ ID NO: 748003 - RNA, 19 nt, Artificial Sequence
  Description of Artificial Sequence: Synthetic oligonucleotide
  Antisense strand to SEQ ID NO: 748002
augacuguagcucaucuca

SEQ ID NO: 748004 - RNA, 19 nt, Artificial Sequence
  Description of Artificial Sequence: Synthetic oligonucleotide
  Sense strand starting at position 2373 of SEQ ID NO: 586840
gcucaagaguuaccaaauc

SEQ ID NO: 748005 - RNA, 19 nt, Artificial Sequence
  Description of Artificial Sequence: Synthetic oligonucleotide
  Antisense strand to SEQ ID NO: 748004
gauuugguaacucuugagc

SEQ ID NO: 748006 - RNA, 19 nt, Artificial Sequence
  Description of Artificial Sequence: Synthetic oligonucleotide
  Sense strand starting at position 2627 of SEQ ID NO: 586840
aagaguggauguuuaagca

SEQ ID NO: 748007 - RNA, 19 nt, Artificial Sequence
  Description of Artificial Sequence: Synthetic oligonucleotide
  Antisense strand to SEQ ID NO: 748006
ugcuuaaacauccacucuu

SEQ ID NO: 748008 - RNA, 19 nt, Artificial Sequence
  Description of Artificial Sequence: Synthetic oligonucleotide
  Sense strand starting at position 2778 of SEQ ID NO: 586840
ggagaucagguagguauca

SEQ ID NO: 748009 - RNA, 19 nt, Artificial Sequence
  Description of Artificial Sequence: Synthetic oligonucleotide
  Antisense strand to SEQ ID NO: 748008
ugauaccuaccugaucucc

SEQ ID NO: 748010 - RNA, 19 nt, Artificial Sequence
  Description of Artificial Sequence: Synthetic oligonucleotide
  Sense strand starting at position 2845 of SEQ ID NO: 586840
cccagugaugcccaagaaa

SEQ ID NO: 748011 - RNA, 19 nt, Artificial Sequence
  Description of Artificial Sequence: Synthetic oligonucleotide
  Antisense strand to SEQ ID NO: 748010
uuucuugggcaucacuggg

SEQ ID NO: 748012 - RNA, 19 nt, Artificial Sequence
  Description of Artificial Sequence: Synthetic oligonucleotide
  Sense strand starting at position 3067 of SEQ ID NO: 586840
gguugacuccuaggguuag

SEQ ID NO: 748013 - RNA, 19 nt, Artificial Sequence
  Description of Artificial Sequence: Synthetic oligonucleotide
  Antisense strand to SEQ ID NO: 748012
cuaacccuaggagucaacc

SEQ ID NO: 748014 - RNA, 19 nt, Artificial Sequence
  Description of Artificial Sequence: Synthetic oligonucleotide
  Sense strand starting at position 3171 of SEQ ID NO: 586840
agagaugaggguugcugaa

SEQ ID NO: 748015 - RNA, 19 nt, Artificial Sequence
  Description of Artificial Sequence: Synthetic oligonucleotide
  Antisense strand to SEQ ID NO: 748014
uucagcaacccucaucucu

SEQ ID NO: 748016 - RNA, 19 nt, Artificial Sequence
  Description of Artificial Sequence: Synthetic oligonucleotide
  Sense strand starting at position 3473 of SEQ ID NO: 586840
guccacacuugaguggaaa

SEQ ID NO: 748017 - RNA, 19 nt, Artificial Sequence
  Description of Artificial Sequence: Synthetic oligonucleotide
  Antisense strand to SEQ ID NO: 748016
uuuccacucaaguguggac

SEQ ID NO: 748018 - RNA, 19 nt, Artificial Sequence
  Description of Artificial Sequence: Synthetic oligonucleotide
  Sense strand starting at position 3564 of SEQ ID NO: 586840
gucguugugagggauaaua

SEQ ID NO: 748019 - RNA, 19 nt, Artificial Sequence
  Description of Artificial Sequence: Synthetic oligonucleotide
  Antisense strand to SEQ ID NO: 748018
uauuaucccucacaacgac

SEQ ID NO: 748020 - RNA, 19 nt, Artificial Sequence
  Description of Artificial Sequence: Synthetic oligonucleotide
  Sense strand starting at position 3566 of SEQ ID NO: 586840
cguugugagggauaauaca

SEQ ID NO: 748021 - RNA, 19 nt, Artificial Sequence
  Description of Artificial Sequence: Synthetic oligonucleotide
  Antisense strand to SEQ ID NO: 748020
uguauuaucccucacaacg

SEQ ID NO: 748022 - RNA, 19 nt, Artificial Sequence
  Description of Artificial Sequence: Synthetic oligonucleotide
  Sense strand starting at position 3586 of SEQ ID NO: 586840
ggagaucuccuauacguaa

SEQ ID NO: 748023 - RNA, 19 nt, Artificial Sequence
  Description of Artificial Sequence: Synthetic oligonucleotide
  Antisense strand to SEQ ID NO: 748022
uuacguauaggagaucucc

SEQ ID NO: 748024 - RNA, 19 nt, Artificial Sequence
  Description of Artificial Sequence: Synthetic oligonucleotide
  Sense strand starting at position 3607 of SEQ ID NO: 586840
aguuauauccaaugguaac

SEQ ID NO: 748025 - RNA, 19 nt, Artificial Sequence
  Description of Artificial Sequence: Synthetic oligonucleotide
  Antisense strand to SEQ ID NO: 748024
guuaccauuggauauaacu

SEQ ID NO: 748026 - RNA, 19 nt, Artificial Sequence
  Description of Artificial Sequence: Synthetic oligonucleotide
  Sense strand starting at position 3957 of SEQ ID NO: 586840
gucauugcugaauaguauu

SEQ ID NO: 748027 - RNA, 19 nt, Artificial Sequence
  Description of Artificial Sequence: Synthetic oligonucleotide
  Antisense strand to SEQ ID NO: 748026
aauacuauucagcaaugac

SEQ ID NO: 748028 - RNA, 19 nt, Artificial Sequence
  Description of Artificial Sequence: Synthetic oligonucleotide
  Sense strand starting at position 340 of SEQ ID NO: 586841
gggcuuguuagguguuacu

SEQ ID NO: 748029 - RNA, 19 nt, Artificial Sequence
  Description of Artificial Sequence: Synthetic oligonucleotide
  Antisense strand to SEQ ID NO: 748028
aguaacaccuaacaagccc

SEQ ID NO: 748030 - RNA, 19 nt, Artificial Sequence
  Description of Artificial Sequence: Synthetic oligonucleotide
  Sense strand starting at position 347 of SEQ ID NO: 586841
uuagguguuacuggaacuu

SEQ ID NO: 748031 - RNA, 19 nt, Artificial Sequence
  Description of Artificial Sequence: Synthetic oligonucleotide
  Antisense strand to SEQ ID NO: 748030
aaguuccaguaacaccuaa

SEQ ID NO: 748032 - RNA, 19 nt, Artificial Sequence
  Description of Artificial Sequence: Synthetic oligonucleotide
  Sense strand starting at position 363 of SEQ ID NO: 586841
cuucgaacauacugaguau

SEQ ID NO: 748033 - RNA, 19 nt, Artificial Sequence
  Description of Artificial Sequence: Synthetic oligonucleotide
  Antisense strand to SEQ ID NO: 748032
auacucaguauguucgaag

SEQ ID NO: 748034 - RNA, 19 nt, Artificial Sequence
  Description of Artificial Sequence: Synthetic oligonucleotide
  Sense strand starting at position 376 of SEQ ID NO: 586841
gaguauucaggucaggugu

SEQ ID NO: 748035 - RNA, 19 nt, Artificial Sequence
  Description of Artificial Sequence: Synthetic oligonucleotide
  Antisense strand to SEQ ID NO: 748034
acaccugaccugaauacuc

SEQ ID NO: 748036 - RNA, 19 nt, Artificial Sequence
  Description of Artificial Sequence: Synthetic oligonucleotide
  Sense strand starting at position 378 of SEQ ID NO: 586841
guauucaggucagguguaa

SEQ ID NO: 748037 - RNA, 19 nt, Artificial Sequence
  Description of Artificial Sequence: Synthetic oligonucleotide
  Antisense strand to SEQ ID NO: 748036
uuacaccugaccugaauac

SEQ ID NO: 748038 - RNA, 19 nt, Artificial Sequence
  Description of Artificial Sequence: Synthetic oligonucleotide
  Sense strand starting at position 404 of SEQ ID NO: 586841
gggcaaggcucuuaaaggu

SEQ ID NO: 748039 - RNA, 19 nt, Artificial Sequence
  Description of Artificial Sequence: Synthetic oligonucleotide
  Antisense strand to SEQ ID NO: 748038
accuuuaagagccuugccc

SEQ ID NO: 748040 - RNA, 19 nt, Artificial Sequence
  Description of Artificial Sequence: Synthetic oligonucleotide
  Sense strand starting at position 468 of SEQ ID NO: 586841
uugcaagcuccuugagaca

SEQ ID NO: 748041 - RNA, 19 nt, Artificial Sequence
  Description of Artificial Sequence: Synthetic oligonucleotide
  Antisense strand to SEQ ID NO: 748040
ugucucaaggagcuugcaa

SEQ ID NO: 748042 - RNA, 19 nt, Artificial Sequence
  Description of Artificial Sequence: Synthetic oligonucleotide
  Sense strand starting at position 484 of SEQ ID NO: 586841
acagguaaucauggaaggu

SEQ ID NO: 748043 - RNA, 19 nt, Artificial Sequence
  Description of Artificial Sequence: Synthetic oligonucleotide
  Antisense strand to SEQ ID NO: 748042
accuuccaugauuaccugu

SEQ ID NO: 748044 - RNA, 19 nt, Artificial Sequence
  Description of Artificial Sequence: Synthetic oligonucleotide
  Sense strand starting at position 561 of SEQ ID NO: 586841
gagaacaaucgcuaccuga

SEQ ID NO: 748045 - RNA, 19 nt, Artificial Sequence
  Description of Artificial Sequence: Synthetic oligonucleotide
  Antisense strand to SEQ ID NO: 748044
ucagguagcgauuguucuc

SEQ ID NO: 748046 - RNA, 19 nt, Artificial Sequence
  Description of Artificial Sequence: Synthetic oligonucleotide
  Sense strand starting at position 903 of SEQ ID NO: 586841
gccucaguguccggugcau

SEQ ID NO: 748047 - RNA, 19 nt, Artificial Sequence
  Description of Artificial Sequence: Synthetic oligonucleotide
  Antisense strand to SEQ ID NO: 748046
augcaccggacacugaggc

SEQ ID NO: 748048 - RNA, 19 nt, Artificial Sequence
  Description of Artificial Sequence: Synthetic oligonucleotide
  Sense strand starting at position 921 of SEQ ID NO: 586841
ugaggaagguguccucuga

SEQ ID NO: 748049 - RNA, 19 nt, Artificial Sequence
  Description of Artificial Sequence: Synthetic oligonucleotide
  Antisense strand to SEQ ID NO: 748048
ucagaggacaccuuccuca

SEQ ID NO: 748050 - RNA, 19 nt, Artificial Sequence
  Description of Artificial Sequence: Synthetic oligonucleotide
  Sense strand starting at position 1011 of SEQ ID NO: 586841
gcguuucugggucacacaa

SEQ ID NO: 748051 - RNA, 19 nt, Artificial Sequence
  Description of Artificial Sequence: Synthetic oligonucleotide
  Antisense strand to SEQ ID NO: 748050
uugugugacccagaaacgc

SEQ ID NO: 748052 - RNA, 19 nt, Artificial Sequence
  Description of Artificial Sequence: Synthetic oligonucleotide
  Sense strand starting at position 1089 of SEQ ID NO: 586841
gguuacacuuugggaggaa

SEQ ID NO: 748053 - RNA, 19 nt, Artificial Sequence
  Description of Artificial Sequence: Synthetic oligonucleotide
  Antisense strand to SEQ ID NO: 748052
uuccucccaaaguguaacc

SEQ ID NO: 748054 - RNA, 19 nt, Artificial Sequence
  Description of Artificial Sequence: Synthetic oligonucleotide
  Sense strand starting at position 1414 of SEQ ID NO: 586841
gaacgacuuucucagcugu

SEQ ID NO: 748055 - RNA, 19 nt, Artificial Sequence
  Description of Artificial Sequence: Synthetic oligonucleotide
  Antisense strand to SEQ ID NO: 748054
acagcugagaaagucguuc

SEQ ID NO: 748056 - RNA, 19 nt, Artificial Sequence
  Description of Artificial Sequence: Synthetic oligonucleotide
  Sense strand starting at position 1440 of SEQ ID NO: 586841
cggccuucgcagcaucaaa

SEQ ID NO: 748057 - RNA, 19 nt, Artificial Sequence
  Description of Artificial Sequence: Synthetic oligonucleotide
  Antisense strand to SEQ ID NO: 748056
uuugaugcugcgaaggccg

SEQ ID NO: 748058 - RNA, 19 nt, Artificial Sequence
  Description of Artificial Sequence: Synthetic oligonucleotide
  Sense strand starting at position 2251 of SEQ ID NO: 586841
ggccacuccuccucuugaa

SEQ ID NO: 748059 - RNA, 19 nt, Artificial Sequence
  Description of Artificial Sequence: Synthetic oligonucleotide
  Antisense strand to SEQ ID NO: 748058
uucaagaggaggaguggcc

SEQ ID NO: 748060 - RNA, 19 nt, Artificial Sequence
  Description of Artificial Sequence: Synthetic oligonucleotide
  Sense strand starting at position 2272 of SEQ ID NO: 586841
cucugcuauggcugaguua

SEQ ID NO: 748061 - RNA, 19 nt, Artificial Sequence
  Description of Artificial Sequence: Synthetic oligonucleotide
  Antisense strand to SEQ ID NO: 748060
uaacucagccauagcagag

SEQ ID NO: 748062 - RNA, 19 nt, Artificial Sequence
  Description of Artificial Sequence: Synthetic oligonucleotide
  Sense strand starting at position 2281 of SEQ ID NO: 586841
ggcugaguuacccagagga

SEQ ID NO: 748063 - RNA, 19 nt, Artificial Sequence
  Description of Artificial Sequence: Synthetic oligonucleotide
  Antisense strand to SEQ ID NO: 748062
uccucuggguaacucagcc

SEQ ID NO: 748064 - RNA, 19 nt, Artificial Sequence
  Description of Artificial Sequence: Synthetic oligonucleotide
  Sense strand starting at position 2295 of SEQ ID NO: 586841
gaggaaucuuaguccugcu

SEQ ID NO: 748065 - RNA, 19 nt, Artificial Sequence
  Description of Artificial Sequence: Synthetic oligonucleotide
  Antisense strand to SEQ ID NO: 748064
agcaggacuaagauuccuc

SEQ ID NO: 748066 - RNA, 19 nt, Artificial Sequence
  Description of Artificial Sequence: Synthetic oligonucleotide
  Sense strand starting at position 2337 of SEQ ID NO: 586841
gugugucaguccucauucu

SEQ ID NO: 748067 - RNA, 19 nt, Artificial Sequence
  Description of Artificial Sequence: Synthetic oligonucleotide
  Antisense strand to SEQ ID NO: 748066
agaaugaggacugacacac

SEQ ID NO: 748068 - RNA, 19 nt, Artificial Sequence
  Description of Artificial Sequence: Synthetic oligonucleotide
  Sense strand starting at position 2769 of SEQ ID NO: 586841
ggaguuggccuguaugagu

SEQ ID NO: 748069 - RNA, 19 nt, Artificial Sequence
  Description of Artificial Sequence: Synthetic oligonucleotide
  Antisense strand to SEQ ID NO: 748068
acucauacaggccaacucc

SEQ ID NO: 748070 - RNA, 19 nt, Artificial Sequence
  Description of Artificial Sequence: Synthetic oligonucleotide
  Sense strand starting at position 2868 of SEQ ID NO: 586841
cuucgagaguucccugaaa

SEQ ID NO: 748071 - RNA, 19 nt, Artificial Sequence
  Description of Artificial Sequence: Synthetic oligonucleotide
  Antisense strand to SEQ ID NO: 748070
uuucagggaacucucgaag

SEQ ID NO: 748072 - RNA, 19 nt, Artificial Sequence
  Description of Artificial Sequence: Synthetic oligonucleotide
  Sense strand starting at position 2870 of SEQ ID NO: 586841
ucgagaguucccugaaaua

SEQ ID NO: 748073 - RNA, 19 nt, Artificial Sequence
  Description of Artificial Sequence: Synthetic oligonucleotide
  Antisense strand to SEQ ID NO: 748072
uauuucagggaacucucga

SEQ ID NO: 748074 - RNA, 19 nt, Artificial Sequence
  Description of Artificial Sequence: Synthetic oligonucleotide
  Sense strand starting at position 2905 of SEQ ID NO: 586841
guagauaucuggcacgggu

SEQ ID NO: 748075 - RNA, 19 nt, Artificial Sequence
  Description of Artificial Sequence: Synthetic oligonucleotide
  Antisense strand to SEQ ID NO: 748074
acccgugccagauaucuac

SEQ ID NO: 748076 - RNA, 19 nt, Artificial Sequence
  Description of Artificial Sequence: Synthetic oligonucleotide
  Sense strand starting at position 2965 of SEQ ID NO: 586841
gcgggaagaugucuugaaa

SEQ ID NO: 748077 - RNA, 19 nt, Artificial Sequence
  Description of Artificial Sequence: Synthetic oligonucleotide
  Antisense strand to SEQ ID NO: 748076
uuucaagacaucuucccgc

SEQ ID NO: 748078 - RNA, 19 nt, Artificial Sequence
  Description of Artificial Sequence: Synthetic oligonucleotide
  Sense strand starting at position 3577 of SEQ ID NO: 586841
gacuuauccugggcccuga

SEQ ID NO: 748079 - RNA, 19 nt, Artificial Sequence
  Description of Artificial Sequence: Synthetic oligonucleotide
  Antisense strand to SEQ ID NO: 748078
ucagggcccaggauaaguc

SEQ ID NO: 748080 - RNA, 19 nt, Artificial Sequence
  Description of Artificial Sequence: Synthetic oligonucleotide
  Sense strand starting at position 3649 of SEQ ID NO: 586841
ccaccugcuccuuagguua

SEQ ID NO: 748081 - RNA, 19 nt, Artificial Sequence
  Description of Artificial Sequence: Synthetic oligonucleotide
  Antisense strand to SEQ ID NO: 748080
uaaccuaaggagcaggugg

SEQ ID NO: 748082 - RNA, 19 nt, Artificial Sequence
  Description of Artificial Sequence: Synthetic oligonucleotide
  Sense strand starting at position 3715 of SEQ ID NO: 586841
guagaauguaaguggaagu

SEQ ID NO: 748083 - RNA, 19 nt, Artificial Sequence
  Description of Artificial Sequence: Synthetic oligonucleotide
  Antisense strand to SEQ ID NO: 748082
acuuccacuuacauucuac

SEQ ID NO: 748084 - RNA, 19 nt, Artificial Sequence
  Description of Artificial Sequence: Synthetic oligonucleotide
  Sense strand starting at position 3810 of SEQ ID NO: 586841
ucuugaagcuuuccuggaa

SEQ ID NO: 748085 - RNA, 19 nt, Artificial Sequence
  Description of Artificial Sequence: Synthetic oligonucleotide
  Antisense strand to SEQ ID NO: 748084
uuccaggaaagcuucaaga

SEQ ID NO: 748086 - RNA, 19 nt, Artificial Sequence
  Description of Artificial Sequence: Synthetic oligonucleotide
  Sense strand starting at position 3811 of SEQ ID NO: 586841
cuugaagcuuuccuggaau

SEQ ID NO: 748087 - RNA, 19 nt, Artificial Sequence
  Description of Artificial Sequence: Synthetic oligonucleotide
  Antisense strand to SEQ ID NO: 748086
auuccaggaaagcuucaag

SEQ ID NO: 748088 - RNA, 19 nt, Artificial Sequence
  Description of Artificial Sequence: Synthetic oligonucleotide
  Sense strand starting at position 3813 of SEQ ID NO: 586841
ugaagcuuuccuggaauug

SEQ ID NO: 748089 - RNA, 19 nt, Artificial Sequence
  Description of Artificial Sequence: Synthetic oligonucleotide
  Antisense strand to SEQ ID NO: 748088
caauuccaggaaagcuuca

SEQ ID NO: 748090 - RNA, 19 nt, Artificial Sequence
  Description of Artificial Sequence: Synthetic oligonucleotide
  Sense strand starting at position 3822 of SEQ ID NO: 586841
ccuggaauugauugaugcu

SEQ ID NO: 748091 - RNA, 19 nt, Artificial Sequence
  Description of Artificial Sequence: Synthetic oligonucleotide
  Antisense strand to SEQ ID NO: 748090
agcaucaaucaauuccagg

SEQ ID NO: 748092 - RNA, 19 nt, Artificial Sequence
  Description of Artificial Sequence: Synthetic oligonucleotide
  Sense strand starting at position 3828 of SEQ ID NO: 586841
auugauugaugcucaguca

SEQ ID NO: 748093 - RNA, 19 nt, Artificial Sequence
  Description of Artificial Sequence: Synthetic oligonucleotide
  Antisense strand to SEQ ID NO: 748092
ugacugagcaucaaucaau

SEQ ID NO: 748094 - RNA, 19 nt, Artificial Sequence
  Description of Artificial Sequence: Synthetic oligonucleotide
  Sense strand starting at position 3829 of SEQ ID NO: 586841
uugauugaugcucagucaa

SEQ ID NO: 748095 - RNA, 19 nt, Artificial Sequence
  Description of Artificial Sequence: Synthetic oligonucleotide
  Antisense strand to SEQ ID NO: 748094
uugacugagcaucaaucaa

SEQ ID NO: 748096 - RNA, 19 nt, Artificial Sequence
  Description of Artificial Sequence: Synthetic oligonucleotide
  Sense strand starting at position 3831 of SEQ ID NO: 586841
gauugaugcucagucaaca

SEQ ID NO: 748097 - RNA, 19 nt, Artificial Sequence
  Description of Artificial Sequence: Synthetic oligonucleotide
  Antisense strand to SEQ ID NO: 748096
uguugacugagcaucaauc

SEQ ID NO: 748098 - RNA, 19 nt, Artificial Sequence
  Description of Artificial Sequence: Synthetic oligonucleotide
  Sense strand starting at position 3917 of SEQ ID NO: 586841
uguggaacaucagauagaa

SEQ ID NO: 748099 - RNA, 19 nt, Artificial Sequence
  Description of Artificial Sequence: Synthetic oligonucleotide
  Antisense strand to SEQ ID NO: 748098
uucuaucugauguuccaca

SEQ ID NO: 748100 - RNA, 19 nt, Artificial Sequence
  Description of Artificial Sequence: Synthetic oligonucleotide
  Sense strand starting at position 3972 of SEQ ID NO: 586841
aaaggaagaucucaauggu

SEQ ID NO: 748101 - RNA, 19 nt, Artificial Sequence
  Description of Artificial Sequence: Synthetic oligonucleotide
  Antisense strand to SEQ ID NO: 748100
accauugagaucuuccuuu

SEQ ID NO: 748102 - RNA, 19 nt, Artificial Sequence
  Description of Artificial Sequence: Synthetic oligonucleotide
  Sense strand starting at position 3978 of SEQ ID NO: 586841
agaucucaaugguggaaca

SEQ ID NO: 748103 - RNA, 19 nt, Artificial Sequence
  Description of Artificial Sequence: Synthetic oligonucleotide
  Antisense strand to SEQ ID NO: 748102
uguuccaccauugagaucu

SEQ ID NO: 748104 - RNA, 19 nt, Artificial Sequence
  Description of Artificial Sequence: Synthetic oligonucleotide
  Sense strand starting at position 282 of SEQ ID NO: 586842
agacuuucccucugggaua

SEQ ID NO: 748105 - RNA, 19 nt, Artificial Sequence
  Description of Artificial Sequence: Synthetic oligonucleotide
  Antisense strand to SEQ ID NO: 748104
uaucccagagggaaagucu

SEQ ID NO: 748106 - RNA, 19 nt, Artificial Sequence
  Description of Artificial Sequence: Synthetic oligonucleotide
  Sense strand starting at position 373 of SEQ ID NO: 586842
cuauguacuaucgagacag

SEQ ID NO: 748107 - RNA, 19 nt, Artificial Sequence
  Description of Artificial Sequence: Synthetic oligonucleotide
  Antisense strand to SEQ ID NO: 748106
cugucucgauaguacauag

SEQ ID NO: 748108 - RNA, 19 nt, Artificial Sequence
  Description of Artificial Sequence: Synthetic oligonucleotide
  Sense strand starting at position 377 of SEQ ID NO: 586842
guacuaucgagacagcuga

SEQ ID NO: 748109 - RNA, 19 nt, Artificial Sequence
  Description of Artificial Sequence: Synthetic oligonucleotide
  Antisense strand to SEQ ID NO: 748108
ucagcugucucgauaguac

SEQ ID NO: 748110 - RNA, 19 nt, Artificial Sequence
  Description of Artificial Sequence: Synthetic oligonucleotide
  Sense strand starting at position 429 of SEQ ID NO: 586842
agaguaagguuacuaauga

SEQ ID NO: 748111 - RNA, 19 nt, Artificial Sequence
  Description of Artificial Sequence: Synthetic oligonucleotide
  Antisense strand to SEQ ID NO: 748110
ucauuaguaaccuuacucu

SEQ ID NO: 748112 - RNA, 19 nt, Artificial Sequence
  Description of Artificial Sequence: Synthetic oligonucleotide
  Sense strand starting at position 490 of SEQ ID NO: 586842
cuauuuauauuugggucau

SEQ ID NO: 748113 - RNA, 19 nt, Artificial Sequence
  Description of Artificial Sequence: Synthetic oligonucleotide
  Antisense strand to SEQ ID NO: 748112
augacccaaauauaaauag

SEQ ID NO: 748114 - RNA, 19 nt, Artificial Sequence
  Description of Artificial Sequence: Synthetic oligonucleotide
  Sense strand starting at position 738 of SEQ ID NO: 586842
gggagaaguuuacaaauuu

SEQ ID NO: 748115 - RNA, 19 nt, Artificial Sequence
  Description of Artificial Sequence: Synthetic oligonucleotide
  Antisense strand to SEQ ID NO: 748114
aaauuuguaaacuucuccc

SEQ ID NO: 748116 - RNA, 19 nt, Artificial Sequence
  Description of Artificial Sequence: Synthetic oligonucleotide
  Sense strand starting at position 749 of SEQ ID NO: 586842
acaaauuucugagaacuag

SEQ ID NO: 748117 - RNA, 19 nt, Artificial Sequence
  Description of Artificial Sequence: Synthetic oligonucleotide
  Antisense strand to SEQ ID NO: 748116
cuaguucucagaaauuugu

SEQ ID NO: 748118 - RNA, 19 nt, Artificial Sequence
  Description of Artificial Sequence: Synthetic oligonucleotide
  Sense strand starting at position 901 of SEQ ID NO: 586842
augguuugagcaggaauaa

SEQ ID NO: 748119 - RNA, 19 nt, Artificial Sequence
  Description of Artificial Sequence: Synthetic oligonucleotide
  Antisense strand to SEQ ID NO: 748118
uuauuccugcucaaaccau

SEQ ID NO: 748120 - RNA, 19 nt, Artificial Sequence
  Description of Artificial Sequence: Synthetic oligonucleotide
  Sense strand starting at position 923 of SEQ ID NO: 586842
auaacucauuaggcaagua

SEQ ID NO: 748121 - RNA, 19 nt, Artificial Sequence
  Description of Artificial Sequence: Synthetic oligonucleotide
  Antisense strand to SEQ ID NO: 748120
uacuugccuaaugaguuau

SEQ ID NO: 748122 - RNA, 19 nt, Artificial Sequence
  Description of Artificial Sequence: Synthetic oligonucleotide
  Sense strand starting at position 1286 of SEQ ID NO: 586842
uguauaauuugugccauua

SEQ ID NO: 748123 - RNA, 19 nt, Artificial Sequence
  Description of Artificial Sequence: Synthetic oligonucleotide
  Antisense strand to SEQ ID NO: 748122
uaauggcacaaauuauaca

SEQ ID NO: 748124 - RNA, 19 nt, Artificial Sequence
  Description of Artificial Sequence: Synthetic oligonucleotide
  Sense strand starting at position 1528 of SEQ ID NO: 586842
cucgaauaauacccuugau

SEQ ID NO: 748125 - RNA, 19 nt, Artificial Sequence
  Description of Artificial Sequence: Synthetic oligonucleotide
  Antisense strand to SEQ ID NO: 748124
aucaaggguauuauucgag

SEQ ID NO: 748126 - RNA, 19 nt, Artificial Sequence
  Description of Artificial Sequence: Synthetic oligonucleotide
  Sense strand starting at position 1587 of SEQ ID NO: 586842
gcuuucuguauuuggaguu

SEQ ID NO: 748127 - RNA, 19 nt, Artificial Sequence
  Description of Artificial Sequence: Synthetic oligonucleotide
  Antisense strand to SEQ ID NO: 748126
aacuccaaauacagaaagc

SEQ ID NO: 748128 - RNA, 19 nt, Artificial Sequence
  Description of Artificial Sequence: Synthetic oligonucleotide
  Sense strand starting at position 1593 of SEQ ID NO: 586842
uguauuuggaguuguugca

SEQ ID NO: 748129 - RNA, 19 nt, Artificial Sequence
  Description of Artificial Sequence: Synthetic oligonucleotide
  Antisense strand to SEQ ID NO: 748128
ugcaacaacuccaaauaca

SEQ ID NO: 748130 - RNA, 19 nt, Artificial Sequence
  Description of Artificial Sequence: Synthetic oligonucleotide
  Sense strand starting at position 1600 of SEQ ID NO: 586842
ggaguuguugcauaagauc

SEQ ID NO: 748131 - RNA, 19 nt, Artificial Sequence
  Description of Artificial Sequence: Synthetic oligonucleotide
  Antisense strand to SEQ ID NO: 748130
gaucuuaugcaacaacucc

SEQ ID NO: 748132 - RNA, 19 nt, Artificial Sequence
  Description of Artificial Sequence: Synthetic oligonucleotide
  Sense strand starting at position 1713 of SEQ ID NO: 586842
gguaauucccagcaaucaa

SEQ ID NO: 748133 - RNA, 19 nt, Artificial Sequence
  Description of Artificial Sequence: Synthetic oligonucleotide
  Antisense strand to SEQ ID NO: 748132
uugauugcugggaauuacc

SEQ ID NO: 748134 - RNA, 19 nt, Artificial Sequence
  Description of Artificial Sequence: Synthetic oligonucleotide
  Sense strand starting at position 1780 of SEQ ID NO: 586842
cucuucuaguaccugaaga

SEQ ID NO: 748135 - RNA, 19 nt, Artificial Sequence
  Description of Artificial Sequence: Synthetic oligonucleotide
  Antisense strand to SEQ ID NO: 748134
ucuucagguacuagaagag

SEQ ID NO: 748136 - RNA, 19 nt, Artificial Sequence
  Description of Artificial Sequence: Synthetic oligonucleotide
  Sense strand starting at position 2219 of SEQ ID NO: 586842
agcuguauuuguuuaugag

SEQ ID NO: 748137 - RNA, 19 nt, Artificial Sequence
  Description of Artificial Sequence: Synthetic oligonucleotide
  Antisense strand to SEQ ID NO: 748136
cucauaaacaaauacagcu

SEQ ID NO: 748138 - RNA, 19 nt, Artificial Sequence
  Description of Artificial Sequence: Synthetic oligonucleotide
  Sense strand starting at position 2220 of SEQ ID NO: 586842
gcuguauuuguuuaugagc

SEQ ID NO: 748139 - RNA, 19 nt, Artificial Sequence
  Description of Artificial Sequence: Synthetic oligonucleotide
  Antisense strand to SEQ ID NO: 748138
gcucauaaacaaauacagc

SEQ ID NO: 748140 - RNA, 19 nt, Artificial Sequence
  Description of Artificial Sequence: Synthetic oligonucleotide
  Sense strand starting at position 2225 of SEQ ID NO: 586842
auuuguuuaugagcuaagu

SEQ ID NO: 748141 - RNA, 19 nt, Artificial Sequence
  Description of Artificial Sequence: Synthetic oligonucleotide
  Antisense strand to SEQ ID NO: 748140
acuuagcucauaaacaaau

SEQ ID NO: 748142 - RNA, 19 nt, Artificial Sequence
  Description of Artificial Sequence: Synthetic oligonucleotide
  Sense strand starting at position 2385 of SEQ ID NO: 586842
gaauauguaguuuggacua

SEQ ID NO: 748143 - RNA, 19 nt, Artificial Sequence
  Description of Artificial Sequence: Synthetic oligonucleotide
  Antisense strand to SEQ ID NO: 748142
uaguccaaacuacauauuc

SEQ ID NO: 748144 - RNA, 19 nt, Artificial Sequence
  Description of Artificial Sequence: Synthetic oligonucleotide
  Sense strand starting at position 2390 of SEQ ID NO: 586842
uguaguuuggacuaaauua

SEQ ID NO: 748145 - RNA, 19 nt, Artificial Sequence
  Description of Artificial Sequence: Synthetic oligonucleotide
  Antisense strand to SEQ ID NO: 748144
uaauuuaguccaaacuaca

SEQ ID NO: 748146 - RNA, 19 nt, Artificial Sequence
  Description of Artificial Sequence: Synthetic oligonucleotide
  Sense strand starting at position 2434 of SEQ ID NO: 586842
agggaaagauaagaacauu

SEQ ID NO: 748147 - RNA, 19 nt, Artificial Sequence
  Description of Artificial Sequence: Synthetic oligonucleotide
  Antisense strand to SEQ ID NO: 748146
aauguucuuaucuuucccu

SEQ ID NO: 748148 - RNA, 19 nt, Artificial Sequence
  Description of Artificial Sequence: Synthetic oligonucleotide
  Sense strand starting at position 2543 of SEQ ID NO: 586842
aauagaggugcugaaaguu

SEQ ID NO: 748149 - RNA, 19 nt, Artificial Sequence
  Description of Artificial Sequence: Synthetic oligonucleotide
  Antisense strand to SEQ ID NO: 748148
aacuuucagcaccucuauu

SEQ ID NO: 748150 - RNA, 19 nt, Artificial Sequence
  Description of Artificial Sequence: Synthetic oligonucleotide
  Sense strand starting at position 2746 of SEQ ID NO: 586842
uuaauuaagccaugggaaa

SEQ ID NO: 748151 - RNA, 19 nt, Artificial Sequence
  Description of Artificial Sequence: Synthetic oligonucleotide
  Antisense strand to SEQ ID NO: 748150
uuucccauggcuuaauuaa

SEQ ID NO: 748152 - RNA, 19 nt, Artificial Sequence
  Description of Artificial Sequence: Synthetic oligonucleotide
  Sense strand starting at position 2828 of SEQ ID NO: 586842
cuaauacaucuacguagaa

SEQ ID NO: 748153 - RNA, 19 nt, Artificial Sequence
  Description of Artificial Sequence: Synthetic oligonucleotide
  Antisense strand to SEQ ID NO: 748152
uucuacguagauguauuag

SEQ ID NO: 748154 - RNA, 19 nt, Artificial Sequence
  Description of Artificial Sequence: Synthetic oligonucleotide
  Sense strand starting at position 3058 of SEQ ID NO: 586842
gcuagaaauuugcucuguc

SEQ ID NO: 748155 - RNA, 19 nt, Artificial Sequence
  Description of Artificial Sequence: Synthetic oligonucleotide
  Antisense strand to SEQ ID NO: 748154
gacagagcaaauuucuagc

SEQ ID NO: 748156 - RNA, 19 nt, Artificial Sequence
  Description of Artificial Sequence: Synthetic oligonucleotide
  Sense strand starting at position 3061 of SEQ ID NO: 586842
agaaauuugcucugucagu

SEQ ID NO: 748157 - RNA, 19 nt, Artificial Sequence
  Description of Artificial Sequence: Synthetic oligonucleotide
  Antisense strand to SEQ ID NO: 748156
acugacagagcaaauuucu

SEQ ID NO: 748158 - RNA, 19 nt, Artificial Sequence
  Description of Artificial Sequence: Synthetic oligonucleotide
  Sense strand starting at position 3062 of SEQ ID NO: 586842
gaaauuugcucugucagua

SEQ ID NO: 748159 - RNA, 19 nt, Artificial Sequence
  Description of Artificial Sequence: Synthetic oligonucleotide
  Antisense strand to SEQ ID NO: 748158
uacugacagagcaaauuuc

SEQ ID NO: 748160 - RNA, 19 nt, Artificial Sequence
  Description of Artificial Sequence: Synthetic oligonucleotide
  Sense strand starting at position 3129 of SEQ ID NO: 586842
gugcguuuaacagucucua

SEQ ID NO: 748161 - RNA, 19 nt, Artificial Sequence
  Description of Artificial Sequence: Synthetic oligonucleotide
  Antisense strand to SEQ ID NO: 748160
uagagacuguuaaacgcac

SEQ ID NO: 748162 - RNA, 19 nt, Artificial Sequence
  Description of Artificial Sequence: Synthetic oligonucleotide
  Sense strand starting at position 3133 of SEQ ID NO: 586842
guuuaacagucucuacaaa

SEQ ID NO: 748163 - RNA, 19 nt, Artificial Sequence
  Description of Artificial Sequence: Synthetic oligonucleotide
  Antisense strand to SEQ ID NO: 748162
uuuguagagacuguuaaac

SEQ ID NO: 748164 - RNA, 19 nt, Artificial Sequence
  Description of Artificial Sequence: Synthetic oligonucleotide
  Sense strand starting at position 3169 of SEQ ID NO: 586842
ucgaaagagcauuggauaa

SEQ ID NO: 748165 - RNA, 19 nt, Artificial Sequence
  Description of Artificial Sequence: Synthetic oligonucleotide
  Antisense strand to SEQ ID NO: 748164
uuauccaaugcucuuucga

SEQ ID NO: 748166 - RNA, 19 nt, Artificial Sequence
  Description of Artificial Sequence: Synthetic oligonucleotide
  Sense strand starting at position 3260 of SEQ ID NO: 586842
auaaauggcuaagugauaa

SEQ ID NO: 748167 - RNA, 19 nt, Artificial Sequence
  Description of Artificial Sequence: Synthetic oligonucleotide
  Antisense strand to SEQ ID NO: 748166
uuaucacuuagccauuuau

SEQ ID NO: 748168 - RNA, 19 nt, Artificial Sequence
  Description of Artificial Sequence: Synthetic oligonucleotide
  Sense strand starting at position 3573 of SEQ ID NO: 586842
ugguauaacuuauuaggua

SEQ ID NO: 748169 - RNA, 19 nt, Artificial Sequence
  Description of Artificial Sequence: Synthetic oligonucleotide
  Antisense strand to SEQ ID NO: 748168
uaccuaauaaguuauacca

SEQ ID NO: 748170 - RNA, 19 nt, Artificial Sequence
  Description of Artificial Sequence: Synthetic oligonucleotide
  Sense strand starting at position 3648 of SEQ ID NO: 586842
uagugucuagaaggauaaa

SEQ ID NO: 748171 - RNA, 19 nt, Artificial Sequence
  Description of Artificial Sequence: Synthetic oligonucleotide
  Antisense strand to SEQ ID NO: 748170
uuuauccuucuagacacua

SEQ ID NO: 748172 - RNA, 19 nt, Artificial Sequence
  Description of Artificial Sequence: Synthetic oligonucleotide
  Sense strand starting at position 3720 of SEQ ID NO: 586842
ccacauggauugcucaaga

SEQ ID NO: 748173 - RNA, 19 nt, Artificial Sequence
  Description of Artificial Sequence: Synthetic oligonucleotide
  Antisense strand to SEQ ID NO: 748172
ucuugagcaauccaugugg

SEQ ID NO: 748174 - RNA, 19 nt, Artificial Sequence
  Description of Artificial Sequence: Synthetic oligonucleotide
  Sense strand starting at position 3809 of SEQ ID NO: 586842
ccugaaauacauugcuaug

SEQ ID NO: 748175 - RNA, 19 nt, Artificial Sequence
  Description of Artificial Sequence: Synthetic oligonucleotide
  Antisense strand to SEQ ID NO: 748174
cauagcaauguauuucagg

SEQ ID NO: 748176 - RNA, 19 nt, Artificial Sequence
  Description of Artificial Sequence: Synthetic oligonucleotide
  Sense strand starting at position 3820 of SEQ ID NO: 586842
uugcuauguagucaaggaa

SEQ ID NO: 748177 - RNA, 19 nt, Artificial Sequence
  Description of Artificial Sequence: Synthetic oligonucleotide
  Antisense strand to SEQ ID NO: 748176
uuccuugacuacauagcaa

SEQ ID NO: 748178 - RNA, 19 nt, Artificial Sequence
  Description of Artificial Sequence: Synthetic oligonucleotide
  Sense strand starting at position 3823 of SEQ ID NO: 586842
cuauguagucaaggaaauc

SEQ ID NO: 748179 - RNA, 19 nt, Artificial Sequence
  Description of Artificial Sequence: Synthetic oligonucleotide
  Antisense strand to SEQ ID NO: 748178
gauuuccuugacuacauag

SEQ ID NO: 748180 - RNA, 19 nt, Artificial Sequence
  Description of Artificial Sequence: Synthetic oligonucleotide
  Sense strand starting at position 3940 of SEQ ID NO: 586842
uuuaacuauccaggaguua

SEQ ID NO: 748181 - RNA, 19 nt, Artificial Sequence
  Description of Artificial Sequence: Synthetic oligonucleotide
  Antisense strand to SEQ ID NO: 748180
uaacuccuggauaguuaaa

SEQ ID NO: 748182 - RNA, 19 nt, Artificial Sequence
  Description of Artificial Sequence: Synthetic oligonucleotide
  Sense strand starting at position 3949 of SEQ ID NO: 586842
ccaggaguuaguuagcaaa

SEQ ID NO: 748183 - RNA, 19 nt, Artificial Sequence
  Description of Artificial Sequence: Synthetic oligonucleotide
  Antisense strand to SEQ ID NO: 748182
uuugcuaacuaacuccugg

SEQ ID NO: 748184 - RNA, 19 nt, Artificial Sequence
  Description of Artificial Sequence: Synthetic oligonucleotide
  Sense strand starting at position 159 of SEQ ID NO: 586843
gguagaacuuauucuuucu

SEQ ID NO: 748185 - RNA, 19 nt, Artificial Sequence
  Description of Artificial Sequence: Synthetic oligonucleotide
  Antisense strand to SEQ ID NO: 748184
agaaagaauaaguucuacc

SEQ ID NO: 748186 - RNA, 19 nt, Artificial Sequence
  Description of Artificial Sequence: Synthetic oligonucleotide
  Sense strand starting at position 191 of SEQ ID NO: 586843
uuuggaaucuauguuuaca

SEQ ID NO: 748187 - RNA, 19 nt, Artificial Sequence
  Description of Artificial Sequence: Synthetic oligonucleotide
  Antisense strand to SEQ ID NO: 748186
uguaaacauagauuccaaa

SEQ ID NO: 748188 - RNA, 19 nt, Artificial Sequence
  Description of Artificial Sequence: Synthetic oligonucleotide
  Sense strand starting at position 193 of SEQ ID NO: 586843
uggaaucuauguuuacaaa

SEQ ID NO: 748189 - RNA, 19 nt, Artificial Sequence
  Description of Artificial Sequence: Synthetic oligonucleotide
  Antisense strand to SEQ ID NO: 748188
uuuguaaacauagauucca

SEQ ID NO: 748190 - RNA, 19 nt, Artificial Sequence
  Description of Artificial Sequence: Synthetic oligonucleotide
  Sense strand starting at position 328 of SEQ ID NO: 586843
ccugaauagcaauaaguuu

SEQ ID NO: 748191 - RNA, 19 nt, Artificial Sequence
  Description of Artificial Sequence: Synthetic oligonucleotide
  Antisense strand to SEQ ID NO: 748190
aaacuuauugcuauucagg

SEQ ID NO: 748192 - RNA, 19 nt, Artificial Sequence
  Description of Artificial Sequence: Synthetic oligonucleotide
  Sense strand starting at position 381 of SEQ ID NO: 586843
uccuaacagugguuauuau

SEQ ID NO: 748193 - RNA, 19 nt, Artificial Sequence
  Description of Artificial Sequence: Synthetic oligonucleotide
  Antisense strand to SEQ ID NO: 748192
auaauaaccacuguuagga

SEQ ID NO: 748194 - RNA, 19 nt, Artificial Sequence
  Description of Artificial Sequence: Synthetic oligonucleotide
  Sense strand starting at position 382 of SEQ ID NO: 586843
ccuaacagugguuauuauu

SEQ ID NO: 748195 - RNA, 19 nt, Artificial Sequence
  Description of Artificial Sequence: Synthetic oligonucleotide
  Antisense strand to SEQ ID NO: 748194
aauaauaaccacuguuagg

SEQ ID NO: 748196 - RNA, 19 nt, Artificial Sequence
  Description of Artificial Sequence: Synthetic oligonucleotide
  Sense strand starting at position 399 of SEQ ID NO: 586843
uuaauuauggagugggaug

SEQ ID NO: 748197 - RNA, 19 nt, Artificial Sequence
  Description of Artificial Sequence: Synthetic oligonucleotide
  Antisense strand to SEQ ID NO: 748196
caucccacuccauaauuaa

SEQ ID NO: 748198 - RNA, 19 nt, Artificial Sequence
  Description of Artificial Sequence: Synthetic oligonucleotide
  Sense strand starting at position 428 of SEQ ID NO: 586843
agggaauaaaugcguaaga

SEQ ID NO: 748199 - RNA, 19 nt, Artificial Sequence
  Description of Artificial Sequence: Synthetic oligonucleotide
  Antisense strand to SEQ ID NO: 748198
ucuuacgcauuuauucccu

SEQ ID NO: 748200 - RNA, 19 nt, Artificial Sequence
  Description of Artificial Sequence: Synthetic oligonucleotide
  Sense strand starting at position 429 of SEQ ID NO: 586843
gggaauaaaugcguaagaa

SEQ ID NO: 748201 - RNA, 19 nt, Artificial Sequence
  Description of Artificial Sequence: Synthetic oligonucleotide
  Antisense strand to SEQ ID NO: 748200
uucuuacgcauuuauuccc

SEQ ID NO: 748202 - RNA, 19 nt, Artificial Sequence
  Description of Artificial Sequence: Synthetic oligonucleotide
  Sense strand starting at position 686 of SEQ ID NO: 586843
uugauauuagaccgagcca

SEQ ID NO: 748203 - RNA, 19 nt, Artificial Sequence
  Description of Artificial Sequence: Synthetic oligonucleotide
  Antisense strand to SEQ ID NO: 748202
uggcucggucuaauaucaa

SEQ ID NO: 748204 - RNA, 19 nt, Artificial Sequence
  Description of Artificial Sequence: Synthetic oligonucleotide
  Sense strand starting at position 1323 of SEQ ID NO: 586843
cccaaugugccaggaaaca

SEQ ID NO: 748205 - RNA, 19 nt, Artificial Sequence
  Description of Artificial Sequence: Synthetic oligonucleotide
  Antisense strand to SEQ ID NO: 748204
uguuuccuggcacauuggg

SEQ ID NO: 748206 - RNA, 19 nt, Artificial Sequence
  Description of Artificial Sequence: Synthetic oligonucleotide
  Sense strand starting at position 2366 of SEQ ID NO: 586843
uaccuuuccugucuaggga

SEQ ID NO: 748207 - RNA, 19 nt, Artificial Sequence
  Description of Artificial Sequence: Synthetic oligonucleotide
  Antisense strand to SEQ ID NO: 748206
ucccuagacaggaaaggua

SEQ ID NO: 748208 - RNA, 19 nt, Artificial Sequence
  Description of Artificial Sequence: Synthetic oligonucleotide
  Sense strand starting at position 2494 of SEQ ID NO: 586843
acugaucaugacugucaau

SEQ ID NO: 748209 - RNA, 19 nt, Artificial Sequence
  Description of Artificial Sequence: Synthetic oligonucleotide
  Antisense strand to SEQ ID NO: 748208
auugacagucaugaucagu

SEQ ID NO: 748210 - RNA, 19 nt, Artificial Sequence
  Description of Artificial Sequence: Synthetic oligonucleotide
  Sense strand starting at position 2725 of SEQ ID NO: 586843
ggcaaaucugcuuacuauu

SEQ ID NO: 748211 - RNA, 19 nt, Artificial Sequence
  Description of Artificial Sequence: Synthetic oligonucleotide
  Antisense strand to SEQ ID NO: 748210
aauaguaagcagauuugcc

SEQ ID NO: 748212 - RNA, 19 nt, Artificial Sequence
  Description of Artificial Sequence: Synthetic oligonucleotide
  Sense strand starting at position 2743 of SEQ ID NO: 586843
ucuauagagcacugaaaug

SEQ ID NO: 748213 - RNA, 19 nt, Artificial Sequence
  Description of Artificial Sequence: Synthetic oligonucleotide
  Antisense strand to SEQ ID NO: 748212
cauuucagugcucuauaga

SEQ ID NO: 748214 - RNA, 19 nt, Artificial Sequence
  Description of Artificial Sequence: Synthetic oligonucleotide
  Sense strand starting at position 2796 of SEQ ID NO: 586843
accaguuguaucuguaaag

SEQ ID NO: 748215 - RNA, 19 nt, Artificial Sequence
  Description of Artificial Sequence: Synthetic oligonucleotide
  Antisense strand to SEQ ID NO: 748214
cuuuacagauacaacuggu

SEQ ID NO: 748216 - RNA, 19 nt, Artificial Sequence
  Description of Artificial Sequence: Synthetic oligonucleotide
  Sense strand starting at position 2867 of SEQ ID NO: 586843
acagcuuacugaguaguaa

SEQ ID NO: 748217 - RNA, 19 nt, Artificial Sequence
  Description of Artificial Sequence: Synthetic oligonucleotide
  Antisense strand to SEQ ID NO: 748216
uuacuacucaguaagcugu

SEQ ID NO: 748218 - RNA, 19 nt, Artificial Sequence
  Description of Artificial Sequence: Synthetic oligonucleotide
  Sense strand starting at position 2868 of SEQ ID NO: 586843
cagcuuacugaguaguaaa

SEQ ID NO: 748219 - RNA, 19 nt, Artificial Sequence
  Description of Artificial Sequence: Synthetic oligonucleotide
  Antisense strand to SEQ ID NO: 748218
uuuacuacucaguaagcug

SEQ ID NO: 748220 - RNA, 19 nt, Artificial Sequence
  Description of Artificial Sequence: Synthetic oligonucleotide
  Sense strand starting at position 2891 of SEQ ID NO: 586843
ccuagugaaagucagucua

SEQ ID NO: 748221 - RNA, 19 nt, Artificial Sequence
  Description of Artificial Sequence: Synthetic oligonucleotide
  Antisense strand to SEQ ID NO: 748220
uagacugacuuucacuagg

SEQ ID NO: 748222 - RNA, 19 nt, Artificial Sequence
  Description of Artificial Sequence: Synthetic oligonucleotide
  Sense strand starting at position 2893 of SEQ ID NO: 586843
uagugaaagucagucuaag

SEQ ID NO: 748223 - RNA, 19 nt, Artificial Sequence
  Description of Artificial Sequence: Synthetic oligonucleotide
  Antisense strand to SEQ ID NO: 748222
cuuagacugacuuucacua

SEQ ID NO: 748224 - RNA, 19 nt, Artificial Sequence
  Description of Artificial Sequence: Synthetic oligonucleotide
  Sense strand starting at position 2944 of SEQ ID NO: 586843
uccggaguccuguagauaa

SEQ ID NO: 748225 - RNA, 19 nt, Artificial Sequence
  Description of Artificial Sequence: Synthetic oligonucleotide
  Antisense strand to SEQ ID NO: 748224
uuaucuacaggacuccgga

SEQ ID NO: 748226 - RNA, 19 nt, Artificial Sequence
  Description of Artificial Sequence: Synthetic oligonucleotide
  Sense strand starting at position 2946 of SEQ ID NO: 586843
cggaguccuguagauaaca

SEQ ID NO: 748227 - RNA, 19 nt, Artificial Sequence
  Description of Artificial Sequence: Synthetic oligonucleotide
  Antisense strand to SEQ ID NO: 748226
uguuaucuacaggacuccg

SEQ ID NO: 748228 - RNA, 19 nt, Artificial Sequence
  Description of Artificial Sequence: Synthetic oligonucleotide
  Sense strand starting at position 2966 of SEQ ID NO: 586843
ccagcauuccauugaaagg

SEQ ID NO: 748229 - RNA, 19 nt, Artificial Sequence
  Description of Artificial Sequence: Synthetic oligonucleotide
  Antisense strand to SEQ ID NO: 748228
ccuuucaauggaaugcugg

SEQ ID NO: 748230 - RNA, 19 nt, Artificial Sequence
  Description of Artificial Sequence: Synthetic oligonucleotide
  Sense strand starting at position 3170 of SEQ ID NO: 586843
cuauauacucugggagcaa

SEQ ID NO: 748231 - RNA, 19 nt, Artificial Sequence
  Description of Artificial Sequence: Synthetic oligonucleotide
  Antisense strand to SEQ ID NO: 748230
uugcucccagaguauauag

SEQ ID NO: 748232 - RNA, 19 nt, Artificial Sequence
  Description of Artificial Sequence: Synthetic oligonucleotide
  Sense strand starting at position 3287 of SEQ ID NO: 586843
accaaauucuggguccuuu

SEQ ID NO: 748233 - RNA, 19 nt, Artificial Sequence
  Description of Artificial Sequence: Synthetic oligonucleotide
  Antisense strand to SEQ ID NO: 748232
aaaggacccagaauuuggu

SEQ ID NO: 748234 - RNA, 19 nt, Artificial Sequence
  Description of Artificial Sequence: Synthetic oligonucleotide
  Sense strand starting at position 3295 of SEQ ID NO: 586843
cuggguccuuucccaagaa

SEQ ID NO: 748235 - RNA, 19 nt, Artificial Sequence
  Description of Artificial Sequence: Synthetic oligonucleotide
  Antisense strand to SEQ ID NO: 748234
uucuugggaaaggacccag

SEQ ID NO: 748236 - RNA, 19 nt, Artificial Sequence
  Description of Artificial Sequence: Synthetic oligonucleotide
  Sense strand starting at position 3299 of SEQ ID NO: 586843
guccuuucccaagaaauug

SEQ ID NO: 748237 - RNA, 19 nt, Artificial Sequence
  Description of Artificial Sequence: Synthetic oligonucleotide
  Antisense strand to SEQ ID NO: 748236
caauuucuugggaaaggac

SEQ ID NO: 748238 - RNA, 19 nt, Artificial Sequence
  Description of Artificial Sequence: Synthetic oligonucleotide
  Sense strand starting at position 3425 of SEQ ID NO: 586843
ugcugucugggauaaucua

SEQ ID NO: 748239 - RNA, 19 nt, Artificial Sequence
  Description of Artificial Sequence: Synthetic oligonucleotide
  Antisense strand to SEQ ID NO: 748238
uagauuaucccagacagca

SEQ ID NO: 748240 - RNA, 19 nt, Artificial Sequence
  Description of Artificial Sequence: Synthetic oligonucleotide
  Sense strand starting at position 3458 of SEQ ID NO: 586843
gucauuuauuugcaguaug

SEQ ID NO: 748241 - RNA, 19 nt, Artificial Sequence
  Description of Artificial Sequence: Synthetic oligonucleotide
  Antisense strand to SEQ ID NO: 748240
cauacugcaaauaaaugac

SEQ ID NO: 748242 - RNA, 19 nt, Artificial Sequence
  Description of Artificial Sequence: Synthetic oligonucleotide
  Sense strand starting at position 3512 of SEQ ID NO: 586843
ugcagaaucuaaucacuga

SEQ ID NO: 748243 - RNA, 19 nt, Artificial Sequence
  Description of Artificial Sequence: Synthetic oligonucleotide
  Antisense strand to SEQ ID NO: 748242
ucagugauuagauucugca

SEQ ID NO: 748244 - RNA, 19 nt, Artificial Sequence
  Description of Artificial Sequence: Synthetic oligonucleotide
  Sense strand starting at position 3515 of SEQ ID NO: 586843
agaaucuaaucacugaguu

SEQ ID NO: 748245 - RNA, 19 nt, Artificial Sequence
  Description of Artificial Sequence: Synthetic oligonucleotide
  Antisense strand to SEQ ID NO: 748244
aacucagugauuagauucu

SEQ ID NO: 748246 - RNA, 19 nt, Artificial Sequence
  Description of Artificial Sequence: Synthetic oligonucleotide
  Sense strand starting at position 3529 of SEQ ID NO: 586843
gaguucugucuguagaaga

SEQ ID NO: 748247 - RNA, 19 nt, Artificial Sequence
  Description of Artificial Sequence: Synthetic oligonucleotide
  Antisense strand to SEQ ID NO: 748246
ucuucuacagacagaacuc

SEQ ID NO: 748248 - RNA, 19 nt, Artificial Sequence
  Description of Artificial Sequence: Synthetic oligonucleotide
  Sense strand starting at position 3705 of SEQ ID NO: 586843
acccgauggugagaauuua

SEQ ID NO: 748249 - RNA, 19 nt, Artificial Sequence
  Description of Artificial Sequence: Synthetic oligonucleotide
  Antisense strand to SEQ ID NO: 748248
uaaauucucaccaucgggu

SEQ ID NO: 748250 - RNA, 19 nt, Artificial Sequence
  Description of Artificial Sequence: Synthetic oligonucleotide
  Sense strand starting at position 3713 of SEQ ID NO: 586843
gugagaauuuaagauuccu

SEQ ID NO: 748251 - RNA, 19 nt, Artificial Sequence
  Description of Artificial Sequence: Synthetic oligonucleotide
  Antisense strand to SEQ ID NO: 748250
aggaaucuuaaauucucac

SEQ ID NO: 748252 - RNA, 19 nt, Artificial Sequence
  Description of Artificial Sequence: Synthetic oligonucleotide
  Sense strand starting at position 3776 of SEQ ID NO: 586843
guuugaagggucuauuaga

SEQ ID NO: 748253 - RNA, 19 nt, Artificial Sequence
  Description of Artificial Sequence: Synthetic oligonucleotide
  Antisense strand to SEQ ID NO: 748252
ucuaauagacccuucaaac

SEQ ID NO: 748254 - RNA, 19 nt, Artificial Sequence
  Description of Artificial Sequence: Synthetic oligonucleotide
  Sense strand starting at position 3784 of SEQ ID NO: 586843
ggucuauuagacugcuaau

SEQ ID NO: 748255 - RNA, 19 nt, Artificial Sequence
  Description of Artificial Sequence: Synthetic oligonucleotide
  Antisense strand to SEQ ID NO: 748254
auuagcagucuaauagacc

SEQ ID NO: 748256 - RNA, 19 nt, Artificial Sequence
  Description of Artificial Sequence: Synthetic oligonucleotide
  Sense strand starting at position 3812 of SEQ ID NO: 586843
gcggcuauuuaacuuuaau

SEQ ID NO: 748257 - RNA, 19 nt, Artificial Sequence
  Description of Artificial Sequence: Synthetic oligonucleotide
  Antisense strand to SEQ ID NO: 748256
auuaaaguuaaauagccgc

SEQ ID NO: 748258 - RNA, 19 nt, Artificial Sequence
  Description of Artificial Sequence: Synthetic oligonucleotide
  Sense strand starting at position 3928 of SEQ ID NO: 586843
aguguagauacgcaacauu

SEQ ID NO: 748259 - RNA, 19 nt, Artificial Sequence
  Description of Artificial Sequence: Synthetic oligonucleotide
  Antisense strand to SEQ ID NO: 748258
aauguugcguaucuacacu

SEQ ID NO: 748260 - RNA, 19 nt, Artificial Sequence
  Description of Artificial Sequence: Synthetic oligonucleotide
  Sense strand starting at position 3967 of SEQ ID NO: 586843
caaacaguguuguucuaga

SEQ ID NO: 748261 - RNA, 19 nt, Artificial Sequence
  Description of Artificial Sequence: Synthetic oligonucleotide
  Antisense strand to SEQ ID NO: 748260
ucuagaacaacacuguuug

SEQ ID NO: 748262 - RNA, 19 nt, Artificial Sequence
  Description of Artificial Sequence: Synthetic oligonucleotide
  Sense strand starting at position 3972 of SEQ ID NO: 586843
aguguuguucuagaccaca

SEQ ID NO: 748263 - RNA, 19 nt, Artificial Sequence
  Description of Artificial Sequence: Synthetic oligonucleotide
  Antisense strand to SEQ ID NO: 748262
uguggucuagaacaacacu

SEQ ID NO: 748264 - RNA, 19 nt, Artificial Sequence
  Description of Artificial Sequence: Synthetic oligonucleotide
  Sense strand starting at position 121 of SEQ ID NO: 586844
auuggaacguaucucacaa

SEQ ID NO: 748265 - RNA, 19 nt, Artificial Sequence
  Description of Artificial Sequence: Synthetic oligonucleotide
  Antisense strand to SEQ ID NO: 748264
uugugagauacguuccaau

SEQ ID NO: 748266 - RNA, 19 nt, Artificial Sequence
  Description of Artificial Sequence: Synthetic oligonucleotide
  Sense strand starting at position 123 of SEQ ID NO: 586844
uggaacguaucucacaauu

SEQ ID NO: 748267 - RNA, 19 nt, Artificial Sequence
  Description of Artificial Sequence: Synthetic oligonucleotide
  Antisense strand to SEQ ID NO: 748266
aauugugagauacguucca

SEQ ID NO: 748268 - RNA, 19 nt, Artificial Sequence
  Description of Artificial Sequence: Synthetic oligonucleotide
  Sense strand starting at position 164 of SEQ ID NO: 586844
auuacucacuauugaugua

SEQ ID NO: 748269 - RNA, 19 nt, Artificial Sequence
  Description of Artificial Sequence: Synthetic oligonucleotide
  Antisense strand to SEQ ID NO: 748268
uacaucaauagugaguaau

SEQ ID NO: 748270 - RNA, 19 nt, Artificial Sequence
  Description of Artificial Sequence: Synthetic oligonucleotide
  Sense strand starting at position 171 of SEQ ID NO: 586844
acuauugauguaugccauu

SEQ ID NO: 748271 - RNA, 19 nt, Artificial Sequence
  Description of Artificial Sequence: Synthetic oligonucleotide
  Antisense strand to SEQ ID NO: 748270
aauggcauacaucaauagu

SEQ ID NO: 748272 - RNA, 19 nt, Artificial Sequence
  Description of Artificial Sequence: Synthetic oligonucleotide
  Sense strand starting at position 177 of SEQ ID NO: 586844
gauguaugccauuauaaag

SEQ ID NO: 748273 - RNA, 19 nt, Artificial Sequence
  Description of Artificial Sequence: Synthetic oligonucleotide
  Antisense strand to SEQ ID NO: 748272
cuuuauaauggcauacauc

SEQ ID NO: 748274 - RNA, 19 nt, Artificial Sequence
  Description of Artificial Sequence: Synthetic oligonucleotide
  Sense strand starting at position 309 of SEQ ID NO: 586844
aguugucaagucuauucua

SEQ ID NO: 748275 - RNA, 19 nt, Artificial Sequence
  Description of Artificial Sequence: Synthetic oligonucleotide
  Antisense strand to SEQ ID NO: 748274
uagaauagacuugacaacu

SEQ ID NO: 748276 - RNA, 19 nt, Artificial Sequence
  Description of Artificial Sequence: Synthetic oligonucleotide
  Sense strand starting at position 331 of SEQ ID NO: 586844
acaauuaggcccuaguacu

SEQ ID NO: 748277 - RNA, 19 nt, Artificial Sequence
  Description of Artificial Sequence: Synthetic oligonucleotide
  Antisense strand to SEQ ID NO: 748276
aguacuagggccuaauugu

SEQ ID NO: 748278 - RNA, 19 nt, Artificial Sequence
  Description of Artificial Sequence: Synthetic oligonucleotide
  Sense strand starting at position 2088 of SEQ ID NO: 586844
ggcuuagccacguggcaaa

SEQ ID NO: 748279 - RNA, 19 nt, Artificial Sequence
  Description of Artificial Sequence: Synthetic oligonucleotide
  Antisense strand to SEQ ID NO: 748278
uuugccacguggcuaagcc

SEQ ID NO: 748280 - RNA, 19 nt, Artificial Sequence
  Description of Artificial Sequence: Synthetic oligonucleotide
  Sense strand starting at position 2119 of SEQ ID NO: 586844
cucauugaaaugggaaguu

SEQ ID NO: 748281 - RNA, 19 nt, Artificial Sequence
  Description of Artificial Sequence: Synthetic oligonucleotide
  Antisense strand to SEQ ID NO: 748280
aacuucccauuucaaugag

SEQ ID NO: 748282 - RNA, 19 nt, Artificial Sequence
  Description of Artificial Sequence: Synthetic oligonucleotide
  Sense strand starting at position 2149 of SEQ ID NO: 586844
aguuaucauucugauuggu

SEQ ID NO: 748283 - RNA, 19 nt, Artificial Sequence
  Description of Artificial Sequence: Synthetic oligonucleotide
  Antisense strand to SEQ ID NO: 748282
accaaucagaaugauaacu

SEQ ID NO: 748284 - RNA, 19 nt, Artificial Sequence
  Description of Artificial Sequence: Synthetic oligonucleotide
  Sense strand starting at position 2151 of SEQ ID NO: 586844
uuaucauucugauuggucu

SEQ ID NO: 748285 - RNA, 19 nt, Artificial Sequence
  Description of Artificial Sequence: Synthetic oligonucleotide
  Antisense strand to SEQ ID NO: 748284
agaccaaucagaaugauaa

SEQ ID NO: 748286 - RNA, 19 nt, Artificial Sequence
  Description of Artificial Sequence: Synthetic oligonucleotide
  Sense strand starting at position 2158 of SEQ ID NO: 586844
ucugauuggucuuugguaa

SEQ ID NO: 748287 - RNA, 19 nt, Artificial Sequence
  Description of Artificial Sequence: Synthetic oligonucleotide
  Antisense strand to SEQ ID NO: 748286
uuaccaaagaccaaucaga

SEQ ID NO: 748288 - RNA, 19 nt, Artificial Sequence
  Description of Artificial Sequence: Synthetic oligonucleotide
  Sense strand starting at position 2159 of SEQ ID NO: 586844
cugauuggucuuugguaaa

SEQ ID NO: 748289 - RNA, 19 nt, Artificial Sequence
  Description of Artificial Sequence: Synthetic oligonucleotide
  Antisense strand to SEQ ID NO: 748288
uuuaccaaagaccaaucag

SEQ ID NO: 748290 - RNA, 19 nt, Artificial Sequence
  Description of Artificial Sequence: Synthetic oligonucleotide
  Sense strand starting at position 2291 of SEQ ID NO: 586844
gcaauacuuuagcccaagu

SEQ ID NO: 748291 - RNA, 19 nt, Artificial Sequence
  Description of Artificial Sequence: Synthetic oligonucleotide
  Antisense strand to SEQ ID NO: 748290
acuugggcuaaaguauugc

SEQ ID NO: 748292 - RNA, 19 nt, Artificial Sequence
  Description of Artificial Sequence: Synthetic oligonucleotide
  Sense strand starting at position 2355 of SEQ ID NO: 586844
aucgaucuuuaagaaauca

SEQ ID NO: 748293 - RNA, 19 nt, Artificial Sequence
  Description of Artificial Sequence: Synthetic oligonucleotide
  Antisense strand to SEQ ID NO: 748292
ugauuucuuaaagaucgau

SEQ ID NO: 748294 - RNA, 19 nt, Artificial Sequence
  Description of Artificial Sequence: Synthetic oligonucleotide
  Sense strand starting at position 2420 of SEQ ID NO: 586844
gguagaacuuauucuuucu

SEQ ID NO: 748295 - RNA, 19 nt, Artificial Sequence
  Description of Artificial Sequence: Synthetic oligonucleotide
  Antisense strand to SEQ ID NO: 748294
agaaagaauaaguucuacc

SEQ ID NO: 748296 - RNA, 19 nt, Artificial Sequence
  Description of Artificial Sequence: Synthetic oligonucleotide
  Sense strand starting at position 2452 of SEQ ID NO: 586844
uuuggaaucuauguuuaca

SEQ ID NO: 748297 - RNA, 19 nt, Artificial Sequence
  Description of Artificial Sequence: Synthetic oligonucleotide
  Antisense strand to SEQ ID NO: 748296
uguaaacauagauuccaaa

SEQ ID NO: 748298 - RNA, 19 nt, Artificial Sequence
  Description of Artificial Sequence: Synthetic oligonucleotide
  Sense strand starting at position 2454 of SEQ ID NO: 586844
uggaaucuauguuuacaaa

SEQ ID NO: 748299 - RNA, 19 nt, Artificial Sequence
  Description of Artificial Sequence: Synthetic oligonucleotide
  Antisense strand to SEQ ID NO: 748298
uuuguaaacauagauucca

SEQ ID NO: 748300 - RNA, 19 nt, Artificial Sequence
  Description of Artificial Sequence: Synthetic oligonucleotide
  Sense strand starting at position 2512 of SEQ ID NO: 586844
gguccaauguucucaucua

SEQ ID NO: 748301 - RNA, 19 nt, Artificial Sequence
  Description of Artificial Sequence: Synthetic oligonucleotide
  Antisense strand to SEQ ID NO: 748300
uagaugagaacauuggacc

SEQ ID NO: 748302 - RNA, 19 nt, Artificial Sequence
  Description of Artificial Sequence: Synthetic oligonucleotide
  Sense strand starting at position 2513 of SEQ ID NO: 586844
guccaauguucucaucuac

SEQ ID NO: 748303 - RNA, 19 nt, Artificial Sequence
  Description of Artificial Sequence: Synthetic oligonucleotide
  Antisense strand to SEQ ID NO: 748302
guagaugagaacauuggac

SEQ ID NO: 748304 - RNA, 19 nt, Artificial Sequence
  Description of Artificial Sequence: Synthetic oligonucleotide
  Sense strand starting at position 2589 of SEQ ID NO: 586844
ccugaauagcaauaaguuu

SEQ ID NO: 748305 - RNA, 19 nt, Artificial Sequence
  Description of Artificial Sequence: Synthetic oligonucleotide
  Antisense strand to SEQ ID NO: 748304
aaacuuauugcuauucagg

SEQ ID NO: 748306 - RNA, 19 nt, Artificial Sequence
  Description of Artificial Sequence: Synthetic oligonucleotide
  Sense strand starting at position 2623 of SEQ ID NO: 586844
uaacaaguauuuggaaguu

SEQ ID NO: 748307 - RNA, 19 nt, Artificial Sequence
  Description of Artificial Sequence: Synthetic oligonucleotide
  Antisense strand to SEQ ID NO: 748306
aacuuccaaauacuuguua

SEQ ID NO: 748308 - RNA, 19 nt, Artificial Sequence
  Description of Artificial Sequence: Synthetic oligonucleotide
  Sense strand starting at position 2633 of SEQ ID NO: 586844
uuggaaguuuccuaacagu

SEQ ID NO: 748309 - RNA, 19 nt, Artificial Sequence
  Description of Artificial Sequence: Synthetic oligonucleotide
  Antisense strand to SEQ ID NO: 748308
acuguuaggaaacuuccaa

SEQ ID NO: 748310 - RNA, 19 nt, Artificial Sequence
  Description of Artificial Sequence: Synthetic oligonucleotide
  Sense strand starting at position 2636 of SEQ ID NO: 586844
gaaguuuccuaacaguggu

SEQ ID NO: 748311 - RNA, 19 nt, Artificial Sequence
  Description of Artificial Sequence: Synthetic oligonucleotide
  Antisense strand to SEQ ID NO: 748310
accacuguuaggaaacuuc

SEQ ID NO: 748312 - RNA, 19 nt, Artificial Sequence
  Description of Artificial Sequence: Synthetic oligonucleotide
  Sense strand starting at position 2639 of SEQ ID NO: 586844
guuuccuaacagugguuau

SEQ ID NO: 748313 - RNA, 19 nt, Artificial Sequence
  Description of Artificial Sequence: Synthetic oligonucleotide
  Antisense strand to SEQ ID NO: 748312
auaaccacuguuaggaaac

SEQ ID NO: 748314 - RNA, 19 nt, Artificial Sequence
  Description of Artificial Sequence: Synthetic oligonucleotide
  Sense strand starting at position 2642 of SEQ ID NO: 586844
uccuaacagugguuauuau

SEQ ID NO: 748315 - RNA, 19 nt, Artificial Sequence
  Description of Artificial Sequence: Synthetic oligonucleotide
  Antisense strand to SEQ ID NO: 748314
auaauaaccacuguuagga

SEQ ID NO: 748316 - RNA, 19 nt, Artificial Sequence
  Description of Artificial Sequence: Synthetic oligonucleotide
  Sense strand starting at position 2643 of SEQ ID NO: 586844
ccuaacagugguuauuauu

SEQ ID NO: 748317 - RNA, 19 nt, Artificial Sequence
  Description of Artificial Sequence: Synthetic oligonucleotide
  Antisense strand to SEQ ID NO: 748316
aauaauaaccacuguuagg

SEQ ID NO: 748318 - RNA, 19 nt, Artificial Sequence
  Description of Artificial Sequence: Synthetic oligonucleotide
  Sense strand starting at position 2660 of SEQ ID NO: 586844
uuaauuauggagugggaug

SEQ ID NO: 748319 - RNA, 19 nt, Artificial Sequence
  Description of Artificial Sequence: Synthetic oligonucleotide
  Antisense strand to SEQ ID NO: 748318
caucccacuccauaauuaa

SEQ ID NO: 748320 - RNA, 19 nt, Artificial Sequence
  Description of Artificial Sequence: Synthetic oligonucleotide
  Sense strand starting at position 2689 of SEQ ID NO: 586844
agggaauaaaugcguaaga

SEQ ID NO: 748321 - RNA, 19 nt, Artificial Sequence
  Description of Artificial Sequence: Synthetic oligonucleotide
  Antisense strand to SEQ ID NO: 748320
ucuuacgcauuuauucccu

SEQ ID NO: 748322 - RNA, 19 nt, Artificial Sequence
  Description of Artificial Sequence: Synthetic oligonucleotide
  Sense strand starting at position 2690 of SEQ ID NO: 586844
gggaauaaaugcguaagaa

SEQ ID NO: 748323 - RNA, 19 nt, Artificial Sequence
  Description of Artificial Sequence: Synthetic oligonucleotide
  Antisense strand to SEQ ID NO: 748322
uucuuacgcauuuauuccc

SEQ ID NO: 748324 - RNA, 19 nt, Artificial Sequence
  Description of Artificial Sequence: Synthetic oligonucleotide
  Sense strand starting at position 2699 of SEQ ID NO: 586844
ugcguaagaaugugacaau

SEQ ID NO: 748325 - RNA, 19 nt, Artificial Sequence
  Description of Artificial Sequence: Synthetic oligonucleotide
  Antisense strand to SEQ ID NO: 748324
auugucacauucuuacgca

SEQ ID NO: 748326 - RNA, 19 nt, Artificial Sequence
  Description of Artificial Sequence: Synthetic oligonucleotide
  Sense strand starting at position 2700 of SEQ ID NO: 586844
gcguaagaaugugacaauc

SEQ ID NO: 748327 - RNA, 19 nt, Artificial Sequence
  Description of Artificial Sequence: Synthetic oligonucleotide
  Antisense strand to SEQ ID NO: 748326
gauugucacauucuuacgc

SEQ ID NO: 748328 - RNA, 19 nt, Artificial Sequence
  Description of Artificial Sequence: Synthetic oligonucleotide
  Sense strand starting at position 2702 of SEQ ID NO: 586844
guaagaaugugacaaucag

SEQ ID NO: 748329 - RNA, 19 nt, Artificial Sequence
  Description of Artificial Sequence: Synthetic oligonucleotide
  Antisense strand to SEQ ID NO: 748328
cugauugucacauucuuac

SEQ ID NO: 748330 - RNA, 19 nt, Artificial Sequence
  Description of Artificial Sequence: Synthetic oligonucleotide
  Sense strand starting at position 2947 of SEQ ID NO: 586844
uugauauuagaccgagcca

SEQ ID NO: 748331 - RNA, 19 nt, Artificial Sequence
  Description of Artificial Sequence: Synthetic oligonucleotide
  Antisense strand to SEQ ID NO: 748330
uggcucggucuaauaucaa

SEQ ID NO: 748332 - RNA, 19 nt, Artificial Sequence
  Description of Artificial Sequence: Synthetic oligonucleotide
  Sense strand starting at position 3110 of SEQ ID NO: 586844
uuuguaaagcaucgacaau

SEQ ID NO: 748333 - RNA, 19 nt, Artificial Sequence
  Description of Artificial Sequence: Synthetic oligonucleotide
  Antisense strand to SEQ ID NO: 748332
auugucgaugcuuuacaaa

SEQ ID NO: 748334 - RNA, 19 nt, Artificial Sequence
  Description of Artificial Sequence: Synthetic oligonucleotide
  Sense strand starting at position 3411 of SEQ ID NO: 586844
cuagcuuugugccaagaag

SEQ ID NO: 748335 - RNA, 19 nt, Artificial Sequence
  Description of Artificial Sequence: Synthetic oligonucleotide
  Antisense strand to SEQ ID NO: 748334
cuucuuggcacaaagcuag

SEQ ID NO: 748336 - RNA, 19 nt, Artificial Sequence
  Description of Artificial Sequence: Synthetic oligonucleotide
  Sense strand starting at position 3475 of SEQ ID NO: 586844
ggcggaucccacugugaca

SEQ ID NO: 748337 - RNA, 19 nt, Artificial Sequence
  Description of Artificial Sequence: Synthetic oligonucleotide
  Antisense strand to SEQ ID NO: 748336
ugucacagugggauccgcc

SEQ ID NO: 748338 - RNA, 19 nt, Artificial Sequence
  Description of Artificial Sequence: Synthetic oligonucleotide
  Sense strand starting at position 3582 of SEQ ID NO: 586844
cucccaaugugccaggaaa

SEQ ID NO: 748339 - RNA, 19 nt, Artificial Sequence
  Description of Artificial Sequence: Synthetic oligonucleotide
  Antisense strand to SEQ ID NO: 748338
uuuccuggcacauugggag

SEQ ID NO: 748340 - RNA, 19 nt, Artificial Sequence
  Description of Artificial Sequence: Synthetic oligonucleotide
  Sense strand starting at position 3584 of SEQ ID NO: 586844
cccaaugugccaggaaaca

SEQ ID NO: 748341 - RNA, 19 nt, Artificial Sequence
  Description of Artificial Sequence: Synthetic oligonucleotide
  Antisense strand to SEQ ID NO: 748340
uguuuccuggcacauuggg

SEQ ID NO: 748342 - RNA, 19 nt, Artificial Sequence
  Description of Artificial Sequence: Synthetic oligonucleotide
  Sense strand starting at position 3614 of SEQ ID NO: 586844
ugauaaugccuccgaucuu

SEQ ID NO: 748343 - RNA, 19 nt, Artificial Sequence
  Description of Artificial Sequence: Synthetic oligonucleotide
  Antisense strand to SEQ ID NO: 748342
aagaucggaggcauuauca

SEQ ID NO: 748344 - RNA, 19 nt, Artificial Sequence
  Description of Artificial Sequence: Synthetic oligonucleotide
  Sense strand starting at position 49 of SEQ ID NO: 586845
uacuacugcugggcugaaa

SEQ ID NO: 748345 - RNA, 19 nt, Artificial Sequence
  Description of Artificial Sequence: Synthetic oligonucleotide
  Antisense strand to SEQ ID NO: 748344
uuucagcccagcaguagua

SEQ ID NO: 748346 - RNA, 19 nt, Artificial Sequence
  Description of Artificial Sequence: Synthetic oligonucleotide
  Sense strand starting at position 98 of SEQ ID NO: 586845
uuaucuaguccuuggaagu

SEQ ID NO: 748347 - RNA, 19 nt, Artificial Sequence
  Description of Artificial Sequence: Synthetic oligonucleotide
  Antisense strand to SEQ ID NO: 748346
acuuccaaggacuagauaa

SEQ ID NO: 748348 - RNA, 19 nt, Artificial Sequence
  Description of Artificial Sequence: Synthetic oligonucleotide
  Sense strand starting at position 99 of SEQ ID NO: 586845
uaucuaguccuuggaaguu

SEQ ID NO: 748349 - RNA, 19 nt, Artificial Sequence
  Description of Artificial Sequence: Synthetic oligonucleotide
  Antisense strand to SEQ ID NO: 748348
aacuuccaaggacuagaua

SEQ ID NO: 748350 - RNA, 19 nt, Artificial Sequence
  Description of Artificial Sequence: Synthetic oligonucleotide
  Sense strand starting at position 338 of SEQ ID NO: 586845
gccugcauccugguuguau

SEQ ID NO: 748351 - RNA, 19 nt, Artificial Sequence
  Description of Artificial Sequence: Synthetic oligonucleotide
  Antisense strand to SEQ ID NO: 748350
auacaaccaggaugcaggc

SEQ ID NO: 748352 - RNA, 19 nt, Artificial Sequence
  Description of Artificial Sequence: Synthetic oligonucleotide
  Sense strand starting at position 636 of SEQ ID NO: 586845
ggacauggcuuacucaaag

SEQ ID NO: 748353 - RNA, 19 nt, Artificial Sequence
  Description of Artificial Sequence: Synthetic oligonucleotide
  Antisense strand to SEQ ID NO: 748352
cuuugaguaagccaugucc

SEQ ID NO: 748354 - RNA, 19 nt, Artificial Sequence
  Description of Artificial Sequence: Synthetic oligonucleotide
  Sense strand starting at position 1056 of SEQ ID NO: 586845
uucuguuugggccaaaggu

SEQ ID NO: 748355 - RNA, 19 nt, Artificial Sequence
  Description of Artificial Sequence: Synthetic oligonucleotide
  Antisense strand to SEQ ID NO: 748354
accuuuggcccaaacagaa

SEQ ID NO: 748356 - RNA, 19 nt, Artificial Sequence
  Description of Artificial Sequence: Synthetic oligonucleotide
  Sense strand starting at position 1112 of SEQ ID NO: 586845
gaaugacaacuucgcuaag

SEQ ID NO: 748357 - RNA, 19 nt, Artificial Sequence
  Description of Artificial Sequence: Synthetic oligonucleotide
  Antisense strand to SEQ ID NO: 748356
cuuagcgaaguugucauuc

SEQ ID NO: 748358 - RNA, 19 nt, Artificial Sequence
  Description of Artificial Sequence: Synthetic oligonucleotide
  Sense strand starting at position 1114 of SEQ ID NO: 586845
augacaacuucgcuaagau

SEQ ID NO: 748359 - RNA, 19 nt, Artificial Sequence
  Description of Artificial Sequence: Synthetic oligonucleotide
  Antisense strand to SEQ ID NO: 748358
aucuuagcgaaguugucau

SEQ ID NO: 748360 - RNA, 19 nt, Artificial Sequence
  Description of Artificial Sequence: Synthetic oligonucleotide
  Sense strand starting at position 1115 of SEQ ID NO: 586845
ugacaacuucgcuaagauu

SEQ ID NO: 748361 - RNA, 19 nt, Artificial Sequence
  Description of Artificial Sequence: Synthetic oligonucleotide
  Antisense strand to SEQ ID NO: 748360
aaucuuagcgaaguuguca

SEQ ID NO: 748362 - RNA, 19 nt, Artificial Sequence
  Description of Artificial Sequence: Synthetic oligonucleotide
  Sense strand starting at position 1297 of SEQ ID NO: 586845
agugaugcucuuuaaauca

SEQ ID NO: 748363 - RNA, 19 nt, Artificial Sequence
  Description of Artificial Sequence: Synthetic oligonucleotide
  Antisense strand to SEQ ID NO: 748362
ugauuuaaagagcaucacu

SEQ ID NO: 748364 - RNA, 19 nt, Artificial Sequence
  Description of Artificial Sequence: Synthetic oligonucleotide
  Sense strand starting at position 1346 of SEQ ID NO: 586845
acagcuuccguggagagaa

SEQ ID NO: 748365 - RNA, 19 nt, Artificial Sequence
  Description of Artificial Sequence: Synthetic oligonucleotide
  Antisense strand to SEQ ID NO: 748364
uucucuccacggaagcugu

SEQ ID NO: 748366 - RNA, 19 nt, Artificial Sequence
  Description of Artificial Sequence: Synthetic oligonucleotide
  Sense strand starting at position 1564 of SEQ ID NO: 586845
gaggucuucucuuccagau

SEQ ID NO: 748367 - RNA, 19 nt, Artificial Sequence
  Description of Artificial Sequence: Synthetic oligonucleotide
  Antisense strand to SEQ ID NO: 748366
aucuggaagagaagaccuc

SEQ ID NO: 748368 - RNA, 19 nt, Artificial Sequence
  Description of Artificial Sequence: Synthetic oligonucleotide
  Sense strand starting at position 1764 of SEQ ID NO: 586845
acugcaugucugcaacaga

SEQ ID NO: 748369 - RNA, 19 nt, Artificial Sequence
  Description of Artificial Sequence: Synthetic oligonucleotide
  Antisense strand to SEQ ID NO: 748368
ucuguugcagacaugcagu

SEQ ID NO: 748370 - RNA, 19 nt, Artificial Sequence
  Description of Artificial Sequence: Synthetic oligonucleotide
  Sense strand starting at position 1891 of SEQ ID NO: 586845
agcugcuuugcugcucaaa

SEQ ID NO: 748371 - RNA, 19 nt, Artificial Sequence
  Description of Artificial Sequence: Synthetic oligonucleotide
  Antisense strand to SEQ ID NO: 748370
uuugagcagcaaagcagcu

SEQ ID NO: 748372 - RNA, 19 nt, Artificial Sequence
  Description of Artificial Sequence: Synthetic oligonucleotide
  Sense strand starting at position 2210 of SEQ ID NO: 586845
guccuuggagcacaaagau

SEQ ID NO: 748373 - RNA, 19 nt, Artificial Sequence
  Description of Artificial Sequence: Synthetic oligonucleotide
  Antisense strand to SEQ ID NO: 748372
aucuuugugcuccaaggac

SEQ ID NO: 748374 - RNA, 19 nt, Artificial Sequence
  Description of Artificial Sequence: Synthetic oligonucleotide
  Sense strand starting at position 2256 of SEQ ID NO: 586845
gaaggauggguauggcuuu

SEQ ID NO: 748375 - RNA, 19 nt, Artificial Sequence
  Description of Artificial Sequence: Synthetic oligonucleotide
  Antisense strand to SEQ ID NO: 748374
aaagccauacccauccuuc

SEQ ID NO: 748376 - RNA, 19 nt, Artificial Sequence
  Description of Artificial Sequence: Synthetic oligonucleotide
  Sense strand starting at position 2363 of SEQ ID NO: 586845
auggucucugccuauauca

SEQ ID NO: 748377 - RNA, 19 nt, Artificial Sequence
  Description of Artificial Sequence: Synthetic oligonucleotide
  Antisense strand to SEQ ID NO: 748376
ugauauaggcagagaccau

SEQ ID NO: 748378 - RNA, 19 nt, Artificial Sequence
  Description of Artificial Sequence: Synthetic oligonucleotide
  Sense strand starting at position 2379 of SEQ ID NO: 586845
ucagccaugucucugauuu

SEQ ID NO: 748379 - RNA, 19 nt, Artificial Sequence
  Description of Artificial Sequence: Synthetic oligonucleotide
  Antisense strand to SEQ ID NO: 748378
aaaucagagacauggcuga

SEQ ID NO: 748380 - RNA, 19 nt, Artificial Sequence
  Description of Artificial Sequence: Synthetic oligonucleotide
  Sense strand starting at position 2462 of SEQ ID NO: 586845
ugggcaauuccuggagaua

SEQ ID NO: 748381 - RNA, 19 nt, Artificial Sequence
  Description of Artificial Sequence: Synthetic oligonucleotide
  Antisense strand to SEQ ID NO: 748380
uaucuccaggaauugccca

SEQ ID NO: 748382 - RNA, 19 nt, Artificial Sequence
  Description of Artificial Sequence: Synthetic oligonucleotide
  Sense strand starting at position 2465 of SEQ ID NO: 586845
gcaauuccuggagauagua

SEQ ID NO: 748383 - RNA, 19 nt, Artificial Sequence
  Description of Artificial Sequence: Synthetic oligonucleotide
  Antisense strand to SEQ ID NO: 748382
uacuaucuccaggaauugc

SEQ ID NO: 748384 - RNA, 19 nt, Artificial Sequence
  Description of Artificial Sequence: Synthetic oligonucleotide
  Sense strand starting at position 2768 of SEQ ID NO: 586845
cuuccagggaucugugagu

SEQ ID NO: 748385 - RNA, 19 nt, Artificial Sequence
  Description of Artificial Sequence: Synthetic oligonucleotide
  Antisense strand to SEQ ID NO: 748384
acucacagaucccuggaag

SEQ ID NO: 748386 - RNA, 19 nt, Artificial Sequence
  Description of Artificial Sequence: Synthetic oligonucleotide
  Sense strand starting at position 2773 of SEQ ID NO: 586845
agggaucugugaguaucau

SEQ ID NO: 748387 - RNA, 19 nt, Artificial Sequence
  Description of Artificial Sequence: Synthetic oligonucleotide
  Antisense strand to SEQ ID NO: 748386
augauacucacagaucccu

SEQ ID NO: 748388 - RNA, 19 nt, Artificial Sequence
  Description of Artificial Sequence: Synthetic oligonucleotide
  Sense strand starting at position 2774 of SEQ ID NO: 586845
gggaucugugaguaucauc

SEQ ID NO: 748389 - RNA, 19 nt, Artificial Sequence
  Description of Artificial Sequence: Synthetic oligonucleotide
  Antisense strand to SEQ ID NO: 748388
gaugauacucacagauccc

SEQ ID NO: 748390 - RNA, 19 nt, Artificial Sequence
  Description of Artificial Sequence: Synthetic oligonucleotide
  Sense strand starting at position 2833 of SEQ ID NO: 586845
cuuccuguaccugauuaca

SEQ ID NO: 748391 - RNA, 19 nt, Artificial Sequence
  Description of Artificial Sequence: Synthetic oligonucleotide
  Antisense strand to SEQ ID NO: 748390
uguaaucagguacaggaag

SEQ ID NO: 748392 - RNA, 19 nt, Artificial Sequence
  Description of Artificial Sequence: Synthetic oligonucleotide
  Sense strand starting at position 2944 of SEQ ID NO: 586845
cgugucccucauuaaauaa

SEQ ID NO: 748393 - RNA, 19 nt, Artificial Sequence
  Description of Artificial Sequence: Synthetic oligonucleotide
  Antisense strand to SEQ ID NO: 748392
uuauuuaaugagggacacg

SEQ ID NO: 748394 - RNA, 19 nt, Artificial Sequence
  Description of Artificial Sequence: Synthetic oligonucleotide
  Sense strand starting at position 3008 of SEQ ID NO: 586845
caaagauauugagugaucu

SEQ ID NO: 748395 - RNA, 19 nt, Artificial Sequence
  Description of Artificial Sequence: Synthetic oligonucleotide
  Antisense strand to SEQ ID NO: 748394
agaucacucaauaucuuug

SEQ ID NO: 748396 - RNA, 19 nt, Artificial Sequence
  Description of Artificial Sequence: Synthetic oligonucleotide
  Sense strand starting at position 3012 of SEQ ID NO: 586845
gauauugagugaucuguug

SEQ ID NO: 748397 - RNA, 19 nt, Artificial Sequence
  Description of Artificial Sequence: Synthetic oligonucleotide
  Antisense strand to SEQ ID NO: 748396
caacagaucacucaauauc

SEQ ID NO: 748398 - RNA, 19 nt, Artificial Sequence
  Description of Artificial Sequence: Synthetic oligonucleotide
  Sense strand starting at position 3145 of SEQ ID NO: 586845
gauuaauguggaugacgua

SEQ ID NO: 748399 - RNA, 19 nt, Artificial Sequence
  Description of Artificial Sequence: Synthetic oligonucleotide
  Antisense strand to SEQ ID NO: 748398
uacgucauccacauuaauc

SEQ ID NO: 748400 - RNA, 19 nt, Artificial Sequence
  Description of Artificial Sequence: Synthetic oligonucleotide
  Sense strand starting at position 3157 of SEQ ID NO: 586845
ugacguauucaggaaggcu

SEQ ID NO: 748401 - RNA, 19 nt, Artificial Sequence
  Description of Artificial Sequence: Synthetic oligonucleotide
  Antisense strand to SEQ ID NO: 748400
agccuuccugaauacguca

SEQ ID NO: 748402 - RNA, 19 nt, Artificial Sequence
  Description of Artificial Sequence: Synthetic oligonucleotide
  Sense strand starting at position 3380 of SEQ ID NO: 586845
gccagauagcucuaagaac

SEQ ID NO: 748403 - RNA, 19 nt, Artificial Sequence
  Description of Artificial Sequence: Synthetic oligonucleotide
  Antisense strand to SEQ ID NO: 748402
guucuuagagcuaucuggc

SEQ ID NO: 748404 - RNA, 19 nt, Artificial Sequence
  Description of Artificial Sequence: Synthetic oligonucleotide
  Sense strand starting at position 3496 of SEQ ID NO: 586845
augggauguuccucaaggu

SEQ ID NO: 748405 - RNA, 19 nt, Artificial Sequence
  Description of Artificial Sequence: Synthetic oligonucleotide
  Antisense strand to SEQ ID NO: 748404
accuugaggaacaucccau

SEQ ID NO: 748406 - RNA, 19 nt, Artificial Sequence
  Description of Artificial Sequence: Synthetic oligonucleotide
  Sense strand starting at position 3532 of SEQ ID NO: 586845
auuaauauucugugucaac

SEQ ID NO: 748407 - RNA, 19 nt, Artificial Sequence
  Description of Artificial Sequence: Synthetic oligonucleotide
  Antisense strand to SEQ ID NO: 748406
guugacacagaauauuaau

SEQ ID NO: 748408 - RNA, 19 nt, Artificial Sequence
  Description of Artificial Sequence: Synthetic oligonucleotide
  Sense strand starting at position 3533 of SEQ ID NO: 586845
uuaauauucugugucaaca

SEQ ID NO: 748409 - RNA, 19 nt, Artificial Sequence
  Description of Artificial Sequence: Synthetic oligonucleotide
  Antisense strand to SEQ ID NO: 748408
uguugacacagaauauuaa

SEQ ID NO: 748410 - RNA, 19 nt, Artificial Sequence
  Description of Artificial Sequence: Synthetic oligonucleotide
  Sense strand starting at position 3558 of SEQ ID NO: 586845
guccaaguccuggaucagu

SEQ ID NO: 748411 - RNA, 19 nt, Artificial Sequence
  Description of Artificial Sequence: Synthetic oligonucleotide
  Antisense strand to SEQ ID NO: 748410
acugauccaggacuuggac

SEQ ID NO: 748412 - RNA, 19 nt, Artificial Sequence
  Description of Artificial Sequence: Synthetic oligonucleotide
  Sense strand starting at position 3653 of SEQ ID NO: 586845
ugcuguugggaucauggau

SEQ ID NO: 748413 - RNA, 19 nt, Artificial Sequence
  Description of Artificial Sequence: Synthetic oligonucleotide
  Antisense strand to SEQ ID NO: 748412
auccaugaucccaacagca

SEQ ID NO: 748414 - RNA, 19 nt, Artificial Sequence
  Description of Artificial Sequence: Synthetic oligonucleotide
  Sense strand starting at position 3705 of SEQ ID NO: 586845
ugggaugugcgggauuauu

SEQ ID NO: 748415 - RNA, 19 nt, Artificial Sequence
  Description of Artificial Sequence: Synthetic oligonucleotide
  Antisense strand to SEQ ID NO: 748414
aauaaucccgcacauccca

SEQ ID NO: 748416 - RNA, 19 nt, Artificial Sequence
  Description of Artificial Sequence: Synthetic oligonucleotide
  Sense strand starting at position 3744 of SEQ ID NO: 586845
uagcauaaaccugagguuu

SEQ ID NO: 748417 - RNA, 19 nt, Artificial Sequence
  Description of Artificial Sequence: Synthetic oligonucleotide
  Antisense strand to SEQ ID NO: 748416
aaaccucagguuuaugcua

SEQ ID NO: 748418 - RNA, 19 nt, Artificial Sequence
  Description of Artificial Sequence: Synthetic oligonucleotide
  Sense strand starting at position 3752 of SEQ ID NO: 586845
accugagguuuagcagaaa

SEQ ID NO: 748419 - RNA, 19 nt, Artificial Sequence
  Description of Artificial Sequence: Synthetic oligonucleotide
  Antisense strand to SEQ ID NO: 748418
uuucugcuaaaccucaggu

SEQ ID NO: 748420 - RNA, 19 nt, Artificial Sequence
  Description of Artificial Sequence: Synthetic oligonucleotide
  Sense strand starting at position 3755 of SEQ ID NO: 586845
ugagguuuagcagaaagcu

SEQ ID NO: 748421 - RNA, 19 nt, Artificial Sequence
  Description of Artificial Sequence: Synthetic oligonucleotide
  Antisense strand to SEQ ID NO: 748420
agcuuucugcuaaaccuca

SEQ ID NO: 748422 - RNA, 19 nt, Artificial Sequence
  Description of Artificial Sequence: Synthetic oligonucleotide
  Sense strand starting at position 3775 of SEQ ID NO: 586845
gcgccauuuggcgaagauc

SEQ ID NO: 748423 - RNA, 19 nt, Artificial Sequence
  Description of Artificial Sequence: Synthetic oligonucleotide
  Antisense strand to SEQ ID NO: 748422
gaucuucgccaaauggcgc

SEQ ID NO: 748424 - RNA, 19 nt, Artificial Sequence
  Description of Artificial Sequence: Synthetic oligonucleotide
  Sense strand starting at position 222 of SEQ ID NO: 586846
ugacccugucgggaaggau

SEQ ID NO: 748425 - RNA, 19 nt, Artificial Sequence
  Description of Artificial Sequence: Synthetic oligonucleotide
  Antisense strand to SEQ ID NO: 748424
auccuucccgacaggguca

SEQ ID NO: 748426 - RNA, 19 nt, Artificial Sequence
  Description of Artificial Sequence: Synthetic oligonucleotide
  Sense strand starting at position 231 of SEQ ID NO: 586846
cgggaaggauuagcuuuaa

SEQ ID NO: 748427 - RNA, 19 nt, Artificial Sequence
  Description of Artificial Sequence: Synthetic oligonucleotide
  Antisense strand to SEQ ID NO: 748426
uuaaagcuaauccuucccg

SEQ ID NO: 748428 - RNA, 19 nt, Artificial Sequence
  Description of Artificial Sequence: Synthetic oligonucleotide
  Sense strand starting at position 1400 of SEQ ID NO: 586846
agaaguugauucugcgaaa

SEQ ID NO: 748429 - RNA, 19 nt, Artificial Sequence
  Description of Artificial Sequence: Synthetic oligonucleotide
  Antisense strand to SEQ ID NO: 748428
uuucgcagaaucaacuucu

SEQ ID NO: 748430 - RNA, 19 nt, Artificial Sequence
  Description of Artificial Sequence: Synthetic oligonucleotide
  Sense strand starting at position 1401 of SEQ ID NO: 586846
gaaguugauucugcgaaac

SEQ ID NO: 748431 - RNA, 19 nt, Artificial Sequence
  Description of Artificial Sequence: Synthetic oligonucleotide
  Antisense strand to SEQ ID NO: 748430
guuucgcagaaucaacuuc

SEQ ID NO: 748432 - RNA, 19 nt, Artificial Sequence
  Description of Artificial Sequence: Synthetic oligonucleotide
  Sense strand starting at position 1403 of SEQ ID NO: 586846
aguugauucugcgaaacuc

SEQ ID NO: 748433 - RNA, 19 nt, Artificial Sequence
  Description of Artificial Sequence: Synthetic oligonucleotide
  Antisense strand to SEQ ID NO: 748432
gaguuucgcagaaucaacu

SEQ ID NO: 748434 - RNA, 19 nt, Artificial Sequence
  Description of Artificial Sequence: Synthetic oligonucleotide
  Sense strand starting at position 1649 of SEQ ID NO: 586846
ccggguuacucguggcuga

SEQ ID NO: 748435 - RNA, 19 nt, Artificial Sequence
  Description of Artificial Sequence: Synthetic oligonucleotide
  Antisense strand to SEQ ID NO: 748434
ucagccacgaguaacccgg

SEQ ID NO: 748436 - RNA, 19 nt, Artificial Sequence
  Description of Artificial Sequence: Synthetic oligonucleotide
  Sense strand starting at position 2450 of SEQ ID NO: 586846
guagcacgugcuucucgaa

SEQ ID NO: 748437 - RNA, 19 nt, Artificial Sequence
  Description of Artificial Sequence: Synthetic oligonucleotide
  Antisense strand to SEQ ID NO: 748436
uucgagaagcacgugcuac

SEQ ID NO: 748438 - RNA, 19 nt, Artificial Sequence
  Description of Artificial Sequence: Synthetic oligonucleotide
  Sense strand starting at position 2451 of SEQ ID NO: 586846
uagcacgugcuucucgaaa

SEQ ID NO: 748439 - RNA, 19 nt, Artificial Sequence
  Description of Artificial Sequence: Synthetic oligonucleotide
  Antisense strand to SEQ ID NO: 748438
uuucgagaagcacgugcua

SEQ ID NO: 748440 - RNA, 19 nt, Artificial Sequence
  Description of Artificial Sequence: Synthetic oligonucleotide
  Sense strand starting at position 2453 of SEQ ID NO: 586846
gcacgugcuucucgaaaca

SEQ ID NO: 748441 - RNA, 19 nt, Artificial Sequence
  Description of Artificial Sequence: Synthetic oligonucleotide
  Antisense strand to SEQ ID NO: 748440
uguuucgagaagcacgugc

SEQ ID NO: 748442 - RNA, 19 nt, Artificial Sequence
  Description of Artificial Sequence: Synthetic oligonucleotide
  Sense strand starting at position 2919 of SEQ ID NO: 586846
ugcucuaguuucugaggau

SEQ ID NO: 748443 - RNA, 19 nt, Artificial Sequence
  Description of Artificial Sequence: Synthetic oligonucleotide
  Antisense strand to SEQ ID NO: 748442
auccucagaaacuagagca

SEQ ID NO: 748444 - RNA, 19 nt, Artificial Sequence
  Description of Artificial Sequence: Synthetic oligonucleotide
  Sense strand starting at position 2920 of SEQ ID NO: 586846
gcucuaguuucugaggaug

SEQ ID NO: 748445 - RNA, 19 nt, Artificial Sequence
  Description of Artificial Sequence: Synthetic oligonucleotide
  Antisense strand to SEQ ID NO: 748444
cauccucagaaacuagagc

SEQ ID NO: 748446 - RNA, 19 nt, Artificial Sequence
  Description of Artificial Sequence: Synthetic oligonucleotide
  Sense strand starting at position 2922 of SEQ ID NO: 586846
ucuaguuucugaggaugug

SEQ ID NO: 748447 - RNA, 19 nt, Artificial Sequence
  Description of Artificial Sequence: Synthetic oligonucleotide
  Antisense strand to SEQ ID NO: 748446
cacauccucagaaacuaga

SEQ ID NO: 748448 - RNA, 19 nt, Artificial Sequence
  Description of Artificial Sequence: Synthetic oligonucleotide
  Sense strand starting at position 2923 of SEQ ID NO: 586846
cuaguuucugaggauguga

SEQ ID NO: 748449 - RNA, 19 nt, Artificial Sequence
  Description of Artificial Sequence: Synthetic oligonucleotide
  Antisense strand to SEQ ID NO: 748448
ucacauccucagaaacuag

SEQ ID NO: 748450 - RNA, 19 nt, Artificial Sequence
  Description of Artificial Sequence: Synthetic oligonucleotide
  Sense strand starting at position 2990 of SEQ ID NO: 586846
cgcuccgaguaaucaguaa

SEQ ID NO: 748451 - RNA, 19 nt, Artificial Sequence
  Description of Artificial Sequence: Synthetic oligonucleotide
  Antisense strand to SEQ ID NO: 748450
uuacugauuacucggagcg

SEQ ID NO: 748452 - RNA, 19 nt, Artificial Sequence
  Description of Artificial Sequence: Synthetic oligonucleotide
  Sense strand starting at position 2994 of SEQ ID NO: 586846
ccgaguaaucaguaaugca

SEQ ID NO: 748453 - RNA, 19 nt, Artificial Sequence
  Description of Artificial Sequence: Synthetic oligonucleotide
  Antisense strand to SEQ ID NO: 748452
ugcauuacugauuacucgg

SEQ ID NO: 748454 - RNA, 19 nt, Artificial Sequence
  Description of Artificial Sequence: Synthetic oligonucleotide
  Sense strand starting at position 3142 of SEQ ID NO: 586846
aggaucaucucuuaggaag

SEQ ID NO: 748455 - RNA, 19 nt, Artificial Sequence
  Description of Artificial Sequence: Synthetic oligonucleotide
  Antisense strand to SEQ ID NO: 748454
cuuccuaagagaugauccu

SEQ ID NO: 748456 - RNA, 19 nt, Artificial Sequence
  Description of Artificial Sequence: Synthetic oligonucleotide
  Sense strand starting at position 3180 of SEQ ID NO: 586846
ggagaagcauccuuccuuu

SEQ ID NO: 748457 - RNA, 19 nt, Artificial Sequence
  Description of Artificial Sequence: Synthetic oligonucleotide
  Antisense strand to SEQ ID NO: 748456
aaaggaaggaugcuucucc

SEQ ID NO: 748458 - RNA, 19 nt, Artificial Sequence
  Description of Artificial Sequence: Synthetic oligonucleotide
  Sense strand starting at position 3290 of SEQ ID NO: 586846
gguuuauauucuuucuccu

SEQ ID NO: 748459 - RNA, 19 nt, Artificial Sequence
  Description of Artificial Sequence: Synthetic oligonucleotide
  Antisense strand to SEQ ID NO: 748458
aggagaaagaauauaaacc

SEQ ID NO: 748460 - RNA, 19 nt, Artificial Sequence
  Description of Artificial Sequence: Synthetic oligonucleotide
  Sense strand starting at position 3314 of SEQ ID NO: 586846
ucugcucucugguccagaa

SEQ ID NO: 748461 - RNA, 19 nt, Artificial Sequence
  Description of Artificial Sequence: Synthetic oligonucleotide
  Antisense strand to SEQ ID NO: 748460
uucuggaccagagagcaga

SEQ ID NO: 748462 - RNA, 19 nt, Artificial Sequence
  Description of Artificial Sequence: Synthetic oligonucleotide
  Sense strand starting at position 54 of SEQ ID NO: 586847
acaccaaaucuguguugag

SEQ ID NO: 748463 - RNA, 19 nt, Artificial Sequence
  Description of Artificial Sequence: Synthetic oligonucleotide
  Antisense strand to SEQ ID NO: 748462
cucaacacagauuuggugu

SEQ ID NO: 748464 - RNA, 19 nt, Artificial Sequence
  Description of Artificial Sequence: Synthetic oligonucleotide
  Sense strand starting at position 55 of SEQ ID NO: 586847
caccaaaucuguguugaga

SEQ ID NO: 748465 - RNA, 19 nt, Artificial Sequence
  Description of Artificial Sequence: Synthetic oligonucleotide
  Antisense strand to SEQ ID NO: 748464
ucucaacacagauuuggug

SEQ ID NO: 748466 - RNA, 19 nt, Artificial Sequence
  Description of Artificial Sequence: Synthetic oligonucleotide
  Sense strand starting at position 69 of SEQ ID NO: 586847
ugagaagaaucucuguguu

SEQ ID NO: 748467 - RNA, 19 nt, Artificial Sequence
  Description of Artificial Sequence: Synthetic oligonucleotide
  Antisense strand to SEQ ID NO: 748466
aacacagagauucuucuca

SEQ ID NO: 748468 - RNA, 19 nt, Artificial Sequence
  Description of Artificial Sequence: Synthetic oligonucleotide
  Sense strand starting at position 72 of SEQ ID NO: 586847
gaagaaucucuguguuggg

SEQ ID NO: 748469 - RNA, 19 nt, Artificial Sequence
  Description of Artificial Sequence: Synthetic oligonucleotide
  Antisense strand to SEQ ID NO: 748468
cccaacacagagauucuuc

SEQ ID NO: 748470 - RNA, 19 nt, Artificial Sequence
  Description of Artificial Sequence: Synthetic oligonucleotide
  Sense strand starting at position 143 of SEQ ID NO: 586847
gcacuuaagcgauaauagu

SEQ ID NO: 748471 - RNA, 19 nt, Artificial Sequence
  Description of Artificial Sequence: Synthetic oligonucleotide
  Antisense strand to SEQ ID NO: 748470
acuauuaucgcuuaagugc

SEQ ID NO: 748472 - RNA, 19 nt, Artificial Sequence
  Description of Artificial Sequence: Synthetic oligonucleotide
  Sense strand starting at position 152 of SEQ ID NO: 586847
cgauaauaguaacuaacau

SEQ ID NO: 748473 - RNA, 19 nt, Artificial Sequence
  Description of Artificial Sequence: Synthetic oligonucleotide
  Antisense strand to SEQ ID NO: 748472
auguuaguuacuauuaucg

SEQ ID NO: 748474 - RNA, 19 nt, Artificial Sequence
  Description of Artificial Sequence: Synthetic oligonucleotide
  Sense strand starting at position 174 of SEQ ID NO: 586847
ugaaguacucacuaugggu

SEQ ID NO: 748475 - RNA, 19 nt, Artificial Sequence
  Description of Artificial Sequence: Synthetic oligonucleotide
  Antisense strand to SEQ ID NO: 748474
acccauagugaguacuuca

SEQ ID NO: 748476 - RNA, 19 nt, Artificial Sequence
  Description of Artificial Sequence: Synthetic oligonucleotide
  Sense strand starting at position 337 of SEQ ID NO: 586847
gcgauuccucucgaacaga

SEQ ID NO: 748477 - RNA, 19 nt, Artificial Sequence
  Description of Artificial Sequence: Synthetic oligonucleotide
  Antisense strand to SEQ ID NO: 748476
ucuguucgagaggaaucgc

SEQ ID NO: 748478 - RNA, 19 nt, Artificial Sequence
  Description of Artificial Sequence: Synthetic oligonucleotide
  Sense strand starting at position 517 of SEQ ID NO: 586847
uuuggccugcaauauaaua

SEQ ID NO: 748479 - RNA, 19 nt, Artificial Sequence
  Description of Artificial Sequence: Synthetic oligonucleotide
  Antisense strand to SEQ ID NO: 748478
uauuauauugcaggccaaa

SEQ ID NO: 748480 - RNA, 19 nt, Artificial Sequence
  Description of Artificial Sequence: Synthetic oligonucleotide
  Sense strand starting at position 543 of SEQ ID NO: 586847
ggaauagugagauggguuc

SEQ ID NO: 748481 - RNA, 19 nt, Artificial Sequence
  Description of Artificial Sequence: Synthetic oligonucleotide
  Antisense strand to SEQ ID NO: 748480
gaacccaucucacuauucc

SEQ ID NO: 748482 - RNA, 19 nt, Artificial Sequence
  Description of Artificial Sequence: Synthetic oligonucleotide
  Sense strand starting at position 549 of SEQ ID NO: 586847
gugagauggguucgaauga

SEQ ID NO: 748483 - RNA, 19 nt, Artificial Sequence
  Description of Artificial Sequence: Synthetic oligonucleotide
  Antisense strand to SEQ ID NO: 748482
ucauucgaacccaucucac

SEQ ID NO: 748484 - RNA, 19 nt, Artificial Sequence
  Description of Artificial Sequence: Synthetic oligonucleotide
  Sense strand starting at position 600 of SEQ ID NO: 586847
gcaaauuaaguccgguaaa

SEQ ID NO: 748485 - RNA, 19 nt, Artificial Sequence
  Description of Artificial Sequence: Synthetic oligonucleotide
  Antisense strand to SEQ ID NO: 748484
uuuaccggacuuaauuugc

SEQ ID NO: 748486 - RNA, 19 nt, Artificial Sequence
  Description of Artificial Sequence: Synthetic oligonucleotide
  Sense strand starting at position 684 of SEQ ID NO: 586847
acgcguucucuuccagcua

SEQ ID NO: 748487 - RNA, 19 nt, Artificial Sequence
  Description of Artificial Sequence: Synthetic oligonucleotide
  Antisense strand to SEQ ID NO: 748486
uagcuggaagagaacgcgu

SEQ ID NO: 748488 - RNA, 19 nt, Artificial Sequence
  Description of Artificial Sequence: Synthetic oligonucleotide
  Sense strand starting at position 697 of SEQ ID NO: 586847
cagcuaacauguuugugaa

SEQ ID NO: 748489 - RNA, 19 nt, Artificial Sequence
  Description of Artificial Sequence: Synthetic oligonucleotide
  Antisense strand to SEQ ID NO: 748488
uucacaaacauguuagcug

SEQ ID NO: 748490 - RNA, 19 nt, Artificial Sequence
  Description of Artificial Sequence: Synthetic oligonucleotide
  Sense strand starting at position 698 of SEQ ID NO: 586847
agcuaacauguuugugaaa

SEQ ID NO: 748491 - RNA, 19 nt, Artificial Sequence
  Description of Artificial Sequence: Synthetic oligonucleotide
  Antisense strand to SEQ ID NO: 748490
uuucacaaacauguuagcu

SEQ ID NO: 748492 - RNA, 19 nt, Artificial Sequence
  Description of Artificial Sequence: Synthetic oligonucleotide
  Sense strand starting at position 699 of SEQ ID NO: 586847
gcuaacauguuugugaaau

SEQ ID NO: 748493 - RNA, 19 nt, Artificial Sequence
  Description of Artificial Sequence: Synthetic oligonucleotide
  Antisense strand to SEQ ID NO: 748492
auuucacaaacauguuagc

SEQ ID NO: 748494 - RNA, 19 nt, Artificial Sequence
  Description of Artificial Sequence: Synthetic oligonucleotide
  Sense strand starting at position 785 of SEQ ID NO: 586847
ugugcaggcuuauuuaagu

SEQ ID NO: 748495 - RNA, 19 nt, Artificial Sequence
  Description of Artificial Sequence: Synthetic oligonucleotide
  Antisense strand to SEQ ID NO: 748494
acuuaaauaagccugcaca

SEQ ID NO: 748496 - RNA, 19 nt, Artificial Sequence
  Description of Artificial Sequence: Synthetic oligonucleotide
  Sense strand starting at position 799 of SEQ ID NO: 586847
uaaguaauugccugacugu

SEQ ID NO: 748497 - RNA, 19 nt, Artificial Sequence
  Description of Artificial Sequence: Synthetic oligonucleotide
  Antisense strand to SEQ ID NO: 748496
acagucaggcaauuacuua

SEQ ID NO: 748498 - RNA, 19 nt, Artificial Sequence
  Description of Artificial Sequence: Synthetic oligonucleotide
  Sense strand starting at position 800 of SEQ ID NO: 586847
aaguaauugccugacugug

SEQ ID NO: 748499 - RNA, 19 nt, Artificial Sequence
  Description of Artificial Sequence: Synthetic oligonucleotide
  Antisense strand to SEQ ID NO: 748498
cacagucaggcaauuacuu

SEQ ID NO: 748500 - RNA, 19 nt, Artificial Sequence
  Description of Artificial Sequence: Synthetic oligonucleotide
  Sense strand starting at position 802 of SEQ ID NO: 586847
guaauugccugacugugaa

SEQ ID NO: 748501 - RNA, 19 nt, Artificial Sequence
  Description of Artificial Sequence: Synthetic oligonucleotide
  Antisense strand to SEQ ID NO: 748500
uucacagucaggcaauuac

SEQ ID NO: 748502 - RNA, 19 nt, Artificial Sequence
  Description of Artificial Sequence: Synthetic oligonucleotide
  Sense strand starting at position 805 of SEQ ID NO: 586847
auugccugacugugaauga

SEQ ID NO: 748503 - RNA, 19 nt, Artificial Sequence
  Description of Artificial Sequence: Synthetic oligonucleotide
  Antisense strand to SEQ ID NO: 748502
ucauucacagucaggcaau

SEQ ID NO: 748504 - RNA, 19 nt, Artificial Sequence
  Description of Artificial Sequence: Synthetic oligonucleotide
  Sense strand starting at position 882 of SEQ ID NO: 586847
uuucgagagcuuuauucua

SEQ ID NO: 748505 - RNA, 19 nt, Artificial Sequence
  Description of Artificial Sequence: Synthetic oligonucleotide
  Antisense strand to SEQ ID NO: 748504
uagaauaaagcucucgaaa

SEQ ID NO: 748506 - RNA, 19 nt, Artificial Sequence
  Description of Artificial Sequence: Synthetic oligonucleotide
  Sense strand starting at position 884 of SEQ ID NO: 586847
ucgagagcuuuauucuauc

SEQ ID NO: 748507 - RNA, 19 nt, Artificial Sequence
  Description of Artificial Sequence: Synthetic oligonucleotide
  Antisense strand to SEQ ID NO: 748506
gauagaauaaagcucucga

SEQ ID NO: 748508 - RNA, 19 nt, Artificial Sequence
  Description of Artificial Sequence: Synthetic oligonucleotide
  Sense strand starting at position 999 of SEQ ID NO: 586847
auauaaaguucuuucccga

SEQ ID NO: 748509 - RNA, 19 nt, Artificial Sequence
  Description of Artificial Sequence: Synthetic oligonucleotide
  Antisense strand to SEQ ID NO: 748508
ucgggaaagaacuuuauau

SEQ ID NO: 748510 - RNA, 19 nt, Artificial Sequence
  Description of Artificial Sequence: Synthetic oligonucleotide
  Sense strand starting at position 1015 of SEQ ID NO: 586847
cgacucugagcucaucaca

SEQ ID NO: 748511 - RNA, 19 nt, Artificial Sequence
  Description of Artificial Sequence: Synthetic oligonucleotide
  Antisense strand to SEQ ID NO: 748510
ugugaugagcucagagucg

SEQ ID NO: 748512 - RNA, 19 nt, Artificial Sequence
  Description of Artificial Sequence: Synthetic oligonucleotide
  Sense strand starting at position 1110 of SEQ ID NO: 586847
ggugaaagcucgucacauu

SEQ ID NO: 748513 - RNA, 19 nt, Artificial Sequence
  Description of Artificial Sequence: Synthetic oligonucleotide
  Antisense strand to SEQ ID NO: 748512
aaugugacgagcuuucacc

SEQ ID NO: 748514 - RNA, 19 nt, Artificial Sequence
  Description of Artificial Sequence: Synthetic oligonucleotide
  Sense strand starting at position 1111 of SEQ ID NO: 586847
gugaaagcucgucacauuc

SEQ ID NO: 748515 - RNA, 19 nt, Artificial Sequence
  Description of Artificial Sequence: Synthetic oligonucleotide
  Antisense strand to SEQ ID NO: 748514
gaaugugacgagcuuucac

SEQ ID NO: 748516 - RNA, 19 nt, Artificial Sequence
  Description of Artificial Sequence: Synthetic oligonucleotide
  Sense strand starting at position 1406 of SEQ ID NO: 586847
agggcaccagucuaugauu

SEQ ID NO: 748517 - RNA, 19 nt, Artificial Sequence
  Description of Artificial Sequence: Synthetic oligonucleotide
  Antisense strand to SEQ ID NO: 748516
aaucauagacuggugcccu

SEQ ID NO: 748518 - RNA, 19 nt, Artificial Sequence
  Description of Artificial Sequence: Synthetic oligonucleotide
  Sense strand starting at position 1408 of SEQ ID NO: 586847
ggcaccagucuaugauuaa

SEQ ID NO: 748519 - RNA, 19 nt, Artificial Sequence
  Description of Artificial Sequence: Synthetic oligonucleotide
  Antisense strand to SEQ ID NO: 748518
uuaaucauagacuggugcc

SEQ ID NO: 748520 - RNA, 19 nt, Artificial Sequence
  Description of Artificial Sequence: Synthetic oligonucleotide
  Sense strand starting at position 1432 of SEQ ID NO: 586847
cuggacuguggguaugauu

SEQ ID NO: 748521 - RNA, 19 nt, Artificial Sequence
  Description of Artificial Sequence: Synthetic oligonucleotide
  Antisense strand to SEQ ID NO: 748520
aaucauacccacaguccag

SEQ ID NO: 748522 - RNA, 19 nt, Artificial Sequence
  Description of Artificial Sequence: Synthetic oligonucleotide
  Sense strand starting at position 1499 of SEQ ID NO: 586847
ccugacaccuugcuguaau

SEQ ID NO: 748523 - RNA, 19 nt, Artificial Sequence
  Description of Artificial Sequence: Synthetic oligonucleotide
  Antisense strand to SEQ ID NO: 748522
auuacagcaaggugucagg

SEQ ID NO: 748524 - RNA, 19 nt, Artificial Sequence
  Description of Artificial Sequence: Synthetic oligonucleotide
  Sense strand starting at position 2511 of SEQ ID NO: 586847
gugggcuacacguauugua

SEQ ID NO: 748525 - RNA, 19 nt, Artificial Sequence
  Description of Artificial Sequence: Synthetic oligonucleotide
  Antisense strand to SEQ ID NO: 748524
uacaauacguguagcccac

SEQ ID NO: 748526 - RNA, 19 nt, Artificial Sequence
  Description of Artificial Sequence: Synthetic oligonucleotide
  Sense strand starting at position 2865 of SEQ ID NO: 586847
ggcccuagcgcucuugcaa

SEQ ID NO: 748527 - RNA, 19 nt, Artificial Sequence
  Description of Artificial Sequence: Synthetic oligonucleotide
  Antisense strand to SEQ ID NO: 748526
uugcaagagcgcuagggcc

SEQ ID NO: 748528 - RNA, 19 nt, Artificial Sequence
  Description of Artificial Sequence: Synthetic oligonucleotide
  Sense strand starting at position 2917 of SEQ ID NO: 586847
ucucguuuagcuuugucau

SEQ ID NO: 748529 - RNA, 19 nt, Artificial Sequence
  Description of Artificial Sequence: Synthetic oligonucleotide
  Antisense strand to SEQ ID NO: 748528
augacaaagcuaaacgaga

SEQ ID NO: 748530 - RNA, 19 nt, Artificial Sequence
  Description of Artificial Sequence: Synthetic oligonucleotide
  Sense strand starting at position 3140 of SEQ ID NO: 586847
aguacuaggcccugcaaua

SEQ ID NO: 748531 - RNA, 19 nt, Artificial Sequence
  Description of Artificial Sequence: Synthetic oligonucleotide
  Antisense strand to SEQ ID NO: 748530
uauugcagggccuaguacu

SEQ ID NO: 748532 - RNA, 19 nt, Artificial Sequence
  Description of Artificial Sequence: Synthetic oligonucleotide
  Sense strand starting at position 3278 of SEQ ID NO: 586847
uggaauuagugaguuuggu

SEQ ID NO: 748533 - RNA, 19 nt, Artificial Sequence
  Description of Artificial Sequence: Synthetic oligonucleotide
  Antisense strand to SEQ ID NO: 748532
accaaacucacuaauucca

SEQ ID NO: 748534 - RNA, 19 nt, Artificial Sequence
  Description of Artificial Sequence: Synthetic oligonucleotide
  Sense strand starting at position 3447 of SEQ ID NO: 586847
auaguagcuguaugcugaa

SEQ ID NO: 748535 - RNA, 19 nt, Artificial Sequence
  Description of Artificial Sequence: Synthetic oligonucleotide
  Antisense strand to SEQ ID NO: 748534
uucagcauacagcuacuau

SEQ ID NO: 748536 - RNA, 19 nt, Artificial Sequence
  Description of Artificial Sequence: Synthetic oligonucleotide
  Sense strand starting at position 3646 of SEQ ID NO: 586847
aggugcaagcucuagaauu

SEQ ID NO: 748537 - RNA, 19 nt, Artificial Sequence
  Description of Artificial Sequence: Synthetic oligonucleotide
  Antisense strand to SEQ ID NO: 748536
aauucuagagcuugcaccu

SEQ ID NO: 748538 - RNA, 19 nt, Artificial Sequence
  Description of Artificial Sequence: Synthetic oligonucleotide
  Sense strand starting at position 3648 of SEQ ID NO: 586847
gugcaagcucuagaauucu

SEQ ID NO: 748539 - RNA, 19 nt, Artificial Sequence
  Description of Artificial Sequence: Synthetic oligonucleotide
  Antisense strand to SEQ ID NO: 748538
agaauucuagagcuugcac

SEQ ID NO: 748540 - RNA, 19 nt, Artificial Sequence
  Description of Artificial Sequence: Synthetic oligonucleotide
  Sense strand starting at position 3829 of SEQ ID NO: 586847
cuugaagucgcuuaauauu

SEQ ID NO: 748541 - RNA, 19 nt, Artificial Sequence
  Description of Artificial Sequence: Synthetic oligonucleotide
  Antisense strand to SEQ ID NO: 748540
aauauuaagcgacuucaag

SEQ ID NO: 748542 - RNA, 19 nt, Artificial Sequence
  Description of Artificial Sequence: Synthetic oligonucleotide
  Sense strand starting at position 22 of SEQ ID NO: 586848
auuagaaauugugguuuga

SEQ ID NO: 748543 - RNA, 19 nt, Artificial Sequence
  Description of Artificial Sequence: Synthetic oligonucleotide
  Antisense strand to SEQ ID NO: 748542
ucaaaccacaauuucuaau

SEQ ID NO: 748544 - RNA, 19 nt, Artificial Sequence
  Description of Artificial Sequence: Synthetic oligonucleotide
  Sense strand starting at position 24 of SEQ ID NO: 586848
uagaaauugugguuugagu

SEQ ID NO: 748545 - RNA, 19 nt, Artificial Sequence
  Description of Artificial Sequence: Synthetic oligonucleotide
  Antisense strand to SEQ ID NO: 748544
acucaaaccacaauuucua

SEQ ID NO: 748546 - RNA, 19 nt, Artificial Sequence
  Description of Artificial Sequence: Synthetic oligonucleotide
  Sense strand starting at position 26 of SEQ ID NO: 586848
gaaauugugguuugaguca

SEQ ID NO: 748547 - RNA, 19 nt, Artificial Sequence
  Description of Artificial Sequence: Synthetic oligonucleotide
  Antisense strand to SEQ ID NO: 748546
ugacucaaaccacaauuuc

SEQ ID NO: 748548 - RNA, 19 nt, Artificial Sequence
  Description of Artificial Sequence: Synthetic oligonucleotide
  Sense strand starting at position 31 of SEQ ID NO: 586848
ugugguuugagucaugcag

SEQ ID NO: 748549 - RNA, 19 nt, Artificial Sequence
  Description of Artificial Sequence: Synthetic oligonucleotide
  Antisense strand to SEQ ID NO: 748548
cugcaugacucaaaccaca

SEQ ID NO: 748550 - RNA, 19 nt, Artificial Sequence
  Description of Artificial Sequence: Synthetic oligonucleotide
  Sense strand starting at position 33 of SEQ ID NO: 586848
ugguuugagucaugcagcu

SEQ ID NO: 748551 - RNA, 19 nt, Artificial Sequence
  Description of Artificial Sequence: Synthetic oligonucleotide
  Antisense strand to SEQ ID NO: 748550
agcugcaugacucaaacca

SEQ ID NO: 748552 - RNA, 19 nt, Artificial Sequence
  Description of Artificial Sequence: Synthetic oligonucleotide
  Sense strand starting at position 35 of SEQ ID NO: 586848
guuugagucaugcagcuag

SEQ ID NO: 748553 - RNA, 19 nt, Artificial Sequence
  Description of Artificial Sequence: Synthetic oligonucleotide
  Antisense strand to SEQ ID NO: 748552
cuagcugcaugacucaaac

SEQ ID NO: 748554 - RNA, 19 nt, Artificial Sequence
  Description of Artificial Sequence: Synthetic oligonucleotide
  Sense strand starting at position 76 of SEQ ID NO: 586848
cccaguugcuccuuaggau

SEQ ID NO: 748555 - RNA, 19 nt, Artificial Sequence
  Description of Artificial Sequence: Synthetic oligonucleotide
  Antisense strand to SEQ ID NO: 748554
auccuaaggagcaacuggg

SEQ ID NO: 748556 - RNA, 19 nt, Artificial Sequence
  Description of Artificial Sequence: Synthetic oligonucleotide
  Sense strand starting at position 77 of SEQ ID NO: 586848
ccaguugcuccuuaggaua

SEQ ID NO: 748557 - RNA, 19 nt, Artificial Sequence
  Description of Artificial Sequence: Synthetic oligonucleotide
  Antisense strand to SEQ ID NO: 748556
uauccuaaggagcaacugg

SEQ ID NO: 748558 - RNA, 19 nt, Artificial Sequence
  Description of Artificial Sequence: Synthetic oligonucleotide
  Sense strand starting at position 80 of SEQ ID NO: 586848
guugcuccuuaggauaaca

SEQ ID NO: 748559 - RNA, 19 nt, Artificial Sequence
  Description of Artificial Sequence: Synthetic oligonucleotide
  Antisense strand to SEQ ID NO: 748558
uguuauccuaaggagcaac

SEQ ID NO: 748560 - RNA, 19 nt, Artificial Sequence
  Description of Artificial Sequence: Synthetic oligonucleotide
  Sense strand starting at position 111 of SEQ ID NO: 586848
acucuaagauuggugcuca

SEQ ID NO: 748561 - RNA, 19 nt, Artificial Sequence
  Description of Artificial Sequence: Synthetic oligonucleotide
  Antisense strand to SEQ ID NO: 748560
ugagcaccaaucuuagagu

SEQ ID NO: 748562 - RNA, 19 nt, Artificial Sequence
  Description of Artificial Sequence: Synthetic oligonucleotide
  Sense strand starting at position 112 of SEQ ID NO: 586848
cucuaagauuggugcucaa

SEQ ID NO: 748563 - RNA, 19 nt, Artificial Sequence
  Description of Artificial Sequence: Synthetic oligonucleotide
  Antisense strand to SEQ ID NO: 748562
uugagcaccaaucuuagag

SEQ ID NO: 748564 - RNA, 19 nt, Artificial Sequence
  Description of Artificial Sequence: Synthetic oligonucleotide
  Sense strand starting at position 312 of SEQ ID NO: 586848
gccuaauuauccuuagaug

SEQ ID NO: 748565 - RNA, 19 nt, Artificial Sequence
  Description of Artificial Sequence: Synthetic oligonucleotide
  Antisense strand to SEQ ID NO: 748564
caucuaaggauaauuaggc

SEQ ID NO: 748566 - RNA, 19 nt, Artificial Sequence
  Description of Artificial Sequence: Synthetic oligonucleotide
  Sense strand starting at position 327 of SEQ ID NO: 586848
gaugacccaucucaggauu

SEQ ID NO: 748567 - RNA, 19 nt, Artificial Sequence
  Description of Artificial Sequence: Synthetic oligonucleotide
  Antisense strand to SEQ ID NO: 748566
aauccugagaugggucauc

SEQ ID NO: 748568 - RNA, 19 nt, Artificial Sequence
  Description of Artificial Sequence: Synthetic oligonucleotide
  Sense strand starting at position 355 of SEQ ID NO: 586848
ugguuugagcaauaaagcu

SEQ ID NO: 748569 - RNA, 19 nt, Artificial Sequence
  Description of Artificial Sequence: Synthetic oligonucleotide
  Antisense strand to SEQ ID NO: 748568
agcuuuauugcucaaacca

SEQ ID NO: 748570 - RNA, 19 nt, Artificial Sequence
  Description of Artificial Sequence: Synthetic oligonucleotide
  Sense strand starting at position 422 of SEQ ID NO: 586848
ccaguuucugcaugcauua

SEQ ID NO: 748571 - RNA, 19 nt, Artificial Sequence
  Description of Artificial Sequence: Synthetic oligonucleotide
  Antisense strand to SEQ ID NO: 748570
uaaugcaugcagaaacugg

SEQ ID NO: 748572 - RNA, 19 nt, Artificial Sequence
  Description of Artificial Sequence: Synthetic oligonucleotide
  Sense strand starting at position 515 of SEQ ID NO: 586848
ggcuacgccugagaucuaa

SEQ ID NO: 748573 - RNA, 19 nt, Artificial Sequence
  Description of Artificial Sequence: Synthetic oligonucleotide
  Antisense strand to SEQ ID NO: 748572
uuagaucucaggcguagcc

SEQ ID NO: 748574 - RNA, 19 nt, Artificial Sequence
  Description of Artificial Sequence: Synthetic oligonucleotide
  Sense strand starting at position 970 of SEQ ID NO: 586848
ccggaagugcugccguaau

SEQ ID NO: 748575 - RNA, 19 nt, Artificial Sequence
  Description of Artificial Sequence: Synthetic oligonucleotide
  Antisense strand to SEQ ID NO: 748574
auuacggcagcacuuccgg

SEQ ID NO: 748576 - RNA, 19 nt, Artificial Sequence
  Description of Artificial Sequence: Synthetic oligonucleotide
  Sense strand starting at position 981 of SEQ ID NO: 586848
gccguaaucugcgcugaga

SEQ ID NO: 748577 - RNA, 19 nt, Artificial Sequence
  Description of Artificial Sequence: Synthetic oligonucleotide
  Antisense strand to SEQ ID NO: 748576
ucucagcgcagauuacggc

SEQ ID NO: 748578 - RNA, 19 nt, Artificial Sequence
  Description of Artificial Sequence: Synthetic oligonucleotide
  Sense strand starting at position 983 of SEQ ID NO: 586848
cguaaucugcgcugagagu

SEQ ID NO: 748579 - RNA, 19 nt, Artificial Sequence
  Description of Artificial Sequence: Synthetic oligonucleotide
  Antisense strand to SEQ ID NO: 748578
acucucagcgcagauuacg

SEQ ID NO: 748580 - RNA, 19 nt, Artificial Sequence
  Description of Artificial Sequence: Synthetic oligonucleotide
  Sense strand starting at position 2174 of SEQ ID NO: 586848
cagcgcuucuguccagaua

SEQ ID NO: 748581 - RNA, 19 nt, Artificial Sequence
  Description of Artificial Sequence: Synthetic oligonucleotide
  Antisense strand to SEQ ID NO: 748580
uaucuggacagaagcgcug

SEQ ID NO: 748582 - RNA, 19 nt, Artificial Sequence
  Description of Artificial Sequence: Synthetic oligonucleotide
  Sense strand starting at position 2205 of SEQ ID NO: 586848
cgcagaaauuccuguuagg

SEQ ID NO: 748583 - RNA, 19 nt, Artificial Sequence
  Description of Artificial Sequence: Synthetic oligonucleotide
  Antisense strand to SEQ ID NO: 748582
ccuaacaggaauuucugcg

SEQ ID NO: 748584 - RNA, 19 nt, Artificial Sequence
  Description of Artificial Sequence: Synthetic oligonucleotide
  Sense strand starting at position 2314 of SEQ ID NO: 586848
gagacucugcucuggucau

SEQ ID NO: 748585 - RNA, 19 nt, Artificial Sequence
  Description of Artificial Sequence: Synthetic oligonucleotide
  Antisense strand to SEQ ID NO: 748584
augaccagagcagagucuc

SEQ ID NO: 748586 - RNA, 19 nt, Artificial Sequence
  Description of Artificial Sequence: Synthetic oligonucleotide
  Sense strand starting at position 2315 of SEQ ID NO: 586848
agacucugcucuggucauu

SEQ ID NO: 748587 - RNA, 19 nt, Artificial Sequence
  Description of Artificial Sequence: Synthetic oligonucleotide
  Antisense strand to SEQ ID NO: 748586
aaugaccagagcagagucu

SEQ ID NO: 748588 - RNA, 19 nt, Artificial Sequence
  Description of Artificial Sequence: Synthetic oligonucleotide
  Sense strand starting at position 2586 of SEQ ID NO: 586848
agggaacacugaugcuaua

SEQ ID NO: 748589 - RNA, 19 nt, Artificial Sequence
  Description of Artificial Sequence: Synthetic oligonucleotide
  Antisense strand to SEQ ID NO: 748588
uauagcaucaguguucccu

SEQ ID NO: 748590 - RNA, 19 nt, Artificial Sequence
  Description of Artificial Sequence: Synthetic oligonucleotide
  Sense strand starting at position 2601 of SEQ ID NO: 586848
uauaaauccgugggcggua

SEQ ID NO: 748591 - RNA, 19 nt, Artificial Sequence
  Description of Artificial Sequence: Synthetic oligonucleotide
  Antisense strand to SEQ ID NO: 748590
uaccgcccacggauuuaua

SEQ ID NO: 748592 - RNA, 19 nt, Artificial Sequence
  Description of Artificial Sequence: Synthetic oligonucleotide
  Sense strand starting at position 2637 of SEQ ID NO: 586848
gagggaucuggccagcuca

SEQ ID NO: 748593 - RNA, 19 nt, Artificial Sequence
  Description of Artificial Sequence: Synthetic oligonucleotide
  Antisense strand to SEQ ID NO: 748592
ugagcuggccagaucccuc

SEQ ID NO: 748594 - RNA, 19 nt, Artificial Sequence
  Description of Artificial Sequence: Synthetic oligonucleotide
  Sense strand starting at position 2675 of SEQ ID NO: 586848
cagugauggucugaaugua

SEQ ID NO: 748595 - RNA, 19 nt, Artificial Sequence
  Description of Artificial Sequence: Synthetic oligonucleotide
  Antisense strand to SEQ ID NO: 748594
uacauucagaccaucacug

SEQ ID NO: 748596 - RNA, 19 nt, Artificial Sequence
  Description of Artificial Sequence: Synthetic oligonucleotide
  Sense strand starting at position 2683 of SEQ ID NO: 586848
gucugaauguagugggaag

SEQ ID NO: 748597 - RNA, 19 nt, Artificial Sequence
  Description of Artificial Sequence: Synthetic oligonucleotide
  Antisense strand to SEQ ID NO: 748596
cuucccacuacauucagac

SEQ ID NO: 748598 - RNA, 19 nt, Artificial Sequence
  Description of Artificial Sequence: Synthetic oligonucleotide
  Sense strand starting at position 2684 of SEQ ID NO: 586848
ucugaauguagugggaagu

SEQ ID NO: 748599 - RNA, 19 nt, Artificial Sequence
  Description of Artificial Sequence: Synthetic oligonucleotide
  Antisense strand to SEQ ID NO: 748598
acuucccacuacauucaga

SEQ ID NO: 748600 - RNA, 19 nt, Artificial Sequence
  Description of Artificial Sequence: Synthetic oligonucleotide
  Sense strand starting at position 2711 of SEQ ID NO: 586848
ugucaauagaagugauaga

SEQ ID NO: 748601 - RNA, 19 nt, Artificial Sequence
  Description of Artificial Sequence: Synthetic oligonucleotide
  Antisense strand to SEQ ID NO: 748600
ucuaucacuucuauugaca

SEQ ID NO: 748602 - RNA, 19 nt, Artificial Sequence
  Description of Artificial Sequence: Synthetic oligonucleotide
  Sense strand starting at position 2720 of SEQ ID NO: 586848
aagugauagacccgaguuc

SEQ ID NO: 748603 - RNA, 19 nt, Artificial Sequence
  Description of Artificial Sequence: Synthetic oligonucleotide
  Antisense strand to SEQ ID NO: 748602
gaacucgggucuaucacuu

SEQ ID NO: 748604 - RNA, 19 nt, Artificial Sequence
  Description of Artificial Sequence: Synthetic oligonucleotide
  Sense strand starting at position 2721 of SEQ ID NO: 586848
agugauagacccgaguuca

SEQ ID NO: 748605 - RNA, 19 nt, Artificial Sequence
  Description of Artificial Sequence: Synthetic oligonucleotide
  Antisense strand to SEQ ID NO: 748604
ugaacucgggucuaucacu

SEQ ID NO: 748606 - RNA, 19 nt, Artificial Sequence
  Description of Artificial Sequence: Synthetic oligonucleotide
  Sense strand starting at position 2731 of SEQ ID NO: 586848
ccgaguucagguuguuaaa

SEQ ID NO: 748607 - RNA, 19 nt, Artificial Sequence
  Description of Artificial Sequence: Synthetic oligonucleotide
  Antisense strand to SEQ ID NO: 748606
uuuaacaaccugaacucgg

SEQ ID NO: 748608 - RNA, 19 nt, Artificial Sequence
  Description of Artificial Sequence: Synthetic oligonucleotide
  Sense strand starting at position 2769 of SEQ ID NO: 586848
gagaauagauuccagaagu

SEQ ID NO: 748609 - RNA, 19 nt, Artificial Sequence
  Description of Artificial Sequence: Synthetic oligonucleotide
  Antisense strand to SEQ ID NO: 748608
acuucuggaaucuauucuc

SEQ ID NO: 748610 - RNA, 19 nt, Artificial Sequence
  Description of Artificial Sequence: Synthetic oligonucleotide
  Sense strand starting at position 2815 of SEQ ID NO: 586848
ccgagauuuccacguuggu

SEQ ID NO: 748611 - RNA, 19 nt, Artificial Sequence
  Description of Artificial Sequence: Synthetic oligonucleotide
  Antisense strand to SEQ ID NO: 748610
accaacguggaaaucucgg

SEQ ID NO: 748612 - RNA, 19 nt, Artificial Sequence
  Description of Artificial Sequence: Synthetic oligonucleotide
  Sense strand starting at position 2897 of SEQ ID NO: 586848
ggacauggccauugagaau

SEQ ID NO: 748613 - RNA, 19 nt, Artificial Sequence
  Description of Artificial Sequence: Synthetic oligonucleotide
  Antisense strand to SEQ ID NO: 748612
auucucaauggccaugucc

SEQ ID NO: 748614 - RNA, 19 nt, Artificial Sequence
  Description of Artificial Sequence: Synthetic oligonucleotide
  Sense strand starting at position 3220 of SEQ ID NO: 586848
cccaaagucucacuggaau

SEQ ID NO: 748615 - RNA, 19 nt, Artificial Sequence
  Description of Artificial Sequence: Synthetic oligonucleotide
  Antisense strand to SEQ ID NO: 748614
auuccagugagacuuuggg

SEQ ID NO: 748616 - RNA, 19 nt, Artificial Sequence
  Description of Artificial Sequence: Synthetic oligonucleotide
  Sense strand starting at position 3304 of SEQ ID NO: 586848
acccuuugguucugacuuu

SEQ ID NO: 748617 - RNA, 19 nt, Artificial Sequence
  Description of Artificial Sequence: Synthetic oligonucleotide
  Antisense strand to SEQ ID NO: 748616
aaagucagaaccaaagggu

SEQ ID NO: 748618 - RNA, 19 nt, Artificial Sequence
  Description of Artificial Sequence: Synthetic oligonucleotide
  Sense strand starting at position 3759 of SEQ ID NO: 586848
aggugucaucaggguggga

SEQ ID NO: 748619 - RNA, 19 nt, Artificial Sequence
  Description of Artificial Sequence: Synthetic oligonucleotide
  Antisense strand to SEQ ID NO: 748618
ucccacccugaugacaccu

SEQ ID NO: 748620 - RNA, 19 nt, Artificial Sequence
  Description of Artificial Sequence: Synthetic oligonucleotide
  Sense strand starting at position 3947 of SEQ ID NO: 586848
gggagcagcucugguaacu

SEQ ID NO: 748621 - RNA, 19 nt, Artificial Sequence
  Description of Artificial Sequence: Synthetic oligonucleotide
  Antisense strand to SEQ ID NO: 748620
aguuaccagagcugcuccc

SEQ ID NO: 748622 - RNA, 19 nt, Artificial Sequence
  Description of Artificial Sequence: Synthetic oligonucleotide
  Sense strand starting at position 14 of SEQ ID NO: 586849
augagaagugccuggcuaa

SEQ ID NO: 748623 - RNA, 19 nt, Artificial Sequence
  Description of Artificial Sequence: Synthetic oligonucleotide
  Antisense strand to SEQ ID NO: 748622
uuagccaggcacuucucau

SEQ ID NO: 748624 - RNA, 19 nt, Artificial Sequence
  Description of Artificial Sequence: Synthetic oligonucleotide
  Sense strand starting at position 152 of SEQ ID NO: 586849
caaggucacuacugugaaa

SEQ ID NO: 748625 - RNA, 19 nt, Artificial Sequence
  Description of Artificial Sequence: Synthetic oligonucleotide
  Antisense strand to SEQ ID NO: 748624
uuucacaguagugaccuug

SEQ ID NO: 748626 - RNA, 19 nt, Artificial Sequence
  Description of Artificial Sequence: Synthetic oligonucleotide
  Sense strand starting at position 154 of SEQ ID NO: 586849
aggucacuacugugaaaca

SEQ ID NO: 748627 - RNA, 19 nt, Artificial Sequence
  Description of Artificial Sequence: Synthetic oligonucleotide
  Antisense strand to SEQ ID NO: 748626
uguuucacaguagugaccu

SEQ ID NO: 748628 - RNA, 19 nt, Artificial Sequence
  Description of Artificial Sequence: Synthetic oligonucleotide
  Sense strand starting at position 165 of SEQ ID NO: 586849
gugaaacacugucuugcuu

SEQ ID NO: 748629 - RNA, 19 nt, Artificial Sequence
  Description of Artificial Sequence: Synthetic oligonucleotide
  Antisense strand to SEQ ID NO: 748628
aagcaagacaguguuucac

SEQ ID NO: 748630 - RNA, 19 nt, Artificial Sequence
  Description of Artificial Sequence: Synthetic oligonucleotide
  Sense strand starting at position 200 of SEQ ID NO: 586849
cuuguuauuucuugggagu

SEQ ID NO: 748631 - RNA, 19 nt, Artificial Sequence
  Description of Artificial Sequence: Synthetic oligonucleotide
  Antisense strand to SEQ ID NO: 748630
acucccaagaaauaacaag

SEQ ID NO: 748632 - RNA, 19 nt, Artificial Sequence
  Description of Artificial Sequence: Synthetic oligonucleotide
  Sense strand starting at position 357 of SEQ ID NO: 586849
auuagaaauugugguuuga

SEQ ID NO: 748633 - RNA, 19 nt, Artificial Sequence
  Description of Artificial Sequence: Synthetic oligonucleotide
  Antisense strand to SEQ ID NO: 748632
ucaaaccacaauuucuaau

SEQ ID NO: 748634 - RNA, 19 nt, Artificial Sequence
  Description of Artificial Sequence: Synthetic oligonucleotide
  Sense strand starting at position 359 of SEQ ID NO: 586849
uagaaauugugguuugagu

SEQ ID NO: 748635 - RNA, 19 nt, Artificial Sequence
  Description of Artificial Sequence: Synthetic oligonucleotide
  Antisense strand to SEQ ID NO: 748634
acucaaaccacaauuucua

SEQ ID NO: 748636 - RNA, 19 nt, Artificial Sequence
  Description of Artificial Sequence: Synthetic oligonucleotide
  Sense strand starting at position 361 of SEQ ID NO: 586849
gaaauugugguuugaguca

SEQ ID NO: 748637 - RNA, 19 nt, Artificial Sequence
  Description of Artificial Sequence: Synthetic oligonucleotide
  Antisense strand to SEQ ID NO: 748636
ugacucaaaccacaauuuc

SEQ ID NO: 748638 - RNA, 19 nt, Artificial Sequence
  Description of Artificial Sequence: Synthetic oligonucleotide
  Sense strand starting at position 366 of SEQ ID NO: 586849
ugugguuugagucaugcag

SEQ ID NO: 748639 - RNA, 19 nt, Artificial Sequence
  Description of Artificial Sequence: Synthetic oligonucleotide
  Antisense strand to SEQ ID NO: 748638
cugcaugacucaaaccaca

SEQ ID NO: 748640 - RNA, 19 nt, Artificial Sequence
  Description of Artificial Sequence: Synthetic oligonucleotide
  Sense strand starting at position 370 of SEQ ID NO: 586849
guuugagucaugcagcuag

SEQ ID NO: 748641 - RNA, 19 nt, Artificial Sequence
  Description of Artificial Sequence: Synthetic oligonucleotide
  Antisense strand to SEQ ID NO: 748640
cuagcugcaugacucaaac

SEQ ID NO: 748642 - RNA, 19 nt, Artificial Sequence
  Description of Artificial Sequence: Synthetic oligonucleotide
  Sense strand starting at position 411 of SEQ ID NO: 586849
cccaguugcuccuuaggau

SEQ ID NO: 748643 - RNA, 19 nt, Artificial Sequence
  Description of Artificial Sequence: Synthetic oligonucleotide
  Antisense strand to SEQ ID NO: 748642
auccuaaggagcaacuggg

SEQ ID NO: 748644 - RNA, 19 nt, Artificial Sequence
  Description of Artificial Sequence: Synthetic oligonucleotide
  Sense strand starting at position 412 of SEQ ID NO: 586849
ccaguugcuccuuaggaua

SEQ ID NO: 748645 - RNA, 19 nt, Artificial Sequence
  Description of Artificial Sequence: Synthetic oligonucleotide
  Antisense strand to SEQ ID NO: 748644
uauccuaaggagcaacugg

SEQ ID NO: 748646 - RNA, 19 nt, Artificial Sequence
  Description of Artificial Sequence: Synthetic oligonucleotide
  Sense strand starting at position 415 of SEQ ID NO: 586849
guugcuccuuaggauaaca

SEQ ID NO: 748647 - RNA, 19 nt, Artificial Sequence
  Description of Artificial Sequence: Synthetic oligonucleotide
  Antisense strand to SEQ ID NO: 748646
uguuauccuaaggagcaac

SEQ ID NO: 748648 - RNA, 19 nt, Artificial Sequence
  Description of Artificial Sequence: Synthetic oligonucleotide
  Sense strand starting at position 446 of SEQ ID NO: 586849
acucuaagauuggugcuca

SEQ ID NO: 748649 - RNA, 19 nt, Artificial Sequence
  Description of Artificial Sequence: Synthetic oligonucleotide
  Antisense strand to SEQ ID NO: 748648
ugagcaccaaucuuagagu

SEQ ID NO: 748650 - RNA, 19 nt, Artificial Sequence
  Description of Artificial Sequence: Synthetic oligonucleotide
  Sense strand starting at position 447 of SEQ ID NO: 586849
cucuaagauuggugcucaa

SEQ ID NO: 748651 - RNA, 19 nt, Artificial Sequence
  Description of Artificial Sequence: Synthetic oligonucleotide
  Antisense strand to SEQ ID NO: 748650
uugagcaccaaucuuagag

SEQ ID NO: 748652 - RNA, 19 nt, Artificial Sequence
  Description of Artificial Sequence: Synthetic oligonucleotide
  Sense strand starting at position 647 of SEQ ID NO: 586849
gccuaauuauccuuagaug

SEQ ID NO: 748653 - RNA, 19 nt, Artificial Sequence
  Description of Artificial Sequence: Synthetic oligonucleotide
  Antisense strand to SEQ ID NO: 748652
caucuaaggauaauuaggc

SEQ ID NO: 748654 - RNA, 19 nt, Artificial Sequence
  Description of Artificial Sequence: Synthetic oligonucleotide
  Sense strand starting at position 662 of SEQ ID NO: 586849
gaugacccaucucaggauu

SEQ ID NO: 748655 - RNA, 19 nt, Artificial Sequence
  Description of Artificial Sequence: Synthetic oligonucleotide
  Antisense strand to SEQ ID NO: 748654
aauccugagaugggucauc

SEQ ID NO: 748656 - RNA, 19 nt, Artificial Sequence
  Description of Artificial Sequence: Synthetic oligonucleotide
  Sense strand starting at position 690 of SEQ ID NO: 586849
ugguuugagcaauaaagcu

SEQ ID NO: 748657 - RNA, 19 nt, Artificial Sequence
  Description of Artificial Sequence: Synthetic oligonucleotide
  Antisense strand to SEQ ID NO: 748656
agcuuuauugcucaaacca

SEQ ID NO: 748658 - RNA, 19 nt, Artificial Sequence
  Description of Artificial Sequence: Synthetic oligonucleotide
  Sense strand starting at position 757 of SEQ ID NO: 586849
ccaguuucugcaugcauua

SEQ ID NO: 748659 - RNA, 19 nt, Artificial Sequence
  Description of Artificial Sequence: Synthetic oligonucleotide
  Antisense strand to SEQ ID NO: 748658
uaaugcaugcagaaacugg

SEQ ID NO: 748660 - RNA, 19 nt, Artificial Sequence
  Description of Artificial Sequence: Synthetic oligonucleotide
  Sense strand starting at position 850 of SEQ ID NO: 586849
ggcuacgccugagaucuaa

SEQ ID NO: 748661 - RNA, 19 nt, Artificial Sequence
  Description of Artificial Sequence: Synthetic oligonucleotide
  Antisense strand to SEQ ID NO: 748660
uuagaucucaggcguagcc

SEQ ID NO: 748662 - RNA, 19 nt, Artificial Sequence
  Description of Artificial Sequence: Synthetic oligonucleotide
  Sense strand starting at position 1305 of SEQ ID NO: 586849
ccggaagugcugccguaau

SEQ ID NO: 748663 - RNA, 19 nt, Artificial Sequence
  Description of Artificial Sequence: Synthetic oligonucleotide
  Antisense strand to SEQ ID NO: 748662
auuacggcagcacuuccgg

SEQ ID NO: 748664 - RNA, 19 nt, Artificial Sequence
  Description of Artificial Sequence: Synthetic oligonucleotide
  Sense strand starting at position 1316 of SEQ ID NO: 586849
gccguaaucugcgcugaga

SEQ ID NO: 748665 - RNA, 19 nt, Artificial Sequence
  Description of Artificial Sequence: Synthetic oligonucleotide
  Antisense strand to SEQ ID NO: 748664
ucucagcgcagauuacggc

SEQ ID NO: 748666 - RNA, 19 nt, Artificial Sequence
  Description of Artificial Sequence: Synthetic oligonucleotide
  Sense strand starting at position 1318 of SEQ ID NO: 586849
cguaaucugcgcugagagu

SEQ ID NO: 748667 - RNA, 19 nt, Artificial Sequence
  Description of Artificial Sequence: Synthetic oligonucleotide
  Antisense strand to SEQ ID NO: 748666
acucucagcgcagauuacg

SEQ ID NO: 748668 - RNA, 19 nt, Artificial Sequence
  Description of Artificial Sequence: Synthetic oligonucleotide
  Sense strand starting at position 2509 of SEQ ID NO: 586849
cagcgcuucuguccagaua

SEQ ID NO: 748669 - RNA, 19 nt, Artificial Sequence
  Description of Artificial Sequence: Synthetic oligonucleotide
  Antisense strand to SEQ ID NO: 748668
uaucuggacagaagcgcug

SEQ ID NO: 748670 - RNA, 19 nt, Artificial Sequence
  Description of Artificial Sequence: Synthetic oligonucleotide
  Sense strand starting at position 2649 of SEQ ID NO: 586849
gagacucugcucuggucau

SEQ ID NO: 748671 - RNA, 19 nt, Artificial Sequence
  Description of Artificial Sequence: Synthetic oligonucleotide
  Antisense strand to SEQ ID NO: 748670
augaccagagcagagucuc

SEQ ID NO: 748672 - RNA, 19 nt, Artificial Sequence
  Description of Artificial Sequence: Synthetic oligonucleotide
  Sense strand starting at position 2921 of SEQ ID NO: 586849
agggaacacugaugcuaua

SEQ ID NO: 748673 - RNA, 19 nt, Artificial Sequence
  Description of Artificial Sequence: Synthetic oligonucleotide
  Antisense strand to SEQ ID NO: 748672
uauagcaucaguguucccu

SEQ ID NO: 748674 - RNA, 19 nt, Artificial Sequence
  Description of Artificial Sequence: Synthetic oligonucleotide
  Sense strand starting at position 2936 of SEQ ID NO: 586849
uauaaauccgugggcggua

SEQ ID NO: 748675 - RNA, 19 nt, Artificial Sequence
  Description of Artificial Sequence: Synthetic oligonucleotide
  Antisense strand to SEQ ID NO: 748674
uaccgcccacggauuuaua

SEQ ID NO: 748676 - RNA, 19 nt, Artificial Sequence
  Description of Artificial Sequence: Synthetic oligonucleotide
  Sense strand starting at position 2972 of SEQ ID NO: 586849
gagggaucuggccagcuca

SEQ ID NO: 748677 - RNA, 19 nt, Artificial Sequence
  Description of Artificial Sequence: Synthetic oligonucleotide
  Antisense strand to SEQ ID NO: 748676
ugagcuggccagaucccuc

SEQ ID NO: 748678 - RNA, 19 nt, Artificial Sequence
  Description of Artificial Sequence: Synthetic oligonucleotide
  Sense strand starting at position 3010 of SEQ ID NO: 586849
cagugauggucugaaugua

SEQ ID NO: 748679 - RNA, 19 nt, Artificial Sequence
  Description of Artificial Sequence: Synthetic oligonucleotide
  Antisense strand to SEQ ID NO: 748678
uacauucagaccaucacug

SEQ ID NO: 748680 - RNA, 19 nt, Artificial Sequence
  Description of Artificial Sequence: Synthetic oligonucleotide
  Sense strand starting at position 3018 of SEQ ID NO: 586849
gucugaauguagugggaag

SEQ ID NO: 748681 - RNA, 19 nt, Artificial Sequence
  Description of Artificial Sequence: Synthetic oligonucleotide
  Antisense strand to SEQ ID NO: 748680
cuucccacuacauucagac

SEQ ID NO: 748682 - RNA, 19 nt, Artificial Sequence
  Description of Artificial Sequence: Synthetic oligonucleotide
  Sense strand starting at position 3019 of SEQ ID NO: 586849
ucugaauguagugggaagu

SEQ ID NO: 748683 - RNA, 19 nt, Artificial Sequence
  Description of Artificial Sequence: Synthetic oligonucleotide
  Antisense strand to SEQ ID NO: 748682
acuucccacuacauucaga

SEQ ID NO: 748684 - RNA, 19 nt, Artificial Sequence
  Description of Artificial Sequence: Synthetic oligonucleotide
  Sense strand starting at position 3046 of SEQ ID NO: 586849
ugucaauagaagugauaga

SEQ ID NO: 748685 - RNA, 19 nt, Artificial Sequence
  Description of Artificial Sequence: Synthetic oligonucleotide
  Antisense strand to SEQ ID NO: 748684
ucuaucacuucuauugaca

SEQ ID NO: 748686 - RNA, 19 nt, Artificial Sequence
  Description of Artificial Sequence: Synthetic oligonucleotide
  Sense strand starting at position 3055 of SEQ ID NO: 586849
aagugauagacccgaguuc

SEQ ID NO: 748687 - RNA, 19 nt, Artificial Sequence
  Description of Artificial Sequence: Synthetic oligonucleotide
  Antisense strand to SEQ ID NO: 748686
gaacucgggucuaucacuu

SEQ ID NO: 748688 - RNA, 19 nt, Artificial Sequence
  Description of Artificial Sequence: Synthetic oligonucleotide
  Sense strand starting at position 3056 of SEQ ID NO: 586849
agugauagacccgaguuca

SEQ ID NO: 748689 - RNA, 19 nt, Artificial Sequence
  Description of Artificial Sequence: Synthetic oligonucleotide
  Antisense strand to SEQ ID NO: 748688
ugaacucgggucuaucacu

SEQ ID NO: 748690 - RNA, 19 nt, Artificial Sequence
  Description of Artificial Sequence: Synthetic oligonucleotide
  Sense strand starting at position 3066 of SEQ ID NO: 586849
ccgaguucagguuguuaaa

SEQ ID NO: 748691 - RNA, 19 nt, Artificial Sequence
  Description of Artificial Sequence: Synthetic oligonucleotide
  Antisense strand to SEQ ID NO: 748690
uuuaacaaccugaacucgg

SEQ ID NO: 748692 - RNA, 19 nt, Artificial Sequence
  Description of Artificial Sequence: Synthetic oligonucleotide
  Sense strand starting at position 3104 of SEQ ID NO: 586849
gagaauagauuccagaagu

SEQ ID NO: 748693 - RNA, 19 nt, Artificial Sequence
  Description of Artificial Sequence: Synthetic oligonucleotide
  Antisense strand to SEQ ID NO: 748692
acuucuggaaucuauucuc

SEQ ID NO: 748694 - RNA, 19 nt, Artificial Sequence
  Description of Artificial Sequence: Synthetic oligonucleotide
  Sense strand starting at position 3150 of SEQ ID NO: 586849
ccgagauuuccacguuggu

SEQ ID NO: 748695 - RNA, 19 nt, Artificial Sequence
  Description of Artificial Sequence: Synthetic oligonucleotide
  Antisense strand to SEQ ID NO: 748694
accaacguggaaaucucgg

SEQ ID NO: 748696 - RNA, 19 nt, Artificial Sequence
  Description of Artificial Sequence: Synthetic oligonucleotide
  Sense strand starting at position 3232 of SEQ ID NO: 586849
ggacauggccauugagaau

SEQ ID NO: 748697 - RNA, 19 nt, Artificial Sequence
  Description of Artificial Sequence: Synthetic oligonucleotide
  Antisense strand to SEQ ID NO: 748696
auucucaauggccaugucc

SEQ ID NO: 748698 - RNA, 19 nt, Artificial Sequence
  Description of Artificial Sequence: Synthetic oligonucleotide
  Sense strand starting at position 3555 of SEQ ID NO: 586849
cccaaagucucacuggaau

SEQ ID NO: 748699 - RNA, 19 nt, Artificial Sequence
  Description of Artificial Sequence: Synthetic oligonucleotide
  Antisense strand to SEQ ID NO: 748698
auuccagugagacuuuggg

SEQ ID NO: 748700 - RNA, 19 nt, Artificial Sequence
  Description of Artificial Sequence: Synthetic oligonucleotide
  Sense strand starting at position 3639 of SEQ ID NO: 586849
acccuuugguucugacuuu

SEQ ID NO: 748701 - RNA, 19 nt, Artificial Sequence
  Description of Artificial Sequence: Synthetic oligonucleotide
  Antisense strand to SEQ ID NO: 748700
aaagucagaaccaaagggu

SEQ ID NO: 748702 - RNA, 19 nt, Artificial Sequence
  Description of Artificial Sequence: Synthetic oligonucleotide
  Sense strand starting at position 136 of SEQ ID NO: 586850
cgaagugcucccggaggaa

SEQ ID NO: 748703 - RNA, 19 nt, Artificial Sequence
  Description of Artificial Sequence: Synthetic oligonucleotide
  Antisense strand to SEQ ID NO: 748702
uuccuccgggagcacuucg

SEQ ID NO: 748704 - RNA, 19 nt, Artificial Sequence
  Description of Artificial Sequence: Synthetic oligonucleotide
  Sense strand starting at position 163 of SEQ ID NO: 586850
ggcguucgggcuuggagau

SEQ ID NO: 748705 - RNA, 19 nt, Artificial Sequence
  Description of Artificial Sequence: Synthetic oligonucleotide
  Antisense strand to SEQ ID NO: 748704
aucuccaagcccgaacgcc

SEQ ID NO: 748706 - RNA, 19 nt, Artificial Sequence
  Description of Artificial Sequence: Synthetic oligonucleotide
  Sense strand starting at position 192 of SEQ ID NO: 586850
acgauacagucuuugagga

SEQ ID NO: 748707 - RNA, 19 nt, Artificial Sequence
  Description of Artificial Sequence: Synthetic oligonucleotide
  Antisense strand to SEQ ID NO: 748706
uccucaaagacuguaucgu

SEQ ID NO: 748708 - RNA, 19 nt, Artificial Sequence
  Description of Artificial Sequence: Synthetic oligonucleotide
  Sense strand starting at position 420 of SEQ ID NO: 586850
gaagaaagucacugauucu

SEQ ID NO: 748709 - RNA, 19 nt, Artificial Sequence
  Description of Artificial Sequence: Synthetic oligonucleotide
  Antisense strand to SEQ ID NO: 748708
agaaucagugacuuucuuc

SEQ ID NO: 748710 - RNA, 19 nt, Artificial Sequence
  Description of Artificial Sequence: Synthetic oligonucleotide
  Sense strand starting at position 423 of SEQ ID NO: 586850
gaaagucacugauucugca

SEQ ID NO: 748711 - RNA, 19 nt, Artificial Sequence
  Description of Artificial Sequence: Synthetic oligonucleotide
  Antisense strand to SEQ ID NO: 748710
ugcagaaucagugacuuuc

SEQ ID NO: 748712 - RNA, 19 nt, Artificial Sequence
  Description of Artificial Sequence: Synthetic oligonucleotide
  Sense strand starting at position 426 of SEQ ID NO: 586850
agucacugauucugcauuu

SEQ ID NO: 748713 - RNA, 19 nt, Artificial Sequence
  Description of Artificial Sequence: Synthetic oligonucleotide
  Antisense strand to SEQ ID NO: 748712
aaaugcagaaucagugacu

SEQ ID NO: 748714 - RNA, 19 nt, Artificial Sequence
  Description of Artificial Sequence: Synthetic oligonucleotide
  Sense strand starting at position 435 of SEQ ID NO: 586850
uucugcauuugucaaagau

SEQ ID NO: 748715 - RNA, 19 nt, Artificial Sequence
  Description of Artificial Sequence: Synthetic oligonucleotide
  Antisense strand to SEQ ID NO: 748714
aucuuugacaaaugcagaa

SEQ ID NO: 748716 - RNA, 19 nt, Artificial Sequence
  Description of Artificial Sequence: Synthetic oligonucleotide
  Sense strand starting at position 601 of SEQ ID NO: 586850
uucugcaguucugaggauu

SEQ ID NO: 748717 - RNA, 19 nt, Artificial Sequence
  Description of Artificial Sequence: Synthetic oligonucleotide
  Antisense strand to SEQ ID NO: 748716
aauccucagaacugcagaa

SEQ ID NO: 748718 - RNA, 19 nt, Artificial Sequence
  Description of Artificial Sequence: Synthetic oligonucleotide
  Sense strand starting at position 611 of SEQ ID NO: 586850
cugaggauuccggguggga

SEQ ID NO: 748719 - RNA, 19 nt, Artificial Sequence
  Description of Artificial Sequence: Synthetic oligonucleotide
  Antisense strand to SEQ ID NO: 748718
ucccacccggaauccucag

SEQ ID NO: 748720 - RNA, 19 nt, Artificial Sequence
  Description of Artificial Sequence: Synthetic oligonucleotide
  Sense strand starting at position 613 of SEQ ID NO: 586850
gaggauuccgggugggaag

SEQ ID NO: 748721 - RNA, 19 nt, Artificial Sequence
  Description of Artificial Sequence: Synthetic oligonucleotide
  Antisense strand to SEQ ID NO: 748720
cuucccacccggaauccuc

SEQ ID NO: 748722 - RNA, 19 nt, Artificial Sequence
  Description of Artificial Sequence: Synthetic oligonucleotide
  Sense strand starting at position 708 of SEQ ID NO: 586850
gggcacuuaugugaaaugu

SEQ ID NO: 748723 - RNA, 19 nt, Artificial Sequence
  Description of Artificial Sequence: Synthetic oligonucleotide
  Antisense strand to SEQ ID NO: 748722
acauuucacauaagugccc

SEQ ID NO: 748724 - RNA, 19 nt, Artificial Sequence
  Description of Artificial Sequence: Synthetic oligonucleotide
  Sense strand starting at position 1802 of SEQ ID NO: 586850
cccgaugcccagugggaaa

SEQ ID NO: 748725 - RNA, 19 nt, Artificial Sequence
  Description of Artificial Sequence: Synthetic oligonucleotide
  Antisense strand to SEQ ID NO: 748724
uuucccacugggcaucggg

SEQ ID NO: 748726 - RNA, 19 nt, Artificial Sequence
  Description of Artificial Sequence: Synthetic oligonucleotide
  Sense strand starting at position 2044 of SEQ ID NO: 586850
ggcaguuccagcugugaag

SEQ ID NO: 748727 - RNA, 19 nt, Artificial Sequence
  Description of Artificial Sequence: Synthetic oligonucleotide
  Antisense strand to SEQ ID NO: 748726
cuucacagcuggaacugcc

SEQ ID NO: 748728 - RNA, 19 nt, Artificial Sequence
  Description of Artificial Sequence: Synthetic oligonucleotide
  Sense strand starting at position 2717 of SEQ ID NO: 586850
cugcauuuguccugagacu

SEQ ID NO: 748729 - RNA, 19 nt, Artificial Sequence
  Description of Artificial Sequence: Synthetic oligonucleotide
  Antisense strand to SEQ ID NO: 748728
agucucaggacaaaugcag

SEQ ID NO: 748730 - RNA, 19 nt, Artificial Sequence
  Description of Artificial Sequence: Synthetic oligonucleotide
  Sense strand starting at position 2728 of SEQ ID NO: 586850
cugagacuuucuuagggau

SEQ ID NO: 748731 - RNA, 19 nt, Artificial Sequence
  Description of Artificial Sequence: Synthetic oligonucleotide
  Antisense strand to SEQ ID NO: 748730
aucccuaagaaagucucag

SEQ ID NO: 748732 - RNA, 19 nt, Artificial Sequence
  Description of Artificial Sequence: Synthetic oligonucleotide
  Sense strand starting at position 2731 of SEQ ID NO: 586850
agacuuucuuagggaucca

SEQ ID NO: 748733 - RNA, 19 nt, Artificial Sequence
  Description of Artificial Sequence: Synthetic oligonucleotide
  Antisense strand to SEQ ID NO: 748732
uggaucccuaagaaagucu

SEQ ID NO: 748734 - RNA, 19 nt, Artificial Sequence
  Description of Artificial Sequence: Synthetic oligonucleotide
  Sense strand starting at position 2749 of SEQ ID NO: 586850
aggccuggucucugaauua

SEQ ID NO: 748735 - RNA, 19 nt, Artificial Sequence
  Description of Artificial Sequence: Synthetic oligonucleotide
  Antisense strand to SEQ ID NO: 748734
uaauucagagaccaggccu

SEQ ID NO: 748736 - RNA, 19 nt, Artificial Sequence
  Description of Artificial Sequence: Synthetic oligonucleotide
  Sense strand starting at position 3032 of SEQ ID NO: 586850
ucuggagacucccuguaaa

SEQ ID NO: 748737 - RNA, 19 nt, Artificial Sequence
  Description of Artificial Sequence: Synthetic oligonucleotide
  Antisense strand to SEQ ID NO: 748736
uuuacagggagucuccaga

SEQ ID NO: 748738 - RNA, 19 nt, Artificial Sequence
  Description of Artificial Sequence: Synthetic oligonucleotide
  Sense strand starting at position 3459 of SEQ ID NO: 586850
cagacaaguuucugccuga

SEQ ID NO: 748739 - RNA, 19 nt, Artificial Sequence
  Description of Artificial Sequence: Synthetic oligonucleotide
  Antisense strand to SEQ ID NO: 748738
ucaggcagaaacuugucug

SEQ ID NO: 748740 - RNA, 19 nt, Artificial Sequence
  Description of Artificial Sequence: Synthetic oligonucleotide
  Sense strand starting at position 3542 of SEQ ID NO: 586850
cugcucacugucugaucau

SEQ ID NO: 748741 - RNA, 19 nt, Artificial Sequence
  Description of Artificial Sequence: Synthetic oligonucleotide
  Antisense strand to SEQ ID NO: 748740
augaucagacagugagcag

SEQ ID NO: 748742 - RNA, 19 nt, Artificial Sequence
  Description of Artificial Sequence: Synthetic oligonucleotide
  Sense strand starting at position 3543 of SEQ ID NO: 586850
ugcucacugucugaucauu

SEQ ID NO: 748743 - RNA, 19 nt, Artificial Sequence
  Description of Artificial Sequence: Synthetic oligonucleotide
  Antisense strand to SEQ ID NO: 748742
aaugaucagacagugagca

SEQ ID NO: 748744 - RNA, 19 nt, Artificial Sequence
  Description of Artificial Sequence: Synthetic oligonucleotide
  Sense strand starting at position 3549 of SEQ ID NO: 586850
cugucugaucauugccaga

SEQ ID NO: 748745 - RNA, 19 nt, Artificial Sequence
  Description of Artificial Sequence: Synthetic oligonucleotide
  Antisense strand to SEQ ID NO: 748744
ucuggcaaugaucagacag

SEQ ID NO: 748746 - RNA, 19 nt, Artificial Sequence
  Description of Artificial Sequence: Synthetic oligonucleotide
  Sense strand starting at position 3552 of SEQ ID NO: 586850
ucugaucauugccagagga

SEQ ID NO: 748747 - RNA, 19 nt, Artificial Sequence
  Description of Artificial Sequence: Synthetic oligonucleotide
  Antisense strand to SEQ ID NO: 748746
uccucuggcaaugaucaga

SEQ ID NO: 748748 - RNA, 19 nt, Artificial Sequence
  Description of Artificial Sequence: Synthetic oligonucleotide
  Sense strand starting at position 3556 of SEQ ID NO: 586850
aucauugccagaggaugaa

SEQ ID NO: 748749 - RNA, 19 nt, Artificial Sequence
  Description of Artificial Sequence: Synthetic oligonucleotide
  Antisense strand to SEQ ID NO: 748748
uucauccucuggcaaugau

SEQ ID NO: 748750 - RNA, 19 nt, Artificial Sequence
  Description of Artificial Sequence: Synthetic oligonucleotide
  Sense strand starting at position 3594 of SEQ ID NO: 586850
gaaacaggauccuagagaa

SEQ ID NO: 748751 - RNA, 19 nt, Artificial Sequence
  Description of Artificial Sequence: Synthetic oligonucleotide
  Antisense strand to SEQ ID NO: 748750
uucucuaggauccuguuuc

SEQ ID NO: 748752 - RNA, 19 nt, Artificial Sequence
  Description of Artificial Sequence: Synthetic oligonucleotide
  Sense strand starting at position 19 of SEQ ID NO: 586851
ggugacagcaucuguaacu

SEQ ID NO: 748753 - RNA, 19 nt, Artificial Sequence
  Description of Artificial Sequence: Synthetic oligonucleotide
  Antisense strand to SEQ ID NO: 748752
aguuacagaugcugucacc

SEQ ID NO: 748754 - RNA, 19 nt, Artificial Sequence
  Description of Artificial Sequence: Synthetic oligonucleotide
  Sense strand starting at position 20 of SEQ ID NO: 586851
gugacagcaucuguaacua

SEQ ID NO: 748755 - RNA, 19 nt, Artificial Sequence
  Description of Artificial Sequence: Synthetic oligonucleotide
  Antisense strand to SEQ ID NO: 748754
uaguuacagaugcugucac

SEQ ID NO: 748756 - RNA, 19 nt, Artificial Sequence
  Description of Artificial Sequence: Synthetic oligonucleotide
  Sense strand starting at position 28 of SEQ ID NO: 586851
aucuguaacuaggcugaaa

SEQ ID NO: 748757 - RNA, 19 nt, Artificial Sequence
  Description of Artificial Sequence: Synthetic oligonucleotide
  Antisense strand to SEQ ID NO: 748756
uuucagccuaguuacagau

SEQ ID NO: 748758 - RNA, 19 nt, Artificial Sequence
  Description of Artificial Sequence: Synthetic oligonucleotide
  Sense strand starting at position 106 of SEQ ID NO: 586851
ccaggagagcucugaagac

SEQ ID NO: 748759 - RNA, 19 nt, Artificial Sequence
  Description of Artificial Sequence: Synthetic oligonucleotide
  Antisense strand to SEQ ID NO: 748758
gucuucagagcucuccugg

SEQ ID NO: 748760 - RNA, 19 nt, Artificial Sequence
  Description of Artificial Sequence: Synthetic oligonucleotide
  Sense strand starting at position 150 of SEQ ID NO: 586851
ggaauucuguggcucagag

SEQ ID NO: 748761 - RNA, 19 nt, Artificial Sequence
  Description of Artificial Sequence: Synthetic oligonucleotide
  Antisense strand to SEQ ID NO: 748760
cucugagccacagaauucc

SEQ ID NO: 748762 - RNA, 19 nt, Artificial Sequence
  Description of Artificial Sequence: Synthetic oligonucleotide
  Sense strand starting at position 181 of SEQ ID NO: 586851
aggcaugaaucucgggaga

SEQ ID NO: 748763 - RNA, 19 nt, Artificial Sequence
  Description of Artificial Sequence: Synthetic oligonucleotide
  Antisense strand to SEQ ID NO: 748762
ucucccgagauucaugccu

SEQ ID NO: 748764 - RNA, 19 nt, Artificial Sequence
  Description of Artificial Sequence: Synthetic oligonucleotide
  Sense strand starting at position 183 of SEQ ID NO: 586851
gcaugaaucucgggagacc

SEQ ID NO: 748765 - RNA, 19 nt, Artificial Sequence
  Description of Artificial Sequence: Synthetic oligonucleotide
  Antisense strand to SEQ ID NO: 748764
ggucucccgagauucaugc

SEQ ID NO: 748766 - RNA, 19 nt, Artificial Sequence
  Description of Artificial Sequence: Synthetic oligonucleotide
  Sense strand starting at position 403 of SEQ ID NO: 586851
cgaagugcucccggaggaa

SEQ ID NO: 748767 - RNA, 19 nt, Artificial Sequence
  Description of Artificial Sequence: Synthetic oligonucleotide
  Antisense strand to SEQ ID NO: 748766
uuccuccgggagcacuucg

SEQ ID NO: 748768 - RNA, 19 nt, Artificial Sequence
  Description of Artificial Sequence: Synthetic oligonucleotide
  Sense strand starting at position 430 of SEQ ID NO: 586851
ggcguucgggcuuggagau

SEQ ID NO: 748769 - RNA, 19 nt, Artificial Sequence
  Description of Artificial Sequence: Synthetic oligonucleotide
  Antisense strand to SEQ ID NO: 748768
aucuccaagcccgaacgcc

SEQ ID NO: 748770 - RNA, 19 nt, Artificial Sequence
  Description of Artificial Sequence: Synthetic oligonucleotide
  Sense strand starting at position 459 of SEQ ID NO: 586851
acgauacagucuuugagga

SEQ ID NO: 748771 - RNA, 19 nt, Artificial Sequence
  Description of Artificial Sequence: Synthetic oligonucleotide
  Antisense strand to SEQ ID NO: 748770
uccucaaagacuguaucgu

SEQ ID NO: 748772 - RNA, 19 nt, Artificial Sequence
  Description of Artificial Sequence: Synthetic oligonucleotide
  Sense strand starting at position 687 of SEQ ID NO: 586851
gaagaaagucacugauucu

SEQ ID NO: 748773 - RNA, 19 nt, Artificial Sequence
  Description of Artificial Sequence: Synthetic oligonucleotide
  Antisense strand to SEQ ID NO: 748772
agaaucagugacuuucuuc

SEQ ID NO: 748774 - RNA, 19 nt, Artificial Sequence
  Description of Artificial Sequence: Synthetic oligonucleotide
  Sense strand starting at position 690 of SEQ ID NO: 586851
gaaagucacugauucugca

SEQ ID NO: 748775 - RNA, 19 nt, Artificial Sequence
  Description of Artificial Sequence: Synthetic oligonucleotide
  Antisense strand to SEQ ID NO: 748774
ugcagaaucagugacuuuc

SEQ ID NO: 748776 - RNA, 19 nt, Artificial Sequence
  Description of Artificial Sequence: Synthetic oligonucleotide
  Sense strand starting at position 693 of SEQ ID NO: 586851
agucacugauucugcauuu

SEQ ID NO: 748777 - RNA, 19 nt, Artificial Sequence
  Description of Artificial Sequence: Synthetic oligonucleotide
  Antisense strand to SEQ ID NO: 748776
aaaugcagaaucagugacu

SEQ ID NO: 748778 - RNA, 19 nt, Artificial Sequence
  Description of Artificial Sequence: Synthetic oligonucleotide
  Sense strand starting at position 702 of SEQ ID NO: 586851
uucugcauuugucaaagau

SEQ ID NO: 748779 - RNA, 19 nt, Artificial Sequence
  Description of Artificial Sequence: Synthetic oligonucleotide
  Antisense strand to SEQ ID NO: 748778
aucuuugacaaaugcagaa

SEQ ID NO: 748780 - RNA, 19 nt, Artificial Sequence
  Description of Artificial Sequence: Synthetic oligonucleotide
  Sense strand starting at position 868 of SEQ ID NO: 586851
uucugcaguucugaggauu

SEQ ID NO: 748781 - RNA, 19 nt, Artificial Sequence
  Description of Artificial Sequence: Synthetic oligonucleotide
  Antisense strand to SEQ ID NO: 748780
aauccucagaacugcagaa

SEQ ID NO: 748782 - RNA, 19 nt, Artificial Sequence
  Description of Artificial Sequence: Synthetic oligonucleotide
  Sense strand starting at position 878 of SEQ ID NO: 586851
cugaggauuccggguggga

SEQ ID NO: 748783 - RNA, 19 nt, Artificial Sequence
  Description of Artificial Sequence: Synthetic oligonucleotide
  Antisense strand to SEQ ID NO: 748782
ucccacccggaauccucag

SEQ ID NO: 748784 - RNA, 19 nt, Artificial Sequence
  Description of Artificial Sequence: Synthetic oligonucleotide
  Sense strand starting at position 880 of SEQ ID NO: 586851
gaggauuccgggugggaag

SEQ ID NO: 748785 - RNA, 19 nt, Artificial Sequence
  Description of Artificial Sequence: Synthetic oligonucleotide
  Antisense strand to SEQ ID NO: 748784
cuucccacccggaauccuc

SEQ ID NO: 748786 - RNA, 19 nt, Artificial Sequence
  Description of Artificial Sequence: Synthetic oligonucleotide
  Sense strand starting at position 975 of SEQ ID NO: 586851
gggcacuuaugugaaaugu

SEQ ID NO: 748787 - RNA, 19 nt, Artificial Sequence
  Description of Artificial Sequence: Synthetic oligonucleotide
  Antisense strand to SEQ ID NO: 748786
acauuucacauaagugccc

SEQ ID NO: 748788 - RNA, 19 nt, Artificial Sequence
  Description of Artificial Sequence: Synthetic oligonucleotide
  Sense strand starting at position 2069 of SEQ ID NO: 586851
cccgaugcccagugggaaa

SEQ ID NO: 748789 - RNA, 19 nt, Artificial Sequence
  Description of Artificial Sequence: Synthetic oligonucleotide
  Antisense strand to SEQ ID NO: 748788
uuucccacugggcaucggg

SEQ ID NO: 748790 - RNA, 19 nt, Artificial Sequence
  Description of Artificial Sequence: Synthetic oligonucleotide
  Sense strand starting at position 2311 of SEQ ID NO: 586851
ggcaguuccagcugugaag

SEQ ID NO: 748791 - RNA, 19 nt, Artificial Sequence
  Description of Artificial Sequence: Synthetic oligonucleotide
  Antisense strand to SEQ ID NO: 748790
cuucacagcuggaacugcc

SEQ ID NO: 748792 - RNA, 19 nt, Artificial Sequence
  Description of Artificial Sequence: Synthetic oligonucleotide
  Sense strand starting at position 2984 of SEQ ID NO: 586851
cugcauuuguccugagacu

SEQ ID NO: 748793 - RNA, 19 nt, Artificial Sequence
  Description of Artificial Sequence: Synthetic oligonucleotide
  Antisense strand to SEQ ID NO: 748792
agucucaggacaaaugcag

SEQ ID NO: 748794 - RNA, 19 nt, Artificial Sequence
  Description of Artificial Sequence: Synthetic oligonucleotide
  Sense strand starting at position 2995 of SEQ ID NO: 586851
cugagacuuucuuagggau

SEQ ID NO: 748795 - RNA, 19 nt, Artificial Sequence
  Description of Artificial Sequence: Synthetic oligonucleotide
  Antisense strand to SEQ ID NO: 748794
aucccuaagaaagucucag

SEQ ID NO: 748796 - RNA, 19 nt, Artificial Sequence
  Description of Artificial Sequence: Synthetic oligonucleotide
  Sense strand starting at position 2998 of SEQ ID NO: 586851
agacuuucuuagggaucca

SEQ ID NO: 748797 - RNA, 19 nt, Artificial Sequence
  Description of Artificial Sequence: Synthetic oligonucleotide
  Antisense strand to SEQ ID NO: 748796
uggaucccuaagaaagucu

SEQ ID NO: 748798 - RNA, 19 nt, Artificial Sequence
  Description of Artificial Sequence: Synthetic oligonucleotide
  Sense strand starting at position 3016 of SEQ ID NO: 586851
aggccuggucucugaauua

SEQ ID NO: 748799 - RNA, 19 nt, Artificial Sequence
  Description of Artificial Sequence: Synthetic oligonucleotide
  Antisense strand to SEQ ID NO: 748798
uaauucagagaccaggccu

SEQ ID NO: 748800 - RNA, 19 nt, Artificial Sequence
  Description of Artificial Sequence: Synthetic oligonucleotide
  Sense strand starting at position 3299 of SEQ ID NO: 586851
ucuggagacucccuguaaa

SEQ ID NO: 748801 - RNA, 19 nt, Artificial Sequence
  Description of Artificial Sequence: Synthetic oligonucleotide
  Antisense strand to SEQ ID NO: 748800
uuuacagggagucuccaga

SEQ ID NO: 748802 - RNA, 19 nt, Artificial Sequence
  Description of Artificial Sequence: Synthetic oligonucleotide
  Sense strand starting at position 3726 of SEQ ID NO: 586851
cagacaaguuucugccuga

SEQ ID NO: 748803 - RNA, 19 nt, Artificial Sequence
  Description of Artificial Sequence: Synthetic oligonucleotide
  Antisense strand to SEQ ID NO: 748802
ucaggcagaaacuugucug

SEQ ID NO: 748804 - RNA, 19 nt, Artificial Sequence
  Description of Artificial Sequence: Synthetic oligonucleotide
  Sense strand starting at position 3809 of SEQ ID NO: 586851
cugcucacugucugaucau

SEQ ID NO: 748805 - RNA, 19 nt, Artificial Sequence
  Description of Artificial Sequence: Synthetic oligonucleotide
  Antisense strand to SEQ ID NO: 748804
augaucagacagugagcag

SEQ ID NO: 748806 - RNA, 19 nt, Artificial Sequence
  Description of Artificial Sequence: Synthetic oligonucleotide
  Sense strand starting at position 3810 of SEQ ID NO: 586851
ugcucacugucugaucauu

SEQ ID NO: 748807 - RNA, 19 nt, Artificial Sequence
  Description of Artificial Sequence: Synthetic oligonucleotide
  Antisense strand to SEQ ID NO: 748806
aaugaucagacagugagca

SEQ ID NO: 748808 - RNA, 19 nt, Artificial Sequence
  Description of Artificial Sequence: Synthetic oligonucleotide
  Sense strand starting at position 3816 of SEQ ID NO: 586851
cugucugaucauugccaga

SEQ ID NO: 748809 - RNA, 19 nt, Artificial Sequence
  Description of Artificial Sequence: Synthetic oligonucleotide
  Antisense strand to SEQ ID NO: 748808
ucuggcaaugaucagacag

SEQ ID NO: 748810 - RNA, 19 nt, Artificial Sequence
  Description of Artificial Sequence: Synthetic oligonucleotide
  Sense strand starting at position 3819 of SEQ ID NO: 586851
ucugaucauugccagagga

SEQ ID NO: 748811 - RNA, 19 nt, Artificial Sequence
  Description of Artificial Sequence: Synthetic oligonucleotide
  Antisense strand to SEQ ID NO: 748810
uccucuggcaaugaucaga

SEQ ID NO: 748812 - RNA, 19 nt, Artificial Sequence
  Description of Artificial Sequence: Synthetic oligonucleotide
  Sense strand starting at position 3823 of SEQ ID NO: 586851
aucauugccagaggaugaa

SEQ ID NO: 748813 - RNA, 19 nt, Artificial Sequence
  Description of Artificial Sequence: Synthetic oligonucleotide
  Antisense strand to SEQ ID NO: 748812
uucauccucuggcaaugau

SEQ ID NO: 748814 - RNA, 19 nt, Artificial Sequence
  Description of Artificial Sequence: Synthetic oligonucleotide
  Sense strand starting at position 3861 of SEQ ID NO: 586851
gaaacaggauccuagagaa

SEQ ID NO: 748815 - RNA, 19 nt, Artificial Sequence
  Description of Artificial Sequence: Synthetic oligonucleotide
  Antisense strand to SEQ ID NO: 748814
uucucuaggauccuguuuc

SEQ ID NO: 748816 - RNA, 19 nt, Artificial Sequence
  Description of Artificial Sequence: Synthetic oligonucleotide
  Sense strand starting at position 49 of SEQ ID NO: 586852
cugcaagaucaacguggaa

SEQ ID NO: 748817 - RNA, 19 nt, Artificial Sequence
  Description of Artificial Sequence: Synthetic oligonucleotide
  Antisense strand to SEQ ID NO: 748816
uuccacguugaucuugcag

SEQ ID NO: 748818 - RNA, 19 nt, Artificial Sequence
  Description of Artificial Sequence: Synthetic oligonucleotide
  Sense strand starting at position 51 of SEQ ID NO: 586852
gcaagaucaacguggaauu

SEQ ID NO: 748819 - RNA, 19 nt, Artificial Sequence
  Description of Artificial Sequence: Synthetic oligonucleotide
  Antisense strand to SEQ ID NO: 748818
aauuccacguugaucuugc

SEQ ID NO: 748820 - RNA, 19 nt, Artificial Sequence
  Description of Artificial Sequence: Synthetic oligonucleotide
  Sense strand starting at position 435 of SEQ ID NO: 586852
ggugacagcaucuguaacu

SEQ ID NO: 748821 - RNA, 19 nt, Artificial Sequence
  Description of Artificial Sequence: Synthetic oligonucleotide
  Antisense strand to SEQ ID NO: 748820
aguuacagaugcugucacc

SEQ ID NO: 748822 - RNA, 19 nt, Artificial Sequence
  Description of Artificial Sequence: Synthetic oligonucleotide
  Sense strand starting at position 436 of SEQ ID NO: 586852
gugacagcaucuguaacua

SEQ ID NO: 748823 - RNA, 19 nt, Artificial Sequence
  Description of Artificial Sequence: Synthetic oligonucleotide
  Antisense strand to SEQ ID NO: 748822
uaguuacagaugcugucac

SEQ ID NO: 748824 - RNA, 19 nt, Artificial Sequence
  Description of Artificial Sequence: Synthetic oligonucleotide
  Sense strand starting at position 444 of SEQ ID NO: 586852
aucuguaacuaggcugaaa

SEQ ID NO: 748825 - RNA, 19 nt, Artificial Sequence
  Description of Artificial Sequence: Synthetic oligonucleotide
  Antisense strand to SEQ ID NO: 748824
uuucagccuaguuacagau

SEQ ID NO: 748826 - RNA, 19 nt, Artificial Sequence
  Description of Artificial Sequence: Synthetic oligonucleotide
  Sense strand starting at position 522 of SEQ ID NO: 586852
ccaggagagcucugaagac

SEQ ID NO: 748827 - RNA, 19 nt, Artificial Sequence
  Description of Artificial Sequence: Synthetic oligonucleotide
  Antisense strand to SEQ ID NO: 748826
gucuucagagcucuccugg

SEQ ID NO: 748828 - RNA, 19 nt, Artificial Sequence
  Description of Artificial Sequence: Synthetic oligonucleotide
  Sense strand starting at position 566 of SEQ ID NO: 586852
ggaauucuguggcucagag

SEQ ID NO: 748829 - RNA, 19 nt, Artificial Sequence
  Description of Artificial Sequence: Synthetic oligonucleotide
  Antisense strand to SEQ ID NO: 748828
cucugagccacagaauucc

SEQ ID NO: 748830 - RNA, 19 nt, Artificial Sequence
  Description of Artificial Sequence: Synthetic oligonucleotide
  Sense strand starting at position 597 of SEQ ID NO: 586852
aggcaugaaucucgggaga

SEQ ID NO: 748831 - RNA, 19 nt, Artificial Sequence
  Description of Artificial Sequence: Synthetic oligonucleotide
  Antisense strand to SEQ ID NO: 748830
ucucccgagauucaugccu

SEQ ID NO: 748832 - RNA, 19 nt, Artificial Sequence
  Description of Artificial Sequence: Synthetic oligonucleotide
  Sense strand starting at position 599 of SEQ ID NO: 586852
gcaugaaucucgggagacc

SEQ ID NO: 748833 - RNA, 19 nt, Artificial Sequence
  Description of Artificial Sequence: Synthetic oligonucleotide
  Antisense strand to SEQ ID NO: 748832
ggucucccgagauucaugc

SEQ ID NO: 748834 - RNA, 19 nt, Artificial Sequence
  Description of Artificial Sequence: Synthetic oligonucleotide
  Sense strand starting at position 819 of SEQ ID NO: 586852
cgaagugcucccggaggaa

SEQ ID NO: 748835 - RNA, 19 nt, Artificial Sequence
  Description of Artificial Sequence: Synthetic oligonucleotide
  Antisense strand to SEQ ID NO: 748834
uuccuccgggagcacuucg

SEQ ID NO: 748836 - RNA, 19 nt, Artificial Sequence
  Description of Artificial Sequence: Synthetic oligonucleotide
  Sense strand starting at position 846 of SEQ ID NO: 586852
ggcguucgggcuuggagau

SEQ ID NO: 748837 - RNA, 19 nt, Artificial Sequence
  Description of Artificial Sequence: Synthetic oligonucleotide
  Antisense strand to SEQ ID NO: 748836
aucuccaagcccgaacgcc

SEQ ID NO: 748838 - RNA, 19 nt, Artificial Sequence
  Description of Artificial Sequence: Synthetic oligonucleotide
  Sense strand starting at position 875 of SEQ ID NO: 586852
acgauacagucuuugagga

SEQ ID NO: 748839 - RNA, 19 nt, Artificial Sequence
  Description of Artificial Sequence: Synthetic oligonucleotide
  Antisense strand to SEQ ID NO: 748838
uccucaaagacuguaucgu

SEQ ID NO: 748840 - RNA, 19 nt, Artificial Sequence
  Description of Artificial Sequence: Synthetic oligonucleotide
  Sense strand starting at position 1103 of SEQ ID NO: 586852
gaagaaagucacugauucu

SEQ ID NO: 748841 - RNA, 19 nt, Artificial Sequence
  Description of Artificial Sequence: Synthetic oligonucleotide
  Antisense strand to SEQ ID NO: 748840
agaaucagugacuuucuuc

SEQ ID NO: 748842 - RNA, 19 nt, Artificial Sequence
  Description of Artificial Sequence: Synthetic oligonucleotide
  Sense strand starting at position 1106 of SEQ ID NO: 586852
gaaagucacugauucugca

SEQ ID NO: 748843 - RNA, 19 nt, Artificial Sequence
  Description of Artificial Sequence: Synthetic oligonucleotide
  Antisense strand to SEQ ID NO: 748842
ugcagaaucagugacuuuc

SEQ ID NO: 748844 - RNA, 19 nt, Artificial Sequence
  Description of Artificial Sequence: Synthetic oligonucleotide
  Sense strand starting at position 1109 of SEQ ID NO: 586852
agucacugauucugcauuu

SEQ ID NO: 748845 - RNA, 19 nt, Artificial Sequence
  Description of Artificial Sequence: Synthetic oligonucleotide
  Antisense strand to SEQ ID NO: 748844
aaaugcagaaucagugacu

SEQ ID NO: 748846 - RNA, 19 nt, Artificial Sequence
  Description of Artificial Sequence: Synthetic oligonucleotide
  Sense strand starting at position 1118 of SEQ ID NO: 586852
uucugcauuugucaaagau

SEQ ID NO: 748847 - RNA, 19 nt, Artificial Sequence
  Description of Artificial Sequence: Synthetic oligonucleotide
  Antisense strand to SEQ ID NO: 748846
aucuuugacaaaugcagaa

SEQ ID NO: 748848 - RNA, 19 nt, Artificial Sequence
  Description of Artificial Sequence: Synthetic oligonucleotide
  Sense strand starting at position 1284 of SEQ ID NO: 586852
uucugcaguucugaggauu

SEQ ID NO: 748849 - RNA, 19 nt, Artificial Sequence
  Description of Artificial Sequence: Synthetic oligonucleotide
  Antisense strand to SEQ ID NO: 748848
aauccucagaacugcagaa

SEQ ID NO: 748850 - RNA, 19 nt, Artificial Sequence
  Description of Artificial Sequence: Synthetic oligonucleotide
  Sense strand starting at position 1294 of SEQ ID NO: 586852
cugaggauuccggguggga

SEQ ID NO: 748851 - RNA, 19 nt, Artificial Sequence
  Description of Artificial Sequence: Synthetic oligonucleotide
  Antisense strand to SEQ ID NO: 748850
ucccacccggaauccucag

SEQ ID NO: 748852 - RNA, 19 nt, Artificial Sequence
  Description of Artificial Sequence: Synthetic oligonucleotide
  Sense strand starting at position 1296 of SEQ ID NO: 586852
gaggauuccgggugggaag

SEQ ID NO: 748853 - RNA, 19 nt, Artificial Sequence
  Description of Artificial Sequence: Synthetic oligonucleotide
  Antisense strand to SEQ ID NO: 748852
cuucccacccggaauccuc

SEQ ID NO: 748854 - RNA, 19 nt, Artificial Sequence
  Description of Artificial Sequence: Synthetic oligonucleotide
  Sense strand starting at position 1391 of SEQ ID NO: 586852
gggcacuuaugugaaaugu

SEQ ID NO: 748855 - RNA, 19 nt, Artificial Sequence
  Description of Artificial Sequence: Synthetic oligonucleotide
  Antisense strand to SEQ ID NO: 748854
acauuucacauaagugccc

SEQ ID NO: 748856 - RNA, 19 nt, Artificial Sequence
  Description of Artificial Sequence: Synthetic oligonucleotide
  Sense strand starting at position 2485 of SEQ ID NO: 586852
cccgaugcccagugggaaa

SEQ ID NO: 748857 - RNA, 19 nt, Artificial Sequence
  Description of Artificial Sequence: Synthetic oligonucleotide
  Antisense strand to SEQ ID NO: 748856
uuucccacugggcaucggg

SEQ ID NO: 748858 - RNA, 19 nt, Artificial Sequence
  Description of Artificial Sequence: Synthetic oligonucleotide
  Sense strand starting at position 2727 of SEQ ID NO: 586852
ggcaguuccagcugugaag

SEQ ID NO: 748859 - RNA, 19 nt, Artificial Sequence
  Description of Artificial Sequence: Synthetic oligonucleotide
  Antisense strand to SEQ ID NO: 748858
cuucacagcuggaacugcc

SEQ ID NO: 748860 - RNA, 19 nt, Artificial Sequence
  Description of Artificial Sequence: Synthetic oligonucleotide
  Sense strand starting at position 3400 of SEQ ID NO: 586852
cugcauuuguccugagacu

SEQ ID NO: 748861 - RNA, 19 nt, Artificial Sequence
  Description of Artificial Sequence: Synthetic oligonucleotide
  Antisense strand to SEQ ID NO: 748860
agucucaggacaaaugcag

SEQ ID NO: 748862 - RNA, 19 nt, Artificial Sequence
  Description of Artificial Sequence: Synthetic oligonucleotide
  Sense strand starting at position 3411 of SEQ ID NO: 586852
cugagacuuucuuagggau

SEQ ID NO: 748863 - RNA, 19 nt, Artificial Sequence
  Description of Artificial Sequence: Synthetic oligonucleotide
  Antisense strand to SEQ ID NO: 748862
aucccuaagaaagucucag

SEQ ID NO: 748864 - RNA, 19 nt, Artificial Sequence
  Description of Artificial Sequence: Synthetic oligonucleotide
  Sense strand starting at position 3414 of SEQ ID NO: 586852
agacuuucuuagggaucca

SEQ ID NO: 748865 - RNA, 19 nt, Artificial Sequence
  Description of Artificial Sequence: Synthetic oligonucleotide
  Antisense strand to SEQ ID NO: 748864
uggaucccuaagaaagucu

SEQ ID NO: 748866 - RNA, 19 nt, Artificial Sequence
  Description of Artificial Sequence: Synthetic oligonucleotide
  Sense strand starting at position 3432 of SEQ ID NO: 586852
aggccuggucucugaauua

SEQ ID NO: 748867 - RNA, 19 nt, Artificial Sequence
  Description of Artificial Sequence: Synthetic oligonucleotide
  Antisense strand to SEQ ID NO: 748866
uaauucagagaccaggccu

SEQ ID NO: 748868 - RNA, 19 nt, Artificial Sequence
  Description of Artificial Sequence: Synthetic oligonucleotide
  Sense strand starting at position 3715 of SEQ ID NO: 586852
ucuggagacucccuguaaa

SEQ ID NO: 748869 - RNA, 19 nt, Artificial Sequence
  Description of Artificial Sequence: Synthetic oligonucleotide
  Antisense strand to SEQ ID NO: 748868
uuuacagggagucuccaga

SEQ ID NO: 748870 - RNA, 19 nt, Artificial Sequence
  Description of Artificial Sequence: Synthetic oligonucleotide
  Sense strand starting at position 144 of SEQ ID NO: 586853
agacuauguuuauccucuu

SEQ ID NO: 748871 - RNA, 19 nt, Artificial Sequence
  Description of Artificial Sequence: Synthetic oligonucleotide
  Antisense strand to SEQ ID NO: 748870
aagaggauaaacauagucu

SEQ ID NO: 748872 - RNA, 19 nt, Artificial Sequence
  Description of Artificial Sequence: Synthetic oligonucleotide
  Sense strand starting at position 408 of SEQ ID NO: 586853
ccacaagcaguguaaauaa

SEQ ID NO: 748873 - RNA, 19 nt, Artificial Sequence
  Description of Artificial Sequence: Synthetic oligonucleotide
  Antisense strand to SEQ ID NO: 748872
uuauuuacacugcuugugg

SEQ ID NO: 748874 - RNA, 19 nt, Artificial Sequence
  Description of Artificial Sequence: Synthetic oligonucleotide
  Sense strand starting at position 451 of SEQ ID NO: 586853
gcauguuugccuuacacca

SEQ ID NO: 748875 - RNA, 19 nt, Artificial Sequence
  Description of Artificial Sequence: Synthetic oligonucleotide
  Antisense strand to SEQ ID NO: 748874
ugguguaaggcaaacaugc

SEQ ID NO: 748876 - RNA, 19 nt, Artificial Sequence
  Description of Artificial Sequence: Synthetic oligonucleotide
  Sense strand starting at position 509 of SEQ ID NO: 586853
uagcuuggguugccauaaa

SEQ ID NO: 748877 - RNA, 19 nt, Artificial Sequence
  Description of Artificial Sequence: Synthetic oligonucleotide
  Antisense strand to SEQ ID NO: 748876
uuuauggcaacccaagcua

SEQ ID NO: 748878 - RNA, 19 nt, Artificial Sequence
  Description of Artificial Sequence: Synthetic oligonucleotide
  Sense strand starting at position 538 of SEQ ID NO: 586853
gggcauguuguguaauaca

SEQ ID NO: 748879 - RNA, 19 nt, Artificial Sequence
  Description of Artificial Sequence: Synthetic oligonucleotide
  Antisense strand to SEQ ID NO: 748878
uguauuacacaacaugccc

SEQ ID NO: 748880 - RNA, 19 nt, Artificial Sequence
  Description of Artificial Sequence: Synthetic oligonucleotide
  Sense strand starting at position 887 of SEQ ID NO: 586853
aauagaauccuuuguuacg

SEQ ID NO: 748881 - RNA, 19 nt, Artificial Sequence
  Description of Artificial Sequence: Synthetic oligonucleotide
  Antisense strand to SEQ ID NO: 748880
cguaacaaaggauucuauu

SEQ ID NO: 748882 - RNA, 19 nt, Artificial Sequence
  Description of Artificial Sequence: Synthetic oligonucleotide
  Sense strand starting at position 888 of SEQ ID NO: 586853
auagaauccuuuguuacgu

SEQ ID NO: 748883 - RNA, 19 nt, Artificial Sequence
  Description of Artificial Sequence: Synthetic oligonucleotide
  Antisense strand to SEQ ID NO: 748882
acguaacaaaggauucuau

SEQ ID NO: 748884 - RNA, 19 nt, Artificial Sequence
  Description of Artificial Sequence: Synthetic oligonucleotide
  Sense strand starting at position 974 of SEQ ID NO: 586853
gucagagcuacuggccaua

SEQ ID NO: 748885 - RNA, 19 nt, Artificial Sequence
  Description of Artificial Sequence: Synthetic oligonucleotide
  Antisense strand to SEQ ID NO: 748884
uauggccaguagcucugac

SEQ ID NO: 748886 - RNA, 19 nt, Artificial Sequence
  Description of Artificial Sequence: Synthetic oligonucleotide
  Sense strand starting at position 977 of SEQ ID NO: 586853
agagcuacuggccauaaau

SEQ ID NO: 748887 - RNA, 19 nt, Artificial Sequence
  Description of Artificial Sequence: Synthetic oligonucleotide
  Antisense strand to SEQ ID NO: 748886
auuuauggccaguagcucu

SEQ ID NO: 748888 - RNA, 19 nt, Artificial Sequence
  Description of Artificial Sequence: Synthetic oligonucleotide
  Sense strand starting at position 1161 of SEQ ID NO: 586853
gcacaaugguauccucuaa

SEQ ID NO: 748889 - RNA, 19 nt, Artificial Sequence
  Description of Artificial Sequence: Synthetic oligonucleotide
  Antisense strand to SEQ ID NO: 748888
uuagaggauaccauugugc

SEQ ID NO: 748890 - RNA, 19 nt, Artificial Sequence
  Description of Artificial Sequence: Synthetic oligonucleotide
  Sense strand starting at position 1165 of SEQ ID NO: 586853
aaugguauccucuaagcga

SEQ ID NO: 748891 - RNA, 19 nt, Artificial Sequence
  Description of Artificial Sequence: Synthetic oligonucleotide
  Antisense strand to SEQ ID NO: 748890
ucgcuuagaggauaccauu

SEQ ID NO: 748892 - RNA, 19 nt, Artificial Sequence
  Description of Artificial Sequence: Synthetic oligonucleotide
  Sense strand starting at position 1168 of SEQ ID NO: 586853
gguauccucuaagcgaaau

SEQ ID NO: 748893 - RNA, 19 nt, Artificial Sequence
  Description of Artificial Sequence: Synthetic oligonucleotide
  Antisense strand to SEQ ID NO: 748892
auuucgcuuagaggauacc

SEQ ID NO: 748894 - RNA, 19 nt, Artificial Sequence
  Description of Artificial Sequence: Synthetic oligonucleotide
  Sense strand starting at position 1505 of SEQ ID NO: 586853
gggucugguccucaccauu

SEQ ID NO: 748895 - RNA, 19 nt, Artificial Sequence
  Description of Artificial Sequence: Synthetic oligonucleotide
  Antisense strand to SEQ ID NO: 748894
aauggugaggaccagaccc

SEQ ID NO: 748896 - RNA, 19 nt, Artificial Sequence
  Description of Artificial Sequence: Synthetic oligonucleotide
  Sense strand starting at position 1508 of SEQ ID NO: 586853
ucugguccucaccauugaa

SEQ ID NO: 748897 - RNA, 19 nt, Artificial Sequence
  Description of Artificial Sequence: Synthetic oligonucleotide
  Antisense strand to SEQ ID NO: 748896
uucaauggugaggaccaga

SEQ ID NO: 748898 - RNA, 19 nt, Artificial Sequence
  Description of Artificial Sequence: Synthetic oligonucleotide
  Sense strand starting at position 2380 of SEQ ID NO: 586853
ggagauuugucuugaaacu

SEQ ID NO: 748899 - RNA, 19 nt, Artificial Sequence
  Description of Artificial Sequence: Synthetic oligonucleotide
  Antisense strand to SEQ ID NO: 748898
aguuucaagacaaaucucc

SEQ ID NO: 748900 - RNA, 19 nt, Artificial Sequence
  Description of Artificial Sequence: Synthetic oligonucleotide
  Sense strand starting at position 2435 of SEQ ID NO: 586853
ucuagaaucuaguugcaug

SEQ ID NO: 748901 - RNA, 19 nt, Artificial Sequence
  Description of Artificial Sequence: Synthetic oligonucleotide
  Antisense strand to SEQ ID NO: 748900
caugcaacuagauucuaga

SEQ ID NO: 748902 - RNA, 19 nt, Artificial Sequence
  Description of Artificial Sequence: Synthetic oligonucleotide
  Sense strand starting at position 2440 of SEQ ID NO: 586853
aaucuaguugcaugauaag

SEQ ID NO: 748903 - RNA, 19 nt, Artificial Sequence
  Description of Artificial Sequence: Synthetic oligonucleotide
  Antisense strand to SEQ ID NO: 748902
cuuaucaugcaacuagauu

SEQ ID NO: 748904 - RNA, 19 nt, Artificial Sequence
  Description of Artificial Sequence: Synthetic oligonucleotide
  Sense strand starting at position 2569 of SEQ ID NO: 586853
ccagccuuucccgauccau

SEQ ID NO: 748905 - RNA, 19 nt, Artificial Sequence
  Description of Artificial Sequence: Synthetic oligonucleotide
  Antisense strand to SEQ ID NO: 748904
auggaucgggaaaggcugg

SEQ ID NO: 748906 - RNA, 19 nt, Artificial Sequence
  Description of Artificial Sequence: Synthetic oligonucleotide
  Sense strand starting at position 2591 of SEQ ID NO: 586853
guuuauuauguuucgucuu

SEQ ID NO: 748907 - RNA, 19 nt, Artificial Sequence
  Description of Artificial Sequence: Synthetic oligonucleotide
  Antisense strand to SEQ ID NO: 748906
aagacgaaacauaauaaac

SEQ ID NO: 748908 - RNA, 19 nt, Artificial Sequence
  Description of Artificial Sequence: Synthetic oligonucleotide
  Sense strand starting at position 2613 of SEQ ID NO: 586853
gaugcuauuccguugugca

SEQ ID NO: 748909 - RNA, 19 nt, Artificial Sequence
  Description of Artificial Sequence: Synthetic oligonucleotide
  Antisense strand to SEQ ID NO: 748908
ugcacaacggaauagcauc

SEQ ID NO: 748910 - RNA, 19 nt, Artificial Sequence
  Description of Artificial Sequence: Synthetic oligonucleotide
  Sense strand starting at position 2644 of SEQ ID NO: 586853
acuauuuauugagacaaag

SEQ ID NO: 748911 - RNA, 19 nt, Artificial Sequence
  Description of Artificial Sequence: Synthetic oligonucleotide
  Antisense strand to SEQ ID NO: 748910
cuuugucucaauaaauagu

SEQ ID NO: 748912 - RNA, 19 nt, Artificial Sequence
  Description of Artificial Sequence: Synthetic oligonucleotide
  Sense strand starting at position 2724 of SEQ ID NO: 586853
ggaugaggcgcuuauuauu

SEQ ID NO: 748913 - RNA, 19 nt, Artificial Sequence
  Description of Artificial Sequence: Synthetic oligonucleotide
  Antisense strand to SEQ ID NO: 748912
aauaauaagcgccucaucc

SEQ ID NO: 748914 - RNA, 19 nt, Artificial Sequence
  Description of Artificial Sequence: Synthetic oligonucleotide
  Sense strand starting at position 2773 of SEQ ID NO: 586853
uuugacuuguauguccaaa

SEQ ID NO: 748915 - RNA, 19 nt, Artificial Sequence
  Description of Artificial Sequence: Synthetic oligonucleotide
  Antisense strand to SEQ ID NO: 748914
uuuggacauacaagucaaa

SEQ ID NO: 748916 - RNA, 19 nt, Artificial Sequence
  Description of Artificial Sequence: Synthetic oligonucleotide
  Sense strand starting at position 2845 of SEQ ID NO: 586853
aguagaaggcuuugacuuu

SEQ ID NO: 748917 - RNA, 19 nt, Artificial Sequence
  Description of Artificial Sequence: Synthetic oligonucleotide
  Antisense strand to SEQ ID NO: 748916
aaagucaaagccuucuacu

SEQ ID NO: 748918 - RNA, 19 nt, Artificial Sequence
  Description of Artificial Sequence: Synthetic oligonucleotide
  Sense strand starting at position 2851 of SEQ ID NO: 586853
aggcuuugacuuugaaaug

SEQ ID NO: 748919 - RNA, 19 nt, Artificial Sequence
  Description of Artificial Sequence: Synthetic oligonucleotide
  Antisense strand to SEQ ID NO: 748918
cauuucaaagucaaagccu

SEQ ID NO: 748920 - RNA, 19 nt, Artificial Sequence
  Description of Artificial Sequence: Synthetic oligonucleotide
  Sense strand starting at position 2868 of SEQ ID NO: 586853
ugaggcuuacuuugcaaau

SEQ ID NO: 748921 - RNA, 19 nt, Artificial Sequence
  Description of Artificial Sequence: Synthetic oligonucleotide
  Antisense strand to SEQ ID NO: 748920
auuugcaaaguaagccuca

SEQ ID NO: 748922 - RNA, 19 nt, Artificial Sequence
  Description of Artificial Sequence: Synthetic oligonucleotide
  Sense strand starting at position 2869 of SEQ ID NO: 586853
gaggcuuacuuugcaaaug

SEQ ID NO: 748923 - RNA, 19 nt, Artificial Sequence
  Description of Artificial Sequence: Synthetic oligonucleotide
  Antisense strand to SEQ ID NO: 748922
cauuugcaaaguaagccuc

SEQ ID NO: 748924 - RNA, 19 nt, Artificial Sequence
  Description of Artificial Sequence: Synthetic oligonucleotide
  Sense strand starting at position 3004 of SEQ ID NO: 586853
ucacuugguuauucugauu

SEQ ID NO: 748925 - RNA, 19 nt, Artificial Sequence
  Description of Artificial Sequence: Synthetic oligonucleotide
  Antisense strand to SEQ ID NO: 748924
aaucagaauaaccaaguga

SEQ ID NO: 748926 - RNA, 19 nt, Artificial Sequence
  Description of Artificial Sequence: Synthetic oligonucleotide
  Sense strand starting at position 3124 of SEQ ID NO: 586853
auguuaacccuuuguuaau

SEQ ID NO: 748927 - RNA, 19 nt, Artificial Sequence
  Description of Artificial Sequence: Synthetic oligonucleotide
  Antisense strand to SEQ ID NO: 748926
auuaacaaaggguuaacau

SEQ ID NO: 748928 - RNA, 19 nt, Artificial Sequence
  Description of Artificial Sequence: Synthetic oligonucleotide
  Sense strand starting at position 3125 of SEQ ID NO: 586853
uguuaacccuuuguuaaug

SEQ ID NO: 748929 - RNA, 19 nt, Artificial Sequence
  Description of Artificial Sequence: Synthetic oligonucleotide
  Antisense strand to SEQ ID NO: 748928
cauuaacaaaggguuaaca

SEQ ID NO: 748930 - RNA, 19 nt, Artificial Sequence
  Description of Artificial Sequence: Synthetic oligonucleotide
  Sense strand starting at position 3126 of SEQ ID NO: 586853
guuaacccuuuguuaauga

SEQ ID NO: 748931 - RNA, 19 nt, Artificial Sequence
  Description of Artificial Sequence: Synthetic oligonucleotide
  Antisense strand to SEQ ID NO: 748930
ucauuaacaaaggguuaac

SEQ ID NO: 748932 - RNA, 19 nt, Artificial Sequence
  Description of Artificial Sequence: Synthetic oligonucleotide
  Sense strand starting at position 3142 of SEQ ID NO: 586853
ugaugcauccuguauugac

SEQ ID NO: 748933 - RNA, 19 nt, Artificial Sequence
  Description of Artificial Sequence: Synthetic oligonucleotide
  Antisense strand to SEQ ID NO: 748932
gucaauacaggaugcauca

SEQ ID NO: 748934 - RNA, 19 nt, Artificial Sequence
  Description of Artificial Sequence: Synthetic oligonucleotide
  Sense strand starting at position 3624 of SEQ ID NO: 586853
ucacaugucaccgguugga

SEQ ID NO: 748935 - RNA, 19 nt, Artificial Sequence
  Description of Artificial Sequence: Synthetic oligonucleotide
  Antisense strand to SEQ ID NO: 748934
uccaaccggugacauguga

SEQ ID NO: 748936 - RNA, 19 nt, Artificial Sequence
  Description of Artificial Sequence: Synthetic oligonucleotide
  Sense strand starting at position 3667 of SEQ ID NO: 586853
ccguguaagcauuauuauu

SEQ ID NO: 748937 - RNA, 19 nt, Artificial Sequence
  Description of Artificial Sequence: Synthetic oligonucleotide
  Antisense strand to SEQ ID NO: 748936
aauaauaaugcuuacacgg

SEQ ID NO: 748938 - RNA, 19 nt, Artificial Sequence
  Description of Artificial Sequence: Synthetic oligonucleotide
  Sense strand starting at position 3690 of SEQ ID NO: 586853
cggaucugguaaucuaaga

SEQ ID NO: 748939 - RNA, 19 nt, Artificial Sequence
  Description of Artificial Sequence: Synthetic oligonucleotide
  Antisense strand to SEQ ID NO: 748938
ucuuagauuaccagauccg

SEQ ID NO: 748940 - RNA, 19 nt, Artificial Sequence
  Description of Artificial Sequence: Synthetic oligonucleotide
  Sense strand starting at position 3697 of SEQ ID NO: 586853
gguaaucuaagaugcaugu

SEQ ID NO: 748941 - RNA, 19 nt, Artificial Sequence
  Description of Artificial Sequence: Synthetic oligonucleotide
  Antisense strand to SEQ ID NO: 748940
acaugcaucuuagauuacc

SEQ ID NO: 748942 - RNA, 19 nt, Artificial Sequence
  Description of Artificial Sequence: Synthetic oligonucleotide
  Sense strand starting at position 3701 of SEQ ID NO: 586853
aucuaagaugcauguguau

SEQ ID NO: 748943 - RNA, 19 nt, Artificial Sequence
  Description of Artificial Sequence: Synthetic oligonucleotide
  Antisense strand to SEQ ID NO: 748942
auacacaugcaucuuagau

SEQ ID NO: 748944 - RNA, 19 nt, Artificial Sequence
  Description of Artificial Sequence: Synthetic oligonucleotide
  Sense strand starting at position 3715 of SEQ ID NO: 586853
uguaucaccugucuaaauu

SEQ ID NO: 748945 - RNA, 19 nt, Artificial Sequence
  Description of Artificial Sequence: Synthetic oligonucleotide
  Antisense strand to SEQ ID NO: 748944
aauuuagacaggugauaca

SEQ ID NO: 748946 - RNA, 19 nt, Artificial Sequence
  Description of Artificial Sequence: Synthetic oligonucleotide
  Sense strand starting at position 3787 of SEQ ID NO: 586853
ugcgaaauacaauagcuua

SEQ ID NO: 748947 - RNA, 19 nt, Artificial Sequence
  Description of Artificial Sequence: Synthetic oligonucleotide
  Antisense strand to SEQ ID NO: 748946
uaagcuauuguauuucgca

SEQ ID NO: 748948 - RNA, 19 nt, Artificial Sequence
  Description of Artificial Sequence: Synthetic oligonucleotide
  Sense strand starting at position 3846 of SEQ ID NO: 586853
uugguauugagaggugaua

SEQ ID NO: 748949 - RNA, 19 nt, Artificial Sequence
  Description of Artificial Sequence: Synthetic oligonucleotide
  Antisense strand to SEQ ID NO: 748948
uaucaccucucaauaccaa

SEQ ID NO: 748950 - RNA, 19 nt, Artificial Sequence
  Description of Artificial Sequence: Synthetic oligonucleotide
  Sense strand starting at position 95 of SEQ ID NO: 586854
cgcaauacugcaggagaaa

SEQ ID NO: 748951 - RNA, 19 nt, Artificial Sequence
  Description of Artificial Sequence: Synthetic oligonucleotide
  Antisense strand to SEQ ID NO: 748950
uuucuccugcaguauugcg

SEQ ID NO: 748952 - RNA, 19 nt, Artificial Sequence
  Description of Artificial Sequence: Synthetic oligonucleotide
  Sense strand starting at position 730 of SEQ ID NO: 586854
ugcuuuguccugcaacauu

SEQ ID NO: 748953 - RNA, 19 nt, Artificial Sequence
  Description of Artificial Sequence: Synthetic oligonucleotide
  Antisense strand to SEQ ID NO: 748952
aauguugcaggacaaagca

SEQ ID NO: 748954 - RNA, 19 nt, Artificial Sequence
  Description of Artificial Sequence: Synthetic oligonucleotide
  Sense strand starting at position 917 of SEQ ID NO: 586854
ccagaauaguuaggacucu

SEQ ID NO: 748955 - RNA, 19 nt, Artificial Sequence
  Description of Artificial Sequence: Synthetic oligonucleotide
  Antisense strand to SEQ ID NO: 748954
agaguccuaacuauucugg

SEQ ID NO: 748956 - RNA, 19 nt, Artificial Sequence
  Description of Artificial Sequence: Synthetic oligonucleotide
  Sense strand starting at position 1126 of SEQ ID NO: 586854
uuaauugacuaaugaagca

SEQ ID NO: 748957 - RNA, 19 nt, Artificial Sequence
  Description of Artificial Sequence: Synthetic oligonucleotide
  Antisense strand to SEQ ID NO: 748956
ugcuucauuagucaauuaa

SEQ ID NO: 748958 - RNA, 19 nt, Artificial Sequence
  Description of Artificial Sequence: Synthetic oligonucleotide
  Sense strand starting at position 1142 of SEQ ID NO: 586854
gcaggacugcuuugcuacu

SEQ ID NO: 748959 - RNA, 19 nt, Artificial Sequence
  Description of Artificial Sequence: Synthetic oligonucleotide
  Antisense strand to SEQ ID NO: 748958
aguagcaaagcaguccugc

SEQ ID NO: 748960 - RNA, 19 nt, Artificial Sequence
  Description of Artificial Sequence: Synthetic oligonucleotide
  Sense strand starting at position 1148 of SEQ ID NO: 586854
cugcuuugcuacuuggaca

SEQ ID NO: 748961 - RNA, 19 nt, Artificial Sequence
  Description of Artificial Sequence: Synthetic oligonucleotide
  Antisense strand to SEQ ID NO: 748960
uguccaaguagcaaagcag

SEQ ID NO: 748962 - RNA, 19 nt, Artificial Sequence
  Description of Artificial Sequence: Synthetic oligonucleotide
  Sense strand starting at position 1212 of SEQ ID NO: 586854
cuauguacucuuggguaua

SEQ ID NO: 748963 - RNA, 19 nt, Artificial Sequence
  Description of Artificial Sequence: Synthetic oligonucleotide
  Antisense strand to SEQ ID NO: 748962
uauacccaagaguacauag

SEQ ID NO: 748964 - RNA, 19 nt, Artificial Sequence
  Description of Artificial Sequence: Synthetic oligonucleotide
  Sense strand starting at position 1215 of SEQ ID NO: 586854
uguacucuuggguauaaca

SEQ ID NO: 748965 - RNA, 19 nt, Artificial Sequence
  Description of Artificial Sequence: Synthetic oligonucleotide
  Antisense strand to SEQ ID NO: 748964
uguuauacccaagaguaca

SEQ ID NO: 748966 - RNA, 19 nt, Artificial Sequence
  Description of Artificial Sequence: Synthetic oligonucleotide
  Sense strand starting at position 1254 of SEQ ID NO: 586854
cuacgcuuuccagagcaga

SEQ ID NO: 748967 - RNA, 19 nt, Artificial Sequence
  Description of Artificial Sequence: Synthetic oligonucleotide
  Antisense strand to SEQ ID NO: 748966
ucugcucuggaaagcguag

SEQ ID NO: 748968 - RNA, 19 nt, Artificial Sequence
  Description of Artificial Sequence: Synthetic oligonucleotide
  Sense strand starting at position 1300 of SEQ ID NO: 586854
gcuagaaaccgccaacuuu

SEQ ID NO: 748969 - RNA, 19 nt, Artificial Sequence
  Description of Artificial Sequence: Synthetic oligonucleotide
  Antisense strand to SEQ ID NO: 748968
aaaguuggcgguuucuagc

SEQ ID NO: 748970 - RNA, 19 nt, Artificial Sequence
  Description of Artificial Sequence: Synthetic oligonucleotide
  Sense strand starting at position 1467 of SEQ ID NO: 586854
cucucuaacgaucaguguu

SEQ ID NO: 748971 - RNA, 19 nt, Artificial Sequence
  Description of Artificial Sequence: Synthetic oligonucleotide
  Antisense strand to SEQ ID NO: 748970
aacacugaucguuagagag

SEQ ID NO: 748972 - RNA, 19 nt, Artificial Sequence
  Description of Artificial Sequence: Synthetic oligonucleotide
  Sense strand starting at position 1470 of SEQ ID NO: 586854
ucuaacgaucaguguuguu

SEQ ID NO: 748973 - RNA, 19 nt, Artificial Sequence
  Description of Artificial Sequence: Synthetic oligonucleotide
  Antisense strand to SEQ ID NO: 748972
aacaacacugaucguuaga

SEQ ID NO: 748974 - RNA, 19 nt, Artificial Sequence
  Description of Artificial Sequence: Synthetic oligonucleotide
  Sense strand starting at position 1475 of SEQ ID NO: 586854
cgaucaguguuguuuagag

SEQ ID NO: 748975 - RNA, 19 nt, Artificial Sequence
  Description of Artificial Sequence: Synthetic oligonucleotide
  Antisense strand to SEQ ID NO: 748974
cucuaaacaacacugaucg

SEQ ID NO: 748976 - RNA, 19 nt, Artificial Sequence
  Description of Artificial Sequence: Synthetic oligonucleotide
  Sense strand starting at position 1477 of SEQ ID NO: 586854
aucaguguuguuuagagua

SEQ ID NO: 748977 - RNA, 19 nt, Artificial Sequence
  Description of Artificial Sequence: Synthetic oligonucleotide
  Antisense strand to SEQ ID NO: 748976
uacucuaaacaacacugau

SEQ ID NO: 748978 - RNA, 19 nt, Artificial Sequence
  Description of Artificial Sequence: Synthetic oligonucleotide
  Sense strand starting at position 1591 of SEQ ID NO: 586854
gcuccaccgugcuuugauu

SEQ ID NO: 748979 - RNA, 19 nt, Artificial Sequence
  Description of Artificial Sequence: Synthetic oligonucleotide
  Antisense strand to SEQ ID NO: 748978
aaucaaagcacgguggagc

SEQ ID NO: 748980 - RNA, 19 nt, Artificial Sequence
  Description of Artificial Sequence: Synthetic oligonucleotide
  Sense strand starting at position 1707 of SEQ ID NO: 586854
gauacugaguuucugaguu

SEQ ID NO: 748981 - RNA, 19 nt, Artificial Sequence
  Description of Artificial Sequence: Synthetic oligonucleotide
  Antisense strand to SEQ ID NO: 748980
aacucagaaacucaguauc

SEQ ID NO: 748982 - RNA, 19 nt, Artificial Sequence
  Description of Artificial Sequence: Synthetic oligonucleotide
  Sense strand starting at position 1711 of SEQ ID NO: 586854
cugaguuucugaguuugga

SEQ ID NO: 748983 - RNA, 19 nt, Artificial Sequence
  Description of Artificial Sequence: Synthetic oligonucleotide
  Antisense strand to SEQ ID NO: 748982
uccaaacucagaaacucag

SEQ ID NO: 748984 - RNA, 19 nt, Artificial Sequence
  Description of Artificial Sequence: Synthetic oligonucleotide
  Sense strand starting at position 2106 of SEQ ID NO: 586854
guggguuauuguguucaaa

SEQ ID NO: 748985 - RNA, 19 nt, Artificial Sequence
  Description of Artificial Sequence: Synthetic oligonucleotide
  Antisense strand to SEQ ID NO: 748984
uuugaacacaauaacccac

SEQ ID NO: 748986 - RNA, 19 nt, Artificial Sequence
  Description of Artificial Sequence: Synthetic oligonucleotide
  Sense strand starting at position 2108 of SEQ ID NO: 586854
ggguuauuguguucaaagc

SEQ ID NO: 748987 - RNA, 19 nt, Artificial Sequence
  Description of Artificial Sequence: Synthetic oligonucleotide
  Antisense strand to SEQ ID NO: 748986
gcuuugaacacaauaaccc

SEQ ID NO: 748988 - RNA, 19 nt, Artificial Sequence
  Description of Artificial Sequence: Synthetic oligonucleotide
  Sense strand starting at position 2442 of SEQ ID NO: 586854
cuuuguccgccuugaauua

SEQ ID NO: 748989 - RNA, 19 nt, Artificial Sequence
  Description of Artificial Sequence: Synthetic oligonucleotide
  Antisense strand to SEQ ID NO: 748988
uaauucaaggcggacaaag

SEQ ID NO: 748990 - RNA, 19 nt, Artificial Sequence
  Description of Artificial Sequence: Synthetic oligonucleotide
  Sense strand starting at position 2449 of SEQ ID NO: 586854
cgccuugaauuacucuaua

SEQ ID NO: 748991 - RNA, 19 nt, Artificial Sequence
  Description of Artificial Sequence: Synthetic oligonucleotide
  Antisense strand to SEQ ID NO: 748990
uauagaguaauucaaggcg

SEQ ID NO: 748992 - RNA, 19 nt, Artificial Sequence
  Description of Artificial Sequence: Synthetic oligonucleotide
  Sense strand starting at position 2513 of SEQ ID NO: 586854
uagugugaggcacaguaau

SEQ ID NO: 748993 - RNA, 19 nt, Artificial Sequence
  Description of Artificial Sequence: Synthetic oligonucleotide
  Antisense strand to SEQ ID NO: 748992
auuacugugccucacacua

SEQ ID NO: 748994 - RNA, 19 nt, Artificial Sequence
  Description of Artificial Sequence: Synthetic oligonucleotide
  Sense strand starting at position 2558 of SEQ ID NO: 586854
ucugcuugcgagcaggauu

SEQ ID NO: 748995 - RNA, 19 nt, Artificial Sequence
  Description of Artificial Sequence: Synthetic oligonucleotide
  Antisense strand to SEQ ID NO: 748994
aauccugcucgcaagcaga

SEQ ID NO: 748996 - RNA, 19 nt, Artificial Sequence
  Description of Artificial Sequence: Synthetic oligonucleotide
  Sense strand starting at position 2585 of SEQ ID NO: 586854
gccgugacucggugacuga

SEQ ID NO: 748997 - RNA, 19 nt, Artificial Sequence
  Description of Artificial Sequence: Synthetic oligonucleotide
  Antisense strand to SEQ ID NO: 748996
ucagucaccgagucacggc

SEQ ID NO: 748998 - RNA, 19 nt, Artificial Sequence
  Description of Artificial Sequence: Synthetic oligonucleotide
  Sense strand starting at position 2616 of SEQ ID NO: 586854
ccaauaacgcccugaacaa

SEQ ID NO: 748999 - RNA, 19 nt, Artificial Sequence
  Description of Artificial Sequence: Synthetic oligonucleotide
  Antisense strand to SEQ ID NO: 748998
uuguucagggcguuauugg

SEQ ID NO: 749000 - RNA, 19 nt, Artificial Sequence
  Description of Artificial Sequence: Synthetic oligonucleotide
  Sense strand starting at position 2740 of SEQ ID NO: 586854
uacauaaucucugacggga

SEQ ID NO: 749001 - RNA, 19 nt, Artificial Sequence
  Description of Artificial Sequence: Synthetic oligonucleotide
  Antisense strand to SEQ ID NO: 749000
ucccgucagagauuaugua

SEQ ID NO: 749002 - RNA, 19 nt, Artificial Sequence
  Description of Artificial Sequence: Synthetic oligonucleotide
  Sense strand starting at position 2743 of SEQ ID NO: 586854
auaaucucugacgggauua

SEQ ID NO: 749003 - RNA, 19 nt, Artificial Sequence
  Description of Artificial Sequence: Synthetic oligonucleotide
  Antisense strand to SEQ ID NO: 749002
uaaucccgucagagauuau

SEQ ID NO: 749004 - RNA, 19 nt, Artificial Sequence
  Description of Artificial Sequence: Synthetic oligonucleotide
  Sense strand starting at position 2754 of SEQ ID NO: 586854
cgggauuaaugauuaugcu

SEQ ID NO: 749005 - RNA, 19 nt, Artificial Sequence
  Description of Artificial Sequence: Synthetic oligonucleotide
  Antisense strand to SEQ ID NO: 749004
agcauaaucauuaaucccg

SEQ ID NO: 749006 - RNA, 19 nt, Artificial Sequence
  Description of Artificial Sequence: Synthetic oligonucleotide
  Sense strand starting at position 3051 of SEQ ID NO: 586854
ugaaauuauagguguuaag

SEQ ID NO: 749007 - RNA, 19 nt, Artificial Sequence
  Description of Artificial Sequence: Synthetic oligonucleotide
  Antisense strand to SEQ ID NO: 749006
cuuaacaccuauaauuuca

SEQ ID NO: 749008 - RNA, 19 nt, Artificial Sequence
  Description of Artificial Sequence: Synthetic oligonucleotide
  Sense strand starting at position 3089 of SEQ ID NO: 586854
cucuguaaucuguaacuag

SEQ ID NO: 749009 - RNA, 19 nt, Artificial Sequence
  Description of Artificial Sequence: Synthetic oligonucleotide
  Antisense strand to SEQ ID NO: 749008
cuaguuacagauuacagag

SEQ ID NO: 749010 - RNA, 19 nt, Artificial Sequence
  Description of Artificial Sequence: Synthetic oligonucleotide
  Sense strand starting at position 3092 of SEQ ID NO: 586854
uguaaucuguaacuagaua

SEQ ID NO: 749011 - RNA, 19 nt, Artificial Sequence
  Description of Artificial Sequence: Synthetic oligonucleotide
  Antisense strand to SEQ ID NO: 749010
uaucuaguuacagauuaca

SEQ ID NO: 749012 - RNA, 19 nt, Artificial Sequence
  Description of Artificial Sequence: Synthetic oligonucleotide
  Sense strand starting at position 3156 of SEQ ID NO: 586854
uucugagcacauuagauau

SEQ ID NO: 749013 - RNA, 19 nt, Artificial Sequence
  Description of Artificial Sequence: Synthetic oligonucleotide
  Antisense strand to SEQ ID NO: 749012
auaucuaaugugcucagaa

SEQ ID NO: 749014 - RNA, 19 nt, Artificial Sequence
  Description of Artificial Sequence: Synthetic oligonucleotide
  Sense strand starting at position 3158 of SEQ ID NO: 586854
cugagcacauuagauauaa

SEQ ID NO: 749015 - RNA, 19 nt, Artificial Sequence
  Description of Artificial Sequence: Synthetic oligonucleotide
  Antisense strand to SEQ ID NO: 749014
uuauaucuaaugugcucag

SEQ ID NO: 749016 - RNA, 19 nt, Artificial Sequence
  Description of Artificial Sequence: Synthetic oligonucleotide
  Sense strand starting at position 3465 of SEQ ID NO: 586854
ccacgcccagcuugauaua

SEQ ID NO: 749017 - RNA, 19 nt, Artificial Sequence
  Description of Artificial Sequence: Synthetic oligonucleotide
  Antisense strand to SEQ ID NO: 749016
uauaucaagcugggcgugg

SEQ ID NO: 749018 - RNA, 19 nt, Artificial Sequence
  Description of Artificial Sequence: Synthetic oligonucleotide
  Sense strand starting at position 3556 of SEQ ID NO: 586854
auauaaaugugugcugaaa

SEQ ID NO: 749019 - RNA, 19 nt, Artificial Sequence
  Description of Artificial Sequence: Synthetic oligonucleotide
  Antisense strand to SEQ ID NO: 749018
uuucagcacacauuuauau

SEQ ID NO: 749020 - RNA, 19 nt, Artificial Sequence
  Description of Artificial Sequence: Synthetic oligonucleotide
  Sense strand starting at position 3581 of SEQ ID NO: 586854
uuuggagcaguuuaacaaa

SEQ ID NO: 749021 - RNA, 19 nt, Artificial Sequence
  Description of Artificial Sequence: Synthetic oligonucleotide
  Antisense strand to SEQ ID NO: 749020
uuuguuaaacugcuccaaa

SEQ ID NO: 749022 - RNA, 19 nt, Artificial Sequence
  Description of Artificial Sequence: Synthetic oligonucleotide
  Sense strand starting at position 3610 of SEQ ID NO: 586854
gacuuucccugguuacagu

SEQ ID NO: 749023 - RNA, 19 nt, Artificial Sequence
  Description of Artificial Sequence: Synthetic oligonucleotide
  Antisense strand to SEQ ID NO: 749022
acuguaaccagggaaaguc

SEQ ID NO: 749024 - RNA, 19 nt, Artificial Sequence
  Description of Artificial Sequence: Synthetic oligonucleotide
  Sense strand starting at position 3619 of SEQ ID NO: 586854
ugguuacaguccucaguaa

SEQ ID NO: 749025 - RNA, 19 nt, Artificial Sequence
  Description of Artificial Sequence: Synthetic oligonucleotide
  Antisense strand to SEQ ID NO: 749024
uuacugaggacuguaacca

SEQ ID NO: 749026 - RNA, 19 nt, Artificial Sequence
  Description of Artificial Sequence: Synthetic oligonucleotide
  Sense strand starting at position 3620 of SEQ ID NO: 586854
gguuacaguccucaguaag

SEQ ID NO: 749027 - RNA, 19 nt, Artificial Sequence
  Description of Artificial Sequence: Synthetic oligonucleotide
  Antisense strand to SEQ ID NO: 749026
cuuacugaggacuguaacc

SEQ ID NO: 749028 - RNA, 19 nt, Artificial Sequence
  Description of Artificial Sequence: Synthetic oligonucleotide
  Sense strand starting at position 3683 of SEQ ID NO: 586854
uuuaguugacauugagaaa

SEQ ID NO: 749029 - RNA, 19 nt, Artificial Sequence
  Description of Artificial Sequence: Synthetic oligonucleotide
  Antisense strand to SEQ ID NO: 749028
uuucucaaugucaacuaaa

SEQ ID NO: 749030 - RNA, 19 nt, Artificial Sequence
  Description of Artificial Sequence: Synthetic oligonucleotide
  Sense strand starting at position 112 of SEQ ID NO: 586855
uacuacaauggugguaaua

SEQ ID NO: 749031 - RNA, 19 nt, Artificial Sequence
  Description of Artificial Sequence: Synthetic oligonucleotide
  Antisense strand to SEQ ID NO: 749030
uauuaccaccauuguagua

SEQ ID NO: 749032 - RNA, 19 nt, Artificial Sequence
  Description of Artificial Sequence: Synthetic oligonucleotide
  Sense strand starting at position 200 of SEQ ID NO: 586855
guuugccuuccagaagacu

SEQ ID NO: 749033 - RNA, 19 nt, Artificial Sequence
  Description of Artificial Sequence: Synthetic oligonucleotide
  Antisense strand to SEQ ID NO: 749032
agucuucuggaaggcaaac

SEQ ID NO: 749034 - RNA, 19 nt, Artificial Sequence
  Description of Artificial Sequence: Synthetic oligonucleotide
  Sense strand starting at position 326 of SEQ ID NO: 586855
gauagauaguguccaaaua

SEQ ID NO: 749035 - RNA, 19 nt, Artificial Sequence
  Description of Artificial Sequence: Synthetic oligonucleotide
  Antisense strand to SEQ ID NO: 749034
uauuuggacacuaucuauc

SEQ ID NO: 749036 - RNA, 19 nt, Artificial Sequence
  Description of Artificial Sequence: Synthetic oligonucleotide
  Sense strand starting at position 336 of SEQ ID NO: 586855
guccaaauagauggugaca

SEQ ID NO: 749037 - RNA, 19 nt, Artificial Sequence
  Description of Artificial Sequence: Synthetic oligonucleotide
  Antisense strand to SEQ ID NO: 749036
ugucaccaucuauuuggac

SEQ ID NO: 749038 - RNA, 19 nt, Artificial Sequence
  Description of Artificial Sequence: Synthetic oligonucleotide
  Sense strand starting at position 511 of SEQ ID NO: 586855
gagcaucgaacuuggagaa

SEQ ID NO: 749039 - RNA, 19 nt, Artificial Sequence
  Description of Artificial Sequence: Synthetic oligonucleotide
  Antisense strand to SEQ ID NO: 749038
uucuccaaguucgaugcuc

SEQ ID NO: 749040 - RNA, 19 nt, Artificial Sequence
  Description of Artificial Sequence: Synthetic oligonucleotide
  Sense strand starting at position 512 of SEQ ID NO: 586855
agcaucgaacuuggagaau

SEQ ID NO: 749041 - RNA, 19 nt, Artificial Sequence
  Description of Artificial Sequence: Synthetic oligonucleotide
  Antisense strand to SEQ ID NO: 749040
auucuccaaguucgaugcu

SEQ ID NO: 749042 - RNA, 19 nt, Artificial Sequence
  Description of Artificial Sequence: Synthetic oligonucleotide
  Sense strand starting at position 523 of SEQ ID NO: 586855
uggagaauuugugacacaa

SEQ ID NO: 749043 - RNA, 19 nt, Artificial Sequence
  Description of Artificial Sequence: Synthetic oligonucleotide
  Antisense strand to SEQ ID NO: 749042
uugugucacaaauucucca

SEQ ID NO: 749044 - RNA, 19 nt, Artificial Sequence
  Description of Artificial Sequence: Synthetic oligonucleotide
  Sense strand starting at position 525 of SEQ ID NO: 586855
gagaauuugugacacaaag

SEQ ID NO: 749045 - RNA, 19 nt, Artificial Sequence
  Description of Artificial Sequence: Synthetic oligonucleotide
  Antisense strand to SEQ ID NO: 749044
cuuugugucacaaauucuc

SEQ ID NO: 749046 - RNA, 19 nt, Artificial Sequence
  Description of Artificial Sequence: Synthetic oligonucleotide
  Sense strand starting at position 575 of SEQ ID NO: 586855
gcuuuauugcuaguuguuc

SEQ ID NO: 749047 - RNA, 19 nt, Artificial Sequence
  Description of Artificial Sequence: Synthetic oligonucleotide
  Antisense strand to SEQ ID NO: 749046
gaacaacuagcaauaaagc

SEQ ID NO: 749048 - RNA, 19 nt, Artificial Sequence
  Description of Artificial Sequence: Synthetic oligonucleotide
  Sense strand starting at position 663 of SEQ ID NO: 586855
cccucagaagucugaaauc

SEQ ID NO: 749049 - RNA, 19 nt, Artificial Sequence
  Description of Artificial Sequence: Synthetic oligonucleotide
  Antisense strand to SEQ ID NO: 749048
gauuucagacuucugaggg

SEQ ID NO: 749050 - RNA, 19 nt, Artificial Sequence
  Description of Artificial Sequence: Synthetic oligonucleotide
  Sense strand starting at position 816 of SEQ ID NO: 586855
auaccugaugugggaugua

SEQ ID NO: 749051 - RNA, 19 nt, Artificial Sequence
  Description of Artificial Sequence: Synthetic oligonucleotide
  Antisense strand to SEQ ID NO: 749050
uacaucccacaucagguau

SEQ ID NO: 749052 - RNA, 19 nt, Artificial Sequence
  Description of Artificial Sequence: Synthetic oligonucleotide
  Sense strand starting at position 819 of SEQ ID NO: 586855
ccugaugugggauguagaa

SEQ ID NO: 749053 - RNA, 19 nt, Artificial Sequence
  Description of Artificial Sequence: Synthetic oligonucleotide
  Antisense strand to SEQ ID NO: 749052
uucuacaucccacaucagg

SEQ ID NO: 749054 - RNA, 19 nt, Artificial Sequence
  Description of Artificial Sequence: Synthetic oligonucleotide
  Sense strand starting at position 857 of SEQ ID NO: 586855
ggaucuucugcugaacuuu

SEQ ID NO: 749055 - RNA, 19 nt, Artificial Sequence
  Description of Artificial Sequence: Synthetic oligonucleotide
  Antisense strand to SEQ ID NO: 749054
aaaguucagcagaagaucc

SEQ ID NO: 749056 - RNA, 19 nt, Artificial Sequence
  Description of Artificial Sequence: Synthetic oligonucleotide
  Sense strand starting at position 1041 of SEQ ID NO: 586855
ggagaugucaauuacucgu

SEQ ID NO: 749057 - RNA, 19 nt, Artificial Sequence
  Description of Artificial Sequence: Synthetic oligonucleotide
  Antisense strand to SEQ ID NO: 749056
acgaguaauugacaucucc

SEQ ID NO: 749058 - RNA, 19 nt, Artificial Sequence
  Description of Artificial Sequence: Synthetic oligonucleotide
  Sense strand starting at position 1079 of SEQ ID NO: 586855
ucuucucaucuugagguau

SEQ ID NO: 749059 - RNA, 19 nt, Artificial Sequence
  Description of Artificial Sequence: Synthetic oligonucleotide
  Antisense strand to SEQ ID NO: 749058
auaccucaagaugagaaga

SEQ ID NO: 749060 - RNA, 19 nt, Artificial Sequence
  Description of Artificial Sequence: Synthetic oligonucleotide
  Sense strand starting at position 1083 of SEQ ID NO: 586855
cucaucuugagguauggua

SEQ ID NO: 749061 - RNA, 19 nt, Artificial Sequence
  Description of Artificial Sequence: Synthetic oligonucleotide
  Antisense strand to SEQ ID NO: 749060
uaccauaccucaagaugag

SEQ ID NO: 749062 - RNA, 19 nt, Artificial Sequence
  Description of Artificial Sequence: Synthetic oligonucleotide
  Sense strand starting at position 1142 of SEQ ID NO: 586855
gagaaauggcugggccaga

SEQ ID NO: 749063 - RNA, 19 nt, Artificial Sequence
  Description of Artificial Sequence: Synthetic oligonucleotide
  Antisense strand to SEQ ID NO: 749062
ucuggcccagccauuucuc

SEQ ID NO: 749064 - RNA, 19 nt, Artificial Sequence
  Description of Artificial Sequence: Synthetic oligonucleotide
  Sense strand starting at position 1267 of SEQ ID NO: 586855
aggauagccacacgaucau

SEQ ID NO: 749065 - RNA, 19 nt, Artificial Sequence
  Description of Artificial Sequence: Synthetic oligonucleotide
  Antisense strand to SEQ ID NO: 749064
augaucguguggcuauccu

SEQ ID NO: 749066 - RNA, 19 nt, Artificial Sequence
  Description of Artificial Sequence: Synthetic oligonucleotide
  Sense strand starting at position 1323 of SEQ ID NO: 586855
ggccuucuuccguucuuua

SEQ ID NO: 749067 - RNA, 19 nt, Artificial Sequence
  Description of Artificial Sequence: Synthetic oligonucleotide
  Antisense strand to SEQ ID NO: 749066
uaaagaacggaagaaggcc

SEQ ID NO: 749068 - RNA, 19 nt, Artificial Sequence
  Description of Artificial Sequence: Synthetic oligonucleotide
  Sense strand starting at position 1324 of SEQ ID NO: 586855
gccuucuuccguucuuuau

SEQ ID NO: 749069 - RNA, 19 nt, Artificial Sequence
  Description of Artificial Sequence: Synthetic oligonucleotide
  Antisense strand to SEQ ID NO: 749068
auaaagaacggaagaaggc

SEQ ID NO: 749070 - RNA, 19 nt, Artificial Sequence
  Description of Artificial Sequence: Synthetic oligonucleotide
  Sense strand starting at position 1404 of SEQ ID NO: 586855
agcaucuggcgagacaaua

SEQ ID NO: 749071 - RNA, 19 nt, Artificial Sequence
  Description of Artificial Sequence: Synthetic oligonucleotide
  Antisense strand to SEQ ID NO: 749070
uauugucucgccagaugcu

SEQ ID NO: 749072 - RNA, 19 nt, Artificial Sequence
  Description of Artificial Sequence: Synthetic oligonucleotide
  Sense strand starting at position 1430 of SEQ ID NO: 586855
ucuuccacucagggauauu

SEQ ID NO: 749073 - RNA, 19 nt, Artificial Sequence
  Description of Artificial Sequence: Synthetic oligonucleotide
  Antisense strand to SEQ ID NO: 749072
aauaucccugaguggaaga

SEQ ID NO: 749074 - RNA, 19 nt, Artificial Sequence
  Description of Artificial Sequence: Synthetic oligonucleotide
  Sense strand starting at position 1441 of SEQ ID NO: 586855
gggauauucucccuuaucc

SEQ ID NO: 749075 - RNA, 19 nt, Artificial Sequence
  Description of Artificial Sequence: Synthetic oligonucleotide
  Antisense strand to SEQ ID NO: 749074
ggauaagggagaauauccc

SEQ ID NO: 749076 - RNA, 19 nt, Artificial Sequence
  Description of Artificial Sequence: Synthetic oligonucleotide
  Sense strand starting at position 1533 of SEQ ID NO: 586855
uagguccauggugaugaua

SEQ ID NO: 749077 - RNA, 19 nt, Artificial Sequence
  Description of Artificial Sequence: Synthetic oligonucleotide
  Antisense strand to SEQ ID NO: 749076
uaucaucaccauggaccua

SEQ ID NO: 749078 - RNA, 19 nt, Artificial Sequence
  Description of Artificial Sequence: Synthetic oligonucleotide
  Sense strand starting at position 1536 of SEQ ID NO: 586855
guccauggugaugauauga

SEQ ID NO: 749079 - RNA, 19 nt, Artificial Sequence
  Description of Artificial Sequence: Synthetic oligonucleotide
  Antisense strand to SEQ ID NO: 749078
ucauaucaucaccauggac

SEQ ID NO: 749080 - RNA, 19 nt, Artificial Sequence
  Description of Artificial Sequence: Synthetic oligonucleotide
  Sense strand starting at position 1717 of SEQ ID NO: 586855
auuagacugucguugauuu

SEQ ID NO: 749081 - RNA, 19 nt, Artificial Sequence
  Description of Artificial Sequence: Synthetic oligonucleotide
  Antisense strand to SEQ ID NO: 749080
aaaucaacgacagucuaau

SEQ ID NO: 749082 - RNA, 19 nt, Artificial Sequence
  Description of Artificial Sequence: Synthetic oligonucleotide
  Sense strand starting at position 1747 of SEQ ID NO: 586855
cucugaacgauguagacau

SEQ ID NO: 749083 - RNA, 19 nt, Artificial Sequence
  Description of Artificial Sequence: Synthetic oligonucleotide
  Antisense strand to SEQ ID NO: 749082
augucuacaucguucagag

SEQ ID NO: 749084 - RNA, 19 nt, Artificial Sequence
  Description of Artificial Sequence: Synthetic oligonucleotide
  Sense strand starting at position 1871 of SEQ ID NO: 586855
gggauaaguccugguggga

SEQ ID NO: 749085 - RNA, 19 nt, Artificial Sequence
  Description of Artificial Sequence: Synthetic oligonucleotide
  Antisense strand to SEQ ID NO: 749084
ucccaccaggacuuauccc

SEQ ID NO: 749086 - RNA, 19 nt, Artificial Sequence
  Description of Artificial Sequence: Synthetic oligonucleotide
  Sense strand starting at position 2063 of SEQ ID NO: 586855
gacccugggucucuugaaa

SEQ ID NO: 749087 - RNA, 19 nt, Artificial Sequence
  Description of Artificial Sequence: Synthetic oligonucleotide
  Antisense strand to SEQ ID NO: 749086
uuucaagagacccaggguc

SEQ ID NO: 749088 - RNA, 19 nt, Artificial Sequence
  Description of Artificial Sequence: Synthetic oligonucleotide
  Sense strand starting at position 2387 of SEQ ID NO: 586855
acgugaaacaauggaagua

SEQ ID NO: 749089 - RNA, 19 nt, Artificial Sequence
  Description of Artificial Sequence: Synthetic oligonucleotide
  Antisense strand to SEQ ID NO: 749088
uacuuccauuguuucacgu

SEQ ID NO: 749090 - RNA, 19 nt, Artificial Sequence
  Description of Artificial Sequence: Synthetic oligonucleotide
  Sense strand starting at position 2459 of SEQ ID NO: 586855
cuucuauucggauggaaug

SEQ ID NO: 749091 - RNA, 19 nt, Artificial Sequence
  Description of Artificial Sequence: Synthetic oligonucleotide
  Antisense strand to SEQ ID NO: 749090
cauuccauccgaauagaag

SEQ ID NO: 749092 - RNA, 19 nt, Artificial Sequence
  Description of Artificial Sequence: Synthetic oligonucleotide
  Sense strand starting at position 2461 of SEQ ID NO: 586855
ucuauucggauggaaugua

SEQ ID NO: 749093 - RNA, 19 nt, Artificial Sequence
  Description of Artificial Sequence: Synthetic oligonucleotide
  Antisense strand to SEQ ID NO: 749092
uacauuccauccgaauaga

SEQ ID NO: 749094 - RNA, 19 nt, Artificial Sequence
  Description of Artificial Sequence: Synthetic oligonucleotide
  Sense strand starting at position 2532 of SEQ ID NO: 586855
uguauacuucuaggaaucu

SEQ ID NO: 749095 - RNA, 19 nt, Artificial Sequence
  Description of Artificial Sequence: Synthetic oligonucleotide
  Antisense strand to SEQ ID NO: 749094
agauuccuagaaguauaca

SEQ ID NO: 749096 - RNA, 19 nt, Artificial Sequence
  Description of Artificial Sequence: Synthetic oligonucleotide
  Sense strand starting at position 2662 of SEQ ID NO: 586855
auacuacuucuaggguaua

SEQ ID NO: 749097 - RNA, 19 nt, Artificial Sequence
  Description of Artificial Sequence: Synthetic oligonucleotide
  Antisense strand to SEQ ID NO: 749096
uauacccuagaaguaguau

SEQ ID NO: 749098 - RNA, 19 nt, Artificial Sequence
  Description of Artificial Sequence: Synthetic oligonucleotide
  Sense strand starting at position 2818 of SEQ ID NO: 586855
uguaaucauguggaaaugu

SEQ ID NO: 749099 - RNA, 19 nt, Artificial Sequence
  Description of Artificial Sequence: Synthetic oligonucleotide
  Antisense strand to SEQ ID NO: 749098
acauuuccacaugauuaca

SEQ ID NO: 749100 - RNA, 19 nt, Artificial Sequence
  Description of Artificial Sequence: Synthetic oligonucleotide
  Sense strand starting at position 2855 of SEQ ID NO: 586855
aagguaaagucagucacaa

SEQ ID NO: 749101 - RNA, 19 nt, Artificial Sequence
  Description of Artificial Sequence: Synthetic oligonucleotide
  Antisense strand to SEQ ID NO: 749100
uugugacugacuuuaccuu

SEQ ID NO: 749102 - RNA, 19 nt, Artificial Sequence
  Description of Artificial Sequence: Synthetic oligonucleotide
  Sense strand starting at position 2925 of SEQ ID NO: 586855
auccaauuagcauggaagu

SEQ ID NO: 749103 - RNA, 19 nt, Artificial Sequence
  Description of Artificial Sequence: Synthetic oligonucleotide
  Antisense strand to SEQ ID NO: 749102
acuuccaugcuaauuggau

SEQ ID NO: 749104 - RNA, 19 nt, Artificial Sequence
  Description of Artificial Sequence: Synthetic oligonucleotide
  Sense strand starting at position 2979 of SEQ ID NO: 586855
gguugugagaguugagaau

SEQ ID NO: 749105 - RNA, 19 nt, Artificial Sequence
  Description of Artificial Sequence: Synthetic oligonucleotide
  Antisense strand to SEQ ID NO: 749104
auucucaacucucacaacc

SEQ ID NO: 749106 - RNA, 19 nt, Artificial Sequence
  Description of Artificial Sequence: Synthetic oligonucleotide
  Sense strand starting at position 3372 of SEQ ID NO: 586855
auguguuggguucaugaau

SEQ ID NO: 749107 - RNA, 19 nt, Artificial Sequence
  Description of Artificial Sequence: Synthetic oligonucleotide
  Antisense strand to SEQ ID NO: 749106
auucaugaacccaacacau

SEQ ID NO: 749108 - RNA, 19 nt, Artificial Sequence
  Description of Artificial Sequence: Synthetic oligonucleotide
  Sense strand starting at position 3940 of SEQ ID NO: 586855
cccauacuugguugcauuu

SEQ ID NO: 749109 - RNA, 19 nt, Artificial Sequence
  Description of Artificial Sequence: Synthetic oligonucleotide
  Antisense strand to SEQ ID NO: 749108
aaaugcaaccaaguauggg

SEQ ID NO: 749110 - RNA, 19 nt, Artificial Sequence
  Description of Artificial Sequence: Synthetic oligonucleotide
  Sense strand starting at position 97 of SEQ ID NO: 586856
acaggugaacgguauuaau

SEQ ID NO: 749111 - RNA, 19 nt, Artificial Sequence
  Description of Artificial Sequence: Synthetic oligonucleotide
  Antisense strand to SEQ ID NO: 749110
auuaauaccguucaccugu

SEQ ID NO: 749112 - RNA, 19 nt, Artificial Sequence
  Description of Artificial Sequence: Synthetic oligonucleotide
  Sense strand starting at position 111 of SEQ ID NO: 586856
uuaauuaguccauggucaa

SEQ ID NO: 749113 - RNA, 19 nt, Artificial Sequence
  Description of Artificial Sequence: Synthetic oligonucleotide
  Antisense strand to SEQ ID NO: 749112
uugaccauggacuaauuaa

SEQ ID NO: 749114 - RNA, 19 nt, Artificial Sequence
  Description of Artificial Sequence: Synthetic oligonucleotide
  Sense strand starting at position 114 of SEQ ID NO: 586856
auuaguccauggucaaaca

SEQ ID NO: 749115 - RNA, 19 nt, Artificial Sequence
  Description of Artificial Sequence: Synthetic oligonucleotide
  Antisense strand to SEQ ID NO: 749114
uguuugaccauggacuaau

SEQ ID NO: 749116 - RNA, 19 nt, Artificial Sequence
  Description of Artificial Sequence: Synthetic oligonucleotide
  Sense strand starting at position 123 of SEQ ID NO: 586856
uggucaaacagucacgaaa

SEQ ID NO: 749117 - RNA, 19 nt, Artificial Sequence
  Description of Artificial Sequence: Synthetic oligonucleotide
  Antisense strand to SEQ ID NO: 749116
uuucgugacuguuugacca

SEQ ID NO: 749118 - RNA, 19 nt, Artificial Sequence
  Description of Artificial Sequence: Synthetic oligonucleotide
  Sense strand starting at position 192 of SEQ ID NO: 586856
augagauacuuaggagaau

SEQ ID NO: 749119 - RNA, 19 nt, Artificial Sequence
  Description of Artificial Sequence: Synthetic oligonucleotide
  Antisense strand to SEQ ID NO: 749118
auucuccuaaguaucucau

SEQ ID NO: 749120 - RNA, 19 nt, Artificial Sequence
  Description of Artificial Sequence: Synthetic oligonucleotide
  Sense strand starting at position 193 of SEQ ID NO: 586856
ugagauacuuaggagaauu

SEQ ID NO: 749121 - RNA, 19 nt, Artificial Sequence
  Description of Artificial Sequence: Synthetic oligonucleotide
  Antisense strand to SEQ ID NO: 749120
aauucuccuaaguaucuca

SEQ ID NO: 749122 - RNA, 19 nt, Artificial Sequence
  Description of Artificial Sequence: Synthetic oligonucleotide
  Sense strand starting at position 232 of SEQ ID NO: 586856
ggacaagcuuaugauauuu

SEQ ID NO: 749123 - RNA, 19 nt, Artificial Sequence
  Description of Artificial Sequence: Synthetic oligonucleotide
  Antisense strand to SEQ ID NO: 749122
aaauaucauaagcuugucc

SEQ ID NO: 749124 - RNA, 19 nt, Artificial Sequence
  Description of Artificial Sequence: Synthetic oligonucleotide
  Sense strand starting at position 278 of SEQ ID NO: 586856
gaccacuucugccuuguga

SEQ ID NO: 749125 - RNA, 19 nt, Artificial Sequence
  Description of Artificial Sequence: Synthetic oligonucleotide
  Antisense strand to SEQ ID NO: 749124
ucacaaggcagaagugguc

SEQ ID NO: 749126 - RNA, 19 nt, Artificial Sequence
  Description of Artificial Sequence: Synthetic oligonucleotide
  Sense strand starting at position 280 of SEQ ID NO: 586856
ccacuucugccuugugacu

SEQ ID NO: 749127 - RNA, 19 nt, Artificial Sequence
  Description of Artificial Sequence: Synthetic oligonucleotide
  Antisense strand to SEQ ID NO: 749126
agucacaaggcagaagugg

SEQ ID NO: 749128 - RNA, 19 nt, Artificial Sequence
  Description of Artificial Sequence: Synthetic oligonucleotide
  Sense strand starting at position 302 of SEQ ID NO: 586856
aaagaagcaugucuagacu

SEQ ID NO: 749129 - RNA, 19 nt, Artificial Sequence
  Description of Artificial Sequence: Synthetic oligonucleotide
  Antisense strand to SEQ ID NO: 749128
agucuagacaugcuucuuu

SEQ ID NO: 749130 - RNA, 19 nt, Artificial Sequence
  Description of Artificial Sequence: Synthetic oligonucleotide
  Sense strand starting at position 305 of SEQ ID NO: 586856
gaagcaugucuagacuuaa

SEQ ID NO: 749131 - RNA, 19 nt, Artificial Sequence
  Description of Artificial Sequence: Synthetic oligonucleotide
  Antisense strand to SEQ ID NO: 749130
uuaagucuagacaugcuuc

SEQ ID NO: 749132 - RNA, 19 nt, Artificial Sequence
  Description of Artificial Sequence: Synthetic oligonucleotide
  Sense strand starting at position 371 of SEQ ID NO: 586856
cccaaucuugcgucuguuu

SEQ ID NO: 749133 - RNA, 19 nt, Artificial Sequence
  Description of Artificial Sequence: Synthetic oligonucleotide
  Antisense strand to SEQ ID NO: 749132
aaacagacgcaagauuggg

SEQ ID NO: 749134 - RNA, 19 nt, Artificial Sequence
  Description of Artificial Sequence: Synthetic oligonucleotide
  Sense strand starting at position 402 of SEQ ID NO: 586856
ggcugacgguugagaugaa

SEQ ID NO: 749135 - RNA, 19 nt, Artificial Sequence
  Description of Artificial Sequence: Synthetic oligonucleotide
  Antisense strand to SEQ ID NO: 749134
uucaucucaaccgucagcc

SEQ ID NO: 749136 - RNA, 19 nt, Artificial Sequence
  Description of Artificial Sequence: Synthetic oligonucleotide
  Sense strand starting at position 484 of SEQ ID NO: 586856
gcaacucaacucuggagaa

SEQ ID NO: 749137 - RNA, 19 nt, Artificial Sequence
  Description of Artificial Sequence: Synthetic oligonucleotide
  Antisense strand to SEQ ID NO: 749136
uucuccagaguugaguugc

SEQ ID NO: 749138 - RNA, 19 nt, Artificial Sequence
  Description of Artificial Sequence: Synthetic oligonucleotide
  Sense strand starting at position 886 of SEQ ID NO: 586856
gaggaagucugaucgccua

SEQ ID NO: 749139 - RNA, 19 nt, Artificial Sequence
  Description of Artificial Sequence: Synthetic oligonucleotide
  Antisense strand to SEQ ID NO: 749138
uaggcgaucagacuuccuc

SEQ ID NO: 749140 - RNA, 19 nt, Artificial Sequence
  Description of Artificial Sequence: Synthetic oligonucleotide
  Sense strand starting at position 1023 of SEQ ID NO: 586856
aaaguucuuucgguacaaa

SEQ ID NO: 749141 - RNA, 19 nt, Artificial Sequence
  Description of Artificial Sequence: Synthetic oligonucleotide
  Antisense strand to SEQ ID NO: 749140
uuuguaccgaaagaacuuu

SEQ ID NO: 749142 - RNA, 19 nt, Artificial Sequence
  Description of Artificial Sequence: Synthetic oligonucleotide
  Sense strand starting at position 1154 of SEQ ID NO: 586856
gugguaagguguccugaug

SEQ ID NO: 749143 - RNA, 19 nt, Artificial Sequence
  Description of Artificial Sequence: Synthetic oligonucleotide
  Antisense strand to SEQ ID NO: 749142
caucaggacaccuuaccac

SEQ ID NO: 749144 - RNA, 19 nt, Artificial Sequence
  Description of Artificial Sequence: Synthetic oligonucleotide
  Sense strand starting at position 1216 of SEQ ID NO: 586856
caacuuugugagcacggaa

SEQ ID NO: 749145 - RNA, 19 nt, Artificial Sequence
  Description of Artificial Sequence: Synthetic oligonucleotide
  Antisense strand to SEQ ID NO: 749144
uuccgugcucacaaaguug

SEQ ID NO: 749146 - RNA, 19 nt, Artificial Sequence
  Description of Artificial Sequence: Synthetic oligonucleotide
  Sense strand starting at position 1242 of SEQ ID NO: 586856
guacgaauugcgcaaggaa

SEQ ID NO: 749147 - RNA, 19 nt, Artificial Sequence
  Description of Artificial Sequence: Synthetic oligonucleotide
  Antisense strand to SEQ ID NO: 749146
uuccuugcgcaauucguac

SEQ ID NO: 749148 - RNA, 19 nt, Artificial Sequence
  Description of Artificial Sequence: Synthetic oligonucleotide
  Sense strand starting at position 2066 of SEQ ID NO: 586856
ugaggugucugauuggaga

SEQ ID NO: 749149 - RNA, 19 nt, Artificial Sequence
  Description of Artificial Sequence: Synthetic oligonucleotide
  Antisense strand to SEQ ID NO: 749148
ucuccaaucagacaccuca

SEQ ID NO: 749150 - RNA, 19 nt, Artificial Sequence
  Description of Artificial Sequence: Synthetic oligonucleotide
  Sense strand starting at position 2068 of SEQ ID NO: 586856
aggugucugauuggagaaa

SEQ ID NO: 749151 - RNA, 19 nt, Artificial Sequence
  Description of Artificial Sequence: Synthetic oligonucleotide
  Antisense strand to SEQ ID NO: 749150
uuucuccaaucagacaccu

SEQ ID NO: 749152 - RNA, 19 nt, Artificial Sequence
  Description of Artificial Sequence: Synthetic oligonucleotide
  Sense strand starting at position 2107 of SEQ ID NO: 586856
ccgaccgacuccuugagaa

SEQ ID NO: 749153 - RNA, 19 nt, Artificial Sequence
  Description of Artificial Sequence: Synthetic oligonucleotide
  Antisense strand to SEQ ID NO: 749152
uucucaaggagucggucgg

SEQ ID NO: 749154 - RNA, 19 nt, Artificial Sequence
  Description of Artificial Sequence: Synthetic oligonucleotide
  Sense strand starting at position 2111 of SEQ ID NO: 586856
ccgacuccuugagaagaaa

SEQ ID NO: 749155 - RNA, 19 nt, Artificial Sequence
  Description of Artificial Sequence: Synthetic oligonucleotide
  Antisense strand to SEQ ID NO: 749154
uuucuucucaaggagucgg

SEQ ID NO: 749156 - RNA, 19 nt, Artificial Sequence
  Description of Artificial Sequence: Synthetic oligonucleotide
  Sense strand starting at position 2325 of SEQ ID NO: 586856
guugaaaggcuguaauuaa

SEQ ID NO: 749157 - RNA, 19 nt, Artificial Sequence
  Description of Artificial Sequence: Synthetic oligonucleotide
  Antisense strand to SEQ ID NO: 749156
uuaauuacagccuuucaac

SEQ ID NO: 749158 - RNA, 19 nt, Artificial Sequence
  Description of Artificial Sequence: Synthetic oligonucleotide
  Sense strand starting at position 2382 of SEQ ID NO: 586856
cuuucuguggauugucauu

SEQ ID NO: 749159 - RNA, 19 nt, Artificial Sequence
  Description of Artificial Sequence: Synthetic oligonucleotide
  Antisense strand to SEQ ID NO: 749158
aaugacaauccacagaaag

SEQ ID NO: 749160 - RNA, 19 nt, Artificial Sequence
  Description of Artificial Sequence: Synthetic oligonucleotide
  Sense strand starting at position 2661 of SEQ ID NO: 586856
caacgagggcaguguaaau

SEQ ID NO: 749161 - RNA, 19 nt, Artificial Sequence
  Description of Artificial Sequence: Synthetic oligonucleotide
  Antisense strand to SEQ ID NO: 749160
auuuacacugcccucguug

SEQ ID NO: 749162 - RNA, 19 nt, Artificial Sequence
  Description of Artificial Sequence: Synthetic oligonucleotide
  Sense strand starting at position 2713 of SEQ ID NO: 586856
gauugcacuccuggucaca

SEQ ID NO: 749163 - RNA, 19 nt, Artificial Sequence
  Description of Artificial Sequence: Synthetic oligonucleotide
  Antisense strand to SEQ ID NO: 749162
ugugaccaggagugcaauc

SEQ ID NO: 749164 - RNA, 19 nt, Artificial Sequence
  Description of Artificial Sequence: Synthetic oligonucleotide
  Sense strand starting at position 2715 of SEQ ID NO: 586856
uugcacuccuggucacaua

SEQ ID NO: 749165 - RNA, 19 nt, Artificial Sequence
  Description of Artificial Sequence: Synthetic oligonucleotide
  Antisense strand to SEQ ID NO: 749164
uaugugaccaggagugcaa

SEQ ID NO: 749166 - RNA, 19 nt, Artificial Sequence
  Description of Artificial Sequence: Synthetic oligonucleotide
  Sense strand starting at position 2716 of SEQ ID NO: 586856
ugcacuccuggucacauaa

SEQ ID NO: 749167 - RNA, 19 nt, Artificial Sequence
  Description of Artificial Sequence: Synthetic oligonucleotide
  Antisense strand to SEQ ID NO: 749166
uuaugugaccaggagugca

SEQ ID NO: 749168 - RNA, 19 nt, Artificial Sequence
  Description of Artificial Sequence: Synthetic oligonucleotide
  Sense strand starting at position 3163 of SEQ ID NO: 586856
gauguuccuugagcucaua

SEQ ID NO: 749169 - RNA, 19 nt, Artificial Sequence
  Description of Artificial Sequence: Synthetic oligonucleotide
  Antisense strand to SEQ ID NO: 749168
uaugagcucaaggaacauc

SEQ ID NO: 749170 - RNA, 19 nt, Artificial Sequence
  Description of Artificial Sequence: Synthetic oligonucleotide
  Sense strand starting at position 3221 of SEQ ID NO: 586856
cugagcaucucuguuguga

SEQ ID NO: 749171 - RNA, 19 nt, Artificial Sequence
  Description of Artificial Sequence: Synthetic oligonucleotide
  Antisense strand to SEQ ID NO: 749170
ucacaacagagaugcucag

SEQ ID NO: 749172 - RNA, 19 nt, Artificial Sequence
  Description of Artificial Sequence: Synthetic oligonucleotide
  Sense strand starting at position 3704 of SEQ ID NO: 586856
uugggauucuuugaauuuc

SEQ ID NO: 749173 - RNA, 19 nt, Artificial Sequence
  Description of Artificial Sequence: Synthetic oligonucleotide
  Antisense strand to SEQ ID NO: 749172
gaaauucaaagaaucccaa

SEQ ID NO: 749174 - RNA, 19 nt, Artificial Sequence
  Description of Artificial Sequence: Synthetic oligonucleotide
  Sense strand starting at position 3722 of SEQ ID NO: 586856
cuaugauaugcacagcaca

SEQ ID NO: 749175 - RNA, 19 nt, Artificial Sequence
  Description of Artificial Sequence: Synthetic oligonucleotide
  Antisense strand to SEQ ID NO: 749174
ugugcugugcauaucauag

SEQ ID NO: 749176 - RNA, 19 nt, Artificial Sequence
  Description of Artificial Sequence: Synthetic oligonucleotide
  Sense strand starting at position 3764 of SEQ ID NO: 586856
uuauauauuucucgggauu

SEQ ID NO: 749177 - RNA, 19 nt, Artificial Sequence
  Description of Artificial Sequence: Synthetic oligonucleotide
  Antisense strand to SEQ ID NO: 749176
aaucccgagaaauauauaa

SEQ ID NO: 749178 - RNA, 19 nt, Artificial Sequence
  Description of Artificial Sequence: Synthetic oligonucleotide
  Sense strand starting at position 3766 of SEQ ID NO: 586856
auauauuucucgggauuac

SEQ ID NO: 749179 - RNA, 19 nt, Artificial Sequence
  Description of Artificial Sequence: Synthetic oligonucleotide
  Antisense strand to SEQ ID NO: 749178
guaaucccgagaaauauau

SEQ ID NO: 749180 - RNA, 19 nt, Artificial Sequence
  Description of Artificial Sequence: Synthetic oligonucleotide
  Sense strand starting at position 3873 of SEQ ID NO: 586856
gugccauuacuuuacagau

SEQ ID NO: 749181 - RNA, 19 nt, Artificial Sequence
  Description of Artificial Sequence: Synthetic oligonucleotide
  Antisense strand to SEQ ID NO: 749180
aucuguaaaguaauggcac

SEQ ID NO: 749182 - RNA, 19 nt, Artificial Sequence
  Description of Artificial Sequence: Synthetic oligonucleotide
  Sense strand starting at position 3892 of SEQ ID NO: 586856
gaaauugaaucauggaaga

SEQ ID NO: 749183 - RNA, 19 nt, Artificial Sequence
  Description of Artificial Sequence: Synthetic oligonucleotide
  Antisense strand to SEQ ID NO: 749182
ucuuccaugauucaauuuc

SEQ ID NO: 749184 - RNA, 19 nt, Artificial Sequence
  Description of Artificial Sequence: Synthetic oligonucleotide
  Sense strand starting at position 3903 of SEQ ID NO: 586856
auggaagaaugccuuuauc

SEQ ID NO: 749185 - RNA, 19 nt, Artificial Sequence
  Description of Artificial Sequence: Synthetic oligonucleotide
  Antisense strand to SEQ ID NO: 749184
gauaaaggcauucuuccau

SEQ ID NO: 749186 - RNA, 19 nt, Artificial Sequence
  Description of Artificial Sequence: Synthetic oligonucleotide
  Sense strand starting at position 3909 of SEQ ID NO: 586856
gaaugccuuuaucugagga

SEQ ID NO: 749187 - RNA, 19 nt, Artificial Sequence
  Description of Artificial Sequence: Synthetic oligonucleotide
  Antisense strand to SEQ ID NO: 749186
uccucagauaaaggcauuc

SEQ ID NO: 749188 - RNA, 19 nt, Artificial Sequence
  Description of Artificial Sequence: Synthetic oligonucleotide
  Sense strand starting at position 3914 of SEQ ID NO: 586856
ccuuuaucugaggagucau

SEQ ID NO: 749189 - RNA, 19 nt, Artificial Sequence
  Description of Artificial Sequence: Synthetic oligonucleotide
  Antisense strand to SEQ ID NO: 749188
augacuccucagauaaagg

SEQ ID NO: 749190 - RNA, 19 nt, Artificial Sequence
  Description of Artificial Sequence: Synthetic oligonucleotide
  Sense strand starting at position 141 of SEQ ID NO: 586857
aguuaagucccagguugag

SEQ ID NO: 749191 - RNA, 19 nt, Artificial Sequence
  Description of Artificial Sequence: Synthetic oligonucleotide
  Antisense strand to SEQ ID NO: 749190
cucaaccugggacuuaacu

SEQ ID NO: 749192 - RNA, 19 nt, Artificial Sequence
  Description of Artificial Sequence: Synthetic oligonucleotide
  Sense strand starting at position 170 of SEQ ID NO: 586857
gaggccucacuuugaggua

SEQ ID NO: 749193 - RNA, 19 nt, Artificial Sequence
  Description of Artificial Sequence: Synthetic oligonucleotide
  Antisense strand to SEQ ID NO: 749192
uaccucaaagugaggccuc

SEQ ID NO: 749194 - RNA, 19 nt, Artificial Sequence
  Description of Artificial Sequence: Synthetic oligonucleotide
  Sense strand starting at position 341 of SEQ ID NO: 586857
gggacucaguuguucagca

SEQ ID NO: 749195 - RNA, 19 nt, Artificial Sequence
  Description of Artificial Sequence: Synthetic oligonucleotide
  Antisense strand to SEQ ID NO: 749194
ugcugaacaacugaguccc

SEQ ID NO: 749196 - RNA, 19 nt, Artificial Sequence
  Description of Artificial Sequence: Synthetic oligonucleotide
  Sense strand starting at position 454 of SEQ ID NO: 586857
agaggcuucugaucucaga

SEQ ID NO: 749197 - RNA, 19 nt, Artificial Sequence
  Description of Artificial Sequence: Synthetic oligonucleotide
  Antisense strand to SEQ ID NO: 749196
ucugagaucagaagccucu

SEQ ID NO: 749198 - RNA, 19 nt, Artificial Sequence
  Description of Artificial Sequence: Synthetic oligonucleotide
  Sense strand starting at position 632 of SEQ ID NO: 586857
gggcccucauccuuaacua

SEQ ID NO: 749199 - RNA, 19 nt, Artificial Sequence
  Description of Artificial Sequence: Synthetic oligonucleotide
  Antisense strand to SEQ ID NO: 749198
uaguuaaggaugagggccc

SEQ ID NO: 749200 - RNA, 19 nt, Artificial Sequence
  Description of Artificial Sequence: Synthetic oligonucleotide
  Sense strand starting at position 670 of SEQ ID NO: 586857
ugggcuuccagacauggau

SEQ ID NO: 749201 - RNA, 19 nt, Artificial Sequence
  Description of Artificial Sequence: Synthetic oligonucleotide
  Antisense strand to SEQ ID NO: 749200
auccaugucuggaagccca

SEQ ID NO: 749202 - RNA, 19 nt, Artificial Sequence
  Description of Artificial Sequence: Synthetic oligonucleotide
  Sense strand starting at position 748 of SEQ ID NO: 586857
gcacccuucugggcauaua

SEQ ID NO: 749203 - RNA, 19 nt, Artificial Sequence
  Description of Artificial Sequence: Synthetic oligonucleotide
  Antisense strand to SEQ ID NO: 749202
uauaugcccagaagggugc

SEQ ID NO: 749204 - RNA, 19 nt, Artificial Sequence
  Description of Artificial Sequence: Synthetic oligonucleotide
  Sense strand starting at position 757 of SEQ ID NO: 586857
ugggcauauaacugugaac

SEQ ID NO: 749205 - RNA, 19 nt, Artificial Sequence
  Description of Artificial Sequence: Synthetic oligonucleotide
  Antisense strand to SEQ ID NO: 749204
guucacaguuauaugccca

SEQ ID NO: 749206 - RNA, 19 nt, Artificial Sequence
  Description of Artificial Sequence: Synthetic oligonucleotide
  Sense strand starting at position 759 of SEQ ID NO: 586857
ggcauauaacugugaacaa

SEQ ID NO: 749207 - RNA, 19 nt, Artificial Sequence
  Description of Artificial Sequence: Synthetic oligonucleotide
  Antisense strand to SEQ ID NO: 749206
uuguucacaguuauaugcc

SEQ ID NO: 749208 - RNA, 19 nt, Artificial Sequence
  Description of Artificial Sequence: Synthetic oligonucleotide
  Sense strand starting at position 786 of SEQ ID NO: 586857
uuccgaugucuugaccuau

SEQ ID NO: 749209 - RNA, 19 nt, Artificial Sequence
  Description of Artificial Sequence: Synthetic oligonucleotide
  Antisense strand to SEQ ID NO: 749208
auaggucaagacaucggaa

SEQ ID NO: 749210 - RNA, 19 nt, Artificial Sequence
  Description of Artificial Sequence: Synthetic oligonucleotide
  Sense strand starting at position 1457 of SEQ ID NO: 586857
gcauguacuguacagagau

SEQ ID NO: 749211 - RNA, 19 nt, Artificial Sequence
  Description of Artificial Sequence: Synthetic oligonucleotide
  Antisense strand to SEQ ID NO: 749210
aucucuguacaguacaugc

SEQ ID NO: 749212 - RNA, 19 nt, Artificial Sequence
  Description of Artificial Sequence: Synthetic oligonucleotide
  Sense strand starting at position 2378 of SEQ ID NO: 586857
ccguuugcuaaguagaagu

SEQ ID NO: 749213 - RNA, 19 nt, Artificial Sequence
  Description of Artificial Sequence: Synthetic oligonucleotide
  Antisense strand to SEQ ID NO: 749212
acuucuacuuagcaaacgg

SEQ ID NO: 749214 - RNA, 19 nt, Artificial Sequence
  Description of Artificial Sequence: Synthetic oligonucleotide
  Sense strand starting at position 2416 of SEQ ID NO: 586857
ccuuuaucucaugaguccu

SEQ ID NO: 749215 - RNA, 19 nt, Artificial Sequence
  Description of Artificial Sequence: Synthetic oligonucleotide
  Antisense strand to SEQ ID NO: 749214
aggacucaugagauaaagg

SEQ ID NO: 749216 - RNA, 19 nt, Artificial Sequence
  Description of Artificial Sequence: Synthetic oligonucleotide
  Sense strand starting at position 2455 of SEQ ID NO: 586857
cgccacuuugcagacaauu

SEQ ID NO: 749217 - RNA, 19 nt, Artificial Sequence
  Description of Artificial Sequence: Synthetic oligonucleotide
  Antisense strand to SEQ ID NO: 749216
aauugucugcaaaguggcg

SEQ ID NO: 749218 - RNA, 19 nt, Artificial Sequence
  Description of Artificial Sequence: Synthetic oligonucleotide
  Sense strand starting at position 2511 of SEQ ID NO: 586857
uugcacagcuugguagaaa

SEQ ID NO: 749219 - RNA, 19 nt, Artificial Sequence
  Description of Artificial Sequence: Synthetic oligonucleotide
  Antisense strand to SEQ ID NO: 749218
uuucuaccaagcugugcaa

SEQ ID NO: 749220 - RNA, 19 nt, Artificial Sequence
  Description of Artificial Sequence: Synthetic oligonucleotide
  Sense strand starting at position 2630 of SEQ ID NO: 586857
aaugccaaucccuguguga

SEQ ID NO: 749221 - RNA, 19 nt, Artificial Sequence
  Description of Artificial Sequence: Synthetic oligonucleotide
  Antisense strand to SEQ ID NO: 749220
ucacacagggauuggcauu

SEQ ID NO: 749222 - RNA, 19 nt, Artificial Sequence
  Description of Artificial Sequence: Synthetic oligonucleotide
  Sense strand starting at position 2632 of SEQ ID NO: 586857
ugccaaucccugugugaca

SEQ ID NO: 749223 - RNA, 19 nt, Artificial Sequence
  Description of Artificial Sequence: Synthetic oligonucleotide
  Antisense strand to SEQ ID NO: 749222
ugucacacagggauuggca

SEQ ID NO: 749224 - RNA, 19 nt, Artificial Sequence
  Description of Artificial Sequence: Synthetic oligonucleotide
  Sense strand starting at position 2633 of SEQ ID NO: 586857
gccaaucccugugugacau

SEQ ID NO: 749225 - RNA, 19 nt, Artificial Sequence
  Description of Artificial Sequence: Synthetic oligonucleotide
  Antisense strand to SEQ ID NO: 749224
augucacacagggauuggc

SEQ ID NO: 749226 - RNA, 19 nt, Artificial Sequence
  Description of Artificial Sequence: Synthetic oligonucleotide
  Sense strand starting at position 2689 of SEQ ID NO: 586857
ucagaaaugucugccagaa

SEQ ID NO: 749227 - RNA, 19 nt, Artificial Sequence
  Description of Artificial Sequence: Synthetic oligonucleotide
  Antisense strand to SEQ ID NO: 749226
uucuggcagacauuucuga

SEQ ID NO: 749228 - RNA, 19 nt, Artificial Sequence
  Description of Artificial Sequence: Synthetic oligonucleotide
  Sense strand starting at position 2726 of SEQ ID NO: 586857
gcuugugagaaguggauua

SEQ ID NO: 749229 - RNA, 19 nt, Artificial Sequence
  Description of Artificial Sequence: Synthetic oligonucleotide
  Antisense strand to SEQ ID NO: 749228
uaauccacuucucacaagc

SEQ ID NO: 749230 - RNA, 19 nt, Artificial Sequence
  Description of Artificial Sequence: Synthetic oligonucleotide
  Sense strand starting at position 2962 of SEQ ID NO: 586857
agaaauuaucugggcguga

SEQ ID NO: 749231 - RNA, 19 nt, Artificial Sequence
  Description of Artificial Sequence: Synthetic oligonucleotide
  Antisense strand to SEQ ID NO: 749230
ucacgcccagauaauuucu

SEQ ID NO: 749232 - RNA, 19 nt, Artificial Sequence
  Description of Artificial Sequence: Synthetic oligonucleotide
  Sense strand starting at position 2963 of SEQ ID NO: 586857
gaaauuaucugggcgugau

SEQ ID NO: 749233 - RNA, 19 nt, Artificial Sequence
  Description of Artificial Sequence: Synthetic oligonucleotide
  Antisense strand to SEQ ID NO: 749232
aucacgcccagauaauuuc

SEQ ID NO: 749234 - RNA, 19 nt, Artificial Sequence
  Description of Artificial Sequence: Synthetic oligonucleotide
  Sense strand starting at position 3219 of SEQ ID NO: 586857
ccgagcagucacuauguau

SEQ ID NO: 749235 - RNA, 19 nt, Artificial Sequence
  Description of Artificial Sequence: Synthetic oligonucleotide
  Antisense strand to SEQ ID NO: 749234
auacauagugacugcucgg

SEQ ID NO: 749236 - RNA, 19 nt, Artificial Sequence
  Description of Artificial Sequence: Synthetic oligonucleotide
  Sense strand starting at position 3222 of SEQ ID NO: 586857
agcagucacuauguauacu

SEQ ID NO: 749237 - RNA, 19 nt, Artificial Sequence
  Description of Artificial Sequence: Synthetic oligonucleotide
  Antisense strand to SEQ ID NO: 749236
aguauacauagugacugcu

SEQ ID NO: 749238 - RNA, 19 nt, Artificial Sequence
  Description of Artificial Sequence: Synthetic oligonucleotide
  Sense strand starting at position 3259 of SEQ ID NO: 586857
uguaguagugacuaacuga

SEQ ID NO: 749239 - RNA, 19 nt, Artificial Sequence
  Description of Artificial Sequence: Synthetic oligonucleotide
  Antisense strand to SEQ ID NO: 749238
ucaguuagucacuacuaca

SEQ ID NO: 749240 - RNA, 19 nt, Artificial Sequence
  Description of Artificial Sequence: Synthetic oligonucleotide
  Sense strand starting at position 3262 of SEQ ID NO: 586857
aguagugacuaacugaagu

SEQ ID NO: 749241 - RNA, 19 nt, Artificial Sequence
  Description of Artificial Sequence: Synthetic oligonucleotide
  Antisense strand to SEQ ID NO: 749240
acuucaguuagucacuacu

SEQ ID NO: 749242 - RNA, 19 nt, Artificial Sequence
  Description of Artificial Sequence: Synthetic oligonucleotide
  Sense strand starting at position 3442 of SEQ ID NO: 586857
gaugguggaugcuuuauaa

SEQ ID NO: 749243 - RNA, 19 nt, Artificial Sequence
  Description of Artificial Sequence: Synthetic oligonucleotide
  Antisense strand to SEQ ID NO: 749242
uuauaaagcauccaccauc

SEQ ID NO: 749244 - RNA, 19 nt, Artificial Sequence
  Description of Artificial Sequence: Synthetic oligonucleotide
  Sense strand starting at position 3570 of SEQ ID NO: 586857
ucuucuucucuugaagguu

SEQ ID NO: 749245 - RNA, 19 nt, Artificial Sequence
  Description of Artificial Sequence: Synthetic oligonucleotide
  Antisense strand to SEQ ID NO: 749244
aaccuucaagagaagaaga

SEQ ID NO: 749246 - RNA, 19 nt, Artificial Sequence
  Description of Artificial Sequence: Synthetic oligonucleotide
  Sense strand starting at position 3626 of SEQ ID NO: 586857
gcugguguugcuuaaagag

SEQ ID NO: 749247 - RNA, 19 nt, Artificial Sequence
  Description of Artificial Sequence: Synthetic oligonucleotide
  Antisense strand to SEQ ID NO: 749246
cucuuuaagcaacaccagc

SEQ ID NO: 749248 - RNA, 19 nt, Artificial Sequence
  Description of Artificial Sequence: Synthetic oligonucleotide
  Sense strand starting at position 3640 of SEQ ID NO: 586857
aagaguuaccuagggcaga

SEQ ID NO: 749249 - RNA, 19 nt, Artificial Sequence
  Description of Artificial Sequence: Synthetic oligonucleotide
  Antisense strand to SEQ ID NO: 749248
ucugcccuagguaacucuu

SEQ ID NO: 749250 - RNA, 19 nt, Artificial Sequence
  Description of Artificial Sequence: Synthetic oligonucleotide
  Sense strand starting at position 3653 of SEQ ID NO: 586857
ggcagauucugucucagua

SEQ ID NO: 749251 - RNA, 19 nt, Artificial Sequence
  Description of Artificial Sequence: Synthetic oligonucleotide
  Antisense strand to SEQ ID NO: 749250
uacugagacagaaucugcc

SEQ ID NO: 749252 - RNA, 19 nt, Artificial Sequence
  Description of Artificial Sequence: Synthetic oligonucleotide
  Sense strand starting at position 3657 of SEQ ID NO: 586857
gauucugucucaguaauug

SEQ ID NO: 749253 - RNA, 19 nt, Artificial Sequence
  Description of Artificial Sequence: Synthetic oligonucleotide
  Antisense strand to SEQ ID NO: 749252
caauuacugagacagaauc

SEQ ID NO: 749254 - RNA, 19 nt, Artificial Sequence
  Description of Artificial Sequence: Synthetic oligonucleotide
  Sense strand starting at position 3669 of SEQ ID NO: 586857
guaauugagagcuagcuua

SEQ ID NO: 749255 - RNA, 19 nt, Artificial Sequence
  Description of Artificial Sequence: Synthetic oligonucleotide
  Antisense strand to SEQ ID NO: 749254
uaagcuagcucucaauuac

SEQ ID NO: 749256 - RNA, 19 nt, Artificial Sequence
  Description of Artificial Sequence: Synthetic oligonucleotide
  Sense strand starting at position 3682 of SEQ ID NO: 586857
agcuuagcacuuuguggau

SEQ ID NO: 749257 - RNA, 19 nt, Artificial Sequence
  Description of Artificial Sequence: Synthetic oligonucleotide
  Antisense strand to SEQ ID NO: 749256
auccacaaagugcuaagcu

SEQ ID NO: 749258 - RNA, 19 nt, Artificial Sequence
  Description of Artificial Sequence: Synthetic oligonucleotide
  Sense strand starting at position 3697 of SEQ ID NO: 586857
ggauaugguccaugccuau

SEQ ID NO: 749259 - RNA, 19 nt, Artificial Sequence
  Description of Artificial Sequence: Synthetic oligonucleotide
  Antisense strand to SEQ ID NO: 749258
auaggcauggaccauaucc

SEQ ID NO: 749260 - RNA, 19 nt, Artificial Sequence
  Description of Artificial Sequence: Synthetic oligonucleotide
  Sense strand starting at position 3706 of SEQ ID NO: 586857
ccaugccuauuugauaagu

SEQ ID NO: 749261 - RNA, 19 nt, Artificial Sequence
  Description of Artificial Sequence: Synthetic oligonucleotide
  Antisense strand to SEQ ID NO: 749260
acuuaucaaauaggcaugg

SEQ ID NO: 749262 - RNA, 19 nt, Artificial Sequence
  Description of Artificial Sequence: Synthetic oligonucleotide
  Sense strand starting at position 3708 of SEQ ID NO: 586857
augccuauuugauaaguga

SEQ ID NO: 749263 - RNA, 19 nt, Artificial Sequence
  Description of Artificial Sequence: Synthetic oligonucleotide
  Antisense strand to SEQ ID NO: 749262
ucacuuaucaaauaggcau

SEQ ID NO: 749264 - RNA, 19 nt, Artificial Sequence
  Description of Artificial Sequence: Synthetic oligonucleotide
  Sense strand starting at position 3860 of SEQ ID NO: 586857
aacgauaaagucugggauu

SEQ ID NO: 749265 - RNA, 19 nt, Artificial Sequence
  Description of Artificial Sequence: Synthetic oligonucleotide
  Antisense strand to SEQ ID NO: 749264
aaucccagacuuuaucguu

SEQ ID NO: 749266 - RNA, 19 nt, Artificial Sequence
  Description of Artificial Sequence: Synthetic oligonucleotide
  Sense strand starting at position 3861 of SEQ ID NO: 586857
acgauaaagucugggauuu

SEQ ID NO: 749267 - RNA, 19 nt, Artificial Sequence
  Description of Artificial Sequence: Synthetic oligonucleotide
  Antisense strand to SEQ ID NO: 749266
aaaucccagacuuuaucgu

SEQ ID NO: 749268 - RNA, 19 nt, Artificial Sequence
  Description of Artificial Sequence: Synthetic oligonucleotide
  Sense strand starting at position 3863 of SEQ ID NO: 586857
gauaaagucugggauuuau

SEQ ID NO: 749269 - RNA, 19 nt, Artificial Sequence
  Description of Artificial Sequence: Synthetic oligonucleotide
  Antisense strand to SEQ ID NO: 749268
auaaaucccagacuuuauc

SEQ ID NO: 749270 - RNA, 19 nt, Artificial Sequence
  Description of Artificial Sequence: Synthetic oligonucleotide
  Sense strand starting at position 81 of SEQ ID NO: 586858
cauucuuggccuggugaga

SEQ ID NO: 749271 - RNA, 19 nt, Artificial Sequence
  Description of Artificial Sequence: Synthetic oligonucleotide
  Antisense strand to SEQ ID NO: 749270
ucucaccaggccaagaaug

SEQ ID NO: 749272 - RNA, 19 nt, Artificial Sequence
  Description of Artificial Sequence: Synthetic oligonucleotide
  Sense strand starting at position 168 of SEQ ID NO: 586858
augugaauucuugguccuu

SEQ ID NO: 749273 - RNA, 19 nt, Artificial Sequence
  Description of Artificial Sequence: Synthetic oligonucleotide
  Antisense strand to SEQ ID NO: 749272
aaggaccaagaauucacau

SEQ ID NO: 749274 - RNA, 19 nt, Artificial Sequence
  Description of Artificial Sequence: Synthetic oligonucleotide
  Sense strand starting at position 169 of SEQ ID NO: 586858
ugugaauucuugguccuua

SEQ ID NO: 749275 - RNA, 19 nt, Artificial Sequence
  Description of Artificial Sequence: Synthetic oligonucleotide
  Antisense strand to SEQ ID NO: 749274
uaaggaccaagaauucaca

SEQ ID NO: 749276 - RNA, 19 nt, Artificial Sequence
  Description of Artificial Sequence: Synthetic oligonucleotide
  Sense strand starting at position 170 of SEQ ID NO: 586858
gugaauucuugguccuuac

SEQ ID NO: 749277 - RNA, 19 nt, Artificial Sequence
  Description of Artificial Sequence: Synthetic oligonucleotide
  Antisense strand to SEQ ID NO: 749276
guaaggaccaagaauucac

SEQ ID NO: 749278 - RNA, 19 nt, Artificial Sequence
  Description of Artificial Sequence: Synthetic oligonucleotide
  Sense strand starting at position 388 of SEQ ID NO: 586858
ugacuuaauugcccuggga

SEQ ID NO: 749279 - RNA, 19 nt, Artificial Sequence
  Description of Artificial Sequence: Synthetic oligonucleotide
  Antisense strand to SEQ ID NO: 749278
ucccagggcaauuaaguca

SEQ ID NO: 749280 - RNA, 19 nt, Artificial Sequence
  Description of Artificial Sequence: Synthetic oligonucleotide
  Sense strand starting at position 390 of SEQ ID NO: 586858
acuuaauugcccugggaua

SEQ ID NO: 749281 - RNA, 19 nt, Artificial Sequence
  Description of Artificial Sequence: Synthetic oligonucleotide
  Antisense strand to SEQ ID NO: 749280
uaucccagggcaauuaagu

SEQ ID NO: 749282 - RNA, 19 nt, Artificial Sequence
  Description of Artificial Sequence: Synthetic oligonucleotide
  Sense strand starting at position 391 of SEQ ID NO: 586858
cuuaauugcccugggauag

SEQ ID NO: 749283 - RNA, 19 nt, Artificial Sequence
  Description of Artificial Sequence: Synthetic oligonucleotide
  Antisense strand to SEQ ID NO: 749282
cuaucccagggcaauuaag

SEQ ID NO: 749284 - RNA, 19 nt, Artificial Sequence
  Description of Artificial Sequence: Synthetic oligonucleotide
  Sense strand starting at position 438 of SEQ ID NO: 586858
cuuucuuaguuggcuuuaa

SEQ ID NO: 749285 - RNA, 19 nt, Artificial Sequence
  Description of Artificial Sequence: Synthetic oligonucleotide
  Antisense strand to SEQ ID NO: 749284
uuaaagccaacuaagaaag

SEQ ID NO: 749286 - RNA, 19 nt, Artificial Sequence
  Description of Artificial Sequence: Synthetic oligonucleotide
  Sense strand starting at position 439 of SEQ ID NO: 586858
uuucuuaguuggcuuuaau

SEQ ID NO: 749287 - RNA, 19 nt, Artificial Sequence
  Description of Artificial Sequence: Synthetic oligonucleotide
  Antisense strand to SEQ ID NO: 749286
auuaaagccaacuaagaaa

SEQ ID NO: 749288 - RNA, 19 nt, Artificial Sequence
  Description of Artificial Sequence: Synthetic oligonucleotide
  Sense strand starting at position 985 of SEQ ID NO: 586858
gcuuucugcuaauuagaaa

SEQ ID NO: 749289 - RNA, 19 nt, Artificial Sequence
  Description of Artificial Sequence: Synthetic oligonucleotide
  Antisense strand to SEQ ID NO: 749288
uuucuaauuagcagaaagc

SEQ ID NO: 749290 - RNA, 19 nt, Artificial Sequence
  Description of Artificial Sequence: Synthetic oligonucleotide
  Sense strand starting at position 1278 of SEQ ID NO: 586858
cuggauugucaggauucuu

SEQ ID NO: 749291 - RNA, 19 nt, Artificial Sequence
  Description of Artificial Sequence: Synthetic oligonucleotide
  Antisense strand to SEQ ID NO: 749290
aagaauccugacaauccag

SEQ ID NO: 749292 - RNA, 19 nt, Artificial Sequence
  Description of Artificial Sequence: Synthetic oligonucleotide
  Sense strand starting at position 1431 of SEQ ID NO: 586858
guuauuggccaauaggaca

SEQ ID NO: 749293 - RNA, 19 nt, Artificial Sequence
  Description of Artificial Sequence: Synthetic oligonucleotide
  Antisense strand to SEQ ID NO: 749292
uguccuauuggccaauaac

SEQ ID NO: 749294 - RNA, 19 nt, Artificial Sequence
  Description of Artificial Sequence: Synthetic oligonucleotide
  Sense strand starting at position 1465 of SEQ ID NO: 586858
ggcugcauggcuggaaaua

SEQ ID NO: 749295 - RNA, 19 nt, Artificial Sequence
  Description of Artificial Sequence: Synthetic oligonucleotide
  Antisense strand to SEQ ID NO: 749294
uauuuccagccaugcagcc

SEQ ID NO: 749296 - RNA, 19 nt, Artificial Sequence
  Description of Artificial Sequence: Synthetic oligonucleotide
  Sense strand starting at position 1466 of SEQ ID NO: 586858
gcugcauggcuggaaauau

SEQ ID NO: 749297 - RNA, 19 nt, Artificial Sequence
  Description of Artificial Sequence: Synthetic oligonucleotide
  Antisense strand to SEQ ID NO: 749296
auauuuccagccaugcagc

SEQ ID NO: 749298 - RNA, 19 nt, Artificial Sequence
  Description of Artificial Sequence: Synthetic oligonucleotide
  Sense strand starting at position 1562 of SEQ ID NO: 586858
gagucucuggcaugaguaa

SEQ ID NO: 749299 - RNA, 19 nt, Artificial Sequence
  Description of Artificial Sequence: Synthetic oligonucleotide
  Antisense strand to SEQ ID NO: 749298
uuacucaugccagagacuc

SEQ ID NO: 749300 - RNA, 19 nt, Artificial Sequence
  Description of Artificial Sequence: Synthetic oligonucleotide
  Sense strand starting at position 1563 of SEQ ID NO: 586858
agucucuggcaugaguaau

SEQ ID NO: 749301 - RNA, 19 nt, Artificial Sequence
  Description of Artificial Sequence: Synthetic oligonucleotide
  Antisense strand to SEQ ID NO: 749300
auuacucaugccagagacu

SEQ ID NO: 749302 - RNA, 19 nt, Artificial Sequence
  Description of Artificial Sequence: Synthetic oligonucleotide
  Sense strand starting at position 1669 of SEQ ID NO: 586858
gcuucauuucgugggacag

SEQ ID NO: 749303 - RNA, 19 nt, Artificial Sequence
  Description of Artificial Sequence: Synthetic oligonucleotide
  Antisense strand to SEQ ID NO: 749302
cugucccacgaaaugaagc

SEQ ID NO: 749304 - RNA, 19 nt, Artificial Sequence
  Description of Artificial Sequence: Synthetic oligonucleotide
  Sense strand starting at position 1872 of SEQ ID NO: 586858
guaagaauggaagggcauu

SEQ ID NO: 749305 - RNA, 19 nt, Artificial Sequence
  Description of Artificial Sequence: Synthetic oligonucleotide
  Antisense strand to SEQ ID NO: 749304
aaugcccuuccauucuuac

SEQ ID NO: 749306 - RNA, 19 nt, Artificial Sequence
  Description of Artificial Sequence: Synthetic oligonucleotide
  Sense strand starting at position 1884 of SEQ ID NO: 586858
gggcauuugucggccagga

SEQ ID NO: 749307 - RNA, 19 nt, Artificial Sequence
  Description of Artificial Sequence: Synthetic oligonucleotide
  Antisense strand to SEQ ID NO: 749306
uccuggccgacaaaugccc

SEQ ID NO: 749308 - RNA, 19 nt, Artificial Sequence
  Description of Artificial Sequence: Synthetic oligonucleotide
  Sense strand starting at position 1886 of SEQ ID NO: 586858
gcauuugucggccaggaac

SEQ ID NO: 749309 - RNA, 19 nt, Artificial Sequence
  Description of Artificial Sequence: Synthetic oligonucleotide
  Antisense strand to SEQ ID NO: 749308
guuccuggccgacaaaugc

SEQ ID NO: 749310 - RNA, 19 nt, Artificial Sequence
  Description of Artificial Sequence: Synthetic oligonucleotide
  Sense strand starting at position 2149 of SEQ ID NO: 586858
acucucuggguuugugauu

SEQ ID NO: 749311 - RNA, 19 nt, Artificial Sequence
  Description of Artificial Sequence: Synthetic oligonucleotide
  Antisense strand to SEQ ID NO: 749310
aaucacaaacccagagagu

SEQ ID NO: 749312 - RNA, 19 nt, Artificial Sequence
  Description of Artificial Sequence: Synthetic oligonucleotide
  Sense strand starting at position 2154 of SEQ ID NO: 586858
cuggguuugugauucacag

SEQ ID NO: 749313 - RNA, 19 nt, Artificial Sequence
  Description of Artificial Sequence: Synthetic oligonucleotide
  Antisense strand to SEQ ID NO: 749312
cugugaaucacaaacccag

SEQ ID NO: 749314 - RNA, 19 nt, Artificial Sequence
  Description of Artificial Sequence: Synthetic oligonucleotide
  Sense strand starting at position 2179 of SEQ ID NO: 586858
aggaaacuuuccuucugag

SEQ ID NO: 749315 - RNA, 19 nt, Artificial Sequence
  Description of Artificial Sequence: Synthetic oligonucleotide
  Antisense strand to SEQ ID NO: 749314
cucagaaggaaaguuuccu

SEQ ID NO: 749316 - RNA, 19 nt, Artificial Sequence
  Description of Artificial Sequence: Synthetic oligonucleotide
  Sense strand starting at position 2214 of SEQ ID NO: 586858
ggcuguuuccugcaaggau

SEQ ID NO: 749317 - RNA, 19 nt, Artificial Sequence
  Description of Artificial Sequence: Synthetic oligonucleotide
  Antisense strand to SEQ ID NO: 749316
auccuugcaggaaacagcc

SEQ ID NO: 749318 - RNA, 19 nt, Artificial Sequence
  Description of Artificial Sequence: Synthetic oligonucleotide
  Sense strand starting at position 2284 of SEQ ID NO: 586858
uuucuuaggcccuggagau

SEQ ID NO: 749319 - RNA, 19 nt, Artificial Sequence
  Description of Artificial Sequence: Synthetic oligonucleotide
  Antisense strand to SEQ ID NO: 749318
aucuccagggccuaagaaa

SEQ ID NO: 749320 - RNA, 19 nt, Artificial Sequence
  Description of Artificial Sequence: Synthetic oligonucleotide
  Sense strand starting at position 2317 of SEQ ID NO: 586858
gggagaauggccuagcugu

SEQ ID NO: 749321 - RNA, 19 nt, Artificial Sequence
  Description of Artificial Sequence: Synthetic oligonucleotide
  Antisense strand to SEQ ID NO: 749320
acagcuaggccauucuccc

SEQ ID NO: 749322 - RNA, 19 nt, Artificial Sequence
  Description of Artificial Sequence: Synthetic oligonucleotide
  Sense strand starting at position 2324 of SEQ ID NO: 586858
uggccuagcuguuuacaaa

SEQ ID NO: 749323 - RNA, 19 nt, Artificial Sequence
  Description of Artificial Sequence: Synthetic oligonucleotide
  Antisense strand to SEQ ID NO: 749322
uuuguaaacagcuaggcca

SEQ ID NO: 749324 - RNA, 19 nt, Artificial Sequence
  Description of Artificial Sequence: Synthetic oligonucleotide
  Sense strand starting at position 2325 of SEQ ID NO: 586858
ggccuagcuguuuacaaau

SEQ ID NO: 749325 - RNA, 19 nt, Artificial Sequence
  Description of Artificial Sequence: Synthetic oligonucleotide
  Antisense strand to SEQ ID NO: 749324
auuuguaaacagcuaggcc

SEQ ID NO: 749326 - RNA, 19 nt, Artificial Sequence
  Description of Artificial Sequence: Synthetic oligonucleotide
  Sense strand starting at position 2382 of SEQ ID NO: 586858
aagggcaagcauugguaaa

SEQ ID NO: 749327 - RNA, 19 nt, Artificial Sequence
  Description of Artificial Sequence: Synthetic oligonucleotide
  Antisense strand to SEQ ID NO: 749326
uuuaccaaugcuugcccuu

SEQ ID NO: 749328 - RNA, 19 nt, Artificial Sequence
  Description of Artificial Sequence: Synthetic oligonucleotide
  Sense strand starting at position 2858 of SEQ ID NO: 586858
ccagaaugaucagaugauc

SEQ ID NO: 749329 - RNA, 19 nt, Artificial Sequence
  Description of Artificial Sequence: Synthetic oligonucleotide
  Antisense strand to SEQ ID NO: 749328
gaucaucugaucauucugg

SEQ ID NO: 749330 - RNA, 19 nt, Artificial Sequence
  Description of Artificial Sequence: Synthetic oligonucleotide
  Sense strand starting at position 2886 of SEQ ID NO: 586858
uuucgaugcagugagauua

SEQ ID NO: 749331 - RNA, 19 nt, Artificial Sequence
  Description of Artificial Sequence: Synthetic oligonucleotide
  Antisense strand to SEQ ID NO: 749330
uaaucucacugcaucgaaa

SEQ ID NO: 749332 - RNA, 19 nt, Artificial Sequence
  Description of Artificial Sequence: Synthetic oligonucleotide
  Sense strand starting at position 2896 of SEQ ID NO: 586858
gugagauuaugcuuggcuc

SEQ ID NO: 749333 - RNA, 19 nt, Artificial Sequence
  Description of Artificial Sequence: Synthetic oligonucleotide
  Antisense strand to SEQ ID NO: 749332
gagccaagcauaaucucac

SEQ ID NO: 749334 - RNA, 19 nt, Artificial Sequence
  Description of Artificial Sequence: Synthetic oligonucleotide
  Sense strand starting at position 2897 of SEQ ID NO: 586858
ugagauuaugcuuggcuca

SEQ ID NO: 749335 - RNA, 19 nt, Artificial Sequence
  Description of Artificial Sequence: Synthetic oligonucleotide
  Antisense strand to SEQ ID NO: 749334
ugagccaagcauaaucuca

SEQ ID NO: 749336 - RNA, 19 nt, Artificial Sequence
  Description of Artificial Sequence: Synthetic oligonucleotide
  Sense strand starting at position 2921 of SEQ ID NO: 586858
aagugaaucuuccuagaga

SEQ ID NO: 749337 - RNA, 19 nt, Artificial Sequence
  Description of Artificial Sequence: Synthetic oligonucleotide
  Antisense strand to SEQ ID NO: 749336
ucucuaggaagauucacuu

SEQ ID NO: 749338 - RNA, 19 nt, Artificial Sequence
  Description of Artificial Sequence: Synthetic oligonucleotide
  Sense strand starting at position 3007 of SEQ ID NO: 586858
gccagagcaguguggaaau

SEQ ID NO: 749339 - RNA, 19 nt, Artificial Sequence
  Description of Artificial Sequence: Synthetic oligonucleotide
  Antisense strand to SEQ ID NO: 749338
auuuccacacugcucuggc

SEQ ID NO: 749340 - RNA, 19 nt, Artificial Sequence
  Description of Artificial Sequence: Synthetic oligonucleotide
  Sense strand starting at position 3120 of SEQ ID NO: 586858
uggugaugggcaggaguaa

SEQ ID NO: 749341 - RNA, 19 nt, Artificial Sequence
  Description of Artificial Sequence: Synthetic oligonucleotide
  Antisense strand to SEQ ID NO: 749340
uuacuccugcccaucacca

SEQ ID NO: 749342 - RNA, 19 nt, Artificial Sequence
  Description of Artificial Sequence: Synthetic oligonucleotide
  Sense strand starting at position 3135 of SEQ ID NO: 586858
guaaguagaguucaaguuu

SEQ ID NO: 749343 - RNA, 19 nt, Artificial Sequence
  Description of Artificial Sequence: Synthetic oligonucleotide
  Antisense strand to SEQ ID NO: 749342
aaacuugaacucuacuuac

SEQ ID NO: 749344 - RNA, 19 nt, Artificial Sequence
  Description of Artificial Sequence: Synthetic oligonucleotide
  Sense strand starting at position 3148 of SEQ ID NO: 586858
aaguuuggauucuuugaaa

SEQ ID NO: 749345 - RNA, 19 nt, Artificial Sequence
  Description of Artificial Sequence: Synthetic oligonucleotide
  Antisense strand to SEQ ID NO: 749344
uuucaaagaauccaaacuu

SEQ ID NO: 749346 - RNA, 19 nt, Artificial Sequence
  Description of Artificial Sequence: Synthetic oligonucleotide
  Sense strand starting at position 3887 of SEQ ID NO: 586858
agagcauuaccaugccaca

SEQ ID NO: 749347 - RNA, 19 nt, Artificial Sequence
  Description of Artificial Sequence: Synthetic oligonucleotide
  Antisense strand to SEQ ID NO: 749346
uguggcaugguaaugcucu

SEQ ID NO: 749348 - RNA, 19 nt, Artificial Sequence
  Description of Artificial Sequence: Synthetic oligonucleotide
  Sense strand starting at position 3900 of SEQ ID NO: 586858
gccacaguucgagacccau

SEQ ID NO: 749349 - RNA, 19 nt, Artificial Sequence
  Description of Artificial Sequence: Synthetic oligonucleotide
  Antisense strand to SEQ ID NO: 749348
augggucucgaacuguggc

SEQ ID NO: 749350 - RNA, 19 nt, Artificial Sequence
  Description of Artificial Sequence: Synthetic oligonucleotide
  Sense strand starting at position 269 of SEQ ID NO: 586859
ggaguucugaugcauacuc

SEQ ID NO: 749351 - RNA, 19 nt, Artificial Sequence
  Description of Artificial Sequence: Synthetic oligonucleotide
  Antisense strand to SEQ ID NO: 749350
gaguaugcaucagaacucc

SEQ ID NO: 749352 - RNA, 19 nt, Artificial Sequence
  Description of Artificial Sequence: Synthetic oligonucleotide
  Sense strand starting at position 281 of SEQ ID NO: 586859
cauacucagguuuaagagu

SEQ ID NO: 749353 - RNA, 19 nt, Artificial Sequence
  Description of Artificial Sequence: Synthetic oligonucleotide
  Antisense strand to SEQ ID NO: 749352
acucuuaaaccugaguaug

SEQ ID NO: 749354 - RNA, 19 nt, Artificial Sequence
  Description of Artificial Sequence: Synthetic oligonucleotide
  Sense strand starting at position 292 of SEQ ID NO: 586859
uuaagaguucuugguguag

SEQ ID NO: 749355 - RNA, 19 nt, Artificial Sequence
  Description of Artificial Sequence: Synthetic oligonucleotide
  Antisense strand to SEQ ID NO: 749354
cuacaccaagaacucuuaa

SEQ ID NO: 749356 - RNA, 19 nt, Artificial Sequence
  Description of Artificial Sequence: Synthetic oligonucleotide
  Sense strand starting at position 351 of SEQ ID NO: 586859
agagguagagugugaaaua

SEQ ID NO: 749357 - RNA, 19 nt, Artificial Sequence
  Description of Artificial Sequence: Synthetic oligonucleotide
  Antisense strand to SEQ ID NO: 749356
uauuucacacucuaccucu

SEQ ID NO: 749358 - RNA, 19 nt, Artificial Sequence
  Description of Artificial Sequence: Synthetic oligonucleotide
  Sense strand starting at position 362 of SEQ ID NO: 586859
gugaaauacucacugauau

SEQ ID NO: 749359 - RNA, 19 nt, Artificial Sequence
  Description of Artificial Sequence: Synthetic oligonucleotide
  Antisense strand to SEQ ID NO: 749358
auaucagugaguauuucac

SEQ ID NO: 749360 - RNA, 19 nt, Artificial Sequence
  Description of Artificial Sequence: Synthetic oligonucleotide
  Sense strand starting at position 404 of SEQ ID NO: 586859
ugaguuaauugcccuggga

SEQ ID NO: 749361 - RNA, 19 nt, Artificial Sequence
  Description of Artificial Sequence: Synthetic oligonucleotide
  Antisense strand to SEQ ID NO: 749360
ucccagggcaauuaacuca

SEQ ID NO: 749362 - RNA, 19 nt, Artificial Sequence
  Description of Artificial Sequence: Synthetic oligonucleotide
  Sense strand starting at position 406 of SEQ ID NO: 586859
aguuaauugcccugggaua

SEQ ID NO: 749363 - RNA, 19 nt, Artificial Sequence
  Description of Artificial Sequence: Synthetic oligonucleotide
  Antisense strand to SEQ ID NO: 749362
uaucccagggcaauuaacu

SEQ ID NO: 749364 - RNA, 19 nt, Artificial Sequence
  Description of Artificial Sequence: Synthetic oligonucleotide
  Sense strand starting at position 407 of SEQ ID NO: 586859
guuaauugcccugggauag

SEQ ID NO: 749365 - RNA, 19 nt, Artificial Sequence
  Description of Artificial Sequence: Synthetic oligonucleotide
  Antisense strand to SEQ ID NO: 749364
cuaucccagggcaauuaac

SEQ ID NO: 749366 - RNA, 19 nt, Artificial Sequence
  Description of Artificial Sequence: Synthetic oligonucleotide
  Sense strand starting at position 408 of SEQ ID NO: 586859
uuaauugcccugggauaga

SEQ ID NO: 749367 - RNA, 19 nt, Artificial Sequence
  Description of Artificial Sequence: Synthetic oligonucleotide
  Antisense strand to SEQ ID NO: 749366
ucuaucccagggcaauuaa

SEQ ID NO: 749368 - RNA, 19 nt, Artificial Sequence
  Description of Artificial Sequence: Synthetic oligonucleotide
  Sense strand starting at position 455 of SEQ ID NO: 586859
auucuuagguggcuuuaau

SEQ ID NO: 749369 - RNA, 19 nt, Artificial Sequence
  Description of Artificial Sequence: Synthetic oligonucleotide
  Antisense strand to SEQ ID NO: 749368
auuaaagccaccuaagaau

SEQ ID NO: 749370 - RNA, 19 nt, Artificial Sequence
  Description of Artificial Sequence: Synthetic oligonucleotide
  Sense strand starting at position 694 of SEQ ID NO: 586859
guacuucccugggcugaau

SEQ ID NO: 749371 - RNA, 19 nt, Artificial Sequence
  Description of Artificial Sequence: Synthetic oligonucleotide
  Antisense strand to SEQ ID NO: 749370
auucagcccagggaaguac

SEQ ID NO: 749372 - RNA, 19 nt, Artificial Sequence
  Description of Artificial Sequence: Synthetic oligonucleotide
  Sense strand starting at position 1069 of SEQ ID NO: 586859
uggugaucaucacuggaug

SEQ ID NO: 749373 - RNA, 19 nt, Artificial Sequence
  Description of Artificial Sequence: Synthetic oligonucleotide
  Antisense strand to SEQ ID NO: 749372
cauccagugaugaucacca

SEQ ID NO: 749374 - RNA, 19 nt, Artificial Sequence
  Description of Artificial Sequence: Synthetic oligonucleotide
  Sense strand starting at position 1070 of SEQ ID NO: 586859
ggugaucaucacuggaugu

SEQ ID NO: 749375 - RNA, 19 nt, Artificial Sequence
  Description of Artificial Sequence: Synthetic oligonucleotide
  Antisense strand to SEQ ID NO: 749374
acauccagugaugaucacc

SEQ ID NO: 749376 - RNA, 19 nt, Artificial Sequence
  Description of Artificial Sequence: Synthetic oligonucleotide
  Sense strand starting at position 1191 of SEQ ID NO: 586859
caauacuuccagugggaua

SEQ ID NO: 749377 - RNA, 19 nt, Artificial Sequence
  Description of Artificial Sequence: Synthetic oligonucleotide
  Antisense strand to SEQ ID NO: 749376
uaucccacuggaaguauug

SEQ ID NO: 749378 - RNA, 19 nt, Artificial Sequence
  Description of Artificial Sequence: Synthetic oligonucleotide
  Sense strand starting at position 1223 of SEQ ID NO: 586859
ggcugucucaagcacugaa

SEQ ID NO: 749379 - RNA, 19 nt, Artificial Sequence
  Description of Artificial Sequence: Synthetic oligonucleotide
  Antisense strand to SEQ ID NO: 749378
uucagugcuugagacagcc

SEQ ID NO: 749380 - RNA, 19 nt, Artificial Sequence
  Description of Artificial Sequence: Synthetic oligonucleotide
  Sense strand starting at position 1577 of SEQ ID NO: 586859
agugucuugcaugaguaau

SEQ ID NO: 749381 - RNA, 19 nt, Artificial Sequence
  Description of Artificial Sequence: Synthetic oligonucleotide
  Antisense strand to SEQ ID NO: 749380
auuacucaugcaagacacu

SEQ ID NO: 749382 - RNA, 19 nt, Artificial Sequence
  Description of Artificial Sequence: Synthetic oligonucleotide
  Sense strand starting at position 1579 of SEQ ID NO: 586859
ugucuugcaugaguaauuu

SEQ ID NO: 749383 - RNA, 19 nt, Artificial Sequence
  Description of Artificial Sequence: Synthetic oligonucleotide
  Antisense strand to SEQ ID NO: 749382
aaauuacucaugcaagaca

SEQ ID NO: 749384 - RNA, 19 nt, Artificial Sequence
  Description of Artificial Sequence: Synthetic oligonucleotide
  Sense strand starting at position 1631 of SEQ ID NO: 586859
gcuauaguggugcuauugu

SEQ ID NO: 749385 - RNA, 19 nt, Artificial Sequence
  Description of Artificial Sequence: Synthetic oligonucleotide
  Antisense strand to SEQ ID NO: 749384
acaauagcaccacuauagc

SEQ ID NO: 749386 - RNA, 19 nt, Artificial Sequence
  Description of Artificial Sequence: Synthetic oligonucleotide
  Sense strand starting at position 2219 of SEQ ID NO: 586859
ggcuguuuccuggaaggau

SEQ ID NO: 749387 - RNA, 19 nt, Artificial Sequence
  Description of Artificial Sequence: Synthetic oligonucleotide
  Antisense strand to SEQ ID NO: 749386
auccuuccaggaaacagcc

SEQ ID NO: 749388 - RNA, 19 nt, Artificial Sequence
  Description of Artificial Sequence: Synthetic oligonucleotide
  Sense strand starting at position 2288 of SEQ ID NO: 586859
cuuucuuaggccgaggaga

SEQ ID NO: 749389 - RNA, 19 nt, Artificial Sequence
  Description of Artificial Sequence: Synthetic oligonucleotide
  Antisense strand to SEQ ID NO: 749388
ucuccucggccuaagaaag

SEQ ID NO: 749390 - RNA, 19 nt, Artificial Sequence
  Description of Artificial Sequence: Synthetic oligonucleotide
  Sense strand starting at position 2445 of SEQ ID NO: 586859
ggcaaagucuuaucuaacu

SEQ ID NO: 749391 - RNA, 19 nt, Artificial Sequence
  Description of Artificial Sequence: Synthetic oligonucleotide
  Antisense strand to SEQ ID NO: 749390
aguuagauaagacuuugcc

SEQ ID NO: 749392 - RNA, 19 nt, Artificial Sequence
  Description of Artificial Sequence: Synthetic oligonucleotide
  Sense strand starting at position 2499 of SEQ ID NO: 586859
ccagucacucagugggaaa

SEQ ID NO: 749393 - RNA, 19 nt, Artificial Sequence
  Description of Artificial Sequence: Synthetic oligonucleotide
  Antisense strand to SEQ ID NO: 749392
uuucccacugagugacugg

SEQ ID NO: 749394 - RNA, 19 nt, Artificial Sequence
  Description of Artificial Sequence: Synthetic oligonucleotide
  Sense strand starting at position 2592 of SEQ ID NO: 586859
ggaugcugggcuugaagau

SEQ ID NO: 749395 - RNA, 19 nt, Artificial Sequence
  Description of Artificial Sequence: Synthetic oligonucleotide
  Antisense strand to SEQ ID NO: 749394
aucuucaagcccagcaucc

SEQ ID NO: 749396 - RNA, 19 nt, Artificial Sequence
  Description of Artificial Sequence: Synthetic oligonucleotide
  Sense strand starting at position 2802 of SEQ ID NO: 586859
accugcacucagggugauu

SEQ ID NO: 749397 - RNA, 19 nt, Artificial Sequence
  Description of Artificial Sequence: Synthetic oligonucleotide
  Antisense strand to SEQ ID NO: 749396
aaucacccugagugcaggu

SEQ ID NO: 749398 - RNA, 19 nt, Artificial Sequence
  Description of Artificial Sequence: Synthetic oligonucleotide
  Sense strand starting at position 2898 of SEQ ID NO: 586859
augguaaaucuggguuaug

SEQ ID NO: 749399 - RNA, 19 nt, Artificial Sequence
  Description of Artificial Sequence: Synthetic oligonucleotide
  Antisense strand to SEQ ID NO: 749398
cauaacccagauuuaccau

SEQ ID NO: 749400 - RNA, 19 nt, Artificial Sequence
  Description of Artificial Sequence: Synthetic oligonucleotide
  Sense strand starting at position 2899 of SEQ ID NO: 586859
ugguaaaucuggguuauga

SEQ ID NO: 749401 - RNA, 19 nt, Artificial Sequence
  Description of Artificial Sequence: Synthetic oligonucleotide
  Antisense strand to SEQ ID NO: 749400
ucauaacccagauuuacca

SEQ ID NO: 749402 - RNA, 19 nt, Artificial Sequence
  Description of Artificial Sequence: Synthetic oligonucleotide
  Sense strand starting at position 2901 of SEQ ID NO: 586859
guaaaucuggguuaugauu

SEQ ID NO: 749403 - RNA, 19 nt, Artificial Sequence
  Description of Artificial Sequence: Synthetic oligonucleotide
  Antisense strand to SEQ ID NO: 749402
aaucauaacccagauuuac

SEQ ID NO: 749404 - RNA, 19 nt, Artificial Sequence
  Description of Artificial Sequence: Synthetic oligonucleotide
  Sense strand starting at position 2909 of SEQ ID NO: 586859
ggguuaugauuugaucuga

SEQ ID NO: 749405 - RNA, 19 nt, Artificial Sequence
  Description of Artificial Sequence: Synthetic oligonucleotide
  Antisense strand to SEQ ID NO: 749404
ucagaucaaaucauaaccc

SEQ ID NO: 749406 - RNA, 19 nt, Artificial Sequence
  Description of Artificial Sequence: Synthetic oligonucleotide
  Sense strand starting at position 2914 of SEQ ID NO: 586859
augauuugaucugagaauc

SEQ ID NO: 749407 - RNA, 19 nt, Artificial Sequence
  Description of Artificial Sequence: Synthetic oligonucleotide
  Antisense strand to SEQ ID NO: 749406
gauucucagaucaaaucau

SEQ ID NO: 749408 - RNA, 19 nt, Artificial Sequence
  Description of Artificial Sequence: Synthetic oligonucleotide
  Sense strand starting at position 3034 of SEQ ID NO: 586859
gugagauuauacuuggcuc

SEQ ID NO: 749409 - RNA, 19 nt, Artificial Sequence
  Description of Artificial Sequence: Synthetic oligonucleotide
  Antisense strand to SEQ ID NO: 749408
gagccaaguauaaucucac

SEQ ID NO: 749410 - RNA, 19 nt, Artificial Sequence
  Description of Artificial Sequence: Synthetic oligonucleotide
  Sense strand starting at position 3042 of SEQ ID NO: 586859
auacuuggcucaguacuaa

SEQ ID NO: 749411 - RNA, 19 nt, Artificial Sequence
  Description of Artificial Sequence: Synthetic oligonucleotide
  Antisense strand to SEQ ID NO: 749410
uuaguacugagccaaguau

SEQ ID NO: 749412 - RNA, 19 nt, Artificial Sequence
  Description of Artificial Sequence: Synthetic oligonucleotide
  Sense strand starting at position 3057 of SEQ ID NO: 586859
cuaagugaaucuuucuaga

SEQ ID NO: 749413 - RNA, 19 nt, Artificial Sequence
  Description of Artificial Sequence: Synthetic oligonucleotide
  Antisense strand to SEQ ID NO: 749412
ucuagaaagauucacuuag

SEQ ID NO: 749414 - RNA, 19 nt, Artificial Sequence
  Description of Artificial Sequence: Synthetic oligonucleotide
  Sense strand starting at position 3059 of SEQ ID NO: 586859
aagugaaucuuucuagaga

SEQ ID NO: 749415 - RNA, 19 nt, Artificial Sequence
  Description of Artificial Sequence: Synthetic oligonucleotide
  Antisense strand to SEQ ID NO: 749414
ucucuagaaagauucacuu

SEQ ID NO: 749416 - RNA, 19 nt, Artificial Sequence
  Description of Artificial Sequence: Synthetic oligonucleotide
  Sense strand starting at position 3107 of SEQ ID NO: 586859
cuaagauacagucguguaa

SEQ ID NO: 749417 - RNA, 19 nt, Artificial Sequence
  Description of Artificial Sequence: Synthetic oligonucleotide
  Antisense strand to SEQ ID NO: 749416
uuacacgacuguaucuuag

SEQ ID NO: 749418 - RNA, 19 nt, Artificial Sequence
  Description of Artificial Sequence: Synthetic oligonucleotide
  Sense strand starting at position 3111 of SEQ ID NO: 586859
gauacagucguguaauuga

SEQ ID NO: 749419 - RNA, 19 nt, Artificial Sequence
  Description of Artificial Sequence: Synthetic oligonucleotide
  Antisense strand to SEQ ID NO: 749418
ucaauuacacgacuguauc

SEQ ID NO: 749420 - RNA, 19 nt, Artificial Sequence
  Description of Artificial Sequence: Synthetic oligonucleotide
  Sense strand starting at position 3120 of SEQ ID NO: 586859
guguaauugacugaggcau

SEQ ID NO: 749421 - RNA, 19 nt, Artificial Sequence
  Description of Artificial Sequence: Synthetic oligonucleotide
  Antisense strand to SEQ ID NO: 749420
augccucagucaauuacac

SEQ ID NO: 749422 - RNA, 19 nt, Artificial Sequence
  Description of Artificial Sequence: Synthetic oligonucleotide
  Sense strand starting at position 3132 of SEQ ID NO: 586859
gaggcauaaccuggccaga

SEQ ID NO: 749423 - RNA, 19 nt, Artificial Sequence
  Description of Artificial Sequence: Synthetic oligonucleotide
  Antisense strand to SEQ ID NO: 749422
ucuggccagguuaugccuc

SEQ ID NO: 749424 - RNA, 19 nt, Artificial Sequence
  Description of Artificial Sequence: Synthetic oligonucleotide
  Sense strand starting at position 3365 of SEQ ID NO: 586859
gcuggagaaaucggacaug

SEQ ID NO: 749425 - RNA, 19 nt, Artificial Sequence
  Description of Artificial Sequence: Synthetic oligonucleotide
  Antisense strand to SEQ ID NO: 749424
cauguccgauuucuccagc

SEQ ID NO: 749426 - RNA, 19 nt, Artificial Sequence
  Description of Artificial Sequence: Synthetic oligonucleotide
  Sense strand starting at position 3682 of SEQ ID NO: 586859
guuuaugcugaguuucgca

SEQ ID NO: 749427 - RNA, 19 nt, Artificial Sequence
  Description of Artificial Sequence: Synthetic oligonucleotide
  Antisense strand to SEQ ID NO: 749426
ugcgaaacucagcauaaac

SEQ ID NO: 749428 - RNA, 19 nt, Artificial Sequence
  Description of Artificial Sequence: Synthetic oligonucleotide
  Sense strand starting at position 3728 of SEQ ID NO: 586859
gugacuuguguggagcaaa

SEQ ID NO: 749429 - RNA, 19 nt, Artificial Sequence
  Description of Artificial Sequence: Synthetic oligonucleotide
  Antisense strand to SEQ ID NO: 749428
uuugcuccacacaagucac

SEQ ID NO: 749430 - RNA, 19 nt, Artificial Sequence
  Description of Artificial Sequence: Synthetic oligonucleotide
  Sense strand starting at position 15 of SEQ ID NO: 586860
agggucuucuuucugaaca

SEQ ID NO: 749431 - RNA, 19 nt, Artificial Sequence
  Description of Artificial Sequence: Synthetic oligonucleotide
  Antisense strand to SEQ ID NO: 749430
uguucagaaagaagacccu

SEQ ID NO: 749432 - RNA, 19 nt, Artificial Sequence
  Description of Artificial Sequence: Synthetic oligonucleotide
  Sense strand starting at position 31 of SEQ ID NO: 586860
acagaugagucagcaaaga

SEQ ID NO: 749433 - RNA, 19 nt, Artificial Sequence
  Description of Artificial Sequence: Synthetic oligonucleotide
  Antisense strand to SEQ ID NO: 749432
ucuuugcugacucaucugu

SEQ ID NO: 749434 - RNA, 19 nt, Artificial Sequence
  Description of Artificial Sequence: Synthetic oligonucleotide
  Sense strand starting at position 153 of SEQ ID NO: 586860
uuaucaguuggccaagaag

SEQ ID NO: 749435 - RNA, 19 nt, Artificial Sequence
  Description of Artificial Sequence: Synthetic oligonucleotide
  Antisense strand to SEQ ID NO: 749434
cuucuuggccaacugauaa

SEQ ID NO: 749436 - RNA, 19 nt, Artificial Sequence
  Description of Artificial Sequence: Synthetic oligonucleotide
  Sense strand starting at position 171 of SEQ ID NO: 586860
guguuaacguauuugacau

SEQ ID NO: 749437 - RNA, 19 nt, Artificial Sequence
  Description of Artificial Sequence: Synthetic oligonucleotide
  Antisense strand to SEQ ID NO: 749436
augucaaauacguuaacac

SEQ ID NO: 749438 - RNA, 19 nt, Artificial Sequence
  Description of Artificial Sequence: Synthetic oligonucleotide
  Sense strand starting at position 508 of SEQ ID NO: 586860
cauaguaauguuggacauu

SEQ ID NO: 749439 - RNA, 19 nt, Artificial Sequence
  Description of Artificial Sequence: Synthetic oligonucleotide
  Antisense strand to SEQ ID NO: 749438
aauguccaacauuacuaug

SEQ ID NO: 749440 - RNA, 19 nt, Artificial Sequence
  Description of Artificial Sequence: Synthetic oligonucleotide
  Sense strand starting at position 734 of SEQ ID NO: 586860
uugacuaagaggugggauu

SEQ ID NO: 749441 - RNA, 19 nt, Artificial Sequence
  Description of Artificial Sequence: Synthetic oligonucleotide
  Antisense strand to SEQ ID NO: 749440
aaucccaccucuuagucaa

SEQ ID NO: 749442 - RNA, 19 nt, Artificial Sequence
  Description of Artificial Sequence: Synthetic oligonucleotide
  Sense strand starting at position 746 of SEQ ID NO: 586860
ugggauuaugaaugaugcu

SEQ ID NO: 749443 - RNA, 19 nt, Artificial Sequence
  Description of Artificial Sequence: Synthetic oligonucleotide
  Antisense strand to SEQ ID NO: 749442
agcaucauucauaauccca

SEQ ID NO: 749444 - RNA, 19 nt, Artificial Sequence
  Description of Artificial Sequence: Synthetic oligonucleotide
  Sense strand starting at position 860 of SEQ ID NO: 586860
gaggaaggcugauucuagu

SEQ ID NO: 749445 - RNA, 19 nt, Artificial Sequence
  Description of Artificial Sequence: Synthetic oligonucleotide
  Antisense strand to SEQ ID NO: 749444
acuagaaucagccuuccuc

SEQ ID NO: 749446 - RNA, 19 nt, Artificial Sequence
  Description of Artificial Sequence: Synthetic oligonucleotide
  Sense strand starting at position 1101 of SEQ ID NO: 586860
ucuauaauauggguaguca

SEQ ID NO: 749447 - RNA, 19 nt, Artificial Sequence
  Description of Artificial Sequence: Synthetic oligonucleotide
  Antisense strand to SEQ ID NO: 749446
ugacuacccauauuauaga

SEQ ID NO: 749448 - RNA, 19 nt, Artificial Sequence
  Description of Artificial Sequence: Synthetic oligonucleotide
  Sense strand starting at position 1102 of SEQ ID NO: 586860
cuauaauauggguagucau

SEQ ID NO: 749449 - RNA, 19 nt, Artificial Sequence
  Description of Artificial Sequence: Synthetic oligonucleotide
  Antisense strand to SEQ ID NO: 749448
augacuacccauauuauag

SEQ ID NO: 749450 - RNA, 19 nt, Artificial Sequence
  Description of Artificial Sequence: Synthetic oligonucleotide
  Sense strand starting at position 1345 of SEQ ID NO: 586860
ggaggacacucacuguuaa

SEQ ID NO: 749451 - RNA, 19 nt, Artificial Sequence
  Description of Artificial Sequence: Synthetic oligonucleotide
  Antisense strand to SEQ ID NO: 749450
uuaacagugaguguccucc

SEQ ID NO: 749452 - RNA, 19 nt, Artificial Sequence
  Description of Artificial Sequence: Synthetic oligonucleotide
  Sense strand starting at position 1346 of SEQ ID NO: 586860
gaggacacucacuguuaag

SEQ ID NO: 749453 - RNA, 19 nt, Artificial Sequence
  Description of Artificial Sequence: Synthetic oligonucleotide
  Antisense strand to SEQ ID NO: 749452
cuuaacagugaguguccuc

SEQ ID NO: 749454 - RNA, 19 nt, Artificial Sequence
  Description of Artificial Sequence: Synthetic oligonucleotide
  Sense strand starting at position 1472 of SEQ ID NO: 586860
ccuaauucugcugaugaca

SEQ ID NO: 749455 - RNA, 19 nt, Artificial Sequence
  Description of Artificial Sequence: Synthetic oligonucleotide
  Antisense strand to SEQ ID NO: 749454
ugucaucagcagaauuagg

SEQ ID NO: 749456 - RNA, 19 nt, Artificial Sequence
  Description of Artificial Sequence: Synthetic oligonucleotide
  Sense strand starting at position 1550 of SEQ ID NO: 586860
uaaacugugccuuacagga

SEQ ID NO: 749457 - RNA, 19 nt, Artificial Sequence
  Description of Artificial Sequence: Synthetic oligonucleotide
  Antisense strand to SEQ ID NO: 749456
uccuguaaggcacaguuua

SEQ ID NO: 749458 - RNA, 19 nt, Artificial Sequence
  Description of Artificial Sequence: Synthetic oligonucleotide
  Sense strand starting at position 1573 of SEQ ID NO: 586860
guacaaggucuugaguaca

SEQ ID NO: 749459 - RNA, 19 nt, Artificial Sequence
  Description of Artificial Sequence: Synthetic oligonucleotide
  Antisense strand to SEQ ID NO: 749458
uguacucaagaccuuguac

SEQ ID NO: 749460 - RNA, 19 nt, Artificial Sequence
  Description of Artificial Sequence: Synthetic oligonucleotide
  Sense strand starting at position 1744 of SEQ ID NO: 586860
ggaggcacuccaugggauu

SEQ ID NO: 749461 - RNA, 19 nt, Artificial Sequence
  Description of Artificial Sequence: Synthetic oligonucleotide
  Antisense strand to SEQ ID NO: 749460
aaucccauggagugccucc

SEQ ID NO: 749462 - RNA, 19 nt, Artificial Sequence
  Description of Artificial Sequence: Synthetic oligonucleotide
  Sense strand starting at position 1919 of SEQ ID NO: 586860
aacacaucuguuugaaggu

SEQ ID NO: 749463 - RNA, 19 nt, Artificial Sequence
  Description of Artificial Sequence: Synthetic oligonucleotide
  Antisense strand to SEQ ID NO: 749462
accuucaaacagauguguu

SEQ ID NO: 749464 - RNA, 19 nt, Artificial Sequence
  Description of Artificial Sequence: Synthetic oligonucleotide
  Sense strand starting at position 2017 of SEQ ID NO: 586860
gggacaauauucuuuaccu

SEQ ID NO: 749465 - RNA, 19 nt, Artificial Sequence
  Description of Artificial Sequence: Synthetic oligonucleotide
  Antisense strand to SEQ ID NO: 749464
agguaaagaauauuguccc

SEQ ID NO: 749466 - RNA, 19 nt, Artificial Sequence
  Description of Artificial Sequence: Synthetic oligonucleotide
  Sense strand starting at position 2032 of SEQ ID NO: 586860
accuuagcucagggaguaa

SEQ ID NO: 749467 - RNA, 19 nt, Artificial Sequence
  Description of Artificial Sequence: Synthetic oligonucleotide
  Antisense strand to SEQ ID NO: 749466
uuacucccugagcuaaggu

SEQ ID NO: 749468 - RNA, 19 nt, Artificial Sequence
  Description of Artificial Sequence: Synthetic oligonucleotide
  Sense strand starting at position 2047 of SEQ ID NO: 586860
guaaguguccugagguuug

SEQ ID NO: 749469 - RNA, 19 nt, Artificial Sequence
  Description of Artificial Sequence: Synthetic oligonucleotide
  Antisense strand to SEQ ID NO: 749468
caaaccucaggacacuuac

SEQ ID NO: 749470 - RNA, 19 nt, Artificial Sequence
  Description of Artificial Sequence: Synthetic oligonucleotide
  Sense strand starting at position 2240 of SEQ ID NO: 586860
auagaacaguuaucuugau

SEQ ID NO: 749471 - RNA, 19 nt, Artificial Sequence
  Description of Artificial Sequence: Synthetic oligonucleotide
  Antisense strand to SEQ ID NO: 749470
aucaagauaacuguucuau

SEQ ID NO: 749472 - RNA, 19 nt, Artificial Sequence
  Description of Artificial Sequence: Synthetic oligonucleotide
  Sense strand starting at position 2269 of SEQ ID NO: 586860
uuguuuacagucuagauga

SEQ ID NO: 749473 - RNA, 19 nt, Artificial Sequence
  Description of Artificial Sequence: Synthetic oligonucleotide
  Antisense strand to SEQ ID NO: 749472
ucaucuagacuguaaacaa

SEQ ID NO: 749474 - RNA, 19 nt, Artificial Sequence
  Description of Artificial Sequence: Synthetic oligonucleotide
  Sense strand starting at position 2271 of SEQ ID NO: 586860
guuuacagucuagaugaca

SEQ ID NO: 749475 - RNA, 19 nt, Artificial Sequence
  Description of Artificial Sequence: Synthetic oligonucleotide
  Antisense strand to SEQ ID NO: 749474
ugucaucuagacuguaaac

SEQ ID NO: 749476 - RNA, 19 nt, Artificial Sequence
  Description of Artificial Sequence: Synthetic oligonucleotide
  Sense strand starting at position 2286 of SEQ ID NO: 586860
gacauuaggccuggugaca

SEQ ID NO: 749477 - RNA, 19 nt, Artificial Sequence
  Description of Artificial Sequence: Synthetic oligonucleotide
  Antisense strand to SEQ ID NO: 749476
ugucaccaggccuaauguc

SEQ ID NO: 749478 - RNA, 19 nt, Artificial Sequence
  Description of Artificial Sequence: Synthetic oligonucleotide
  Sense strand starting at position 2420 of SEQ ID NO: 586860
gcugauauccucuaagcau

SEQ ID NO: 749479 - RNA, 19 nt, Artificial Sequence
  Description of Artificial Sequence: Synthetic oligonucleotide
  Antisense strand to SEQ ID NO: 749478
augcuuagaggauaucagc

SEQ ID NO: 749480 - RNA, 19 nt, Artificial Sequence
  Description of Artificial Sequence: Synthetic oligonucleotide
  Sense strand starting at position 2458 of SEQ ID NO: 586860
gagcuaagaucuuuacgga

SEQ ID NO: 749481 - RNA, 19 nt, Artificial Sequence
  Description of Artificial Sequence: Synthetic oligonucleotide
  Antisense strand to SEQ ID NO: 749480
uccguaaagaucuuagcuc

SEQ ID NO: 749482 - RNA, 19 nt, Artificial Sequence
  Description of Artificial Sequence: Synthetic oligonucleotide
  Sense strand starting at position 2459 of SEQ ID NO: 586860
agcuaagaucuuuacggac

SEQ ID NO: 749483 - RNA, 19 nt, Artificial Sequence
  Description of Artificial Sequence: Synthetic oligonucleotide
  Antisense strand to SEQ ID NO: 749482
guccguaaagaucuuagcu

SEQ ID NO: 749484 - RNA, 19 nt, Artificial Sequence
  Description of Artificial Sequence: Synthetic oligonucleotide
  Sense strand starting at position 2472 of SEQ ID NO: 586860
acggacuugucaguagaga

SEQ ID NO: 749485 - RNA, 19 nt, Artificial Sequence
  Description of Artificial Sequence: Synthetic oligonucleotide
  Antisense strand to SEQ ID NO: 749484
ucucuacugacaaguccgu

SEQ ID NO: 749486 - RNA, 19 nt, Artificial Sequence
  Description of Artificial Sequence: Synthetic oligonucleotide
  Sense strand starting at position 2473 of SEQ ID NO: 586860
cggacuugucaguagagau

SEQ ID NO: 749487 - RNA, 19 nt, Artificial Sequence
  Description of Artificial Sequence: Synthetic oligonucleotide
  Antisense strand to SEQ ID NO: 749486
aucucuacugacaaguccg

SEQ ID NO: 749488 - RNA, 19 nt, Artificial Sequence
  Description of Artificial Sequence: Synthetic oligonucleotide
  Sense strand starting at position 2495 of SEQ ID NO: 586860
auaucagguuagucugaga

SEQ ID NO: 749489 - RNA, 19 nt, Artificial Sequence
  Description of Artificial Sequence: Synthetic oligonucleotide
  Antisense strand to SEQ ID NO: 749488
ucucagacuaaccugauau

SEQ ID NO: 749490 - RNA, 19 nt, Artificial Sequence
  Description of Artificial Sequence: Synthetic oligonucleotide
  Sense strand starting at position 2663 of SEQ ID NO: 586860
gagagaaucuaaguaguuu

SEQ ID NO: 749491 - RNA, 19 nt, Artificial Sequence
  Description of Artificial Sequence: Synthetic oligonucleotide
  Antisense strand to SEQ ID NO: 749490
aaacuacuuagauucucuc

SEQ ID NO: 749492 - RNA, 19 nt, Artificial Sequence
  Description of Artificial Sequence: Synthetic oligonucleotide
  Sense strand starting at position 2690 of SEQ ID NO: 586860
ucacaugucguggacaaug

SEQ ID NO: 749493 - RNA, 19 nt, Artificial Sequence
  Description of Artificial Sequence: Synthetic oligonucleotide
  Antisense strand to SEQ ID NO: 749492
cauuguccacgacauguga

SEQ ID NO: 749494 - RNA, 19 nt, Artificial Sequence
  Description of Artificial Sequence: Synthetic oligonucleotide
  Sense strand starting at position 2695 of SEQ ID NO: 586860
ugucguggacaaugagaaa

SEQ ID NO: 749495 - RNA, 19 nt, Artificial Sequence
  Description of Artificial Sequence: Synthetic oligonucleotide
  Antisense strand to SEQ ID NO: 749494
uuucucauuguccacgaca

SEQ ID NO: 749496 - RNA, 19 nt, Artificial Sequence
  Description of Artificial Sequence: Synthetic oligonucleotide
  Sense strand starting at position 2709 of SEQ ID NO: 586860
agaaauaggccuugucacu

SEQ ID NO: 749497 - RNA, 19 nt, Artificial Sequence
  Description of Artificial Sequence: Synthetic oligonucleotide
  Antisense strand to SEQ ID NO: 749496
agugacaaggccuauuucu

SEQ ID NO: 749498 - RNA, 19 nt, Artificial Sequence
  Description of Artificial Sequence: Synthetic oligonucleotide
  Sense strand starting at position 2753 of SEQ ID NO: 586860
aggauacuuaaggguguau

SEQ ID NO: 749499 - RNA, 19 nt, Artificial Sequence
  Description of Artificial Sequence: Synthetic oligonucleotide
  Antisense strand to SEQ ID NO: 749498
auacacccuuaaguauccu

SEQ ID NO: 749500 - RNA, 19 nt, Artificial Sequence
  Description of Artificial Sequence: Synthetic oligonucleotide
  Sense strand starting at position 2755 of SEQ ID NO: 586860
gauacuuaaggguguauga

SEQ ID NO: 749501 - RNA, 19 nt, Artificial Sequence
  Description of Artificial Sequence: Synthetic oligonucleotide
  Antisense strand to SEQ ID NO: 749500
ucauacacccuuaaguauc

SEQ ID NO: 749502 - RNA, 19 nt, Artificial Sequence
  Description of Artificial Sequence: Synthetic oligonucleotide
  Sense strand starting at position 2792 of SEQ ID NO: 586860
uggcuaaguagugagucaa

SEQ ID NO: 749503 - RNA, 19 nt, Artificial Sequence
  Description of Artificial Sequence: Synthetic oligonucleotide
  Antisense strand to SEQ ID NO: 749502
uugacucacuacuuagcca

SEQ ID NO: 749504 - RNA, 19 nt, Artificial Sequence
  Description of Artificial Sequence: Synthetic oligonucleotide
  Sense strand starting at position 2894 of SEQ ID NO: 586860
guccuugaguacccaaaca

SEQ ID NO: 749505 - RNA, 19 nt, Artificial Sequence
  Description of Artificial Sequence: Synthetic oligonucleotide
  Antisense strand to SEQ ID NO: 749504
uguuuggguacucaaggac

SEQ ID NO: 749506 - RNA, 19 nt, Artificial Sequence
  Description of Artificial Sequence: Synthetic oligonucleotide
  Sense strand starting at position 2999 of SEQ ID NO: 586860
gcagcuuagagauggaaag

SEQ ID NO: 749507 - RNA, 19 nt, Artificial Sequence
  Description of Artificial Sequence: Synthetic oligonucleotide
  Antisense strand to SEQ ID NO: 749506
cuuuccaucucuaagcugc

SEQ ID NO: 749508 - RNA, 19 nt, Artificial Sequence
  Description of Artificial Sequence: Synthetic oligonucleotide
  Sense strand starting at position 3524 of SEQ ID NO: 586860
ccuccagcugguuacauau

SEQ ID NO: 749509 - RNA, 19 nt, Artificial Sequence
  Description of Artificial Sequence: Synthetic oligonucleotide
  Antisense strand to SEQ ID NO: 749508
auauguaaccagcuggagg

SEQ ID NO: 749510 - RNA, 19 nt, Artificial Sequence
  Description of Artificial Sequence: Synthetic oligonucleotide
  Sense strand starting at position 239 of SEQ ID NO: 586861
aacuauguaggauguuaaa

SEQ ID NO: 749511 - RNA, 19 nt, Artificial Sequence
  Description of Artificial Sequence: Synthetic oligonucleotide
  Antisense strand to SEQ ID NO: 749510
uuuaacauccuacauaguu

SEQ ID NO: 749512 - RNA, 19 nt, Artificial Sequence
  Description of Artificial Sequence: Synthetic oligonucleotide
  Sense strand starting at position 246 of SEQ ID NO: 586861
uaggauguuaaauggugau

SEQ ID NO: 749513 - RNA, 19 nt, Artificial Sequence
  Description of Artificial Sequence: Synthetic oligonucleotide
  Antisense strand to SEQ ID NO: 749512
aucaccauuuaacauccua

SEQ ID NO: 749514 - RNA, 19 nt, Artificial Sequence
  Description of Artificial Sequence: Synthetic oligonucleotide
  Sense strand starting at position 302 of SEQ ID NO: 586861
auguuaaauggugauuagu

SEQ ID NO: 749515 - RNA, 19 nt, Artificial Sequence
  Description of Artificial Sequence: Synthetic oligonucleotide
  Antisense strand to SEQ ID NO: 749514
acuaaucaccauuuaacau

SEQ ID NO: 749516 - RNA, 19 nt, Artificial Sequence
  Description of Artificial Sequence: Synthetic oligonucleotide
  Sense strand starting at position 313 of SEQ ID NO: 586861
ugauuagugcuauggaaau

SEQ ID NO: 749517 - RNA, 19 nt, Artificial Sequence
  Description of Artificial Sequence: Synthetic oligonucleotide
  Antisense strand to SEQ ID NO: 749516
auuuccauagcacuaauca

SEQ ID NO: 749518 - RNA, 19 nt, Artificial Sequence
  Description of Artificial Sequence: Synthetic oligonucleotide
  Sense strand starting at position 392 of SEQ ID NO: 586861
gguuucaggcaguauuugu

SEQ ID NO: 749519 - RNA, 19 nt, Artificial Sequence
  Description of Artificial Sequence: Synthetic oligonucleotide
  Antisense strand to SEQ ID NO: 749518
acaaauacugccugaaacc

SEQ ID NO: 749520 - RNA, 19 nt, Artificial Sequence
  Description of Artificial Sequence: Synthetic oligonucleotide
  Sense strand starting at position 712 of SEQ ID NO: 586861
uuaaaccagucaucagagu

SEQ ID NO: 749521 - RNA, 19 nt, Artificial Sequence
  Description of Artificial Sequence: Synthetic oligonucleotide
  Antisense strand to SEQ ID NO: 749520
acucugaugacugguuuaa

SEQ ID NO: 749522 - RNA, 19 nt, Artificial Sequence
  Description of Artificial Sequence: Synthetic oligonucleotide
  Sense strand starting at position 772 of SEQ ID NO: 586861
ggaaguugcuagucaaaua

SEQ ID NO: 749523 - RNA, 19 nt, Artificial Sequence
  Description of Artificial Sequence: Synthetic oligonucleotide
  Antisense strand to SEQ ID NO: 749522
uauuugacuagcaacuucc

SEQ ID NO: 749524 - RNA, 19 nt, Artificial Sequence
  Description of Artificial Sequence: Synthetic oligonucleotide
  Sense strand starting at position 783 of SEQ ID NO: 586861
gucaaauaucugggugaag

SEQ ID NO: 749525 - RNA, 19 nt, Artificial Sequence
  Description of Artificial Sequence: Synthetic oligonucleotide
  Antisense strand to SEQ ID NO: 749524
cuucacccagauauuugac

SEQ ID NO: 749526 - RNA, 19 nt, Artificial Sequence
  Description of Artificial Sequence: Synthetic oligonucleotide
  Sense strand starting at position 873 of SEQ ID NO: 586861
gcugcugacccagagugaa

SEQ ID NO: 749527 - RNA, 19 nt, Artificial Sequence
  Description of Artificial Sequence: Synthetic oligonucleotide
  Antisense strand to SEQ ID NO: 749526
uucacucugggucagcagc

SEQ ID NO: 749528 - RNA, 19 nt, Artificial Sequence
  Description of Artificial Sequence: Synthetic oligonucleotide
  Sense strand starting at position 965 of SEQ ID NO: 586861
uuguuuccugaguacaaau

SEQ ID NO: 749529 - RNA, 19 nt, Artificial Sequence
  Description of Artificial Sequence: Synthetic oligonucleotide
  Antisense strand to SEQ ID NO: 749528
auuuguacucaggaaacaa

SEQ ID NO: 749530 - RNA, 19 nt, Artificial Sequence
  Description of Artificial Sequence: Synthetic oligonucleotide
  Sense strand starting at position 1002 of SEQ ID NO: 586861
gugcaaaggagugaugaca

SEQ ID NO: 749531 - RNA, 19 nt, Artificial Sequence
  Description of Artificial Sequence: Synthetic oligonucleotide
  Antisense strand to SEQ ID NO: 749530
ugucaucacuccuuugcac

SEQ ID NO: 749532 - RNA, 19 nt, Artificial Sequence
  Description of Artificial Sequence: Synthetic oligonucleotide
  Sense strand starting at position 1015 of SEQ ID NO: 586861
augacagucuccucaugga

SEQ ID NO: 749533 - RNA, 19 nt, Artificial Sequence
  Description of Artificial Sequence: Synthetic oligonucleotide
  Antisense strand to SEQ ID NO: 749532
uccaugaggagacugucau

SEQ ID NO: 749534 - RNA, 19 nt, Artificial Sequence
  Description of Artificial Sequence: Synthetic oligonucleotide
  Sense strand starting at position 1034 of SEQ ID NO: 586861
gaaccuguagaguguagaa

SEQ ID NO: 749535 - RNA, 19 nt, Artificial Sequence
  Description of Artificial Sequence: Synthetic oligonucleotide
  Antisense strand to SEQ ID NO: 749534
uucuacacucuacagguuc

SEQ ID NO: 749536 - RNA, 19 nt, Artificial Sequence
  Description of Artificial Sequence: Synthetic oligonucleotide
  Sense strand starting at position 1110 of SEQ ID NO: 586861
uggcuuagaucauugugag

SEQ ID NO: 749537 - RNA, 19 nt, Artificial Sequence
  Description of Artificial Sequence: Synthetic oligonucleotide
  Antisense strand to SEQ ID NO: 749536
cucacaaugaucuaagcca

SEQ ID NO: 749538 - RNA, 19 nt, Artificial Sequence
  Description of Artificial Sequence: Synthetic oligonucleotide
  Sense strand starting at position 1117 of SEQ ID NO: 586861
gaucauugugagcagugga

SEQ ID NO: 749539 - RNA, 19 nt, Artificial Sequence
  Description of Artificial Sequence: Synthetic oligonucleotide
  Antisense strand to SEQ ID NO: 749538
uccacugcucacaaugauc

SEQ ID NO: 749540 - RNA, 19 nt, Artificial Sequence
  Description of Artificial Sequence: Synthetic oligonucleotide
  Sense strand starting at position 1189 of SEQ ID NO: 586861
uuucuaagagaucaaacgu

SEQ ID NO: 749541 - RNA, 19 nt, Artificial Sequence
  Description of Artificial Sequence: Synthetic oligonucleotide
  Antisense strand to SEQ ID NO: 749540
acguuugaucucuuagaaa

SEQ ID NO: 749542 - RNA, 19 nt, Artificial Sequence
  Description of Artificial Sequence: Synthetic oligonucleotide
  Sense strand starting at position 1232 of SEQ ID NO: 586861
uaugaauaagccuggguuu

SEQ ID NO: 749543 - RNA, 19 nt, Artificial Sequence
  Description of Artificial Sequence: Synthetic oligonucleotide
  Antisense strand to SEQ ID NO: 749542
aaacccaggcuuauucaua

SEQ ID NO: 749544 - RNA, 19 nt, Artificial Sequence
  Description of Artificial Sequence: Synthetic oligonucleotide
  Sense strand starting at position 1233 of SEQ ID NO: 586861
augaauaagccuggguuua

SEQ ID NO: 749545 - RNA, 19 nt, Artificial Sequence
  Description of Artificial Sequence: Synthetic oligonucleotide
  Antisense strand to SEQ ID NO: 749544
uaaacccaggcuuauucau

SEQ ID NO: 749546 - RNA, 19 nt, Artificial Sequence
  Description of Artificial Sequence: Synthetic oligonucleotide
  Sense strand starting at position 1234 of SEQ ID NO: 586861
ugaauaagccuggguuuau

SEQ ID NO: 749547 - RNA, 19 nt, Artificial Sequence
  Description of Artificial Sequence: Synthetic oligonucleotide
  Antisense strand to SEQ ID NO: 749546
auaaacccaggcuuauuca

SEQ ID NO: 749548 - RNA, 19 nt, Artificial Sequence
  Description of Artificial Sequence: Synthetic oligonucleotide
  Sense strand starting at position 1235 of SEQ ID NO: 586861
gaauaagccuggguuuaug

SEQ ID NO: 749549 - RNA, 19 nt, Artificial Sequence
  Description of Artificial Sequence: Synthetic oligonucleotide
  Antisense strand to SEQ ID NO: 749548
cauaaacccaggcuuauuc

SEQ ID NO: 749550 - RNA, 19 nt, Artificial Sequence
  Description of Artificial Sequence: Synthetic oligonucleotide
  Sense strand starting at position 1245 of SEQ ID NO: 586861
ggguuuaugccugaguaac

SEQ ID NO: 749551 - RNA, 19 nt, Artificial Sequence
  Description of Artificial Sequence: Synthetic oligonucleotide
  Antisense strand to SEQ ID NO: 749550
guuacucaggcauaaaccc

SEQ ID NO: 749552 - RNA, 19 nt, Artificial Sequence
  Description of Artificial Sequence: Synthetic oligonucleotide
  Sense strand starting at position 1265 of SEQ ID NO: 586861
ggaacugugccaggagaua

SEQ ID NO: 749553 - RNA, 19 nt, Artificial Sequence
  Description of Artificial Sequence: Synthetic oligonucleotide
  Antisense strand to SEQ ID NO: 749552
uaucuccuggcacaguucc

SEQ ID NO: 749554 - RNA, 19 nt, Artificial Sequence
  Description of Artificial Sequence: Synthetic oligonucleotide
  Sense strand starting at position 1570 of SEQ ID NO: 586861
ucucuuugguggguaaaga

SEQ ID NO: 749555 - RNA, 19 nt, Artificial Sequence
  Description of Artificial Sequence: Synthetic oligonucleotide
  Antisense strand to SEQ ID NO: 749554
ucuuuacccaccaaagaga

SEQ ID NO: 749556 - RNA, 19 nt, Artificial Sequence
  Description of Artificial Sequence: Synthetic oligonucleotide
  Sense strand starting at position 1789 of SEQ ID NO: 586861
uagaaaugguguccauuau

SEQ ID NO: 749557 - RNA, 19 nt, Artificial Sequence
  Description of Artificial Sequence: Synthetic oligonucleotide
  Antisense strand to SEQ ID NO: 749556
auaauggacaccauuucua

SEQ ID NO: 749558 - RNA, 19 nt, Artificial Sequence
  Description of Artificial Sequence: Synthetic oligonucleotide
  Sense strand starting at position 1790 of SEQ ID NO: 586861
agaaaugguguccauuauu

SEQ ID NO: 749559 - RNA, 19 nt, Artificial Sequence
  Description of Artificial Sequence: Synthetic oligonucleotide
  Antisense strand to SEQ ID NO: 749558
aauaauggacaccauuucu

SEQ ID NO: 749560 - RNA, 19 nt, Artificial Sequence
  Description of Artificial Sequence: Synthetic oligonucleotide
  Sense strand starting at position 1885 of SEQ ID NO: 586861
gguucuggaacucagaguu

SEQ ID NO: 749561 - RNA, 19 nt, Artificial Sequence
  Description of Artificial Sequence: Synthetic oligonucleotide
  Antisense strand to SEQ ID NO: 749560
aacucugaguuccagaacc

SEQ ID NO: 749562 - RNA, 19 nt, Artificial Sequence
  Description of Artificial Sequence: Synthetic oligonucleotide
  Sense strand starting at position 2325 of SEQ ID NO: 586861
ugggaaugauacuuaaguu

SEQ ID NO: 749563 - RNA, 19 nt, Artificial Sequence
  Description of Artificial Sequence: Synthetic oligonucleotide
  Antisense strand to SEQ ID NO: 749562
aacuuaaguaucauuccca

SEQ ID NO: 749564 - RNA, 19 nt, Artificial Sequence
  Description of Artificial Sequence: Synthetic oligonucleotide
  Sense strand starting at position 2497 of SEQ ID NO: 586861
ggccaaagauccuuaccaa

SEQ ID NO: 749565 - RNA, 19 nt, Artificial Sequence
  Description of Artificial Sequence: Synthetic oligonucleotide
  Antisense strand to SEQ ID NO: 749564
uugguaaggaucuuuggcc

SEQ ID NO: 749566 - RNA, 19 nt, Artificial Sequence
  Description of Artificial Sequence: Synthetic oligonucleotide
  Sense strand starting at position 2603 of SEQ ID NO: 586861
gucagaaguccaugaucaa

SEQ ID NO: 749567 - RNA, 19 nt, Artificial Sequence
  Description of Artificial Sequence: Synthetic oligonucleotide
  Antisense strand to SEQ ID NO: 749566
uugaucauggacuucugac

SEQ ID NO: 749568 - RNA, 19 nt, Artificial Sequence
  Description of Artificial Sequence: Synthetic oligonucleotide
  Sense strand starting at position 2734 of SEQ ID NO: 586861
aaagaaagcucucugguga

SEQ ID NO: 749569 - RNA, 19 nt, Artificial Sequence
  Description of Artificial Sequence: Synthetic oligonucleotide
  Antisense strand to SEQ ID NO: 749568
ucaccagagagcuuucuuu

SEQ ID NO: 749570 - RNA, 19 nt, Artificial Sequence
  Description of Artificial Sequence: Synthetic oligonucleotide
  Sense strand starting at position 2923 of SEQ ID NO: 586861
acagaugguaaauggcaua

SEQ ID NO: 749571 - RNA, 19 nt, Artificial Sequence
  Description of Artificial Sequence: Synthetic oligonucleotide
  Antisense strand to SEQ ID NO: 749570
uaugccauuuaccaucugu

SEQ ID NO: 749572 - RNA, 19 nt, Artificial Sequence
  Description of Artificial Sequence: Synthetic oligonucleotide
  Sense strand starting at position 3071 of SEQ ID NO: 586861
agaacugaugcuggugaga

SEQ ID NO: 749573 - RNA, 19 nt, Artificial Sequence
  Description of Artificial Sequence: Synthetic oligonucleotide
  Antisense strand to SEQ ID NO: 749572
ucucaccagcaucaguucu

SEQ ID NO: 749574 - RNA, 19 nt, Artificial Sequence
  Description of Artificial Sequence: Synthetic oligonucleotide
  Sense strand starting at position 3074 of SEQ ID NO: 586861
acugaugcuggugagaauu

SEQ ID NO: 749575 - RNA, 19 nt, Artificial Sequence
  Description of Artificial Sequence: Synthetic oligonucleotide
  Antisense strand to SEQ ID NO: 749574
aauucucaccagcaucagu

SEQ ID NO: 749576 - RNA, 19 nt, Artificial Sequence
  Description of Artificial Sequence: Synthetic oligonucleotide
  Sense strand starting at position 3139 of SEQ ID NO: 586861
cuuggaaguuucuuauuaa

SEQ ID NO: 749577 - RNA, 19 nt, Artificial Sequence
  Description of Artificial Sequence: Synthetic oligonucleotide
  Antisense strand to SEQ ID NO: 749576
uuaauaagaaacuuccaag

SEQ ID NO: 749578 - RNA, 19 nt, Artificial Sequence
  Description of Artificial Sequence: Synthetic oligonucleotide
  Sense strand starting at position 3413 of SEQ ID NO: 586861
ggaguaaaccuauaugcau

SEQ ID NO: 749579 - RNA, 19 nt, Artificial Sequence
  Description of Artificial Sequence: Synthetic oligonucleotide
  Antisense strand to SEQ ID NO: 749578
augcauauagguuuacucc

SEQ ID NO: 749580 - RNA, 19 nt, Artificial Sequence
  Description of Artificial Sequence: Synthetic oligonucleotide
  Sense strand starting at position 3517 of SEQ ID NO: 586861
gagacauauguaugugcaa

SEQ ID NO: 749581 - RNA, 19 nt, Artificial Sequence
  Description of Artificial Sequence: Synthetic oligonucleotide
  Antisense strand to SEQ ID NO: 749580
uugcacauacauaugucuc

SEQ ID NO: 749582 - RNA, 19 nt, Artificial Sequence
  Description of Artificial Sequence: Synthetic oligonucleotide
  Sense strand starting at position 3520 of SEQ ID NO: 586861
acauauguaugugcaagaa

SEQ ID NO: 749583 - RNA, 19 nt, Artificial Sequence
  Description of Artificial Sequence: Synthetic oligonucleotide
  Antisense strand to SEQ ID NO: 749582
uucuugcacauacauaugu

SEQ ID NO: 749584 - RNA, 19 nt, Artificial Sequence
  Description of Artificial Sequence: Synthetic oligonucleotide
  Sense strand starting at position 3524 of SEQ ID NO: 586861
auguaugugcaagaacuuu

SEQ ID NO: 749585 - RNA, 19 nt, Artificial Sequence
  Description of Artificial Sequence: Synthetic oligonucleotide
  Antisense strand to SEQ ID NO: 749584
aaaguucuugcacauacau

SEQ ID NO: 749586 - RNA, 19 nt, Artificial Sequence
  Description of Artificial Sequence: Synthetic oligonucleotide
  Sense strand starting at position 3574 of SEQ ID NO: 586861
gauuccaaggagugggauu

SEQ ID NO: 749587 - RNA, 19 nt, Artificial Sequence
  Description of Artificial Sequence: Synthetic oligonucleotide
  Antisense strand to SEQ ID NO: 749586
aaucccacuccuuggaauc

SEQ ID NO: 749588 - RNA, 19 nt, Artificial Sequence
  Description of Artificial Sequence: Synthetic oligonucleotide
  Sense strand starting at position 3977 of SEQ ID NO: 586861
guuuacucugcagauuauu

SEQ ID NO: 749589 - RNA, 19 nt, Artificial Sequence
  Description of Artificial Sequence: Synthetic oligonucleotide
  Antisense strand to SEQ ID NO: 749588
aauaaucugcagaguaaac

SEQ ID NO: 749590 - RNA, 19 nt, Artificial Sequence
  Description of Artificial Sequence: Synthetic oligonucleotide
  Sense strand starting at position 809 of SEQ ID NO: 586862
uuaagacaacguuauguaa

SEQ ID NO: 749591 - RNA, 19 nt, Artificial Sequence
  Description of Artificial Sequence: Synthetic oligonucleotide
  Antisense strand to SEQ ID NO: 749590
uuacauaacguugucuuaa

SEQ ID NO: 749592 - RNA, 19 nt, Artificial Sequence
  Description of Artificial Sequence: Synthetic oligonucleotide
  Sense strand starting at position 817 of SEQ ID NO: 586862
acguuauguaauggaaagu

SEQ ID NO: 749593 - RNA, 19 nt, Artificial Sequence
  Description of Artificial Sequence: Synthetic oligonucleotide
  Antisense strand to SEQ ID NO: 749592
acuuuccauuacauaacgu

SEQ ID NO: 749594 - RNA, 19 nt, Artificial Sequence
  Description of Artificial Sequence: Synthetic oligonucleotide
  Sense strand starting at position 962 of SEQ ID NO: 586862
ucauuauagcaguggaaag

SEQ ID NO: 749595 - RNA, 19 nt, Artificial Sequence
  Description of Artificial Sequence: Synthetic oligonucleotide
  Antisense strand to SEQ ID NO: 749594
cuuuccacugcuauaauga

SEQ ID NO: 749596 - RNA, 19 nt, Artificial Sequence
  Description of Artificial Sequence: Synthetic oligonucleotide
  Sense strand starting at position 1067 of SEQ ID NO: 586862
uuaaguaaacugggcauua

SEQ ID NO: 749597 - RNA, 19 nt, Artificial Sequence
  Description of Artificial Sequence: Synthetic oligonucleotide
  Antisense strand to SEQ ID NO: 749596
uaaugcccaguuuacuuaa

SEQ ID NO: 749598 - RNA, 19 nt, Artificial Sequence
  Description of Artificial Sequence: Synthetic oligonucleotide
  Sense strand starting at position 1069 of SEQ ID NO: 586862
aaguaaacugggcauuacu

SEQ ID NO: 749599 - RNA, 19 nt, Artificial Sequence
  Description of Artificial Sequence: Synthetic oligonucleotide
  Antisense strand to SEQ ID NO: 749598
aguaaugcccaguuuacuu

SEQ ID NO: 749600 - RNA, 19 nt, Artificial Sequence
  Description of Artificial Sequence: Synthetic oligonucleotide
  Sense strand starting at position 1078 of SEQ ID NO: 586862
gggcauuacugauccuuaa

SEQ ID NO: 749601 - RNA, 19 nt, Artificial Sequence
  Description of Artificial Sequence: Synthetic oligonucleotide
  Antisense strand to SEQ ID NO: 749600
uuaaggaucaguaaugccc

SEQ ID NO: 749602 - RNA, 19 nt, Artificial Sequence
  Description of Artificial Sequence: Synthetic oligonucleotide
  Sense strand starting at position 1243 of SEQ ID NO: 586862
cuacaaucuuguuuaaagu

SEQ ID NO: 749603 - RNA, 19 nt, Artificial Sequence
  Description of Artificial Sequence: Synthetic oligonucleotide
  Antisense strand to SEQ ID NO: 749602
acuuuaaacaagauuguag

SEQ ID NO: 749604 - RNA, 19 nt, Artificial Sequence
  Description of Artificial Sequence: Synthetic oligonucleotide
  Sense strand starting at position 1445 of SEQ ID NO: 586862
agaccaagacuccgacuua

SEQ ID NO: 749605 - RNA, 19 nt, Artificial Sequence
  Description of Artificial Sequence: Synthetic oligonucleotide
  Antisense strand to SEQ ID NO: 749604
uaagucggagucuuggucu

SEQ ID NO: 749606 - RNA, 19 nt, Artificial Sequence
  Description of Artificial Sequence: Synthetic oligonucleotide
  Sense strand starting at position 1456 of SEQ ID NO: 586862
ccgacuuaacuguaaagcu

SEQ ID NO: 749607 - RNA, 19 nt, Artificial Sequence
  Description of Artificial Sequence: Synthetic oligonucleotide
  Antisense strand to SEQ ID NO: 749606
agcuuuacaguuaagucgg

SEQ ID NO: 749608 - RNA, 19 nt, Artificial Sequence
  Description of Artificial Sequence: Synthetic oligonucleotide
  Sense strand starting at position 1463 of SEQ ID NO: 586862
aacuguaaagcugagaguu

SEQ ID NO: 749609 - RNA, 19 nt, Artificial Sequence
  Description of Artificial Sequence: Synthetic oligonucleotide
  Antisense strand to SEQ ID NO: 749608
aacucucagcuuuacaguu

SEQ ID NO: 749610 - RNA, 19 nt, Artificial Sequence
  Description of Artificial Sequence: Synthetic oligonucleotide
  Sense strand starting at position 1546 of SEQ ID NO: 586862
gucuacuugagccaggaaa

SEQ ID NO: 749611 - RNA, 19 nt, Artificial Sequence
  Description of Artificial Sequence: Synthetic oligonucleotide
  Antisense strand to SEQ ID NO: 749610
uuuccuggcucaaguagac

SEQ ID NO: 749612 - RNA, 19 nt, Artificial Sequence
  Description of Artificial Sequence: Synthetic oligonucleotide
  Sense strand starting at position 1590 of SEQ ID NO: 586862
cccagagaugguuaagcua

SEQ ID NO: 749613 - RNA, 19 nt, Artificial Sequence
  Description of Artificial Sequence: Synthetic oligonucleotide
  Antisense strand to SEQ ID NO: 749612
uagcuuaaccaucucuggg

SEQ ID NO: 749614 - RNA, 19 nt, Artificial Sequence
  Description of Artificial Sequence: Synthetic oligonucleotide
  Sense strand starting at position 1638 of SEQ ID NO: 586862
gaaagcgaauccuuggcua

SEQ ID NO: 749615 - RNA, 19 nt, Artificial Sequence
  Description of Artificial Sequence: Synthetic oligonucleotide
  Antisense strand to SEQ ID NO: 749614
uagccaaggauucgcuuuc

SEQ ID NO: 749616 - RNA, 19 nt, Artificial Sequence
  Description of Artificial Sequence: Synthetic oligonucleotide
  Sense strand starting at position 1762 of SEQ ID NO: 586862
ggcaaaugacuuugcaaag

SEQ ID NO: 749617 - RNA, 19 nt, Artificial Sequence
  Description of Artificial Sequence: Synthetic oligonucleotide
  Antisense strand to SEQ ID NO: 749616
cuuugcaaagucauuugcc

SEQ ID NO: 749618 - RNA, 19 nt, Artificial Sequence
  Description of Artificial Sequence: Synthetic oligonucleotide
  Sense strand starting at position 1911 of SEQ ID NO: 586862
ccugaauguagucagcgaa

SEQ ID NO: 749619 - RNA, 19 nt, Artificial Sequence
  Description of Artificial Sequence: Synthetic oligonucleotide
  Antisense strand to SEQ ID NO: 749618
uucgcugacuacauucagg

SEQ ID NO: 749620 - RNA, 19 nt, Artificial Sequence
  Description of Artificial Sequence: Synthetic oligonucleotide
  Sense strand starting at position 1948 of SEQ ID NO: 586862
gccaucuuuacccgaagag

SEQ ID NO: 749621 - RNA, 19 nt, Artificial Sequence
  Description of Artificial Sequence: Synthetic oligonucleotide
  Antisense strand to SEQ ID NO: 749620
cucuucggguaaagauggc

SEQ ID NO: 749622 - RNA, 19 nt, Artificial Sequence
  Description of Artificial Sequence: Synthetic oligonucleotide
  Sense strand starting at position 2125 of SEQ ID NO: 586862
gccugugcgcaugcugaaa

SEQ ID NO: 749623 - RNA, 19 nt, Artificial Sequence
  Description of Artificial Sequence: Synthetic oligonucleotide
  Antisense strand to SEQ ID NO: 749622
uuucagcaugcgcacaggc

SEQ ID NO: 749624 - RNA, 19 nt, Artificial Sequence
  Description of Artificial Sequence: Synthetic oligonucleotide
  Sense strand starting at position 2440 of SEQ ID NO: 586862
gugacauucccauauuagc

SEQ ID NO: 749625 - RNA, 19 nt, Artificial Sequence
  Description of Artificial Sequence: Synthetic oligonucleotide
  Antisense strand to SEQ ID NO: 749624
gcuaauaugggaaugucac

SEQ ID NO: 749626 - RNA, 19 nt, Artificial Sequence
  Description of Artificial Sequence: Synthetic oligonucleotide
  Sense strand starting at position 2526 of SEQ ID NO: 586862
guuccauucguacacagaa

SEQ ID NO: 749627 - RNA, 19 nt, Artificial Sequence
  Description of Artificial Sequence: Synthetic oligonucleotide
  Antisense strand to SEQ ID NO: 749626
uucuguguacgaauggaac

SEQ ID NO: 749628 - RNA, 19 nt, Artificial Sequence
  Description of Artificial Sequence: Synthetic oligonucleotide
  Sense strand starting at position 2719 of SEQ ID NO: 586862
uguagagucagagaagugu

SEQ ID NO: 749629 - RNA, 19 nt, Artificial Sequence
  Description of Artificial Sequence: Synthetic oligonucleotide
  Antisense strand to SEQ ID NO: 749628
acacuucucugacucuaca

SEQ ID NO: 749630 - RNA, 19 nt, Artificial Sequence
  Description of Artificial Sequence: Synthetic oligonucleotide
  Sense strand starting at position 2723 of SEQ ID NO: 586862
gagucagagaaguguagua

SEQ ID NO: 749631 - RNA, 19 nt, Artificial Sequence
  Description of Artificial Sequence: Synthetic oligonucleotide
  Antisense strand to SEQ ID NO: 749630
uacuacacuucucugacuc

SEQ ID NO: 749632 - RNA, 19 nt, Artificial Sequence
  Description of Artificial Sequence: Synthetic oligonucleotide
  Sense strand starting at position 2725 of SEQ ID NO: 586862
gucagagaaguguaguaua

SEQ ID NO: 749633 - RNA, 19 nt, Artificial Sequence
  Description of Artificial Sequence: Synthetic oligonucleotide
  Antisense strand to SEQ ID NO: 749632
uauacuacacuucucugac

SEQ ID NO: 749634 - RNA, 19 nt, Artificial Sequence
  Description of Artificial Sequence: Synthetic oligonucleotide
  Sense strand starting at position 2730 of SEQ ID NO: 586862
agaaguguaguauagugaa

SEQ ID NO: 749635 - RNA, 19 nt, Artificial Sequence
  Description of Artificial Sequence: Synthetic oligonucleotide
  Antisense strand to SEQ ID NO: 749634
uucacuauacuacacuucu

SEQ ID NO: 749636 - RNA, 19 nt, Artificial Sequence
  Description of Artificial Sequence: Synthetic oligonucleotide
  Sense strand starting at position 2742 of SEQ ID NO: 586862
uagugaagucagugcaaau

SEQ ID NO: 749637 - RNA, 19 nt, Artificial Sequence
  Description of Artificial Sequence: Synthetic oligonucleotide
  Antisense strand to SEQ ID NO: 749636
auuugcacugacuucacua

SEQ ID NO: 749638 - RNA, 19 nt, Artificial Sequence
  Description of Artificial Sequence: Synthetic oligonucleotide
  Sense strand starting at position 2791 of SEQ ID NO: 586862
aguugucuuagggagaauu

SEQ ID NO: 749639 - RNA, 19 nt, Artificial Sequence
  Description of Artificial Sequence: Synthetic oligonucleotide
  Antisense strand to SEQ ID NO: 749638
aauucucccuaagacaacu

SEQ ID NO: 749640 - RNA, 19 nt, Artificial Sequence
  Description of Artificial Sequence: Synthetic oligonucleotide
  Sense strand starting at position 2855 of SEQ ID NO: 586862
augauuagauuucgaagga

SEQ ID NO: 749641 - RNA, 19 nt, Artificial Sequence
  Description of Artificial Sequence: Synthetic oligonucleotide
  Antisense strand to SEQ ID NO: 749640
uccuucgaaaucuaaucau

SEQ ID NO: 749642 - RNA, 19 nt, Artificial Sequence
  Description of Artificial Sequence: Synthetic oligonucleotide
  Sense strand starting at position 2856 of SEQ ID NO: 586862
ugauuagauuucgaaggaa

SEQ ID NO: 749643 - RNA, 19 nt, Artificial Sequence
  Description of Artificial Sequence: Synthetic oligonucleotide
  Antisense strand to SEQ ID NO: 749642
uuccuucgaaaucuaauca

SEQ ID NO: 749644 - RNA, 19 nt, Artificial Sequence
  Description of Artificial Sequence: Synthetic oligonucleotide
  Sense strand starting at position 2878 of SEQ ID NO: 586862
cucucagggccuugaaaga

SEQ ID NO: 749645 - RNA, 19 nt, Artificial Sequence
  Description of Artificial Sequence: Synthetic oligonucleotide
  Antisense strand to SEQ ID NO: 749644
ucuuucaaggcccugagag

SEQ ID NO: 749646 - RNA, 19 nt, Artificial Sequence
  Description of Artificial Sequence: Synthetic oligonucleotide
  Sense strand starting at position 2940 of SEQ ID NO: 586862
augcccuuuccaggaaaug

SEQ ID NO: 749647 - RNA, 19 nt, Artificial Sequence
  Description of Artificial Sequence: Synthetic oligonucleotide
  Antisense strand to SEQ ID NO: 749646
cauuuccuggaaagggcau

SEQ ID NO: 749648 - RNA, 19 nt, Artificial Sequence
  Description of Artificial Sequence: Synthetic oligonucleotide
  Sense strand starting at position 3066 of SEQ ID NO: 586862
gaggucauccuaggauaca

SEQ ID NO: 749649 - RNA, 19 nt, Artificial Sequence
  Description of Artificial Sequence: Synthetic oligonucleotide
  Antisense strand to SEQ ID NO: 749648
uguauccuaggaugaccuc

SEQ ID NO: 749650 - RNA, 19 nt, Artificial Sequence
  Description of Artificial Sequence: Synthetic oligonucleotide
  Sense strand starting at position 3099 of SEQ ID NO: 586862
gaaacuaugcuagaguuug

SEQ ID NO: 749651 - RNA, 19 nt, Artificial Sequence
  Description of Artificial Sequence: Synthetic oligonucleotide
  Antisense strand to SEQ ID NO: 749650
caaacucuagcauaguuuc

SEQ ID NO: 749652 - RNA, 19 nt, Artificial Sequence
  Description of Artificial Sequence: Synthetic oligonucleotide
  Sense strand starting at position 3104 of SEQ ID NO: 586862
uaugcuagaguuuggucaa

SEQ ID NO: 749653 - RNA, 19 nt, Artificial Sequence
  Description of Artificial Sequence: Synthetic oligonucleotide
  Antisense strand to SEQ ID NO: 749652
uugaccaaacucuagcaua

SEQ ID NO: 749654 - RNA, 19 nt, Artificial Sequence
  Description of Artificial Sequence: Synthetic oligonucleotide
  Sense strand starting at position 3344 of SEQ ID NO: 586862
guguuugagcucugaggag

SEQ ID NO: 749655 - RNA, 19 nt, Artificial Sequence
  Description of Artificial Sequence: Synthetic oligonucleotide
  Antisense strand to SEQ ID NO: 749654
cuccucagagcucaaacac

SEQ ID NO: 749656 - RNA, 19 nt, Artificial Sequence
  Description of Artificial Sequence: Synthetic oligonucleotide
  Sense strand starting at position 3408 of SEQ ID NO: 586862
aaguaucuuggauguugaa

SEQ ID NO: 749657 - RNA, 19 nt, Artificial Sequence
  Description of Artificial Sequence: Synthetic oligonucleotide
  Antisense strand to SEQ ID NO: 749656
uucaacauccaagauacuu

SEQ ID NO: 749658 - RNA, 19 nt, Artificial Sequence
  Description of Artificial Sequence: Synthetic oligonucleotide
  Sense strand starting at position 3417 of SEQ ID NO: 586862
ggauguugaaacugucaug

SEQ ID NO: 749659 - RNA, 19 nt, Artificial Sequence
  Description of Artificial Sequence: Synthetic oligonucleotide
  Antisense strand to SEQ ID NO: 749658
caugacaguuucaacaucc

SEQ ID NO: 749660 - RNA, 19 nt, Artificial Sequence
  Description of Artificial Sequence: Synthetic oligonucleotide
  Sense strand starting at position 3468 of SEQ ID NO: 586862
gcagccugaaagugauaau

SEQ ID NO: 749661 - RNA, 19 nt, Artificial Sequence
  Description of Artificial Sequence: Synthetic oligonucleotide
  Antisense strand to SEQ ID NO: 749660
auuaucacuuucaggcugc

SEQ ID NO: 749662 - RNA, 19 nt, Artificial Sequence
  Description of Artificial Sequence: Synthetic oligonucleotide
  Sense strand starting at position 3549 of SEQ ID NO: 586862
cauguacuuccugggauaa

SEQ ID NO: 749663 - RNA, 19 nt, Artificial Sequence
  Description of Artificial Sequence: Synthetic oligonucleotide
  Antisense strand to SEQ ID NO: 749662
uuaucccaggaaguacaug

SEQ ID NO: 749664 - RNA, 19 nt, Artificial Sequence
  Description of Artificial Sequence: Synthetic oligonucleotide
  Sense strand starting at position 3550 of SEQ ID NO: 586862
auguacuuccugggauaau

SEQ ID NO: 749665 - RNA, 19 nt, Artificial Sequence
  Description of Artificial Sequence: Synthetic oligonucleotide
  Antisense strand to SEQ ID NO: 749664
auuaucccaggaaguacau

SEQ ID NO: 749666 - RNA, 19 nt, Artificial Sequence
  Description of Artificial Sequence: Synthetic oligonucleotide
  Sense strand starting at position 3684 of SEQ ID NO: 586862
gcaauacuuguggacauac

SEQ ID NO: 749667 - RNA, 19 nt, Artificial Sequence
  Description of Artificial Sequence: Synthetic oligonucleotide
  Antisense strand to SEQ ID NO: 749666
guauguccacaaguauugc

SEQ ID NO: 749668 - RNA, 19 nt, Artificial Sequence
  Description of Artificial Sequence: Synthetic oligonucleotide
  Sense strand starting at position 3728 of SEQ ID NO: 586862
guuagagaacuuuguguau

SEQ ID NO: 749669 - RNA, 19 nt, Artificial Sequence
  Description of Artificial Sequence: Synthetic oligonucleotide
  Antisense strand to SEQ ID NO: 749668
auacacaaaguucucuaac

SEQ ID NO: 749670 - RNA, 19 nt, Artificial Sequence
  Description of Artificial Sequence: Synthetic oligonucleotide
  Sense strand starting at position 202 of SEQ ID NO: 586863
augauaaaucucugugucu

SEQ ID NO: 749671 - RNA, 19 nt, Artificial Sequence
  Description of Artificial Sequence: Synthetic oligonucleotide
  Antisense strand to SEQ ID NO: 749670
agacacagagauuuaucau

SEQ ID NO: 749672 - RNA, 19 nt, Artificial Sequence
  Description of Artificial Sequence: Synthetic oligonucleotide
  Sense strand starting at position 203 of SEQ ID NO: 586863
ugauaaaucucugugucua

SEQ ID NO: 749673 - RNA, 19 nt, Artificial Sequence
  Description of Artificial Sequence: Synthetic oligonucleotide
  Antisense strand to SEQ ID NO: 749672
uagacacagagauuuauca

SEQ ID NO: 749674 - RNA, 19 nt, Artificial Sequence
  Description of Artificial Sequence: Synthetic oligonucleotide
  Sense strand starting at position 205 of SEQ ID NO: 586863
auaaaucucugugucuaag

SEQ ID NO: 749675 - RNA, 19 nt, Artificial Sequence
  Description of Artificial Sequence: Synthetic oligonucleotide
  Antisense strand to SEQ ID NO: 749674
cuuagacacagagauuuau

SEQ ID NO: 749676 - RNA, 19 nt, Artificial Sequence
  Description of Artificial Sequence: Synthetic oligonucleotide
  Sense strand starting at position 238 of SEQ ID NO: 586863
cugaguauaucugacauuu

SEQ ID NO: 749677 - RNA, 19 nt, Artificial Sequence
  Description of Artificial Sequence: Synthetic oligonucleotide
  Antisense strand to SEQ ID NO: 749676
aaaugucagauauacucag

SEQ ID NO: 749678 - RNA, 19 nt, Artificial Sequence
  Description of Artificial Sequence: Synthetic oligonucleotide
  Sense strand starting at position 452 of SEQ ID NO: 586863
acggcauaaagaugagacu

SEQ ID NO: 749679 - RNA, 19 nt, Artificial Sequence
  Description of Artificial Sequence: Synthetic oligonucleotide
  Antisense strand to SEQ ID NO: 749678
agucucaucuuuaugccgu

SEQ ID NO: 749680 - RNA, 19 nt, Artificial Sequence
  Description of Artificial Sequence: Synthetic oligonucleotide
  Sense strand starting at position 519 of SEQ ID NO: 586863
ucucaugcacuguaaguua

SEQ ID NO: 749681 - RNA, 19 nt, Artificial Sequence
  Description of Artificial Sequence: Synthetic oligonucleotide
  Antisense strand to SEQ ID NO: 749680
uaacuuacagugcaugaga

SEQ ID NO: 749682 - RNA, 19 nt, Artificial Sequence
  Description of Artificial Sequence: Synthetic oligonucleotide
  Sense strand starting at position 550 of SEQ ID NO: 586863
guacaaucuccauggagug

SEQ ID NO: 749683 - RNA, 19 nt, Artificial Sequence
  Description of Artificial Sequence: Synthetic oligonucleotide
  Antisense strand to SEQ ID NO: 749682
cacuccauggagauuguac

SEQ ID NO: 749684 - RNA, 19 nt, Artificial Sequence
  Description of Artificial Sequence: Synthetic oligonucleotide
  Sense strand starting at position 918 of SEQ ID NO: 586863
gacccaucuuggucucaga

SEQ ID NO: 749685 - RNA, 19 nt, Artificial Sequence
  Description of Artificial Sequence: Synthetic oligonucleotide
  Antisense strand to SEQ ID NO: 749684
ucugagaccaagauggguc

SEQ ID NO: 749686 - RNA, 19 nt, Artificial Sequence
  Description of Artificial Sequence: Synthetic oligonucleotide
  Sense strand starting at position 1017 of SEQ ID NO: 586863
auuacuguauacgcauaau

SEQ ID NO: 749687 - RNA, 19 nt, Artificial Sequence
  Description of Artificial Sequence: Synthetic oligonucleotide
  Antisense strand to SEQ ID NO: 749686
auuaugcguauacaguaau

SEQ ID NO: 749688 - RNA, 19 nt, Artificial Sequence
  Description of Artificial Sequence: Synthetic oligonucleotide
  Sense strand starting at position 1020 of SEQ ID NO: 586863
acuguauacgcauaauaca

SEQ ID NO: 749689 - RNA, 19 nt, Artificial Sequence
  Description of Artificial Sequence: Synthetic oligonucleotide
  Antisense strand to SEQ ID NO: 749688
uguauuaugcguauacagu

SEQ ID NO: 749690 - RNA, 19 nt, Artificial Sequence
  Description of Artificial Sequence: Synthetic oligonucleotide
  Sense strand starting at position 1028 of SEQ ID NO: 586863
cgcauaauacaggauacua

SEQ ID NO: 749691 - RNA, 19 nt, Artificial Sequence
  Description of Artificial Sequence: Synthetic oligonucleotide
  Antisense strand to SEQ ID NO: 749690
uaguauccuguauuaugcg

SEQ ID NO: 749692 - RNA, 19 nt, Artificial Sequence
  Description of Artificial Sequence: Synthetic oligonucleotide
  Sense strand starting at position 1066 of SEQ ID NO: 586863
acuacaugauaggaaagua

SEQ ID NO: 749693 - RNA, 19 nt, Artificial Sequence
  Description of Artificial Sequence: Synthetic oligonucleotide
  Antisense strand to SEQ ID NO: 749692
uacuuuccuaucauguagu

SEQ ID NO: 749694 - RNA, 19 nt, Artificial Sequence
  Description of Artificial Sequence: Synthetic oligonucleotide
  Sense strand starting at position 1178 of SEQ ID NO: 586863
uugcuuguauauguauaga

SEQ ID NO: 749695 - RNA, 19 nt, Artificial Sequence
  Description of Artificial Sequence: Synthetic oligonucleotide
  Antisense strand to SEQ ID NO: 749694
ucuauacauauacaagcaa

SEQ ID NO: 749696 - RNA, 19 nt, Artificial Sequence
  Description of Artificial Sequence: Synthetic oligonucleotide
  Sense strand starting at position 1306 of SEQ ID NO: 586863
aauugugaacccugugaau

SEQ ID NO: 749697 - RNA, 19 nt, Artificial Sequence
  Description of Artificial Sequence: Synthetic oligonucleotide
  Antisense strand to SEQ ID NO: 749696
auucacaggguucacaauu

SEQ ID NO: 749698 - RNA, 19 nt, Artificial Sequence
  Description of Artificial Sequence: Synthetic oligonucleotide
  Sense strand starting at position 1308 of SEQ ID NO: 586863
uugugaacccugugaaugu

SEQ ID NO: 749699 - RNA, 19 nt, Artificial Sequence
  Description of Artificial Sequence: Synthetic oligonucleotide
  Antisense strand to SEQ ID NO: 749698
acauucacaggguucacaa

SEQ ID NO: 749700 - RNA, 19 nt, Artificial Sequence
  Description of Artificial Sequence: Synthetic oligonucleotide
  Sense strand starting at position 1324 of SEQ ID NO: 586863
uguauuaucuggucaaaua

SEQ ID NO: 749701 - RNA, 19 nt, Artificial Sequence
  Description of Artificial Sequence: Synthetic oligonucleotide
  Antisense strand to SEQ ID NO: 749700
uauuugaccagauaauaca

SEQ ID NO: 749702 - RNA, 19 nt, Artificial Sequence
  Description of Artificial Sequence: Synthetic oligonucleotide
  Sense strand starting at position 1325 of SEQ ID NO: 586863
guauuaucuggucaaauaa

SEQ ID NO: 749703 - RNA, 19 nt, Artificial Sequence
  Description of Artificial Sequence: Synthetic oligonucleotide
  Antisense strand to SEQ ID NO: 749702
uuauuugaccagauaauac

SEQ ID NO: 749704 - RNA, 19 nt, Artificial Sequence
  Description of Artificial Sequence: Synthetic oligonucleotide
  Sense strand starting at position 1365 of SEQ ID NO: 586863
ucagaauuguggcuacaca

SEQ ID NO: 749705 - RNA, 19 nt, Artificial Sequence
  Description of Artificial Sequence: Synthetic oligonucleotide
  Antisense strand to SEQ ID NO: 749704
uguguagccacaauucuga

SEQ ID NO: 749706 - RNA, 19 nt, Artificial Sequence
  Description of Artificial Sequence: Synthetic oligonucleotide
  Sense strand starting at position 1605 of SEQ ID NO: 586863
cgguguccagacuaaauua

SEQ ID NO: 749707 - RNA, 19 nt, Artificial Sequence
  Description of Artificial Sequence: Synthetic oligonucleotide
  Antisense strand to SEQ ID NO: 749706
uaauuuagucuggacaccg

SEQ ID NO: 749708 - RNA, 19 nt, Artificial Sequence
  Description of Artificial Sequence: Synthetic oligonucleotide
  Sense strand starting at position 1993 of SEQ ID NO: 586863
acugauuaccugugagaag

SEQ ID NO: 749709 - RNA, 19 nt, Artificial Sequence
  Description of Artificial Sequence: Synthetic oligonucleotide
  Antisense strand to SEQ ID NO: 749708
cuucucacagguaaucagu

SEQ ID NO: 749710 - RNA, 19 nt, Artificial Sequence
  Description of Artificial Sequence: Synthetic oligonucleotide
  Sense strand starting at position 2012 of SEQ ID NO: 586863
gaaacuuuacaguguuugu

SEQ ID NO: 749711 - RNA, 19 nt, Artificial Sequence
  Description of Artificial Sequence: Synthetic oligonucleotide
  Antisense strand to SEQ ID NO: 749710
acaaacacuguaaaguuuc

SEQ ID NO: 749712 - RNA, 19 nt, Artificial Sequence
  Description of Artificial Sequence: Synthetic oligonucleotide
  Sense strand starting at position 2015 of SEQ ID NO: 586863
acuuuacaguguuuguaaa

SEQ ID NO: 749713 - RNA, 19 nt, Artificial Sequence
  Description of Artificial Sequence: Synthetic oligonucleotide
  Antisense strand to SEQ ID NO: 749712
uuuacaaacacuguaaagu

SEQ ID NO: 749714 - RNA, 19 nt, Artificial Sequence
  Description of Artificial Sequence: Synthetic oligonucleotide
  Sense strand starting at position 2092 of SEQ ID NO: 586863
aucuauuucugguaaagag

SEQ ID NO: 749715 - RNA, 19 nt, Artificial Sequence
  Description of Artificial Sequence: Synthetic oligonucleotide
  Antisense strand to SEQ ID NO: 749714
cucuuuaccagaaauagau

SEQ ID NO: 749716 - RNA, 19 nt, Artificial Sequence
  Description of Artificial Sequence: Synthetic oligonucleotide
  Sense strand starting at position 2445 of SEQ ID NO: 586863
gaaacaguaugauugauuc

SEQ ID NO: 749717 - RNA, 19 nt, Artificial Sequence
  Description of Artificial Sequence: Synthetic oligonucleotide
  Antisense strand to SEQ ID NO: 749716
gaaucaaucauacuguuuc

SEQ ID NO: 749718 - RNA, 19 nt, Artificial Sequence
  Description of Artificial Sequence: Synthetic oligonucleotide
  Sense strand starting at position 2452 of SEQ ID NO: 586863
uaugauugauuccucagga

SEQ ID NO: 749719 - RNA, 19 nt, Artificial Sequence
  Description of Artificial Sequence: Synthetic oligonucleotide
  Antisense strand to SEQ ID NO: 749718
uccugaggaaucaaucaua

SEQ ID NO: 749720 - RNA, 19 nt, Artificial Sequence
  Description of Artificial Sequence: Synthetic oligonucleotide
  Sense strand starting at position 2503 of SEQ ID NO: 586863
ucgauuucuggauguguau

SEQ ID NO: 749721 - RNA, 19 nt, Artificial Sequence
  Description of Artificial Sequence: Synthetic oligonucleotide
  Antisense strand to SEQ ID NO: 749720
auacacauccagaaaucga

SEQ ID NO: 749722 - RNA, 19 nt, Artificial Sequence
  Description of Artificial Sequence: Synthetic oligonucleotide
  Sense strand starting at position 2569 of SEQ ID NO: 586863
guccauaagcagcauuagu

SEQ ID NO: 749723 - RNA, 19 nt, Artificial Sequence
  Description of Artificial Sequence: Synthetic oligonucleotide
  Antisense strand to SEQ ID NO: 749722
acuaaugcugcuuauggac

SEQ ID NO: 749724 - RNA, 19 nt, Artificial Sequence
  Description of Artificial Sequence: Synthetic oligonucleotide
  Sense strand starting at position 2774 of SEQ ID NO: 586863
augcuaagugaauaaguca

SEQ ID NO: 749725 - RNA, 19 nt, Artificial Sequence
  Description of Artificial Sequence: Synthetic oligonucleotide
  Antisense strand to SEQ ID NO: 749724
ugacuuauucacuuagcau

SEQ ID NO: 749726 - RNA, 19 nt, Artificial Sequence
  Description of Artificial Sequence: Synthetic oligonucleotide
  Sense strand starting at position 2781 of SEQ ID NO: 586863
gugaauaagucagucacaa

SEQ ID NO: 749727 - RNA, 19 nt, Artificial Sequence
  Description of Artificial Sequence: Synthetic oligonucleotide
  Antisense strand to SEQ ID NO: 749726
uugugacugacuuauucac

SEQ ID NO: 749728 - RNA, 19 nt, Artificial Sequence
  Description of Artificial Sequence: Synthetic oligonucleotide
  Sense strand starting at position 2834 of SEQ ID NO: 586863
aguaccuagaggugucaaa

SEQ ID NO: 749729 - RNA, 19 nt, Artificial Sequence
  Description of Artificial Sequence: Synthetic oligonucleotide
  Antisense strand to SEQ ID NO: 749728
uuugacaccucuagguacu

SEQ ID NO: 749730 - RNA, 19 nt, Artificial Sequence
  Description of Artificial Sequence: Synthetic oligonucleotide
  Sense strand starting at position 2844 of SEQ ID NO: 586863
ggugucaaauuccuaaaga

SEQ ID NO: 749731 - RNA, 19 nt, Artificial Sequence
  Description of Artificial Sequence: Synthetic oligonucleotide
  Antisense strand to SEQ ID NO: 749730
ucuuuaggaauuugacacc

SEQ ID NO: 749732 - RNA, 19 nt, Artificial Sequence
  Description of Artificial Sequence: Synthetic oligonucleotide
  Sense strand starting at position 2874 of SEQ ID NO: 586863
gaugguuuccaguggacag

SEQ ID NO: 749733 - RNA, 19 nt, Artificial Sequence
  Description of Artificial Sequence: Synthetic oligonucleotide
  Antisense strand to SEQ ID NO: 749732
cuguccacuggaaaccauc

SEQ ID NO: 749734 - RNA, 19 nt, Artificial Sequence
  Description of Artificial Sequence: Synthetic oligonucleotide
  Sense strand starting at position 2875 of SEQ ID NO: 586863
augguuuccaguggacagu

SEQ ID NO: 749735 - RNA, 19 nt, Artificial Sequence
  Description of Artificial Sequence: Synthetic oligonucleotide
  Antisense strand to SEQ ID NO: 749734
acuguccacuggaaaccau

SEQ ID NO: 749736 - RNA, 19 nt, Artificial Sequence
  Description of Artificial Sequence: Synthetic oligonucleotide
  Sense strand starting at position 3000 of SEQ ID NO: 586863
uguacuuaacauuacugua

SEQ ID NO: 749737 - RNA, 19 nt, Artificial Sequence
  Description of Artificial Sequence: Synthetic oligonucleotide
  Antisense strand to SEQ ID NO: 749736
uacaguaauguuaaguaca

SEQ ID NO: 749738 - RNA, 19 nt, Artificial Sequence
  Description of Artificial Sequence: Synthetic oligonucleotide
  Sense strand starting at position 3027 of SEQ ID NO: 586863
aacggugaagaucguaaau

SEQ ID NO: 749739 - RNA, 19 nt, Artificial Sequence
  Description of Artificial Sequence: Synthetic oligonucleotide
  Antisense strand to SEQ ID NO: 749738
auuuacgaucuucaccguu

SEQ ID NO: 749740 - RNA, 19 nt, Artificial Sequence
  Description of Artificial Sequence: Synthetic oligonucleotide
  Sense strand starting at position 3404 of SEQ ID NO: 586863
ccauguuagaguuaauggu

SEQ ID NO: 749741 - RNA, 19 nt, Artificial Sequence
  Description of Artificial Sequence: Synthetic oligonucleotide
  Antisense strand to SEQ ID NO: 749740
accauuaacucuaacaugg

SEQ ID NO: 749742 - RNA, 19 nt, Artificial Sequence
  Description of Artificial Sequence: Synthetic oligonucleotide
  Sense strand starting at position 3508 of SEQ ID NO: 586863
uuuaacagugguugcauua

SEQ ID NO: 749743 - RNA, 19 nt, Artificial Sequence
  Description of Artificial Sequence: Synthetic oligonucleotide
  Antisense strand to SEQ ID NO: 749742
uaaugcaaccacuguuaaa

SEQ ID NO: 749744 - RNA, 19 nt, Artificial Sequence
  Description of Artificial Sequence: Synthetic oligonucleotide
  Sense strand starting at position 3518 of SEQ ID NO: 586863
guugcauuaguagggauca

SEQ ID NO: 749745 - RNA, 19 nt, Artificial Sequence
  Description of Artificial Sequence: Synthetic oligonucleotide
  Antisense strand to SEQ ID NO: 749744
ugaucccuacuaaugcaac

SEQ ID NO: 749746 - RNA, 19 nt, Artificial Sequence
  Description of Artificial Sequence: Synthetic oligonucleotide
  Sense strand starting at position 3726 of SEQ ID NO: 586863
uuuaucaugcagcagauau

SEQ ID NO: 749747 - RNA, 19 nt, Artificial Sequence
  Description of Artificial Sequence: Synthetic oligonucleotide
  Antisense strand to SEQ ID NO: 749746
auaucugcugcaugauaaa

SEQ ID NO: 749748 - RNA, 19 nt, Artificial Sequence
  Description of Artificial Sequence: Synthetic oligonucleotide
  Sense strand starting at position 3760 of SEQ ID NO: 586863
guauuuaauuggccuggca

SEQ ID NO: 749749 - RNA, 19 nt, Artificial Sequence
  Description of Artificial Sequence: Synthetic oligonucleotide
  Antisense strand to SEQ ID NO: 749748
ugccaggccaauuaaauac

SEQ ID NO: 749750 - RNA, 19 nt, Artificial Sequence
  Description of Artificial Sequence: Synthetic oligonucleotide
  Sense strand starting at position 106 of SEQ ID NO: 586864
aagcgagugcugucgaauc

SEQ ID NO: 749751 - RNA, 19 nt, Artificial Sequence
  Description of Artificial Sequence: Synthetic oligonucleotide
  Antisense strand to SEQ ID NO: 749750
gauucgacagcacucgcuu

SEQ ID NO: 749752 - RNA, 19 nt, Artificial Sequence
  Description of Artificial Sequence: Synthetic oligonucleotide
  Sense strand starting at position 116 of SEQ ID NO: 586864
ugucgaaucucacguguga

SEQ ID NO: 749753 - RNA, 19 nt, Artificial Sequence
  Description of Artificial Sequence: Synthetic oligonucleotide
  Antisense strand to SEQ ID NO: 749752
ucacacgugagauucgaca

SEQ ID NO: 749754 - RNA, 19 nt, Artificial Sequence
  Description of Artificial Sequence: Synthetic oligonucleotide
  Sense strand starting at position 118 of SEQ ID NO: 586864
ucgaaucucacgugugauc

SEQ ID NO: 749755 - RNA, 19 nt, Artificial Sequence
  Description of Artificial Sequence: Synthetic oligonucleotide
  Antisense strand to SEQ ID NO: 749754
gaucacacgugagauucga

SEQ ID NO: 749756 - RNA, 19 nt, Artificial Sequence
  Description of Artificial Sequence: Synthetic oligonucleotide
  Sense strand starting at position 120 of SEQ ID NO: 586864
gaaucucacgugugaucuc

SEQ ID NO: 749757 - RNA, 19 nt, Artificial Sequence
  Description of Artificial Sequence: Synthetic oligonucleotide
  Antisense strand to SEQ ID NO: 749756
gagaucacacgugagauuc

SEQ ID NO: 749758 - RNA, 19 nt, Artificial Sequence
  Description of Artificial Sequence: Synthetic oligonucleotide
  Sense strand starting at position 127 of SEQ ID NO: 586864
acgugugaucuccacagag

SEQ ID NO: 749759 - RNA, 19 nt, Artificial Sequence
  Description of Artificial Sequence: Synthetic oligonucleotide
  Antisense strand to SEQ ID NO: 749758
cucuguggagaucacacgu

SEQ ID NO: 749760 - RNA, 19 nt, Artificial Sequence
  Description of Artificial Sequence: Synthetic oligonucleotide
  Sense strand starting at position 129 of SEQ ID NO: 586864
gugugaucuccacagagca

SEQ ID NO: 749761 - RNA, 19 nt, Artificial Sequence
  Description of Artificial Sequence: Synthetic oligonucleotide
  Antisense strand to SEQ ID NO: 749760
ugcucuguggagaucacac

SEQ ID NO: 749762 - RNA, 19 nt, Artificial Sequence
  Description of Artificial Sequence: Synthetic oligonucleotide
  Sense strand starting at position 221 of SEQ ID NO: 586864
cugcuugucugcuggauaa

SEQ ID NO: 749763 - RNA, 19 nt, Artificial Sequence
  Description of Artificial Sequence: Synthetic oligonucleotide
  Antisense strand to SEQ ID NO: 749762
uuauccagcagacaagcag

SEQ ID NO: 749764 - RNA, 19 nt, Artificial Sequence
  Description of Artificial Sequence: Synthetic oligonucleotide
  Sense strand starting at position 327 of SEQ ID NO: 586864
ggguauuuguccgccagau

SEQ ID NO: 749765 - RNA, 19 nt, Artificial Sequence
  Description of Artificial Sequence: Synthetic oligonucleotide
  Antisense strand to SEQ ID NO: 749764
aucuggcggacaaauaccc

SEQ ID NO: 749766 - RNA, 19 nt, Artificial Sequence
  Description of Artificial Sequence: Synthetic oligonucleotide
  Sense strand starting at position 1267 of SEQ ID NO: 586864
uccgucuucugcuucgaua

SEQ ID NO: 749767 - RNA, 19 nt, Artificial Sequence
  Description of Artificial Sequence: Synthetic oligonucleotide
  Antisense strand to SEQ ID NO: 749766
uaucgaagcagaagacgga

SEQ ID NO: 749768 - RNA, 19 nt, Artificial Sequence
  Description of Artificial Sequence: Synthetic oligonucleotide
  Sense strand starting at position 1268 of SEQ ID NO: 586864
ccgucuucugcuucgauau

SEQ ID NO: 749769 - RNA, 19 nt, Artificial Sequence
  Description of Artificial Sequence: Synthetic oligonucleotide
  Antisense strand to SEQ ID NO: 749768
auaucgaagcagaagacgg

SEQ ID NO: 749770 - RNA, 19 nt, Artificial Sequence
  Description of Artificial Sequence: Synthetic oligonucleotide
  Sense strand starting at position 1269 of SEQ ID NO: 586864
cgucuucugcuucgauauc

SEQ ID NO: 749771 - RNA, 19 nt, Artificial Sequence
  Description of Artificial Sequence: Synthetic oligonucleotide
  Antisense strand to SEQ ID NO: 749770
gauaucgaagcagaagacg

SEQ ID NO: 749772 - RNA, 19 nt, Artificial Sequence
  Description of Artificial Sequence: Synthetic oligonucleotide
  Sense strand starting at position 1270 of SEQ ID NO: 586864
gucuucugcuucgauauca

SEQ ID NO: 749773 - RNA, 19 nt, Artificial Sequence
  Description of Artificial Sequence: Synthetic oligonucleotide
  Antisense strand to SEQ ID NO: 749772
ugauaucgaagcagaagac

SEQ ID NO: 749774 - RNA, 19 nt, Artificial Sequence
  Description of Artificial Sequence: Synthetic oligonucleotide
  Sense strand starting at position 1512 of SEQ ID NO: 586864
gaucguugaggccaggaau

SEQ ID NO: 749775 - RNA, 19 nt, Artificial Sequence
  Description of Artificial Sequence: Synthetic oligonucleotide
  Antisense strand to SEQ ID NO: 749774
auuccuggccucaacgauc

SEQ ID NO: 749776 - RNA, 19 nt, Artificial Sequence
  Description of Artificial Sequence: Synthetic oligonucleotide
  Sense strand starting at position 1718 of SEQ ID NO: 586864
gcgagacccuguccguaaa

SEQ ID NO: 749777 - RNA, 19 nt, Artificial Sequence
  Description of Artificial Sequence: Synthetic oligonucleotide
  Antisense strand to SEQ ID NO: 749776
uuuacggacagggucucgc

SEQ ID NO: 749778 - RNA, 19 nt, Artificial Sequence
  Description of Artificial Sequence: Synthetic oligonucleotide
  Sense strand starting at position 3026 of SEQ ID NO: 586864
cggacaucuugguagcaga

SEQ ID NO: 749779 - RNA, 19 nt, Artificial Sequence
  Description of Artificial Sequence: Synthetic oligonucleotide
  Antisense strand to SEQ ID NO: 749778
ucugcuaccaagauguccg

SEQ ID NO: 749780 - RNA, 19 nt, Artificial Sequence
  Description of Artificial Sequence: Synthetic oligonucleotide
  Sense strand starting at position 3127 of SEQ ID NO: 586864
uacugucguuuccugacaa

SEQ ID NO: 749781 - RNA, 19 nt, Artificial Sequence
  Description of Artificial Sequence: Synthetic oligonucleotide
  Antisense strand to SEQ ID NO: 749780
uugucaggaaacgacagua

SEQ ID NO: 749782 - RNA, 19 nt, Artificial Sequence
  Description of Artificial Sequence: Synthetic oligonucleotide
  Sense strand starting at position 3128 of SEQ ID NO: 586864
acugucguuuccugacaac

SEQ ID NO: 749783 - RNA, 19 nt, Artificial Sequence
  Description of Artificial Sequence: Synthetic oligonucleotide
  Antisense strand to SEQ ID NO: 749782
guugucaggaaacgacagu

SEQ ID NO: 749784 - RNA, 19 nt, Artificial Sequence
  Description of Artificial Sequence: Synthetic oligonucleotide
  Sense strand starting at position 3131 of SEQ ID NO: 586864
gucguuuccugacaaccau

SEQ ID NO: 749785 - RNA, 19 nt, Artificial Sequence
  Description of Artificial Sequence: Synthetic oligonucleotide
  Antisense strand to SEQ ID NO: 749784
augguugucaggaaacgac

SEQ ID NO: 749786 - RNA, 19 nt, Artificial Sequence
  Description of Artificial Sequence: Synthetic oligonucleotide
  Sense strand starting at position 3167 of SEQ ID NO: 586864
ugucuauauuaccagaaag

SEQ ID NO: 749787 - RNA, 19 nt, Artificial Sequence
  Description of Artificial Sequence: Synthetic oligonucleotide
  Antisense strand to SEQ ID NO: 749786
cuuucugguaauauagaca

SEQ ID NO: 749788 - RNA, 19 nt, Artificial Sequence
  Description of Artificial Sequence: Synthetic oligonucleotide
  Sense strand starting at position 3207 of SEQ ID NO: 586864
gagagaauugagggcgagu

SEQ ID NO: 749789 - RNA, 19 nt, Artificial Sequence
  Description of Artificial Sequence: Synthetic oligonucleotide
  Antisense strand to SEQ ID NO: 749788
acucgcccucaauucucuc

SEQ ID NO: 749790 - RNA, 19 nt, Artificial Sequence
  Description of Artificial Sequence: Synthetic oligonucleotide
  Sense strand starting at position 3575 of SEQ ID NO: 586864
cagagucucuguuguccau

SEQ ID NO: 749791 - RNA, 19 nt, Artificial Sequence
  Description of Artificial Sequence: Synthetic oligonucleotide
  Antisense strand to SEQ ID NO: 749790
auggacaacagagacucug

SEQ ID NO: 749792 - RNA, 19 nt, Artificial Sequence
  Description of Artificial Sequence: Synthetic oligonucleotide
  Sense strand starting at position 3606 of SEQ ID NO: 586864
uggcgugauccucacugca

SEQ ID NO: 749793 - RNA, 19 nt, Artificial Sequence
  Description of Artificial Sequence: Synthetic oligonucleotide
  Antisense strand to SEQ ID NO: 749792
ugcagugaggaucacgcca

SEQ ID NO: 749794 - RNA, 19 nt, Artificial Sequence
  Description of Artificial Sequence: Synthetic oligonucleotide
  Sense strand starting at position 3608 of SEQ ID NO: 586864
gcgugauccucacugcaac

SEQ ID NO: 749795 - RNA, 19 nt, Artificial Sequence
  Description of Artificial Sequence: Synthetic oligonucleotide
  Antisense strand to SEQ ID NO: 749794
guugcagugaggaucacgc

SEQ ID NO: 749796 - RNA, 19 nt, Artificial Sequence
  Description of Artificial Sequence: Synthetic oligonucleotide
  Sense strand starting at position 145 of SEQ ID NO: 586865
aagcgagugcugucgaauc

SEQ ID NO: 749797 - RNA, 19 nt, Artificial Sequence
  Description of Artificial Sequence: Synthetic oligonucleotide
  Antisense strand to SEQ ID NO: 749796
gauucgacagcacucgcuu

SEQ ID NO: 749798 - RNA, 19 nt, Artificial Sequence
  Description of Artificial Sequence: Synthetic oligonucleotide
  Sense strand starting at position 155 of SEQ ID NO: 586865
ugucgaaucucacguguga

SEQ ID NO: 749799 - RNA, 19 nt, Artificial Sequence
  Description of Artificial Sequence: Synthetic oligonucleotide
  Antisense strand to SEQ ID NO: 749798
ucacacgugagauucgaca

SEQ ID NO: 749800 - RNA, 19 nt, Artificial Sequence
  Description of Artificial Sequence: Synthetic oligonucleotide
  Sense strand starting at position 157 of SEQ ID NO: 586865
ucgaaucucacgugugauc

SEQ ID NO: 749801 - RNA, 19 nt, Artificial Sequence
  Description of Artificial Sequence: Synthetic oligonucleotide
  Antisense strand to SEQ ID NO: 749800
gaucacacgugagauucga

SEQ ID NO: 749802 - RNA, 19 nt, Artificial Sequence
  Description of Artificial Sequence: Synthetic oligonucleotide
  Sense strand starting at position 159 of SEQ ID NO: 586865
gaaucucacgugugaucuc

SEQ ID NO: 749803 - RNA, 19 nt, Artificial Sequence
  Description of Artificial Sequence: Synthetic oligonucleotide
  Antisense strand to SEQ ID NO: 749802
gagaucacacgugagauuc

SEQ ID NO: 749804 - RNA, 19 nt, Artificial Sequence
  Description of Artificial Sequence: Synthetic oligonucleotide
  Sense strand starting at position 166 of SEQ ID NO: 586865
acgugugaucuccacagag

SEQ ID NO: 749805 - RNA, 19 nt, Artificial Sequence
  Description of Artificial Sequence: Synthetic oligonucleotide
  Antisense strand to SEQ ID NO: 749804
cucuguggagaucacacgu

SEQ ID NO: 749806 - RNA, 19 nt, Artificial Sequence
  Description of Artificial Sequence: Synthetic oligonucleotide
  Sense strand starting at position 168 of SEQ ID NO: 586865
gugugaucuccacagagca

SEQ ID NO: 749807 - RNA, 19 nt, Artificial Sequence
  Description of Artificial Sequence: Synthetic oligonucleotide
  Antisense strand to SEQ ID NO: 749806
ugcucuguggagaucacac

SEQ ID NO: 749808 - RNA, 19 nt, Artificial Sequence
  Description of Artificial Sequence: Synthetic oligonucleotide
  Sense strand starting at position 260 of SEQ ID NO: 586865
cugcuugucugcuggauaa

SEQ ID NO: 749809 - RNA, 19 nt, Artificial Sequence
  Description of Artificial Sequence: Synthetic oligonucleotide
  Antisense strand to SEQ ID NO: 749808
uuauccagcagacaagcag

SEQ ID NO: 749810 - RNA, 19 nt, Artificial Sequence
  Description of Artificial Sequence: Synthetic oligonucleotide
  Sense strand starting at position 366 of SEQ ID NO: 586865
ggguauuuguccgccagau

SEQ ID NO: 749811 - RNA, 19 nt, Artificial Sequence
  Description of Artificial Sequence: Synthetic oligonucleotide
  Antisense strand to SEQ ID NO: 749810
aucuggcggacaaauaccc

SEQ ID NO: 749812 - RNA, 19 nt, Artificial Sequence
  Description of Artificial Sequence: Synthetic oligonucleotide
  Sense strand starting at position 1306 of SEQ ID NO: 586865
uccgucuucugcuucgaua

SEQ ID NO: 749813 - RNA, 19 nt, Artificial Sequence
  Description of Artificial Sequence: Synthetic oligonucleotide
  Antisense strand to SEQ ID NO: 749812
uaucgaagcagaagacgga

SEQ ID NO: 749814 - RNA, 19 nt, Artificial Sequence
  Description of Artificial Sequence: Synthetic oligonucleotide
  Sense strand starting at position 1307 of SEQ ID NO: 586865
ccgucuucugcuucgauau

SEQ ID NO: 749815 - RNA, 19 nt, Artificial Sequence
  Description of Artificial Sequence: Synthetic oligonucleotide
  Antisense strand to SEQ ID NO: 749814
auaucgaagcagaagacgg

SEQ ID NO: 749816 - RNA, 19 nt, Artificial Sequence
  Description of Artificial Sequence: Synthetic oligonucleotide
  Sense strand starting at position 1308 of SEQ ID NO: 586865
cgucuucugcuucgauauc

SEQ ID NO: 749817 - RNA, 19 nt, Artificial Sequence
  Description of Artificial Sequence: Synthetic oligonucleotide
  Antisense strand to SEQ ID NO: 749816
gauaucgaagcagaagacg

SEQ ID NO: 749818 - RNA, 19 nt, Artificial Sequence
  Description of Artificial Sequence: Synthetic oligonucleotide
  Sense strand starting at position 1309 of SEQ ID NO: 586865
gucuucugcuucgauauca

SEQ ID NO: 749819 - RNA, 19 nt, Artificial Sequence
  Description of Artificial Sequence: Synthetic oligonucleotide
  Antisense strand to SEQ ID NO: 749818
ugauaucgaagcagaagac

SEQ ID NO: 749820 - RNA, 19 nt, Artificial Sequence
  Description of Artificial Sequence: Synthetic oligonucleotide
  Sense strand starting at position 1551 of SEQ ID NO: 586865
gaucguugaggccaggaau

SEQ ID NO: 749821 - RNA, 19 nt, Artificial Sequence
  Description of Artificial Sequence: Synthetic oligonucleotide
  Antisense strand to SEQ ID NO: 749820
auuccuggccucaacgauc

SEQ ID NO: 749822 - RNA, 19 nt, Artificial Sequence
  Description of Artificial Sequence: Synthetic oligonucleotide
  Sense strand starting at position 1757 of SEQ ID NO: 586865
gcgagacccuguccguaaa

SEQ ID NO: 749823 - RNA, 19 nt, Artificial Sequence
  Description of Artificial Sequence: Synthetic oligonucleotide
  Antisense strand to SEQ ID NO: 749822
uuuacggacagggucucgc

SEQ ID NO: 749824 - RNA, 19 nt, Artificial Sequence
  Description of Artificial Sequence: Synthetic oligonucleotide
  Sense strand starting at position 3065 of SEQ ID NO: 586865
cggacaucuugguagcaga

SEQ ID NO: 749825 - RNA, 19 nt, Artificial Sequence
  Description of Artificial Sequence: Synthetic oligonucleotide
  Antisense strand to SEQ ID NO: 749824
ucugcuaccaagauguccg

SEQ ID NO: 749826 - RNA, 19 nt, Artificial Sequence
  Description of Artificial Sequence: Synthetic oligonucleotide
  Sense strand starting at position 3166 of SEQ ID NO: 586865
uacugucguuuccugacaa

SEQ ID NO: 749827 - RNA, 19 nt, Artificial Sequence
  Description of Artificial Sequence: Synthetic oligonucleotide
  Antisense strand to SEQ ID NO: 749826
uugucaggaaacgacagua

SEQ ID NO: 749828 - RNA, 19 nt, Artificial Sequence
  Description of Artificial Sequence: Synthetic oligonucleotide
  Sense strand starting at position 3167 of SEQ ID NO: 586865
acugucguuuccugacaac

SEQ ID NO: 749829 - RNA, 19 nt, Artificial Sequence
  Description of Artificial Sequence: Synthetic oligonucleotide
  Antisense strand to SEQ ID NO: 749828
guugucaggaaacgacagu

SEQ ID NO: 749830 - RNA, 19 nt, Artificial Sequence
  Description of Artificial Sequence: Synthetic oligonucleotide
  Sense strand starting at position 3170 of SEQ ID NO: 586865
gucguuuccugacaaccau

SEQ ID NO: 749831 - RNA, 19 nt, Artificial Sequence
  Description of Artificial Sequence: Synthetic oligonucleotide
  Antisense strand to SEQ ID NO: 749830
augguugucaggaaacgac

SEQ ID NO: 749832 - RNA, 19 nt, Artificial Sequence
  Description of Artificial Sequence: Synthetic oligonucleotide
  Sense strand starting at position 3206 of SEQ ID NO: 586865
ugucuauauuaccagaaag

SEQ ID NO: 749833 - RNA, 19 nt, Artificial Sequence
  Description of Artificial Sequence: Synthetic oligonucleotide
  Antisense strand to SEQ ID NO: 749832
cuuucugguaauauagaca

SEQ ID NO: 749834 - RNA, 19 nt, Artificial Sequence
  Description of Artificial Sequence: Synthetic oligonucleotide
  Sense strand starting at position 3246 of SEQ ID NO: 586865
gagagaauugagggcgagu

SEQ ID NO: 749835 - RNA, 19 nt, Artificial Sequence
  Description of Artificial Sequence: Synthetic oligonucleotide
  Antisense strand to SEQ ID NO: 749834
acucgcccucaauucucuc

SEQ ID NO: 749836 - RNA, 19 nt, Artificial Sequence
  Description of Artificial Sequence: Synthetic oligonucleotide
  Sense strand starting at position 3614 of SEQ ID NO: 586865
cagagucucuguuguccau

SEQ ID NO: 749837 - RNA, 19 nt, Artificial Sequence
  Description of Artificial Sequence: Synthetic oligonucleotide
  Antisense strand to SEQ ID NO: 749836
auggacaacagagacucug

SEQ ID NO: 749838 - RNA, 19 nt, Artificial Sequence
  Description of Artificial Sequence: Synthetic oligonucleotide
  Sense strand starting at position 3645 of SEQ ID NO: 586865
uggcgugauccucacugca

SEQ ID NO: 749839 - RNA, 19 nt, Artificial Sequence
  Description of Artificial Sequence: Synthetic oligonucleotide
  Antisense strand to SEQ ID NO: 749838
ugcagugaggaucacgcca

SEQ ID NO: 749840 - RNA, 19 nt, Artificial Sequence
  Description of Artificial Sequence: Synthetic oligonucleotide
  Sense strand starting at position 3647 of SEQ ID NO: 586865
gcgugauccucacugcaac

SEQ ID NO: 749841 - RNA, 19 nt, Artificial Sequence
  Description of Artificial Sequence: Synthetic oligonucleotide
  Antisense strand to SEQ ID NO: 749840
guugcagugaggaucacgc

SEQ ID NO: 749842 - RNA, 19 nt, Artificial Sequence
  Description of Artificial Sequence: Synthetic oligonucleotide
  Sense strand starting at position 153 of SEQ ID NO: 586866
guaccuggccuuuauuauu

SEQ ID NO: 749843 - RNA, 19 nt, Artificial Sequence
  Description of Artificial Sequence: Synthetic oligonucleotide
  Antisense strand to SEQ ID NO: 749842
aauaauaaaggccagguac

SEQ ID NO: 749844 - RNA, 19 nt, Artificial Sequence
  Description of Artificial Sequence: Synthetic oligonucleotide
  Sense strand starting at position 186 of SEQ ID NO: 586866
ugaggaaucucgcucuguu

SEQ ID NO: 749845 - RNA, 19 nt, Artificial Sequence
  Description of Artificial Sequence: Synthetic oligonucleotide
  Antisense strand to SEQ ID NO: 749844
aacagagcgagauuccuca

SEQ ID NO: 749846 - RNA, 19 nt, Artificial Sequence
  Description of Artificial Sequence: Synthetic oligonucleotide
  Sense strand starting at position 321 of SEQ ID NO: 586866
aggccaggcugauguauuu

SEQ ID NO: 749847 - RNA, 19 nt, Artificial Sequence
  Description of Artificial Sequence: Synthetic oligonucleotide
  Antisense strand to SEQ ID NO: 749846
aaauacaucagccuggccu

SEQ ID NO: 749848 - RNA, 19 nt, Artificial Sequence
  Description of Artificial Sequence: Synthetic oligonucleotide
  Sense strand starting at position 507 of SEQ ID NO: 586866
ccguguaaugccuauggaa

SEQ ID NO: 749849 - RNA, 19 nt, Artificial Sequence
  Description of Artificial Sequence: Synthetic oligonucleotide
  Antisense strand to SEQ ID NO: 749848
uuccauaggcauuacacgg

SEQ ID NO: 749850 - RNA, 19 nt, Artificial Sequence
  Description of Artificial Sequence: Synthetic oligonucleotide
  Sense strand starting at position 509 of SEQ ID NO: 586866
guguaaugccuauggaacu

SEQ ID NO: 749851 - RNA, 19 nt, Artificial Sequence
  Description of Artificial Sequence: Synthetic oligonucleotide
  Antisense strand to SEQ ID NO: 749850
aguuccauaggcauuacac

SEQ ID NO: 749852 - RNA, 19 nt, Artificial Sequence
  Description of Artificial Sequence: Synthetic oligonucleotide
  Sense strand starting at position 552 of SEQ ID NO: 586866
ugcuacuagucacauauau

SEQ ID NO: 749853 - RNA, 19 nt, Artificial Sequence
  Description of Artificial Sequence: Synthetic oligonucleotide
  Antisense strand to SEQ ID NO: 749852
auauaugugacuaguagca

SEQ ID NO: 749854 - RNA, 19 nt, Artificial Sequence
  Description of Artificial Sequence: Synthetic oligonucleotide
  Sense strand starting at position 648 of SEQ ID NO: 586866
gcagacugugaacaacuua

SEQ ID NO: 749855 - RNA, 19 nt, Artificial Sequence
  Description of Artificial Sequence: Synthetic oligonucleotide
  Antisense strand to SEQ ID NO: 749854
uaaguuguucacagucugc

SEQ ID NO: 749856 - RNA, 19 nt, Artificial Sequence
  Description of Artificial Sequence: Synthetic oligonucleotide
  Sense strand starting at position 685 of SEQ ID NO: 586866
accgguuaguugugucauu

SEQ ID NO: 749857 - RNA, 19 nt, Artificial Sequence
  Description of Artificial Sequence: Synthetic oligonucleotide
  Antisense strand to SEQ ID NO: 749856
aaugacacaacuaaccggu

SEQ ID NO: 749858 - RNA, 19 nt, Artificial Sequence
  Description of Artificial Sequence: Synthetic oligonucleotide
  Sense strand starting at position 687 of SEQ ID NO: 586866
cgguuaguugugucauucu

SEQ ID NO: 749859 - RNA, 19 nt, Artificial Sequence
  Description of Artificial Sequence: Synthetic oligonucleotide
  Antisense strand to SEQ ID NO: 749858
agaaugacacaacuaaccg

SEQ ID NO: 749860 - RNA, 19 nt, Artificial Sequence
  Description of Artificial Sequence: Synthetic oligonucleotide
  Sense strand starting at position 993 of SEQ ID NO: 586866
cuaguugagucauucuuac

SEQ ID NO: 749861 - RNA, 19 nt, Artificial Sequence
  Description of Artificial Sequence: Synthetic oligonucleotide
  Antisense strand to SEQ ID NO: 749860
guaagaaugacucaacuag

SEQ ID NO: 749862 - RNA, 19 nt, Artificial Sequence
  Description of Artificial Sequence: Synthetic oligonucleotide
  Sense strand starting at position 997 of SEQ ID NO: 586866
uugagucauucuuacaaag

SEQ ID NO: 749863 - RNA, 19 nt, Artificial Sequence
  Description of Artificial Sequence: Synthetic oligonucleotide
  Antisense strand to SEQ ID NO: 749862
cuuuguaagaaugacucaa

SEQ ID NO: 749864 - RNA, 19 nt, Artificial Sequence
  Description of Artificial Sequence: Synthetic oligonucleotide
  Sense strand starting at position 1049 of SEQ ID NO: 586866
uagucuugauauggcacaa

SEQ ID NO: 749865 - RNA, 19 nt, Artificial Sequence
  Description of Artificial Sequence: Synthetic oligonucleotide
  Antisense strand to SEQ ID NO: 749864
uugugccauaucaagacua

SEQ ID NO: 749866 - RNA, 19 nt, Artificial Sequence
  Description of Artificial Sequence: Synthetic oligonucleotide
  Sense strand starting at position 1098 of SEQ ID NO: 586866
ugcaguguguauuaugaau

SEQ ID NO: 749867 - RNA, 19 nt, Artificial Sequence
  Description of Artificial Sequence: Synthetic oligonucleotide
  Antisense strand to SEQ ID NO: 749866
auucauaauacacacugca

SEQ ID NO: 749868 - RNA, 19 nt, Artificial Sequence
  Description of Artificial Sequence: Synthetic oligonucleotide
  Sense strand starting at position 1100 of SEQ ID NO: 586866
caguguguauuaugaauug

SEQ ID NO: 749869 - RNA, 19 nt, Artificial Sequence
  Description of Artificial Sequence: Synthetic oligonucleotide
  Antisense strand to SEQ ID NO: 749868
caauucauaauacacacug

SEQ ID NO: 749870 - RNA, 19 nt, Artificial Sequence
  Description of Artificial Sequence: Synthetic oligonucleotide
  Sense strand starting at position 1442 of SEQ ID NO: 586866
gugagacccuauguuuaca

SEQ ID NO: 749871 - RNA, 19 nt, Artificial Sequence
  Description of Artificial Sequence: Synthetic oligonucleotide
  Antisense strand to SEQ ID NO: 749870
uguaaacauagggucucac

SEQ ID NO: 749872 - RNA, 19 nt, Artificial Sequence
  Description of Artificial Sequence: Synthetic oligonucleotide
  Sense strand starting at position 1492 of SEQ ID NO: 586866
guuacugaaucccugguau

SEQ ID NO: 749873 - RNA, 19 nt, Artificial Sequence
  Description of Artificial Sequence: Synthetic oligonucleotide
  Antisense strand to SEQ ID NO: 749872
auaccagggauucaguaac

SEQ ID NO: 749874 - RNA, 19 nt, Artificial Sequence
  Description of Artificial Sequence: Synthetic oligonucleotide
  Sense strand starting at position 1503 of SEQ ID NO: 586866
ccugguauuuggcgggaca

SEQ ID NO: 749875 - RNA, 19 nt, Artificial Sequence
  Description of Artificial Sequence: Synthetic oligonucleotide
  Antisense strand to SEQ ID NO: 749874
ugucccgccaaauaccagg

SEQ ID NO: 749876 - RNA, 19 nt, Artificial Sequence
  Description of Artificial Sequence: Synthetic oligonucleotide
  Sense strand starting at position 1505 of SEQ ID NO: 586866
ugguauuuggcgggacacu

SEQ ID NO: 749877 - RNA, 19 nt, Artificial Sequence
  Description of Artificial Sequence: Synthetic oligonucleotide
  Antisense strand to SEQ ID NO: 749876
agugucccgccaaauacca

SEQ ID NO: 749878 - RNA, 19 nt, Artificial Sequence
  Description of Artificial Sequence: Synthetic oligonucleotide
  Sense strand starting at position 1593 of SEQ ID NO: 586866
ugacucuacaagggugaau

SEQ ID NO: 749879 - RNA, 19 nt, Artificial Sequence
  Description of Artificial Sequence: Synthetic oligonucleotide
  Antisense strand to SEQ ID NO: 749878
auucacccuuguagaguca

SEQ ID NO: 749880 - RNA, 19 nt, Artificial Sequence
  Description of Artificial Sequence: Synthetic oligonucleotide
  Sense strand starting at position 1669 of SEQ ID NO: 586866
gcagguucuuacgucucaa

SEQ ID NO: 749881 - RNA, 19 nt, Artificial Sequence
  Description of Artificial Sequence: Synthetic oligonucleotide
  Antisense strand to SEQ ID NO: 749880
uugagacguaagaaccugc

SEQ ID NO: 749882 - RNA, 19 nt, Artificial Sequence
  Description of Artificial Sequence: Synthetic oligonucleotide
  Sense strand starting at position 1704 of SEQ ID NO: 586866
ccugcagcuuucuaaaggu

SEQ ID NO: 749883 - RNA, 19 nt, Artificial Sequence
  Description of Artificial Sequence: Synthetic oligonucleotide
  Antisense strand to SEQ ID NO: 749882
accuuuagaaagcugcagg

SEQ ID NO: 749884 - RNA, 19 nt, Artificial Sequence
  Description of Artificial Sequence: Synthetic oligonucleotide
  Sense strand starting at position 2542 of SEQ ID NO: 586866
gguccugugucccuccuaa

SEQ ID NO: 749885 - RNA, 19 nt, Artificial Sequence
  Description of Artificial Sequence: Synthetic oligonucleotide
  Antisense strand to SEQ ID NO: 749884
uuaggagggacacaggacc

SEQ ID NO: 749886 - RNA, 19 nt, Artificial Sequence
  Description of Artificial Sequence: Synthetic oligonucleotide
  Sense strand starting at position 2577 of SEQ ID NO: 586866
cauuucuucccgcaucgau

SEQ ID NO: 749887 - RNA, 19 nt, Artificial Sequence
  Description of Artificial Sequence: Synthetic oligonucleotide
  Antisense strand to SEQ ID NO: 749886
aucgaugcgggaagaaaug

SEQ ID NO: 749888 - RNA, 19 nt, Artificial Sequence
  Description of Artificial Sequence: Synthetic oligonucleotide
  Sense strand starting at position 2596 of SEQ ID NO: 586866
gcagucuccgcggagaaca

SEQ ID NO: 749889 - RNA, 19 nt, Artificial Sequence
  Description of Artificial Sequence: Synthetic oligonucleotide
  Antisense strand to SEQ ID NO: 749888
uguucuccgcggagacugc

SEQ ID NO: 749890 - RNA, 19 nt, Artificial Sequence
  Description of Artificial Sequence: Synthetic oligonucleotide
  Sense strand starting at position 2716 of SEQ ID NO: 586866
cuccauccugcuggacaua

SEQ ID NO: 749891 - RNA, 19 nt, Artificial Sequence
  Description of Artificial Sequence: Synthetic oligonucleotide
  Antisense strand to SEQ ID NO: 749890
uauguccagcaggauggag

SEQ ID NO: 749892 - RNA, 19 nt, Artificial Sequence
  Description of Artificial Sequence: Synthetic oligonucleotide
  Sense strand starting at position 3012 of SEQ ID NO: 586866
ucagaaguggcguguaauc

SEQ ID NO: 749893 - RNA, 19 nt, Artificial Sequence
  Description of Artificial Sequence: Synthetic oligonucleotide
  Antisense strand to SEQ ID NO: 749892
gauuacacgccacuucuga

SEQ ID NO: 749894 - RNA, 19 nt, Artificial Sequence
  Description of Artificial Sequence: Synthetic oligonucleotide
  Sense strand starting at position 3017 of SEQ ID NO: 586866
aguggcguguaaucaguaa

SEQ ID NO: 749895 - RNA, 19 nt, Artificial Sequence
  Description of Artificial Sequence: Synthetic oligonucleotide
  Antisense strand to SEQ ID NO: 749894
uuacugauuacacgccacu

SEQ ID NO: 749896 - RNA, 19 nt, Artificial Sequence
  Description of Artificial Sequence: Synthetic oligonucleotide
  Sense strand starting at position 3021 of SEQ ID NO: 586866
gcguguaaucaguaauagu

SEQ ID NO: 749897 - RNA, 19 nt, Artificial Sequence
  Description of Artificial Sequence: Synthetic oligonucleotide
  Antisense strand to SEQ ID NO: 749896
acuauuacugauuacacgc

SEQ ID NO: 749898 - RNA, 19 nt, Artificial Sequence
  Description of Artificial Sequence: Synthetic oligonucleotide
  Sense strand starting at position 3030 of SEQ ID NO: 586866
caguaauaguccugagugc

SEQ ID NO: 749899 - RNA, 19 nt, Artificial Sequence
  Description of Artificial Sequence: Synthetic oligonucleotide
  Antisense strand to SEQ ID NO: 749898
gcacucaggacuauuacug

SEQ ID NO: 749900 - RNA, 19 nt, Artificial Sequence
  Description of Artificial Sequence: Synthetic oligonucleotide
  Sense strand starting at position 3103 of SEQ ID NO: 586866
gggcuaaagggcuguaauu

SEQ ID NO: 749901 - RNA, 19 nt, Artificial Sequence
  Description of Artificial Sequence: Synthetic oligonucleotide
  Antisense strand to SEQ ID NO: 749900
aauuacagcccuuuagccc

SEQ ID NO: 749902 - RNA, 19 nt, Artificial Sequence
  Description of Artificial Sequence: Synthetic oligonucleotide
  Sense strand starting at position 3105 of SEQ ID NO: 586866
gcuaaagggcuguaauugu

SEQ ID NO: 749903 - RNA, 19 nt, Artificial Sequence
  Description of Artificial Sequence: Synthetic oligonucleotide
  Antisense strand to SEQ ID NO: 749902
acaauuacagcccuuuagc

SEQ ID NO: 749904 - RNA, 19 nt, Artificial Sequence
  Description of Artificial Sequence: Synthetic oligonucleotide
  Sense strand starting at position 3532 of SEQ ID NO: 586866
agcaguuucucuguuaggu

SEQ ID NO: 749905 - RNA, 19 nt, Artificial Sequence
  Description of Artificial Sequence: Synthetic oligonucleotide
  Antisense strand to SEQ ID NO: 749904
accuaacagagaaacugcu

SEQ ID NO: 749906 - RNA, 19 nt, Artificial Sequence
  Description of Artificial Sequence: Synthetic oligonucleotide
  Sense strand starting at position 3574 of SEQ ID NO: 586866
gggagauaaaucugucucu

SEQ ID NO: 749907 - RNA, 19 nt, Artificial Sequence
  Description of Artificial Sequence: Synthetic oligonucleotide
  Antisense strand to SEQ ID NO: 749906
agagacagauuuaucuccc

SEQ ID NO: 749908 - RNA, 19 nt, Artificial Sequence
  Description of Artificial Sequence: Synthetic oligonucleotide
  Sense strand starting at position 3575 of SEQ ID NO: 586866
ggagauaaaucugucucuu

SEQ ID NO: 749909 - RNA, 19 nt, Artificial Sequence
  Description of Artificial Sequence: Synthetic oligonucleotide
  Antisense strand to SEQ ID NO: 749908
aagagacagauuuaucucc

SEQ ID NO: 749910 - RNA, 19 nt, Artificial Sequence
  Description of Artificial Sequence: Synthetic oligonucleotide
  Sense strand starting at position 3577 of SEQ ID NO: 586866
agauaaaucugucucuuug

SEQ ID NO: 749911 - RNA, 19 nt, Artificial Sequence
  Description of Artificial Sequence: Synthetic oligonucleotide
  Antisense strand to SEQ ID NO: 749910
caaagagacagauuuaucu

SEQ ID NO: 749912 - RNA, 19 nt, Artificial Sequence
  Description of Artificial Sequence: Synthetic oligonucleotide
  Sense strand starting at position 3591 of SEQ ID NO: 586866
cuuugcaagucuuagggau

SEQ ID NO: 749913 - RNA, 19 nt, Artificial Sequence
  Description of Artificial Sequence: Synthetic oligonucleotide
  Antisense strand to SEQ ID NO: 749912
aucccuaagacuugcaaag

SEQ ID NO: 749914 - RNA, 19 nt, Artificial Sequence
  Description of Artificial Sequence: Synthetic oligonucleotide
  Sense strand starting at position 3607 of SEQ ID NO: 586866
gauggagaauauuagauua

SEQ ID NO: 749915 - RNA, 19 nt, Artificial Sequence
  Description of Artificial Sequence: Synthetic oligonucleotide
  Antisense strand to SEQ ID NO: 749914
uaaucuaauauucuccauc

SEQ ID NO: 749916 - RNA, 19 nt, Artificial Sequence
  Description of Artificial Sequence: Synthetic oligonucleotide
  Sense strand starting at position 3834 of SEQ ID NO: 586866
agugguggcccguguuuga

SEQ ID NO: 749917 - RNA, 19 nt, Artificial Sequence
  Description of Artificial Sequence: Synthetic oligonucleotide
  Antisense strand to SEQ ID NO: 749916
ucaaacacgggccaccacu

SEQ ID NO: 749918 - RNA, 19 nt, Artificial Sequence
  Description of Artificial Sequence: Synthetic oligonucleotide
  Sense strand starting at position 3835 of SEQ ID NO: 586866
gugguggcccguguuugaa

SEQ ID NO: 749919 - RNA, 19 nt, Artificial Sequence
  Description of Artificial Sequence: Synthetic oligonucleotide
  Antisense strand to SEQ ID NO: 749918
uucaaacacgggccaccac

SEQ ID NO: 749920 - RNA, 19 nt, Artificial Sequence
  Description of Artificial Sequence: Synthetic oligonucleotide
  Sense strand starting at position 2 of SEQ ID NO: 586867
caagcaugguguuuaugua

SEQ ID NO: 749921 - RNA, 19 nt, Artificial Sequence
  Description of Artificial Sequence: Synthetic oligonucleotide
  Antisense strand to SEQ ID NO: 749920
uacauaaacaccaugcuug

SEQ ID NO: 749922 - RNA, 19 nt, Artificial Sequence
  Description of Artificial Sequence: Synthetic oligonucleotide
  Sense strand starting at position 3 of SEQ ID NO: 586867
aagcaugguguuuauguaa

SEQ ID NO: 749923 - RNA, 19 nt, Artificial Sequence
  Description of Artificial Sequence: Synthetic oligonucleotide
  Antisense strand to SEQ ID NO: 749922
uuacauaaacaccaugcuu

SEQ ID NO: 749924 - RNA, 19 nt, Artificial Sequence
  Description of Artificial Sequence: Synthetic oligonucleotide
  Sense strand starting at position 6 of SEQ ID NO: 586867
caugguguuuauguaauuu

SEQ ID NO: 749925 - RNA, 19 nt, Artificial Sequence
  Description of Artificial Sequence: Synthetic oligonucleotide
  Antisense strand to SEQ ID NO: 749924
aaauuacauaaacaccaug

SEQ ID NO: 749926 - RNA, 19 nt, Artificial Sequence
  Description of Artificial Sequence: Synthetic oligonucleotide
  Sense strand starting at position 322 of SEQ ID NO: 586867
cugccuuacgugcauuaau

SEQ ID NO: 749927 - RNA, 19 nt, Artificial Sequence
  Description of Artificial Sequence: Synthetic oligonucleotide
  Antisense strand to SEQ ID NO: 749926
auuaaugcacguaaggcag

SEQ ID NO: 749928 - RNA, 19 nt, Artificial Sequence
  Description of Artificial Sequence: Synthetic oligonucleotide
  Sense strand starting at position 919 of SEQ ID NO: 586867
ggguuuaagccaugcucau

SEQ ID NO: 749929 - RNA, 19 nt, Artificial Sequence
  Description of Artificial Sequence: Synthetic oligonucleotide
  Antisense strand to SEQ ID NO: 749928
augagcauggcuuaaaccc

SEQ ID NO: 749930 - RNA, 19 nt, Artificial Sequence
  Description of Artificial Sequence: Synthetic oligonucleotide
  Sense strand starting at position 1296 of SEQ ID NO: 586867
ccugaauuaggcuguauag

SEQ ID NO: 749931 - RNA, 19 nt, Artificial Sequence
  Description of Artificial Sequence: Synthetic oligonucleotide
  Antisense strand to SEQ ID NO: 749930
cuauacagccuaauucagg

SEQ ID NO: 749932 - RNA, 19 nt, Artificial Sequence
  Description of Artificial Sequence: Synthetic oligonucleotide
  Sense strand starting at position 1298 of SEQ ID NO: 586867
ugaauuaggcuguauagug

SEQ ID NO: 749933 - RNA, 19 nt, Artificial Sequence
  Description of Artificial Sequence: Synthetic oligonucleotide
  Antisense strand to SEQ ID NO: 749932
cacuauacagccuaauuca

SEQ ID NO: 749934 - RNA, 19 nt, Artificial Sequence
  Description of Artificial Sequence: Synthetic oligonucleotide
  Sense strand starting at position 1357 of SEQ ID NO: 586867
ggaggaucgcuuugggcuu

SEQ ID NO: 749935 - RNA, 19 nt, Artificial Sequence
  Description of Artificial Sequence: Synthetic oligonucleotide
  Antisense strand to SEQ ID NO: 749934
aagcccaaagcgauccucc

SEQ ID NO: 749936 - RNA, 19 nt, Artificial Sequence
  Description of Artificial Sequence: Synthetic oligonucleotide
  Sense strand starting at position 1540 of SEQ ID NO: 586867
aucgcuugagucugagaag

SEQ ID NO: 749937 - RNA, 19 nt, Artificial Sequence
  Description of Artificial Sequence: Synthetic oligonucleotide
  Antisense strand to SEQ ID NO: 749936
cuucucagacucaagcgau

SEQ ID NO: 749938 - RNA, 19 nt, Artificial Sequence
  Description of Artificial Sequence: Synthetic oligonucleotide
  Sense strand starting at position 1551 of SEQ ID NO: 586867
cugagaaguugacugcagu

SEQ ID NO: 749939 - RNA, 19 nt, Artificial Sequence
  Description of Artificial Sequence: Synthetic oligonucleotide
  Antisense strand to SEQ ID NO: 749938
acugcagucaacuucucag

SEQ ID NO: 749940 - RNA, 19 nt, Artificial Sequence
  Description of Artificial Sequence: Synthetic oligonucleotide
  Sense strand starting at position 1646 of SEQ ID NO: 586867
ccguccuuccucggagaga

SEQ ID NO: 749941 - RNA, 19 nt, Artificial Sequence
  Description of Artificial Sequence: Synthetic oligonucleotide
  Antisense strand to SEQ ID NO: 749940
ucucuccgaggaaggacgg

SEQ ID NO: 749942 - RNA, 19 nt, Artificial Sequence
  Description of Artificial Sequence: Synthetic oligonucleotide
  Sense strand starting at position 2040 of SEQ ID NO: 586867
ggcggagucucgauuggca

SEQ ID NO: 749943 - RNA, 19 nt, Artificial Sequence
  Description of Artificial Sequence: Synthetic oligonucleotide
  Antisense strand to SEQ ID NO: 749942
ugccaaucgagacuccgcc

SEQ ID NO: 749944 - RNA, 19 nt, Artificial Sequence
  Description of Artificial Sequence: Synthetic oligonucleotide
  Sense strand starting at position 2604 of SEQ ID NO: 586867
gagaccuccucuucuggau

SEQ ID NO: 749945 - RNA, 19 nt, Artificial Sequence
  Description of Artificial Sequence: Synthetic oligonucleotide
  Antisense strand to SEQ ID NO: 749944
auccagaagaggaggucuc

SEQ ID NO: 749946 - RNA, 19 nt, Artificial Sequence
  Description of Artificial Sequence: Synthetic oligonucleotide
  Sense strand starting at position 2713 of SEQ ID NO: 586867
ggaguucacugccucggau

SEQ ID NO: 749947 - RNA, 19 nt, Artificial Sequence
  Description of Artificial Sequence: Synthetic oligonucleotide
  Antisense strand to SEQ ID NO: 749946
auccgaggcagugaacucc

SEQ ID NO: 749948 - RNA, 19 nt, Artificial Sequence
  Description of Artificial Sequence: Synthetic oligonucleotide
  Sense strand starting at position 2756 of SEQ ID NO: 586867
agguaaucuguaggagggu

SEQ ID NO: 749949 - RNA, 19 nt, Artificial Sequence
  Description of Artificial Sequence: Synthetic oligonucleotide
  Antisense strand to SEQ ID NO: 749948
acccuccuacagauuaccu

SEQ ID NO: 749950 - RNA, 19 nt, Artificial Sequence
  Description of Artificial Sequence: Synthetic oligonucleotide
  Sense strand starting at position 2769 of SEQ ID NO: 586867
gaggguagaccuugucugu

SEQ ID NO: 749951 - RNA, 19 nt, Artificial Sequence
  Description of Artificial Sequence: Synthetic oligonucleotide
  Antisense strand to SEQ ID NO: 749950
acagacaaggucuacccuc

SEQ ID NO: 749952 - RNA, 19 nt, Artificial Sequence
  Description of Artificial Sequence: Synthetic oligonucleotide
  Sense strand starting at position 2780 of SEQ ID NO: 586867
uugucuguucgcuuaauuc

SEQ ID NO: 749953 - RNA, 19 nt, Artificial Sequence
  Description of Artificial Sequence: Synthetic oligonucleotide
  Antisense strand to SEQ ID NO: 749952
gaauuaagcgaacagacaa

SEQ ID NO: 749954 - RNA, 19 nt, Artificial Sequence
  Description of Artificial Sequence: Synthetic oligonucleotide
  Sense strand starting at position 2787 of SEQ ID NO: 586867
uucgcuuaauucuugaaua

SEQ ID NO: 749955 - RNA, 19 nt, Artificial Sequence
  Description of Artificial Sequence: Synthetic oligonucleotide
  Antisense strand to SEQ ID NO: 749954
uauucaagaauuaagcgaa

SEQ ID NO: 749956 - RNA, 19 nt, Artificial Sequence
  Description of Artificial Sequence: Synthetic oligonucleotide
  Sense strand starting at position 2789 of SEQ ID NO: 586867
cgcuuaauucuugaauaag

SEQ ID NO: 749957 - RNA, 19 nt, Artificial Sequence
  Description of Artificial Sequence: Synthetic oligonucleotide
  Antisense strand to SEQ ID NO: 749956
cuuauucaagaauuaagcg

SEQ ID NO: 749958 - RNA, 19 nt, Artificial Sequence
  Description of Artificial Sequence: Synthetic oligonucleotide
  Sense strand starting at position 2798 of SEQ ID NO: 586867
cuugaauaaggguggguua

SEQ ID NO: 749959 - RNA, 19 nt, Artificial Sequence
  Description of Artificial Sequence: Synthetic oligonucleotide
  Antisense strand to SEQ ID NO: 749958
uaacccacccuuauucaag

SEQ ID NO: 749960 - RNA, 19 nt, Artificial Sequence
  Description of Artificial Sequence: Synthetic oligonucleotide
  Sense strand starting at position 2799 of SEQ ID NO: 586867
uugaauaaggguggguuau

SEQ ID NO: 749961 - RNA, 19 nt, Artificial Sequence
  Description of Artificial Sequence: Synthetic oligonucleotide
  Antisense strand to SEQ ID NO: 749960
auaacccacccuuauucaa

SEQ ID NO: 749962 - RNA, 19 nt, Artificial Sequence
  Description of Artificial Sequence: Synthetic oligonucleotide
  Sense strand starting at position 2889 of SEQ ID NO: 586867
gagcgucucuucuugauuu

SEQ ID NO: 749963 - RNA, 19 nt, Artificial Sequence
  Description of Artificial Sequence: Synthetic oligonucleotide
  Antisense strand to SEQ ID NO: 749962
aaaucaagaagagacgcuc

SEQ ID NO: 749964 - RNA, 19 nt, Artificial Sequence
  Description of Artificial Sequence: Synthetic oligonucleotide
  Sense strand starting at position 3011 of SEQ ID NO: 586867
gggagcucaucccuaguuu

SEQ ID NO: 749965 - RNA, 19 nt, Artificial Sequence
  Description of Artificial Sequence: Synthetic oligonucleotide
  Antisense strand to SEQ ID NO: 749964
aaacuagggaugagcuccc

SEQ ID NO: 749966 - RNA, 19 nt, Artificial Sequence
  Description of Artificial Sequence: Synthetic oligonucleotide
  Sense strand starting at position 3156 of SEQ ID NO: 586867
ccuccuacucggugggaua

SEQ ID NO: 749967 - RNA, 19 nt, Artificial Sequence
  Description of Artificial Sequence: Synthetic oligonucleotide
  Antisense strand to SEQ ID NO: 749966
uaucccaccgaguaggagg

SEQ ID NO: 749968 - RNA, 19 nt, Artificial Sequence
  Description of Artificial Sequence: Synthetic oligonucleotide
  Sense strand starting at position 3157 of SEQ ID NO: 586867
cuccuacucggugggauau

SEQ ID NO: 749969 - RNA, 19 nt, Artificial Sequence
  Description of Artificial Sequence: Synthetic oligonucleotide
  Antisense strand to SEQ ID NO: 749968
auaucccaccgaguaggag

SEQ ID NO: 749970 - RNA, 19 nt, Artificial Sequence
  Description of Artificial Sequence: Synthetic oligonucleotide
  Sense strand starting at position 3272 of SEQ ID NO: 586867
uguggaagucacugaguuc

SEQ ID NO: 749971 - RNA, 19 nt, Artificial Sequence
  Description of Artificial Sequence: Synthetic oligonucleotide
  Antisense strand to SEQ ID NO: 749970
gaacucagugacuuccaca

SEQ ID NO: 749972 - RNA, 19 nt, Artificial Sequence
  Description of Artificial Sequence: Synthetic oligonucleotide
  Sense strand starting at position 3366 of SEQ ID NO: 586867
gggcaagcucuccaguguu

SEQ ID NO: 749973 - RNA, 19 nt, Artificial Sequence
  Description of Artificial Sequence: Synthetic oligonucleotide
  Antisense strand to SEQ ID NO: 749972
aacacuggagagcuugccc

SEQ ID NO: 749974 - RNA, 19 nt, Artificial Sequence
  Description of Artificial Sequence: Synthetic oligonucleotide
  Sense strand starting at position 3368 of SEQ ID NO: 586867
gcaagcucuccaguguugu

SEQ ID NO: 749975 - RNA, 19 nt, Artificial Sequence
  Description of Artificial Sequence: Synthetic oligonucleotide
  Antisense strand to SEQ ID NO: 749974
acaacacuggagagcuugc

SEQ ID NO: 749976 - RNA, 19 nt, Artificial Sequence
  Description of Artificial Sequence: Synthetic oligonucleotide
  Sense strand starting at position 3470 of SEQ ID NO: 586867
acaugugaccucugagucu

SEQ ID NO: 749977 - RNA, 19 nt, Artificial Sequence
  Description of Artificial Sequence: Synthetic oligonucleotide
  Antisense strand to SEQ ID NO: 749976
agacucagaggucacaugu

SEQ ID NO: 749978 - RNA, 19 nt, Artificial Sequence
  Description of Artificial Sequence: Synthetic oligonucleotide
  Sense strand starting at position 3479 of SEQ ID NO: 586867
cucugagucugucccuuua

SEQ ID NO: 749979 - RNA, 19 nt, Artificial Sequence
  Description of Artificial Sequence: Synthetic oligonucleotide
  Antisense strand to SEQ ID NO: 749978
uaaagggacagacucagag

SEQ ID NO: 749980 - RNA, 19 nt, Artificial Sequence
  Description of Artificial Sequence: Synthetic oligonucleotide
  Sense strand starting at position 3560 of SEQ ID NO: 586867
ggugcagugacgcaaucau

SEQ ID NO: 749981 - RNA, 19 nt, Artificial Sequence
  Description of Artificial Sequence: Synthetic oligonucleotide
  Antisense strand to SEQ ID NO: 749980
augauugcgucacugcacc

SEQ ID NO: 749982 - RNA, 19 nt, Artificial Sequence
  Description of Artificial Sequence: Synthetic oligonucleotide
  Sense strand starting at position 3682 of SEQ ID NO: 586867
uuguguguauuucuuggua

SEQ ID NO: 749983 - RNA, 19 nt, Artificial Sequence
  Description of Artificial Sequence: Synthetic oligonucleotide
  Antisense strand to SEQ ID NO: 749982
uaccaagaaauacacacaa

SEQ ID NO: 749984 - RNA, 19 nt, Artificial Sequence
  Description of Artificial Sequence: Synthetic oligonucleotide
  Sense strand starting at position 3774 of SEQ ID NO: 586867
uucggaaguacugggauua

SEQ ID NO: 749985 - RNA, 19 nt, Artificial Sequence
  Description of Artificial Sequence: Synthetic oligonucleotide
  Antisense strand to SEQ ID NO: 749984
uaaucccaguacuuccgaa

SEQ ID NO: 749986 - RNA, 19 nt, Artificial Sequence
  Description of Artificial Sequence: Synthetic oligonucleotide
  Sense strand starting at position 3775 of SEQ ID NO: 586867
ucggaaguacugggauuau

SEQ ID NO: 749987 - RNA, 19 nt, Artificial Sequence
  Description of Artificial Sequence: Synthetic oligonucleotide
  Antisense strand to SEQ ID NO: 749986
auaaucccaguacuuccga

SEQ ID NO: 749988 - RNA, 19 nt, Artificial Sequence
  Description of Artificial Sequence: Synthetic oligonucleotide
  Sense strand starting at position 3867 of SEQ ID NO: 586867
acaacuuuacauggugaua

SEQ ID NO: 749989 - RNA, 19 nt, Artificial Sequence
  Description of Artificial Sequence: Synthetic oligonucleotide
  Antisense strand to SEQ ID NO: 749988
uaucaccauguaaaguugu

SEQ ID NO: 749990 - RNA, 19 nt, Artificial Sequence
  Description of Artificial Sequence: Synthetic oligonucleotide
  Sense strand starting at position 3870 of SEQ ID NO: 586867
acuuuacauggugauaguu

SEQ ID NO: 749991 - RNA, 19 nt, Artificial Sequence
  Description of Artificial Sequence: Synthetic oligonucleotide
  Antisense strand to SEQ ID NO: 749990
aacuaucaccauguaaagu

SEQ ID NO: 749992 - RNA, 19 nt, Artificial Sequence
  Description of Artificial Sequence: Synthetic oligonucleotide
  Sense strand starting at position 3879 of SEQ ID NO: 586867
ggugauaguucuguacaag

SEQ ID NO: 749993 - RNA, 19 nt, Artificial Sequence
  Description of Artificial Sequence: Synthetic oligonucleotide
  Antisense strand to SEQ ID NO: 749992
cuuguacagaacuaucacc

SEQ ID NO: 749994 - RNA, 19 nt, Artificial Sequence
  Description of Artificial Sequence: Synthetic oligonucleotide
  Sense strand starting at position 3880 of SEQ ID NO: 586867
gugauaguucuguacaaga

SEQ ID NO: 749995 - RNA, 19 nt, Artificial Sequence
  Description of Artificial Sequence: Synthetic oligonucleotide
  Antisense strand to SEQ ID NO: 749994
ucuuguacagaacuaucac

SEQ ID NO: 749996 - RNA, 19 nt, Artificial Sequence
  Description of Artificial Sequence: Synthetic oligonucleotide
  Sense strand starting at position 3885 of SEQ ID NO: 586867
aguucuguacaagauaguu

SEQ ID NO: 749997 - RNA, 19 nt, Artificial Sequence
  Description of Artificial Sequence: Synthetic oligonucleotide
  Antisense strand to SEQ ID NO: 749996
aacuaucuuguacagaacu

SEQ ID NO: 749998 - RNA, 19 nt, Artificial Sequence
  Description of Artificial Sequence: Synthetic oligonucleotide
  Sense strand starting at position 3934 of SEQ ID NO: 586867
acaagauagugcuuauaag

SEQ ID NO: 749999 - RNA, 19 nt, Artificial Sequence
  Description of Artificial Sequence: Synthetic oligonucleotide
  Antisense strand to SEQ ID NO: 749998
cuuauaagcacuaucuugu

SEQ ID NO: 750000 - RNA, 19 nt, Artificial Sequence
  Description of Artificial Sequence: Synthetic oligonucleotide
  Sense strand starting at position 204 of SEQ ID NO: 586868
cgacuuggccuuuaaagug

SEQ ID NO: 750001 - RNA, 19 nt, Artificial Sequence
  Description of Artificial Sequence: Synthetic oligonucleotide
  Antisense strand to SEQ ID NO: 750000
cacuuuaaaggccaagucg

SEQ ID NO: 750002 - RNA, 19 nt, Artificial Sequence
  Description of Artificial Sequence: Synthetic oligonucleotide
  Sense strand starting at position 211 of SEQ ID NO: 586868
gccuuuaaagugcauaauu

SEQ ID NO: 750003 - RNA, 19 nt, Artificial Sequence
  Description of Artificial Sequence: Synthetic oligonucleotide
  Antisense strand to SEQ ID NO: 750002
aauuaugcacuuuaaaggc

SEQ ID NO: 750004 - RNA, 19 nt, Artificial Sequence
  Description of Artificial Sequence: Synthetic oligonucleotide
  Sense strand starting at position 333 of SEQ ID NO: 586868
aucaaugcauucccggaua

SEQ ID NO: 750005 - RNA, 19 nt, Artificial Sequence
  Description of Artificial Sequence: Synthetic oligonucleotide
  Antisense strand to SEQ ID NO: 750004
uauccgggaaugcauugau

SEQ ID NO: 750006 - RNA, 19 nt, Artificial Sequence
  Description of Artificial Sequence: Synthetic oligonucleotide
  Sense strand starting at position 338 of SEQ ID NO: 586868
ugcauucccggauaauuaa

SEQ ID NO: 750007 - RNA, 19 nt, Artificial Sequence
  Description of Artificial Sequence: Synthetic oligonucleotide
  Antisense strand to SEQ ID NO: 750006
uuaauuauccgggaaugca

SEQ ID NO: 750008 - RNA, 19 nt, Artificial Sequence
  Description of Artificial Sequence: Synthetic oligonucleotide
  Sense strand starting at position 392 of SEQ ID NO: 586868
acauuugccuaggaucaua

SEQ ID NO: 750009 - RNA, 19 nt, Artificial Sequence
  Description of Artificial Sequence: Synthetic oligonucleotide
  Antisense strand to SEQ ID NO: 750008
uaugauccuaggcaaaugu

SEQ ID NO: 750010 - RNA, 19 nt, Artificial Sequence
  Description of Artificial Sequence: Synthetic oligonucleotide
  Sense strand starting at position 421 of SEQ ID NO: 586868
uuauguuauuaguccagag

SEQ ID NO: 750011 - RNA, 19 nt, Artificial Sequence
  Description of Artificial Sequence: Synthetic oligonucleotide
  Antisense strand to SEQ ID NO: 750010
cucuggacuaauaacauaa

SEQ ID NO: 750012 - RNA, 19 nt, Artificial Sequence
  Description of Artificial Sequence: Synthetic oligonucleotide
  Sense strand starting at position 423 of SEQ ID NO: 586868
auguuauuaguccagagcu

SEQ ID NO: 750013 - RNA, 19 nt, Artificial Sequence
  Description of Artificial Sequence: Synthetic oligonucleotide
  Antisense strand to SEQ ID NO: 750012
agcucuggacuaauaacau

SEQ ID NO: 750014 - RNA, 19 nt, Artificial Sequence
  Description of Artificial Sequence: Synthetic oligonucleotide
  Sense strand starting at position 684 of SEQ ID NO: 586868
gugaguuaacacuagagug

SEQ ID NO: 750015 - RNA, 19 nt, Artificial Sequence
  Description of Artificial Sequence: Synthetic oligonucleotide
  Antisense strand to SEQ ID NO: 750014
cacucuaguguuaacucac

SEQ ID NO: 750016 - RNA, 19 nt, Artificial Sequence
  Description of Artificial Sequence: Synthetic oligonucleotide
  Sense strand starting at position 686 of SEQ ID NO: 586868
gaguuaacacuagagugua

SEQ ID NO: 750017 - RNA, 19 nt, Artificial Sequence
  Description of Artificial Sequence: Synthetic oligonucleotide
  Antisense strand to SEQ ID NO: 750016
uacacucuaguguuaacuc

SEQ ID NO: 750018 - RNA, 19 nt, Artificial Sequence
  Description of Artificial Sequence: Synthetic oligonucleotide
  Sense strand starting at position 689 of SEQ ID NO: 586868
uuaacacuagaguguauau

SEQ ID NO: 750019 - RNA, 19 nt, Artificial Sequence
  Description of Artificial Sequence: Synthetic oligonucleotide
  Antisense strand to SEQ ID NO: 750018
auauacacucuaguguuaa

SEQ ID NO: 750020 - RNA, 19 nt, Artificial Sequence
  Description of Artificial Sequence: Synthetic oligonucleotide
  Sense strand starting at position 1157 of SEQ ID NO: 586868
agaaaugccagcuaagagu

SEQ ID NO: 750021 - RNA, 19 nt, Artificial Sequence
  Description of Artificial Sequence: Synthetic oligonucleotide
  Antisense strand to SEQ ID NO: 750020
acucuuagcuggcauuucu

SEQ ID NO: 750022 - RNA, 19 nt, Artificial Sequence
  Description of Artificial Sequence: Synthetic oligonucleotide
  Sense strand starting at position 1288 of SEQ ID NO: 586868
cuacuaaagcuccagguuu

SEQ ID NO: 750023 - RNA, 19 nt, Artificial Sequence
  Description of Artificial Sequence: Synthetic oligonucleotide
  Antisense strand to SEQ ID NO: 750022
aaaccuggagcuuuaguag

SEQ ID NO: 750024 - RNA, 19 nt, Artificial Sequence
  Description of Artificial Sequence: Synthetic oligonucleotide
  Sense strand starting at position 1599 of SEQ ID NO: 586868
cgaagagcccuccgagaaa

SEQ ID NO: 750025 - RNA, 19 nt, Artificial Sequence
  Description of Artificial Sequence: Synthetic oligonucleotide
  Antisense strand to SEQ ID NO: 750024
uuucucggagggcucuucg

SEQ ID NO: 750026 - RNA, 19 nt, Artificial Sequence
  Description of Artificial Sequence: Synthetic oligonucleotide
  Sense strand starting at position 1773 of SEQ ID NO: 586868
ggaugacucacuggucucu

SEQ ID NO: 750027 - RNA, 19 nt, Artificial Sequence
  Description of Artificial Sequence: Synthetic oligonucleotide
  Antisense strand to SEQ ID NO: 750026
agagaccagugagucaucc

SEQ ID NO: 750028 - RNA, 19 nt, Artificial Sequence
  Description of Artificial Sequence: Synthetic oligonucleotide
  Sense strand starting at position 1832 of SEQ ID NO: 586868
ggcucucuuggcgggauuu

SEQ ID NO: 750029 - RNA, 19 nt, Artificial Sequence
  Description of Artificial Sequence: Synthetic oligonucleotide
  Antisense strand to SEQ ID NO: 750028
aaaucccgccaagagagcc

SEQ ID NO: 750030 - RNA, 19 nt, Artificial Sequence
  Description of Artificial Sequence: Synthetic oligonucleotide
  Sense strand starting at position 1986 of SEQ ID NO: 586868
gagcgcuuugcacucgaga

SEQ ID NO: 750031 - RNA, 19 nt, Artificial Sequence
  Description of Artificial Sequence: Synthetic oligonucleotide
  Antisense strand to SEQ ID NO: 750030
ucucgagugcaaagcgcuc

SEQ ID NO: 750032 - RNA, 19 nt, Artificial Sequence
  Description of Artificial Sequence: Synthetic oligonucleotide
  Sense strand starting at position 2091 of SEQ ID NO: 586868
augagaugguaccuuguuu

SEQ ID NO: 750033 - RNA, 19 nt, Artificial Sequence
  Description of Artificial Sequence: Synthetic oligonucleotide
  Antisense strand to SEQ ID NO: 750032
aaacaagguaccaucucau

SEQ ID NO: 750034 - RNA, 19 nt, Artificial Sequence
  Description of Artificial Sequence: Synthetic oligonucleotide
  Sense strand starting at position 2427 of SEQ ID NO: 586868
gucucaaaguucccaauua

SEQ ID NO: 750035 - RNA, 19 nt, Artificial Sequence
  Description of Artificial Sequence: Synthetic oligonucleotide
  Antisense strand to SEQ ID NO: 750034
uaauugggaacuuugagac

SEQ ID NO: 750036 - RNA, 19 nt, Artificial Sequence
  Description of Artificial Sequence: Synthetic oligonucleotide
  Sense strand starting at position 2540 of SEQ ID NO: 586868
uuuagaggauucgucaaag

SEQ ID NO: 750037 - RNA, 19 nt, Artificial Sequence
  Description of Artificial Sequence: Synthetic oligonucleotide
  Antisense strand to SEQ ID NO: 750036
cuuugacgaauccucuaaa

SEQ ID NO: 750038 - RNA, 19 nt, Artificial Sequence
  Description of Artificial Sequence: Synthetic oligonucleotide
  Sense strand starting at position 2646 of SEQ ID NO: 586868
aggcaaugcauagguaaau

SEQ ID NO: 750039 - RNA, 19 nt, Artificial Sequence
  Description of Artificial Sequence: Synthetic oligonucleotide
  Antisense strand to SEQ ID NO: 750038
auuuaccuaugcauugccu

SEQ ID NO: 750040 - RNA, 19 nt, Artificial Sequence
  Description of Artificial Sequence: Synthetic oligonucleotide
  Sense strand starting at position 2647 of SEQ ID NO: 586868
ggcaaugcauagguaaaua

SEQ ID NO: 750041 - RNA, 19 nt, Artificial Sequence
  Description of Artificial Sequence: Synthetic oligonucleotide
  Antisense strand to SEQ ID NO: 750040
uauuuaccuaugcauugcc

SEQ ID NO: 750042 - RNA, 19 nt, Artificial Sequence
  Description of Artificial Sequence: Synthetic oligonucleotide
  Sense strand starting at position 2816 of SEQ ID NO: 586868
accuuuacuggucagcuua

SEQ ID NO: 750043 - RNA, 19 nt, Artificial Sequence
  Description of Artificial Sequence: Synthetic oligonucleotide
  Antisense strand to SEQ ID NO: 750042
uaagcugaccaguaaaggu

SEQ ID NO: 750044 - RNA, 19 nt, Artificial Sequence
  Description of Artificial Sequence: Synthetic oligonucleotide
  Sense strand starting at position 2851 of SEQ ID NO: 586868
uucccaaauugguuguaaa

SEQ ID NO: 750045 - RNA, 19 nt, Artificial Sequence
  Description of Artificial Sequence: Synthetic oligonucleotide
  Antisense strand to SEQ ID NO: 750044
uuuacaaccaauuugggaa

SEQ ID NO: 750046 - RNA, 19 nt, Artificial Sequence
  Description of Artificial Sequence: Synthetic oligonucleotide
  Sense strand starting at position 3028 of SEQ ID NO: 586868
gacagcuaccuguagaaau

SEQ ID NO: 750047 - RNA, 19 nt, Artificial Sequence
  Description of Artificial Sequence: Synthetic oligonucleotide
  Antisense strand to SEQ ID NO: 750046
auuucuacagguagcuguc

SEQ ID NO: 750048 - RNA, 19 nt, Artificial Sequence
  Description of Artificial Sequence: Synthetic oligonucleotide
  Sense strand starting at position 3039 of SEQ ID NO: 586868
guagaaaugucccuuggag

SEQ ID NO: 750049 - RNA, 19 nt, Artificial Sequence
  Description of Artificial Sequence: Synthetic oligonucleotide
  Antisense strand to SEQ ID NO: 750048
cuccaagggacauuucuac

SEQ ID NO: 750050 - RNA, 19 nt, Artificial Sequence
  Description of Artificial Sequence: Synthetic oligonucleotide
  Sense strand starting at position 3126 of SEQ ID NO: 586868
aggcaucagagaugcacuu

SEQ ID NO: 750051 - RNA, 19 nt, Artificial Sequence
  Description of Artificial Sequence: Synthetic oligonucleotide
  Antisense strand to SEQ ID NO: 750050
aagugcaucucugaugccu

SEQ ID NO: 750052 - RNA, 19 nt, Artificial Sequence
  Description of Artificial Sequence: Synthetic oligonucleotide
  Sense strand starting at position 3281 of SEQ ID NO: 586868
gauuccacuucugugugaa

SEQ ID NO: 750053 - RNA, 19 nt, Artificial Sequence
  Description of Artificial Sequence: Synthetic oligonucleotide
  Antisense strand to SEQ ID NO: 750052
uucacacagaaguggaauc

SEQ ID NO: 750054 - RNA, 19 nt, Artificial Sequence
  Description of Artificial Sequence: Synthetic oligonucleotide
  Sense strand starting at position 3331 of SEQ ID NO: 586868
cuguauaaaguguggagaa

SEQ ID NO: 750055 - RNA, 19 nt, Artificial Sequence
  Description of Artificial Sequence: Synthetic oligonucleotide
  Antisense strand to SEQ ID NO: 750054
uucuccacacuuuauacag

SEQ ID NO: 750056 - RNA, 19 nt, Artificial Sequence
  Description of Artificial Sequence: Synthetic oligonucleotide
  Sense strand starting at position 3441 of SEQ ID NO: 586868
uuucuaaggcauugaacaa

SEQ ID NO: 750057 - RNA, 19 nt, Artificial Sequence
  Description of Artificial Sequence: Synthetic oligonucleotide
  Antisense strand to SEQ ID NO: 750056
uuguucaaugccuuagaaa

SEQ ID NO: 750058 - RNA, 19 nt, Artificial Sequence
  Description of Artificial Sequence: Synthetic oligonucleotide
  Sense strand starting at position 3540 of SEQ ID NO: 586868
gaacaaugcuggcuugauu

SEQ ID NO: 750059 - RNA, 19 nt, Artificial Sequence
  Description of Artificial Sequence: Synthetic oligonucleotide
  Antisense strand to SEQ ID NO: 750058
aaucaagccagcauuguuc

SEQ ID NO: 750060 - RNA, 19 nt, Artificial Sequence
  Description of Artificial Sequence: Synthetic oligonucleotide
  Sense strand starting at position 3566 of SEQ ID NO: 586868
ucucuauagggcugauaaa

SEQ ID NO: 750061 - RNA, 19 nt, Artificial Sequence
  Description of Artificial Sequence: Synthetic oligonucleotide
  Antisense strand to SEQ ID NO: 750060
uuuaucagcccuauagaga

SEQ ID NO: 750062 - RNA, 19 nt, Artificial Sequence
  Description of Artificial Sequence: Synthetic oligonucleotide
  Sense strand starting at position 3672 of SEQ ID NO: 586868
uuguauacaucagugauua

SEQ ID NO: 750063 - RNA, 19 nt, Artificial Sequence
  Description of Artificial Sequence: Synthetic oligonucleotide
  Antisense strand to SEQ ID NO: 750062
uaaucacugauguauacaa

SEQ ID NO: 750064 - RNA, 19 nt, Artificial Sequence
  Description of Artificial Sequence: Synthetic oligonucleotide
  Sense strand starting at position 3673 of SEQ ID NO: 586868
uguauacaucagugauuau

SEQ ID NO: 750065 - RNA, 19 nt, Artificial Sequence
  Description of Artificial Sequence: Synthetic oligonucleotide
  Antisense strand to SEQ ID NO: 750064
auaaucacugauguauaca

SEQ ID NO: 750066 - RNA, 19 nt, Artificial Sequence
  Description of Artificial Sequence: Synthetic oligonucleotide
  Sense strand starting at position 3684 of SEQ ID NO: 586868
gugauuaucaauugggagc

SEQ ID NO: 750067 - RNA, 19 nt, Artificial Sequence
  Description of Artificial Sequence: Synthetic oligonucleotide
  Antisense strand to SEQ ID NO: 750066
gcucccaauugauaaucac

SEQ ID NO: 750068 - RNA, 19 nt, Artificial Sequence
  Description of Artificial Sequence: Synthetic oligonucleotide
  Sense strand starting at position 3685 of SEQ ID NO: 586868
ugauuaucaauugggagca

SEQ ID NO: 750069 - RNA, 19 nt, Artificial Sequence
  Description of Artificial Sequence: Synthetic oligonucleotide
  Antisense strand to SEQ ID NO: 750068
ugcucccaauugauaauca

SEQ ID NO: 750070 - RNA, 19 nt, Artificial Sequence
  Description of Artificial Sequence: Synthetic oligonucleotide
  Sense strand starting at position 3723 of SEQ ID NO: 586868
gggaauaaugucuggaggu

SEQ ID NO: 750071 - RNA, 19 nt, Artificial Sequence
  Description of Artificial Sequence: Synthetic oligonucleotide
  Antisense strand to SEQ ID NO: 750070
accuccagacauuauuccc

SEQ ID NO: 750072 - RNA, 19 nt, Artificial Sequence
  Description of Artificial Sequence: Synthetic oligonucleotide
  Sense strand starting at position 3740 of SEQ ID NO: 586868
guagucuugguugucgcaa

SEQ ID NO: 750073 - RNA, 19 nt, Artificial Sequence
  Description of Artificial Sequence: Synthetic oligonucleotide
  Antisense strand to SEQ ID NO: 750072
uugcgacaaccaagacuac

SEQ ID NO: 750074 - RNA, 19 nt, Artificial Sequence
  Description of Artificial Sequence: Synthetic oligonucleotide
  Sense strand starting at position 3777 of SEQ ID NO: 586868
ucuggaucuaguggguaga

SEQ ID NO: 750075 - RNA, 19 nt, Artificial Sequence
  Description of Artificial Sequence: Synthetic oligonucleotide
  Antisense strand to SEQ ID NO: 750074
ucuacccacuagauccaga

SEQ ID NO: 750076 - RNA, 19 nt, Artificial Sequence
  Description of Artificial Sequence: Synthetic oligonucleotide
  Sense strand starting at position 3778 of SEQ ID NO: 586868
cuggaucuaguggguagaa

SEQ ID NO: 750077 - RNA, 19 nt, Artificial Sequence
  Description of Artificial Sequence: Synthetic oligonucleotide
  Antisense strand to SEQ ID NO: 750076
uucuacccacuagauccag

SEQ ID NO: 750078 - RNA, 19 nt, Artificial Sequence
  Description of Artificial Sequence: Synthetic oligonucleotide
  Sense strand starting at position 3885 of SEQ ID NO: 586868
uuggaucucaguugcaaga

SEQ ID NO: 750079 - RNA, 19 nt, Artificial Sequence
  Description of Artificial Sequence: Synthetic oligonucleotide
  Antisense strand to SEQ ID NO: 750078
ucuugcaacugagauccaa

SEQ ID NO: 750080 - RNA, 19 nt, Artificial Sequence
  Description of Artificial Sequence: Synthetic oligonucleotide
  Sense strand starting at position 136 of SEQ ID NO: 586869
ucgagagcagccugcaaau

SEQ ID NO: 750081 - RNA, 19 nt, Artificial Sequence
  Description of Artificial Sequence: Synthetic oligonucleotide
  Antisense strand to SEQ ID NO: 750080
auuugcaggcugcucucga

SEQ ID NO: 750082 - RNA, 19 nt, Artificial Sequence
  Description of Artificial Sequence: Synthetic oligonucleotide
  Sense strand starting at position 138 of SEQ ID NO: 586869
gagagcagccugcaaauau

SEQ ID NO: 750083 - RNA, 19 nt, Artificial Sequence
  Description of Artificial Sequence: Synthetic oligonucleotide
  Antisense strand to SEQ ID NO: 750082
auauuugcaggcugcucuc

SEQ ID NO: 750084 - RNA, 19 nt, Artificial Sequence
  Description of Artificial Sequence: Synthetic oligonucleotide
  Sense strand starting at position 519 of SEQ ID NO: 586869
auccaauugcuguaaauga

SEQ ID NO: 750085 - RNA, 19 nt, Artificial Sequence
  Description of Artificial Sequence: Synthetic oligonucleotide
  Antisense strand to SEQ ID NO: 750084
ucauuuacagcaauuggau

SEQ ID NO: 750086 - RNA, 19 nt, Artificial Sequence
  Description of Artificial Sequence: Synthetic oligonucleotide
  Sense strand starting at position 758 of SEQ ID NO: 586869
uuacuuccguccucuauua

SEQ ID NO: 750087 - RNA, 19 nt, Artificial Sequence
  Description of Artificial Sequence: Synthetic oligonucleotide
  Antisense strand to SEQ ID NO: 750086
uaauagaggacggaaguaa

SEQ ID NO: 750088 - RNA, 19 nt, Artificial Sequence
  Description of Artificial Sequence: Synthetic oligonucleotide
  Sense strand starting at position 760 of SEQ ID NO: 586869
acuuccguccucuauuauu

SEQ ID NO: 750089 - RNA, 19 nt, Artificial Sequence
  Description of Artificial Sequence: Synthetic oligonucleotide
  Antisense strand to SEQ ID NO: 750088
aauaauagaggacggaagu

SEQ ID NO: 750090 - RNA, 19 nt, Artificial Sequence
  Description of Artificial Sequence: Synthetic oligonucleotide
  Sense strand starting at position 818 of SEQ ID NO: 586869
guauaauacuguguauggu

SEQ ID NO: 750091 - RNA, 19 nt, Artificial Sequence
  Description of Artificial Sequence: Synthetic oligonucleotide
  Antisense strand to SEQ ID NO: 750090
accauacacaguauuauac

SEQ ID NO: 750092 - RNA, 19 nt, Artificial Sequence
  Description of Artificial Sequence: Synthetic oligonucleotide
  Sense strand starting at position 821 of SEQ ID NO: 586869
uaauacuguguauggucaa

SEQ ID NO: 750093 - RNA, 19 nt, Artificial Sequence
  Description of Artificial Sequence: Synthetic oligonucleotide
  Antisense strand to SEQ ID NO: 750092
uugaccauacacaguauua

SEQ ID NO: 750094 - RNA, 19 nt, Artificial Sequence
  Description of Artificial Sequence: Synthetic oligonucleotide
  Sense strand starting at position 870 of SEQ ID NO: 586869
acgcuaaagcuuuacuaga

SEQ ID NO: 750095 - RNA, 19 nt, Artificial Sequence
  Description of Artificial Sequence: Synthetic oligonucleotide
  Antisense strand to SEQ ID NO: 750094
ucuaguaaagcuuuagcgu

SEQ ID NO: 750096 - RNA, 19 nt, Artificial Sequence
  Description of Artificial Sequence: Synthetic oligonucleotide
  Sense strand starting at position 1013 of SEQ ID NO: 586869
ggcauuaacuguguauccu

SEQ ID NO: 750097 - RNA, 19 nt, Artificial Sequence
  Description of Artificial Sequence: Synthetic oligonucleotide
  Antisense strand to SEQ ID NO: 750096
aggauacacaguuaaugcc

SEQ ID NO: 750098 - RNA, 19 nt, Artificial Sequence
  Description of Artificial Sequence: Synthetic oligonucleotide
  Sense strand starting at position 1014 of SEQ ID NO: 586869
gcauuaacuguguauccuu

SEQ ID NO: 750099 - RNA, 19 nt, Artificial Sequence
  Description of Artificial Sequence: Synthetic oligonucleotide
  Antisense strand to SEQ ID NO: 750098
aaggauacacaguuaaugc

SEQ ID NO: 750100 - RNA, 19 nt, Artificial Sequence
  Description of Artificial Sequence: Synthetic oligonucleotide
  Sense strand starting at position 1022 of SEQ ID NO: 586869
uguguauccuucucauaau

SEQ ID NO: 750101 - RNA, 19 nt, Artificial Sequence
  Description of Artificial Sequence: Synthetic oligonucleotide
  Antisense strand to SEQ ID NO: 750100
auuaugagaaggauacaca

SEQ ID NO: 750102 - RNA, 19 nt, Artificial Sequence
  Description of Artificial Sequence: Synthetic oligonucleotide
  Sense strand starting at position 1053 of SEQ ID NO: 586869
uuaagugauuauucuucga

SEQ ID NO: 750103 - RNA, 19 nt, Artificial Sequence
  Description of Artificial Sequence: Synthetic oligonucleotide
  Antisense strand to SEQ ID NO: 750102
ucgaagaauaaucacuuaa

SEQ ID NO: 750104 - RNA, 19 nt, Artificial Sequence
  Description of Artificial Sequence: Synthetic oligonucleotide
  Sense strand starting at position 1055 of SEQ ID NO: 586869
aagugauuauucuucgagg

SEQ ID NO: 750105 - RNA, 19 nt, Artificial Sequence
  Description of Artificial Sequence: Synthetic oligonucleotide
  Antisense strand to SEQ ID NO: 750104
ccucgaagaauaaucacuu

SEQ ID NO: 750106 - RNA, 19 nt, Artificial Sequence
  Description of Artificial Sequence: Synthetic oligonucleotide
  Sense strand starting at position 1056 of SEQ ID NO: 586869
agugauuauucuucgaggu

SEQ ID NO: 750107 - RNA, 19 nt, Artificial Sequence
  Description of Artificial Sequence: Synthetic oligonucleotide
  Antisense strand to SEQ ID NO: 750106
accucgaagaauaaucacu

SEQ ID NO: 750108 - RNA, 19 nt, Artificial Sequence
  Description of Artificial Sequence: Synthetic oligonucleotide
  Sense strand starting at position 1057 of SEQ ID NO: 586869
gugauuauucuucgaggug

SEQ ID NO: 750109 - RNA, 19 nt, Artificial Sequence
  Description of Artificial Sequence: Synthetic oligonucleotide
  Antisense strand to SEQ ID NO: 750108
caccucgaagaauaaucac

SEQ ID NO: 750110 - RNA, 19 nt, Artificial Sequence
  Description of Artificial Sequence: Synthetic oligonucleotide
  Sense strand starting at position 1060 of SEQ ID NO: 586869
auuauucuucgagguguac

SEQ ID NO: 750111 - RNA, 19 nt, Artificial Sequence
  Description of Artificial Sequence: Synthetic oligonucleotide
  Antisense strand to SEQ ID NO: 750110
guacaccucgaagaauaau

SEQ ID NO: 750112 - RNA, 19 nt, Artificial Sequence
  Description of Artificial Sequence: Synthetic oligonucleotide
  Sense strand starting at position 1069 of SEQ ID NO: 586869
cgagguguaccuuacccaa

SEQ ID NO: 750113 - RNA, 19 nt, Artificial Sequence
  Description of Artificial Sequence: Synthetic oligonucleotide
  Antisense strand to SEQ ID NO: 750112
uuggguaagguacaccucg

SEQ ID NO: 750114 - RNA, 19 nt, Artificial Sequence
  Description of Artificial Sequence: Synthetic oligonucleotide
  Sense strand starting at position 1071 of SEQ ID NO: 586869
agguguaccuuacccaaga

SEQ ID NO: 750115 - RNA, 19 nt, Artificial Sequence
  Description of Artificial Sequence: Synthetic oligonucleotide
  Antisense strand to SEQ ID NO: 750114
ucuuggguaagguacaccu

SEQ ID NO: 750116 - RNA, 19 nt, Artificial Sequence
  Description of Artificial Sequence: Synthetic oligonucleotide
  Sense strand starting at position 1072 of SEQ ID NO: 586869
gguguaccuuacccaagau

SEQ ID NO: 750117 - RNA, 19 nt, Artificial Sequence
  Description of Artificial Sequence: Synthetic oligonucleotide
  Antisense strand to SEQ ID NO: 750116
aucuuggguaagguacacc

SEQ ID NO: 750118 - RNA, 19 nt, Artificial Sequence
  Description of Artificial Sequence: Synthetic oligonucleotide
  Sense strand starting at position 1205 of SEQ ID NO: 586869
cccagucuugcgcaauauc

SEQ ID NO: 750119 - RNA, 19 nt, Artificial Sequence
  Description of Artificial Sequence: Synthetic oligonucleotide
  Antisense strand to SEQ ID NO: 750118
gauauugcgcaagacuggg

SEQ ID NO: 750120 - RNA, 19 nt, Artificial Sequence
  Description of Artificial Sequence: Synthetic oligonucleotide
  Sense strand starting at position 1214 of SEQ ID NO: 586869
gcgcaauauccguaggagc

SEQ ID NO: 750121 - RNA, 19 nt, Artificial Sequence
  Description of Artificial Sequence: Synthetic oligonucleotide
  Antisense strand to SEQ ID NO: 750120
gcuccuacggauauugcgc

SEQ ID NO: 750122 - RNA, 19 nt, Artificial Sequence
  Description of Artificial Sequence: Synthetic oligonucleotide
  Sense strand starting at position 1216 of SEQ ID NO: 586869
gcaauauccguaggagcag

SEQ ID NO: 750123 - RNA, 19 nt, Artificial Sequence
  Description of Artificial Sequence: Synthetic oligonucleotide
  Antisense strand to SEQ ID NO: 750122
cugcuccuacggauauugc

SEQ ID NO: 750124 - RNA, 19 nt, Artificial Sequence
  Description of Artificial Sequence: Synthetic oligonucleotide
  Sense strand starting at position 1383 of SEQ ID NO: 586869
gugcuaaagcaauagugua

SEQ ID NO: 750125 - RNA, 19 nt, Artificial Sequence
  Description of Artificial Sequence: Synthetic oligonucleotide
  Antisense strand to SEQ ID NO: 750124
uacacuauugcuuuagcac

SEQ ID NO: 750126 - RNA, 19 nt, Artificial Sequence
  Description of Artificial Sequence: Synthetic oligonucleotide
  Sense strand starting at position 1561 of SEQ ID NO: 586869
ccaggacuauuguucccaa

SEQ ID NO: 750127 - RNA, 19 nt, Artificial Sequence
  Description of Artificial Sequence: Synthetic oligonucleotide
  Antisense strand to SEQ ID NO: 750126
uugggaacaauaguccugg

SEQ ID NO: 750128 - RNA, 19 nt, Artificial Sequence
  Description of Artificial Sequence: Synthetic oligonucleotide
  Sense strand starting at position 1564 of SEQ ID NO: 586869
ggacuauuguucccaaguu

SEQ ID NO: 750129 - RNA, 19 nt, Artificial Sequence
  Description of Artificial Sequence: Synthetic oligonucleotide
  Antisense strand to SEQ ID NO: 750128
aacuugggaacaauagucc

SEQ ID NO: 750130 - RNA, 19 nt, Artificial Sequence
  Description of Artificial Sequence: Synthetic oligonucleotide
  Sense strand starting at position 1596 of SEQ ID NO: 586869
ccggauaggaagugauagu

SEQ ID NO: 750131 - RNA, 19 nt, Artificial Sequence
  Description of Artificial Sequence: Synthetic oligonucleotide
  Antisense strand to SEQ ID NO: 750130
acuaucacuuccuauccgg

SEQ ID NO: 750132 - RNA, 19 nt, Artificial Sequence
  Description of Artificial Sequence: Synthetic oligonucleotide
  Sense strand starting at position 1788 of SEQ ID NO: 586869
uagguaaacccaugagauu

SEQ ID NO: 750133 - RNA, 19 nt, Artificial Sequence
  Description of Artificial Sequence: Synthetic oligonucleotide
  Antisense strand to SEQ ID NO: 750132
aaucucauggguuuaccua

SEQ ID NO: 750134 - RNA, 19 nt, Artificial Sequence
  Description of Artificial Sequence: Synthetic oligonucleotide
  Sense strand starting at position 3149 of SEQ ID NO: 586869
ugcucagaggucggaguau

SEQ ID NO: 750135 - RNA, 19 nt, Artificial Sequence
  Description of Artificial Sequence: Synthetic oligonucleotide
  Antisense strand to SEQ ID NO: 750134
auacuccgaccucugagca

SEQ ID NO: 750136 - RNA, 19 nt, Artificial Sequence
  Description of Artificial Sequence: Synthetic oligonucleotide
  Sense strand starting at position 3160 of SEQ ID NO: 586869
cggaguaucgcugggagga

SEQ ID NO: 750137 - RNA, 19 nt, Artificial Sequence
  Description of Artificial Sequence: Synthetic oligonucleotide
  Antisense strand to SEQ ID NO: 750136
uccucccagcgauacuccg

SEQ ID NO: 750138 - RNA, 19 nt, Artificial Sequence
  Description of Artificial Sequence: Synthetic oligonucleotide
  Sense strand starting at position 3173 of SEQ ID NO: 586869
ggaggagaguugguucauu

SEQ ID NO: 750139 - RNA, 19 nt, Artificial Sequence
  Description of Artificial Sequence: Synthetic oligonucleotide
  Antisense strand to SEQ ID NO: 750138
aaugaaccaacucuccucc

SEQ ID NO: 750140 - RNA, 19 nt, Artificial Sequence
  Description of Artificial Sequence: Synthetic oligonucleotide
  Sense strand starting at position 3224 of SEQ ID NO: 586869
gcccuagugggucagagua

SEQ ID NO: 750141 - RNA, 19 nt, Artificial Sequence
  Description of Artificial Sequence: Synthetic oligonucleotide
  Antisense strand to SEQ ID NO: 750140
uacucugacccacuagggc

SEQ ID NO: 750142 - RNA, 19 nt, Artificial Sequence
  Description of Artificial Sequence: Synthetic oligonucleotide
  Sense strand starting at position 3237 of SEQ ID NO: 586869
agaguaggauucugaugga

SEQ ID NO: 750143 - RNA, 19 nt, Artificial Sequence
  Description of Artificial Sequence: Synthetic oligonucleotide
  Antisense strand to SEQ ID NO: 750142
uccaucagaauccuacucu

SEQ ID NO: 750144 - RNA, 19 nt, Artificial Sequence
  Description of Artificial Sequence: Synthetic oligonucleotide
  Sense strand starting at position 3240 of SEQ ID NO: 586869
guaggauucugauggaauu

SEQ ID NO: 750145 - RNA, 19 nt, Artificial Sequence
  Description of Artificial Sequence: Synthetic oligonucleotide
  Antisense strand to SEQ ID NO: 750144
aauuccaucagaauccuac

SEQ ID NO: 750146 - RNA, 19 nt, Artificial Sequence
  Description of Artificial Sequence: Synthetic oligonucleotide
  Sense strand starting at position 3250 of SEQ ID NO: 586869
gauggaauuugcggucuca

SEQ ID NO: 750147 - RNA, 19 nt, Artificial Sequence
  Description of Artificial Sequence: Synthetic oligonucleotide
  Antisense strand to SEQ ID NO: 750146
ugagaccgcaaauuccauc

SEQ ID NO: 750148 - RNA, 19 nt, Artificial Sequence
  Description of Artificial Sequence: Synthetic oligonucleotide
  Sense strand starting at position 3419 of SEQ ID NO: 586869
gcagguagaugcucaucuu

SEQ ID NO: 750149 - RNA, 19 nt, Artificial Sequence
  Description of Artificial Sequence: Synthetic oligonucleotide
  Antisense strand to SEQ ID NO: 750148
aagaugagcaucuaccugc

SEQ ID NO: 750150 - RNA, 19 nt, Artificial Sequence
  Description of Artificial Sequence: Synthetic oligonucleotide
  Sense strand starting at position 3422 of SEQ ID NO: 586869
gguagaugcucaucuugcu

SEQ ID NO: 750151 - RNA, 19 nt, Artificial Sequence
  Description of Artificial Sequence: Synthetic oligonucleotide
  Antisense strand to SEQ ID NO: 750150
agcaagaugagcaucuacc

SEQ ID NO: 750152 - RNA, 19 nt, Artificial Sequence
  Description of Artificial Sequence: Synthetic oligonucleotide
  Sense strand starting at position 3511 of SEQ ID NO: 586869
aaacgcuuccugggugaga

SEQ ID NO: 750153 - RNA, 19 nt, Artificial Sequence
  Description of Artificial Sequence: Synthetic oligonucleotide
  Antisense strand to SEQ ID NO: 750152
ucucacccaggaagcguuu

SEQ ID NO: 750154 - RNA, 19 nt, Artificial Sequence
  Description of Artificial Sequence: Synthetic oligonucleotide
  Sense strand starting at position 3551 of SEQ ID NO: 586869
ccucuuaaaccuggcgagu

SEQ ID NO: 750155 - RNA, 19 nt, Artificial Sequence
  Description of Artificial Sequence: Synthetic oligonucleotide
  Antisense strand to SEQ ID NO: 750154
acucgccagguuuaagagg

SEQ ID NO: 750156 - RNA, 19 nt, Artificial Sequence
  Description of Artificial Sequence: Synthetic oligonucleotide
  Sense strand starting at position 3565 of SEQ ID NO: 586869
cgagugagcgccugagguu

SEQ ID NO: 750157 - RNA, 19 nt, Artificial Sequence
  Description of Artificial Sequence: Synthetic oligonucleotide
  Antisense strand to SEQ ID NO: 750156
aaccucaggcgcucacucg

SEQ ID NO: 750158 - RNA, 19 nt, Artificial Sequence
  Description of Artificial Sequence: Synthetic oligonucleotide
  Sense strand starting at position 3955 of SEQ ID NO: 586869
cucgaauuccugugcacua

SEQ ID NO: 750159 - RNA, 19 nt, Artificial Sequence
  Description of Artificial Sequence: Synthetic oligonucleotide
  Antisense strand to SEQ ID NO: 750158
uagugcacaggaauucgag

SEQ ID NO: 750160 - RNA, 19 nt, Artificial Sequence
  Description of Artificial Sequence: Synthetic oligonucleotide
  Sense strand starting at position 179 of SEQ ID NO: 586870
uuacuuccguccucuauua

SEQ ID NO: 750161 - RNA, 19 nt, Artificial Sequence
  Description of Artificial Sequence: Synthetic oligonucleotide
  Antisense strand to SEQ ID NO: 750160
uaauagaggacggaaguaa

SEQ ID NO: 750162 - RNA, 19 nt, Artificial Sequence
  Description of Artificial Sequence: Synthetic oligonucleotide
  Sense strand starting at position 181 of SEQ ID NO: 586870
acuuccguccucuauuauu

SEQ ID NO: 750163 - RNA, 19 nt, Artificial Sequence
  Description of Artificial Sequence: Synthetic oligonucleotide
  Antisense strand to SEQ ID NO: 750162
aauaauagaggacggaagu

SEQ ID NO: 750164 - RNA, 19 nt, Artificial Sequence
  Description of Artificial Sequence: Synthetic oligonucleotide
  Sense strand starting at position 239 of SEQ ID NO: 586870
guauaauacuguguauggu

SEQ ID NO: 750165 - RNA, 19 nt, Artificial Sequence
  Description of Artificial Sequence: Synthetic oligonucleotide
  Antisense strand to SEQ ID NO: 750164
accauacacaguauuauac

SEQ ID NO: 750166 - RNA, 19 nt, Artificial Sequence
  Description of Artificial Sequence: Synthetic oligonucleotide
  Sense strand starting at position 242 of SEQ ID NO: 586870
uaauacuguguauggucaa

SEQ ID NO: 750167 - RNA, 19 nt, Artificial Sequence
  Description of Artificial Sequence: Synthetic oligonucleotide
  Antisense strand to SEQ ID NO: 750166
uugaccauacacaguauua

SEQ ID NO: 750168 - RNA, 19 nt, Artificial Sequence
  Description of Artificial Sequence: Synthetic oligonucleotide
  Sense strand starting at position 291 of SEQ ID NO: 586870
acgcuaaagcuuuacuaga

SEQ ID NO: 750169 - RNA, 19 nt, Artificial Sequence
  Description of Artificial Sequence: Synthetic oligonucleotide
  Antisense strand to SEQ ID NO: 750168
ucuaguaaagcuuuagcgu

SEQ ID NO: 750170 - RNA, 19 nt, Artificial Sequence
  Description of Artificial Sequence: Synthetic oligonucleotide
  Sense strand starting at position 434 of SEQ ID NO: 586870
ggcauuaacuguguauccu

SEQ ID NO: 750171 - RNA, 19 nt, Artificial Sequence
  Description of Artificial Sequence: Synthetic oligonucleotide
  Antisense strand to SEQ ID NO: 750170
aggauacacaguuaaugcc

SEQ ID NO: 750172 - RNA, 19 nt, Artificial Sequence
  Description of Artificial Sequence: Synthetic oligonucleotide
  Sense strand starting at position 435 of SEQ ID NO: 586870
gcauuaacuguguauccuu

SEQ ID NO: 750173 - RNA, 19 nt, Artificial Sequence
  Description of Artificial Sequence: Synthetic oligonucleotide
  Antisense strand to SEQ ID NO: 750172
aaggauacacaguuaaugc

SEQ ID NO: 750174 - RNA, 19 nt, Artificial Sequence
  Description of Artificial Sequence: Synthetic oligonucleotide
  Sense strand starting at position 443 of SEQ ID NO: 586870
uguguauccuucucauaau

SEQ ID NO: 750175 - RNA, 19 nt, Artificial Sequence
  Description of Artificial Sequence: Synthetic oligonucleotide
  Antisense strand to SEQ ID NO: 750174
auuaugagaaggauacaca

SEQ ID NO: 750176 - RNA, 19 nt, Artificial Sequence
  Description of Artificial Sequence: Synthetic oligonucleotide
  Sense strand starting at position 474 of SEQ ID NO: 586870
uuaagugauuauucuucga

SEQ ID NO: 750177 - RNA, 19 nt, Artificial Sequence
  Description of Artificial Sequence: Synthetic oligonucleotide
  Antisense strand to SEQ ID NO: 750176
ucgaagaauaaucacuuaa

SEQ ID NO: 750178 - RNA, 19 nt, Artificial Sequence
  Description of Artificial Sequence: Synthetic oligonucleotide
  Sense strand starting at position 476 of SEQ ID NO: 586870
aagugauuauucuucgagg

SEQ ID NO: 750179 - RNA, 19 nt, Artificial Sequence
  Description of Artificial Sequence: Synthetic oligonucleotide
  Antisense strand to SEQ ID NO: 750178
ccucgaagaauaaucacuu

SEQ ID NO: 750180 - RNA, 19 nt, Artificial Sequence
  Description of Artificial Sequence: Synthetic oligonucleotide
  Sense strand starting at position 477 of SEQ ID NO: 586870
agugauuauucuucgaggu

SEQ ID NO: 750181 - RNA, 19 nt, Artificial Sequence
  Description of Artificial Sequence: Synthetic oligonucleotide
  Antisense strand to SEQ ID NO: 750180
accucgaagaauaaucacu

SEQ ID NO: 750182 - RNA, 19 nt, Artificial Sequence
  Description of Artificial Sequence: Synthetic oligonucleotide
  Sense strand starting at position 478 of SEQ ID NO: 586870
gugauuauucuucgaggug

SEQ ID NO: 750183 - RNA, 19 nt, Artificial Sequence
  Description of Artificial Sequence: Synthetic oligonucleotide
  Antisense strand to SEQ ID NO: 750182
caccucgaagaauaaucac

SEQ ID NO: 750184 - RNA, 19 nt, Artificial Sequence
  Description of Artificial Sequence: Synthetic oligonucleotide
  Sense strand starting at position 481 of SEQ ID NO: 586870
auuauucuucgagguguac

SEQ ID NO: 750185 - RNA, 19 nt, Artificial Sequence
  Description of Artificial Sequence: Synthetic oligonucleotide
  Antisense strand to SEQ ID NO: 750184
guacaccucgaagaauaau

SEQ ID NO: 750186 - RNA, 19 nt, Artificial Sequence
  Description of Artificial Sequence: Synthetic oligonucleotide
  Sense strand starting at position 490 of SEQ ID NO: 586870
cgagguguaccuuacccaa

SEQ ID NO: 750187 - RNA, 19 nt, Artificial Sequence
  Description of Artificial Sequence: Synthetic oligonucleotide
  Antisense strand to SEQ ID NO: 750186
uuggguaagguacaccucg

SEQ ID NO: 750188 - RNA, 19 nt, Artificial Sequence
  Description of Artificial Sequence: Synthetic oligonucleotide
  Sense strand starting at position 492 of SEQ ID NO: 586870
agguguaccuuacccaaga

SEQ ID NO: 750189 - RNA, 19 nt, Artificial Sequence
  Description of Artificial Sequence: Synthetic oligonucleotide
  Antisense strand to SEQ ID NO: 750188
ucuuggguaagguacaccu

SEQ ID NO: 750190 - RNA, 19 nt, Artificial Sequence
  Description of Artificial Sequence: Synthetic oligonucleotide
  Sense strand starting at position 493 of SEQ ID NO: 586870
gguguaccuuacccaagau

SEQ ID NO: 750191 - RNA, 19 nt, Artificial Sequence
  Description of Artificial Sequence: Synthetic oligonucleotide
  Antisense strand to SEQ ID NO: 750190
aucuuggguaagguacacc

SEQ ID NO: 750192 - RNA, 19 nt, Artificial Sequence
  Description of Artificial Sequence: Synthetic oligonucleotide
  Sense strand starting at position 637 of SEQ ID NO: 586870
gcaauauccguaggagcag

SEQ ID NO: 750193 - RNA, 19 nt, Artificial Sequence
  Description of Artificial Sequence: Synthetic oligonucleotide
  Antisense strand to SEQ ID NO: 750192
cugcuccuacggauauugc

SEQ ID NO: 750194 - RNA, 19 nt, Artificial Sequence
  Description of Artificial Sequence: Synthetic oligonucleotide
  Sense strand starting at position 804 of SEQ ID NO: 586870
gugcuaaagcaauagugua

SEQ ID NO: 750195 - RNA, 19 nt, Artificial Sequence
  Description of Artificial Sequence: Synthetic oligonucleotide
  Antisense strand to SEQ ID NO: 750194
uacacuauugcuuuagcac

SEQ ID NO: 750196 - RNA, 19 nt, Artificial Sequence
  Description of Artificial Sequence: Synthetic oligonucleotide
  Sense strand starting at position 982 of SEQ ID NO: 586870
ccaggacuauuguucccaa

SEQ ID NO: 750197 - RNA, 19 nt, Artificial Sequence
  Description of Artificial Sequence: Synthetic oligonucleotide
  Antisense strand to SEQ ID NO: 750196
uugggaacaauaguccugg

SEQ ID NO: 750198 - RNA, 19 nt, Artificial Sequence
  Description of Artificial Sequence: Synthetic oligonucleotide
  Sense strand starting at position 985 of SEQ ID NO: 586870
ggacuauuguucccaaguu

SEQ ID NO: 750199 - RNA, 19 nt, Artificial Sequence
  Description of Artificial Sequence: Synthetic oligonucleotide
  Antisense strand to SEQ ID NO: 750198
aacuugggaacaauagucc

SEQ ID NO: 750200 - RNA, 19 nt, Artificial Sequence
  Description of Artificial Sequence: Synthetic oligonucleotide
  Sense strand starting at position 1017 of SEQ ID NO: 586870
ccggauaggaagugauagu

SEQ ID NO: 750201 - RNA, 19 nt, Artificial Sequence
  Description of Artificial Sequence: Synthetic oligonucleotide
  Antisense strand to SEQ ID NO: 750200
acuaucacuuccuauccgg

SEQ ID NO: 750202 - RNA, 19 nt, Artificial Sequence
  Description of Artificial Sequence: Synthetic oligonucleotide
  Sense strand starting at position 1209 of SEQ ID NO: 586870
uagguaaacccaugagauu

SEQ ID NO: 750203 - RNA, 19 nt, Artificial Sequence
  Description of Artificial Sequence: Synthetic oligonucleotide
  Antisense strand to SEQ ID NO: 750202
aaucucauggguuuaccua

SEQ ID NO: 750204 - RNA, 19 nt, Artificial Sequence
  Description of Artificial Sequence: Synthetic oligonucleotide
  Sense strand starting at position 2570 of SEQ ID NO: 586870
ugcucagaggucggaguau

SEQ ID NO: 750205 - RNA, 19 nt, Artificial Sequence
  Description of Artificial Sequence: Synthetic oligonucleotide
  Antisense strand to SEQ ID NO: 750204
auacuccgaccucugagca

SEQ ID NO: 750206 - RNA, 19 nt, Artificial Sequence
  Description of Artificial Sequence: Synthetic oligonucleotide
  Sense strand starting at position 2581 of SEQ ID NO: 586870
cggaguaucgcugggagga

SEQ ID NO: 750207 - RNA, 19 nt, Artificial Sequence
  Description of Artificial Sequence: Synthetic oligonucleotide
  Antisense strand to SEQ ID NO: 750206
uccucccagcgauacuccg

SEQ ID NO: 750208 - RNA, 19 nt, Artificial Sequence
  Description of Artificial Sequence: Synthetic oligonucleotide
  Sense strand starting at position 2594 of SEQ ID NO: 586870
ggaggagaguugguucauu

SEQ ID NO: 750209 - RNA, 19 nt, Artificial Sequence
  Description of Artificial Sequence: Synthetic oligonucleotide
  Antisense strand to SEQ ID NO: 750208
aaugaaccaacucuccucc

SEQ ID NO: 750210 - RNA, 19 nt, Artificial Sequence
  Description of Artificial Sequence: Synthetic oligonucleotide
  Sense strand starting at position 2645 of SEQ ID NO: 586870
gcccuagugggucagagua

SEQ ID NO: 750211 - RNA, 19 nt, Artificial Sequence
  Description of Artificial Sequence: Synthetic oligonucleotide
  Antisense strand to SEQ ID NO: 750210
uacucugacccacuagggc

SEQ ID NO: 750212 - RNA, 19 nt, Artificial Sequence
  Description of Artificial Sequence: Synthetic oligonucleotide
  Sense strand starting at position 2840 of SEQ ID NO: 586870
gcagguagaugcucaucuu

SEQ ID NO: 750213 - RNA, 19 nt, Artificial Sequence
  Description of Artificial Sequence: Synthetic oligonucleotide
  Antisense strand to SEQ ID NO: 750212
aagaugagcaucuaccugc

SEQ ID NO: 750214 - RNA, 19 nt, Artificial Sequence
  Description of Artificial Sequence: Synthetic oligonucleotide
  Sense strand starting at position 2932 of SEQ ID NO: 586870
aaacgcuuccugggugaga

SEQ ID NO: 750215 - RNA, 19 nt, Artificial Sequence
  Description of Artificial Sequence: Synthetic oligonucleotide
  Antisense strand to SEQ ID NO: 750214
ucucacccaggaagcguuu

SEQ ID NO: 750216 - RNA, 19 nt, Artificial Sequence
  Description of Artificial Sequence: Synthetic oligonucleotide
  Sense strand starting at position 2972 of SEQ ID NO: 586870
ccucuuaaaccuggcgagu

SEQ ID NO: 750217 - RNA, 19 nt, Artificial Sequence
  Description of Artificial Sequence: Synthetic oligonucleotide
  Antisense strand to SEQ ID NO: 750216
acucgccagguuuaagagg

SEQ ID NO: 750218 - RNA, 19 nt, Artificial Sequence
  Description of Artificial Sequence: Synthetic oligonucleotide
  Sense strand starting at position 3442 of SEQ ID NO: 586870
gcgccuagccuauaaaucu

SEQ ID NO: 750219 - RNA, 19 nt, Artificial Sequence
  Description of Artificial Sequence: Synthetic oligonucleotide
  Antisense strand to SEQ ID NO: 750218
agauuuauaggcuaggcgc

SEQ ID NO: 750220 - RNA, 19 nt, Artificial Sequence
  Description of Artificial Sequence: Synthetic oligonucleotide
  Sense strand starting at position 3473 of SEQ ID NO: 586870
guaaacuucuaucagagaa

SEQ ID NO: 750221 - RNA, 19 nt, Artificial Sequence
  Description of Artificial Sequence: Synthetic oligonucleotide
  Antisense strand to SEQ ID NO: 750220
uucucugauagaaguuuac

SEQ ID NO: 750222 - RNA, 19 nt, Artificial Sequence
  Description of Artificial Sequence: Synthetic oligonucleotide
  Sense strand starting at position 3599 of SEQ ID NO: 586870
ggccucucacaaugugaca

SEQ ID NO: 750223 - RNA, 19 nt, Artificial Sequence
  Description of Artificial Sequence: Synthetic oligonucleotide
  Antisense strand to SEQ ID NO: 750222
ugucacauugugagaggcc

SEQ ID NO: 750224 - RNA, 19 nt, Artificial Sequence
  Description of Artificial Sequence: Synthetic oligonucleotide
  Sense strand starting at position 3620 of SEQ ID NO: 586870
acugaaggauuugauccau

SEQ ID NO: 750225 - RNA, 19 nt, Artificial Sequence
  Description of Artificial Sequence: Synthetic oligonucleotide
  Antisense strand to SEQ ID NO: 750224
auggaucaaauccuucagu

SEQ ID NO: 750226 - RNA, 19 nt, Artificial Sequence
  Description of Artificial Sequence: Synthetic oligonucleotide
  Sense strand starting at position 3683 of SEQ ID NO: 586870
gcagauuggucagcgaauu

SEQ ID NO: 750227 - RNA, 19 nt, Artificial Sequence
  Description of Artificial Sequence: Synthetic oligonucleotide
  Antisense strand to SEQ ID NO: 750226
aauucgcugaccaaucugc

SEQ ID NO: 750228 - RNA, 19 nt, Artificial Sequence
  Description of Artificial Sequence: Synthetic oligonucleotide
  Sense strand starting at position 3723 of SEQ ID NO: 586870
gugguagaauacuuucuca

SEQ ID NO: 750229 - RNA, 19 nt, Artificial Sequence
  Description of Artificial Sequence: Synthetic oligonucleotide
  Antisense strand to SEQ ID NO: 750228
ugagaaaguauucuaccac

SEQ ID NO: 750230 - RNA, 19 nt, Artificial Sequence
  Description of Artificial Sequence: Synthetic oligonucleotide
  Sense strand starting at position 3726 of SEQ ID NO: 586870
guagaauacuuucucagau

SEQ ID NO: 750231 - RNA, 19 nt, Artificial Sequence
  Description of Artificial Sequence: Synthetic oligonucleotide
  Antisense strand to SEQ ID NO: 750230
aucugagaaaguauucuac

SEQ ID NO: 750232 - RNA, 19 nt, Artificial Sequence
  Description of Artificial Sequence: Synthetic oligonucleotide
  Sense strand starting at position 3728 of SEQ ID NO: 586870
agaauacuuucucagauga

SEQ ID NO: 750233 - RNA, 19 nt, Artificial Sequence
  Description of Artificial Sequence: Synthetic oligonucleotide
  Antisense strand to SEQ ID NO: 750232
ucaucugagaaaguauucu

SEQ ID NO: 750234 - RNA, 19 nt, Artificial Sequence
  Description of Artificial Sequence: Synthetic oligonucleotide
  Sense strand starting at position 3750 of SEQ ID NO: 586870
uuaggagcacuauggaauu

SEQ ID NO: 750235 - RNA, 19 nt, Artificial Sequence
  Description of Artificial Sequence: Synthetic oligonucleotide
  Antisense strand to SEQ ID NO: 750234
aauuccauagugcuccuaa

SEQ ID NO: 750236 - RNA, 19 nt, Artificial Sequence
  Description of Artificial Sequence: Synthetic oligonucleotide
  Sense strand starting at position 3972 of SEQ ID NO: 586870
auagguguaacaggauaua

SEQ ID NO: 750237 - RNA, 19 nt, Artificial Sequence
  Description of Artificial Sequence: Synthetic oligonucleotide
  Antisense strand to SEQ ID NO: 750236
uauauccuguuacaccuau

SEQ ID NO: 750238 - RNA, 19 nt, Artificial Sequence
  Description of Artificial Sequence: Synthetic oligonucleotide
  Sense strand starting at position 3975 of SEQ ID NO: 586870
gguguaacaggauauaguu

SEQ ID NO: 750239 - RNA, 19 nt, Artificial Sequence
  Description of Artificial Sequence: Synthetic oligonucleotide
  Antisense strand to SEQ ID NO: 750238
aacuauauccuguuacacc

SEQ ID NO: 750240 - RNA, 19 nt, Artificial Sequence
  Description of Artificial Sequence: Synthetic oligonucleotide
  Sense strand starting at position 22 of SEQ ID NO: 586871
ccaugugugcuucaugugu

SEQ ID NO: 750241 - RNA, 19 nt, Artificial Sequence
  Description of Artificial Sequence: Synthetic oligonucleotide
  Antisense strand to SEQ ID NO: 750240
acacaugaagcacacaugg

SEQ ID NO: 750242 - RNA, 19 nt, Artificial Sequence
  Description of Artificial Sequence: Synthetic oligonucleotide
  Sense strand starting at position 26 of SEQ ID NO: 586871
gugugcuucauguguaggu

SEQ ID NO: 750243 - RNA, 19 nt, Artificial Sequence
  Description of Artificial Sequence: Synthetic oligonucleotide
  Antisense strand to SEQ ID NO: 750242
accuacacaugaagcacac

SEQ ID NO: 750244 - RNA, 19 nt, Artificial Sequence
  Description of Artificial Sequence: Synthetic oligonucleotide
  Sense strand starting at position 28 of SEQ ID NO: 586871
gugcuucauguguagguga

SEQ ID NO: 750245 - RNA, 19 nt, Artificial Sequence
  Description of Artificial Sequence: Synthetic oligonucleotide
  Antisense strand to SEQ ID NO: 750244
ucaccuacacaugaagcac

SEQ ID NO: 750246 - RNA, 19 nt, Artificial Sequence
  Description of Artificial Sequence: Synthetic oligonucleotide
  Sense strand starting at position 30 of SEQ ID NO: 586871
gcuucauguguaggugaag

SEQ ID NO: 750247 - RNA, 19 nt, Artificial Sequence
  Description of Artificial Sequence: Synthetic oligonucleotide
  Antisense strand to SEQ ID NO: 750246
cuucaccuacacaugaagc

SEQ ID NO: 750248 - RNA, 19 nt, Artificial Sequence
  Description of Artificial Sequence: Synthetic oligonucleotide
  Sense strand starting at position 156 of SEQ ID NO: 586871
ugggccuucuuuccugaua

SEQ ID NO: 750249 - RNA, 19 nt, Artificial Sequence
  Description of Artificial Sequence: Synthetic oligonucleotide
  Antisense strand to SEQ ID NO: 750248
uaucaggaaagaaggccca

SEQ ID NO: 750250 - RNA, 19 nt, Artificial Sequence
  Description of Artificial Sequence: Synthetic oligonucleotide
  Sense strand starting at position 379 of SEQ ID NO: 586871
gcgccuguguuccuucuaa

SEQ ID NO: 750251 - RNA, 19 nt, Artificial Sequence
  Description of Artificial Sequence: Synthetic oligonucleotide
  Antisense strand to SEQ ID NO: 750250
uuagaaggaacacaggcgc

SEQ ID NO: 750252 - RNA, 19 nt, Artificial Sequence
  Description of Artificial Sequence: Synthetic oligonucleotide
  Sense strand starting at position 383 of SEQ ID NO: 586871
cuguguuccuucuaacaga

SEQ ID NO: 750253 - RNA, 19 nt, Artificial Sequence
  Description of Artificial Sequence: Synthetic oligonucleotide
  Antisense strand to SEQ ID NO: 750252
ucuguuagaaggaacacag

SEQ ID NO: 750254 - RNA, 19 nt, Artificial Sequence
  Description of Artificial Sequence: Synthetic oligonucleotide
  Sense strand starting at position 497 of SEQ ID NO: 586871
gggagacugugucaagacu

SEQ ID NO: 750255 - RNA, 19 nt, Artificial Sequence
  Description of Artificial Sequence: Synthetic oligonucleotide
  Antisense strand to SEQ ID NO: 750254
agucuugacacagucuccc

SEQ ID NO: 750256 - RNA, 19 nt, Artificial Sequence
  Description of Artificial Sequence: Synthetic oligonucleotide
  Sense strand starting at position 506 of SEQ ID NO: 586871
ugucaagacuccugguucu

SEQ ID NO: 750257 - RNA, 19 nt, Artificial Sequence
  Description of Artificial Sequence: Synthetic oligonucleotide
  Antisense strand to SEQ ID NO: 750256
agaaccaggagucuugaca

SEQ ID NO: 750258 - RNA, 19 nt, Artificial Sequence
  Description of Artificial Sequence: Synthetic oligonucleotide
  Sense strand starting at position 698 of SEQ ID NO: 586871
guggacaccgauuauccua

SEQ ID NO: 750259 - RNA, 19 nt, Artificial Sequence
  Description of Artificial Sequence: Synthetic oligonucleotide
  Antisense strand to SEQ ID NO: 750258
uaggauaaucgguguccac

SEQ ID NO: 750260 - RNA, 19 nt, Artificial Sequence
  Description of Artificial Sequence: Synthetic oligonucleotide
  Sense strand starting at position 706 of SEQ ID NO: 586871
cgauuauccuaaccuguca

SEQ ID NO: 750261 - RNA, 19 nt, Artificial Sequence
  Description of Artificial Sequence: Synthetic oligonucleotide
  Antisense strand to SEQ ID NO: 750260
ugacagguuaggauaaucg

SEQ ID NO: 750262 - RNA, 19 nt, Artificial Sequence
  Description of Artificial Sequence: Synthetic oligonucleotide
  Sense strand starting at position 713 of SEQ ID NO: 586871
ccuaaccugucauguguaa

SEQ ID NO: 750263 - RNA, 19 nt, Artificial Sequence
  Description of Artificial Sequence: Synthetic oligonucleotide
  Antisense strand to SEQ ID NO: 750262
uuacacaugacagguuagg

SEQ ID NO: 750264 - RNA, 19 nt, Artificial Sequence
  Description of Artificial Sequence: Synthetic oligonucleotide
  Sense strand starting at position 717 of SEQ ID NO: 586871
accugucauguguaauucu

SEQ ID NO: 750265 - RNA, 19 nt, Artificial Sequence
  Description of Artificial Sequence: Synthetic oligonucleotide
  Antisense strand to SEQ ID NO: 750264
agaauuacacaugacaggu

SEQ ID NO: 750266 - RNA, 19 nt, Artificial Sequence
  Description of Artificial Sequence: Synthetic oligonucleotide
  Sense strand starting at position 750 of SEQ ID NO: 586871
cuggaaacauuggcuuuau

SEQ ID NO: 750267 - RNA, 19 nt, Artificial Sequence
  Description of Artificial Sequence: Synthetic oligonucleotide
  Antisense strand to SEQ ID NO: 750266
auaaagccaauguuuccag

SEQ ID NO: 750268 - RNA, 19 nt, Artificial Sequence
  Description of Artificial Sequence: Synthetic oligonucleotide
  Sense strand starting at position 751 of SEQ ID NO: 586871
uggaaacauuggcuuuaug

SEQ ID NO: 750269 - RNA, 19 nt, Artificial Sequence
  Description of Artificial Sequence: Synthetic oligonucleotide
  Antisense strand to SEQ ID NO: 750268
cauaaagccaauguuucca

SEQ ID NO: 750270 - RNA, 19 nt, Artificial Sequence
  Description of Artificial Sequence: Synthetic oligonucleotide
  Sense strand starting at position 754 of SEQ ID NO: 586871
aaacauuggcuuuauggua

SEQ ID NO: 750271 - RNA, 19 nt, Artificial Sequence
  Description of Artificial Sequence: Synthetic oligonucleotide
  Antisense strand to SEQ ID NO: 750270
uaccauaaagccaauguuu

SEQ ID NO: 750272 - RNA, 19 nt, Artificial Sequence
  Description of Artificial Sequence: Synthetic oligonucleotide
  Sense strand starting at position 759 of SEQ ID NO: 586871
uuggcuuuaugguaaaucu

SEQ ID NO: 750273 - RNA, 19 nt, Artificial Sequence
  Description of Artificial Sequence: Synthetic oligonucleotide
  Antisense strand to SEQ ID NO: 750272
agauuuaccauaaagccaa

SEQ ID NO: 750274 - RNA, 19 nt, Artificial Sequence
  Description of Artificial Sequence: Synthetic oligonucleotide
  Sense strand starting at position 2737 of SEQ ID NO: 586871
gcguguccuccucaggaga

SEQ ID NO: 750275 - RNA, 19 nt, Artificial Sequence
  Description of Artificial Sequence: Synthetic oligonucleotide
  Antisense strand to SEQ ID NO: 750274
ucuccugaggaggacacgc

SEQ ID NO: 750276 - RNA, 19 nt, Artificial Sequence
  Description of Artificial Sequence: Synthetic oligonucleotide
  Sense strand starting at position 2739 of SEQ ID NO: 586871
guguccuccucaggagaca

SEQ ID NO: 750277 - RNA, 19 nt, Artificial Sequence
  Description of Artificial Sequence: Synthetic oligonucleotide
  Antisense strand to SEQ ID NO: 750276
ugucuccugaggaggacac

SEQ ID NO: 750278 - RNA, 19 nt, Artificial Sequence
  Description of Artificial Sequence: Synthetic oligonucleotide
  Sense strand starting at position 2923 of SEQ ID NO: 586871
ugcuucugccuuggacaga

SEQ ID NO: 750279 - RNA, 19 nt, Artificial Sequence
  Description of Artificial Sequence: Synthetic oligonucleotide
  Antisense strand to SEQ ID NO: 750278
ucuguccaaggcagaagca

SEQ ID NO: 750280 - RNA, 19 nt, Artificial Sequence
  Description of Artificial Sequence: Synthetic oligonucleotide
  Sense strand starting at position 3434 of SEQ ID NO: 586871
aagucaggcccguguguaa

SEQ ID NO: 750281 - RNA, 19 nt, Artificial Sequence
  Description of Artificial Sequence: Synthetic oligonucleotide
  Antisense strand to SEQ ID NO: 750280
uuacacacgggccugacuu

SEQ ID NO: 750282 - RNA, 19 nt, Artificial Sequence
  Description of Artificial Sequence: Synthetic oligonucleotide
  Sense strand starting at position 3519 of SEQ ID NO: 586871
ggcugcuucugacucauua

SEQ ID NO: 750283 - RNA, 19 nt, Artificial Sequence
  Description of Artificial Sequence: Synthetic oligonucleotide
  Antisense strand to SEQ ID NO: 750282
uaaugagucagaagcagcc

SEQ ID NO: 750284 - RNA, 19 nt, Artificial Sequence
  Description of Artificial Sequence: Synthetic oligonucleotide
  Sense strand starting at position 3530 of SEQ ID NO: 586871
acucauuauuuguaguaga

SEQ ID NO: 750285 - RNA, 19 nt, Artificial Sequence
  Description of Artificial Sequence: Synthetic oligonucleotide
  Antisense strand to SEQ ID NO: 750284
ucuacuacaaauaaugagu

SEQ ID NO: 750286 - RNA, 19 nt, Artificial Sequence
  Description of Artificial Sequence: Synthetic oligonucleotide
  Sense strand starting at position 3665 of SEQ ID NO: 586871
ugggcuugguggugauacu

SEQ ID NO: 750287 - RNA, 19 nt, Artificial Sequence
  Description of Artificial Sequence: Synthetic oligonucleotide
  Antisense strand to SEQ ID NO: 750286
aguaucaccaccaagccca

SEQ ID NO: 750288 - RNA, 19 nt, Artificial Sequence
  Description of Artificial Sequence: Synthetic oligonucleotide
  Sense strand starting at position 3674 of SEQ ID NO: 586871
uggugauacuguuuggaca

SEQ ID NO: 750289 - RNA, 19 nt, Artificial Sequence
  Description of Artificial Sequence: Synthetic oligonucleotide
  Antisense strand to SEQ ID NO: 750288
uguccaaacaguaucacca

SEQ ID NO: 750290 - RNA, 19 nt, Artificial Sequence
  Description of Artificial Sequence: Synthetic oligonucleotide
  Sense strand starting at position 3675 of SEQ ID NO: 586871
ggugauacuguuuggacau

SEQ ID NO: 750291 - RNA, 19 nt, Artificial Sequence
  Description of Artificial Sequence: Synthetic oligonucleotide
  Antisense strand to SEQ ID NO: 750290
auguccaaacaguaucacc

SEQ ID NO: 750292 - RNA, 19 nt, Artificial Sequence
  Description of Artificial Sequence: Synthetic oligonucleotide
  Sense strand starting at position 3676 of SEQ ID NO: 586871
gugauacuguuuggacauu

SEQ ID NO: 750293 - RNA, 19 nt, Artificial Sequence
  Description of Artificial Sequence: Synthetic oligonucleotide
  Antisense strand to SEQ ID NO: 750292
aauguccaaacaguaucac

SEQ ID NO: 750294 - RNA, 19 nt, Artificial Sequence
  Description of Artificial Sequence: Synthetic oligonucleotide
  Sense strand starting at position 3677 of SEQ ID NO: 586871
ugauacuguuuggacauuu

SEQ ID NO: 750295 - RNA, 19 nt, Artificial Sequence
  Description of Artificial Sequence: Synthetic oligonucleotide
  Antisense strand to SEQ ID NO: 750294
aaauguccaaacaguauca

SEQ ID NO: 750296 - RNA, 19 nt, Artificial Sequence
  Description of Artificial Sequence: Synthetic oligonucleotide
  Sense strand starting at position 3688 of SEQ ID NO: 586871
ggacauuuguccugcccua

SEQ ID NO: 750297 - RNA, 19 nt, Artificial Sequence
  Description of Artificial Sequence: Synthetic oligonucleotide
  Antisense strand to SEQ ID NO: 750296
uagggcaggacaaaugucc

SEQ ID NO: 750298 - RNA, 19 nt, Artificial Sequence
  Description of Artificial Sequence: Synthetic oligonucleotide
  Sense strand starting at position 3701 of SEQ ID NO: 586871
gcccuaaucuccuguugaa

SEQ ID NO: 750299 - RNA, 19 nt, Artificial Sequence
  Description of Artificial Sequence: Synthetic oligonucleotide
  Antisense strand to SEQ ID NO: 750298
uucaacaggagauuagggc

SEQ ID NO: 750300 - RNA, 19 nt, Artificial Sequence
  Description of Artificial Sequence: Synthetic oligonucleotide
  Sense strand starting at position 3704 of SEQ ID NO: 586871
cuaaucuccuguugaauug

SEQ ID NO: 750301 - RNA, 19 nt, Artificial Sequence
  Description of Artificial Sequence: Synthetic oligonucleotide
  Antisense strand to SEQ ID NO: 750300
caauucaacaggagauuag

SEQ ID NO: 750302 - RNA, 19 nt, Artificial Sequence
  Description of Artificial Sequence: Synthetic oligonucleotide
  Sense strand starting at position 3831 of SEQ ID NO: 586871
cgcgacucccuguucugau

SEQ ID NO: 750303 - RNA, 19 nt, Artificial Sequence
  Description of Artificial Sequence: Synthetic oligonucleotide
  Antisense strand to SEQ ID NO: 750302
aucagaacagggagucgcg

SEQ ID NO: 750304 - RNA, 19 nt, Artificial Sequence
  Description of Artificial Sequence: Synthetic oligonucleotide
  Sense strand starting at position 3835 of SEQ ID NO: 586871
acucccuguucugaucauu

SEQ ID NO: 750305 - RNA, 19 nt, Artificial Sequence
  Description of Artificial Sequence: Synthetic oligonucleotide
  Antisense strand to SEQ ID NO: 750304
aaugaucagaacagggagu

SEQ ID NO: 750306 - RNA, 19 nt, Artificial Sequence
  Description of Artificial Sequence: Synthetic oligonucleotide
  Sense strand starting at position 123 of SEQ ID NO: 586872
cugguuuauuuccuugcua

SEQ ID NO: 750307 - RNA, 19 nt, Artificial Sequence
  Description of Artificial Sequence: Synthetic oligonucleotide
  Antisense strand to SEQ ID NO: 750306
uagcaaggaaauaaaccag

SEQ ID NO: 750308 - RNA, 19 nt, Artificial Sequence
  Description of Artificial Sequence: Synthetic oligonucleotide
  Sense strand starting at position 125 of SEQ ID NO: 586872
gguuuauuuccuugcuacu

SEQ ID NO: 750309 - RNA, 19 nt, Artificial Sequence
  Description of Artificial Sequence: Synthetic oligonucleotide
  Antisense strand to SEQ ID NO: 750308
aguagcaaggaaauaaacc

SEQ ID NO: 750310 - RNA, 19 nt, Artificial Sequence
  Description of Artificial Sequence: Synthetic oligonucleotide
  Sense strand starting at position 307 of SEQ ID NO: 586872
accagagauucccuugcau

SEQ ID NO: 750311 - RNA, 19 nt, Artificial Sequence
  Description of Artificial Sequence: Synthetic oligonucleotide
  Antisense strand to SEQ ID NO: 750310
augcaagggaaucucuggu

SEQ ID NO: 750312 - RNA, 19 nt, Artificial Sequence
  Description of Artificial Sequence: Synthetic oligonucleotide
  Sense strand starting at position 415 of SEQ ID NO: 586872
ggcaauuaucaccguauuu

SEQ ID NO: 750313 - RNA, 19 nt, Artificial Sequence
  Description of Artificial Sequence: Synthetic oligonucleotide
  Antisense strand to SEQ ID NO: 750312
aaauacggugauaauugcc

SEQ ID NO: 750314 - RNA, 19 nt, Artificial Sequence
  Description of Artificial Sequence: Synthetic oligonucleotide
  Sense strand starting at position 426 of SEQ ID NO: 586872
ccguauuugcaauguaauu

SEQ ID NO: 750315 - RNA, 19 nt, Artificial Sequence
  Description of Artificial Sequence: Synthetic oligonucleotide
  Antisense strand to SEQ ID NO: 750314
aauuacauugcaaauacgg

SEQ ID NO: 750316 - RNA, 19 nt, Artificial Sequence
  Description of Artificial Sequence: Synthetic oligonucleotide
  Sense strand starting at position 481 of SEQ ID NO: 586872
aaagguuacugugccaaga

SEQ ID NO: 750317 - RNA, 19 nt, Artificial Sequence
  Description of Artificial Sequence: Synthetic oligonucleotide
  Antisense strand to SEQ ID NO: 750316
ucuuggcacaguaaccuuu

SEQ ID NO: 750318 - RNA, 19 nt, Artificial Sequence
  Description of Artificial Sequence: Synthetic oligonucleotide
  Sense strand starting at position 616 of SEQ ID NO: 586872
aguacaacacuuuguaacu

SEQ ID NO: 750319 - RNA, 19 nt, Artificial Sequence
  Description of Artificial Sequence: Synthetic oligonucleotide
  Antisense strand to SEQ ID NO: 750318
aguuacaaaguguuguacu

SEQ ID NO: 750320 - RNA, 19 nt, Artificial Sequence
  Description of Artificial Sequence: Synthetic oligonucleotide
  Sense strand starting at position 617 of SEQ ID NO: 586872
guacaacacuuuguaacuu

SEQ ID NO: 750321 - RNA, 19 nt, Artificial Sequence
  Description of Artificial Sequence: Synthetic oligonucleotide
  Antisense strand to SEQ ID NO: 750320
aaguuacaaaguguuguac

SEQ ID NO: 750322 - RNA, 19 nt, Artificial Sequence
  Description of Artificial Sequence: Synthetic oligonucleotide
  Sense strand starting at position 646 of SEQ ID NO: 586872
gcguaaacccauuauauuc

SEQ ID NO: 750323 - RNA, 19 nt, Artificial Sequence
  Description of Artificial Sequence: Synthetic oligonucleotide
  Antisense strand to SEQ ID NO: 750322
gaauauaauggguuuacgc

SEQ ID NO: 750324 - RNA, 19 nt, Artificial Sequence
  Description of Artificial Sequence: Synthetic oligonucleotide
  Sense strand starting at position 659 of SEQ ID NO: 586872
auauucuaucgcgauggaa

SEQ ID NO: 750325 - RNA, 19 nt, Artificial Sequence
  Description of Artificial Sequence: Synthetic oligonucleotide
  Antisense strand to SEQ ID NO: 750324
uuccaucgcgauagaauau

SEQ ID NO: 750326 - RNA, 19 nt, Artificial Sequence
  Description of Artificial Sequence: Synthetic oligonucleotide
  Sense strand starting at position 771 of SEQ ID NO: 586872
agguaaagggaaugcuuaa

SEQ ID NO: 750327 - RNA, 19 nt, Artificial Sequence
  Description of Artificial Sequence: Synthetic oligonucleotide
  Antisense strand to SEQ ID NO: 750326
uuaagcauucccuuuaccu

SEQ ID NO: 750328 - RNA, 19 nt, Artificial Sequence
  Description of Artificial Sequence: Synthetic oligonucleotide
  Sense strand starting at position 955 of SEQ ID NO: 586872
cgcagacuugaauaugacu

SEQ ID NO: 750329 - RNA, 19 nt, Artificial Sequence
  Description of Artificial Sequence: Synthetic oligonucleotide
  Antisense strand to SEQ ID NO: 750328
agucauauucaagucugcg

SEQ ID NO: 750330 - RNA, 19 nt, Artificial Sequence
  Description of Artificial Sequence: Synthetic oligonucleotide
  Sense strand starting at position 1014 of SEQ ID NO: 586872
gugcuugugccuguuacua

SEQ ID NO: 750331 - RNA, 19 nt, Artificial Sequence
  Description of Artificial Sequence: Synthetic oligonucleotide
  Antisense strand to SEQ ID NO: 750330
uaguaacaggcacaagcac

SEQ ID NO: 750332 - RNA, 19 nt, Artificial Sequence
  Description of Artificial Sequence: Synthetic oligonucleotide
  Sense strand starting at position 2451 of SEQ ID NO: 586872
uugccuuugggagaguuga

SEQ ID NO: 750333 - RNA, 19 nt, Artificial Sequence
  Description of Artificial Sequence: Synthetic oligonucleotide
  Antisense strand to SEQ ID NO: 750332
ucaacucucccaaaggcaa

SEQ ID NO: 750334 - RNA, 19 nt, Artificial Sequence
  Description of Artificial Sequence: Synthetic oligonucleotide
  Sense strand starting at position 2695 of SEQ ID NO: 586872
ugccuuagagcuggaaaug

SEQ ID NO: 750335 - RNA, 19 nt, Artificial Sequence
  Description of Artificial Sequence: Synthetic oligonucleotide
  Antisense strand to SEQ ID NO: 750334
cauuuccagcucuaaggca

SEQ ID NO: 750336 - RNA, 19 nt, Artificial Sequence
  Description of Artificial Sequence: Synthetic oligonucleotide
  Sense strand starting at position 2696 of SEQ ID NO: 586872
gccuuagagcuggaaaugu

SEQ ID NO: 750337 - RNA, 19 nt, Artificial Sequence
  Description of Artificial Sequence: Synthetic oligonucleotide
  Antisense strand to SEQ ID NO: 750336
acauuuccagcucuaaggc

SEQ ID NO: 750338 - RNA, 19 nt, Artificial Sequence
  Description of Artificial Sequence: Synthetic oligonucleotide
  Sense strand starting at position 2705 of SEQ ID NO: 586872
cuggaaaugucacccucau

SEQ ID NO: 750339 - RNA, 19 nt, Artificial Sequence
  Description of Artificial Sequence: Synthetic oligonucleotide
  Antisense strand to SEQ ID NO: 750338
augagggugacauuuccag

SEQ ID NO: 750340 - RNA, 19 nt, Artificial Sequence
  Description of Artificial Sequence: Synthetic oligonucleotide
  Sense strand starting at position 2735 of SEQ ID NO: 586872
uuuggugguguucagaauu

SEQ ID NO: 750341 - RNA, 19 nt, Artificial Sequence
  Description of Artificial Sequence: Synthetic oligonucleotide
  Antisense strand to SEQ ID NO: 750340
aauucugaacaccaccaaa

SEQ ID NO: 750342 - RNA, 19 nt, Artificial Sequence
  Description of Artificial Sequence: Synthetic oligonucleotide
  Sense strand starting at position 2775 of SEQ ID NO: 586872
cagggaguuuaccuuuauu

SEQ ID NO: 750343 - RNA, 19 nt, Artificial Sequence
  Description of Artificial Sequence: Synthetic oligonucleotide
  Antisense strand to SEQ ID NO: 750342
aauaaagguaaacucccug

SEQ ID NO: 750344 - RNA, 19 nt, Artificial Sequence
  Description of Artificial Sequence: Synthetic oligonucleotide
  Sense strand starting at position 2778 of SEQ ID NO: 586872
ggaguuuaccuuuauuacu

SEQ ID NO: 750345 - RNA, 19 nt, Artificial Sequence
  Description of Artificial Sequence: Synthetic oligonucleotide
  Antisense strand to SEQ ID NO: 750344
aguaauaaagguaaacucc

SEQ ID NO: 750346 - RNA, 19 nt, Artificial Sequence
  Description of Artificial Sequence: Synthetic oligonucleotide
  Sense strand starting at position 2833 of SEQ ID NO: 586872
aucaauagguguucccuga

SEQ ID NO: 750347 - RNA, 19 nt, Artificial Sequence
  Description of Artificial Sequence: Synthetic oligonucleotide
  Antisense strand to SEQ ID NO: 750346
ucagggaacaccuauugau

SEQ ID NO: 750348 - RNA, 19 nt, Artificial Sequence
  Description of Artificial Sequence: Synthetic oligonucleotide
  Sense strand starting at position 2837 of SEQ ID NO: 586872
auagguguucccugaauau

SEQ ID NO: 750349 - RNA, 19 nt, Artificial Sequence
  Description of Artificial Sequence: Synthetic oligonucleotide
  Antisense strand to SEQ ID NO: 750348
auauucagggaacaccuau

SEQ ID NO: 750350 - RNA, 19 nt, Artificial Sequence
  Description of Artificial Sequence: Synthetic oligonucleotide
  Sense strand starting at position 2880 of SEQ ID NO: 586872
aggaaauaaugagaaggua

SEQ ID NO: 750351 - RNA, 19 nt, Artificial Sequence
  Description of Artificial Sequence: Synthetic oligonucleotide
  Antisense strand to SEQ ID NO: 750350
uaccuucucauuauuuccu

SEQ ID NO: 750352 - RNA, 19 nt, Artificial Sequence
  Description of Artificial Sequence: Synthetic oligonucleotide
  Sense strand starting at position 3030 of SEQ ID NO: 586872
agccaaguuguggaauuau

SEQ ID NO: 750353 - RNA, 19 nt, Artificial Sequence
  Description of Artificial Sequence: Synthetic oligonucleotide
  Antisense strand to SEQ ID NO: 750352
auaauuccacaacuuggcu

SEQ ID NO: 750354 - RNA, 19 nt, Artificial Sequence
  Description of Artificial Sequence: Synthetic oligonucleotide
  Sense strand starting at position 3041 of SEQ ID NO: 586872
ggaauuaucccauguauuc

SEQ ID NO: 750355 - RNA, 19 nt, Artificial Sequence
  Description of Artificial Sequence: Synthetic oligonucleotide
  Antisense strand to SEQ ID NO: 750354
gaauacaugggauaauucc

SEQ ID NO: 750356 - RNA, 19 nt, Artificial Sequence
  Description of Artificial Sequence: Synthetic oligonucleotide
  Sense strand starting at position 3072 of SEQ ID NO: 586872
ugaaguagguaucuguaca

SEQ ID NO: 750357 - RNA, 19 nt, Artificial Sequence
  Description of Artificial Sequence: Synthetic oligonucleotide
  Antisense strand to SEQ ID NO: 750356
uguacagauaccuacuuca

SEQ ID NO: 750358 - RNA, 19 nt, Artificial Sequence
  Description of Artificial Sequence: Synthetic oligonucleotide
  Sense strand starting at position 3073 of SEQ ID NO: 586872
gaaguagguaucuguacag

SEQ ID NO: 750359 - RNA, 19 nt, Artificial Sequence
  Description of Artificial Sequence: Synthetic oligonucleotide
  Antisense strand to SEQ ID NO: 750358
cuguacagauaccuacuuc

SEQ ID NO: 750360 - RNA, 19 nt, Artificial Sequence
  Description of Artificial Sequence: Synthetic oligonucleotide
  Sense strand starting at position 3077 of SEQ ID NO: 586872
uagguaucuguacagugua

SEQ ID NO: 750361 - RNA, 19 nt, Artificial Sequence
  Description of Artificial Sequence: Synthetic oligonucleotide
  Antisense strand to SEQ ID NO: 750360
uacacuguacagauaccua

SEQ ID NO: 750362 - RNA, 19 nt, Artificial Sequence
  Description of Artificial Sequence: Synthetic oligonucleotide
  Sense strand starting at position 3351 of SEQ ID NO: 586872
uuaagaaguugauccuuga

SEQ ID NO: 750363 - RNA, 19 nt, Artificial Sequence
  Description of Artificial Sequence: Synthetic oligonucleotide
  Antisense strand to SEQ ID NO: 750362
ucaaggaucaacuucuuaa

SEQ ID NO: 750364 - RNA, 19 nt, Artificial Sequence
  Description of Artificial Sequence: Synthetic oligonucleotide
  Sense strand starting at position 3355 of SEQ ID NO: 586872
gaaguugauccuugaucuu

SEQ ID NO: 750365 - RNA, 19 nt, Artificial Sequence
  Description of Artificial Sequence: Synthetic oligonucleotide
  Antisense strand to SEQ ID NO: 750364
aagaucaaggaucaacuuc

SEQ ID NO: 750366 - RNA, 19 nt, Artificial Sequence
  Description of Artificial Sequence: Synthetic oligonucleotide
  Sense strand starting at position 3492 of SEQ ID NO: 586872
cuagcauuacaagaaguau

SEQ ID NO: 750367 - RNA, 19 nt, Artificial Sequence
  Description of Artificial Sequence: Synthetic oligonucleotide
  Antisense strand to SEQ ID NO: 750366
auacuucuuguaaugcuag

SEQ ID NO: 750368 - RNA, 19 nt, Artificial Sequence
  Description of Artificial Sequence: Synthetic oligonucleotide
  Sense strand starting at position 3558 of SEQ ID NO: 586872
uuuaauauugacuggagua

SEQ ID NO: 750369 - RNA, 19 nt, Artificial Sequence
  Description of Artificial Sequence: Synthetic oligonucleotide
  Antisense strand to SEQ ID NO: 750368
uacuccagucaauauuaaa

SEQ ID NO: 750370 - RNA, 19 nt, Artificial Sequence
  Description of Artificial Sequence: Synthetic oligonucleotide
  Sense strand starting at position 3559 of SEQ ID NO: 586872
uuaauauugacuggaguag

SEQ ID NO: 750371 - RNA, 19 nt, Artificial Sequence
  Description of Artificial Sequence: Synthetic oligonucleotide
  Antisense strand to SEQ ID NO: 750370
cuacuccagucaauauuaa

SEQ ID NO: 750372 - RNA, 19 nt, Artificial Sequence
  Description of Artificial Sequence: Synthetic oligonucleotide
  Sense strand starting at position 3579 of SEQ ID NO: 586872
caggaaagcuuuccuagag

SEQ ID NO: 750373 - RNA, 19 nt, Artificial Sequence
  Description of Artificial Sequence: Synthetic oligonucleotide
  Antisense strand to SEQ ID NO: 750372
cucuaggaaagcuuuccug

SEQ ID NO: 750374 - RNA, 19 nt, Artificial Sequence
  Description of Artificial Sequence: Synthetic oligonucleotide
  Sense strand starting at position 3583 of SEQ ID NO: 586872
aaagcuuuccuagagaugu

SEQ ID NO: 750375 - RNA, 19 nt, Artificial Sequence
  Description of Artificial Sequence: Synthetic oligonucleotide
  Antisense strand to SEQ ID NO: 750374
acaucucuaggaaagcuuu

SEQ ID NO: 750376 - RNA, 19 nt, Artificial Sequence
  Description of Artificial Sequence: Synthetic oligonucleotide
  Sense strand starting at position 3585 of SEQ ID NO: 586872
agcuuuccuagagaugugu

SEQ ID NO: 750377 - RNA, 19 nt, Artificial Sequence
  Description of Artificial Sequence: Synthetic oligonucleotide
  Antisense strand to SEQ ID NO: 750376
acacaucucuaggaaagcu

SEQ ID NO: 750378 - RNA, 19 nt, Artificial Sequence
  Description of Artificial Sequence: Synthetic oligonucleotide
  Sense strand starting at position 3591 of SEQ ID NO: 586872
ccuagagauguguaguuaa

SEQ ID NO: 750379 - RNA, 19 nt, Artificial Sequence
  Description of Artificial Sequence: Synthetic oligonucleotide
  Antisense strand to SEQ ID NO: 750378
uuaacuacacaucucuagg

SEQ ID NO: 750380 - RNA, 19 nt, Artificial Sequence
  Description of Artificial Sequence: Synthetic oligonucleotide
  Sense strand starting at position 3594 of SEQ ID NO: 586872
agagauguguaguuaaaca

SEQ ID NO: 750381 - RNA, 19 nt, Artificial Sequence
  Description of Artificial Sequence: Synthetic oligonucleotide
  Antisense strand to SEQ ID NO: 750380
uguuuaacuacacaucucu

SEQ ID NO: 750382 - RNA, 19 nt, Artificial Sequence
  Description of Artificial Sequence: Synthetic oligonucleotide
  Sense strand starting at position 3895 of SEQ ID NO: 586872
cccaguagccugcaagaau

SEQ ID NO: 750383 - RNA, 19 nt, Artificial Sequence
  Description of Artificial Sequence: Synthetic oligonucleotide
  Antisense strand to SEQ ID NO: 750382
auucuugcaggcuacuggg

SEQ ID NO: 750384 - RNA, 19 nt, Artificial Sequence
  Description of Artificial Sequence: Synthetic oligonucleotide
  Sense strand starting at position 3898 of SEQ ID NO: 586872
aguagccugcaagaauaau

SEQ ID NO: 750385 - RNA, 19 nt, Artificial Sequence
  Description of Artificial Sequence: Synthetic oligonucleotide
  Antisense strand to SEQ ID NO: 750384
auuauucuugcaggcuacu

SEQ ID NO: 750386 - RNA, 19 nt, Artificial Sequence
  Description of Artificial Sequence: Synthetic oligonucleotide
  Sense strand starting at position 120 of SEQ ID NO: 586873
caacuuuagugagcagcaa

SEQ ID NO: 750387 - RNA, 19 nt, Artificial Sequence
  Description of Artificial Sequence: Synthetic oligonucleotide
  Antisense strand to SEQ ID NO: 750386
uugcugcucacuaaaguug

SEQ ID NO: 750388 - RNA, 19 nt, Artificial Sequence
  Description of Artificial Sequence: Synthetic oligonucleotide
  Sense strand starting at position 268 of SEQ ID NO: 586873
cggauucuacuccaagcau

SEQ ID NO: 750389 - RNA, 19 nt, Artificial Sequence
  Description of Artificial Sequence: Synthetic oligonucleotide
  Antisense strand to SEQ ID NO: 750388
augcuuggaguagaauccg

SEQ ID NO: 750390 - RNA, 19 nt, Artificial Sequence
  Description of Artificial Sequence: Synthetic oligonucleotide
  Sense strand starting at position 394 of SEQ ID NO: 586873
uugguucuguauucuuaga

SEQ ID NO: 750391 - RNA, 19 nt, Artificial Sequence
  Description of Artificial Sequence: Synthetic oligonucleotide
  Antisense strand to SEQ ID NO: 750390
ucuaagaauacagaaccaa

SEQ ID NO: 750392 - RNA, 19 nt, Artificial Sequence
  Description of Artificial Sequence: Synthetic oligonucleotide
  Sense strand starting at position 396 of SEQ ID NO: 586873
gguucuguauucuuagaug

SEQ ID NO: 750393 - RNA, 19 nt, Artificial Sequence
  Description of Artificial Sequence: Synthetic oligonucleotide
  Antisense strand to SEQ ID NO: 750392
caucuaagaauacagaacc

SEQ ID NO: 750394 - RNA, 19 nt, Artificial Sequence
  Description of Artificial Sequence: Synthetic oligonucleotide
  Sense strand starting at position 408 of SEQ ID NO: 586873
uuagauggcuucuugaaau

SEQ ID NO: 750395 - RNA, 19 nt, Artificial Sequence
  Description of Artificial Sequence: Synthetic oligonucleotide
  Antisense strand to SEQ ID NO: 750394
auuucaagaagccaucuaa

SEQ ID NO: 750396 - RNA, 19 nt, Artificial Sequence
  Description of Artificial Sequence: Synthetic oligonucleotide
  Sense strand starting at position 484 of SEQ ID NO: 586873
cccucagaacuggguaauu

SEQ ID NO: 750397 - RNA, 19 nt, Artificial Sequence
  Description of Artificial Sequence: Synthetic oligonucleotide
  Antisense strand to SEQ ID NO: 750396
aauuacccaguucugaggg

SEQ ID NO: 750398 - RNA, 19 nt, Artificial Sequence
  Description of Artificial Sequence: Synthetic oligonucleotide
  Sense strand starting at position 486 of SEQ ID NO: 586873
cucagaacuggguaauugu

SEQ ID NO: 750399 - RNA, 19 nt, Artificial Sequence
  Description of Artificial Sequence: Synthetic oligonucleotide
  Antisense strand to SEQ ID NO: 750398
acaauuacccaguucugag

SEQ ID NO: 750400 - RNA, 19 nt, Artificial Sequence
  Description of Artificial Sequence: Synthetic oligonucleotide
  Sense strand starting at position 489 of SEQ ID NO: 586873
agaacuggguaauuguaaa

SEQ ID NO: 750401 - RNA, 19 nt, Artificial Sequence
  Description of Artificial Sequence: Synthetic oligonucleotide
  Antisense strand to SEQ ID NO: 750400
uuuacaauuacccaguucu

SEQ ID NO: 750402 - RNA, 19 nt, Artificial Sequence
  Description of Artificial Sequence: Synthetic oligonucleotide
  Sense strand starting at position 615 of SEQ ID NO: 586873
ccagauuacccaggugcaa

SEQ ID NO: 750403 - RNA, 19 nt, Artificial Sequence
  Description of Artificial Sequence: Synthetic oligonucleotide
  Antisense strand to SEQ ID NO: 750402
uugcaccuggguaaucugg

SEQ ID NO: 750404 - RNA, 19 nt, Artificial Sequence
  Description of Artificial Sequence: Synthetic oligonucleotide
  Sense strand starting at position 648 of SEQ ID NO: 586873
uuaucaauggucuggguaa

SEQ ID NO: 750405 - RNA, 19 nt, Artificial Sequence
  Description of Artificial Sequence: Synthetic oligonucleotide
  Antisense strand to SEQ ID NO: 750404
uuacccagaccauugauaa

SEQ ID NO: 750406 - RNA, 19 nt, Artificial Sequence
  Description of Artificial Sequence: Synthetic oligonucleotide
  Sense strand starting at position 650 of SEQ ID NO: 586873
aucaauggucuggguaacu

SEQ ID NO: 750407 - RNA, 19 nt, Artificial Sequence
  Description of Artificial Sequence: Synthetic oligonucleotide
  Antisense strand to SEQ ID NO: 750406
aguuacccagaccauugau

SEQ ID NO: 750408 - RNA, 19 nt, Artificial Sequence
  Description of Artificial Sequence: Synthetic oligonucleotide
  Sense strand starting at position 672 of SEQ ID NO: 586873
acauguuucuugcccugga

SEQ ID NO: 750409 - RNA, 19 nt, Artificial Sequence
  Description of Artificial Sequence: Synthetic oligonucleotide
  Antisense strand to SEQ ID NO: 750408
uccagggcaagaaacaugu

SEQ ID NO: 750410 - RNA, 19 nt, Artificial Sequence
  Description of Artificial Sequence: Synthetic oligonucleotide
  Sense strand starting at position 686 of SEQ ID NO: 586873
cuggaugugcaaggaucua

SEQ ID NO: 750411 - RNA, 19 nt, Artificial Sequence
  Description of Artificial Sequence: Synthetic oligonucleotide
  Antisense strand to SEQ ID NO: 750410
uagauccuugcacauccag

SEQ ID NO: 750412 - RNA, 19 nt, Artificial Sequence
  Description of Artificial Sequence: Synthetic oligonucleotide
  Sense strand starting at position 702 of SEQ ID NO: 586873
cuauucccuccagggauua

SEQ ID NO: 750413 - RNA, 19 nt, Artificial Sequence
  Description of Artificial Sequence: Synthetic oligonucleotide
  Antisense strand to SEQ ID NO: 750412
uaaucccuggagggaauag

SEQ ID NO: 750414 - RNA, 19 nt, Artificial Sequence
  Description of Artificial Sequence: Synthetic oligonucleotide
  Sense strand starting at position 716 of SEQ ID NO: 586873
gauuauccugauggguuua

SEQ ID NO: 750415 - RNA, 19 nt, Artificial Sequence
  Description of Artificial Sequence: Synthetic oligonucleotide
  Antisense strand to SEQ ID NO: 750414
uaaacccaucaggauaauc

SEQ ID NO: 750416 - RNA, 19 nt, Artificial Sequence
  Description of Artificial Sequence: Synthetic oligonucleotide
  Sense strand starting at position 721 of SEQ ID NO: 586873
uccugauggguuuacgaac

SEQ ID NO: 750417 - RNA, 19 nt, Artificial Sequence
  Description of Artificial Sequence: Synthetic oligonucleotide
  Antisense strand to SEQ ID NO: 750416
guucguaaacccaucagga

SEQ ID NO: 750418 - RNA, 19 nt, Artificial Sequence
  Description of Artificial Sequence: Synthetic oligonucleotide
  Sense strand starting at position 732 of SEQ ID NO: 586873
uuacgaaccucaguugaga

SEQ ID NO: 750419 - RNA, 19 nt, Artificial Sequence
  Description of Artificial Sequence: Synthetic oligonucleotide
  Antisense strand to SEQ ID NO: 750418
ucucaacugagguucguaa

SEQ ID NO: 750420 - RNA, 19 nt, Artificial Sequence
  Description of Artificial Sequence: Synthetic oligonucleotide
  Sense strand starting at position 734 of SEQ ID NO: 586873
acgaaccucaguugagaaa

SEQ ID NO: 750421 - RNA, 19 nt, Artificial Sequence
  Description of Artificial Sequence: Synthetic oligonucleotide
  Antisense strand to SEQ ID NO: 750420
uuucucaacugagguucgu

SEQ ID NO: 750422 - RNA, 19 nt, Artificial Sequence
  Description of Artificial Sequence: Synthetic oligonucleotide
  Sense strand starting at position 814 of SEQ ID NO: 586873
cugucaguuccuuggaacu

SEQ ID NO: 750423 - RNA, 19 nt, Artificial Sequence
  Description of Artificial Sequence: Synthetic oligonucleotide
  Antisense strand to SEQ ID NO: 750422
aguuccaaggaacugacag

SEQ ID NO: 750424 - RNA, 19 nt, Artificial Sequence
  Description of Artificial Sequence: Synthetic oligonucleotide
  Sense strand starting at position 845 of SEQ ID NO: 586873
ucaaguuguccgucacugu

SEQ ID NO: 750425 - RNA, 19 nt, Artificial Sequence
  Description of Artificial Sequence: Synthetic oligonucleotide
  Antisense strand to SEQ ID NO: 750424
acagugacggacaacuuga

SEQ ID NO: 750426 - RNA, 19 nt, Artificial Sequence
  Description of Artificial Sequence: Synthetic oligonucleotide
  Sense strand starting at position 1555 of SEQ ID NO: 586873
ccuugagguccagguagua

SEQ ID NO: 750427 - RNA, 19 nt, Artificial Sequence
  Description of Artificial Sequence: Synthetic oligonucleotide
  Antisense strand to SEQ ID NO: 750426
uacuaccuggaccucaagg

SEQ ID NO: 750428 - RNA, 19 nt, Artificial Sequence
  Description of Artificial Sequence: Synthetic oligonucleotide
  Sense strand starting at position 1568 of SEQ ID NO: 586873
guaguacuugcgguucuca

SEQ ID NO: 750429 - RNA, 19 nt, Artificial Sequence
  Description of Artificial Sequence: Synthetic oligonucleotide
  Antisense strand to SEQ ID NO: 750428
ugagaaccgcaaguacuac

SEQ ID NO: 750430 - RNA, 19 nt, Artificial Sequence
  Description of Artificial Sequence: Synthetic oligonucleotide
  Sense strand starting at position 1580 of SEQ ID NO: 586873
guucucacgcaccaagaau

SEQ ID NO: 750431 - RNA, 19 nt, Artificial Sequence
  Description of Artificial Sequence: Synthetic oligonucleotide
  Antisense strand to SEQ ID NO: 750430
auucuuggugcgugagaac

SEQ ID NO: 750432 - RNA, 19 nt, Artificial Sequence
  Description of Artificial Sequence: Synthetic oligonucleotide
  Sense strand starting at position 1678 of SEQ ID NO: 586873
gcgcguaguguucuaugaa

SEQ ID NO: 750433 - RNA, 19 nt, Artificial Sequence
  Description of Artificial Sequence: Synthetic oligonucleotide
  Antisense strand to SEQ ID NO: 750432
uucauagaacacuacgcgc

SEQ ID NO: 750434 - RNA, 19 nt, Artificial Sequence
  Description of Artificial Sequence: Synthetic oligonucleotide
  Sense strand starting at position 2161 of SEQ ID NO: 586873
gcgauuucccgugaaguca

SEQ ID NO: 750435 - RNA, 19 nt, Artificial Sequence
  Description of Artificial Sequence: Synthetic oligonucleotide
  Antisense strand to SEQ ID NO: 750434
ugacuucacgggaaaucgc

SEQ ID NO: 750436 - RNA, 19 nt, Artificial Sequence
  Description of Artificial Sequence: Synthetic oligonucleotide
  Sense strand starting at position 2274 of SEQ ID NO: 586873
cugagaguaggcuaguguu

SEQ ID NO: 750437 - RNA, 19 nt, Artificial Sequence
  Description of Artificial Sequence: Synthetic oligonucleotide
  Antisense strand to SEQ ID NO: 750436
aacacuagccuacucucag

SEQ ID NO: 750438 - RNA, 19 nt, Artificial Sequence
  Description of Artificial Sequence: Synthetic oligonucleotide
  Sense strand starting at position 2709 of SEQ ID NO: 586873
ggguguguaugccugaaga

SEQ ID NO: 750439 - RNA, 19 nt, Artificial Sequence
  Description of Artificial Sequence: Synthetic oligonucleotide
  Antisense strand to SEQ ID NO: 750438
ucuucaggcauacacaccc

SEQ ID NO: 750440 - RNA, 19 nt, Artificial Sequence
  Description of Artificial Sequence: Synthetic oligonucleotide
  Sense strand starting at position 2720 of SEQ ID NO: 586873
ccugaagaauggucguaga

SEQ ID NO: 750441 - RNA, 19 nt, Artificial Sequence
  Description of Artificial Sequence: Synthetic oligonucleotide
  Antisense strand to SEQ ID NO: 750440
ucuacgaccauucuucagg

SEQ ID NO: 750442 - RNA, 19 nt, Artificial Sequence
  Description of Artificial Sequence: Synthetic oligonucleotide
  Sense strand starting at position 2880 of SEQ ID NO: 586873
gauuuaggaugagguuaga

SEQ ID NO: 750443 - RNA, 19 nt, Artificial Sequence
  Description of Artificial Sequence: Synthetic oligonucleotide
  Antisense strand to SEQ ID NO: 750442
ucuaaccucauccuaaauc

SEQ ID NO: 750444 - RNA, 19 nt, Artificial Sequence
  Description of Artificial Sequence: Synthetic oligonucleotide
  Sense strand starting at position 2891 of SEQ ID NO: 586873
agguuagauuugggaucca

SEQ ID NO: 750445 - RNA, 19 nt, Artificial Sequence
  Description of Artificial Sequence: Synthetic oligonucleotide
  Antisense strand to SEQ ID NO: 750444
uggaucccaaaucuaaccu

SEQ ID NO: 750446 - RNA, 19 nt, Artificial Sequence
  Description of Artificial Sequence: Synthetic oligonucleotide
  Sense strand starting at position 2940 of SEQ ID NO: 586873
auauuaaagugguuaagga

SEQ ID NO: 750447 - RNA, 19 nt, Artificial Sequence
  Description of Artificial Sequence: Synthetic oligonucleotide
  Antisense strand to SEQ ID NO: 750446
uccuuaaccacuuuaauau

SEQ ID NO: 750448 - RNA, 19 nt, Artificial Sequence
  Description of Artificial Sequence: Synthetic oligonucleotide
  Sense strand starting at position 2995 of SEQ ID NO: 586873
augaauaauuccuaugagg

SEQ ID NO: 750449 - RNA, 19 nt, Artificial Sequence
  Description of Artificial Sequence: Synthetic oligonucleotide
  Antisense strand to SEQ ID NO: 750448
ccucauaggaauuauucau

SEQ ID NO: 750450 - RNA, 19 nt, Artificial Sequence
  Description of Artificial Sequence: Synthetic oligonucleotide
  Sense strand starting at position 2997 of SEQ ID NO: 586873
gaauaauuccuaugagguc

SEQ ID NO: 750451 - RNA, 19 nt, Artificial Sequence
  Description of Artificial Sequence: Synthetic oligonucleotide
  Antisense strand to SEQ ID NO: 750450
gaccucauaggaauuauuc

SEQ ID NO: 750452 - RNA, 19 nt, Artificial Sequence
  Description of Artificial Sequence: Synthetic oligonucleotide
  Sense strand starting at position 3021 of SEQ ID NO: 586873
guuguaagcauugaggugu

SEQ ID NO: 750453 - RNA, 19 nt, Artificial Sequence
  Description of Artificial Sequence: Synthetic oligonucleotide
  Antisense strand to SEQ ID NO: 750452
acaccucaaugcuuacaac

SEQ ID NO: 750454 - RNA, 19 nt, Artificial Sequence
  Description of Artificial Sequence: Synthetic oligonucleotide
  Sense strand starting at position 3027 of SEQ ID NO: 586873
agcauugagguguaacaag

SEQ ID NO: 750455 - RNA, 19 nt, Artificial Sequence
  Description of Artificial Sequence: Synthetic oligonucleotide
  Antisense strand to SEQ ID NO: 750454
cuuguuacaccucaaugcu

SEQ ID NO: 750456 - RNA, 19 nt, Artificial Sequence
  Description of Artificial Sequence: Synthetic oligonucleotide
  Sense strand starting at position 3048 of SEQ ID NO: 586873
gcagaauuggaauaguguu

SEQ ID NO: 750457 - RNA, 19 nt, Artificial Sequence
  Description of Artificial Sequence: Synthetic oligonucleotide
  Antisense strand to SEQ ID NO: 750456
aacacuauuccaauucugc

SEQ ID NO: 750458 - RNA, 19 nt, Artificial Sequence
  Description of Artificial Sequence: Synthetic oligonucleotide
  Sense strand starting at position 3094 of SEQ ID NO: 586873
ggguuugaaucugugaccu

SEQ ID NO: 750459 - RNA, 19 nt, Artificial Sequence
  Description of Artificial Sequence: Synthetic oligonucleotide
  Antisense strand to SEQ ID NO: 750458
aggucacagauucaaaccc

SEQ ID NO: 750460 - RNA, 19 nt, Artificial Sequence
  Description of Artificial Sequence: Synthetic oligonucleotide
  Sense strand starting at position 3104 of SEQ ID NO: 586873
cugugaccuugaccaguua

SEQ ID NO: 750461 - RNA, 19 nt, Artificial Sequence
  Description of Artificial Sequence: Synthetic oligonucleotide
  Antisense strand to SEQ ID NO: 750460
uaacuggucaaggucacag

SEQ ID NO: 750462 - RNA, 19 nt, Artificial Sequence
  Description of Artificial Sequence: Synthetic oligonucleotide
  Sense strand starting at position 3736 of SEQ ID NO: 586873
ugguauaaaugcuuuggga

SEQ ID NO: 750463 - RNA, 19 nt, Artificial Sequence
  Description of Artificial Sequence: Synthetic oligonucleotide
  Antisense strand to SEQ ID NO: 750462
ucccaaagcauuuauacca

SEQ ID NO: 750464 - RNA, 19 nt, Artificial Sequence
  Description of Artificial Sequence: Synthetic oligonucleotide
  Sense strand starting at position 3738 of SEQ ID NO: 586873
guauaaaugcuuugggaaa

SEQ ID NO: 750465 - RNA, 19 nt, Artificial Sequence
  Description of Artificial Sequence: Synthetic oligonucleotide
  Antisense strand to SEQ ID NO: 750464
uuucccaaagcauuuauac

SEQ ID NO: 750466 - RNA, 19 nt, Artificial Sequence
  Description of Artificial Sequence: Synthetic oligonucleotide
  Sense strand starting at position 198 of SEQ ID NO: 586874
gcccucaagcugggugaau

SEQ ID NO: 750467 - RNA, 19 nt, Artificial Sequence
  Description of Artificial Sequence: Synthetic oligonucleotide
  Antisense strand to SEQ ID NO: 750466
auucacccagcuugagggc

SEQ ID NO: 750468 - RNA, 19 nt, Artificial Sequence
  Description of Artificial Sequence: Synthetic oligonucleotide
  Sense strand starting at position 207 of SEQ ID NO: 586874
cugggugaaugcuuaacga

SEQ ID NO: 750469 - RNA, 19 nt, Artificial Sequence
  Description of Artificial Sequence: Synthetic oligonucleotide
  Antisense strand to SEQ ID NO: 750468
ucguuaagcauucacccag

SEQ ID NO: 750470 - RNA, 19 nt, Artificial Sequence
  Description of Artificial Sequence: Synthetic oligonucleotide
  Sense strand starting at position 234 of SEQ ID NO: 586874
aggugcugccucugcaaua

SEQ ID NO: 750471 - RNA, 19 nt, Artificial Sequence
  Description of Artificial Sequence: Synthetic oligonucleotide
  Antisense strand to SEQ ID NO: 750470
uauugcagaggcagcaccu

SEQ ID NO: 750472 - RNA, 19 nt, Artificial Sequence
  Description of Artificial Sequence: Synthetic oligonucleotide
  Sense strand starting at position 714 of SEQ ID NO: 586874
gagcgaugaucacgcaacu

SEQ ID NO: 750473 - RNA, 19 nt, Artificial Sequence
  Description of Artificial Sequence: Synthetic oligonucleotide
  Antisense strand to SEQ ID NO: 750472
aguugcgugaucaucgcuc

SEQ ID NO: 750474 - RNA, 19 nt, Artificial Sequence
  Description of Artificial Sequence: Synthetic oligonucleotide
  Sense strand starting at position 818 of SEQ ID NO: 586874
aggaguuguuaaguacgua

SEQ ID NO: 750475 - RNA, 19 nt, Artificial Sequence
  Description of Artificial Sequence: Synthetic oligonucleotide
  Antisense strand to SEQ ID NO: 750474
uacguacuuaacaacuccu

SEQ ID NO: 750476 - RNA, 19 nt, Artificial Sequence
  Description of Artificial Sequence: Synthetic oligonucleotide
  Sense strand starting at position 819 of SEQ ID NO: 586874
ggaguuguuaaguacguac

SEQ ID NO: 750477 - RNA, 19 nt, Artificial Sequence
  Description of Artificial Sequence: Synthetic oligonucleotide
  Antisense strand to SEQ ID NO: 750476
guacguacuuaacaacucc

SEQ ID NO: 750478 - RNA, 19 nt, Artificial Sequence
  Description of Artificial Sequence: Synthetic oligonucleotide
  Sense strand starting at position 841 of SEQ ID NO: 586874
uggcuacuuuccuaauguu

SEQ ID NO: 750479 - RNA, 19 nt, Artificial Sequence
  Description of Artificial Sequence: Synthetic oligonucleotide
  Antisense strand to SEQ ID NO: 750478
aacauuaggaaaguagcca

SEQ ID NO: 750480 - RNA, 19 nt, Artificial Sequence
  Description of Artificial Sequence: Synthetic oligonucleotide
  Sense strand starting at position 915 of SEQ ID NO: 586874
uucgacagaucccucaaua

SEQ ID NO: 750481 - RNA, 19 nt, Artificial Sequence
  Description of Artificial Sequence: Synthetic oligonucleotide
  Antisense strand to SEQ ID NO: 750480
uauugagggaucugucgaa

SEQ ID NO: 750482 - RNA, 19 nt, Artificial Sequence
  Description of Artificial Sequence: Synthetic oligonucleotide
  Sense strand starting at position 1045 of SEQ ID NO: 586874
aguagucugacgggaccaa

SEQ ID NO: 750483 - RNA, 19 nt, Artificial Sequence
  Description of Artificial Sequence: Synthetic oligonucleotide
  Antisense strand to SEQ ID NO: 750482
uuggucccgucagacuacu

SEQ ID NO: 750484 - RNA, 19 nt, Artificial Sequence
  Description of Artificial Sequence: Synthetic oligonucleotide
  Sense strand starting at position 1046 of SEQ ID NO: 586874
guagucugacgggaccaaa

SEQ ID NO: 750485 - RNA, 19 nt, Artificial Sequence
  Description of Artificial Sequence: Synthetic oligonucleotide
  Antisense strand to SEQ ID NO: 750484
uuuggucccgucagacuac

SEQ ID NO: 750486 - RNA, 19 nt, Artificial Sequence
  Description of Artificial Sequence: Synthetic oligonucleotide
  Sense strand starting at position 1106 of SEQ ID NO: 586874
caacgaaggugugcuucua

SEQ ID NO: 750487 - RNA, 19 nt, Artificial Sequence
  Description of Artificial Sequence: Synthetic oligonucleotide
  Antisense strand to SEQ ID NO: 750486
uagaagcacaccuucguug

SEQ ID NO: 750488 - RNA, 19 nt, Artificial Sequence
  Description of Artificial Sequence: Synthetic oligonucleotide
  Sense strand starting at position 1184 of SEQ ID NO: 586874
ccauccacucguuaagcau

SEQ ID NO: 750489 - RNA, 19 nt, Artificial Sequence
  Description of Artificial Sequence: Synthetic oligonucleotide
  Antisense strand to SEQ ID NO: 750488
augcuuaacgaguggaugg

SEQ ID NO: 750490 - RNA, 19 nt, Artificial Sequence
  Description of Artificial Sequence: Synthetic oligonucleotide
  Sense strand starting at position 1222 of SEQ ID NO: 586874
gagaaagcacucugagucu

SEQ ID NO: 750491 - RNA, 19 nt, Artificial Sequence
  Description of Artificial Sequence: Synthetic oligonucleotide
  Antisense strand to SEQ ID NO: 750490
agacucagagugcuuucuc

SEQ ID NO: 750492 - RNA, 19 nt, Artificial Sequence
  Description of Artificial Sequence: Synthetic oligonucleotide
  Sense strand starting at position 1250 of SEQ ID NO: 586874
ccacuccuacucugggaaa

SEQ ID NO: 750493 - RNA, 19 nt, Artificial Sequence
  Description of Artificial Sequence: Synthetic oligonucleotide
  Antisense strand to SEQ ID NO: 750492
uuucccagaguaggagugg

SEQ ID NO: 750494 - RNA, 19 nt, Artificial Sequence
  Description of Artificial Sequence: Synthetic oligonucleotide
  Sense strand starting at position 1252 of SEQ ID NO: 586874
acuccuacucugggaaaug

SEQ ID NO: 750495 - RNA, 19 nt, Artificial Sequence
  Description of Artificial Sequence: Synthetic oligonucleotide
  Antisense strand to SEQ ID NO: 750494
cauuucccagaguaggagu

SEQ ID NO: 750496 - RNA, 19 nt, Artificial Sequence
  Description of Artificial Sequence: Synthetic oligonucleotide
  Sense strand starting at position 1647 of SEQ ID NO: 586874
uggcacgauccauaaugga

SEQ ID NO: 750497 - RNA, 19 nt, Artificial Sequence
  Description of Artificial Sequence: Synthetic oligonucleotide
  Antisense strand to SEQ ID NO: 750496
uccauuauggaucgugcca

SEQ ID NO: 750498 - RNA, 19 nt, Artificial Sequence
  Description of Artificial Sequence: Synthetic oligonucleotide
  Sense strand starting at position 2211 of SEQ ID NO: 586874
ccaagcaucuaagaguucu

SEQ ID NO: 750499 - RNA, 19 nt, Artificial Sequence
  Description of Artificial Sequence: Synthetic oligonucleotide
  Antisense strand to SEQ ID NO: 750498
agaacucuuagaugcuugg

SEQ ID NO: 750500 - RNA, 19 nt, Artificial Sequence
  Description of Artificial Sequence: Synthetic oligonucleotide
  Sense strand starting at position 2217 of SEQ ID NO: 586874
aucuaagaguucuuuagau

SEQ ID NO: 750501 - RNA, 19 nt, Artificial Sequence
  Description of Artificial Sequence: Synthetic oligonucleotide
  Antisense strand to SEQ ID NO: 750500
aucuaaagaacucuuagau

SEQ ID NO: 750502 - RNA, 19 nt, Artificial Sequence
  Description of Artificial Sequence: Synthetic oligonucleotide
  Sense strand starting at position 2219 of SEQ ID NO: 586874
cuaagaguucuuuagaucu

SEQ ID NO: 750503 - RNA, 19 nt, Artificial Sequence
  Description of Artificial Sequence: Synthetic oligonucleotide
  Antisense strand to SEQ ID NO: 750502
agaucuaaagaacucuuag

SEQ ID NO: 750504 - RNA, 19 nt, Artificial Sequence
  Description of Artificial Sequence: Synthetic oligonucleotide
  Sense strand starting at position 2226 of SEQ ID NO: 586874
uucuuuagaucuuuaggaa

SEQ ID NO: 750505 - RNA, 19 nt, Artificial Sequence
  Description of Artificial Sequence: Synthetic oligonucleotide
  Antisense strand to SEQ ID NO: 750504
uuccuaaagaucuaaagaa

SEQ ID NO: 750506 - RNA, 19 nt, Artificial Sequence
  Description of Artificial Sequence: Synthetic oligonucleotide
  Sense strand starting at position 2229 of SEQ ID NO: 586874
uuuagaucuuuaggaaguc

SEQ ID NO: 750507 - RNA, 19 nt, Artificial Sequence
  Description of Artificial Sequence: Synthetic oligonucleotide
  Antisense strand to SEQ ID NO: 750506
gacuuccuaaagaucuaaa

SEQ ID NO: 750508 - RNA, 19 nt, Artificial Sequence
  Description of Artificial Sequence: Synthetic oligonucleotide
  Sense strand starting at position 2260 of SEQ ID NO: 586874
ugccuccuuugguguuaua

SEQ ID NO: 750509 - RNA, 19 nt, Artificial Sequence
  Description of Artificial Sequence: Synthetic oligonucleotide
  Antisense strand to SEQ ID NO: 750508
uauaacaccaaaggaggca

SEQ ID NO: 750510 - RNA, 19 nt, Artificial Sequence
  Description of Artificial Sequence: Synthetic oligonucleotide
  Sense strand starting at position 2270 of SEQ ID NO: 586874
gguguuauauucuaagugu

SEQ ID NO: 750511 - RNA, 19 nt, Artificial Sequence
  Description of Artificial Sequence: Synthetic oligonucleotide
  Antisense strand to SEQ ID NO: 750510
acacuuagaauauaacacc

SEQ ID NO: 750512 - RNA, 19 nt, Artificial Sequence
  Description of Artificial Sequence: Synthetic oligonucleotide
  Sense strand starting at position 2327 of SEQ ID NO: 586874
ccacgcaguugacaauaau

SEQ ID NO: 750513 - RNA, 19 nt, Artificial Sequence
  Description of Artificial Sequence: Synthetic oligonucleotide
  Antisense strand to SEQ ID NO: 750512
auuauugucaacugcgugg

SEQ ID NO: 750514 - RNA, 19 nt, Artificial Sequence
  Description of Artificial Sequence: Synthetic oligonucleotide
  Sense strand starting at position 2330 of SEQ ID NO: 586874
cgcaguugacaauaaugga

SEQ ID NO: 750515 - RNA, 19 nt, Artificial Sequence
  Description of Artificial Sequence: Synthetic oligonucleotide
  Antisense strand to SEQ ID NO: 750514
uccauuauugucaacugcg

SEQ ID NO: 750516 - RNA, 19 nt, Artificial Sequence
  Description of Artificial Sequence: Synthetic oligonucleotide
  Sense strand starting at position 2364 of SEQ ID NO: 586874
gggacuaaauauuguucua

SEQ ID NO: 750517 - RNA, 19 nt, Artificial Sequence
  Description of Artificial Sequence: Synthetic oligonucleotide
  Antisense strand to SEQ ID NO: 750516
uagaacaauauuuaguccc

SEQ ID NO: 750518 - RNA, 19 nt, Artificial Sequence
  Description of Artificial Sequence: Synthetic oligonucleotide
  Sense strand starting at position 2384 of SEQ ID NO: 586874
auuugauccugggaaugua

SEQ ID NO: 750519 - RNA, 19 nt, Artificial Sequence
  Description of Artificial Sequence: Synthetic oligonucleotide
  Antisense strand to SEQ ID NO: 750518
uacauucccaggaucaaau

SEQ ID NO: 750520 - RNA, 19 nt, Artificial Sequence
  Description of Artificial Sequence: Synthetic oligonucleotide
  Sense strand starting at position 2393 of SEQ ID NO: 586874
ugggaauguaguggaucua

SEQ ID NO: 750521 - RNA, 19 nt, Artificial Sequence
  Description of Artificial Sequence: Synthetic oligonucleotide
  Antisense strand to SEQ ID NO: 750520
uagauccacuacauuccca

SEQ ID NO: 750522 - RNA, 19 nt, Artificial Sequence
  Description of Artificial Sequence: Synthetic oligonucleotide
  Sense strand starting at position 2992 of SEQ ID NO: 586874
ccgccucuguguugagauu

SEQ ID NO: 750523 - RNA, 19 nt, Artificial Sequence
  Description of Artificial Sequence: Synthetic oligonucleotide
  Antisense strand to SEQ ID NO: 750522
aaucucaacacagaggcgg

SEQ ID NO: 750524 - RNA, 19 nt, Artificial Sequence
  Description of Artificial Sequence: Synthetic oligonucleotide
  Sense strand starting at position 2993 of SEQ ID NO: 586874
cgccucuguguugagauua

SEQ ID NO: 750525 - RNA, 19 nt, Artificial Sequence
  Description of Artificial Sequence: Synthetic oligonucleotide
  Antisense strand to SEQ ID NO: 750524
uaaucucaacacagaggcg

SEQ ID NO: 750526 - RNA, 19 nt, Artificial Sequence
  Description of Artificial Sequence: Synthetic oligonucleotide
  Sense strand starting at position 3027 of SEQ ID NO: 586874
gcucccagccucuaauagu

SEQ ID NO: 750527 - RNA, 19 nt, Artificial Sequence
  Description of Artificial Sequence: Synthetic oligonucleotide
  Antisense strand to SEQ ID NO: 750526
acuauuagaggcugggagc

SEQ ID NO: 750528 - RNA, 19 nt, Artificial Sequence
  Description of Artificial Sequence: Synthetic oligonucleotide
  Sense strand starting at position 3137 of SEQ ID NO: 586874
gccuacgagugcuugacau

SEQ ID NO: 750529 - RNA, 19 nt, Artificial Sequence
  Description of Artificial Sequence: Synthetic oligonucleotide
  Antisense strand to SEQ ID NO: 750528
augucaagcacucguaggc

SEQ ID NO: 750530 - RNA, 19 nt, Artificial Sequence
  Description of Artificial Sequence: Synthetic oligonucleotide
  Sense strand starting at position 3139 of SEQ ID NO: 586874
cuacgagugcuugacauca

SEQ ID NO: 750531 - RNA, 19 nt, Artificial Sequence
  Description of Artificial Sequence: Synthetic oligonucleotide
  Antisense strand to SEQ ID NO: 750530
ugaugucaagcacucguag

SEQ ID NO: 750532 - RNA, 19 nt, Artificial Sequence
  Description of Artificial Sequence: Synthetic oligonucleotide
  Sense strand starting at position 3141 of SEQ ID NO: 586874
acgagugcuugacaucaug

SEQ ID NO: 750533 - RNA, 19 nt, Artificial Sequence
  Description of Artificial Sequence: Synthetic oligonucleotide
  Antisense strand to SEQ ID NO: 750532
caugaugucaagcacucgu

SEQ ID NO: 750534 - RNA, 19 nt, Artificial Sequence
  Description of Artificial Sequence: Synthetic oligonucleotide
  Sense strand starting at position 3149 of SEQ ID NO: 586874
uugacaucaugccagacua

SEQ ID NO: 750535 - RNA, 19 nt, Artificial Sequence
  Description of Artificial Sequence: Synthetic oligonucleotide
  Antisense strand to SEQ ID NO: 750534
uagucuggcaugaugucaa

SEQ ID NO: 750536 - RNA, 19 nt, Artificial Sequence
  Description of Artificial Sequence: Synthetic oligonucleotide
  Sense strand starting at position 3709 of SEQ ID NO: 586874
cugcacaaguauguuuaua

SEQ ID NO: 750537 - RNA, 19 nt, Artificial Sequence
  Description of Artificial Sequence: Synthetic oligonucleotide
  Antisense strand to SEQ ID NO: 750536
uauaaacauacuugugcag

SEQ ID NO: 750538 - RNA, 19 nt, Artificial Sequence
  Description of Artificial Sequence: Synthetic oligonucleotide
  Sense strand starting at position 3717 of SEQ ID NO: 586874
guauguuuauagcugcauu

SEQ ID NO: 750539 - RNA, 19 nt, Artificial Sequence
  Description of Artificial Sequence: Synthetic oligonucleotide
  Antisense strand to SEQ ID NO: 750538
aaugcagcuauaaacauac

SEQ ID NO: 750540 - RNA, 19 nt, Artificial Sequence
  Description of Artificial Sequence: Synthetic oligonucleotide
  Sense strand starting at position 1158 of SEQ ID NO: 586875
gugggcuguuguccuacau

SEQ ID NO: 750541 - RNA, 19 nt, Artificial Sequence
  Description of Artificial Sequence: Synthetic oligonucleotide
  Antisense strand to SEQ ID NO: 750540
auguaggacaacagcccac

SEQ ID NO: 750542 - RNA, 19 nt, Artificial Sequence
  Description of Artificial Sequence: Synthetic oligonucleotide
  Sense strand starting at position 2087 of SEQ ID NO: 586875
aggcuacuccagcaauaca

SEQ ID NO: 750543 - RNA, 19 nt, Artificial Sequence
  Description of Artificial Sequence: Synthetic oligonucleotide
  Antisense strand to SEQ ID NO: 750542
uguauugcuggaguagccu

SEQ ID NO: 750544 - RNA, 19 nt, Artificial Sequence
  Description of Artificial Sequence: Synthetic oligonucleotide
  Sense strand starting at position 2372 of SEQ ID NO: 586875
cggugaaucugcgcugaug

SEQ ID NO: 750545 - RNA, 19 nt, Artificial Sequence
  Description of Artificial Sequence: Synthetic oligonucleotide
  Antisense strand to SEQ ID NO: 750544
caucagcgcagauucaccg

SEQ ID NO: 750546 - RNA, 19 nt, Artificial Sequence
  Description of Artificial Sequence: Synthetic oligonucleotide
  Sense strand starting at position 2374 of SEQ ID NO: 586875
gugaaucugcgcugaugag

SEQ ID NO: 750547 - RNA, 19 nt, Artificial Sequence
  Description of Artificial Sequence: Synthetic oligonucleotide
  Antisense strand to SEQ ID NO: 750546
cucaucagcgcagauucac

SEQ ID NO: 750548 - RNA, 19 nt, Artificial Sequence
  Description of Artificial Sequence: Synthetic oligonucleotide
  Sense strand starting at position 2375 of SEQ ID NO: 586875
ugaaucugcgcugaugagu

SEQ ID NO: 750549 - RNA, 19 nt, Artificial Sequence
  Description of Artificial Sequence: Synthetic oligonucleotide
  Antisense strand to SEQ ID NO: 750548
acucaucagcgcagauuca

SEQ ID NO: 750550 - RNA, 19 nt, Artificial Sequence
  Description of Artificial Sequence: Synthetic oligonucleotide
  Sense strand starting at position 2384 of SEQ ID NO: 586875
gcugaugagugacacguuu

SEQ ID NO: 750551 - RNA, 19 nt, Artificial Sequence
  Description of Artificial Sequence: Synthetic oligonucleotide
  Antisense strand to SEQ ID NO: 750550
aaacgugucacucaucagc

SEQ ID NO: 750552 - RNA, 19 nt, Artificial Sequence
  Description of Artificial Sequence: Synthetic oligonucleotide
  Sense strand starting at position 2569 of SEQ ID NO: 586875
gucagugucaccuggaguu

SEQ ID NO: 750553 - RNA, 19 nt, Artificial Sequence
  Description of Artificial Sequence: Synthetic oligonucleotide
  Antisense strand to SEQ ID NO: 750552
aacuccaggugacacugac

SEQ ID NO: 750554 - RNA, 19 nt, Artificial Sequence
  Description of Artificial Sequence: Synthetic oligonucleotide
  Sense strand starting at position 2571 of SEQ ID NO: 586875
cagugucaccuggaguuau

SEQ ID NO: 750555 - RNA, 19 nt, Artificial Sequence
  Description of Artificial Sequence: Synthetic oligonucleotide
  Antisense strand to SEQ ID NO: 750554
auaacuccaggugacacug

SEQ ID NO: 750556 - RNA, 19 nt, Artificial Sequence
  Description of Artificial Sequence: Synthetic oligonucleotide
  Sense strand starting at position 2597 of SEQ ID NO: 586875
cggugacuuaccuaguaac

SEQ ID NO: 750557 - RNA, 19 nt, Artificial Sequence
  Description of Artificial Sequence: Synthetic oligonucleotide
  Antisense strand to SEQ ID NO: 750556
guuacuagguaagucaccg

SEQ ID NO: 750558 - RNA, 19 nt, Artificial Sequence
  Description of Artificial Sequence: Synthetic oligonucleotide
  Sense strand starting at position 2600 of SEQ ID NO: 586875
ugacuuaccuaguaacgga

SEQ ID NO: 750559 - RNA, 19 nt, Artificial Sequence
  Description of Artificial Sequence: Synthetic oligonucleotide
  Antisense strand to SEQ ID NO: 750558
uccguuacuagguaaguca

SEQ ID NO: 750560 - RNA, 19 nt, Artificial Sequence
  Description of Artificial Sequence: Synthetic oligonucleotide
  Sense strand starting at position 2655 of SEQ ID NO: 586875
cuuuauaacugaggagaua

SEQ ID NO: 750561 - RNA, 19 nt, Artificial Sequence
  Description of Artificial Sequence: Synthetic oligonucleotide
  Antisense strand to SEQ ID NO: 750560
uaucuccucaguuauaaag

SEQ ID NO: 750562 - RNA, 19 nt, Artificial Sequence
  Description of Artificial Sequence: Synthetic oligonucleotide
  Sense strand starting at position 3032 of SEQ ID NO: 586875
gggacaugcugagaaguga

SEQ ID NO: 750563 - RNA, 19 nt, Artificial Sequence
  Description of Artificial Sequence: Synthetic oligonucleotide
  Antisense strand to SEQ ID NO: 750562
ucacuucucagcauguccc

SEQ ID NO: 750564 - RNA, 19 nt, Artificial Sequence
  Description of Artificial Sequence: Synthetic oligonucleotide
  Sense strand starting at position 3064 of SEQ ID NO: 586875
gugugaacccucugucaug

SEQ ID NO: 750565 - RNA, 19 nt, Artificial Sequence
  Description of Artificial Sequence: Synthetic oligonucleotide
  Antisense strand to SEQ ID NO: 750564
caugacagaggguucacac

SEQ ID NO: 750566 - RNA, 19 nt, Artificial Sequence
  Description of Artificial Sequence: Synthetic oligonucleotide
  Sense strand starting at position 3559 of SEQ ID NO: 586875
gaccuuaucuaucgauaga

SEQ ID NO: 750567 - RNA, 19 nt, Artificial Sequence
  Description of Artificial Sequence: Synthetic oligonucleotide
  Antisense strand to SEQ ID NO: 750566
ucuaucgauagauaagguc

SEQ ID NO: 750568 - RNA, 19 nt, Artificial Sequence
  Description of Artificial Sequence: Synthetic oligonucleotide
  Sense strand starting at position 440 of SEQ ID NO: 586876
ggagguugaaaguagucua

SEQ ID NO: 750569 - RNA, 19 nt, Artificial Sequence
  Description of Artificial Sequence: Synthetic oligonucleotide
  Antisense strand to SEQ ID NO: 750568
uagacuacuuucaaccucc

SEQ ID NO: 750570 - RNA, 19 nt, Artificial Sequence
  Description of Artificial Sequence: Synthetic oligonucleotide
  Sense strand starting at position 445 of SEQ ID NO: 586876
uugaaaguagucuaggcaa

SEQ ID NO: 750571 - RNA, 19 nt, Artificial Sequence
  Description of Artificial Sequence: Synthetic oligonucleotide
  Antisense strand to SEQ ID NO: 750570
uugccuagacuacuuucaa

SEQ ID NO: 750572 - RNA, 19 nt, Artificial Sequence
  Description of Artificial Sequence: Synthetic oligonucleotide
  Sense strand starting at position 447 of SEQ ID NO: 586876
gaaaguagucuaggcaaua

SEQ ID NO: 750573 - RNA, 19 nt, Artificial Sequence
  Description of Artificial Sequence: Synthetic oligonucleotide
  Antisense strand to SEQ ID NO: 750572
uauugccuagacuacuuuc

SEQ ID NO: 750574 - RNA, 19 nt, Artificial Sequence
  Description of Artificial Sequence: Synthetic oligonucleotide
  Sense strand starting at position 448 of SEQ ID NO: 586876
aaaguagucuaggcaauau

SEQ ID NO: 750575 - RNA, 19 nt, Artificial Sequence
  Description of Artificial Sequence: Synthetic oligonucleotide
  Antisense strand to SEQ ID NO: 750574
auauugccuagacuacuuu

SEQ ID NO: 750576 - RNA, 19 nt, Artificial Sequence
  Description of Artificial Sequence: Synthetic oligonucleotide
  Sense strand starting at position 986 of SEQ ID NO: 586876
uggcuuaaauguccaccua

SEQ ID NO: 750577 - RNA, 19 nt, Artificial Sequence
  Description of Artificial Sequence: Synthetic oligonucleotide
  Antisense strand to SEQ ID NO: 750576
uagguggacauuuaagcca

SEQ ID NO: 750578 - RNA, 19 nt, Artificial Sequence
  Description of Artificial Sequence: Synthetic oligonucleotide
  Sense strand starting at position 987 of SEQ ID NO: 586876
ggcuuaaauguccaccuau

SEQ ID NO: 750579 - RNA, 19 nt, Artificial Sequence
  Description of Artificial Sequence: Synthetic oligonucleotide
  Antisense strand to SEQ ID NO: 750578
auagguggacauuuaagcc

SEQ ID NO: 750580 - RNA, 19 nt, Artificial Sequence
  Description of Artificial Sequence: Synthetic oligonucleotide
  Sense strand starting at position 1072 of SEQ ID NO: 586876
cucucacuucugugggauu

SEQ ID NO: 750581 - RNA, 19 nt, Artificial Sequence
  Description of Artificial Sequence: Synthetic oligonucleotide
  Antisense strand to SEQ ID NO: 750580
aaucccacagaagugagag

SEQ ID NO: 750582 - RNA, 19 nt, Artificial Sequence
  Description of Artificial Sequence: Synthetic oligonucleotide
  Sense strand starting at position 1074 of SEQ ID NO: 586876
cucacuucugugggauuga

SEQ ID NO: 750583 - RNA, 19 nt, Artificial Sequence
  Description of Artificial Sequence: Synthetic oligonucleotide
  Antisense strand to SEQ ID NO: 750582
ucaaucccacagaagugag

SEQ ID NO: 750584 - RNA, 19 nt, Artificial Sequence
  Description of Artificial Sequence: Synthetic oligonucleotide
  Sense strand starting at position 1160 of SEQ ID NO: 586876
auuccuguuccacaugaca

SEQ ID NO: 750585 - RNA, 19 nt, Artificial Sequence
  Description of Artificial Sequence: Synthetic oligonucleotide
  Antisense strand to SEQ ID NO: 750584
ugucauguggaacaggaau

SEQ ID NO: 750586 - RNA, 19 nt, Artificial Sequence
  Description of Artificial Sequence: Synthetic oligonucleotide
  Sense strand starting at position 1241 of SEQ ID NO: 586876
acuguucuuccugagagug

SEQ ID NO: 750587 - RNA, 19 nt, Artificial Sequence
  Description of Artificial Sequence: Synthetic oligonucleotide
  Antisense strand to SEQ ID NO: 750586
cacucucaggaagaacagu

SEQ ID NO: 750588 - RNA, 19 nt, Artificial Sequence
  Description of Artificial Sequence: Synthetic oligonucleotide
  Sense strand starting at position 1263 of SEQ ID NO: 586876
ucggacuccucauccaauu

SEQ ID NO: 750589 - RNA, 19 nt, Artificial Sequence
  Description of Artificial Sequence: Synthetic oligonucleotide
  Antisense strand to SEQ ID NO: 750588
aauuggaugaggaguccga

SEQ ID NO: 750590 - RNA, 19 nt, Artificial Sequence
  Description of Artificial Sequence: Synthetic oligonucleotide
  Sense strand starting at position 1320 of SEQ ID NO: 586876
uacauuugaugugcugcaa

SEQ ID NO: 750591 - RNA, 19 nt, Artificial Sequence
  Description of Artificial Sequence: Synthetic oligonucleotide
  Antisense strand to SEQ ID NO: 750590
uugcagcacaucaaaugua

SEQ ID NO: 750592 - RNA, 19 nt, Artificial Sequence
  Description of Artificial Sequence: Synthetic oligonucleotide
  Sense strand starting at position 1474 of SEQ ID NO: 586876
agggcuuuaaggcgaugaa

SEQ ID NO: 750593 - RNA, 19 nt, Artificial Sequence
  Description of Artificial Sequence: Synthetic oligonucleotide
  Antisense strand to SEQ ID NO: 750592
uucaucgccuuaaagcccu

SEQ ID NO: 750594 - RNA, 19 nt, Artificial Sequence
  Description of Artificial Sequence: Synthetic oligonucleotide
  Sense strand starting at position 1477 of SEQ ID NO: 586876
gcuuuaaggcgaugaagaa

SEQ ID NO: 750595 - RNA, 19 nt, Artificial Sequence
  Description of Artificial Sequence: Synthetic oligonucleotide
  Antisense strand to SEQ ID NO: 750594
uucuucaucgccuuaaagc

SEQ ID NO: 750596 - RNA, 19 nt, Artificial Sequence
  Description of Artificial Sequence: Synthetic oligonucleotide
  Sense strand starting at position 1511 of SEQ ID NO: 586876
cuuggaccucucugaaauc

SEQ ID NO: 750597 - RNA, 19 nt, Artificial Sequence
  Description of Artificial Sequence: Synthetic oligonucleotide
  Antisense strand to SEQ ID NO: 750596
gauuucagagagguccaag

SEQ ID NO: 750598 - RNA, 19 nt, Artificial Sequence
  Description of Artificial Sequence: Synthetic oligonucleotide
  Sense strand starting at position 1628 of SEQ ID NO: 586876
uuggucuuaucacuguaac

SEQ ID NO: 750599 - RNA, 19 nt, Artificial Sequence
  Description of Artificial Sequence: Synthetic oligonucleotide
  Antisense strand to SEQ ID NO: 750598
guuacagugauaagaccaa

SEQ ID NO: 750600 - RNA, 19 nt, Artificial Sequence
  Description of Artificial Sequence: Synthetic oligonucleotide
  Sense strand starting at position 1629 of SEQ ID NO: 586876
uggucuuaucacuguaacu

SEQ ID NO: 750601 - RNA, 19 nt, Artificial Sequence
  Description of Artificial Sequence: Synthetic oligonucleotide
  Antisense strand to SEQ ID NO: 750600
aguuacagugauaagacca

SEQ ID NO: 750602 - RNA, 19 nt, Artificial Sequence
  Description of Artificial Sequence: Synthetic oligonucleotide
  Sense strand starting at position 1631 of SEQ ID NO: 586876
gucuuaucacuguaacuug

SEQ ID NO: 750603 - RNA, 19 nt, Artificial Sequence
  Description of Artificial Sequence: Synthetic oligonucleotide
  Antisense strand to SEQ ID NO: 750602
caaguuacagugauaagac

SEQ ID NO: 750604 - RNA, 19 nt, Artificial Sequence
  Description of Artificial Sequence: Synthetic oligonucleotide
  Sense strand starting at position 1639 of SEQ ID NO: 586876
acuguaacuugagcugaga

SEQ ID NO: 750605 - RNA, 19 nt, Artificial Sequence
  Description of Artificial Sequence: Synthetic oligonucleotide
  Antisense strand to SEQ ID NO: 750604
ucucagcucaaguuacagu

SEQ ID NO: 750606 - RNA, 19 nt, Artificial Sequence
  Description of Artificial Sequence: Synthetic oligonucleotide
  Sense strand starting at position 1641 of SEQ ID NO: 586876
uguaacuugagcugagacu

SEQ ID NO: 750607 - RNA, 19 nt, Artificial Sequence
  Description of Artificial Sequence: Synthetic oligonucleotide
  Antisense strand to SEQ ID NO: 750606
agucucagcucaaguuaca

SEQ ID NO: 750608 - RNA, 19 nt, Artificial Sequence
  Description of Artificial Sequence: Synthetic oligonucleotide
  Sense strand starting at position 1642 of SEQ ID NO: 586876
guaacuugagcugagacuu

SEQ ID NO: 750609 - RNA, 19 nt, Artificial Sequence
  Description of Artificial Sequence: Synthetic oligonucleotide
  Antisense strand to SEQ ID NO: 750608
aagucucagcucaaguuac

SEQ ID NO: 750610 - RNA, 19 nt, Artificial Sequence
  Description of Artificial Sequence: Synthetic oligonucleotide
  Sense strand starting at position 2135 of SEQ ID NO: 586876
aggaacagccagugaauua

SEQ ID NO: 750611 - RNA, 19 nt, Artificial Sequence
  Description of Artificial Sequence: Synthetic oligonucleotide
  Antisense strand to SEQ ID NO: 750610
uaauucacuggcuguuccu

SEQ ID NO: 750612 - RNA, 19 nt, Artificial Sequence
  Description of Artificial Sequence: Synthetic oligonucleotide
  Sense strand starting at position 2223 of SEQ ID NO: 586876
gcguccuuugcucucaauu

SEQ ID NO: 750613 - RNA, 19 nt, Artificial Sequence
  Description of Artificial Sequence: Synthetic oligonucleotide
  Antisense strand to SEQ ID NO: 750612
aauugagagcaaaggacgc

SEQ ID NO: 750614 - RNA, 19 nt, Artificial Sequence
  Description of Artificial Sequence: Synthetic oligonucleotide
  Sense strand starting at position 2311 of SEQ ID NO: 586876
aaauguuugggucaguugu

SEQ ID NO: 750615 - RNA, 19 nt, Artificial Sequence
  Description of Artificial Sequence: Synthetic oligonucleotide
  Antisense strand to SEQ ID NO: 750614
acaacugacccaaacauuu

SEQ ID NO: 750616 - RNA, 19 nt, Artificial Sequence
  Description of Artificial Sequence: Synthetic oligonucleotide
  Sense strand starting at position 2339 of SEQ ID NO: 586876
uauuguacugggugaugua

SEQ ID NO: 750617 - RNA, 19 nt, Artificial Sequence
  Description of Artificial Sequence: Synthetic oligonucleotide
  Antisense strand to SEQ ID NO: 750616
uacaucacccaguacaaua

SEQ ID NO: 750618 - RNA, 19 nt, Artificial Sequence
  Description of Artificial Sequence: Synthetic oligonucleotide
  Sense strand starting at position 2340 of SEQ ID NO: 586876
auuguacugggugauguaa

SEQ ID NO: 750619 - RNA, 19 nt, Artificial Sequence
  Description of Artificial Sequence: Synthetic oligonucleotide
  Antisense strand to SEQ ID NO: 750618
uuacaucacccaguacaau

SEQ ID NO: 750620 - RNA, 19 nt, Artificial Sequence
  Description of Artificial Sequence: Synthetic oligonucleotide
  Sense strand starting at position 2517 of SEQ ID NO: 586876
gaggguuguuaguugagau

SEQ ID NO: 750621 - RNA, 19 nt, Artificial Sequence
  Description of Artificial Sequence: Synthetic oligonucleotide
  Antisense strand to SEQ ID NO: 750620
aucucaacuaacaacccuc

SEQ ID NO: 750622 - RNA, 19 nt, Artificial Sequence
  Description of Artificial Sequence: Synthetic oligonucleotide
  Sense strand starting at position 2518 of SEQ ID NO: 586876
aggguuguuaguugagaua

SEQ ID NO: 750623 - RNA, 19 nt, Artificial Sequence
  Description of Artificial Sequence: Synthetic oligonucleotide
  Antisense strand to SEQ ID NO: 750622
uaucucaacuaacaacccu

SEQ ID NO: 750624 - RNA, 19 nt, Artificial Sequence
  Description of Artificial Sequence: Synthetic oligonucleotide
  Sense strand starting at position 2632 of SEQ ID NO: 586876
agugcagaggcauaauuau

SEQ ID NO: 750625 - RNA, 19 nt, Artificial Sequence
  Description of Artificial Sequence: Synthetic oligonucleotide
  Antisense strand to SEQ ID NO: 750624
auaauuaugccucugcacu

SEQ ID NO: 750626 - RNA, 19 nt, Artificial Sequence
  Description of Artificial Sequence: Synthetic oligonucleotide
  Sense strand starting at position 2764 of SEQ ID NO: 586876
cugggaucucccuauguug

SEQ ID NO: 750627 - RNA, 19 nt, Artificial Sequence
  Description of Artificial Sequence: Synthetic oligonucleotide
  Antisense strand to SEQ ID NO: 750626
caacauagggagaucccag

SEQ ID NO: 750628 - RNA, 19 nt, Artificial Sequence
  Description of Artificial Sequence: Synthetic oligonucleotide
  Sense strand starting at position 3224 of SEQ ID NO: 586876
cugaauaucucuuugugag

SEQ ID NO: 750629 - RNA, 19 nt, Artificial Sequence
  Description of Artificial Sequence: Synthetic oligonucleotide
  Antisense strand to SEQ ID NO: 750628
cucacaaagagauauucag

SEQ ID NO: 750630 - RNA, 19 nt, Artificial Sequence
  Description of Artificial Sequence: Synthetic oligonucleotide
  Sense strand starting at position 3225 of SEQ ID NO: 586876
ugaauaucucuuugugagg

SEQ ID NO: 750631 - RNA, 19 nt, Artificial Sequence
  Description of Artificial Sequence: Synthetic oligonucleotide
  Antisense strand to SEQ ID NO: 750630
ccucacaaagagauauuca

SEQ ID NO: 750632 - RNA, 19 nt, Artificial Sequence
  Description of Artificial Sequence: Synthetic oligonucleotide
  Sense strand starting at position 3226 of SEQ ID NO: 586876
gaauaucucuuugugagga

SEQ ID NO: 750633 - RNA, 19 nt, Artificial Sequence
  Description of Artificial Sequence: Synthetic oligonucleotide
  Antisense strand to SEQ ID NO: 750632
uccucacaaagagauauuc

SEQ ID NO: 750634 - RNA, 19 nt, Artificial Sequence
  Description of Artificial Sequence: Synthetic oligonucleotide
  Sense strand starting at position 3303 of SEQ ID NO: 586876
gaagguauaugagaagaaa

SEQ ID NO: 750635 - RNA, 19 nt, Artificial Sequence
  Description of Artificial Sequence: Synthetic oligonucleotide
  Antisense strand to SEQ ID NO: 750634
uuucuucucauauaccuuc

SEQ ID NO: 750636 - RNA, 19 nt, Artificial Sequence
  Description of Artificial Sequence: Synthetic oligonucleotide
  Sense strand starting at position 3525 of SEQ ID NO: 586876
cacuacauaggaugugaua

SEQ ID NO: 750637 - RNA, 19 nt, Artificial Sequence
  Description of Artificial Sequence: Synthetic oligonucleotide
  Antisense strand to SEQ ID NO: 750636
uaucacauccuauguagug

SEQ ID NO: 750638 - RNA, 19 nt, Artificial Sequence
  Description of Artificial Sequence: Synthetic oligonucleotide
  Sense strand starting at position 3527 of SEQ ID NO: 586876
cuacauaggaugugauaug

SEQ ID NO: 750639 - RNA, 19 nt, Artificial Sequence
  Description of Artificial Sequence: Synthetic oligonucleotide
  Antisense strand to SEQ ID NO: 750638
cauaucacauccuauguag

SEQ ID NO: 750640 - RNA, 19 nt, Artificial Sequence
  Description of Artificial Sequence: Synthetic oligonucleotide
  Sense strand starting at position 3538 of SEQ ID NO: 586876
gugauauguaggcaguuaa

SEQ ID NO: 750641 - RNA, 19 nt, Artificial Sequence
  Description of Artificial Sequence: Synthetic oligonucleotide
  Antisense strand to SEQ ID NO: 750640
uuaacugccuacauaucac

SEQ ID NO: 750642 - RNA, 19 nt, Artificial Sequence
  Description of Artificial Sequence: Synthetic oligonucleotide
  Sense strand starting at position 3552 of SEQ ID NO: 586876
guuaaauggcauuauagac

SEQ ID NO: 750643 - RNA, 19 nt, Artificial Sequence
  Description of Artificial Sequence: Synthetic oligonucleotide
  Antisense strand to SEQ ID NO: 750642
gucuauaaugccauuuaac

SEQ ID NO: 750644 - RNA, 19 nt, Artificial Sequence
  Description of Artificial Sequence: Synthetic oligonucleotide
  Sense strand starting at position 3669 of SEQ ID NO: 586876
gaaaucaaccuuugugggu

SEQ ID NO: 750645 - RNA, 19 nt, Artificial Sequence
  Description of Artificial Sequence: Synthetic oligonucleotide
  Antisense strand to SEQ ID NO: 750644
acccacaaagguugauuuc

SEQ ID NO: 750646 - RNA, 19 nt, Artificial Sequence
  Description of Artificial Sequence: Synthetic oligonucleotide
  Sense strand starting at position 3733 of SEQ ID NO: 586876
auguaucuuguguaguaac

SEQ ID NO: 750647 - RNA, 19 nt, Artificial Sequence
  Description of Artificial Sequence: Synthetic oligonucleotide
  Antisense strand to SEQ ID NO: 750646
guuacuacacaagauacau

SEQ ID NO: 750648 - RNA, 19 nt, Artificial Sequence
  Description of Artificial Sequence: Synthetic oligonucleotide
  Sense strand starting at position 62 of SEQ ID NO: 586877
ggagccgaugccuguaauu

SEQ ID NO: 750649 - RNA, 19 nt, Artificial Sequence
  Description of Artificial Sequence: Synthetic oligonucleotide
  Antisense strand to SEQ ID NO: 750648
aauuacaggcaucggcucc

SEQ ID NO: 750650 - RNA, 19 nt, Artificial Sequence
  Description of Artificial Sequence: Synthetic oligonucleotide
  Sense strand starting at position 64 of SEQ ID NO: 586877
agccgaugccuguaauuuc

SEQ ID NO: 750651 - RNA, 19 nt, Artificial Sequence
  Description of Artificial Sequence: Synthetic oligonucleotide
  Antisense strand to SEQ ID NO: 750650
gaaauuacaggcaucggcu

SEQ ID NO: 750652 - RNA, 19 nt, Artificial Sequence
  Description of Artificial Sequence: Synthetic oligonucleotide
  Sense strand starting at position 94 of SEQ ID NO: 586877
acacuugaggcgggagaau

SEQ ID NO: 750653 - RNA, 19 nt, Artificial Sequence
  Description of Artificial Sequence: Synthetic oligonucleotide
  Antisense strand to SEQ ID NO: 750652
auucucccgccucaagugu

SEQ ID NO: 750654 - RNA, 19 nt, Artificial Sequence
  Description of Artificial Sequence: Synthetic oligonucleotide
  Sense strand starting at position 103 of SEQ ID NO: 586877
gcgggagaauggcuugagu

SEQ ID NO: 750655 - RNA, 19 nt, Artificial Sequence
  Description of Artificial Sequence: Synthetic oligonucleotide
  Antisense strand to SEQ ID NO: 750654
acucaagccauucucccgc

SEQ ID NO: 750656 - RNA, 19 nt, Artificial Sequence
  Description of Artificial Sequence: Synthetic oligonucleotide
  Sense strand starting at position 562 of SEQ ID NO: 586877
ccacacuguucugaaagua

SEQ ID NO: 750657 - RNA, 19 nt, Artificial Sequence
  Description of Artificial Sequence: Synthetic oligonucleotide
  Antisense strand to SEQ ID NO: 750656
uacuuucagaacagugugg

SEQ ID NO: 750658 - RNA, 19 nt, Artificial Sequence
  Description of Artificial Sequence: Synthetic oligonucleotide
  Sense strand starting at position 570 of SEQ ID NO: 586877
uucugaaaguaucuugacu

SEQ ID NO: 750659 - RNA, 19 nt, Artificial Sequence
  Description of Artificial Sequence: Synthetic oligonucleotide
  Antisense strand to SEQ ID NO: 750658
agucaagauacuuucagaa

SEQ ID NO: 750660 - RNA, 19 nt, Artificial Sequence
  Description of Artificial Sequence: Synthetic oligonucleotide
  Sense strand starting at position 606 of SEQ ID NO: 586877
ggcuaacuucuagagagca

SEQ ID NO: 750661 - RNA, 19 nt, Artificial Sequence
  Description of Artificial Sequence: Synthetic oligonucleotide
  Antisense strand to SEQ ID NO: 750660
ugcucucuagaaguuagcc

SEQ ID NO: 750662 - RNA, 19 nt, Artificial Sequence
  Description of Artificial Sequence: Synthetic oligonucleotide
  Sense strand starting at position 632 of SEQ ID NO: 586877
acugauuggaaaggucauu

SEQ ID NO: 750663 - RNA, 19 nt, Artificial Sequence
  Description of Artificial Sequence: Synthetic oligonucleotide
  Antisense strand to SEQ ID NO: 750662
aaugaccuuuccaaucagu

SEQ ID NO: 750664 - RNA, 19 nt, Artificial Sequence
  Description of Artificial Sequence: Synthetic oligonucleotide
  Sense strand starting at position 670 of SEQ ID NO: 586877
auuucuuaaucuugaggau

SEQ ID NO: 750665 - RNA, 19 nt, Artificial Sequence
  Description of Artificial Sequence: Synthetic oligonucleotide
  Antisense strand to SEQ ID NO: 750664
auccucaagauuaagaaau

SEQ ID NO: 750666 - RNA, 19 nt, Artificial Sequence
  Description of Artificial Sequence: Synthetic oligonucleotide
  Sense strand starting at position 673 of SEQ ID NO: 586877
ucuuaaucuugaggauaug

SEQ ID NO: 750667 - RNA, 19 nt, Artificial Sequence
  Description of Artificial Sequence: Synthetic oligonucleotide
  Antisense strand to SEQ ID NO: 750666
cauauccucaagauuaaga

SEQ ID NO: 750668 - RNA, 19 nt, Artificial Sequence
  Description of Artificial Sequence: Synthetic oligonucleotide
  Sense strand starting at position 685 of SEQ ID NO: 586877
ggauaugaaucaguaacuc

SEQ ID NO: 750669 - RNA, 19 nt, Artificial Sequence
  Description of Artificial Sequence: Synthetic oligonucleotide
  Antisense strand to SEQ ID NO: 750668
gaguuacugauucauaucc

SEQ ID NO: 750670 - RNA, 19 nt, Artificial Sequence
  Description of Artificial Sequence: Synthetic oligonucleotide
  Sense strand starting at position 1112 of SEQ ID NO: 586877
ggucacucgcgcugagaca

SEQ ID NO: 750671 - RNA, 19 nt, Artificial Sequence
  Description of Artificial Sequence: Synthetic oligonucleotide
  Antisense strand to SEQ ID NO: 750670
ugucucagcgcgagugacc

SEQ ID NO: 750672 - RNA, 19 nt, Artificial Sequence
  Description of Artificial Sequence: Synthetic oligonucleotide
  Sense strand starting at position 2393 of SEQ ID NO: 586877
aagccaaucguuugaucca

SEQ ID NO: 750673 - RNA, 19 nt, Artificial Sequence
  Description of Artificial Sequence: Synthetic oligonucleotide
  Antisense strand to SEQ ID NO: 750672
uggaucaaacgauuggcuu

SEQ ID NO: 750674 - RNA, 19 nt, Artificial Sequence
  Description of Artificial Sequence: Synthetic oligonucleotide
  Sense strand starting at position 2719 of SEQ ID NO: 586877
ugaaauaauuaaccagugu

SEQ ID NO: 750675 - RNA, 19 nt, Artificial Sequence
  Description of Artificial Sequence: Synthetic oligonucleotide
  Antisense strand to SEQ ID NO: 750674
acacugguuaauuauuuca

SEQ ID NO: 750676 - RNA, 19 nt, Artificial Sequence
  Description of Artificial Sequence: Synthetic oligonucleotide
  Sense strand starting at position 2723 of SEQ ID NO: 586877
auaauuaaccagugucaca

SEQ ID NO: 750677 - RNA, 19 nt, Artificial Sequence
  Description of Artificial Sequence: Synthetic oligonucleotide
  Antisense strand to SEQ ID NO: 750676
ugugacacugguuaauuau

SEQ ID NO: 750678 - RNA, 19 nt, Artificial Sequence
  Description of Artificial Sequence: Synthetic oligonucleotide
  Sense strand starting at position 2746 of SEQ ID NO: 586877
augaaugguugagucacaa

SEQ ID NO: 750679 - RNA, 19 nt, Artificial Sequence
  Description of Artificial Sequence: Synthetic oligonucleotide
  Antisense strand to SEQ ID NO: 750678
uugugacucaaccauucau

SEQ ID NO: 750680 - RNA, 19 nt, Artificial Sequence
  Description of Artificial Sequence: Synthetic oligonucleotide
  Sense strand starting at position 2773 of SEQ ID NO: 586877
cuguuuacuuucuuuaugu

SEQ ID NO: 750681 - RNA, 19 nt, Artificial Sequence
  Description of Artificial Sequence: Synthetic oligonucleotide
  Antisense strand to SEQ ID NO: 750680
acauaaagaaaguaaacag

SEQ ID NO: 750682 - RNA, 19 nt, Artificial Sequence
  Description of Artificial Sequence: Synthetic oligonucleotide
  Sense strand starting at position 2775 of SEQ ID NO: 586877
guuuacuuucuuuauguga

SEQ ID NO: 750683 - RNA, 19 nt, Artificial Sequence
  Description of Artificial Sequence: Synthetic oligonucleotide
  Antisense strand to SEQ ID NO: 750682
ucacauaaagaaaguaaac

SEQ ID NO: 750684 - RNA, 19 nt, Artificial Sequence
  Description of Artificial Sequence: Synthetic oligonucleotide
  Sense strand starting at position 2782 of SEQ ID NO: 586877
uucuuuaugugauucccau

SEQ ID NO: 750685 - RNA, 19 nt, Artificial Sequence
  Description of Artificial Sequence: Synthetic oligonucleotide
  Antisense strand to SEQ ID NO: 750684
augggaaucacauaaagaa

SEQ ID NO: 750686 - RNA, 19 nt, Artificial Sequence
  Description of Artificial Sequence: Synthetic oligonucleotide
  Sense strand starting at position 2786 of SEQ ID NO: 586877
uuaugugauucccauguaa

SEQ ID NO: 750687 - RNA, 19 nt, Artificial Sequence
  Description of Artificial Sequence: Synthetic oligonucleotide
  Antisense strand to SEQ ID NO: 750686
uuacaugggaaucacauaa

SEQ ID NO: 750688 - RNA, 19 nt, Artificial Sequence
  Description of Artificial Sequence: Synthetic oligonucleotide
  Sense strand starting at position 2788 of SEQ ID NO: 586877
augugauucccauguaagg

SEQ ID NO: 750689 - RNA, 19 nt, Artificial Sequence
  Description of Artificial Sequence: Synthetic oligonucleotide
  Antisense strand to SEQ ID NO: 750688
ccuuacaugggaaucacau

SEQ ID NO: 750690 - RNA, 19 nt, Artificial Sequence
  Description of Artificial Sequence: Synthetic oligonucleotide
  Sense strand starting at position 2827 of SEQ ID NO: 586877
caugcugauugcucugagu

SEQ ID NO: 750691 - RNA, 19 nt, Artificial Sequence
  Description of Artificial Sequence: Synthetic oligonucleotide
  Antisense strand to SEQ ID NO: 750690
acucagagcaaucagcaug

SEQ ID NO: 750692 - RNA, 19 nt, Artificial Sequence
  Description of Artificial Sequence: Synthetic oligonucleotide
  Sense strand starting at position 2849 of SEQ ID NO: 586877
ggaugccaucuauggugaa

SEQ ID NO: 750693 - RNA, 19 nt, Artificial Sequence
  Description of Artificial Sequence: Synthetic oligonucleotide
  Antisense strand to SEQ ID NO: 750692
uucaccauagauggcaucc

SEQ ID NO: 750694 - RNA, 19 nt, Artificial Sequence
  Description of Artificial Sequence: Synthetic oligonucleotide
  Sense strand starting at position 2853 of SEQ ID NO: 586877
gccaucuauggugaaaggu

SEQ ID NO: 750695 - RNA, 19 nt, Artificial Sequence
  Description of Artificial Sequence: Synthetic oligonucleotide
  Antisense strand to SEQ ID NO: 750694
accuuucaccauagauggc

SEQ ID NO: 750696 - RNA, 19 nt, Artificial Sequence
  Description of Artificial Sequence: Synthetic oligonucleotide
  Sense strand starting at position 3113 of SEQ ID NO: 586877
ucucgaguagccggaauua

SEQ ID NO: 750697 - RNA, 19 nt, Artificial Sequence
  Description of Artificial Sequence: Synthetic oligonucleotide
  Antisense strand to SEQ ID NO: 750696
uaauuccggcuacucgaga

SEQ ID NO: 750698 - RNA, 19 nt, Artificial Sequence
  Description of Artificial Sequence: Synthetic oligonucleotide
  Sense strand starting at position 3211 of SEQ ID NO: 586877
uuggaaucgugaccucaag

SEQ ID NO: 750699 - RNA, 19 nt, Artificial Sequence
  Description of Artificial Sequence: Synthetic oligonucleotide
  Antisense strand to SEQ ID NO: 750698
cuugaggucacgauuccaa

SEQ ID NO: 750700 - RNA, 19 nt, Artificial Sequence
  Description of Artificial Sequence: Synthetic oligonucleotide
  Sense strand starting at position 3332 of SEQ ID NO: 586877
uggccagucuagucuagua

SEQ ID NO: 750701 - RNA, 19 nt, Artificial Sequence
  Description of Artificial Sequence: Synthetic oligonucleotide
  Antisense strand to SEQ ID NO: 750700
uacuagacuagacuggcca

SEQ ID NO: 750702 - RNA, 19 nt, Artificial Sequence
  Description of Artificial Sequence: Synthetic oligonucleotide
  Sense strand starting at position 3433 of SEQ ID NO: 586877
uucuguucuugcucauuau

SEQ ID NO: 750703 - RNA, 19 nt, Artificial Sequence
  Description of Artificial Sequence: Synthetic oligonucleotide
  Antisense strand to SEQ ID NO: 750702
auaaugagcaagaacagaa

SEQ ID NO: 750704 - RNA, 19 nt, Artificial Sequence
  Description of Artificial Sequence: Synthetic oligonucleotide
  Sense strand starting at position 3434 of SEQ ID NO: 586877
ucuguucuugcucauuauu

SEQ ID NO: 750705 - RNA, 19 nt, Artificial Sequence
  Description of Artificial Sequence: Synthetic oligonucleotide
  Antisense strand to SEQ ID NO: 750704
aauaaugagcaagaacaga

SEQ ID NO: 750706 - RNA, 19 nt, Artificial Sequence
  Description of Artificial Sequence: Synthetic oligonucleotide
  Sense strand starting at position 3439 of SEQ ID NO: 586877
ucuugcucauuauugguaa

SEQ ID NO: 750707 - RNA, 19 nt, Artificial Sequence
  Description of Artificial Sequence: Synthetic oligonucleotide
  Antisense strand to SEQ ID NO: 750706
uuaccaauaaugagcaaga

SEQ ID NO: 750708 - RNA, 19 nt, Artificial Sequence
  Description of Artificial Sequence: Synthetic oligonucleotide
  Sense strand starting at position 3442 of SEQ ID NO: 586877
ugcucauuauugguaaagu

SEQ ID NO: 750709 - RNA, 19 nt, Artificial Sequence
  Description of Artificial Sequence: Synthetic oligonucleotide
  Antisense strand to SEQ ID NO: 750708
acuuuaccaauaaugagca

SEQ ID NO: 750710 - RNA, 19 nt, Artificial Sequence
  Description of Artificial Sequence: Synthetic oligonucleotide
  Sense strand starting at position 3460 of SEQ ID NO: 586877
uggagauuaauugauucgu

SEQ ID NO: 750711 - RNA, 19 nt, Artificial Sequence
  Description of Artificial Sequence: Synthetic oligonucleotide
  Antisense strand to SEQ ID NO: 750710
acgaaucaauuaaucucca

SEQ ID NO: 750712 - RNA, 19 nt, Artificial Sequence
  Description of Artificial Sequence: Synthetic oligonucleotide
  Sense strand starting at position 3462 of SEQ ID NO: 586877
gagauuaauugauucguuu

SEQ ID NO: 750713 - RNA, 19 nt, Artificial Sequence
  Description of Artificial Sequence: Synthetic oligonucleotide
  Antisense strand to SEQ ID NO: 750712
aaacgaaucaauuaaucuc

SEQ ID NO: 750714 - RNA, 19 nt, Artificial Sequence
  Description of Artificial Sequence: Synthetic oligonucleotide
  Sense strand starting at position 3466 of SEQ ID NO: 586877
uuaauugauucguuucuca

SEQ ID NO: 750715 - RNA, 19 nt, Artificial Sequence
  Description of Artificial Sequence: Synthetic oligonucleotide
  Antisense strand to SEQ ID NO: 750714
ugagaaacgaaucaauuaa

SEQ ID NO: 750716 - RNA, 19 nt, Artificial Sequence
  Description of Artificial Sequence: Synthetic oligonucleotide
  Sense strand starting at position 3469 of SEQ ID NO: 586877
auugauucguuucucaaau

SEQ ID NO: 750717 - RNA, 19 nt, Artificial Sequence
  Description of Artificial Sequence: Synthetic oligonucleotide
  Antisense strand to SEQ ID NO: 750716
auuugagaaacgaaucaau

SEQ ID NO: 750718 - RNA, 19 nt, Artificial Sequence
  Description of Artificial Sequence: Synthetic oligonucleotide
  Sense strand starting at position 3470 of SEQ ID NO: 586877
uugauucguuucucaaauu

SEQ ID NO: 750719 - RNA, 19 nt, Artificial Sequence
  Description of Artificial Sequence: Synthetic oligonucleotide
  Antisense strand to SEQ ID NO: 750718
aauuugagaaacgaaucaa

SEQ ID NO: 750720 - RNA, 19 nt, Artificial Sequence
  Description of Artificial Sequence: Synthetic oligonucleotide
  Sense strand starting at position 3908 of SEQ ID NO: 586877
aguacauuacauggugaua

SEQ ID NO: 750721 - RNA, 19 nt, Artificial Sequence
  Description of Artificial Sequence: Synthetic oligonucleotide
  Antisense strand to SEQ ID NO: 750720
uaucaccauguaauguacu

SEQ ID NO: 750722 - RNA, 19 nt, Artificial Sequence
  Description of Artificial Sequence: Synthetic oligonucleotide
  Sense strand starting at position 3919 of SEQ ID NO: 586877
uggugauaauugcuauuac

SEQ ID NO: 750723 - RNA, 19 nt, Artificial Sequence
  Description of Artificial Sequence: Synthetic oligonucleotide
  Antisense strand to SEQ ID NO: 750722
guaauagcaauuaucacca

SEQ ID NO: 750724 - RNA, 19 nt, Artificial Sequence
  Description of Artificial Sequence: Synthetic oligonucleotide
  Sense strand starting at position 3964 of SEQ ID NO: 586877
gaucuuaacugacuuguga

SEQ ID NO: 750725 - RNA, 19 nt, Artificial Sequence
  Description of Artificial Sequence: Synthetic oligonucleotide
  Antisense strand to SEQ ID NO: 750724
ucacaagucaguuaagauc

SEQ ID NO: 750726 - RNA, 19 nt, Artificial Sequence
  Description of Artificial Sequence: Synthetic oligonucleotide
  Sense strand starting at position 3971 of SEQ ID NO: 586877
acugacuugugaucauaga

SEQ ID NO: 750727 - RNA, 19 nt, Artificial Sequence
  Description of Artificial Sequence: Synthetic oligonucleotide
  Antisense strand to SEQ ID NO: 750726
ucuaugaucacaagucagu

SEQ ID NO: 750728 - RNA, 19 nt, Artificial Sequence
  Description of Artificial Sequence: Synthetic oligonucleotide
  Sense strand starting at position 301 of SEQ ID NO: 586878
ugguacauauuccuauagu

SEQ ID NO: 750729 - RNA, 19 nt, Artificial Sequence
  Description of Artificial Sequence: Synthetic oligonucleotide
  Antisense strand to SEQ ID NO: 750728
acuauaggaauauguacca

SEQ ID NO: 750730 - RNA, 19 nt, Artificial Sequence
  Description of Artificial Sequence: Synthetic oligonucleotide
  Sense strand starting at position 354 of SEQ ID NO: 586878
gauugauuacugcacgaaa

SEQ ID NO: 750731 - RNA, 19 nt, Artificial Sequence
  Description of Artificial Sequence: Synthetic oligonucleotide
  Antisense strand to SEQ ID NO: 750730
uuucgugcaguaaucaauc

SEQ ID NO: 750732 - RNA, 19 nt, Artificial Sequence
  Description of Artificial Sequence: Synthetic oligonucleotide
  Sense strand starting at position 367 of SEQ ID NO: 586878
acgaaaggcacuugggaua

SEQ ID NO: 750733 - RNA, 19 nt, Artificial Sequence
  Description of Artificial Sequence: Synthetic oligonucleotide
  Antisense strand to SEQ ID NO: 750732
uaucccaagugccuuucgu

SEQ ID NO: 750734 - RNA, 19 nt, Artificial Sequence
  Description of Artificial Sequence: Synthetic oligonucleotide
  Sense strand starting at position 374 of SEQ ID NO: 586878
gcacuugggauacaaaugu

SEQ ID NO: 750735 - RNA, 19 nt, Artificial Sequence
  Description of Artificial Sequence: Synthetic oligonucleotide
  Antisense strand to SEQ ID NO: 750734
acauuuguaucccaagugc

SEQ ID NO: 750736 - RNA, 19 nt, Artificial Sequence
  Description of Artificial Sequence: Synthetic oligonucleotide
  Sense strand starting at position 378 of SEQ ID NO: 586878
uugggauacaaauguaagu

SEQ ID NO: 750737 - RNA, 19 nt, Artificial Sequence
  Description of Artificial Sequence: Synthetic oligonucleotide
  Antisense strand to SEQ ID NO: 750736
acuuacauuuguaucccaa

SEQ ID NO: 750738 - RNA, 19 nt, Artificial Sequence
  Description of Artificial Sequence: Synthetic oligonucleotide
  Sense strand starting at position 423 of SEQ ID NO: 586878
gagcuuaguguguaauaug

SEQ ID NO: 750739 - RNA, 19 nt, Artificial Sequence
  Description of Artificial Sequence: Synthetic oligonucleotide
  Antisense strand to SEQ ID NO: 750738
cauauuacacacuaagcuc

SEQ ID NO: 750740 - RNA, 19 nt, Artificial Sequence
  Description of Artificial Sequence: Synthetic oligonucleotide
  Sense strand starting at position 428 of SEQ ID NO: 586878
uaguguguaauaugagaga

SEQ ID NO: 750741 - RNA, 19 nt, Artificial Sequence
  Description of Artificial Sequence: Synthetic oligonucleotide
  Antisense strand to SEQ ID NO: 750740
ucucucauauuacacacua

SEQ ID NO: 750742 - RNA, 19 nt, Artificial Sequence
  Description of Artificial Sequence: Synthetic oligonucleotide
  Sense strand starting at position 443 of SEQ ID NO: 586878
gagauaugacuauguaucu

SEQ ID NO: 750743 - RNA, 19 nt, Artificial Sequence
  Description of Artificial Sequence: Synthetic oligonucleotide
  Antisense strand to SEQ ID NO: 750742
agauacauagucauaucuc

SEQ ID NO: 750744 - RNA, 19 nt, Artificial Sequence
  Description of Artificial Sequence: Synthetic oligonucleotide
  Sense strand starting at position 448 of SEQ ID NO: 586878
augacuauguaucugaaag

SEQ ID NO: 750745 - RNA, 19 nt, Artificial Sequence
  Description of Artificial Sequence: Synthetic oligonucleotide
  Antisense strand to SEQ ID NO: 750744
cuuucagauacauagucau

SEQ ID NO: 750746 - RNA, 19 nt, Artificial Sequence
  Description of Artificial Sequence: Synthetic oligonucleotide
  Sense strand starting at position 449 of SEQ ID NO: 586878
ugacuauguaucugaaagg

SEQ ID NO: 750747 - RNA, 19 nt, Artificial Sequence
  Description of Artificial Sequence: Synthetic oligonucleotide
  Antisense strand to SEQ ID NO: 750746
ccuuucagauacauaguca

SEQ ID NO: 750748 - RNA, 19 nt, Artificial Sequence
  Description of Artificial Sequence: Synthetic oligonucleotide
  Sense strand starting at position 564 of SEQ ID NO: 586878
guacaugaaaucuguggaa

SEQ ID NO: 750749 - RNA, 19 nt, Artificial Sequence
  Description of Artificial Sequence: Synthetic oligonucleotide
  Antisense strand to SEQ ID NO: 750748
uuccacagauuucauguac

SEQ ID NO: 750750 - RNA, 19 nt, Artificial Sequence
  Description of Artificial Sequence: Synthetic oligonucleotide
  Sense strand starting at position 566 of SEQ ID NO: 586878
acaugaaaucuguggaacu

SEQ ID NO: 750751 - RNA, 19 nt, Artificial Sequence
  Description of Artificial Sequence: Synthetic oligonucleotide
  Antisense strand to SEQ ID NO: 750750
aguuccacagauuucaugu

SEQ ID NO: 750752 - RNA, 19 nt, Artificial Sequence
  Description of Artificial Sequence: Synthetic oligonucleotide
  Sense strand starting at position 769 of SEQ ID NO: 586878
uguguaaguuuacuacaaa

SEQ ID NO: 750753 - RNA, 19 nt, Artificial Sequence
  Description of Artificial Sequence: Synthetic oligonucleotide
  Antisense strand to SEQ ID NO: 750752
uuuguaguaaacuuacaca

SEQ ID NO: 750754 - RNA, 19 nt, Artificial Sequence
  Description of Artificial Sequence: Synthetic oligonucleotide
  Sense strand starting at position 898 of SEQ ID NO: 586878
uuugcaaacuaguuagaag

SEQ ID NO: 750755 - RNA, 19 nt, Artificial Sequence
  Description of Artificial Sequence: Synthetic oligonucleotide
  Antisense strand to SEQ ID NO: 750754
cuucuaacuaguuugcaaa

SEQ ID NO: 750756 - RNA, 19 nt, Artificial Sequence
  Description of Artificial Sequence: Synthetic oligonucleotide
  Sense strand starting at position 907 of SEQ ID NO: 586878
uaguuagaagacugugaac

SEQ ID NO: 750757 - RNA, 19 nt, Artificial Sequence
  Description of Artificial Sequence: Synthetic oligonucleotide
  Antisense strand to SEQ ID NO: 750756
guucacagucuucuaacua

SEQ ID NO: 750758 - RNA, 19 nt, Artificial Sequence
  Description of Artificial Sequence: Synthetic oligonucleotide
  Sense strand starting at position 909 of SEQ ID NO: 586878
guuagaagacugugaacac

SEQ ID NO: 750759 - RNA, 19 nt, Artificial Sequence
  Description of Artificial Sequence: Synthetic oligonucleotide
  Antisense strand to SEQ ID NO: 750758
guguucacagucuucuaac

SEQ ID NO: 750760 - RNA, 19 nt, Artificial Sequence
  Description of Artificial Sequence: Synthetic oligonucleotide
  Sense strand starting at position 1049 of SEQ ID NO: 586878
gcaauaacuggucagcaau

SEQ ID NO: 750761 - RNA, 19 nt, Artificial Sequence
  Description of Artificial Sequence: Synthetic oligonucleotide
  Antisense strand to SEQ ID NO: 750760
auugcugaccaguuauugc

SEQ ID NO: 750762 - RNA, 19 nt, Artificial Sequence
  Description of Artificial Sequence: Synthetic oligonucleotide
  Sense strand starting at position 1165 of SEQ ID NO: 586878
guucuaaagagaugagugu

SEQ ID NO: 750763 - RNA, 19 nt, Artificial Sequence
  Description of Artificial Sequence: Synthetic oligonucleotide
  Antisense strand to SEQ ID NO: 750762
acacucaucucuuuagaac

SEQ ID NO: 750764 - RNA, 19 nt, Artificial Sequence
  Description of Artificial Sequence: Synthetic oligonucleotide
  Sense strand starting at position 1169 of SEQ ID NO: 586878
uaaagagaugagugucauc

SEQ ID NO: 750765 - RNA, 19 nt, Artificial Sequence
  Description of Artificial Sequence: Synthetic oligonucleotide
  Antisense strand to SEQ ID NO: 750764
gaugacacucaucucuuua

SEQ ID NO: 750766 - RNA, 19 nt, Artificial Sequence
  Description of Artificial Sequence: Synthetic oligonucleotide
  Sense strand starting at position 1176 of SEQ ID NO: 586878
augagugucaucuaagguu

SEQ ID NO: 750767 - RNA, 19 nt, Artificial Sequence
  Description of Artificial Sequence: Synthetic oligonucleotide
  Antisense strand to SEQ ID NO: 750766
aaccuuagaugacacucau

SEQ ID NO: 750768 - RNA, 19 nt, Artificial Sequence
  Description of Artificial Sequence: Synthetic oligonucleotide
  Sense strand starting at position 1245 of SEQ ID NO: 586878
ugaaacaucuagcuaguuu

SEQ ID NO: 750769 - RNA, 19 nt, Artificial Sequence
  Description of Artificial Sequence: Synthetic oligonucleotide
  Antisense strand to SEQ ID NO: 750768
aaacuagcuagauguuuca

SEQ ID NO: 750770 - RNA, 19 nt, Artificial Sequence
  Description of Artificial Sequence: Synthetic oligonucleotide
  Sense strand starting at position 1267 of SEQ ID NO: 586878
agaggcuaucuguagccaa

SEQ ID NO: 750771 - RNA, 19 nt, Artificial Sequence
  Description of Artificial Sequence: Synthetic oligonucleotide
  Antisense strand to SEQ ID NO: 750770
uuggcuacagauagccucu

SEQ ID NO: 750772 - RNA, 19 nt, Artificial Sequence
  Description of Artificial Sequence: Synthetic oligonucleotide
  Sense strand starting at position 1446 of SEQ ID NO: 586878
agcaguuugcuagaaacag

SEQ ID NO: 750773 - RNA, 19 nt, Artificial Sequence
  Description of Artificial Sequence: Synthetic oligonucleotide
  Antisense strand to SEQ ID NO: 750772
cuguuucuagcaaacugcu

SEQ ID NO: 750774 - RNA, 19 nt, Artificial Sequence
  Description of Artificial Sequence: Synthetic oligonucleotide
  Sense strand starting at position 1507 of SEQ ID NO: 586878
auaccaaacuggucugaca

SEQ ID NO: 750775 - RNA, 19 nt, Artificial Sequence
  Description of Artificial Sequence: Synthetic oligonucleotide
  Antisense strand to SEQ ID NO: 750774
ugucagaccaguuugguau

SEQ ID NO: 750776 - RNA, 19 nt, Artificial Sequence
  Description of Artificial Sequence: Synthetic oligonucleotide
  Sense strand starting at position 1564 of SEQ ID NO: 586878
gagggaaucuggucuccca

SEQ ID NO: 750777 - RNA, 19 nt, Artificial Sequence
  Description of Artificial Sequence: Synthetic oligonucleotide
  Antisense strand to SEQ ID NO: 750776
ugggagaccagauucccuc

SEQ ID NO: 750778 - RNA, 19 nt, Artificial Sequence
  Description of Artificial Sequence: Synthetic oligonucleotide
  Sense strand starting at position 1567 of SEQ ID NO: 586878
ggaaucuggucucccauaa

SEQ ID NO: 750779 - RNA, 19 nt, Artificial Sequence
  Description of Artificial Sequence: Synthetic oligonucleotide
  Antisense strand to SEQ ID NO: 750778
uuaugggagaccagauucc

SEQ ID NO: 750780 - RNA, 19 nt, Artificial Sequence
  Description of Artificial Sequence: Synthetic oligonucleotide
  Sense strand starting at position 1657 of SEQ ID NO: 586878
cgugcauuucccuaagguu

SEQ ID NO: 750781 - RNA, 19 nt, Artificial Sequence
  Description of Artificial Sequence: Synthetic oligonucleotide
  Antisense strand to SEQ ID NO: 750780
aaccuuagggaaaugcacg

SEQ ID NO: 750782 - RNA, 19 nt, Artificial Sequence
  Description of Artificial Sequence: Synthetic oligonucleotide
  Sense strand starting at position 1673 of SEQ ID NO: 586878
guuagccaucuuuagagau

SEQ ID NO: 750783 - RNA, 19 nt, Artificial Sequence
  Description of Artificial Sequence: Synthetic oligonucleotide
  Antisense strand to SEQ ID NO: 750782
aucucuaaagauggcuaac

SEQ ID NO: 750784 - RNA, 19 nt, Artificial Sequence
  Description of Artificial Sequence: Synthetic oligonucleotide
  Sense strand starting at position 1686 of SEQ ID NO: 586878
agagauauuuauuagcacu

SEQ ID NO: 750785 - RNA, 19 nt, Artificial Sequence
  Description of Artificial Sequence: Synthetic oligonucleotide
  Antisense strand to SEQ ID NO: 750784
agugcuaauaaauaucucu

SEQ ID NO: 750786 - RNA, 19 nt, Artificial Sequence
  Description of Artificial Sequence: Synthetic oligonucleotide
  Sense strand starting at position 2034 of SEQ ID NO: 586878
uugauugcugcuggaauga

SEQ ID NO: 750787 - RNA, 19 nt, Artificial Sequence
  Description of Artificial Sequence: Synthetic oligonucleotide
  Antisense strand to SEQ ID NO: 750786
ucauuccagcagcaaucaa

SEQ ID NO: 750788 - RNA, 19 nt, Artificial Sequence
  Description of Artificial Sequence: Synthetic oligonucleotide
  Sense strand starting at position 2068 of SEQ ID NO: 586878
gagcauucucaaggaauga

SEQ ID NO: 750789 - RNA, 19 nt, Artificial Sequence
  Description of Artificial Sequence: Synthetic oligonucleotide
  Antisense strand to SEQ ID NO: 750788
ucauuccuugagaaugcuc

SEQ ID NO: 750790 - RNA, 19 nt, Artificial Sequence
  Description of Artificial Sequence: Synthetic oligonucleotide
  Sense strand starting at position 2092 of SEQ ID NO: 586878
agacaacagucuucuauug

SEQ ID NO: 750791 - RNA, 19 nt, Artificial Sequence
  Description of Artificial Sequence: Synthetic oligonucleotide
  Antisense strand to SEQ ID NO: 750790
caauagaagacuguugucu

SEQ ID NO: 750792 - RNA, 19 nt, Artificial Sequence
  Description of Artificial Sequence: Synthetic oligonucleotide
  Sense strand starting at position 2163 of SEQ ID NO: 586878
ugccauucuccggaauaac

SEQ ID NO: 750793 - RNA, 19 nt, Artificial Sequence
  Description of Artificial Sequence: Synthetic oligonucleotide
  Antisense strand to SEQ ID NO: 750792
guuauuccggagaauggca

SEQ ID NO: 750794 - RNA, 19 nt, Artificial Sequence
  Description of Artificial Sequence: Synthetic oligonucleotide
  Sense strand starting at position 2200 of SEQ ID NO: 586878
agauaaucuggcuaccgua

SEQ ID NO: 750795 - RNA, 19 nt, Artificial Sequence
  Description of Artificial Sequence: Synthetic oligonucleotide
  Antisense strand to SEQ ID NO: 750794
uacgguagccagauuaucu

SEQ ID NO: 750796 - RNA, 19 nt, Artificial Sequence
  Description of Artificial Sequence: Synthetic oligonucleotide
  Sense strand starting at position 2490 of SEQ ID NO: 586878
agugauccucuccaccuua

SEQ ID NO: 750797 - RNA, 19 nt, Artificial Sequence
  Description of Artificial Sequence: Synthetic oligonucleotide
  Antisense strand to SEQ ID NO: 750796
uaagguggagaggaucacu

SEQ ID NO: 750798 - RNA, 19 nt, Artificial Sequence
  Description of Artificial Sequence: Synthetic oligonucleotide
  Sense strand starting at position 3129 of SEQ ID NO: 586878
augccuagacgugaaaugu

SEQ ID NO: 750799 - RNA, 19 nt, Artificial Sequence
  Description of Artificial Sequence: Synthetic oligonucleotide
  Antisense strand to SEQ ID NO: 750798
acauuucacgucuaggcau

SEQ ID NO: 750800 - RNA, 19 nt, Artificial Sequence
  Description of Artificial Sequence: Synthetic oligonucleotide
  Sense strand starting at position 3156 of SEQ ID NO: 586878
agauuuguuagauggcgca

SEQ ID NO: 750801 - RNA, 19 nt, Artificial Sequence
  Description of Artificial Sequence: Synthetic oligonucleotide
  Antisense strand to SEQ ID NO: 750800
ugcgccaucuaacaaaucu

SEQ ID NO: 750802 - RNA, 19 nt, Artificial Sequence
  Description of Artificial Sequence: Synthetic oligonucleotide
  Sense strand starting at position 3188 of SEQ ID NO: 586878
uuguguuaugcucuaagcu

SEQ ID NO: 750803 - RNA, 19 nt, Artificial Sequence
  Description of Artificial Sequence: Synthetic oligonucleotide
  Antisense strand to SEQ ID NO: 750802
agcuuagagcauaacacaa

SEQ ID NO: 750804 - RNA, 19 nt, Artificial Sequence
  Description of Artificial Sequence: Synthetic oligonucleotide
  Sense strand starting at position 3459 of SEQ ID NO: 586878
ccugacagugcugaaagau

SEQ ID NO: 750805 - RNA, 19 nt, Artificial Sequence
  Description of Artificial Sequence: Synthetic oligonucleotide
  Antisense strand to SEQ ID NO: 750804
aucuuucagcacugucagg

SEQ ID NO: 750806 - RNA, 19 nt, Artificial Sequence
  Description of Artificial Sequence: Synthetic oligonucleotide
  Sense strand starting at position 3481 of SEQ ID NO: 586878
aaaguaugauggcuuuaaa

SEQ ID NO: 750807 - RNA, 19 nt, Artificial Sequence
  Description of Artificial Sequence: Synthetic oligonucleotide
  Antisense strand to SEQ ID NO: 750806
uuuaaagccaucauacuuu

SEQ ID NO: 750808 - RNA, 19 nt, Artificial Sequence
  Description of Artificial Sequence: Synthetic oligonucleotide
  Sense strand starting at position 116 of SEQ ID NO: 586879
uagucugaauguuagucau

SEQ ID NO: 750809 - RNA, 19 nt, Artificial Sequence
  Description of Artificial Sequence: Synthetic oligonucleotide
  Antisense strand to SEQ ID NO: 750808
augacuaacauucagacua

SEQ ID NO: 750810 - RNA, 19 nt, Artificial Sequence
  Description of Artificial Sequence: Synthetic oligonucleotide
  Sense strand starting at position 118 of SEQ ID NO: 586879
gucugaauguuagucauuc

SEQ ID NO: 750811 - RNA, 19 nt, Artificial Sequence
  Description of Artificial Sequence: Synthetic oligonucleotide
  Antisense strand to SEQ ID NO: 750810
gaaugacuaacauucagac

SEQ ID NO: 750812 - RNA, 19 nt, Artificial Sequence
  Description of Artificial Sequence: Synthetic oligonucleotide
  Sense strand starting at position 119 of SEQ ID NO: 586879
ucugaauguuagucauucu

SEQ ID NO: 750813 - RNA, 19 nt, Artificial Sequence
  Description of Artificial Sequence: Synthetic oligonucleotide
  Antisense strand to SEQ ID NO: 750812
agaaugacuaacauucaga

SEQ ID NO: 750814 - RNA, 19 nt, Artificial Sequence
  Description of Artificial Sequence: Synthetic oligonucleotide
  Sense strand starting at position 148 of SEQ ID NO: 586879
ugcagaaaguauucccuga

SEQ ID NO: 750815 - RNA, 19 nt, Artificial Sequence
  Description of Artificial Sequence: Synthetic oligonucleotide
  Antisense strand to SEQ ID NO: 750814
ucagggaauacuuucugca

SEQ ID NO: 750816 - RNA, 19 nt, Artificial Sequence
  Description of Artificial Sequence: Synthetic oligonucleotide
  Sense strand starting at position 357 of SEQ ID NO: 586879
auuucuuaauccugcggau

SEQ ID NO: 750817 - RNA, 19 nt, Artificial Sequence
  Description of Artificial Sequence: Synthetic oligonucleotide
  Antisense strand to SEQ ID NO: 750816
auccgcaggauuaagaaau

SEQ ID NO: 750818 - RNA, 19 nt, Artificial Sequence
  Description of Artificial Sequence: Synthetic oligonucleotide
  Sense strand starting at position 359 of SEQ ID NO: 586879
uucuuaauccugcggauau

SEQ ID NO: 750819 - RNA, 19 nt, Artificial Sequence
  Description of Artificial Sequence: Synthetic oligonucleotide
  Antisense strand to SEQ ID NO: 750818
auauccgcaggauuaagaa

SEQ ID NO: 750820 - RNA, 19 nt, Artificial Sequence
  Description of Artificial Sequence: Synthetic oligonucleotide
  Sense strand starting at position 360 of SEQ ID NO: 586879
ucuuaauccugcggauaug

SEQ ID NO: 750821 - RNA, 19 nt, Artificial Sequence
  Description of Artificial Sequence: Synthetic oligonucleotide
  Antisense strand to SEQ ID NO: 750820
cauauccgcaggauuaaga

SEQ ID NO: 750822 - RNA, 19 nt, Artificial Sequence
  Description of Artificial Sequence: Synthetic oligonucleotide
  Sense strand starting at position 361 of SEQ ID NO: 586879
cuuaauccugcggauauga

SEQ ID NO: 750823 - RNA, 19 nt, Artificial Sequence
  Description of Artificial Sequence: Synthetic oligonucleotide
  Antisense strand to SEQ ID NO: 750822
ucauauccgcaggauuaag

SEQ ID NO: 750824 - RNA, 19 nt, Artificial Sequence
  Description of Artificial Sequence: Synthetic oligonucleotide
  Sense strand starting at position 363 of SEQ ID NO: 586879
uaauccugcggauaugaau

SEQ ID NO: 750825 - RNA, 19 nt, Artificial Sequence
  Description of Artificial Sequence: Synthetic oligonucleotide
  Antisense strand to SEQ ID NO: 750824
auucauauccgcaggauua

SEQ ID NO: 750826 - RNA, 19 nt, Artificial Sequence
  Description of Artificial Sequence: Synthetic oligonucleotide
  Sense strand starting at position 372 of SEQ ID NO: 586879
ggauaugaaucagugacuc

SEQ ID NO: 750827 - RNA, 19 nt, Artificial Sequence
  Description of Artificial Sequence: Synthetic oligonucleotide
  Antisense strand to SEQ ID NO: 750826
gagucacugauucauaucc

SEQ ID NO: 750828 - RNA, 19 nt, Artificial Sequence
  Description of Artificial Sequence: Synthetic oligonucleotide
  Sense strand starting at position 376 of SEQ ID NO: 586879
augaaucagugacucuuaa

SEQ ID NO: 750829 - RNA, 19 nt, Artificial Sequence
  Description of Artificial Sequence: Synthetic oligonucleotide
  Antisense strand to SEQ ID NO: 750828
uuaagagucacugauucau

SEQ ID NO: 750830 - RNA, 19 nt, Artificial Sequence
  Description of Artificial Sequence: Synthetic oligonucleotide
  Sense strand starting at position 1557 of SEQ ID NO: 586879
caggaaaugcuccgcguca

SEQ ID NO: 750831 - RNA, 19 nt, Artificial Sequence
  Description of Artificial Sequence: Synthetic oligonucleotide
  Antisense strand to SEQ ID NO: 750830
ugacgcggagcauuuccug

SEQ ID NO: 750832 - RNA, 19 nt, Artificial Sequence
  Description of Artificial Sequence: Synthetic oligonucleotide
  Sense strand starting at position 1634 of SEQ ID NO: 586879
gccgcacucugaggauuaa

SEQ ID NO: 750833 - RNA, 19 nt, Artificial Sequence
  Description of Artificial Sequence: Synthetic oligonucleotide
  Antisense strand to SEQ ID NO: 750832
uuaauccucagagugcggc

SEQ ID NO: 750834 - RNA, 19 nt, Artificial Sequence
  Description of Artificial Sequence: Synthetic oligonucleotide
  Sense strand starting at position 2697 of SEQ ID NO: 586879
gaaauaaauuagccagugu

SEQ ID NO: 750835 - RNA, 19 nt, Artificial Sequence
  Description of Artificial Sequence: Synthetic oligonucleotide
  Antisense strand to SEQ ID NO: 750834
acacuggcuaauuuauuuc

SEQ ID NO: 750836 - RNA, 19 nt, Artificial Sequence
  Description of Artificial Sequence: Synthetic oligonucleotide
  Sense strand starting at position 2749 of SEQ ID NO: 586879
uccuguuuaccugauucuu

SEQ ID NO: 750837 - RNA, 19 nt, Artificial Sequence
  Description of Artificial Sequence: Synthetic oligonucleotide
  Antisense strand to SEQ ID NO: 750836
aagaaucagguaaacagga

SEQ ID NO: 750838 - RNA, 19 nt, Artificial Sequence
  Description of Artificial Sequence: Synthetic oligonucleotide
  Sense strand starting at position 2751 of SEQ ID NO: 586879
cuguuuaccugauucuuua

SEQ ID NO: 750839 - RNA, 19 nt, Artificial Sequence
  Description of Artificial Sequence: Synthetic oligonucleotide
  Antisense strand to SEQ ID NO: 750838
uaaagaaucagguaaacag

SEQ ID NO: 750840 - RNA, 19 nt, Artificial Sequence
  Description of Artificial Sequence: Synthetic oligonucleotide
  Sense strand starting at position 2758 of SEQ ID NO: 586879
ccugauucuuuacgugauu

SEQ ID NO: 750841 - RNA, 19 nt, Artificial Sequence
  Description of Artificial Sequence: Synthetic oligonucleotide
  Antisense strand to SEQ ID NO: 750840
aaucacguaaagaaucagg

SEQ ID NO: 750842 - RNA, 19 nt, Artificial Sequence
  Description of Artificial Sequence: Synthetic oligonucleotide
  Sense strand starting at position 2767 of SEQ ID NO: 586879
uuacgugauucccauguaa

SEQ ID NO: 750843 - RNA, 19 nt, Artificial Sequence
  Description of Artificial Sequence: Synthetic oligonucleotide
  Antisense strand to SEQ ID NO: 750842
uuacaugggaaucacguaa

SEQ ID NO: 750844 - RNA, 19 nt, Artificial Sequence
  Description of Artificial Sequence: Synthetic oligonucleotide
  Sense strand starting at position 2778 of SEQ ID NO: 586879
ccauguaaggaauguuaaa

SEQ ID NO: 750845 - RNA, 19 nt, Artificial Sequence
  Description of Artificial Sequence: Synthetic oligonucleotide
  Antisense strand to SEQ ID NO: 750844
uuuaacauuccuuacaugg

SEQ ID NO: 750846 - RNA, 19 nt, Artificial Sequence
  Description of Artificial Sequence: Synthetic oligonucleotide
  Sense strand starting at position 2891 of SEQ ID NO: 586879
gugagauagaccuggguua

SEQ ID NO: 750847 - RNA, 19 nt, Artificial Sequence
  Description of Artificial Sequence: Synthetic oligonucleotide
  Antisense strand to SEQ ID NO: 750846
uaacccaggucuaucucac

SEQ ID NO: 750848 - RNA, 19 nt, Artificial Sequence
  Description of Artificial Sequence: Synthetic oligonucleotide
  Sense strand starting at position 2922 of SEQ ID NO: 586879
ugcuaauugucgcuguagu

SEQ ID NO: 750849 - RNA, 19 nt, Artificial Sequence
  Description of Artificial Sequence: Synthetic oligonucleotide
  Antisense strand to SEQ ID NO: 750848
acuacagcgacaauuagca

SEQ ID NO: 750850 - RNA, 19 nt, Artificial Sequence
  Description of Artificial Sequence: Synthetic oligonucleotide
  Sense strand starting at position 2923 of SEQ ID NO: 586879
gcuaauugucgcuguagug

SEQ ID NO: 750851 - RNA, 19 nt, Artificial Sequence
  Description of Artificial Sequence: Synthetic oligonucleotide
  Antisense strand to SEQ ID NO: 750850
cacuacagcgacaauuagc

SEQ ID NO: 750852 - RNA, 19 nt, Artificial Sequence
  Description of Artificial Sequence: Synthetic oligonucleotide
  Sense strand starting at position 2924 of SEQ ID NO: 586879
cuaauugucgcuguagugu

SEQ ID NO: 750853 - RNA, 19 nt, Artificial Sequence
  Description of Artificial Sequence: Synthetic oligonucleotide
  Antisense strand to SEQ ID NO: 750852
acacuacagcgacaauuag

SEQ ID NO: 750854 - RNA, 19 nt, Artificial Sequence
  Description of Artificial Sequence: Synthetic oligonucleotide
  Sense strand starting at position 2933 of SEQ ID NO: 586879
gcuguaguguucuuggaca

SEQ ID NO: 750855 - RNA, 19 nt, Artificial Sequence
  Description of Artificial Sequence: Synthetic oligonucleotide
  Antisense strand to SEQ ID NO: 750854
uguccaagaacacuacagc

SEQ ID NO: 750856 - RNA, 19 nt, Artificial Sequence
  Description of Artificial Sequence: Synthetic oligonucleotide
  Sense strand starting at position 2945 of SEQ ID NO: 586879
uuggacagguugcguaauu

SEQ ID NO: 750857 - RNA, 19 nt, Artificial Sequence
  Description of Artificial Sequence: Synthetic oligonucleotide
  Antisense strand to SEQ ID NO: 750856
aauuacgcaaccuguccaa

SEQ ID NO: 750858 - RNA, 19 nt, Artificial Sequence
  Description of Artificial Sequence: Synthetic oligonucleotide
  Sense strand starting at position 2946 of SEQ ID NO: 586879
uggacagguugcguaauuu

SEQ ID NO: 750859 - RNA, 19 nt, Artificial Sequence
  Description of Artificial Sequence: Synthetic oligonucleotide
  Antisense strand to SEQ ID NO: 750858
aaauuacgcaaccugucca

SEQ ID NO: 750860 - RNA, 19 nt, Artificial Sequence
  Description of Artificial Sequence: Synthetic oligonucleotide
  Sense strand starting at position 3203 of SEQ ID NO: 586879
uuugaauccugaccucaag

SEQ ID NO: 750861 - RNA, 19 nt, Artificial Sequence
  Description of Artificial Sequence: Synthetic oligonucleotide
  Antisense strand to SEQ ID NO: 750860
cuugaggucaggauucaaa

SEQ ID NO: 750862 - RNA, 19 nt, Artificial Sequence
  Description of Artificial Sequence: Synthetic oligonucleotide
  Sense strand starting at position 3282 of SEQ ID NO: 586879
gcccgaguuucucagucuu

SEQ ID NO: 750863 - RNA, 19 nt, Artificial Sequence
  Description of Artificial Sequence: Synthetic oligonucleotide
  Antisense strand to SEQ ID NO: 750862
aagacugagaaacucgggc

SEQ ID NO: 750864 - RNA, 19 nt, Artificial Sequence
  Description of Artificial Sequence: Synthetic oligonucleotide
  Sense strand starting at position 3284 of SEQ ID NO: 586879
ccgaguuucucagucuuua

SEQ ID NO: 750865 - RNA, 19 nt, Artificial Sequence
  Description of Artificial Sequence: Synthetic oligonucleotide
  Antisense strand to SEQ ID NO: 750864
uaaagacugagaaacucgg

SEQ ID NO: 750866 - RNA, 19 nt, Artificial Sequence
  Description of Artificial Sequence: Synthetic oligonucleotide
  Sense strand starting at position 3309 of SEQ ID NO: 586879
auugguaaaguagggauua

SEQ ID NO: 750867 - RNA, 19 nt, Artificial Sequence
  Description of Artificial Sequence: Synthetic oligonucleotide
  Antisense strand to SEQ ID NO: 750866
uaaucccuacuuuaccaau

SEQ ID NO: 750868 - RNA, 19 nt, Artificial Sequence
  Description of Artificial Sequence: Synthetic oligonucleotide
  Sense strand starting at position 3310 of SEQ ID NO: 586879
uugguaaaguagggauuaa

SEQ ID NO: 750869 - RNA, 19 nt, Artificial Sequence
  Description of Artificial Sequence: Synthetic oligonucleotide
  Antisense strand to SEQ ID NO: 750868
uuaaucccuacuuuaccaa

SEQ ID NO: 750870 - RNA, 19 nt, Artificial Sequence
  Description of Artificial Sequence: Synthetic oligonucleotide
  Sense strand starting at position 3321 of SEQ ID NO: 586879
gggauuaacugauucguuu

SEQ ID NO: 750871 - RNA, 19 nt, Artificial Sequence
  Description of Artificial Sequence: Synthetic oligonucleotide
  Antisense strand to SEQ ID NO: 750870
aaacgaaucaguuaauccc

SEQ ID NO: 750872 - RNA, 19 nt, Artificial Sequence
  Description of Artificial Sequence: Synthetic oligonucleotide
  Sense strand starting at position 3325 of SEQ ID NO: 586879
uuaacugauucguuucuca

SEQ ID NO: 750873 - RNA, 19 nt, Artificial Sequence
  Description of Artificial Sequence: Synthetic oligonucleotide
  Antisense strand to SEQ ID NO: 750872
ugagaaacgaaucaguuaa

SEQ ID NO: 750874 - RNA, 19 nt, Artificial Sequence
  Description of Artificial Sequence: Synthetic oligonucleotide
  Sense strand starting at position 3328 of SEQ ID NO: 586879
acugauucguuucucagau

SEQ ID NO: 750875 - RNA, 19 nt, Artificial Sequence
  Description of Artificial Sequence: Synthetic oligonucleotide
  Antisense strand to SEQ ID NO: 750874
aucugagaaacgaaucagu

SEQ ID NO: 750876 - RNA, 19 nt, Artificial Sequence
  Description of Artificial Sequence: Synthetic oligonucleotide
  Sense strand starting at position 3329 of SEQ ID NO: 586879
cugauucguuucucagauu

SEQ ID NO: 750877 - RNA, 19 nt, Artificial Sequence
  Description of Artificial Sequence: Synthetic oligonucleotide
  Antisense strand to SEQ ID NO: 750876
aaucugagaaacgaaucag

SEQ ID NO: 750878 - RNA, 19 nt, Artificial Sequence
  Description of Artificial Sequence: Synthetic oligonucleotide
  Sense strand starting at position 3330 of SEQ ID NO: 586879
ugauucguuucucagauuc

SEQ ID NO: 750879 - RNA, 19 nt, Artificial Sequence
  Description of Artificial Sequence: Synthetic oligonucleotide
  Antisense strand to SEQ ID NO: 750878
gaaucugagaaacgaauca

SEQ ID NO: 750880 - RNA, 19 nt, Artificial Sequence
  Description of Artificial Sequence: Synthetic oligonucleotide
  Sense strand starting at position 3332 of SEQ ID NO: 586879
auucguuucucagauucuu

SEQ ID NO: 750881 - RNA, 19 nt, Artificial Sequence
  Description of Artificial Sequence: Synthetic oligonucleotide
  Antisense strand to SEQ ID NO: 750880
aagaaucugagaaacgaau

SEQ ID NO: 750882 - RNA, 19 nt, Artificial Sequence
  Description of Artificial Sequence: Synthetic oligonucleotide
  Sense strand starting at position 3340 of SEQ ID NO: 586879
cucagauucuuccuaagug

SEQ ID NO: 750883 - RNA, 19 nt, Artificial Sequence
  Description of Artificial Sequence: Synthetic oligonucleotide
  Antisense strand to SEQ ID NO: 750882
cacuuaggaagaaucugag

SEQ ID NO: 750884 - RNA, 19 nt, Artificial Sequence
  Description of Artificial Sequence: Synthetic oligonucleotide
  Sense strand starting at position 3778 of SEQ ID NO: 586879
gauggugguaauugcuauu

SEQ ID NO: 750885 - RNA, 19 nt, Artificial Sequence
  Description of Artificial Sequence: Synthetic oligonucleotide
  Antisense strand to SEQ ID NO: 750884
aauagcaauuaccaccauc

SEQ ID NO: 750886 - RNA, 19 nt, Artificial Sequence
  Description of Artificial Sequence: Synthetic oligonucleotide
  Sense strand starting at position 3784 of SEQ ID NO: 586879
gguaauugcuauuaccaaa

SEQ ID NO: 750887 - RNA, 19 nt, Artificial Sequence
  Description of Artificial Sequence: Synthetic oligonucleotide
  Antisense strand to SEQ ID NO: 750886
uuugguaauagcaauuacc

SEQ ID NO: 750888 - RNA, 19 nt, Artificial Sequence
  Description of Artificial Sequence: Synthetic oligonucleotide
  Sense strand starting at position 370 of SEQ ID NO: 586880
ccgacagaugggcaucuua

SEQ ID NO: 750889 - RNA, 19 nt, Artificial Sequence
  Description of Artificial Sequence: Synthetic oligonucleotide
  Antisense strand to SEQ ID NO: 750888
uaagaugcccaucugucgg

SEQ ID NO: 750890 - RNA, 19 nt, Artificial Sequence
  Description of Artificial Sequence: Synthetic oligonucleotide
  Sense strand starting at position 443 of SEQ ID NO: 586880
cuguccuaaugauaaguuu

SEQ ID NO: 750891 - RNA, 19 nt, Artificial Sequence
  Description of Artificial Sequence: Synthetic oligonucleotide
  Antisense strand to SEQ ID NO: 750890
aaacuuaucauuaggacag

SEQ ID NO: 750892 - RNA, 19 nt, Artificial Sequence
  Description of Artificial Sequence: Synthetic oligonucleotide
  Sense strand starting at position 446 of SEQ ID NO: 586880
uccuaaugauaaguuugaa

SEQ ID NO: 750893 - RNA, 19 nt, Artificial Sequence
  Description of Artificial Sequence: Synthetic oligonucleotide
  Antisense strand to SEQ ID NO: 750892
uucaaacuuaucauuagga

SEQ ID NO: 750894 - RNA, 19 nt, Artificial Sequence
  Description of Artificial Sequence: Synthetic oligonucleotide
  Sense strand starting at position 475 of SEQ ID NO: 586880
ccaguuaaccgugaugcca

SEQ ID NO: 750895 - RNA, 19 nt, Artificial Sequence
  Description of Artificial Sequence: Synthetic oligonucleotide
  Antisense strand to SEQ ID NO: 750894
uggcaucacgguuaacugg

SEQ ID NO: 750896 - RNA, 19 nt, Artificial Sequence
  Description of Artificial Sequence: Synthetic oligonucleotide
  Sense strand starting at position 491 of SEQ ID NO: 586880
ccagaacuuuccuuggacu

SEQ ID NO: 750897 - RNA, 19 nt, Artificial Sequence
  Description of Artificial Sequence: Synthetic oligonucleotide
  Antisense strand to SEQ ID NO: 750896
aguccaaggaaaguucugg

SEQ ID NO: 750898 - RNA, 19 nt, Artificial Sequence
  Description of Artificial Sequence: Synthetic oligonucleotide
  Sense strand starting at position 493 of SEQ ID NO: 586880
agaacuuuccuuggacuuu

SEQ ID NO: 750899 - RNA, 19 nt, Artificial Sequence
  Description of Artificial Sequence: Synthetic oligonucleotide
  Antisense strand to SEQ ID NO: 750898
aaaguccaaggaaaguucu

SEQ ID NO: 750900 - RNA, 19 nt, Artificial Sequence
  Description of Artificial Sequence: Synthetic oligonucleotide
  Sense strand starting at position 529 of SEQ ID NO: 586880
uugcauugaguuugauuaa

SEQ ID NO: 750901 - RNA, 19 nt, Artificial Sequence
  Description of Artificial Sequence: Synthetic oligonucleotide
  Antisense strand to SEQ ID NO: 750900
uuaaucaaacucaaugcaa

SEQ ID NO: 750902 - RNA, 19 nt, Artificial Sequence
  Description of Artificial Sequence: Synthetic oligonucleotide
  Sense strand starting at position 530 of SEQ ID NO: 586880
ugcauugaguuugauuaaa

SEQ ID NO: 750903 - RNA, 19 nt, Artificial Sequence
  Description of Artificial Sequence: Synthetic oligonucleotide
  Antisense strand to SEQ ID NO: 750902
uuuaaucaaacucaaugca

SEQ ID NO: 750904 - RNA, 19 nt, Artificial Sequence
  Description of Artificial Sequence: Synthetic oligonucleotide
  Sense strand starting at position 538 of SEQ ID NO: 586880
guuugauuaaacugguagu

SEQ ID NO: 750905 - RNA, 19 nt, Artificial Sequence
  Description of Artificial Sequence: Synthetic oligonucleotide
  Antisense strand to SEQ ID NO: 750904
acuaccaguuuaaucaaac

SEQ ID NO: 750906 - RNA, 19 nt, Artificial Sequence
  Description of Artificial Sequence: Synthetic oligonucleotide
  Sense strand starting at position 541 of SEQ ID NO: 586880
ugauuaaacugguaguaau

SEQ ID NO: 750907 - RNA, 19 nt, Artificial Sequence
  Description of Artificial Sequence: Synthetic oligonucleotide
  Antisense strand to SEQ ID NO: 750906
auuacuaccaguuuaauca

SEQ ID NO: 750908 - RNA, 19 nt, Artificial Sequence
  Description of Artificial Sequence: Synthetic oligonucleotide
  Sense strand starting at position 613 of SEQ ID NO: 586880
ucggguuacacugagauuc

SEQ ID NO: 750909 - RNA, 19 nt, Artificial Sequence
  Description of Artificial Sequence: Synthetic oligonucleotide
  Antisense strand to SEQ ID NO: 750908
gaaucucaguguaacccga

SEQ ID NO: 750910 - RNA, 19 nt, Artificial Sequence
  Description of Artificial Sequence: Synthetic oligonucleotide
  Sense strand starting at position 615 of SEQ ID NO: 586880
ggguuacacugagauucuu

SEQ ID NO: 750911 - RNA, 19 nt, Artificial Sequence
  Description of Artificial Sequence: Synthetic oligonucleotide
  Antisense strand to SEQ ID NO: 750910
aagaaucucaguguaaccc

SEQ ID NO: 750912 - RNA, 19 nt, Artificial Sequence
  Description of Artificial Sequence: Synthetic oligonucleotide
  Sense strand starting at position 623 of SEQ ID NO: 586880
cugagauucuuguuucuau

SEQ ID NO: 750913 - RNA, 19 nt, Artificial Sequence
  Description of Artificial Sequence: Synthetic oligonucleotide
  Antisense strand to SEQ ID NO: 750912
auagaaacaagaaucucag

SEQ ID NO: 750914 - RNA, 19 nt, Artificial Sequence
  Description of Artificial Sequence: Synthetic oligonucleotide
  Sense strand starting at position 624 of SEQ ID NO: 586880
ugagauucuuguuucuaug

SEQ ID NO: 750915 - RNA, 19 nt, Artificial Sequence
  Description of Artificial Sequence: Synthetic oligonucleotide
  Antisense strand to SEQ ID NO: 750914
cauagaaacaagaaucuca

SEQ ID NO: 750916 - RNA, 19 nt, Artificial Sequence
  Description of Artificial Sequence: Synthetic oligonucleotide
  Sense strand starting at position 627 of SEQ ID NO: 586880
gauucuuguuucuauggga

SEQ ID NO: 750917 - RNA, 19 nt, Artificial Sequence
  Description of Artificial Sequence: Synthetic oligonucleotide
  Antisense strand to SEQ ID NO: 750916
ucccauagaaacaagaauc

SEQ ID NO: 750918 - RNA, 19 nt, Artificial Sequence
  Description of Artificial Sequence: Synthetic oligonucleotide
  Sense strand starting at position 630 of SEQ ID NO: 586880
ucuuguuucuaugggagaa

SEQ ID NO: 750919 - RNA, 19 nt, Artificial Sequence
  Description of Artificial Sequence: Synthetic oligonucleotide
  Antisense strand to SEQ ID NO: 750918
uucucccauagaaacaaga

SEQ ID NO: 750920 - RNA, 19 nt, Artificial Sequence
  Description of Artificial Sequence: Synthetic oligonucleotide
  Sense strand starting at position 631 of SEQ ID NO: 586880
cuuguuucuaugggagaaa

SEQ ID NO: 750921 - RNA, 19 nt, Artificial Sequence
  Description of Artificial Sequence: Synthetic oligonucleotide
  Antisense strand to SEQ ID NO: 750920
uuucucccauagaaacaag

SEQ ID NO: 750922 - RNA, 19 nt, Artificial Sequence
  Description of Artificial Sequence: Synthetic oligonucleotide
  Sense strand starting at position 712 of SEQ ID NO: 586880
aaagcaaugccuggaguca

SEQ ID NO: 750923 - RNA, 19 nt, Artificial Sequence
  Description of Artificial Sequence: Synthetic oligonucleotide
  Antisense strand to SEQ ID NO: 750922
ugacuccaggcauugcuuu

SEQ ID NO: 750924 - RNA, 19 nt, Artificial Sequence
  Description of Artificial Sequence: Synthetic oligonucleotide
  Sense strand starting at position 757 of SEQ ID NO: 586880
uaccuaacgcguuaagcaa

SEQ ID NO: 750925 - RNA, 19 nt, Artificial Sequence
  Description of Artificial Sequence: Synthetic oligonucleotide
  Antisense strand to SEQ ID NO: 750924
uugcuuaacgcguuaggua

SEQ ID NO: 750926 - RNA, 19 nt, Artificial Sequence
  Description of Artificial Sequence: Synthetic oligonucleotide
  Sense strand starting at position 765 of SEQ ID NO: 586880
gcguuaagcaaagaacagu

SEQ ID NO: 750927 - RNA, 19 nt, Artificial Sequence
  Description of Artificial Sequence: Synthetic oligonucleotide
  Antisense strand to SEQ ID NO: 750926
acuguucuuugcuuaacgc

SEQ ID NO: 750928 - RNA, 19 nt, Artificial Sequence
  Description of Artificial Sequence: Synthetic oligonucleotide
  Sense strand starting at position 2079 of SEQ ID NO: 586880
cccggaguuucucuggacu

SEQ ID NO: 750929 - RNA, 19 nt, Artificial Sequence
  Description of Artificial Sequence: Synthetic oligonucleotide
  Antisense strand to SEQ ID NO: 750928
aguccagagaaacuccggg

SEQ ID NO: 750930 - RNA, 19 nt, Artificial Sequence
  Description of Artificial Sequence: Synthetic oligonucleotide
  Sense strand starting at position 2081 of SEQ ID NO: 586880
cggaguuucucuggacuuc

SEQ ID NO: 750931 - RNA, 19 nt, Artificial Sequence
  Description of Artificial Sequence: Synthetic oligonucleotide
  Antisense strand to SEQ ID NO: 750930
gaaguccagagaaacuccg

SEQ ID NO: 750932 - RNA, 19 nt, Artificial Sequence
  Description of Artificial Sequence: Synthetic oligonucleotide
  Sense strand starting at position 2156 of SEQ ID NO: 586880
gccaucuuggcgcgcuaaa

SEQ ID NO: 750933 - RNA, 19 nt, Artificial Sequence
  Description of Artificial Sequence: Synthetic oligonucleotide
  Antisense strand to SEQ ID NO: 750932
uuuagcgcgccaagauggc

SEQ ID NO: 750934 - RNA, 19 nt, Artificial Sequence
  Description of Artificial Sequence: Synthetic oligonucleotide
  Sense strand starting at position 3198 of SEQ ID NO: 586880
ggagccauguuccuuguca

SEQ ID NO: 750935 - RNA, 19 nt, Artificial Sequence
  Description of Artificial Sequence: Synthetic oligonucleotide
  Antisense strand to SEQ ID NO: 750934
ugacaaggaacauggcucc

SEQ ID NO: 750936 - RNA, 19 nt, Artificial Sequence
  Description of Artificial Sequence: Synthetic oligonucleotide
  Sense strand starting at position 3200 of SEQ ID NO: 586880
agccauguuccuugucacu

SEQ ID NO: 750937 - RNA, 19 nt, Artificial Sequence
  Description of Artificial Sequence: Synthetic oligonucleotide
  Antisense strand to SEQ ID NO: 750936
agugacaaggaacauggcu

SEQ ID NO: 750938 - RNA, 19 nt, Artificial Sequence
  Description of Artificial Sequence: Synthetic oligonucleotide
  Sense strand starting at position 3202 of SEQ ID NO: 586880
ccauguuccuugucacuaa

SEQ ID NO: 750939 - RNA, 19 nt, Artificial Sequence
  Description of Artificial Sequence: Synthetic oligonucleotide
  Antisense strand to SEQ ID NO: 750938
uuagugacaaggaacaugg

SEQ ID NO: 750940 - RNA, 19 nt, Artificial Sequence
  Description of Artificial Sequence: Synthetic oligonucleotide
  Sense strand starting at position 3213 of SEQ ID NO: 586880
gucacuaacuccugcuuga

SEQ ID NO: 750941 - RNA, 19 nt, Artificial Sequence
  Description of Artificial Sequence: Synthetic oligonucleotide
  Antisense strand to SEQ ID NO: 750940
ucaagcaggaguuagugac

SEQ ID NO: 750942 - RNA, 19 nt, Artificial Sequence
  Description of Artificial Sequence: Synthetic oligonucleotide
  Sense strand starting at position 3274 of SEQ ID NO: 586880
ugugauaacuaucugcaau

SEQ ID NO: 750943 - RNA, 19 nt, Artificial Sequence
  Description of Artificial Sequence: Synthetic oligonucleotide
  Antisense strand to SEQ ID NO: 750942
auugcagauaguuaucaca

SEQ ID NO: 750944 - RNA, 19 nt, Artificial Sequence
  Description of Artificial Sequence: Synthetic oligonucleotide
  Sense strand starting at position 3276 of SEQ ID NO: 586880
ugauaacuaucugcaauga

SEQ ID NO: 750945 - RNA, 19 nt, Artificial Sequence
  Description of Artificial Sequence: Synthetic oligonucleotide
  Antisense strand to SEQ ID NO: 750944
ucauugcagauaguuauca

SEQ ID NO: 750946 - RNA, 19 nt, Artificial Sequence
  Description of Artificial Sequence: Synthetic oligonucleotide
  Sense strand starting at position 3354 of SEQ ID NO: 586880
ccauacguuuacucagcaa

SEQ ID NO: 750947 - RNA, 19 nt, Artificial Sequence
  Description of Artificial Sequence: Synthetic oligonucleotide
  Antisense strand to SEQ ID NO: 750946
uugcugaguaaacguaugg

SEQ ID NO: 750948 - RNA, 19 nt, Artificial Sequence
  Description of Artificial Sequence: Synthetic oligonucleotide
  Sense strand starting at position 3358 of SEQ ID NO: 586880
acguuuacucagcaauaac

SEQ ID NO: 750949 - RNA, 19 nt, Artificial Sequence
  Description of Artificial Sequence: Synthetic oligonucleotide
  Antisense strand to SEQ ID NO: 750948
guuauugcugaguaaacgu

SEQ ID NO: 750950 - RNA, 19 nt, Artificial Sequence
  Description of Artificial Sequence: Synthetic oligonucleotide
  Sense strand starting at position 3628 of SEQ ID NO: 586880
guggcauugagccgaaauc

SEQ ID NO: 750951 - RNA, 19 nt, Artificial Sequence
  Description of Artificial Sequence: Synthetic oligonucleotide
  Antisense strand to SEQ ID NO: 750950
gauuucggcucaaugccac

SEQ ID NO: 750952 - RNA, 19 nt, Artificial Sequence
  Description of Artificial Sequence: Synthetic oligonucleotide
  Sense strand starting at position 3629 of SEQ ID NO: 586880
uggcauugagccgaaaucu

SEQ ID NO: 750953 - RNA, 19 nt, Artificial Sequence
  Description of Artificial Sequence: Synthetic oligonucleotide
  Antisense strand to SEQ ID NO: 750952
agauuucggcucaaugcca

SEQ ID NO: 750954 - RNA, 19 nt, Artificial Sequence
  Description of Artificial Sequence: Synthetic oligonucleotide
  Sense strand starting at position 3753 of SEQ ID NO: 586880
uaauguauuuagugcuaug

SEQ ID NO: 750955 - RNA, 19 nt, Artificial Sequence
  Description of Artificial Sequence: Synthetic oligonucleotide
  Antisense strand to SEQ ID NO: 750954
cauagcacuaaauacauua

SEQ ID NO: 750956 - RNA, 19 nt, Artificial Sequence
  Description of Artificial Sequence: Synthetic oligonucleotide
  Sense strand starting at position 3763 of SEQ ID NO: 586880
agugcuaugccucgugcuu

SEQ ID NO: 750957 - RNA, 19 nt, Artificial Sequence
  Description of Artificial Sequence: Synthetic oligonucleotide
  Antisense strand to SEQ ID NO: 750956
aagcacgaggcauagcacu

SEQ ID NO: 750958 - RNA, 19 nt, Artificial Sequence
  Description of Artificial Sequence: Synthetic oligonucleotide
  Sense strand starting at position 3764 of SEQ ID NO: 586880
gugcuaugccucgugcuuu

SEQ ID NO: 750959 - RNA, 19 nt, Artificial Sequence
  Description of Artificial Sequence: Synthetic oligonucleotide
  Antisense strand to SEQ ID NO: 750958
aaagcacgaggcauagcac

SEQ ID NO: 750960 - RNA, 19 nt, Artificial Sequence
  Description of Artificial Sequence: Synthetic oligonucleotide
  Sense strand starting at position 3783 of SEQ ID NO: 586880
guaccagguucuggagaua

SEQ ID NO: 750961 - RNA, 19 nt, Artificial Sequence
  Description of Artificial Sequence: Synthetic oligonucleotide
  Antisense strand to SEQ ID NO: 750960
uaucuccagaaccugguac

SEQ ID NO: 750962 - RNA, 19 nt, Artificial Sequence
  Description of Artificial Sequence: Synthetic oligonucleotide
  Sense strand starting at position 3803 of SEQ ID NO: 586880
uggccauuagacggugaaa

SEQ ID NO: 750963 - RNA, 19 nt, Artificial Sequence
  Description of Artificial Sequence: Synthetic oligonucleotide
  Antisense strand to SEQ ID NO: 750962
uuucaccgucuaauggcca

SEQ ID NO: 750964 - RNA, 19 nt, Artificial Sequence
  Description of Artificial Sequence: Synthetic oligonucleotide
  Sense strand starting at position 3805 of SEQ ID NO: 586880
gccauuagacggugaaagu

SEQ ID NO: 750965 - RNA, 19 nt, Artificial Sequence
  Description of Artificial Sequence: Synthetic oligonucleotide
  Antisense strand to SEQ ID NO: 750964
acuuucaccgucuaauggc

SEQ ID NO: 750966 - RNA, 19 nt, Artificial Sequence
  Description of Artificial Sequence: Synthetic oligonucleotide
  Sense strand starting at position 3834 of SEQ ID NO: 586880
ugguauauuuccucuuagu

SEQ ID NO: 750967 - RNA, 19 nt, Artificial Sequence
  Description of Artificial Sequence: Synthetic oligonucleotide
  Antisense strand to SEQ ID NO: 750966
acuaagaggaaauauacca

SEQ ID NO: 750968 - RNA, 19 nt, Artificial Sequence
  Description of Artificial Sequence: Synthetic oligonucleotide
  Sense strand starting at position 202 of SEQ ID NO: 586881
gucuuagaagcuugaacuu

SEQ ID NO: 750969 - RNA, 19 nt, Artificial Sequence
  Description of Artificial Sequence: Synthetic oligonucleotide
  Antisense strand to SEQ ID NO: 750968
aaguucaagcuucuaagac

SEQ ID NO: 750970 - RNA, 19 nt, Artificial Sequence
  Description of Artificial Sequence: Synthetic oligonucleotide
  Sense strand starting at position 293 of SEQ ID NO: 586881
gaggcagaguuagcaguau

SEQ ID NO: 750971 - RNA, 19 nt, Artificial Sequence
  Description of Artificial Sequence: Synthetic oligonucleotide
  Antisense strand to SEQ ID NO: 750970
auacugcuaacucugccuc

SEQ ID NO: 750972 - RNA, 19 nt, Artificial Sequence
  Description of Artificial Sequence: Synthetic oligonucleotide
  Sense strand starting at position 297 of SEQ ID NO: 586881
cagaguuagcaguaucaug

SEQ ID NO: 750973 - RNA, 19 nt, Artificial Sequence
  Description of Artificial Sequence: Synthetic oligonucleotide
  Antisense strand to SEQ ID NO: 750972
caugauacugcuaacucug

SEQ ID NO: 750974 - RNA, 19 nt, Artificial Sequence
  Description of Artificial Sequence: Synthetic oligonucleotide
  Sense strand starting at position 381 of SEQ ID NO: 586881
cccagaagucccuguuaca

SEQ ID NO: 750975 - RNA, 19 nt, Artificial Sequence
  Description of Artificial Sequence: Synthetic oligonucleotide
  Antisense strand to SEQ ID NO: 750974
uguaacagggacuucuggg

SEQ ID NO: 750976 - RNA, 19 nt, Artificial Sequence
  Description of Artificial Sequence: Synthetic oligonucleotide
  Sense strand starting at position 427 of SEQ ID NO: 586881
gaaagcauuucucuccguu

SEQ ID NO: 750977 - RNA, 19 nt, Artificial Sequence
  Description of Artificial Sequence: Synthetic oligonucleotide
  Antisense strand to SEQ ID NO: 750976
aacggagagaaaugcuuuc

SEQ ID NO: 750978 - RNA, 19 nt, Artificial Sequence
  Description of Artificial Sequence: Synthetic oligonucleotide
  Sense strand starting at position 431 of SEQ ID NO: 586881
gcauuucucuccguuuggu

SEQ ID NO: 750979 - RNA, 19 nt, Artificial Sequence
  Description of Artificial Sequence: Synthetic oligonucleotide
  Antisense strand to SEQ ID NO: 750978
accaaacggagagaaaugc

SEQ ID NO: 750980 - RNA, 19 nt, Artificial Sequence
  Description of Artificial Sequence: Synthetic oligonucleotide
  Sense strand starting at position 735 of SEQ ID NO: 586881
gcugcucuuagagaauguu

SEQ ID NO: 750981 - RNA, 19 nt, Artificial Sequence
  Description of Artificial Sequence: Synthetic oligonucleotide
  Antisense strand to SEQ ID NO: 750980
aacauucucuaagagcagc

SEQ ID NO: 750982 - RNA, 19 nt, Artificial Sequence
  Description of Artificial Sequence: Synthetic oligonucleotide
  Sense strand starting at position 753 of SEQ ID NO: 586881
uuucucuuguucucaagga

SEQ ID NO: 750983 - RNA, 19 nt, Artificial Sequence
  Description of Artificial Sequence: Synthetic oligonucleotide
  Antisense strand to SEQ ID NO: 750982
uccuugagaacaagagaaa

SEQ ID NO: 750984 - RNA, 19 nt, Artificial Sequence
  Description of Artificial Sequence: Synthetic oligonucleotide
  Sense strand starting at position 886 of SEQ ID NO: 586881
uguggaacccauuaucauu

SEQ ID NO: 750985 - RNA, 19 nt, Artificial Sequence
  Description of Artificial Sequence: Synthetic oligonucleotide
  Antisense strand to SEQ ID NO: 750984
aaugauaauggguuccaca

SEQ ID NO: 750986 - RNA, 19 nt, Artificial Sequence
  Description of Artificial Sequence: Synthetic oligonucleotide
  Sense strand starting at position 1096 of SEQ ID NO: 586881
acugguuccugucuggaau

SEQ ID NO: 750987 - RNA, 19 nt, Artificial Sequence
  Description of Artificial Sequence: Synthetic oligonucleotide
  Antisense strand to SEQ ID NO: 750986
auuccagacaggaaccagu

SEQ ID NO: 750988 - RNA, 19 nt, Artificial Sequence
  Description of Artificial Sequence: Synthetic oligonucleotide
  Sense strand starting at position 1120 of SEQ ID NO: 586881
agagguggccuauauuaac

SEQ ID NO: 750989 - RNA, 19 nt, Artificial Sequence
  Description of Artificial Sequence: Synthetic oligonucleotide
  Antisense strand to SEQ ID NO: 750988
guuaauauaggccaccucu

SEQ ID NO: 750990 - RNA, 19 nt, Artificial Sequence
  Description of Artificial Sequence: Synthetic oligonucleotide
  Sense strand starting at position 1129 of SEQ ID NO: 586881
cuauauuaaccgcgggaca

SEQ ID NO: 750991 - RNA, 19 nt, Artificial Sequence
  Description of Artificial Sequence: Synthetic oligonucleotide
  Antisense strand to SEQ ID NO: 750990
ugucccgcgguuaauauag

SEQ ID NO: 750992 - RNA, 19 nt, Artificial Sequence
  Description of Artificial Sequence: Synthetic oligonucleotide
  Sense strand starting at position 1155 of SEQ ID NO: 586881
ucagauucuucugugcaau

SEQ ID NO: 750993 - RNA, 19 nt, Artificial Sequence
  Description of Artificial Sequence: Synthetic oligonucleotide
  Antisense strand to SEQ ID NO: 750992
auugcacagaagaaucuga

SEQ ID NO: 750994 - RNA, 19 nt, Artificial Sequence
  Description of Artificial Sequence: Synthetic oligonucleotide
  Sense strand starting at position 1157 of SEQ ID NO: 586881
agauucuucugugcaauuc

SEQ ID NO: 750995 - RNA, 19 nt, Artificial Sequence
  Description of Artificial Sequence: Synthetic oligonucleotide
  Antisense strand to SEQ ID NO: 750994
gaauugcacagaagaaucu

SEQ ID NO: 750996 - RNA, 19 nt, Artificial Sequence
  Description of Artificial Sequence: Synthetic oligonucleotide
  Sense strand starting at position 1291 of SEQ ID NO: 586881
agcaucuguuaucuuggau

SEQ ID NO: 750997 - RNA, 19 nt, Artificial Sequence
  Description of Artificial Sequence: Synthetic oligonucleotide
  Antisense strand to SEQ ID NO: 750996
auccaagauaacagaugcu

SEQ ID NO: 750998 - RNA, 19 nt, Artificial Sequence
  Description of Artificial Sequence: Synthetic oligonucleotide
  Sense strand starting at position 1294 of SEQ ID NO: 586881
aucuguuaucuuggaugca

SEQ ID NO: 750999 - RNA, 19 nt, Artificial Sequence
  Description of Artificial Sequence: Synthetic oligonucleotide
  Antisense strand to SEQ ID NO: 750998
ugcauccaagauaacagau

SEQ ID NO: 751000 - RNA, 19 nt, Artificial Sequence
  Description of Artificial Sequence: Synthetic oligonucleotide
  Sense strand starting at position 1340 of SEQ ID NO: 586881
cauaaauagccgggaaaca

SEQ ID NO: 751001 - RNA, 19 nt, Artificial Sequence
  Description of Artificial Sequence: Synthetic oligonucleotide
  Antisense strand to SEQ ID NO: 751000
uguuucccggcuauuuaug

SEQ ID NO: 751002 - RNA, 19 nt, Artificial Sequence
  Description of Artificial Sequence: Synthetic oligonucleotide
  Sense strand starting at position 1353 of SEQ ID NO: 586881
gaaacaaugcuuugagcug

SEQ ID NO: 751003 - RNA, 19 nt, Artificial Sequence
  Description of Artificial Sequence: Synthetic oligonucleotide
  Antisense strand to SEQ ID NO: 751002
cagcucaaagcauuguuuc

SEQ ID NO: 751004 - RNA, 19 nt, Artificial Sequence
  Description of Artificial Sequence: Synthetic oligonucleotide
  Sense strand starting at position 2348 of SEQ ID NO: 586881
guucuaagucccugagcug

SEQ ID NO: 751005 - RNA, 19 nt, Artificial Sequence
  Description of Artificial Sequence: Synthetic oligonucleotide
  Antisense strand to SEQ ID NO: 751004
cagcucagggacuuagaac

SEQ ID NO: 751006 - RNA, 19 nt, Artificial Sequence
  Description of Artificial Sequence: Synthetic oligonucleotide
  Sense strand starting at position 2570 of SEQ ID NO: 586881
uggcauuccugcuuacaau

SEQ ID NO: 751007 - RNA, 19 nt, Artificial Sequence
  Description of Artificial Sequence: Synthetic oligonucleotide
  Antisense strand to SEQ ID NO: 751006
auuguaagcaggaaugcca

SEQ ID NO: 751008 - RNA, 19 nt, Artificial Sequence
  Description of Artificial Sequence: Synthetic oligonucleotide
  Sense strand starting at position 2571 of SEQ ID NO: 586881
ggcauuccugcuuacaauu

SEQ ID NO: 751009 - RNA, 19 nt, Artificial Sequence
  Description of Artificial Sequence: Synthetic oligonucleotide
  Antisense strand to SEQ ID NO: 751008
aauuguaagcaggaaugcc

SEQ ID NO: 751010 - RNA, 19 nt, Artificial Sequence
  Description of Artificial Sequence: Synthetic oligonucleotide
  Sense strand starting at position 2711 of SEQ ID NO: 586881
gggcuagaccugggagauu

SEQ ID NO: 751011 - RNA, 19 nt, Artificial Sequence
  Description of Artificial Sequence: Synthetic oligonucleotide
  Antisense strand to SEQ ID NO: 751010
aaucucccaggucuagccc

SEQ ID NO: 751012 - RNA, 19 nt, Artificial Sequence
  Description of Artificial Sequence: Synthetic oligonucleotide
  Sense strand starting at position 2732 of SEQ ID NO: 586881
ggugguucggaauaucaau

SEQ ID NO: 751013 - RNA, 19 nt, Artificial Sequence
  Description of Artificial Sequence: Synthetic oligonucleotide
  Antisense strand to SEQ ID NO: 751012
auugauauuccgaaccacc

SEQ ID NO: 751014 - RNA, 19 nt, Artificial Sequence
  Description of Artificial Sequence: Synthetic oligonucleotide
  Sense strand starting at position 2738 of SEQ ID NO: 586881
ucggaauaucaauaugcag

SEQ ID NO: 751015 - RNA, 19 nt, Artificial Sequence
  Description of Artificial Sequence: Synthetic oligonucleotide
  Antisense strand to SEQ ID NO: 751014
cugcauauugauauuccga

SEQ ID NO: 751016 - RNA, 19 nt, Artificial Sequence
  Description of Artificial Sequence: Synthetic oligonucleotide
  Sense strand starting at position 2788 of SEQ ID NO: 586881
gacagcuaucgugguauga

SEQ ID NO: 751017 - RNA, 19 nt, Artificial Sequence
  Description of Artificial Sequence: Synthetic oligonucleotide
  Antisense strand to SEQ ID NO: 751016
ucauaccacgauagcuguc

SEQ ID NO: 751018 - RNA, 19 nt, Artificial Sequence
  Description of Artificial Sequence: Synthetic oligonucleotide
  Sense strand starting at position 2798 of SEQ ID NO: 586881
gugguaugauuuccguagu

SEQ ID NO: 751019 - RNA, 19 nt, Artificial Sequence
  Description of Artificial Sequence: Synthetic oligonucleotide
  Antisense strand to SEQ ID NO: 751018
acuacggaaaucauaccac

SEQ ID NO: 751020 - RNA, 19 nt, Artificial Sequence
  Description of Artificial Sequence: Synthetic oligonucleotide
  Sense strand starting at position 2804 of SEQ ID NO: 586881
ugauuuccguagucaugac

SEQ ID NO: 751021 - RNA, 19 nt, Artificial Sequence
  Description of Artificial Sequence: Synthetic oligonucleotide
  Antisense strand to SEQ ID NO: 751020
gucaugacuacggaaauca

SEQ ID NO: 751022 - RNA, 19 nt, Artificial Sequence
  Description of Artificial Sequence: Synthetic oligonucleotide
  Sense strand starting at position 2824 of SEQ ID NO: 586881
ccauauucgcgauggaggu

SEQ ID NO: 751023 - RNA, 19 nt, Artificial Sequence
  Description of Artificial Sequence: Synthetic oligonucleotide
  Antisense strand to SEQ ID NO: 751022
accuccaucgcgaauaugg

SEQ ID NO: 751024 - RNA, 19 nt, Artificial Sequence
  Description of Artificial Sequence: Synthetic oligonucleotide
  Sense strand starting at position 2852 of SEQ ID NO: 586881
cauugaugagugugggaac

SEQ ID NO: 751025 - RNA, 19 nt, Artificial Sequence
  Description of Artificial Sequence: Synthetic oligonucleotide
  Antisense strand to SEQ ID NO: 751024
guucccacacucaucaaug

SEQ ID NO: 751026 - RNA, 19 nt, Artificial Sequence
  Description of Artificial Sequence: Synthetic oligonucleotide
  Sense strand starting at position 2855 of SEQ ID NO: 586881
ugaugagugugggaacaga

SEQ ID NO: 751027 - RNA, 19 nt, Artificial Sequence
  Description of Artificial Sequence: Synthetic oligonucleotide
  Antisense strand to SEQ ID NO: 751026
ucuguucccacacucauca

SEQ ID NO: 751028 - RNA, 19 nt, Artificial Sequence
  Description of Artificial Sequence: Synthetic oligonucleotide
  Sense strand starting at position 2951 of SEQ ID NO: 586881
gugagacagagaugucuga

SEQ ID NO: 751029 - RNA, 19 nt, Artificial Sequence
  Description of Artificial Sequence: Synthetic oligonucleotide
  Antisense strand to SEQ ID NO: 751028
ucagacaucucugucucac

SEQ ID NO: 751030 - RNA, 19 nt, Artificial Sequence
  Description of Artificial Sequence: Synthetic oligonucleotide
  Sense strand starting at position 3091 of SEQ ID NO: 586881
gcuccugucuccuuauuga

SEQ ID NO: 751031 - RNA, 19 nt, Artificial Sequence
  Description of Artificial Sequence: Synthetic oligonucleotide
  Antisense strand to SEQ ID NO: 751030
ucaauaaggagacaggagc

SEQ ID NO: 751032 - RNA, 19 nt, Artificial Sequence
  Description of Artificial Sequence: Synthetic oligonucleotide
  Sense strand starting at position 3094 of SEQ ID NO: 586881
ccugucuccuuauugauca

SEQ ID NO: 751033 - RNA, 19 nt, Artificial Sequence
  Description of Artificial Sequence: Synthetic oligonucleotide
  Antisense strand to SEQ ID NO: 751032
ugaucaauaaggagacagg

SEQ ID NO: 751034 - RNA, 19 nt, Artificial Sequence
  Description of Artificial Sequence: Synthetic oligonucleotide
  Sense strand starting at position 3472 of SEQ ID NO: 586881
cucugcaccugaucaagau

SEQ ID NO: 751035 - RNA, 19 nt, Artificial Sequence
  Description of Artificial Sequence: Synthetic oligonucleotide
  Antisense strand to SEQ ID NO: 751034
aucuugaucaggugcagag

SEQ ID NO: 751036 - RNA, 19 nt, Artificial Sequence
  Description of Artificial Sequence: Synthetic oligonucleotide
  Sense strand starting at position 3473 of SEQ ID NO: 586881
ucugcaccugaucaagauu

SEQ ID NO: 751037 - RNA, 19 nt, Artificial Sequence
  Description of Artificial Sequence: Synthetic oligonucleotide
  Antisense strand to SEQ ID NO: 751036
aaucuugaucaggugcaga

SEQ ID NO: 751038 - RNA, 19 nt, Artificial Sequence
  Description of Artificial Sequence: Synthetic oligonucleotide
  Sense strand starting at position 3481 of SEQ ID NO: 586881
ugaucaagauuggcuucua

SEQ ID NO: 751039 - RNA, 19 nt, Artificial Sequence
  Description of Artificial Sequence: Synthetic oligonucleotide
  Antisense strand to SEQ ID NO: 751038
uagaagccaaucuugauca

SEQ ID NO: 751040 - RNA, 19 nt, Artificial Sequence
  Description of Artificial Sequence: Synthetic oligonucleotide
  Sense strand starting at position 3670 of SEQ ID NO: 586881
aaaggaaugacgugcuuga

SEQ ID NO: 751041 - RNA, 19 nt, Artificial Sequence
  Description of Artificial Sequence: Synthetic oligonucleotide
  Antisense strand to SEQ ID NO: 751040
ucaagcacgucauuccuuu

SEQ ID NO: 751042 - RNA, 19 nt, Artificial Sequence
  Description of Artificial Sequence: Synthetic oligonucleotide
  Sense strand starting at position 3674 of SEQ ID NO: 586881
gaaugacgugcuugaauau

SEQ ID NO: 751043 - RNA, 19 nt, Artificial Sequence
  Description of Artificial Sequence: Synthetic oligonucleotide
  Antisense strand to SEQ ID NO: 751042
auauucaagcacgucauuc

SEQ ID NO: 751044 - RNA, 19 nt, Artificial Sequence
  Description of Artificial Sequence: Synthetic oligonucleotide
  Sense strand starting at position 3675 of SEQ ID NO: 586881
aaugacgugcuugaauauu

SEQ ID NO: 751045 - RNA, 19 nt, Artificial Sequence
  Description of Artificial Sequence: Synthetic oligonucleotide
  Antisense strand to SEQ ID NO: 751044
aauauucaagcacgucauu

SEQ ID NO: 751046 - RNA, 19 nt, Artificial Sequence
  Description of Artificial Sequence: Synthetic oligonucleotide
  Sense strand starting at position 3919 of SEQ ID NO: 586881
uuuagauauuaucuacgac

SEQ ID NO: 751047 - RNA, 19 nt, Artificial Sequence
  Description of Artificial Sequence: Synthetic oligonucleotide
  Antisense strand to SEQ ID NO: 751046
gucguagauaauaucuaaa

SEQ ID NO: 751048 - RNA, 19 nt, Artificial Sequence
  Description of Artificial Sequence: Synthetic oligonucleotide
  Sense strand starting at position 48 of SEQ ID NO: 586882
auaagcauucugggaagca

SEQ ID NO: 751049 - RNA, 19 nt, Artificial Sequence
  Description of Artificial Sequence: Synthetic oligonucleotide
  Antisense strand to SEQ ID NO: 751048
ugcuucccagaaugcuuau

SEQ ID NO: 751050 - RNA, 19 nt, Artificial Sequence
  Description of Artificial Sequence: Synthetic oligonucleotide
  Sense strand starting at position 183 of SEQ ID NO: 586882
cucugaauaugcucaagua

SEQ ID NO: 751051 - RNA, 19 nt, Artificial Sequence
  Description of Artificial Sequence: Synthetic oligonucleotide
  Antisense strand to SEQ ID NO: 751050
uacuugagcauauucagag

SEQ ID NO: 751052 - RNA, 19 nt, Artificial Sequence
  Description of Artificial Sequence: Synthetic oligonucleotide
  Sense strand starting at position 184 of SEQ ID NO: 586882
ucugaauaugcucaaguag

SEQ ID NO: 751053 - RNA, 19 nt, Artificial Sequence
  Description of Artificial Sequence: Synthetic oligonucleotide
  Antisense strand to SEQ ID NO: 751052
cuacuugagcauauucaga

SEQ ID NO: 751054 - RNA, 19 nt, Artificial Sequence
  Description of Artificial Sequence: Synthetic oligonucleotide
  Sense strand starting at position 226 of SEQ ID NO: 586882
aguuauaaugcccagcaca

SEQ ID NO: 751055 - RNA, 19 nt, Artificial Sequence
  Description of Artificial Sequence: Synthetic oligonucleotide
  Antisense strand to SEQ ID NO: 751054
ugugcugggcauuauaacu

SEQ ID NO: 751056 - RNA, 19 nt, Artificial Sequence
  Description of Artificial Sequence: Synthetic oligonucleotide
  Sense strand starting at position 323 of SEQ ID NO: 586882
gaaguaaagucuguaagug

SEQ ID NO: 751057 - RNA, 19 nt, Artificial Sequence
  Description of Artificial Sequence: Synthetic oligonucleotide
  Antisense strand to SEQ ID NO: 751056
cacuuacagacuuuacuuc

SEQ ID NO: 751058 - RNA, 19 nt, Artificial Sequence
  Description of Artificial Sequence: Synthetic oligonucleotide
  Sense strand starting at position 394 of SEQ ID NO: 586882
cuggauggugacugugaga

SEQ ID NO: 751059 - RNA, 19 nt, Artificial Sequence
  Description of Artificial Sequence: Synthetic oligonucleotide
  Antisense strand to SEQ ID NO: 751058
ucucacagucaccauccag

SEQ ID NO: 751060 - RNA, 19 nt, Artificial Sequence
  Description of Artificial Sequence: Synthetic oligonucleotide
  Sense strand starting at position 437 of SEQ ID NO: 586882
ugcagaaaugugugaacag

SEQ ID NO: 751061 - RNA, 19 nt, Artificial Sequence
  Description of Artificial Sequence: Synthetic oligonucleotide
  Antisense strand to SEQ ID NO: 751060
cuguucacacauuucugca

SEQ ID NO: 751062 - RNA, 19 nt, Artificial Sequence
  Description of Artificial Sequence: Synthetic oligonucleotide
  Sense strand starting at position 503 of SEQ ID NO: 586882
uggcuccugcccuaaagaa

SEQ ID NO: 751063 - RNA, 19 nt, Artificial Sequence
  Description of Artificial Sequence: Synthetic oligonucleotide
  Antisense strand to SEQ ID NO: 751062
uucuuuagggcaggagcca

SEQ ID NO: 751064 - RNA, 19 nt, Artificial Sequence
  Description of Artificial Sequence: Synthetic oligonucleotide
  Sense strand starting at position 539 of SEQ ID NO: 586882
gguguugucagauaauacu

SEQ ID NO: 751065 - RNA, 19 nt, Artificial Sequence
  Description of Artificial Sequence: Synthetic oligonucleotide
  Antisense strand to SEQ ID NO: 751064
aguauuaucugacaacacc

SEQ ID NO: 751066 - RNA, 19 nt, Artificial Sequence
  Description of Artificial Sequence: Synthetic oligonucleotide
  Sense strand starting at position 590 of SEQ ID NO: 586882
gucgguuuagaauaauauu

SEQ ID NO: 751067 - RNA, 19 nt, Artificial Sequence
  Description of Artificial Sequence: Synthetic oligonucleotide
  Antisense strand to SEQ ID NO: 751066
aauauuauucuaaaccgac

SEQ ID NO: 751068 - RNA, 19 nt, Artificial Sequence
  Description of Artificial Sequence: Synthetic oligonucleotide
  Sense strand starting at position 670 of SEQ ID NO: 586882
acuguaagaguuuaccaau

SEQ ID NO: 751069 - RNA, 19 nt, Artificial Sequence
  Description of Artificial Sequence: Synthetic oligonucleotide
  Antisense strand to SEQ ID NO: 751068
auugguaaacucuuacagu

SEQ ID NO: 751070 - RNA, 19 nt, Artificial Sequence
  Description of Artificial Sequence: Synthetic oligonucleotide
  Sense strand starting at position 707 of SEQ ID NO: 586882
ucuggaauaugauuaaagu

SEQ ID NO: 751071 - RNA, 19 nt, Artificial Sequence
  Description of Artificial Sequence: Synthetic oligonucleotide
  Antisense strand to SEQ ID NO: 751070
acuuuaaucauauuccaga

SEQ ID NO: 751072 - RNA, 19 nt, Artificial Sequence
  Description of Artificial Sequence: Synthetic oligonucleotide
  Sense strand starting at position 884 of SEQ ID NO: 586882
cucuuacaagucuggacau

SEQ ID NO: 751073 - RNA, 19 nt, Artificial Sequence
  Description of Artificial Sequence: Synthetic oligonucleotide
  Antisense strand to SEQ ID NO: 751072
auguccagacuuguaagag

SEQ ID NO: 751074 - RNA, 19 nt, Artificial Sequence
  Description of Artificial Sequence: Synthetic oligonucleotide
  Sense strand starting at position 1187 of SEQ ID NO: 586882
gucuaaugacuuuaagucu

SEQ ID NO: 751075 - RNA, 19 nt, Artificial Sequence
  Description of Artificial Sequence: Synthetic oligonucleotide
  Antisense strand to SEQ ID NO: 751074
agacuuaaagucauuagac

SEQ ID NO: 751076 - RNA, 19 nt, Artificial Sequence
  Description of Artificial Sequence: Synthetic oligonucleotide
  Sense strand starting at position 2551 of SEQ ID NO: 586882
gacggucugcgaguucuuu

SEQ ID NO: 751077 - RNA, 19 nt, Artificial Sequence
  Description of Artificial Sequence: Synthetic oligonucleotide
  Antisense strand to SEQ ID NO: 751076
aaagaacucgcagaccguc

SEQ ID NO: 751078 - RNA, 19 nt, Artificial Sequence
  Description of Artificial Sequence: Synthetic oligonucleotide
  Sense strand starting at position 2643 of SEQ ID NO: 586882
cacugugauuugguagcuu

SEQ ID NO: 751079 - RNA, 19 nt, Artificial Sequence
  Description of Artificial Sequence: Synthetic oligonucleotide
  Antisense strand to SEQ ID NO: 751078
aagcuaccaaaucacagug

SEQ ID NO: 751080 - RNA, 19 nt, Artificial Sequence
  Description of Artificial Sequence: Synthetic oligonucleotide
  Sense strand starting at position 2647 of SEQ ID NO: 586882
gugauuugguagcuuguga

SEQ ID NO: 751081 - RNA, 19 nt, Artificial Sequence
  Description of Artificial Sequence: Synthetic oligonucleotide
  Antisense strand to SEQ ID NO: 751080
ucacaagcuaccaaaucac

SEQ ID NO: 751082 - RNA, 19 nt, Artificial Sequence
  Description of Artificial Sequence: Synthetic oligonucleotide
  Sense strand starting at position 2684 of SEQ ID NO: 586882
ccguaaauuuaaguuagca

SEQ ID NO: 751083 - RNA, 19 nt, Artificial Sequence
  Description of Artificial Sequence: Synthetic oligonucleotide
  Antisense strand to SEQ ID NO: 751082
ugcuaacuuaaauuuacgg

SEQ ID NO: 751084 - RNA, 19 nt, Artificial Sequence
  Description of Artificial Sequence: Synthetic oligonucleotide
  Sense strand starting at position 2706 of SEQ ID NO: 586882
acagauucuuaugucuuga

SEQ ID NO: 751085 - RNA, 19 nt, Artificial Sequence
  Description of Artificial Sequence: Synthetic oligonucleotide
  Antisense strand to SEQ ID NO: 751084
ucaagacauaagaaucugu

SEQ ID NO: 751086 - RNA, 19 nt, Artificial Sequence
  Description of Artificial Sequence: Synthetic oligonucleotide
  Sense strand starting at position 2708 of SEQ ID NO: 586882
agauucuuaugucuugaca

SEQ ID NO: 751087 - RNA, 19 nt, Artificial Sequence
  Description of Artificial Sequence: Synthetic oligonucleotide
  Antisense strand to SEQ ID NO: 751086
ugucaagacauaagaaucu

SEQ ID NO: 751088 - RNA, 19 nt, Artificial Sequence
  Description of Artificial Sequence: Synthetic oligonucleotide
  Sense strand starting at position 2720 of SEQ ID NO: 586882
cuugacauuuauucgcuua

SEQ ID NO: 751089 - RNA, 19 nt, Artificial Sequence
  Description of Artificial Sequence: Synthetic oligonucleotide
  Antisense strand to SEQ ID NO: 751088
uaagcgaauaaaugucaag

SEQ ID NO: 751090 - RNA, 19 nt, Artificial Sequence
  Description of Artificial Sequence: Synthetic oligonucleotide
  Sense strand starting at position 2722 of SEQ ID NO: 586882
ugacauuuauucgcuuauc

SEQ ID NO: 751091 - RNA, 19 nt, Artificial Sequence
  Description of Artificial Sequence: Synthetic oligonucleotide
  Antisense strand to SEQ ID NO: 751090
gauaagcgaauaaauguca

SEQ ID NO: 751092 - RNA, 19 nt, Artificial Sequence
  Description of Artificial Sequence: Synthetic oligonucleotide
  Sense strand starting at position 2846 of SEQ ID NO: 586882
uuggaaguaugguuuauca

SEQ ID NO: 751093 - RNA, 19 nt, Artificial Sequence
  Description of Artificial Sequence: Synthetic oligonucleotide
  Antisense strand to SEQ ID NO: 751092
ugauaaaccauacuuccaa

SEQ ID NO: 751094 - RNA, 19 nt, Artificial Sequence
  Description of Artificial Sequence: Synthetic oligonucleotide
  Sense strand starting at position 2850 of SEQ ID NO: 586882
aaguaugguuuaucaagau

SEQ ID NO: 751095 - RNA, 19 nt, Artificial Sequence
  Description of Artificial Sequence: Synthetic oligonucleotide
  Antisense strand to SEQ ID NO: 751094
aucuugauaaaccauacuu

SEQ ID NO: 751096 - RNA, 19 nt, Artificial Sequence
  Description of Artificial Sequence: Synthetic oligonucleotide
  Sense strand starting at position 2854 of SEQ ID NO: 586882
augguuuaucaagauguac

SEQ ID NO: 751097 - RNA, 19 nt, Artificial Sequence
  Description of Artificial Sequence: Synthetic oligonucleotide
  Antisense strand to SEQ ID NO: 751096
guacaucuugauaaaccau

SEQ ID NO: 751098 - RNA, 19 nt, Artificial Sequence
  Description of Artificial Sequence: Synthetic oligonucleotide
  Sense strand starting at position 2856 of SEQ ID NO: 586882
gguuuaucaagauguacag

SEQ ID NO: 751099 - RNA, 19 nt, Artificial Sequence
  Description of Artificial Sequence: Synthetic oligonucleotide
  Antisense strand to SEQ ID NO: 751098
cuguacaucuugauaaacc

SEQ ID NO: 751100 - RNA, 19 nt, Artificial Sequence
  Description of Artificial Sequence: Synthetic oligonucleotide
  Sense strand starting at position 2866 of SEQ ID NO: 586882
gauguacagcgugaagaau

SEQ ID NO: 751101 - RNA, 19 nt, Artificial Sequence
  Description of Artificial Sequence: Synthetic oligonucleotide
  Antisense strand to SEQ ID NO: 751100
auucuucacgcuguacauc

SEQ ID NO: 751102 - RNA, 19 nt, Artificial Sequence
  Description of Artificial Sequence: Synthetic oligonucleotide
  Sense strand starting at position 3050 of SEQ ID NO: 586882
aaacuuagguugcugaaga

SEQ ID NO: 751103 - RNA, 19 nt, Artificial Sequence
  Description of Artificial Sequence: Synthetic oligonucleotide
  Antisense strand to SEQ ID NO: 751102
ucuucagcaaccuaaguuu

SEQ ID NO: 751104 - RNA, 19 nt, Artificial Sequence
  Description of Artificial Sequence: Synthetic oligonucleotide
  Sense strand starting at position 3134 of SEQ ID NO: 586882
guggacagauuacaauuua

SEQ ID NO: 751105 - RNA, 19 nt, Artificial Sequence
  Description of Artificial Sequence: Synthetic oligonucleotide
  Antisense strand to SEQ ID NO: 751104
uaaauuguaaucuguccac

SEQ ID NO: 751106 - RNA, 19 nt, Artificial Sequence
  Description of Artificial Sequence: Synthetic oligonucleotide
  Sense strand starting at position 3157 of SEQ ID NO: 586882
auucuucuguugguagaga

SEQ ID NO: 751107 - RNA, 19 nt, Artificial Sequence
  Description of Artificial Sequence: Synthetic oligonucleotide
  Antisense strand to SEQ ID NO: 751106
ucucuaccaacagaagaau

SEQ ID NO: 751108 - RNA, 19 nt, Artificial Sequence
  Description of Artificial Sequence: Synthetic oligonucleotide
  Sense strand starting at position 3245 of SEQ ID NO: 586882
ugcagaagccaguaagaga

SEQ ID NO: 751109 - RNA, 19 nt, Artificial Sequence
  Description of Artificial Sequence: Synthetic oligonucleotide
  Antisense strand to SEQ ID NO: 751108
ucucuuacuggcuucugca

SEQ ID NO: 751110 - RNA, 19 nt, Artificial Sequence
  Description of Artificial Sequence: Synthetic oligonucleotide
  Sense strand starting at position 3520 of SEQ ID NO: 586882
uggaguugaugagugaagu

SEQ ID NO: 751111 - RNA, 19 nt, Artificial Sequence
  Description of Artificial Sequence: Synthetic oligonucleotide
  Antisense strand to SEQ ID NO: 751110
acuucacucaucaacucca

SEQ ID NO: 751112 - RNA, 19 nt, Artificial Sequence
  Description of Artificial Sequence: Synthetic oligonucleotide
  Sense strand starting at position 3521 of SEQ ID NO: 586882
ggaguugaugagugaagua

SEQ ID NO: 751113 - RNA, 19 nt, Artificial Sequence
  Description of Artificial Sequence: Synthetic oligonucleotide
  Antisense strand to SEQ ID NO: 751112
uacuucacucaucaacucc

SEQ ID NO: 751114 - RNA, 19 nt, Artificial Sequence
  Description of Artificial Sequence: Synthetic oligonucleotide
  Sense strand starting at position 3619 of SEQ ID NO: 586882
agguuuagaugaccauaac

SEQ ID NO: 751115 - RNA, 19 nt, Artificial Sequence
  Description of Artificial Sequence: Synthetic oligonucleotide
  Antisense strand to SEQ ID NO: 751114
guuauggucaucuaaaccu

SEQ ID NO: 751116 - RNA, 19 nt, Artificial Sequence
  Description of Artificial Sequence: Synthetic oligonucleotide
  Sense strand starting at position 3739 of SEQ ID NO: 586882
acccaauauggugauaugu

SEQ ID NO: 751117 - RNA, 19 nt, Artificial Sequence
  Description of Artificial Sequence: Synthetic oligonucleotide
  Antisense strand to SEQ ID NO: 751116
acauaucaccauauugggu

SEQ ID NO: 751118 - RNA, 19 nt, Artificial Sequence
  Description of Artificial Sequence: Synthetic oligonucleotide
  Sense strand starting at position 3784 of SEQ ID NO: 586882
guuuaauggucuucuaagg

SEQ ID NO: 751119 - RNA, 19 nt, Artificial Sequence
  Description of Artificial Sequence: Synthetic oligonucleotide
  Antisense strand to SEQ ID NO: 751118
ccuuagaagaccauuaaac

SEQ ID NO: 751120 - RNA, 19 nt, Artificial Sequence
  Description of Artificial Sequence: Synthetic oligonucleotide
  Sense strand starting at position 3808 of SEQ ID NO: 586882
aaaggucagguuuagcaga

SEQ ID NO: 751121 - RNA, 19 nt, Artificial Sequence
  Description of Artificial Sequence: Synthetic oligonucleotide
  Antisense strand to SEQ ID NO: 751120
ucugcuaaaccugaccuuu

SEQ ID NO: 751122 - RNA, 19 nt, Artificial Sequence
  Description of Artificial Sequence: Synthetic oligonucleotide
  Sense strand starting at position 3810 of SEQ ID NO: 586882
aggucagguuuagcagaaa

SEQ ID NO: 751123 - RNA, 19 nt, Artificial Sequence
  Description of Artificial Sequence: Synthetic oligonucleotide
  Antisense strand to SEQ ID NO: 751122
uuucugcuaaaccugaccu

SEQ ID NO: 751124 - RNA, 19 nt, Artificial Sequence
  Description of Artificial Sequence: Synthetic oligonucleotide
  Sense strand starting at position 3822 of SEQ ID NO: 586882
gcagaaacuggauguaaca

SEQ ID NO: 751125 - RNA, 19 nt, Artificial Sequence
  Description of Artificial Sequence: Synthetic oligonucleotide
  Antisense strand to SEQ ID NO: 751124
uguuacauccaguuucugc

SEQ ID NO: 751126 - RNA, 19 nt, Artificial Sequence
  Description of Artificial Sequence: Synthetic oligonucleotide
  Sense strand starting at position 3831 of SEQ ID NO: 586882
ggauguaacagugguaacu

SEQ ID NO: 751127 - RNA, 19 nt, Artificial Sequence
  Description of Artificial Sequence: Synthetic oligonucleotide
  Antisense strand to SEQ ID NO: 751126
aguuaccacuguuacaucc

SEQ ID NO: 751128 - RNA, 19 nt, Artificial Sequence
  Description of Artificial Sequence: Synthetic oligonucleotide
  Sense strand starting at position 62 of SEQ ID NO: 586883
ucagcagcccuuuacagau

SEQ ID NO: 751129 - RNA, 19 nt, Artificial Sequence
  Description of Artificial Sequence: Synthetic oligonucleotide
  Antisense strand to SEQ ID NO: 751128
aucuguaaagggcugcuga

SEQ ID NO: 751130 - RNA, 19 nt, Artificial Sequence
  Description of Artificial Sequence: Synthetic oligonucleotide
  Sense strand starting at position 116 of SEQ ID NO: 586883
gaggccagugagugcuuua

SEQ ID NO: 751131 - RNA, 19 nt, Artificial Sequence
  Description of Artificial Sequence: Synthetic oligonucleotide
  Antisense strand to SEQ ID NO: 751130
uaaagcacucacuggccuc

SEQ ID NO: 751132 - RNA, 19 nt, Artificial Sequence
  Description of Artificial Sequence: Synthetic oligonucleotide
  Sense strand starting at position 119 of SEQ ID NO: 586883
gccagugagugcuuuauaa

SEQ ID NO: 751133 - RNA, 19 nt, Artificial Sequence
  Description of Artificial Sequence: Synthetic oligonucleotide
  Antisense strand to SEQ ID NO: 751132
uuauaaagcacucacuggc

SEQ ID NO: 751134 - RNA, 19 nt, Artificial Sequence
  Description of Artificial Sequence: Synthetic oligonucleotide
  Sense strand starting at position 121 of SEQ ID NO: 586883
cagugagugcuuuauaauc

SEQ ID NO: 751135 - RNA, 19 nt, Artificial Sequence
  Description of Artificial Sequence: Synthetic oligonucleotide
  Antisense strand to SEQ ID NO: 751134
gauuauaaagcacucacug

SEQ ID NO: 751136 - RNA, 19 nt, Artificial Sequence
  Description of Artificial Sequence: Synthetic oligonucleotide
  Sense strand starting at position 130 of SEQ ID NO: 586883
cuuuauaaucuugggauca

SEQ ID NO: 751137 - RNA, 19 nt, Artificial Sequence
  Description of Artificial Sequence: Synthetic oligonucleotide
  Antisense strand to SEQ ID NO: 751136
ugaucccaagauuauaaag

SEQ ID NO: 751138 - RNA, 19 nt, Artificial Sequence
  Description of Artificial Sequence: Synthetic oligonucleotide
  Sense strand starting at position 132 of SEQ ID NO: 586883
uuauaaucuugggaucaug

SEQ ID NO: 751139 - RNA, 19 nt, Artificial Sequence
  Description of Artificial Sequence: Synthetic oligonucleotide
  Antisense strand to SEQ ID NO: 751138
caugaucccaagauuauaa

SEQ ID NO: 751140 - RNA, 19 nt, Artificial Sequence
  Description of Artificial Sequence: Synthetic oligonucleotide
  Sense strand starting at position 206 of SEQ ID NO: 586883
aaguguccugcugaguaga

SEQ ID NO: 751141 - RNA, 19 nt, Artificial Sequence
  Description of Artificial Sequence: Synthetic oligonucleotide
  Antisense strand to SEQ ID NO: 751140
ucuacucagcaggacacuu

SEQ ID NO: 751142 - RNA, 19 nt, Artificial Sequence
  Description of Artificial Sequence: Synthetic oligonucleotide
  Sense strand starting at position 208 of SEQ ID NO: 586883
guguccugcugaguagaca

SEQ ID NO: 751143 - RNA, 19 nt, Artificial Sequence
  Description of Artificial Sequence: Synthetic oligonucleotide
  Antisense strand to SEQ ID NO: 751142
ugucuacucagcaggacac

SEQ ID NO: 751144 - RNA, 19 nt, Artificial Sequence
  Description of Artificial Sequence: Synthetic oligonucleotide
  Sense strand starting at position 209 of SEQ ID NO: 586883
uguccugcugaguagacaa

SEQ ID NO: 751145 - RNA, 19 nt, Artificial Sequence
  Description of Artificial Sequence: Synthetic oligonucleotide
  Antisense strand to SEQ ID NO: 751144
uugucuacucagcaggaca

SEQ ID NO: 751146 - RNA, 19 nt, Artificial Sequence
  Description of Artificial Sequence: Synthetic oligonucleotide
  Sense strand starting at position 263 of SEQ ID NO: 586883
aucaaaugcuuucuggaaa

SEQ ID NO: 751147 - RNA, 19 nt, Artificial Sequence
  Description of Artificial Sequence: Synthetic oligonucleotide
  Antisense strand to SEQ ID NO: 751146
uuuccagaaagcauuugau

SEQ ID NO: 751148 - RNA, 19 nt, Artificial Sequence
  Description of Artificial Sequence: Synthetic oligonucleotide
  Sense strand starting at position 338 of SEQ ID NO: 586883
cugagcuaguccucaguca

SEQ ID NO: 751149 - RNA, 19 nt, Artificial Sequence
  Description of Artificial Sequence: Synthetic oligonucleotide
  Antisense strand to SEQ ID NO: 751148
ugacugaggacuagcucag

SEQ ID NO: 751150 - RNA, 19 nt, Artificial Sequence
  Description of Artificial Sequence: Synthetic oligonucleotide
  Sense strand starting at position 339 of SEQ ID NO: 586883
ugagcuaguccucagucaa

SEQ ID NO: 751151 - RNA, 19 nt, Artificial Sequence
  Description of Artificial Sequence: Synthetic oligonucleotide
  Antisense strand to SEQ ID NO: 751150
uugacugaggacuagcuca

SEQ ID NO: 751152 - RNA, 19 nt, Artificial Sequence
  Description of Artificial Sequence: Synthetic oligonucleotide
  Sense strand starting at position 422 of SEQ ID NO: 586883
cccggauaccucugacaca

SEQ ID NO: 751153 - RNA, 19 nt, Artificial Sequence
  Description of Artificial Sequence: Synthetic oligonucleotide
  Antisense strand to SEQ ID NO: 751152
ugugucagagguauccggg

SEQ ID NO: 751154 - RNA, 19 nt, Artificial Sequence
  Description of Artificial Sequence: Synthetic oligonucleotide
  Sense strand starting at position 533 of SEQ ID NO: 586883
ucccuauucuggccaggga

SEQ ID NO: 751155 - RNA, 19 nt, Artificial Sequence
  Description of Artificial Sequence: Synthetic oligonucleotide
  Antisense strand to SEQ ID NO: 751154
ucccuggccagaauaggga

SEQ ID NO: 751156 - RNA, 19 nt, Artificial Sequence
  Description of Artificial Sequence: Synthetic oligonucleotide
  Sense strand starting at position 687 of SEQ ID NO: 586883
uucucaauuugauacugga

SEQ ID NO: 751157 - RNA, 19 nt, Artificial Sequence
  Description of Artificial Sequence: Synthetic oligonucleotide
  Antisense strand to SEQ ID NO: 751156
uccaguaucaaauugagaa

SEQ ID NO: 751158 - RNA, 19 nt, Artificial Sequence
  Description of Artificial Sequence: Synthetic oligonucleotide
  Sense strand starting at position 690 of SEQ ID NO: 586883
ucaauuugauacuggagau

SEQ ID NO: 751159 - RNA, 19 nt, Artificial Sequence
  Description of Artificial Sequence: Synthetic oligonucleotide
  Antisense strand to SEQ ID NO: 751158
aucuccaguaucaaauuga

SEQ ID NO: 751160 - RNA, 19 nt, Artificial Sequence
  Description of Artificial Sequence: Synthetic oligonucleotide
  Sense strand starting at position 768 of SEQ ID NO: 586883
cgaccaagaucuccaccua

SEQ ID NO: 751161 - RNA, 19 nt, Artificial Sequence
  Description of Artificial Sequence: Synthetic oligonucleotide
  Antisense strand to SEQ ID NO: 751160
uagguggagaucuuggucg

SEQ ID NO: 751162 - RNA, 19 nt, Artificial Sequence
  Description of Artificial Sequence: Synthetic oligonucleotide
  Sense strand starting at position 797 of SEQ ID NO: 586883
acuggaaguuugcugaaau

SEQ ID NO: 751163 - RNA, 19 nt, Artificial Sequence
  Description of Artificial Sequence: Synthetic oligonucleotide
  Antisense strand to SEQ ID NO: 751162
auuucagcaaacuuccagu

SEQ ID NO: 751164 - RNA, 19 nt, Artificial Sequence
  Description of Artificial Sequence: Synthetic oligonucleotide
  Sense strand starting at position 1026 of SEQ ID NO: 586883
ggcccaacucugcaucuua

SEQ ID NO: 751165 - RNA, 19 nt, Artificial Sequence
  Description of Artificial Sequence: Synthetic oligonucleotide
  Antisense strand to SEQ ID NO: 751164
uaagaugcagaguugggcc

SEQ ID NO: 751166 - RNA, 19 nt, Artificial Sequence
  Description of Artificial Sequence: Synthetic oligonucleotide
  Sense strand starting at position 1037 of SEQ ID NO: 586883
gcaucuuacagccagggaa

SEQ ID NO: 751167 - RNA, 19 nt, Artificial Sequence
  Description of Artificial Sequence: Synthetic oligonucleotide
  Antisense strand to SEQ ID NO: 751166
uucccuggcuguaagaugc

SEQ ID NO: 751168 - RNA, 19 nt, Artificial Sequence
  Description of Artificial Sequence: Synthetic oligonucleotide
  Sense strand starting at position 1275 of SEQ ID NO: 586883
gagcaaugguucuuccuag

SEQ ID NO: 751169 - RNA, 19 nt, Artificial Sequence
  Description of Artificial Sequence: Synthetic oligonucleotide
  Antisense strand to SEQ ID NO: 751168
cuaggaagaaccauugcuc

SEQ ID NO: 751170 - RNA, 19 nt, Artificial Sequence
  Description of Artificial Sequence: Synthetic oligonucleotide
  Sense strand starting at position 1276 of SEQ ID NO: 586883
agcaaugguucuuccuaga

SEQ ID NO: 751171 - RNA, 19 nt, Artificial Sequence
  Description of Artificial Sequence: Synthetic oligonucleotide
  Antisense strand to SEQ ID NO: 751170
ucuaggaagaaccauugcu

SEQ ID NO: 751172 - RNA, 19 nt, Artificial Sequence
  Description of Artificial Sequence: Synthetic oligonucleotide
  Sense strand starting at position 1287 of SEQ ID NO: 586883
uuccuagaguccugauuuc

SEQ ID NO: 751173 - RNA, 19 nt, Artificial Sequence
  Description of Artificial Sequence: Synthetic oligonucleotide
  Antisense strand to SEQ ID NO: 751172
gaaaucaggacucuaggaa

SEQ ID NO: 751174 - RNA, 19 nt, Artificial Sequence
  Description of Artificial Sequence: Synthetic oligonucleotide
  Sense strand starting at position 1298 of SEQ ID NO: 586883
cugauuucuugccgaagaa

SEQ ID NO: 751175 - RNA, 19 nt, Artificial Sequence
  Description of Artificial Sequence: Synthetic oligonucleotide
  Antisense strand to SEQ ID NO: 751174
uucuucggcaagaaaucag

SEQ ID NO: 751176 - RNA, 19 nt, Artificial Sequence
  Description of Artificial Sequence: Synthetic oligonucleotide
  Sense strand starting at position 1699 of SEQ ID NO: 586883
cagcuucucccggguggaa

SEQ ID NO: 751177 - RNA, 19 nt, Artificial Sequence
  Description of Artificial Sequence: Synthetic oligonucleotide
  Antisense strand to SEQ ID NO: 751176
uuccacccgggagaagcug

SEQ ID NO: 751178 - RNA, 19 nt, Artificial Sequence
  Description of Artificial Sequence: Synthetic oligonucleotide
  Sense strand starting at position 2573 of SEQ ID NO: 586883
gagauacaucuaggagcca

SEQ ID NO: 751179 - RNA, 19 nt, Artificial Sequence
  Description of Artificial Sequence: Synthetic oligonucleotide
  Antisense strand to SEQ ID NO: 751178
uggcuccuagauguaucuc

SEQ ID NO: 751180 - RNA, 19 nt, Artificial Sequence
  Description of Artificial Sequence: Synthetic oligonucleotide
  Sense strand starting at position 2586 of SEQ ID NO: 586883
gagccaggucuccaaaggu

SEQ ID NO: 751181 - RNA, 19 nt, Artificial Sequence
  Description of Artificial Sequence: Synthetic oligonucleotide
  Antisense strand to SEQ ID NO: 751180
accuuuggagaccuggcuc

SEQ ID NO: 751182 - RNA, 19 nt, Artificial Sequence
  Description of Artificial Sequence: Synthetic oligonucleotide
  Sense strand starting at position 2666 of SEQ ID NO: 586883
uguguuguucauggaguac

SEQ ID NO: 751183 - RNA, 19 nt, Artificial Sequence
  Description of Artificial Sequence: Synthetic oligonucleotide
  Antisense strand to SEQ ID NO: 751182
guacuccaugaacaacaca

SEQ ID NO: 751184 - RNA, 19 nt, Artificial Sequence
  Description of Artificial Sequence: Synthetic oligonucleotide
  Sense strand starting at position 2768 of SEQ ID NO: 586883
uguguuugagucugagaca

SEQ ID NO: 751185 - RNA, 19 nt, Artificial Sequence
  Description of Artificial Sequence: Synthetic oligonucleotide
  Antisense strand to SEQ ID NO: 751184
ugucucagacucaaacaca

SEQ ID NO: 751186 - RNA, 19 nt, Artificial Sequence
  Description of Artificial Sequence: Synthetic oligonucleotide
  Sense strand starting at position 2797 of SEQ ID NO: 586883
gugaguguaugcuugggaa

SEQ ID NO: 751187 - RNA, 19 nt, Artificial Sequence
  Description of Artificial Sequence: Synthetic oligonucleotide
  Antisense strand to SEQ ID NO: 751186
uucccaagcauacacucac

SEQ ID NO: 751188 - RNA, 19 nt, Artificial Sequence
  Description of Artificial Sequence: Synthetic oligonucleotide
  Sense strand starting at position 2799 of SEQ ID NO: 586883
gaguguaugcuugggaaac

SEQ ID NO: 751189 - RNA, 19 nt, Artificial Sequence
  Description of Artificial Sequence: Synthetic oligonucleotide
  Antisense strand to SEQ ID NO: 751188
guuucccaagcauacacuc

SEQ ID NO: 751190 - RNA, 19 nt, Artificial Sequence
  Description of Artificial Sequence: Synthetic oligonucleotide
  Sense strand starting at position 2810 of SEQ ID NO: 586883
ugggaaacaguguguauga

SEQ ID NO: 751191 - RNA, 19 nt, Artificial Sequence
  Description of Artificial Sequence: Synthetic oligonucleotide
  Antisense strand to SEQ ID NO: 751190
ucauacacacuguuuccca

SEQ ID NO: 751192 - RNA, 19 nt, Artificial Sequence
  Description of Artificial Sequence: Synthetic oligonucleotide
  Sense strand starting at position 2932 of SEQ ID NO: 586883
agaccuggccuugaagagu

SEQ ID NO: 751193 - RNA, 19 nt, Artificial Sequence
  Description of Artificial Sequence: Synthetic oligonucleotide
  Antisense strand to SEQ ID NO: 751192
acucuucaaggccaggucu

SEQ ID NO: 751194 - RNA, 19 nt, Artificial Sequence
  Description of Artificial Sequence: Synthetic oligonucleotide
  Sense strand starting at position 3065 of SEQ ID NO: 586883
acuuaauggugucuuaaga

SEQ ID NO: 751195 - RNA, 19 nt, Artificial Sequence
  Description of Artificial Sequence: Synthetic oligonucleotide
  Antisense strand to SEQ ID NO: 751194
ucuuaagacaccauuaagu

SEQ ID NO: 751196 - RNA, 19 nt, Artificial Sequence
  Description of Artificial Sequence: Synthetic oligonucleotide
  Sense strand starting at position 3079 of SEQ ID NO: 586883
uaagaauugucacugguca

SEQ ID NO: 751197 - RNA, 19 nt, Artificial Sequence
  Description of Artificial Sequence: Synthetic oligonucleotide
  Antisense strand to SEQ ID NO: 751196
ugaccagugacaauucuua

SEQ ID NO: 751198 - RNA, 19 nt, Artificial Sequence
  Description of Artificial Sequence: Synthetic oligonucleotide
  Sense strand starting at position 3320 of SEQ ID NO: 586883
gaagaacuuucugugcuuu

SEQ ID NO: 751199 - RNA, 19 nt, Artificial Sequence
  Description of Artificial Sequence: Synthetic oligonucleotide
  Antisense strand to SEQ ID NO: 751198
aaagcacagaaaguucuuc

SEQ ID NO: 751200 - RNA, 19 nt, Artificial Sequence
  Description of Artificial Sequence: Synthetic oligonucleotide
  Sense strand starting at position 3344 of SEQ ID NO: 586883
ugaagaaauucugauuaca

SEQ ID NO: 751201 - RNA, 19 nt, Artificial Sequence
  Description of Artificial Sequence: Synthetic oligonucleotide
  Antisense strand to SEQ ID NO: 751200
uguaaucagaauuucuuca

SEQ ID NO: 751202 - RNA, 19 nt, Artificial Sequence
  Description of Artificial Sequence: Synthetic oligonucleotide
  Sense strand starting at position 3645 of SEQ ID NO: 586883
uacagcucucuccaggaga

SEQ ID NO: 751203 - RNA, 19 nt, Artificial Sequence
  Description of Artificial Sequence: Synthetic oligonucleotide
  Antisense strand to SEQ ID NO: 751202
ucuccuggagagagcugua

SEQ ID NO: 751204 - RNA, 19 nt, Artificial Sequence
  Description of Artificial Sequence: Synthetic oligonucleotide
  Sense strand starting at position 3647 of SEQ ID NO: 586883
cagcucucuccaggagagu

SEQ ID NO: 751205 - RNA, 19 nt, Artificial Sequence
  Description of Artificial Sequence: Synthetic oligonucleotide
  Antisense strand to SEQ ID NO: 751204
acucuccuggagagagcug

SEQ ID NO: 751206 - RNA, 19 nt, Artificial Sequence
  Description of Artificial Sequence: Synthetic oligonucleotide
  Sense strand starting at position 3658 of SEQ ID NO: 586883
aggagagucuuagucucca

SEQ ID NO: 751207 - RNA, 19 nt, Artificial Sequence
  Description of Artificial Sequence: Synthetic oligonucleotide
  Antisense strand to SEQ ID NO: 751206
uggagacuaagacucuccu

SEQ ID NO: 751208 - RNA, 19 nt, Artificial Sequence
  Description of Artificial Sequence: Synthetic oligonucleotide
  Sense strand starting at position 211 of SEQ ID NO: 586884
uacgaaauguguuuggaaa

SEQ ID NO: 751209 - RNA, 19 nt, Artificial Sequence
  Description of Artificial Sequence: Synthetic oligonucleotide
  Antisense strand to SEQ ID NO: 751208
uuuccaaacacauuucgua

SEQ ID NO: 751210 - RNA, 19 nt, Artificial Sequence
  Description of Artificial Sequence: Synthetic oligonucleotide
  Sense strand starting at position 212 of SEQ ID NO: 586884
acgaaauguguuuggaaag

SEQ ID NO: 751211 - RNA, 19 nt, Artificial Sequence
  Description of Artificial Sequence: Synthetic oligonucleotide
  Antisense strand to SEQ ID NO: 751210
cuuuccaaacacauuucgu

SEQ ID NO: 751212 - RNA, 19 nt, Artificial Sequence
  Description of Artificial Sequence: Synthetic oligonucleotide
  Sense strand starting at position 334 of SEQ ID NO: 586884
guauauugacaagguauac

SEQ ID NO: 751213 - RNA, 19 nt, Artificial Sequence
  Description of Artificial Sequence: Synthetic oligonucleotide
  Antisense strand to SEQ ID NO: 751212
guauaccuugucaauauac

SEQ ID NO: 751214 - RNA, 19 nt, Artificial Sequence
  Description of Artificial Sequence: Synthetic oligonucleotide
  Sense strand starting at position 379 of SEQ ID NO: 586884
ugaguaugaacgcaaauaa

SEQ ID NO: 751215 - RNA, 19 nt, Artificial Sequence
  Description of Artificial Sequence: Synthetic oligonucleotide
  Antisense strand to SEQ ID NO: 751214
uuauuugcguucauacuca

SEQ ID NO: 751216 - RNA, 19 nt, Artificial Sequence
  Description of Artificial Sequence: Synthetic oligonucleotide
  Sense strand starting at position 491 of SEQ ID NO: 586884
aguaaccgucaaggauaau

SEQ ID NO: 751217 - RNA, 19 nt, Artificial Sequence
  Description of Artificial Sequence: Synthetic oligonucleotide
  Antisense strand to SEQ ID NO: 751216
auuauccuugacgguuacu

SEQ ID NO: 751218 - RNA, 19 nt, Artificial Sequence
  Description of Artificial Sequence: Synthetic oligonucleotide
  Sense strand starting at position 492 of SEQ ID NO: 586884
guaaccgucaaggauaaua

SEQ ID NO: 751219 - RNA, 19 nt, Artificial Sequence
  Description of Artificial Sequence: Synthetic oligonucleotide
  Antisense strand to SEQ ID NO: 751218
uauuauccuugacgguuac

SEQ ID NO: 751220 - RNA, 19 nt, Artificial Sequence
  Description of Artificial Sequence: Synthetic oligonucleotide
  Sense strand starting at position 535 of SEQ ID NO: 586884
ccuggauuccugcaaaguc

SEQ ID NO: 751221 - RNA, 19 nt, Artificial Sequence
  Description of Artificial Sequence: Synthetic oligonucleotide
  Antisense strand to SEQ ID NO: 751220
gacuuugcaggaauccagg

SEQ ID NO: 751222 - RNA, 19 nt, Artificial Sequence
  Description of Artificial Sequence: Synthetic oligonucleotide
  Sense strand starting at position 569 of SEQ ID NO: 586884
uguuuauuccgacaccaca

SEQ ID NO: 751223 - RNA, 19 nt, Artificial Sequence
  Description of Artificial Sequence: Synthetic oligonucleotide
  Antisense strand to SEQ ID NO: 751222
uguggugucggaauaaaca

SEQ ID NO: 751224 - RNA, 19 nt, Artificial Sequence
  Description of Artificial Sequence: Synthetic oligonucleotide
  Sense strand starting at position 664 of SEQ ID NO: 586884
uccuaaacucucuggguca

SEQ ID NO: 751225 - RNA, 19 nt, Artificial Sequence
  Description of Artificial Sequence: Synthetic oligonucleotide
  Antisense strand to SEQ ID NO: 751224
ugacccagagaguuuagga

SEQ ID NO: 751226 - RNA, 19 nt, Artificial Sequence
  Description of Artificial Sequence: Synthetic oligonucleotide
  Sense strand starting at position 678 of SEQ ID NO: 586884
ggucaccgacuuuaagaau

SEQ ID NO: 751227 - RNA, 19 nt, Artificial Sequence
  Description of Artificial Sequence: Synthetic oligonucleotide
  Antisense strand to SEQ ID NO: 751226
auucuuaaagucggugacc

SEQ ID NO: 751228 - RNA, 19 nt, Artificial Sequence
  Description of Artificial Sequence: Synthetic oligonucleotide
  Sense strand starting at position 684 of SEQ ID NO: 586884
cgacuuuaagaauguccca

SEQ ID NO: 751229 - RNA, 19 nt, Artificial Sequence
  Description of Artificial Sequence: Synthetic oligonucleotide
  Antisense strand to SEQ ID NO: 751228
ugggacauucuuaaagucg

SEQ ID NO: 751230 - RNA, 19 nt, Artificial Sequence
  Description of Artificial Sequence: Synthetic oligonucleotide
  Sense strand starting at position 809 of SEQ ID NO: 586884
gcugaagaccgacaucagu

SEQ ID NO: 751231 - RNA, 19 nt, Artificial Sequence
  Description of Artificial Sequence: Synthetic oligonucleotide
  Antisense strand to SEQ ID NO: 751230
acugaugucggucuucagc

SEQ ID NO: 751232 - RNA, 19 nt, Artificial Sequence
  Description of Artificial Sequence: Synthetic oligonucleotide
  Sense strand starting at position 1006 of SEQ ID NO: 586884
gcagcuucucauuaaagac

SEQ ID NO: 751233 - RNA, 19 nt, Artificial Sequence
  Description of Artificial Sequence: Synthetic oligonucleotide
  Antisense strand to SEQ ID NO: 751232
gucuuuaaugagaagcugc

SEQ ID NO: 751234 - RNA, 19 nt, Artificial Sequence
  Description of Artificial Sequence: Synthetic oligonucleotide
  Sense strand starting at position 1091 of SEQ ID NO: 586884
agggaaaucugaguaaguc

SEQ ID NO: 751235 - RNA, 19 nt, Artificial Sequence
  Description of Artificial Sequence: Synthetic oligonucleotide
  Antisense strand to SEQ ID NO: 751234
gacuuacucagauuucccu

SEQ ID NO: 751236 - RNA, 19 nt, Artificial Sequence
  Description of Artificial Sequence: Synthetic oligonucleotide
  Sense strand starting at position 1142 of SEQ ID NO: 586884
cuagguggcuucuuaaaga

SEQ ID NO: 751237 - RNA, 19 nt, Artificial Sequence
  Description of Artificial Sequence: Synthetic oligonucleotide
  Antisense strand to SEQ ID NO: 751236
ucuuuaagaagccaccuag

SEQ ID NO: 751238 - RNA, 19 nt, Artificial Sequence
  Description of Artificial Sequence: Synthetic oligonucleotide
  Sense strand starting at position 1272 of SEQ ID NO: 586884
aggaaaucguaucugaaca

SEQ ID NO: 751239 - RNA, 19 nt, Artificial Sequence
  Description of Artificial Sequence: Synthetic oligonucleotide
  Antisense strand to SEQ ID NO: 751238
uguucagauacgauuuccu

SEQ ID NO: 751240 - RNA, 19 nt, Artificial Sequence
  Description of Artificial Sequence: Synthetic oligonucleotide
  Sense strand starting at position 1273 of SEQ ID NO: 586884
ggaaaucguaucugaacac

SEQ ID NO: 751241 - RNA, 19 nt, Artificial Sequence
  Description of Artificial Sequence: Synthetic oligonucleotide
  Antisense strand to SEQ ID NO: 751240
guguucagauacgauuucc

SEQ ID NO: 751242 - RNA, 19 nt, Artificial Sequence
  Description of Artificial Sequence: Synthetic oligonucleotide
  Sense strand starting at position 1303 of SEQ ID NO: 586884
gucaauauugaagguucuu

SEQ ID NO: 751243 - RNA, 19 nt, Artificial Sequence
  Description of Artificial Sequence: Synthetic oligonucleotide
  Antisense strand to SEQ ID NO: 751242
aagaaccuucaauauugac

SEQ ID NO: 751244 - RNA, 19 nt, Artificial Sequence
  Description of Artificial Sequence: Synthetic oligonucleotide
  Sense strand starting at position 1346 of SEQ ID NO: 586884
gaggguguccaggaguauu

SEQ ID NO: 751245 - RNA, 19 nt, Artificial Sequence
  Description of Artificial Sequence: Synthetic oligonucleotide
  Antisense strand to SEQ ID NO: 751244
aauacuccuggacacccuc

SEQ ID NO: 751246 - RNA, 19 nt, Artificial Sequence
  Description of Artificial Sequence: Synthetic oligonucleotide
  Sense strand starting at position 1356 of SEQ ID NO: 586884
aggaguauuaagugcugga

SEQ ID NO: 751247 - RNA, 19 nt, Artificial Sequence
  Description of Artificial Sequence: Synthetic oligonucleotide
  Antisense strand to SEQ ID NO: 751246
uccagcacuuaauacuccu

SEQ ID NO: 751248 - RNA, 19 nt, Artificial Sequence
  Description of Artificial Sequence: Synthetic oligonucleotide
  Sense strand starting at position 1360 of SEQ ID NO: 586884
guauuaagugcuggagaca

SEQ ID NO: 751249 - RNA, 19 nt, Artificial Sequence
  Description of Artificial Sequence: Synthetic oligonucleotide
  Antisense strand to SEQ ID NO: 751248
ugucuccagcacuuaauac

SEQ ID NO: 751250 - RNA, 19 nt, Artificial Sequence
  Description of Artificial Sequence: Synthetic oligonucleotide
  Sense strand starting at position 2381 of SEQ ID NO: 586884
gcccuuucgccugcgaaag

SEQ ID NO: 751251 - RNA, 19 nt, Artificial Sequence
  Description of Artificial Sequence: Synthetic oligonucleotide
  Antisense strand to SEQ ID NO: 751250
cuuucgcaggcgaaagggc

SEQ ID NO: 751252 - RNA, 19 nt, Artificial Sequence
  Description of Artificial Sequence: Synthetic oligonucleotide
  Sense strand starting at position 2480 of SEQ ID NO: 586884
ggugcagaauucccagaau

SEQ ID NO: 751253 - RNA, 19 nt, Artificial Sequence
  Description of Artificial Sequence: Synthetic oligonucleotide
  Antisense strand to SEQ ID NO: 751252
auucugggaauucugcacc

SEQ ID NO: 751254 - RNA, 19 nt, Artificial Sequence
  Description of Artificial Sequence: Synthetic oligonucleotide
  Sense strand starting at position 2483 of SEQ ID NO: 586884
gcagaauucccagaaucuc

SEQ ID NO: 751255 - RNA, 19 nt, Artificial Sequence
  Description of Artificial Sequence: Synthetic oligonucleotide
  Antisense strand to SEQ ID NO: 751254
gagauucugggaauucugc

SEQ ID NO: 751256 - RNA, 19 nt, Artificial Sequence
  Description of Artificial Sequence: Synthetic oligonucleotide
  Sense strand starting at position 2666 of SEQ ID NO: 586884
aucuuuacuccugggaacu

SEQ ID NO: 751257 - RNA, 19 nt, Artificial Sequence
  Description of Artificial Sequence: Synthetic oligonucleotide
  Antisense strand to SEQ ID NO: 751256
aguucccaggaguaaagau

SEQ ID NO: 751258 - RNA, 19 nt, Artificial Sequence
  Description of Artificial Sequence: Synthetic oligonucleotide
  Sense strand starting at position 2667 of SEQ ID NO: 586884
ucuuuacuccugggaacug

SEQ ID NO: 751259 - RNA, 19 nt, Artificial Sequence
  Description of Artificial Sequence: Synthetic oligonucleotide
  Antisense strand to SEQ ID NO: 751258
caguucccaggaguaaaga

SEQ ID NO: 751260 - RNA, 19 nt, Artificial Sequence
  Description of Artificial Sequence: Synthetic oligonucleotide
  Sense strand starting at position 2804 of SEQ ID NO: 586884
guugguuaugauagguguu

SEQ ID NO: 751261 - RNA, 19 nt, Artificial Sequence
  Description of Artificial Sequence: Synthetic oligonucleotide
  Antisense strand to SEQ ID NO: 751260
aacaccuaucauaaccaac

SEQ ID NO: 751262 - RNA, 19 nt, Artificial Sequence
  Description of Artificial Sequence: Synthetic oligonucleotide
  Sense strand starting at position 2806 of SEQ ID NO: 586884
ugguuaugauagguguuga

SEQ ID NO: 751263 - RNA, 19 nt, Artificial Sequence
  Description of Artificial Sequence: Synthetic oligonucleotide
  Antisense strand to SEQ ID NO: 751262
ucaacaccuaucauaacca

SEQ ID NO: 751264 - RNA, 19 nt, Artificial Sequence
  Description of Artificial Sequence: Synthetic oligonucleotide
  Sense strand starting at position 2807 of SEQ ID NO: 586884
gguuaugauagguguugag

SEQ ID NO: 751265 - RNA, 19 nt, Artificial Sequence
  Description of Artificial Sequence: Synthetic oligonucleotide
  Antisense strand to SEQ ID NO: 751264
cucaacaccuaucauaacc

SEQ ID NO: 751266 - RNA, 19 nt, Artificial Sequence
  Description of Artificial Sequence: Synthetic oligonucleotide
  Sense strand starting at position 2811 of SEQ ID NO: 586884
augauagguguugagcaga

SEQ ID NO: 751267 - RNA, 19 nt, Artificial Sequence
  Description of Artificial Sequence: Synthetic oligonucleotide
  Antisense strand to SEQ ID NO: 751266
ucugcucaacaccuaucau

SEQ ID NO: 751268 - RNA, 19 nt, Artificial Sequence
  Description of Artificial Sequence: Synthetic oligonucleotide
  Sense strand starting at position 2814 of SEQ ID NO: 586884
auagguguugagcagagua

SEQ ID NO: 751269 - RNA, 19 nt, Artificial Sequence
  Description of Artificial Sequence: Synthetic oligonucleotide
  Antisense strand to SEQ ID NO: 751268
uacucugcucaacaccuau

SEQ ID NO: 751270 - RNA, 19 nt, Artificial Sequence
  Description of Artificial Sequence: Synthetic oligonucleotide
  Sense strand starting at position 2843 of SEQ ID NO: 586884
uggugaccugaaggugaau

SEQ ID NO: 751271 - RNA, 19 nt, Artificial Sequence
  Description of Artificial Sequence: Synthetic oligonucleotide
  Antisense strand to SEQ ID NO: 751270
auucaccuucaggucacca

SEQ ID NO: 751272 - RNA, 19 nt, Artificial Sequence
  Description of Artificial Sequence: Synthetic oligonucleotide
  Sense strand starting at position 2852 of SEQ ID NO: 586884
gaaggugaaucucuguuag

SEQ ID NO: 751273 - RNA, 19 nt, Artificial Sequence
  Description of Artificial Sequence: Synthetic oligonucleotide
  Antisense strand to SEQ ID NO: 751272
cuaacagagauucaccuuc

SEQ ID NO: 751274 - RNA, 19 nt, Artificial Sequence
  Description of Artificial Sequence: Synthetic oligonucleotide
  Sense strand starting at position 2910 of SEQ ID NO: 586884
gaugaaugugcuuggugaa

SEQ ID NO: 751275 - RNA, 19 nt, Artificial Sequence
  Description of Artificial Sequence: Synthetic oligonucleotide
  Antisense strand to SEQ ID NO: 751274
uucaccaagcacauucauc

SEQ ID NO: 751276 - RNA, 19 nt, Artificial Sequence
  Description of Artificial Sequence: Synthetic oligonucleotide
  Sense strand starting at position 2948 of SEQ ID NO: 586884
ugugaaucauuguuuacac

SEQ ID NO: 751277 - RNA, 19 nt, Artificial Sequence
  Description of Artificial Sequence: Synthetic oligonucleotide
  Antisense strand to SEQ ID NO: 751276
guguaaacaaugauucaca

SEQ ID NO: 751278 - RNA, 19 nt, Artificial Sequence
  Description of Artificial Sequence: Synthetic oligonucleotide
  Sense strand starting at position 2999 of SEQ ID NO: 586884
gagugaaacuauuccagca

SEQ ID NO: 751279 - RNA, 19 nt, Artificial Sequence
  Description of Artificial Sequence: Synthetic oligonucleotide
  Antisense strand to SEQ ID NO: 751278
ugcuggaauaguuucacuc

SEQ ID NO: 751280 - RNA, 19 nt, Artificial Sequence
  Description of Artificial Sequence: Synthetic oligonucleotide
  Sense strand starting at position 3252 of SEQ ID NO: 586884
cuuggcaaauauguauaaa

SEQ ID NO: 751281 - RNA, 19 nt, Artificial Sequence
  Description of Artificial Sequence: Synthetic oligonucleotide
  Antisense strand to SEQ ID NO: 751280
uuuauacauauuugccaag

SEQ ID NO: 751282 - RNA, 19 nt, Artificial Sequence
  Description of Artificial Sequence: Synthetic oligonucleotide
  Sense strand starting at position 3399 of SEQ ID NO: 586884
caaguaaguguagguaaga

SEQ ID NO: 751283 - RNA, 19 nt, Artificial Sequence
  Description of Artificial Sequence: Synthetic oligonucleotide
  Antisense strand to SEQ ID NO: 751282
ucuuaccuacacuuacuug

SEQ ID NO: 751284 - RNA, 19 nt, Artificial Sequence
  Description of Artificial Sequence: Synthetic oligonucleotide
  Sense strand starting at position 3541 of SEQ ID NO: 586884
gaggguagguguccuucaa

SEQ ID NO: 751285 - RNA, 19 nt, Artificial Sequence
  Description of Artificial Sequence: Synthetic oligonucleotide
  Antisense strand to SEQ ID NO: 751284
uugaaggacaccuacccuc

SEQ ID NO: 751286 - RNA, 19 nt, Artificial Sequence
  Description of Artificial Sequence: Synthetic oligonucleotide
  Sense strand starting at position 3545 of SEQ ID NO: 586884
guagguguccuucaaguaa

SEQ ID NO: 751287 - RNA, 19 nt, Artificial Sequence
  Description of Artificial Sequence: Synthetic oligonucleotide
  Antisense strand to SEQ ID NO: 751286
uuacuugaaggacaccuac

SEQ ID NO: 751288 - RNA, 19 nt, Artificial Sequence
  Description of Artificial Sequence: Synthetic oligonucleotide
  Sense strand starting at position 114 of SEQ ID NO: 586885
ggcccugaugcuugagaga

SEQ ID NO: 751289 - RNA, 19 nt, Artificial Sequence
  Description of Artificial Sequence: Synthetic oligonucleotide
  Antisense strand to SEQ ID NO: 751288
ucucucaagcaucagggcc

SEQ ID NO: 751290 - RNA, 19 nt, Artificial Sequence
  Description of Artificial Sequence: Synthetic oligonucleotide
  Sense strand starting at position 149 of SEQ ID NO: 586885
ugagcccugcucugaugaa

SEQ ID NO: 751291 - RNA, 19 nt, Artificial Sequence
  Description of Artificial Sequence: Synthetic oligonucleotide
  Antisense strand to SEQ ID NO: 751290
uucaucagagcagggcuca

SEQ ID NO: 751292 - RNA, 19 nt, Artificial Sequence
  Description of Artificial Sequence: Synthetic oligonucleotide
  Sense strand starting at position 153 of SEQ ID NO: 586885
cccugcucugaugaagaua

SEQ ID NO: 751293 - RNA, 19 nt, Artificial Sequence
  Description of Artificial Sequence: Synthetic oligonucleotide
  Antisense strand to SEQ ID NO: 751292
uaucuucaucagagcaggg

SEQ ID NO: 751294 - RNA, 19 nt, Artificial Sequence
  Description of Artificial Sequence: Synthetic oligonucleotide
  Sense strand starting at position 156 of SEQ ID NO: 586885
ugcucugaugaagauaagu

SEQ ID NO: 751295 - RNA, 19 nt, Artificial Sequence
  Description of Artificial Sequence: Synthetic oligonucleotide
  Antisense strand to SEQ ID NO: 751294
acuuaucuucaucagagca

SEQ ID NO: 751296 - RNA, 19 nt, Artificial Sequence
  Description of Artificial Sequence: Synthetic oligonucleotide
  Sense strand starting at position 809 of SEQ ID NO: 586885
cgggcgggugcuugugaaa

SEQ ID NO: 751297 - RNA, 19 nt, Artificial Sequence
  Description of Artificial Sequence: Synthetic oligonucleotide
  Antisense strand to SEQ ID NO: 751296
uuucacaagcacccgcccg

SEQ ID NO: 751298 - RNA, 19 nt, Artificial Sequence
  Description of Artificial Sequence: Synthetic oligonucleotide
  Sense strand starting at position 812 of SEQ ID NO: 586885
gcgggugcuugugaaauuc

SEQ ID NO: 751299 - RNA, 19 nt, Artificial Sequence
  Description of Artificial Sequence: Synthetic oligonucleotide
  Antisense strand to SEQ ID NO: 751298
gaauuucacaagcacccgc

SEQ ID NO: 751300 - RNA, 19 nt, Artificial Sequence
  Description of Artificial Sequence: Synthetic oligonucleotide
  Sense strand starting at position 1079 of SEQ ID NO: 586885
ggugaaggagccuggaaau

SEQ ID NO: 751301 - RNA, 19 nt, Artificial Sequence
  Description of Artificial Sequence: Synthetic oligonucleotide
  Antisense strand to SEQ ID NO: 751300
auuuccaggcuccuucacc

SEQ ID NO: 751302 - RNA, 19 nt, Artificial Sequence
  Description of Artificial Sequence: Synthetic oligonucleotide
  Sense strand starting at position 1812 of SEQ ID NO: 586885
ggguggucgccuuagagca

SEQ ID NO: 751303 - RNA, 19 nt, Artificial Sequence
  Description of Artificial Sequence: Synthetic oligonucleotide
  Antisense strand to SEQ ID NO: 751302
ugcucuaaggcgaccaccc

SEQ ID NO: 751304 - RNA, 19 nt, Artificial Sequence
  Description of Artificial Sequence: Synthetic oligonucleotide
  Sense strand starting at position 1813 of SEQ ID NO: 586885
gguggucgccuuagagcaa

SEQ ID NO: 751305 - RNA, 19 nt, Artificial Sequence
  Description of Artificial Sequence: Synthetic oligonucleotide
  Antisense strand to SEQ ID NO: 751304
uugcucuaaggcgaccacc

SEQ ID NO: 751306 - RNA, 19 nt, Artificial Sequence
  Description of Artificial Sequence: Synthetic oligonucleotide
  Sense strand starting at position 2476 of SEQ ID NO: 586885
gaaggaaggucucuccuuu

SEQ ID NO: 751307 - RNA, 19 nt, Artificial Sequence
  Description of Artificial Sequence: Synthetic oligonucleotide
  Antisense strand to SEQ ID NO: 751306
aaaggagagaccuuccuuc

SEQ ID NO: 751308 - RNA, 19 nt, Artificial Sequence
  Description of Artificial Sequence: Synthetic oligonucleotide
  Sense strand starting at position 2519 of SEQ ID NO: 586885
cuugaucgacagcaaagau

SEQ ID NO: 751309 - RNA, 19 nt, Artificial Sequence
  Description of Artificial Sequence: Synthetic oligonucleotide
  Antisense strand to SEQ ID NO: 751308
aucuuugcugucgaucaag

SEQ ID NO: 751310 - RNA, 19 nt, Artificial Sequence
  Description of Artificial Sequence: Synthetic oligonucleotide
  Sense strand starting at position 2532 of SEQ ID NO: 586885
aaagauguccaguguguau

SEQ ID NO: 751311 - RNA, 19 nt, Artificial Sequence
  Description of Artificial Sequence: Synthetic oligonucleotide
  Antisense strand to SEQ ID NO: 751310
auacacacuggacaucuuu

SEQ ID NO: 751312 - RNA, 19 nt, Artificial Sequence
  Description of Artificial Sequence: Synthetic oligonucleotide
  Sense strand starting at position 2585 of SEQ ID NO: 586885
ccauucuccgugggauaga

SEQ ID NO: 751313 - RNA, 19 nt, Artificial Sequence
  Description of Artificial Sequence: Synthetic oligonucleotide
  Antisense strand to SEQ ID NO: 751312
ucuaucccacggagaaugg

SEQ ID NO: 751314 - RNA, 19 nt, Artificial Sequence
  Description of Artificial Sequence: Synthetic oligonucleotide
  Sense strand starting at position 2586 of SEQ ID NO: 586885
cauucuccgugggauagau

SEQ ID NO: 751315 - RNA, 19 nt, Artificial Sequence
  Description of Artificial Sequence: Synthetic oligonucleotide
  Antisense strand to SEQ ID NO: 751314
aucuaucccacggagaaug

SEQ ID NO: 751316 - RNA, 19 nt, Artificial Sequence
  Description of Artificial Sequence: Synthetic oligonucleotide
  Sense strand starting at position 2730 of SEQ ID NO: 586885
ugaagaagcucugagacuu

SEQ ID NO: 751317 - RNA, 19 nt, Artificial Sequence
  Description of Artificial Sequence: Synthetic oligonucleotide
  Antisense strand to SEQ ID NO: 751316
aagucucagagcuucuuca

SEQ ID NO: 751318 - RNA, 19 nt, Artificial Sequence
  Description of Artificial Sequence: Synthetic oligonucleotide
  Sense strand starting at position 2741 of SEQ ID NO: 586885
ugagacuuugcacgucagu

SEQ ID NO: 751319 - RNA, 19 nt, Artificial Sequence
  Description of Artificial Sequence: Synthetic oligonucleotide
  Antisense strand to SEQ ID NO: 751318
acugacgugcaaagucuca

SEQ ID NO: 751320 - RNA, 19 nt, Artificial Sequence
  Description of Artificial Sequence: Synthetic oligonucleotide
  Sense strand starting at position 2808 of SEQ ID NO: 586885
aguagaggaucucauguaa

SEQ ID NO: 751321 - RNA, 19 nt, Artificial Sequence
  Description of Artificial Sequence: Synthetic oligonucleotide
  Antisense strand to SEQ ID NO: 751320
uuacaugagauccucuacu

SEQ ID NO: 751322 - RNA, 19 nt, Artificial Sequence
  Description of Artificial Sequence: Synthetic oligonucleotide
  Sense strand starting at position 2878 of SEQ ID NO: 586885
gaaacucugucuuaaggag

SEQ ID NO: 751323 - RNA, 19 nt, Artificial Sequence
  Description of Artificial Sequence: Synthetic oligonucleotide
  Antisense strand to SEQ ID NO: 751322
cuccuuaagacagaguuuc

SEQ ID NO: 751324 - RNA, 19 nt, Artificial Sequence
  Description of Artificial Sequence: Synthetic oligonucleotide
  Sense strand starting at position 3044 of SEQ ID NO: 586885
gaaagaaacucggcuucca

SEQ ID NO: 751325 - RNA, 19 nt, Artificial Sequence
  Description of Artificial Sequence: Synthetic oligonucleotide
  Antisense strand to SEQ ID NO: 751324
uggaagccgaguuucuuuc

SEQ ID NO: 751326 - RNA, 19 nt, Artificial Sequence
  Description of Artificial Sequence: Synthetic oligonucleotide
  Sense strand starting at position 3069 of SEQ ID NO: 586885
acuuccaggugucugaaau

SEQ ID NO: 751327 - RNA, 19 nt, Artificial Sequence
  Description of Artificial Sequence: Synthetic oligonucleotide
  Antisense strand to SEQ ID NO: 751326
auuucagacaccuggaagu

SEQ ID NO: 751328 - RNA, 19 nt, Artificial Sequence
  Description of Artificial Sequence: Synthetic oligonucleotide
  Sense strand starting at position 3070 of SEQ ID NO: 586885
cuuccaggugucugaaauc

SEQ ID NO: 751329 - RNA, 19 nt, Artificial Sequence
  Description of Artificial Sequence: Synthetic oligonucleotide
  Antisense strand to SEQ ID NO: 751328
gauuucagacaccuggaag

SEQ ID NO: 751330 - RNA, 19 nt, Artificial Sequence
  Description of Artificial Sequence: Synthetic oligonucleotide
  Sense strand starting at position 3158 of SEQ ID NO: 586885
ggauccguguucccugaaa

SEQ ID NO: 751331 - RNA, 19 nt, Artificial Sequence
  Description of Artificial Sequence: Synthetic oligonucleotide
  Antisense strand to SEQ ID NO: 751330
uuucagggaacacggaucc

SEQ ID NO: 751332 - RNA, 19 nt, Artificial Sequence
  Description of Artificial Sequence: Synthetic oligonucleotide
  Sense strand starting at position 3160 of SEQ ID NO: 586885
auccguguucccugaaagc

SEQ ID NO: 751333 - RNA, 19 nt, Artificial Sequence
  Description of Artificial Sequence: Synthetic oligonucleotide
  Antisense strand to SEQ ID NO: 751332
gcuuucagggaacacggau

SEQ ID NO: 751334 - RNA, 19 nt, Artificial Sequence
  Description of Artificial Sequence: Synthetic oligonucleotide
  Sense strand starting at position 3289 of SEQ ID NO: 586885
gguggcuguucagaauggu

SEQ ID NO: 751335 - RNA, 19 nt, Artificial Sequence
  Description of Artificial Sequence: Synthetic oligonucleotide
  Antisense strand to SEQ ID NO: 751334
accauucugaacagccacc

SEQ ID NO: 751336 - RNA, 19 nt, Artificial Sequence
  Description of Artificial Sequence: Synthetic oligonucleotide
  Sense strand starting at position 3295 of SEQ ID NO: 586885
uguucagaaugguuggaaa

SEQ ID NO: 751337 - RNA, 19 nt, Artificial Sequence
  Description of Artificial Sequence: Synthetic oligonucleotide
  Antisense strand to SEQ ID NO: 751336
uuuccaaccauucugaaca

SEQ ID NO: 751338 - RNA, 19 nt, Artificial Sequence
  Description of Artificial Sequence: Synthetic oligonucleotide
  Sense strand starting at position 3298 of SEQ ID NO: 586885
ucagaaugguuggaaauag

SEQ ID NO: 751339 - RNA, 19 nt, Artificial Sequence
  Description of Artificial Sequence: Synthetic oligonucleotide
  Antisense strand to SEQ ID NO: 751338
cuauuuccaaccauucuga

SEQ ID NO: 751340 - RNA, 19 nt, Artificial Sequence
  Description of Artificial Sequence: Synthetic oligonucleotide
  Sense strand starting at position 3363 of SEQ ID NO: 586885
ggaaaucugcauugaugua

SEQ ID NO: 751341 - RNA, 19 nt, Artificial Sequence
  Description of Artificial Sequence: Synthetic oligonucleotide
  Antisense strand to SEQ ID NO: 751340
uacaucaaugcagauuucc

SEQ ID NO: 751342 - RNA, 19 nt, Artificial Sequence
  Description of Artificial Sequence: Synthetic oligonucleotide
  Sense strand starting at position 3396 of SEQ ID NO: 586885
gaggcucucccuugucuaa

SEQ ID NO: 751343 - RNA, 19 nt, Artificial Sequence
  Description of Artificial Sequence: Synthetic oligonucleotide
  Antisense strand to SEQ ID NO: 751342
uuagacaagggagagccuc

SEQ ID NO: 751344 - RNA, 19 nt, Artificial Sequence
  Description of Artificial Sequence: Synthetic oligonucleotide
  Sense strand starting at position 3408 of SEQ ID NO: 586885
ugucuaacucuaggaaaga

SEQ ID NO: 751345 - RNA, 19 nt, Artificial Sequence
  Description of Artificial Sequence: Synthetic oligonucleotide
  Antisense strand to SEQ ID NO: 751344
ucuuuccuagaguuagaca

SEQ ID NO: 751346 - RNA, 19 nt, Artificial Sequence
  Description of Artificial Sequence: Synthetic oligonucleotide
  Sense strand starting at position 3409 of SEQ ID NO: 586885
gucuaacucuaggaaagau

SEQ ID NO: 751347 - RNA, 19 nt, Artificial Sequence
  Description of Artificial Sequence: Synthetic oligonucleotide
  Antisense strand to SEQ ID NO: 751346
aucuuuccuagaguuagac

SEQ ID NO: 751348 - RNA, 19 nt, Artificial Sequence
  Description of Artificial Sequence: Synthetic oligonucleotide
  Sense strand starting at position 3437 of SEQ ID NO: 586885
ggcugacaccuuuacagau

SEQ ID NO: 751349 - RNA, 19 nt, Artificial Sequence
  Description of Artificial Sequence: Synthetic oligonucleotide
  Antisense strand to SEQ ID NO: 751348
aucuguaaaggugucagcc

SEQ ID NO: 751350 - RNA, 19 nt, Artificial Sequence
  Description of Artificial Sequence: Synthetic oligonucleotide
  Sense strand starting at position 3446 of SEQ ID NO: 586885
cuuuacagaucugaaagaa

SEQ ID NO: 751351 - RNA, 19 nt, Artificial Sequence
  Description of Artificial Sequence: Synthetic oligonucleotide
  Antisense strand to SEQ ID NO: 751350
uucuuucagaucuguaaag

SEQ ID NO: 751352 - RNA, 19 nt, Artificial Sequence
  Description of Artificial Sequence: Synthetic oligonucleotide
  Sense strand starting at position 3505 of SEQ ID NO: 586885
ggugucaucuaccuaacaa

SEQ ID NO: 751353 - RNA, 19 nt, Artificial Sequence
  Description of Artificial Sequence: Synthetic oligonucleotide
  Antisense strand to SEQ ID NO: 751352
uuguuagguagaugacacc

SEQ ID NO: 751354 - RNA, 19 nt, Artificial Sequence
  Description of Artificial Sequence: Synthetic oligonucleotide
  Sense strand starting at position 3569 of SEQ ID NO: 586885
cugucuugccacuaucuga

SEQ ID NO: 751355 - RNA, 19 nt, Artificial Sequence
  Description of Artificial Sequence: Synthetic oligonucleotide
  Antisense strand to SEQ ID NO: 751354
ucagauaguggcaagacag

SEQ ID NO: 751356 - RNA, 19 nt, Artificial Sequence
  Description of Artificial Sequence: Synthetic oligonucleotide
  Sense strand starting at position 3605 of SEQ ID NO: 586885
aacucaagaugguggauaa

SEQ ID NO: 751357 - RNA, 19 nt, Artificial Sequence
  Description of Artificial Sequence: Synthetic oligonucleotide
  Antisense strand to SEQ ID NO: 751356
uuauccaccaucuugaguu

SEQ ID NO: 751358 - RNA, 19 nt, Artificial Sequence
  Description of Artificial Sequence: Synthetic oligonucleotide
  Sense strand starting at position 3649 of SEQ ID NO: 586885
ggguaaucacuuugugguu

SEQ ID NO: 751359 - RNA, 19 nt, Artificial Sequence
  Description of Artificial Sequence: Synthetic oligonucleotide
  Antisense strand to SEQ ID NO: 751358
aaccacaaagugauuaccc

SEQ ID NO: 751360 - RNA, 19 nt, Artificial Sequence
  Description of Artificial Sequence: Synthetic oligonucleotide
  Sense strand starting at position 3668 of SEQ ID NO: 586885
cucucucauguauguuaau

SEQ ID NO: 751361 - RNA, 19 nt, Artificial Sequence
  Description of Artificial Sequence: Synthetic oligonucleotide
  Antisense strand to SEQ ID NO: 751360
auuaacauacaugagagag

SEQ ID NO: 751362 - RNA, 19 nt, Artificial Sequence
  Description of Artificial Sequence: Synthetic oligonucleotide
  Sense strand starting at position 3669 of SEQ ID NO: 586885
ucucucauguauguuaaua

SEQ ID NO: 751363 - RNA, 19 nt, Artificial Sequence
  Description of Artificial Sequence: Synthetic oligonucleotide
  Antisense strand to SEQ ID NO: 751362
uauuaacauacaugagaga

SEQ ID NO: 751364 - RNA, 19 nt, Artificial Sequence
  Description of Artificial Sequence: Synthetic oligonucleotide
  Sense strand starting at position 3748 of SEQ ID NO: 586885
gugagcucugaucaugaaa

SEQ ID NO: 751365 - RNA, 19 nt, Artificial Sequence
  Description of Artificial Sequence: Synthetic oligonucleotide
  Antisense strand to SEQ ID NO: 751364
uuucaugaucagagcucac

SEQ ID NO: 751366 - RNA, 19 nt, Artificial Sequence
  Description of Artificial Sequence: Synthetic oligonucleotide
  Sense strand starting at position 3947 of SEQ ID NO: 586885
agagaaaucuuccaggaca

SEQ ID NO: 751367 - RNA, 19 nt, Artificial Sequence
  Description of Artificial Sequence: Synthetic oligonucleotide
  Antisense strand to SEQ ID NO: 751366
uguccuggaagauuucucu

SEQ ID NO: 751368 - RNA, 19 nt, Artificial Sequence
  Description of Artificial Sequence: Synthetic oligonucleotide
  Sense strand starting at position 3528 of SEQ ID NO: 586887
aggcuugagaucggaggau

SEQ ID NO: 751369 - RNA, 19 nt, Artificial Sequence
  Description of Artificial Sequence: Synthetic oligonucleotide
  Antisense strand to SEQ ID NO: 751368
auccuccgaucucaagccu

SEQ ID NO: 751370 - RNA, 19 nt, Artificial Sequence
  Description of Artificial Sequence: Synthetic oligonucleotide
  Sense strand starting at position 284 of SEQ ID NO: 586889
guaguaaucagaugaguga

SEQ ID NO: 751371 - RNA, 19 nt, Artificial Sequence
  Description of Artificial Sequence: Synthetic oligonucleotide
  Antisense strand to SEQ ID NO: 751370
ucacucaucugauuacuac

SEQ ID NO: 751372 - RNA, 19 nt, Artificial Sequence
  Description of Artificial Sequence: Synthetic oligonucleotide
  Sense strand starting at position 297 of SEQ ID NO: 586889
gagugagacucucaugggu

SEQ ID NO: 751373 - RNA, 19 nt, Artificial Sequence
  Description of Artificial Sequence: Synthetic oligonucleotide
  Antisense strand to SEQ ID NO: 751372
acccaugagagucucacuc

SEQ ID NO: 751374 - RNA, 19 nt, Artificial Sequence
  Description of Artificial Sequence: Synthetic oligonucleotide
  Sense strand starting at position 299 of SEQ ID NO: 586889
gugagacucucauggguaa

SEQ ID NO: 751375 - RNA, 19 nt, Artificial Sequence
  Description of Artificial Sequence: Synthetic oligonucleotide
  Antisense strand to SEQ ID NO: 751374
uuacccaugagagucucac

SEQ ID NO: 751376 - RNA, 19 nt, Artificial Sequence
  Description of Artificial Sequence: Synthetic oligonucleotide
  Sense strand starting at position 407 of SEQ ID NO: 586889
ugguuugucuguuuguuga

SEQ ID NO: 751377 - RNA, 19 nt, Artificial Sequence
  Description of Artificial Sequence: Synthetic oligonucleotide
  Antisense strand to SEQ ID NO: 751376
ucaacaaacagacaaacca

SEQ ID NO: 751378 - RNA, 19 nt, Artificial Sequence
  Description of Artificial Sequence: Synthetic oligonucleotide
  Sense strand starting at position 411 of SEQ ID NO: 586889
uugucuguuuguugagaca

SEQ ID NO: 751379 - RNA, 19 nt, Artificial Sequence
  Description of Artificial Sequence: Synthetic oligonucleotide
  Antisense strand to SEQ ID NO: 751378
ugucucaacaaacagacaa

SEQ ID NO: 751380 - RNA, 19 nt, Artificial Sequence
  Description of Artificial Sequence: Synthetic oligonucleotide
  Sense strand starting at position 2188 of SEQ ID NO: 586889
cugauugaacuucgcauuu

SEQ ID NO: 751381 - RNA, 19 nt, Artificial Sequence
  Description of Artificial Sequence: Synthetic oligonucleotide
  Antisense strand to SEQ ID NO: 751380
aaaugcgaaguucaaucag

SEQ ID NO: 751382 - RNA, 19 nt, Artificial Sequence
  Description of Artificial Sequence: Synthetic oligonucleotide
  Sense strand starting at position 2190 of SEQ ID NO: 586889
gauugaacuucgcauuugu

SEQ ID NO: 751383 - RNA, 19 nt, Artificial Sequence
  Description of Artificial Sequence: Synthetic oligonucleotide
  Antisense strand to SEQ ID NO: 751382
acaaaugcgaaguucaauc

SEQ ID NO: 751384 - RNA, 19 nt, Artificial Sequence
  Description of Artificial Sequence: Synthetic oligonucleotide
  Sense strand starting at position 2262 of SEQ ID NO: 586889
caaggccucuggguuagaa

SEQ ID NO: 751385 - RNA, 19 nt, Artificial Sequence
  Description of Artificial Sequence: Synthetic oligonucleotide
  Antisense strand to SEQ ID NO: 751384
uucuaacccagaggccuug

SEQ ID NO: 751386 - RNA, 19 nt, Artificial Sequence
  Description of Artificial Sequence: Synthetic oligonucleotide
  Sense strand starting at position 2279 of SEQ ID NO: 586889
aaccgaguuucccauaaag

SEQ ID NO: 751387 - RNA, 19 nt, Artificial Sequence
  Description of Artificial Sequence: Synthetic oligonucleotide
  Antisense strand to SEQ ID NO: 751386
cuuuaugggaaacucgguu

SEQ ID NO: 751388 - RNA, 19 nt, Artificial Sequence
  Description of Artificial Sequence: Synthetic oligonucleotide
  Sense strand starting at position 2281 of SEQ ID NO: 586889
ccgaguuucccauaaagag

SEQ ID NO: 751389 - RNA, 19 nt, Artificial Sequence
  Description of Artificial Sequence: Synthetic oligonucleotide
  Antisense strand to SEQ ID NO: 751388
cucuuuaugggaaacucgg

SEQ ID NO: 751390 - RNA, 19 nt, Artificial Sequence
  Description of Artificial Sequence: Synthetic oligonucleotide
  Sense strand starting at position 2773 of SEQ ID NO: 586889
aagagauaccugugaucuc

SEQ ID NO: 751391 - RNA, 19 nt, Artificial Sequence
  Description of Artificial Sequence: Synthetic oligonucleotide
  Antisense strand to SEQ ID NO: 751390
gagaucacagguaucucuu

SEQ ID NO: 751392 - RNA, 19 nt, Artificial Sequence
  Description of Artificial Sequence: Synthetic oligonucleotide
  Sense strand starting at position 2774 of SEQ ID NO: 586889
agagauaccugugaucuca

SEQ ID NO: 751393 - RNA, 19 nt, Artificial Sequence
  Description of Artificial Sequence: Synthetic oligonucleotide
  Antisense strand to SEQ ID NO: 751392
ugagaucacagguaucucu

SEQ ID NO: 751394 - RNA, 19 nt, Artificial Sequence
  Description of Artificial Sequence: Synthetic oligonucleotide
  Sense strand starting at position 2841 of SEQ ID NO: 586889
gacucaaagucugucaaga

SEQ ID NO: 751395 - RNA, 19 nt, Artificial Sequence
  Description of Artificial Sequence: Synthetic oligonucleotide
  Antisense strand to SEQ ID NO: 751394
ucuugacagacuuugaguc

SEQ ID NO: 751396 - RNA, 19 nt, Artificial Sequence
  Description of Artificial Sequence: Synthetic oligonucleotide
  Sense strand starting at position 2843 of SEQ ID NO: 586889
cucaaagucugucaagagu

SEQ ID NO: 751397 - RNA, 19 nt, Artificial Sequence
  Description of Artificial Sequence: Synthetic oligonucleotide
  Antisense strand to SEQ ID NO: 751396
acucuugacagacuuugag

SEQ ID NO: 751398 - RNA, 19 nt, Artificial Sequence
  Description of Artificial Sequence: Synthetic oligonucleotide
  Sense strand starting at position 2870 of SEQ ID NO: 586889
gggccuccuacuugaguga

SEQ ID NO: 751399 - RNA, 19 nt, Artificial Sequence
  Description of Artificial Sequence: Synthetic oligonucleotide
  Antisense strand to SEQ ID NO: 751398
ucacucaaguaggaggccc

SEQ ID NO: 751400 - RNA, 19 nt, Artificial Sequence
  Description of Artificial Sequence: Synthetic oligonucleotide
  Sense strand starting at position 2874 of SEQ ID NO: 586889
cuccuacuugagugaccau

SEQ ID NO: 751401 - RNA, 19 nt, Artificial Sequence
  Description of Artificial Sequence: Synthetic oligonucleotide
  Antisense strand to SEQ ID NO: 751400
auggucacucaaguaggag

SEQ ID NO: 751402 - RNA, 19 nt, Artificial Sequence
  Description of Artificial Sequence: Synthetic oligonucleotide
  Sense strand starting at position 3084 of SEQ ID NO: 586889
agaguuaagcguuggcuga

SEQ ID NO: 751403 - RNA, 19 nt, Artificial Sequence
  Description of Artificial Sequence: Synthetic oligonucleotide
  Antisense strand to SEQ ID NO: 751402
ucagccaacgcuuaacucu

SEQ ID NO: 751404 - RNA, 19 nt, Artificial Sequence
  Description of Artificial Sequence: Synthetic oligonucleotide
  Sense strand starting at position 3085 of SEQ ID NO: 586889
gaguuaagcguuggcugaa

SEQ ID NO: 751405 - RNA, 19 nt, Artificial Sequence
  Description of Artificial Sequence: Synthetic oligonucleotide
  Antisense strand to SEQ ID NO: 751404
uucagccaacgcuuaacuc

SEQ ID NO: 751406 - RNA, 19 nt, Artificial Sequence
  Description of Artificial Sequence: Synthetic oligonucleotide
  Sense strand starting at position 3599 of SEQ ID NO: 586889
gugucagaaucuccagaaa

SEQ ID NO: 751407 - RNA, 19 nt, Artificial Sequence
  Description of Artificial Sequence: Synthetic oligonucleotide
  Antisense strand to SEQ ID NO: 751406
uuucuggagauucugacac

SEQ ID NO: 751408 - RNA, 19 nt, Artificial Sequence
  Description of Artificial Sequence: Synthetic oligonucleotide
  Sense strand starting at position 3695 of SEQ ID NO: 586889
uuuaaagugugucaaagaa

SEQ ID NO: 751409 - RNA, 19 nt, Artificial Sequence
  Description of Artificial Sequence: Synthetic oligonucleotide
  Antisense strand to SEQ ID NO: 751408
uucuuugacacacuuuaaa

SEQ ID NO: 751410 - RNA, 19 nt, Artificial Sequence
  Description of Artificial Sequence: Synthetic oligonucleotide
  Sense strand starting at position 3789 of SEQ ID NO: 586889
gauggaguuggguaucuua

SEQ ID NO: 751411 - RNA, 19 nt, Artificial Sequence
  Description of Artificial Sequence: Synthetic oligonucleotide
  Antisense strand to SEQ ID NO: 751410
uaagauacccaacuccauc

SEQ ID NO: 751412 - RNA, 19 nt, Artificial Sequence
  Description of Artificial Sequence: Synthetic oligonucleotide
  Sense strand starting at position 3796 of SEQ ID NO: 586889
uuggguaucuuacugauac

SEQ ID NO: 751413 - RNA, 19 nt, Artificial Sequence
  Description of Artificial Sequence: Synthetic oligonucleotide
  Antisense strand to SEQ ID NO: 751412
guaucaguaagauacccaa

SEQ ID NO: 751414 - RNA, 19 nt, Artificial Sequence
  Description of Artificial Sequence: Synthetic oligonucleotide
  Sense strand starting at position 3797 of SEQ ID NO: 586889
uggguaucuuacugauaca

SEQ ID NO: 751415 - RNA, 19 nt, Artificial Sequence
  Description of Artificial Sequence: Synthetic oligonucleotide
  Antisense strand to SEQ ID NO: 751414
uguaucaguaagauaccca

SEQ ID NO: 751416 - RNA, 19 nt, Artificial Sequence
  Description of Artificial Sequence: Synthetic oligonucleotide
  Sense strand starting at position 3800 of SEQ ID NO: 586889
guaucuuacugauacaaag

SEQ ID NO: 751417 - RNA, 19 nt, Artificial Sequence
  Description of Artificial Sequence: Synthetic oligonucleotide
  Antisense strand to SEQ ID NO: 751416
cuuuguaucaguaagauac

SEQ ID NO: 751418 - RNA, 19 nt, Artificial Sequence
  Description of Artificial Sequence: Synthetic oligonucleotide
  Sense strand starting at position 3833 of SEQ ID NO: 586889
gucuuaugaucuguauucu

SEQ ID NO: 751419 - RNA, 19 nt, Artificial Sequence
  Description of Artificial Sequence: Synthetic oligonucleotide
  Antisense strand to SEQ ID NO: 751418
agaauacagaucauaagac

SEQ ID NO: 751420 - RNA, 19 nt, Artificial Sequence
  Description of Artificial Sequence: Synthetic oligonucleotide
  Sense strand starting at position 3834 of SEQ ID NO: 586889
ucuuaugaucuguauucua

SEQ ID NO: 751421 - RNA, 19 nt, Artificial Sequence
  Description of Artificial Sequence: Synthetic oligonucleotide
  Antisense strand to SEQ ID NO: 751420
uagaauacagaucauaaga

SEQ ID NO: 751422 - RNA, 19 nt, Artificial Sequence
  Description of Artificial Sequence: Synthetic oligonucleotide
  Sense strand starting at position 3842 of SEQ ID NO: 586889
ucuguauucuaguguuaau

SEQ ID NO: 751423 - RNA, 19 nt, Artificial Sequence
  Description of Artificial Sequence: Synthetic oligonucleotide
  Antisense strand to SEQ ID NO: 751422
auuaacacuagaauacaga

SEQ ID NO: 751424 - RNA, 19 nt, Artificial Sequence
  Description of Artificial Sequence: Synthetic oligonucleotide
  Sense strand starting at position 3845 of SEQ ID NO: 586889
guauucuaguguuaauguu

SEQ ID NO: 751425 - RNA, 19 nt, Artificial Sequence
  Description of Artificial Sequence: Synthetic oligonucleotide
  Antisense strand to SEQ ID NO: 751424
aacauuaacacuagaauac

SEQ ID NO: 751426 - RNA, 19 nt, Artificial Sequence
  Description of Artificial Sequence: Synthetic oligonucleotide
  Sense strand starting at position 73 of SEQ ID NO: 586890
cucgaauucuggccucaag

SEQ ID NO: 751427 - RNA, 19 nt, Artificial Sequence
  Description of Artificial Sequence: Synthetic oligonucleotide
  Antisense strand to SEQ ID NO: 751426
cuugaggccagaauucgag

SEQ ID NO: 751428 - RNA, 19 nt, Artificial Sequence
  Description of Artificial Sequence: Synthetic oligonucleotide
  Sense strand starting at position 96 of SEQ ID NO: 586890
ccgccuuccuuggccaaua

SEQ ID NO: 751429 - RNA, 19 nt, Artificial Sequence
  Description of Artificial Sequence: Synthetic oligonucleotide
  Antisense strand to SEQ ID NO: 751428
uauuggccaaggaaggcgg

SEQ ID NO: 751430 - RNA, 19 nt, Artificial Sequence
  Description of Artificial Sequence: Synthetic oligonucleotide
  Sense strand starting at position 97 of SEQ ID NO: 586890
cgccuuccuuggccaauau

SEQ ID NO: 751431 - RNA, 19 nt, Artificial Sequence
  Description of Artificial Sequence: Synthetic oligonucleotide
  Antisense strand to SEQ ID NO: 751430
auauuggccaaggaaggcg

SEQ ID NO: 751432 - RNA, 19 nt, Artificial Sequence
  Description of Artificial Sequence: Synthetic oligonucleotide
  Sense strand starting at position 385 of SEQ ID NO: 586890
guaguaaucagaugaguga

SEQ ID NO: 751433 - RNA, 19 nt, Artificial Sequence
  Description of Artificial Sequence: Synthetic oligonucleotide
  Antisense strand to SEQ ID NO: 751432
ucacucaucugauuacuac

SEQ ID NO: 751434 - RNA, 19 nt, Artificial Sequence
  Description of Artificial Sequence: Synthetic oligonucleotide
  Sense strand starting at position 398 of SEQ ID NO: 586890
gagugagacucucaugggu

SEQ ID NO: 751435 - RNA, 19 nt, Artificial Sequence
  Description of Artificial Sequence: Synthetic oligonucleotide
  Antisense strand to SEQ ID NO: 751434
acccaugagagucucacuc

SEQ ID NO: 751436 - RNA, 19 nt, Artificial Sequence
  Description of Artificial Sequence: Synthetic oligonucleotide
  Sense strand starting at position 400 of SEQ ID NO: 586890
gugagacucucauggguaa

SEQ ID NO: 751437 - RNA, 19 nt, Artificial Sequence
  Description of Artificial Sequence: Synthetic oligonucleotide
  Antisense strand to SEQ ID NO: 751436
uuacccaugagagucucac

SEQ ID NO: 751438 - RNA, 19 nt, Artificial Sequence
  Description of Artificial Sequence: Synthetic oligonucleotide
  Sense strand starting at position 508 of SEQ ID NO: 586890
ugguuugucuguuuguuga

SEQ ID NO: 751439 - RNA, 19 nt, Artificial Sequence
  Description of Artificial Sequence: Synthetic oligonucleotide
  Antisense strand to SEQ ID NO: 751438
ucaacaaacagacaaacca

SEQ ID NO: 751440 - RNA, 19 nt, Artificial Sequence
  Description of Artificial Sequence: Synthetic oligonucleotide
  Sense strand starting at position 512 of SEQ ID NO: 586890
uugucuguuuguugagaca

SEQ ID NO: 751441 - RNA, 19 nt, Artificial Sequence
  Description of Artificial Sequence: Synthetic oligonucleotide
  Antisense strand to SEQ ID NO: 751440
ugucucaacaaacagacaa

SEQ ID NO: 751442 - RNA, 19 nt, Artificial Sequence
  Description of Artificial Sequence: Synthetic oligonucleotide
  Sense strand starting at position 2289 of SEQ ID NO: 586890
cugauugaacuucgcauuu

SEQ ID NO: 751443 - RNA, 19 nt, Artificial Sequence
  Description of Artificial Sequence: Synthetic oligonucleotide
  Antisense strand to SEQ ID NO: 751442
aaaugcgaaguucaaucag

SEQ ID NO: 751444 - RNA, 19 nt, Artificial Sequence
  Description of Artificial Sequence: Synthetic oligonucleotide
  Sense strand starting at position 2291 of SEQ ID NO: 586890
gauugaacuucgcauuugu

SEQ ID NO: 751445 - RNA, 19 nt, Artificial Sequence
  Description of Artificial Sequence: Synthetic oligonucleotide
  Antisense strand to SEQ ID NO: 751444
acaaaugcgaaguucaauc

SEQ ID NO: 751446 - RNA, 19 nt, Artificial Sequence
  Description of Artificial Sequence: Synthetic oligonucleotide
  Sense strand starting at position 2363 of SEQ ID NO: 586890
caaggccucuggguuagaa

SEQ ID NO: 751447 - RNA, 19 nt, Artificial Sequence
  Description of Artificial Sequence: Synthetic oligonucleotide
  Antisense strand to SEQ ID NO: 751446
uucuaacccagaggccuug

SEQ ID NO: 751448 - RNA, 19 nt, Artificial Sequence
  Description of Artificial Sequence: Synthetic oligonucleotide
  Sense strand starting at position 2380 of SEQ ID NO: 586890
aaccgaguuucccauaaag

SEQ ID NO: 751449 - RNA, 19 nt, Artificial Sequence
  Description of Artificial Sequence: Synthetic oligonucleotide
  Antisense strand to SEQ ID NO: 751448
cuuuaugggaaacucgguu

SEQ ID NO: 751450 - RNA, 19 nt, Artificial Sequence
  Description of Artificial Sequence: Synthetic oligonucleotide
  Sense strand starting at position 2382 of SEQ ID NO: 586890
ccgaguuucccauaaagag

SEQ ID NO: 751451 - RNA, 19 nt, Artificial Sequence
  Description of Artificial Sequence: Synthetic oligonucleotide
  Antisense strand to SEQ ID NO: 751450
cucuuuaugggaaacucgg

SEQ ID NO: 751452 - RNA, 19 nt, Artificial Sequence
  Description of Artificial Sequence: Synthetic oligonucleotide
  Sense strand starting at position 2874 of SEQ ID NO: 586890
aagagauaccugugaucuc

SEQ ID NO: 751453 - RNA, 19 nt, Artificial Sequence
  Description of Artificial Sequence: Synthetic oligonucleotide
  Antisense strand to SEQ ID NO: 751452
gagaucacagguaucucuu

SEQ ID NO: 751454 - RNA, 19 nt, Artificial Sequence
  Description of Artificial Sequence: Synthetic oligonucleotide
  Sense strand starting at position 2875 of SEQ ID NO: 586890
agagauaccugugaucuca

SEQ ID NO: 751455 - RNA, 19 nt, Artificial Sequence
  Description of Artificial Sequence: Synthetic oligonucleotide
  Antisense strand to SEQ ID NO: 751454
ugagaucacagguaucucu

SEQ ID NO: 751456 - RNA, 19 nt, Artificial Sequence
  Description of Artificial Sequence: Synthetic oligonucleotide
  Sense strand starting at position 2942 of SEQ ID NO: 586890
gacucaaagucugucaaga

SEQ ID NO: 751457 - RNA, 19 nt, Artificial Sequence
  Description of Artificial Sequence: Synthetic oligonucleotide
  Antisense strand to SEQ ID NO: 751456
ucuugacagacuuugaguc

SEQ ID NO: 751458 - RNA, 19 nt, Artificial Sequence
  Description of Artificial Sequence: Synthetic oligonucleotide
  Sense strand starting at position 2944 of SEQ ID NO: 586890
cucaaagucugucaagagu

SEQ ID NO: 751459 - RNA, 19 nt, Artificial Sequence
  Description of Artificial Sequence: Synthetic oligonucleotide
  Antisense strand to SEQ ID NO: 751458
acucuugacagacuuugag

SEQ ID NO: 751460 - RNA, 19 nt, Artificial Sequence
  Description of Artificial Sequence: Synthetic oligonucleotide
  Sense strand starting at position 2971 of SEQ ID NO: 586890
gggccuccuacuugaguga

SEQ ID NO: 751461 - RNA, 19 nt, Artificial Sequence
  Description of Artificial Sequence: Synthetic oligonucleotide
  Antisense strand to SEQ ID NO: 751460
ucacucaaguaggaggccc

SEQ ID NO: 751462 - RNA, 19 nt, Artificial Sequence
  Description of Artificial Sequence: Synthetic oligonucleotide
  Sense strand starting at position 2975 of SEQ ID NO: 586890
cuccuacuugagugaccau

SEQ ID NO: 751463 - RNA, 19 nt, Artificial Sequence
  Description of Artificial Sequence: Synthetic oligonucleotide
  Antisense strand to SEQ ID NO: 751462
auggucacucaaguaggag

SEQ ID NO: 751464 - RNA, 19 nt, Artificial Sequence
  Description of Artificial Sequence: Synthetic oligonucleotide
  Sense strand starting at position 3185 of SEQ ID NO: 586890
agaguuaagcguuggcuga

SEQ ID NO: 751465 - RNA, 19 nt, Artificial Sequence
  Description of Artificial Sequence: Synthetic oligonucleotide
  Antisense strand to SEQ ID NO: 751464
ucagccaacgcuuaacucu

SEQ ID NO: 751466 - RNA, 19 nt, Artificial Sequence
  Description of Artificial Sequence: Synthetic oligonucleotide
  Sense strand starting at position 3186 of SEQ ID NO: 586890
gaguuaagcguuggcugaa

SEQ ID NO: 751467 - RNA, 19 nt, Artificial Sequence
  Description of Artificial Sequence: Synthetic oligonucleotide
  Antisense strand to SEQ ID NO: 751466
uucagccaacgcuuaacuc

SEQ ID NO: 751468 - RNA, 19 nt, Artificial Sequence
  Description of Artificial Sequence: Synthetic oligonucleotide
  Sense strand starting at position 3700 of SEQ ID NO: 586890
gugucagaaucuccagaaa

SEQ ID NO: 751469 - RNA, 19 nt, Artificial Sequence
  Description of Artificial Sequence: Synthetic oligonucleotide
  Antisense strand to SEQ ID NO: 751468
uuucuggagauucugacac

SEQ ID NO: 751470 - RNA, 19 nt, Artificial Sequence
  Description of Artificial Sequence: Synthetic oligonucleotide
  Sense strand starting at position 3796 of SEQ ID NO: 586890
uuuaaagugugucaaagaa

SEQ ID NO: 751471 - RNA, 19 nt, Artificial Sequence
  Description of Artificial Sequence: Synthetic oligonucleotide
  Antisense strand to SEQ ID NO: 751470
uucuuugacacacuuuaaa

SEQ ID NO: 751472 - RNA, 19 nt, Artificial Sequence
  Description of Artificial Sequence: Synthetic oligonucleotide
  Sense strand starting at position 3890 of SEQ ID NO: 586890
gauggaguuggguaucuua

SEQ ID NO: 751473 - RNA, 19 nt, Artificial Sequence
  Description of Artificial Sequence: Synthetic oligonucleotide
  Antisense strand to SEQ ID NO: 751472
uaagauacccaacuccauc

SEQ ID NO: 751474 - RNA, 19 nt, Artificial Sequence
  Description of Artificial Sequence: Synthetic oligonucleotide
  Sense strand starting at position 3897 of SEQ ID NO: 586890
uuggguaucuuacugauac

SEQ ID NO: 751475 - RNA, 19 nt, Artificial Sequence
  Description of Artificial Sequence: Synthetic oligonucleotide
  Antisense strand to SEQ ID NO: 751474
guaucaguaagauacccaa

SEQ ID NO: 751476 - RNA, 19 nt, Artificial Sequence
  Description of Artificial Sequence: Synthetic oligonucleotide
  Sense strand starting at position 3898 of SEQ ID NO: 586890
uggguaucuuacugauaca

SEQ ID NO: 751477 - RNA, 19 nt, Artificial Sequence
  Description of Artificial Sequence: Synthetic oligonucleotide
  Antisense strand to SEQ ID NO: 751476
uguaucaguaagauaccca

SEQ ID NO: 751478 - RNA, 19 nt, Artificial Sequence
  Description of Artificial Sequence: Synthetic oligonucleotide
  Sense strand starting at position 3901 of SEQ ID NO: 586890
guaucuuacugauacaaag

SEQ ID NO: 751479 - RNA, 19 nt, Artificial Sequence
  Description of Artificial Sequence: Synthetic oligonucleotide
  Antisense strand to SEQ ID NO: 751478
cuuuguaucaguaagauac

SEQ ID NO: 751480 - RNA, 19 nt, Artificial Sequence
  Description of Artificial Sequence: Synthetic oligonucleotide
  Sense strand starting at position 3934 of SEQ ID NO: 586890
gucuuaugaucuguauucu

SEQ ID NO: 751481 - RNA, 19 nt, Artificial Sequence
  Description of Artificial Sequence: Synthetic oligonucleotide
  Antisense strand to SEQ ID NO: 751480
agaauacagaucauaagac

SEQ ID NO: 751482 - RNA, 19 nt, Artificial Sequence
  Description of Artificial Sequence: Synthetic oligonucleotide
  Sense strand starting at position 3935 of SEQ ID NO: 586890
ucuuaugaucuguauucua

SEQ ID NO: 751483 - RNA, 19 nt, Artificial Sequence
  Description of Artificial Sequence: Synthetic oligonucleotide
  Antisense strand to SEQ ID NO: 751482
uagaauacagaucauaaga

SEQ ID NO: 751484 - RNA, 19 nt, Artificial Sequence
  Description of Artificial Sequence: Synthetic oligonucleotide
  Sense strand starting at position 3943 of SEQ ID NO: 586890
ucuguauucuaguguuaau

SEQ ID NO: 751485 - RNA, 19 nt, Artificial Sequence
  Description of Artificial Sequence: Synthetic oligonucleotide
  Antisense strand to SEQ ID NO: 751484
auuaacacuagaauacaga

SEQ ID NO: 751486 - RNA, 19 nt, Artificial Sequence
  Description of Artificial Sequence: Synthetic oligonucleotide
  Sense strand starting at position 3946 of SEQ ID NO: 586890
guauucuaguguuaauguu

SEQ ID NO: 751487 - RNA, 19 nt, Artificial Sequence
  Description of Artificial Sequence: Synthetic oligonucleotide
  Antisense strand to SEQ ID NO: 751486
aacauuaacacuagaauac

SEQ ID NO: 751488 - RNA, 19 nt, Artificial Sequence
  Description of Artificial Sequence: Synthetic oligonucleotide
  Sense strand starting at position 284 of SEQ ID NO: 586891
guaguaaucagaugaguga

SEQ ID NO: 751489 - RNA, 19 nt, Artificial Sequence
  Description of Artificial Sequence: Synthetic oligonucleotide
  Antisense strand to SEQ ID NO: 751488
ucacucaucugauuacuac

SEQ ID NO: 751490 - RNA, 19 nt, Artificial Sequence
  Description of Artificial Sequence: Synthetic oligonucleotide
  Sense strand starting at position 297 of SEQ ID NO: 586891
gagugagacucucaugggu

SEQ ID NO: 751491 - RNA, 19 nt, Artificial Sequence
  Description of Artificial Sequence: Synthetic oligonucleotide
  Antisense strand to SEQ ID NO: 751490
acccaugagagucucacuc

SEQ ID NO: 751492 - RNA, 19 nt, Artificial Sequence
  Description of Artificial Sequence: Synthetic oligonucleotide
  Sense strand starting at position 299 of SEQ ID NO: 586891
gugagacucucauggguaa

SEQ ID NO: 751493 - RNA, 19 nt, Artificial Sequence
  Description of Artificial Sequence: Synthetic oligonucleotide
  Antisense strand to SEQ ID NO: 751492
uuacccaugagagucucac

SEQ ID NO: 751494 - RNA, 19 nt, Artificial Sequence
  Description of Artificial Sequence: Synthetic oligonucleotide
  Sense strand starting at position 407 of SEQ ID NO: 586891
ugguuugucuguuuguuga

SEQ ID NO: 751495 - RNA, 19 nt, Artificial Sequence
  Description of Artificial Sequence: Synthetic oligonucleotide
  Antisense strand to SEQ ID NO: 751494
ucaacaaacagacaaacca

SEQ ID NO: 751496 - RNA, 19 nt, Artificial Sequence
  Description of Artificial Sequence: Synthetic oligonucleotide
  Sense strand starting at position 411 of SEQ ID NO: 586891
uugucuguuuguugagaca

SEQ ID NO: 751497 - RNA, 19 nt, Artificial Sequence
  Description of Artificial Sequence: Synthetic oligonucleotide
  Antisense strand to SEQ ID NO: 751496
ugucucaacaaacagacaa

SEQ ID NO: 751498 - RNA, 19 nt, Artificial Sequence
  Description of Artificial Sequence: Synthetic oligonucleotide
  Sense strand starting at position 2188 of SEQ ID NO: 586891
cugauugaacuucgcauuu

SEQ ID NO: 751499 - RNA, 19 nt, Artificial Sequence
  Description of Artificial Sequence: Synthetic oligonucleotide
  Antisense strand to SEQ ID NO: 751498
aaaugcgaaguucaaucag

SEQ ID NO: 751500 - RNA, 19 nt, Artificial Sequence
  Description of Artificial Sequence: Synthetic oligonucleotide
  Sense strand starting at position 2190 of SEQ ID NO: 586891
gauugaacuucgcauuugu

SEQ ID NO: 751501 - RNA, 19 nt, Artificial Sequence
  Description of Artificial Sequence: Synthetic oligonucleotide
  Antisense strand to SEQ ID NO: 751500
acaaaugcgaaguucaauc

SEQ ID NO: 751502 - RNA, 19 nt, Artificial Sequence
  Description of Artificial Sequence: Synthetic oligonucleotide
  Sense strand starting at position 2262 of SEQ ID NO: 586891
caaggccucuggguuagaa

SEQ ID NO: 751503 - RNA, 19 nt, Artificial Sequence
  Description of Artificial Sequence: Synthetic oligonucleotide
  Antisense strand to SEQ ID NO: 751502
uucuaacccagaggccuug

SEQ ID NO: 751504 - RNA, 19 nt, Artificial Sequence
  Description of Artificial Sequence: Synthetic oligonucleotide
  Sense strand starting at position 2279 of SEQ ID NO: 586891
aaccgaguuucccauaaag

SEQ ID NO: 751505 - RNA, 19 nt, Artificial Sequence
  Description of Artificial Sequence: Synthetic oligonucleotide
  Antisense strand to SEQ ID NO: 751504
cuuuaugggaaacucgguu

SEQ ID NO: 751506 - RNA, 19 nt, Artificial Sequence
  Description of Artificial Sequence: Synthetic oligonucleotide
  Sense strand starting at position 2281 of SEQ ID NO: 586891
ccgaguuucccauaaagag

SEQ ID NO: 751507 - RNA, 19 nt, Artificial Sequence
  Description of Artificial Sequence: Synthetic oligonucleotide
  Antisense strand to SEQ ID NO: 751506
cucuuuaugggaaacucgg

SEQ ID NO: 751508 - RNA, 19 nt, Artificial Sequence
  Description of Artificial Sequence: Synthetic oligonucleotide
  Sense strand starting at position 2773 of SEQ ID NO: 586891
aagagauaccugugaucuc

SEQ ID NO: 751509 - RNA, 19 nt, Artificial Sequence
  Description of Artificial Sequence: Synthetic oligonucleotide
  Antisense strand to SEQ ID NO: 751508
gagaucacagguaucucuu

SEQ ID NO: 751510 - RNA, 19 nt, Artificial Sequence
  Description of Artificial Sequence: Synthetic oligonucleotide
  Sense strand starting at position 2774 of SEQ ID NO: 586891
agagauaccugugaucuca

SEQ ID NO: 751511 - RNA, 19 nt, Artificial Sequence
  Description of Artificial Sequence: Synthetic oligonucleotide
  Antisense strand to SEQ ID NO: 751510
ugagaucacagguaucucu

SEQ ID NO: 751512 - RNA, 19 nt, Artificial Sequence
  Description of Artificial Sequence: Synthetic oligonucleotide
  Sense strand starting at position 2841 of SEQ ID NO: 586891
gacucaaagucugucaaga

SEQ ID NO: 751513 - RNA, 19 nt, Artificial Sequence
  Description of Artificial Sequence: Synthetic oligonucleotide
  Antisense strand to SEQ ID NO: 751512
ucuugacagacuuugaguc

SEQ ID NO: 751514 - RNA, 19 nt, Artificial Sequence
  Description of Artificial Sequence: Synthetic oligonucleotide
  Sense strand starting at position 2843 of SEQ ID NO: 586891
cucaaagucugucaagagu

SEQ ID NO: 751515 - RNA, 19 nt, Artificial Sequence
  Description of Artificial Sequence: Synthetic oligonucleotide
  Antisense strand to SEQ ID NO: 751514
acucuugacagacuuugag

SEQ ID NO: 751516 - RNA, 19 nt, Artificial Sequence
  Description of Artificial Sequence: Synthetic oligonucleotide
  Sense strand starting at position 2870 of SEQ ID NO: 586891
gggccuccuacuugaguga

SEQ ID NO: 751517 - RNA, 19 nt, Artificial Sequence
  Description of Artificial Sequence: Synthetic oligonucleotide
  Antisense strand to SEQ ID NO: 751516
ucacucaaguaggaggccc

SEQ ID NO: 751518 - RNA, 19 nt, Artificial Sequence
  Description of Artificial Sequence: Synthetic oligonucleotide
  Sense strand starting at position 2874 of SEQ ID NO: 586891
cuccuacuugagugaccau

SEQ ID NO: 751519 - RNA, 19 nt, Artificial Sequence
  Description of Artificial Sequence: Synthetic oligonucleotide
  Antisense strand to SEQ ID NO: 751518
auggucacucaaguaggag

SEQ ID NO: 751520 - RNA, 19 nt, Artificial Sequence
  Description of Artificial Sequence: Synthetic oligonucleotide
  Sense strand starting at position 3084 of SEQ ID NO: 586891
agaguuaagcguuggcuga

SEQ ID NO: 751521 - RNA, 19 nt, Artificial Sequence
  Description of Artificial Sequence: Synthetic oligonucleotide
  Antisense strand to SEQ ID NO: 751520
ucagccaacgcuuaacucu

SEQ ID NO: 751522 - RNA, 19 nt, Artificial Sequence
  Description of Artificial Sequence: Synthetic oligonucleotide
  Sense strand starting at position 3085 of SEQ ID NO: 586891
gaguuaagcguuggcugaa

SEQ ID NO: 751523 - RNA, 19 nt, Artificial Sequence
  Description of Artificial Sequence: Synthetic oligonucleotide
  Antisense strand to SEQ ID NO: 751522
uucagccaacgcuuaacuc

SEQ ID NO: 751524 - RNA, 19 nt, Artificial Sequence
  Description of Artificial Sequence: Synthetic oligonucleotide
  Sense strand starting at position 3599 of SEQ ID NO: 586891
gugucagaaucuccagaaa

SEQ ID NO: 751525 - RNA, 19 nt, Artificial Sequence
  Description of Artificial Sequence: Synthetic oligonucleotide
  Antisense strand to SEQ ID NO: 751524
uuucuggagauucugacac

SEQ ID NO: 751526 - RNA, 19 nt, Artificial Sequence
  Description of Artificial Sequence: Synthetic oligonucleotide
  Sense strand starting at position 3695 of SEQ ID NO: 586891
uuuaaagugugucaaagaa

SEQ ID NO: 751527 - RNA, 19 nt, Artificial Sequence
  Description of Artificial Sequence: Synthetic oligonucleotide
  Antisense strand to SEQ ID NO: 751526
uucuuugacacacuuuaaa

SEQ ID NO: 751528 - RNA, 19 nt, Artificial Sequence
  Description of Artificial Sequence: Synthetic oligonucleotide
  Sense strand starting at position 3789 of SEQ ID NO: 586891
gauggaguuggguaucuua

SEQ ID NO: 751529 - RNA, 19 nt, Artificial Sequence
  Description of Artificial Sequence: Synthetic oligonucleotide
  Antisense strand to SEQ ID NO: 751528
uaagauacccaacuccauc

SEQ ID NO: 751530 - RNA, 19 nt, Artificial Sequence
  Description of Artificial Sequence: Synthetic oligonucleotide
  Sense strand starting at position 3796 of SEQ ID NO: 586891
uuggguaucuuacugauac

SEQ ID NO: 751531 - RNA, 19 nt, Artificial Sequence
  Description of Artificial Sequence: Synthetic oligonucleotide
  Antisense strand to SEQ ID NO: 751530
guaucaguaagauacccaa

SEQ ID NO: 751532 - RNA, 19 nt, Artificial Sequence
  Description of Artificial Sequence: Synthetic oligonucleotide
  Sense strand starting at position 3797 of SEQ ID NO: 586891
uggguaucuuacugauaca

SEQ ID NO: 751533 - RNA, 19 nt, Artificial Sequence
  Description of Artificial Sequence: Synthetic oligonucleotide
  Antisense strand to SEQ ID NO: 751532
uguaucaguaagauaccca

SEQ ID NO: 751534 - RNA, 19 nt, Artificial Sequence
  Description of Artificial Sequence: Synthetic oligonucleotide
  Sense strand starting at position 3800 of SEQ ID NO: 586891
guaucuuacugauacaaag

SEQ ID NO: 751535 - RNA, 19 nt, Artificial Sequence
  Description of Artificial Sequence: Synthetic oligonucleotide
  Antisense strand to SEQ ID NO: 751534
cuuuguaucaguaagauac

SEQ ID NO: 751536 - RNA, 19 nt, Artificial Sequence
  Description of Artificial Sequence: Synthetic oligonucleotide
  Sense strand starting at position 3833 of SEQ ID NO: 586891
gucuuaugaucuguauucu

SEQ ID NO: 751537 - RNA, 19 nt, Artificial Sequence
  Description of Artificial Sequence: Synthetic oligonucleotide
  Antisense strand to SEQ ID NO: 751536
agaauacagaucauaagac

SEQ ID NO: 751538 - RNA, 19 nt, Artificial Sequence
  Description of Artificial Sequence: Synthetic oligonucleotide
  Sense strand starting at position 3834 of SEQ ID NO: 586891
ucuuaugaucuguauucua

SEQ ID NO: 751539 - RNA, 19 nt, Artificial Sequence
  Description of Artificial Sequence: Synthetic oligonucleotide
  Antisense strand to SEQ ID NO: 751538
uagaauacagaucauaaga

SEQ ID NO: 751540 - RNA, 19 nt, Artificial Sequence
  Description of Artificial Sequence: Synthetic oligonucleotide
  Sense strand starting at position 3842 of SEQ ID NO: 586891
ucuguauucuaguguuaau

SEQ ID NO: 751541 - RNA, 19 nt, Artificial Sequence
  Description of Artificial Sequence: Synthetic oligonucleotide
  Antisense strand to SEQ ID NO: 751540
auuaacacuagaauacaga

SEQ ID NO: 751542 - RNA, 19 nt, Artificial Sequence
  Description of Artificial Sequence: Synthetic oligonucleotide
  Sense strand starting at position 3845 of SEQ ID NO: 586891
guauucuaguguuaauguu

SEQ ID NO: 751543 - RNA, 19 nt, Artificial Sequence
  Description of Artificial Sequence: Synthetic oligonucleotide
  Antisense strand to SEQ ID NO: 751542
aacauuaacacuagaauac

SEQ ID NO: 751544 - RNA, 19 nt, Artificial Sequence
  Description of Artificial Sequence: Synthetic oligonucleotide
  Sense strand starting at position 185 of SEQ ID NO: 586892
agguuacauugagcuguga

SEQ ID NO: 751545 - RNA, 19 nt, Artificial Sequence
  Description of Artificial Sequence: Synthetic oligonucleotide
  Antisense strand to SEQ ID NO: 751544
ucacagcucaauguaaccu

SEQ ID NO: 751546 - RNA, 19 nt, Artificial Sequence
  Description of Artificial Sequence: Synthetic oligonucleotide
  Sense strand starting at position 309 of SEQ ID NO: 586892
agguaauaaucugcaguuu

SEQ ID NO: 751547 - RNA, 19 nt, Artificial Sequence
  Description of Artificial Sequence: Synthetic oligonucleotide
  Antisense strand to SEQ ID NO: 751546
aaacugcagauuauuaccu

SEQ ID NO: 751548 - RNA, 19 nt, Artificial Sequence
  Description of Artificial Sequence: Synthetic oligonucleotide
  Sense strand starting at position 310 of SEQ ID NO: 586892
gguaauaaucugcaguuua

SEQ ID NO: 751549 - RNA, 19 nt, Artificial Sequence
  Description of Artificial Sequence: Synthetic oligonucleotide
  Antisense strand to SEQ ID NO: 751548
uaaacugcagauuauuacc

SEQ ID NO: 751550 - RNA, 19 nt, Artificial Sequence
  Description of Artificial Sequence: Synthetic oligonucleotide
  Sense strand starting at position 381 of SEQ ID NO: 586892
uguccuauucuccaacagu

SEQ ID NO: 751551 - RNA, 19 nt, Artificial Sequence
  Description of Artificial Sequence: Synthetic oligonucleotide
  Antisense strand to SEQ ID NO: 751550
acuguuggagaauaggaca

SEQ ID NO: 751552 - RNA, 19 nt, Artificial Sequence
  Description of Artificial Sequence: Synthetic oligonucleotide
  Sense strand starting at position 482 of SEQ ID NO: 586892
ggcuuccuaucucugagua

SEQ ID NO: 751553 - RNA, 19 nt, Artificial Sequence
  Description of Artificial Sequence: Synthetic oligonucleotide
  Antisense strand to SEQ ID NO: 751552
uacucagagauaggaagcc

SEQ ID NO: 751554 - RNA, 19 nt, Artificial Sequence
  Description of Artificial Sequence: Synthetic oligonucleotide
  Sense strand starting at position 483 of SEQ ID NO: 586892
gcuuccuaucucugaguaa

SEQ ID NO: 751555 - RNA, 19 nt, Artificial Sequence
  Description of Artificial Sequence: Synthetic oligonucleotide
  Antisense strand to SEQ ID NO: 751554
uuacucagagauaggaagc

SEQ ID NO: 751556 - RNA, 19 nt, Artificial Sequence
  Description of Artificial Sequence: Synthetic oligonucleotide
  Sense strand starting at position 513 of SEQ ID NO: 586892
cuugcaauggucuauaaca

SEQ ID NO: 751557 - RNA, 19 nt, Artificial Sequence
  Description of Artificial Sequence: Synthetic oligonucleotide
  Antisense strand to SEQ ID NO: 751556
uguuauagaccauugcaag

SEQ ID NO: 751558 - RNA, 19 nt, Artificial Sequence
  Description of Artificial Sequence: Synthetic oligonucleotide
  Sense strand starting at position 515 of SEQ ID NO: 586892
ugcaauggucuauaacauc

SEQ ID NO: 751559 - RNA, 19 nt, Artificial Sequence
  Description of Artificial Sequence: Synthetic oligonucleotide
  Antisense strand to SEQ ID NO: 751558
gauguuauagaccauugca

SEQ ID NO: 751560 - RNA, 19 nt, Artificial Sequence
  Description of Artificial Sequence: Synthetic oligonucleotide
  Sense strand starting at position 795 of SEQ ID NO: 586892
augaucugcuacucuagau

SEQ ID NO: 751561 - RNA, 19 nt, Artificial Sequence
  Description of Artificial Sequence: Synthetic oligonucleotide
  Antisense strand to SEQ ID NO: 751560
aucuagaguagcagaucau

SEQ ID NO: 751562 - RNA, 19 nt, Artificial Sequence
  Description of Artificial Sequence: Synthetic oligonucleotide
  Sense strand starting at position 1123 of SEQ ID NO: 586892
uuguuuauuggcucguuua

SEQ ID NO: 751563 - RNA, 19 nt, Artificial Sequence
  Description of Artificial Sequence: Synthetic oligonucleotide
  Antisense strand to SEQ ID NO: 751562
uaaacgagccaauaaacaa

SEQ ID NO: 751564 - RNA, 19 nt, Artificial Sequence
  Description of Artificial Sequence: Synthetic oligonucleotide
  Sense strand starting at position 1125 of SEQ ID NO: 586892
guuuauuggcucguuuauu

SEQ ID NO: 751565 - RNA, 19 nt, Artificial Sequence
  Description of Artificial Sequence: Synthetic oligonucleotide
  Antisense strand to SEQ ID NO: 751564
aauaaacgagccaauaaac

SEQ ID NO: 751566 - RNA, 19 nt, Artificial Sequence
  Description of Artificial Sequence: Synthetic oligonucleotide
  Sense strand starting at position 1286 of SEQ ID NO: 586892
auagcauccuggcuaagau

SEQ ID NO: 751567 - RNA, 19 nt, Artificial Sequence
  Description of Artificial Sequence: Synthetic oligonucleotide
  Antisense strand to SEQ ID NO: 751566
aucuuagccaggaugcuau

SEQ ID NO: 751568 - RNA, 19 nt, Artificial Sequence
  Description of Artificial Sequence: Synthetic oligonucleotide
  Sense strand starting at position 1298 of SEQ ID NO: 586892
cuaagauguccaggucuga

SEQ ID NO: 751569 - RNA, 19 nt, Artificial Sequence
  Description of Artificial Sequence: Synthetic oligonucleotide
  Antisense strand to SEQ ID NO: 751568
ucagaccuggacaucuuag

SEQ ID NO: 751570 - RNA, 19 nt, Artificial Sequence
  Description of Artificial Sequence: Synthetic oligonucleotide
  Sense strand starting at position 1374 of SEQ ID NO: 586892
cccuaaaucccggauuccu

SEQ ID NO: 751571 - RNA, 19 nt, Artificial Sequence
  Description of Artificial Sequence: Synthetic oligonucleotide
  Antisense strand to SEQ ID NO: 751570
aggaauccgggauuuaggg

SEQ ID NO: 751572 - RNA, 19 nt, Artificial Sequence
  Description of Artificial Sequence: Synthetic oligonucleotide
  Sense strand starting at position 1414 of SEQ ID NO: 586892
cucuccauccgguaagauu

SEQ ID NO: 751573 - RNA, 19 nt, Artificial Sequence
  Description of Artificial Sequence: Synthetic oligonucleotide
  Antisense strand to SEQ ID NO: 751572
aaucuuaccggauggagag

SEQ ID NO: 751574 - RNA, 19 nt, Artificial Sequence
  Description of Artificial Sequence: Synthetic oligonucleotide
  Sense strand starting at position 1422 of SEQ ID NO: 586892
ccgguaagauugcugagaa

SEQ ID NO: 751575 - RNA, 19 nt, Artificial Sequence
  Description of Artificial Sequence: Synthetic oligonucleotide
  Antisense strand to SEQ ID NO: 751574
uucucagcaaucuuaccgg

SEQ ID NO: 751576 - RNA, 19 nt, Artificial Sequence
  Description of Artificial Sequence: Synthetic oligonucleotide
  Sense strand starting at position 1459 of SEQ ID NO: 586892
guaucaaacugaucacugu

SEQ ID NO: 751577 - RNA, 19 nt, Artificial Sequence
  Description of Artificial Sequence: Synthetic oligonucleotide
  Antisense strand to SEQ ID NO: 751576
acagugaucaguuugauac

SEQ ID NO: 751578 - RNA, 19 nt, Artificial Sequence
  Description of Artificial Sequence: Synthetic oligonucleotide
  Sense strand starting at position 1490 of SEQ ID NO: 586892
ggugacucucaauaagucu

SEQ ID NO: 751579 - RNA, 19 nt, Artificial Sequence
  Description of Artificial Sequence: Synthetic oligonucleotide
  Antisense strand to SEQ ID NO: 751578
agacuuauugagagucacc

SEQ ID NO: 751580 - RNA, 19 nt, Artificial Sequence
  Description of Artificial Sequence: Synthetic oligonucleotide
  Sense strand starting at position 1544 of SEQ ID NO: 586892
gcgcauaaucaacagaaag

SEQ ID NO: 751581 - RNA, 19 nt, Artificial Sequence
  Description of Artificial Sequence: Synthetic oligonucleotide
  Antisense strand to SEQ ID NO: 751580
cuuucuguugauuaugcgc

SEQ ID NO: 751582 - RNA, 19 nt, Artificial Sequence
  Description of Artificial Sequence: Synthetic oligonucleotide
  Sense strand starting at position 1554 of SEQ ID NO: 586892
aacagaaagcgcuauagaa

SEQ ID NO: 751583 - RNA, 19 nt, Artificial Sequence
  Description of Artificial Sequence: Synthetic oligonucleotide
  Antisense strand to SEQ ID NO: 751582
uucuauagcgcuuucuguu

SEQ ID NO: 751584 - RNA, 19 nt, Artificial Sequence
  Description of Artificial Sequence: Synthetic oligonucleotide
  Sense strand starting at position 1577 of SEQ ID NO: 586892
aagggaaugcuuugcccuu

SEQ ID NO: 751585 - RNA, 19 nt, Artificial Sequence
  Description of Artificial Sequence: Synthetic oligonucleotide
  Antisense strand to SEQ ID NO: 751584
aagggcaaagcauucccuu

SEQ ID NO: 751586 - RNA, 19 nt, Artificial Sequence
  Description of Artificial Sequence: Synthetic oligonucleotide
  Sense strand starting at position 2142 of SEQ ID NO: 586892
uguguaaacuuggcaucaa

SEQ ID NO: 751587 - RNA, 19 nt, Artificial Sequence
  Description of Artificial Sequence: Synthetic oligonucleotide
  Antisense strand to SEQ ID NO: 751586
uugaugccaaguuuacaca

SEQ ID NO: 751588 - RNA, 19 nt, Artificial Sequence
  Description of Artificial Sequence: Synthetic oligonucleotide
  Sense strand starting at position 2359 of SEQ ID NO: 586892
ggcguaacucaggaucuga

SEQ ID NO: 751589 - RNA, 19 nt, Artificial Sequence
  Description of Artificial Sequence: Synthetic oligonucleotide
  Antisense strand to SEQ ID NO: 751588
ucagauccugaguuacgcc

SEQ ID NO: 751590 - RNA, 19 nt, Artificial Sequence
  Description of Artificial Sequence: Synthetic oligonucleotide
  Sense strand starting at position 2380 of SEQ ID NO: 586892
uacuguggguguuugauau

SEQ ID NO: 751591 - RNA, 19 nt, Artificial Sequence
  Description of Artificial Sequence: Synthetic oligonucleotide
  Antisense strand to SEQ ID NO: 751590
auaucaaacacccacagua

SEQ ID NO: 751592 - RNA, 19 nt, Artificial Sequence
  Description of Artificial Sequence: Synthetic oligonucleotide
  Sense strand starting at position 2483 of SEQ ID NO: 586892
acaucauucggacgauucu

SEQ ID NO: 751593 - RNA, 19 nt, Artificial Sequence
  Description of Artificial Sequence: Synthetic oligonucleotide
  Antisense strand to SEQ ID NO: 751592
agaaucguccgaaugaugu

SEQ ID NO: 751594 - RNA, 19 nt, Artificial Sequence
  Description of Artificial Sequence: Synthetic oligonucleotide
  Sense strand starting at position 2695 of SEQ ID NO: 586892
cagucuaaugguggaaaca

SEQ ID NO: 751595 - RNA, 19 nt, Artificial Sequence
  Description of Artificial Sequence: Synthetic oligonucleotide
  Antisense strand to SEQ ID NO: 751594
uguuuccaccauuagacug

SEQ ID NO: 751596 - RNA, 19 nt, Artificial Sequence
  Description of Artificial Sequence: Synthetic oligonucleotide
  Sense strand starting at position 3134 of SEQ ID NO: 586892
acagaagaucuuugucuca

SEQ ID NO: 751597 - RNA, 19 nt, Artificial Sequence
  Description of Artificial Sequence: Synthetic oligonucleotide
  Antisense strand to SEQ ID NO: 751596
ugagacaaagaucuucugu

SEQ ID NO: 751598 - RNA, 19 nt, Artificial Sequence
  Description of Artificial Sequence: Synthetic oligonucleotide
  Sense strand starting at position 3136 of SEQ ID NO: 586892
agaagaucuuugucucaag

SEQ ID NO: 751599 - RNA, 19 nt, Artificial Sequence
  Description of Artificial Sequence: Synthetic oligonucleotide
  Antisense strand to SEQ ID NO: 751598
cuugagacaaagaucuucu

SEQ ID NO: 751600 - RNA, 19 nt, Artificial Sequence
  Description of Artificial Sequence: Synthetic oligonucleotide
  Sense strand starting at position 3137 of SEQ ID NO: 586892
gaagaucuuugucucaagu

SEQ ID NO: 751601 - RNA, 19 nt, Artificial Sequence
  Description of Artificial Sequence: Synthetic oligonucleotide
  Antisense strand to SEQ ID NO: 751600
acuugagacaaagaucuuc

SEQ ID NO: 751602 - RNA, 19 nt, Artificial Sequence
  Description of Artificial Sequence: Synthetic oligonucleotide
  Sense strand starting at position 3181 of SEQ ID NO: 586892
gagagcucuuaauuggcua

SEQ ID NO: 751603 - RNA, 19 nt, Artificial Sequence
  Description of Artificial Sequence: Synthetic oligonucleotide
  Antisense strand to SEQ ID NO: 751602
uagccaauuaagagcucuc

SEQ ID NO: 751604 - RNA, 19 nt, Artificial Sequence
  Description of Artificial Sequence: Synthetic oligonucleotide
  Sense strand starting at position 3185 of SEQ ID NO: 586892
gcucuuaauuggcuaggaa

SEQ ID NO: 751605 - RNA, 19 nt, Artificial Sequence
  Description of Artificial Sequence: Synthetic oligonucleotide
  Antisense strand to SEQ ID NO: 751604
uuccuagccaauuaagagc

SEQ ID NO: 751606 - RNA, 19 nt, Artificial Sequence
  Description of Artificial Sequence: Synthetic oligonucleotide
  Sense strand starting at position 3188 of SEQ ID NO: 586892
cuuaauuggcuaggaaauc

SEQ ID NO: 751607 - RNA, 19 nt, Artificial Sequence
  Description of Artificial Sequence: Synthetic oligonucleotide
  Antisense strand to SEQ ID NO: 751606
gauuuccuagccaauuaag

SEQ ID NO: 751608 - RNA, 19 nt, Artificial Sequence
  Description of Artificial Sequence: Synthetic oligonucleotide
  Sense strand starting at position 3199 of SEQ ID NO: 586892
aggaaaucugggugcuccu

SEQ ID NO: 751609 - RNA, 19 nt, Artificial Sequence
  Description of Artificial Sequence: Synthetic oligonucleotide
  Antisense strand to SEQ ID NO: 751608
aggagcacccagauuuccu

SEQ ID NO: 751610 - RNA, 19 nt, Artificial Sequence
  Description of Artificial Sequence: Synthetic oligonucleotide
  Sense strand starting at position 3228 of SEQ ID NO: 586892
cacagagaguguuugccau

SEQ ID NO: 751611 - RNA, 19 nt, Artificial Sequence
  Description of Artificial Sequence: Synthetic oligonucleotide
  Antisense strand to SEQ ID NO: 751610
auggcaaacacucucugug

SEQ ID NO: 751612 - RNA, 19 nt, Artificial Sequence
  Description of Artificial Sequence: Synthetic oligonucleotide
  Sense strand starting at position 3279 of SEQ ID NO: 586892
agagcuacaccuugcagaa

SEQ ID NO: 751613 - RNA, 19 nt, Artificial Sequence
  Description of Artificial Sequence: Synthetic oligonucleotide
  Antisense strand to SEQ ID NO: 751612
uucugcaagguguagcucu

SEQ ID NO: 751614 - RNA, 19 nt, Artificial Sequence
  Description of Artificial Sequence: Synthetic oligonucleotide
  Sense strand starting at position 3647 of SEQ ID NO: 586892
augauaguaacauggcaga

SEQ ID NO: 751615 - RNA, 19 nt, Artificial Sequence
  Description of Artificial Sequence: Synthetic oligonucleotide
  Antisense strand to SEQ ID NO: 751614
ucugccauguuacuaucau

SEQ ID NO: 751616 - RNA, 19 nt, Artificial Sequence
  Description of Artificial Sequence: Synthetic oligonucleotide
  Sense strand starting at position 3793 of SEQ ID NO: 586892
agugaugggaguggagauu

SEQ ID NO: 751617 - RNA, 19 nt, Artificial Sequence
  Description of Artificial Sequence: Synthetic oligonucleotide
  Antisense strand to SEQ ID NO: 751616
aaucuccacucccaucacu

SEQ ID NO: 751618 - RNA, 19 nt, Artificial Sequence
  Description of Artificial Sequence: Synthetic oligonucleotide
  Sense strand starting at position 3843 of SEQ ID NO: 586892
ucuaguucgaaguaaguaa

SEQ ID NO: 751619 - RNA, 19 nt, Artificial Sequence
  Description of Artificial Sequence: Synthetic oligonucleotide
  Antisense strand to SEQ ID NO: 751618
uuacuuacuucgaacuaga

SEQ ID NO: 751620 - RNA, 19 nt, Artificial Sequence
  Description of Artificial Sequence: Synthetic oligonucleotide
  Sense strand starting at position 3847 of SEQ ID NO: 586892
guucgaaguaaguaaucua

SEQ ID NO: 751621 - RNA, 19 nt, Artificial Sequence
  Description of Artificial Sequence: Synthetic oligonucleotide
  Antisense strand to SEQ ID NO: 751620
uagauuacuuacuucgaac

SEQ ID NO: 751622 - RNA, 19 nt, Artificial Sequence
  Description of Artificial Sequence: Synthetic oligonucleotide
  Sense strand starting at position 3854 of SEQ ID NO: 586892
guaaguaaucuaugcuuaa

SEQ ID NO: 751623 - RNA, 19 nt, Artificial Sequence
  Description of Artificial Sequence: Synthetic oligonucleotide
  Antisense strand to SEQ ID NO: 751622
uuaagcauagauuacuuac

SEQ ID NO: 751624 - RNA, 19 nt, Artificial Sequence
  Description of Artificial Sequence: Synthetic oligonucleotide
  Sense strand starting at position 15 of SEQ ID NO: 586893
ucacaaaucuuggcaagga

SEQ ID NO: 751625 - RNA, 19 nt, Artificial Sequence
  Description of Artificial Sequence: Synthetic oligonucleotide
  Antisense strand to SEQ ID NO: 751624
uccuugccaagauuuguga

SEQ ID NO: 751626 - RNA, 19 nt, Artificial Sequence
  Description of Artificial Sequence: Synthetic oligonucleotide
  Sense strand starting at position 19 of SEQ ID NO: 586893
aaaucuuggcaaggaguuu

SEQ ID NO: 751627 - RNA, 19 nt, Artificial Sequence
  Description of Artificial Sequence: Synthetic oligonucleotide
  Antisense strand to SEQ ID NO: 751626
aaacuccuugccaagauuu

SEQ ID NO: 751628 - RNA, 19 nt, Artificial Sequence
  Description of Artificial Sequence: Synthetic oligonucleotide
  Sense strand starting at position 28 of SEQ ID NO: 586893
caaggaguuugguaugaag

SEQ ID NO: 751629 - RNA, 19 nt, Artificial Sequence
  Description of Artificial Sequence: Synthetic oligonucleotide
  Antisense strand to SEQ ID NO: 751628
cuucauaccaaacuccuug

SEQ ID NO: 751630 - RNA, 19 nt, Artificial Sequence
  Description of Artificial Sequence: Synthetic oligonucleotide
  Sense strand starting at position 30 of SEQ ID NO: 586893
aggaguuugguaugaagag

SEQ ID NO: 751631 - RNA, 19 nt, Artificial Sequence
  Description of Artificial Sequence: Synthetic oligonucleotide
  Antisense strand to SEQ ID NO: 751630
cucuucauaccaaacuccu

SEQ ID NO: 751632 - RNA, 19 nt, Artificial Sequence
  Description of Artificial Sequence: Synthetic oligonucleotide
  Sense strand starting at position 178 of SEQ ID NO: 586893
augccuguuuaucuggauu

SEQ ID NO: 751633 - RNA, 19 nt, Artificial Sequence
  Description of Artificial Sequence: Synthetic oligonucleotide
  Antisense strand to SEQ ID NO: 751632
aauccagauaaacaggcau

SEQ ID NO: 751634 - RNA, 19 nt, Artificial Sequence
  Description of Artificial Sequence: Synthetic oligonucleotide
  Sense strand starting at position 181 of SEQ ID NO: 586893
ccuguuuaucuggauuaca

SEQ ID NO: 751635 - RNA, 19 nt, Artificial Sequence
  Description of Artificial Sequence: Synthetic oligonucleotide
  Antisense strand to SEQ ID NO: 751634
uguaauccagauaaacagg

SEQ ID NO: 751636 - RNA, 19 nt, Artificial Sequence
  Description of Artificial Sequence: Synthetic oligonucleotide
  Sense strand starting at position 319 of SEQ ID NO: 586893
acuguacacuacugaaaga

SEQ ID NO: 751637 - RNA, 19 nt, Artificial Sequence
  Description of Artificial Sequence: Synthetic oligonucleotide
  Antisense strand to SEQ ID NO: 751636
ucuuucaguaguguacagu

SEQ ID NO: 751638 - RNA, 19 nt, Artificial Sequence
  Description of Artificial Sequence: Synthetic oligonucleotide
  Sense strand starting at position 500 of SEQ ID NO: 586893
acgcaaacaucauguauuu

SEQ ID NO: 751639 - RNA, 19 nt, Artificial Sequence
  Description of Artificial Sequence: Synthetic oligonucleotide
  Antisense strand to SEQ ID NO: 751638
aaauacaugauguuugcgu

SEQ ID NO: 751640 - RNA, 19 nt, Artificial Sequence
  Description of Artificial Sequence: Synthetic oligonucleotide
  Sense strand starting at position 562 of SEQ ID NO: 586893
gcgacauuccuacacuuag

SEQ ID NO: 751641 - RNA, 19 nt, Artificial Sequence
  Description of Artificial Sequence: Synthetic oligonucleotide
  Antisense strand to SEQ ID NO: 751640
cuaaguguaggaaugucgc

SEQ ID NO: 751642 - RNA, 19 nt, Artificial Sequence
  Description of Artificial Sequence: Synthetic oligonucleotide
  Sense strand starting at position 685 of SEQ ID NO: 586893
auacuucucgaguauacac

SEQ ID NO: 751643 - RNA, 19 nt, Artificial Sequence
  Description of Artificial Sequence: Synthetic oligonucleotide
  Antisense strand to SEQ ID NO: 751642
guguauacucgagaaguau

SEQ ID NO: 751644 - RNA, 19 nt, Artificial Sequence
  Description of Artificial Sequence: Synthetic oligonucleotide
  Sense strand starting at position 814 of SEQ ID NO: 586893
ucaaguaucucuccacguu

SEQ ID NO: 751645 - RNA, 19 nt, Artificial Sequence
  Description of Artificial Sequence: Synthetic oligonucleotide
  Antisense strand to SEQ ID NO: 751644
aacguggagagauacuuga

SEQ ID NO: 751646 - RNA, 19 nt, Artificial Sequence
  Description of Artificial Sequence: Synthetic oligonucleotide
  Sense strand starting at position 911 of SEQ ID NO: 586893
acuguuuaugcuugcaaac

SEQ ID NO: 751647 - RNA, 19 nt, Artificial Sequence
  Description of Artificial Sequence: Synthetic oligonucleotide
  Antisense strand to SEQ ID NO: 751646
guuugcaagcauaaacagu

SEQ ID NO: 751648 - RNA, 19 nt, Artificial Sequence
  Description of Artificial Sequence: Synthetic oligonucleotide
  Sense strand starting at position 947 of SEQ ID NO: 586893
ggaacugacucaguaucua

SEQ ID NO: 751649 - RNA, 19 nt, Artificial Sequence
  Description of Artificial Sequence: Synthetic oligonucleotide
  Antisense strand to SEQ ID NO: 751648
uagauacugagucaguucc

SEQ ID NO: 751650 - RNA, 19 nt, Artificial Sequence
  Description of Artificial Sequence: Synthetic oligonucleotide
  Sense strand starting at position 1012 of SEQ ID NO: 586893
cuaacagguuauuagacaa

SEQ ID NO: 751651 - RNA, 19 nt, Artificial Sequence
  Description of Artificial Sequence: Synthetic oligonucleotide
  Antisense strand to SEQ ID NO: 751650
uugucuaauaaccuguuag

SEQ ID NO: 751652 - RNA, 19 nt, Artificial Sequence
  Description of Artificial Sequence: Synthetic oligonucleotide
  Sense strand starting at position 1052 of SEQ ID NO: 586893
gggauuuauugagacuuuc

SEQ ID NO: 751653 - RNA, 19 nt, Artificial Sequence
  Description of Artificial Sequence: Synthetic oligonucleotide
  Antisense strand to SEQ ID NO: 751652
gaaagucucaauaaauccc

SEQ ID NO: 751654 - RNA, 19 nt, Artificial Sequence
  Description of Artificial Sequence: Synthetic oligonucleotide
  Sense strand starting at position 1060 of SEQ ID NO: 586893
uugagacuuucucaagaaa

SEQ ID NO: 751655 - RNA, 19 nt, Artificial Sequence
  Description of Artificial Sequence: Synthetic oligonucleotide
  Antisense strand to SEQ ID NO: 751654
uuucuugagaaagucucaa

SEQ ID NO: 751656 - RNA, 19 nt, Artificial Sequence
  Description of Artificial Sequence: Synthetic oligonucleotide
  Sense strand starting at position 1165 of SEQ ID NO: 586893
aucuaaaucugucaggaug

SEQ ID NO: 751657 - RNA, 19 nt, Artificial Sequence
  Description of Artificial Sequence: Synthetic oligonucleotide
  Antisense strand to SEQ ID NO: 751656
cauccugacagauuuagau

SEQ ID NO: 751658 - RNA, 19 nt, Artificial Sequence
  Description of Artificial Sequence: Synthetic oligonucleotide
  Sense strand starting at position 1320 of SEQ ID NO: 586893
cagagaugggccugacacu

SEQ ID NO: 751659 - RNA, 19 nt, Artificial Sequence
  Description of Artificial Sequence: Synthetic oligonucleotide
  Antisense strand to SEQ ID NO: 751658
agugucaggcccaucucug

SEQ ID NO: 751660 - RNA, 19 nt, Artificial Sequence
  Description of Artificial Sequence: Synthetic oligonucleotide
  Sense strand starting at position 2210 of SEQ ID NO: 586893
gucugaaugagcuacagua

SEQ ID NO: 751661 - RNA, 19 nt, Artificial Sequence
  Description of Artificial Sequence: Synthetic oligonucleotide
  Antisense strand to SEQ ID NO: 751660
uacuguagcucauucagac

SEQ ID NO: 751662 - RNA, 19 nt, Artificial Sequence
  Description of Artificial Sequence: Synthetic oligonucleotide
  Sense strand starting at position 2212 of SEQ ID NO: 586893
cugaaugagcuacaguagu

SEQ ID NO: 751663 - RNA, 19 nt, Artificial Sequence
  Description of Artificial Sequence: Synthetic oligonucleotide
  Antisense strand to SEQ ID NO: 751662
acuacuguagcucauucag

SEQ ID NO: 751664 - RNA, 19 nt, Artificial Sequence
  Description of Artificial Sequence: Synthetic oligonucleotide
  Sense strand starting at position 2244 of SEQ ID NO: 586893
uuguguugagggcaggaaa

SEQ ID NO: 751665 - RNA, 19 nt, Artificial Sequence
  Description of Artificial Sequence: Synthetic oligonucleotide
  Antisense strand to SEQ ID NO: 751664
uuuccugcccucaacacaa

SEQ ID NO: 751666 - RNA, 19 nt, Artificial Sequence
  Description of Artificial Sequence: Synthetic oligonucleotide
  Sense strand starting at position 2282 of SEQ ID NO: 586893
aggugcuuccgcgagguga

SEQ ID NO: 751667 - RNA, 19 nt, Artificial Sequence
  Description of Artificial Sequence: Synthetic oligonucleotide
  Antisense strand to SEQ ID NO: 751666
ucaccucgcggaagcaccu

SEQ ID NO: 751668 - RNA, 19 nt, Artificial Sequence
  Description of Artificial Sequence: Synthetic oligonucleotide
  Sense strand starting at position 2530 of SEQ ID NO: 586893
ggcacucaugucugaguuu

SEQ ID NO: 751669 - RNA, 19 nt, Artificial Sequence
  Description of Artificial Sequence: Synthetic oligonucleotide
  Antisense strand to SEQ ID NO: 751668
aaacucagacaugagugcc

SEQ ID NO: 751670 - RNA, 19 nt, Artificial Sequence
  Description of Artificial Sequence: Synthetic oligonucleotide
  Sense strand starting at position 2533 of SEQ ID NO: 586893
acucaugucugaguuugca

SEQ ID NO: 751671 - RNA, 19 nt, Artificial Sequence
  Description of Artificial Sequence: Synthetic oligonucleotide
  Antisense strand to SEQ ID NO: 751670
ugcaaacucagacaugagu

SEQ ID NO: 751672 - RNA, 19 nt, Artificial Sequence
  Description of Artificial Sequence: Synthetic oligonucleotide
  Sense strand starting at position 2536 of SEQ ID NO: 586893
caugucugaguuugcauuu

SEQ ID NO: 751673 - RNA, 19 nt, Artificial Sequence
  Description of Artificial Sequence: Synthetic oligonucleotide
  Antisense strand to SEQ ID NO: 751672
aaaugcaaacucagacaug

SEQ ID NO: 751674 - RNA, 19 nt, Artificial Sequence
  Description of Artificial Sequence: Synthetic oligonucleotide
  Sense strand starting at position 2578 of SEQ ID NO: 586893
acgaaauccucauacuuga

SEQ ID NO: 751675 - RNA, 19 nt, Artificial Sequence
  Description of Artificial Sequence: Synthetic oligonucleotide
  Antisense strand to SEQ ID NO: 751674
ucaaguaugaggauuucgu

SEQ ID NO: 751676 - RNA, 19 nt, Artificial Sequence
  Description of Artificial Sequence: Synthetic oligonucleotide
  Sense strand starting at position 2772 of SEQ ID NO: 586893
ggcguucugacccagcaau

SEQ ID NO: 751677 - RNA, 19 nt, Artificial Sequence
  Description of Artificial Sequence: Synthetic oligonucleotide
  Antisense strand to SEQ ID NO: 751676
auugcugggucagaacgcc

SEQ ID NO: 751678 - RNA, 19 nt, Artificial Sequence
  Description of Artificial Sequence: Synthetic oligonucleotide
  Sense strand starting at position 2872 of SEQ ID NO: 586893
agaaacaauuuacauggua

SEQ ID NO: 751679 - RNA, 19 nt, Artificial Sequence
  Description of Artificial Sequence: Synthetic oligonucleotide
  Antisense strand to SEQ ID NO: 751678
uaccauguaaauuguuucu

SEQ ID NO: 751680 - RNA, 19 nt, Artificial Sequence
  Description of Artificial Sequence: Synthetic oligonucleotide
  Sense strand starting at position 2906 of SEQ ID NO: 586893
aaaggugacugauacaaca

SEQ ID NO: 751681 - RNA, 19 nt, Artificial Sequence
  Description of Artificial Sequence: Synthetic oligonucleotide
  Antisense strand to SEQ ID NO: 751680
uguuguaucagucaccuuu

SEQ ID NO: 751682 - RNA, 19 nt, Artificial Sequence
  Description of Artificial Sequence: Synthetic oligonucleotide
  Sense strand starting at position 2943 of SEQ ID NO: 586893
uguggagaggcaugaaacu

SEQ ID NO: 751683 - RNA, 19 nt, Artificial Sequence
  Description of Artificial Sequence: Synthetic oligonucleotide
  Antisense strand to SEQ ID NO: 751682
aguuucaugccucuccaca

SEQ ID NO: 751684 - RNA, 19 nt, Artificial Sequence
  Description of Artificial Sequence: Synthetic oligonucleotide
  Sense strand starting at position 2965 of SEQ ID NO: 586893
gguccagugccgugaguua

SEQ ID NO: 751685 - RNA, 19 nt, Artificial Sequence
  Description of Artificial Sequence: Synthetic oligonucleotide
  Antisense strand to SEQ ID NO: 751684
uaacucacggcacuggacc

SEQ ID NO: 751686 - RNA, 19 nt, Artificial Sequence
  Description of Artificial Sequence: Synthetic oligonucleotide
  Sense strand starting at position 2970 of SEQ ID NO: 586893
agugccgugaguuaacaau

SEQ ID NO: 751687 - RNA, 19 nt, Artificial Sequence
  Description of Artificial Sequence: Synthetic oligonucleotide
  Antisense strand to SEQ ID NO: 751686
auuguuaacucacggcacu

SEQ ID NO: 751688 - RNA, 19 nt, Artificial Sequence
  Description of Artificial Sequence: Synthetic oligonucleotide
  Sense strand starting at position 3003 of SEQ ID NO: 586893
aggagaugcauugguggau

SEQ ID NO: 751689 - RNA, 19 nt, Artificial Sequence
  Description of Artificial Sequence: Synthetic oligonucleotide
  Antisense strand to SEQ ID NO: 751688
auccaccaaugcaucuccu

SEQ ID NO: 751690 - RNA, 19 nt, Artificial Sequence
  Description of Artificial Sequence: Synthetic oligonucleotide
  Sense strand starting at position 3538 of SEQ ID NO: 586893
aggauaauucaguggugau

SEQ ID NO: 751691 - RNA, 19 nt, Artificial Sequence
  Description of Artificial Sequence: Synthetic oligonucleotide
  Antisense strand to SEQ ID NO: 751690
aucaccacugaauuauccu

SEQ ID NO: 751692 - RNA, 19 nt, Artificial Sequence
  Description of Artificial Sequence: Synthetic oligonucleotide
  Sense strand starting at position 3701 of SEQ ID NO: 586893
auuugaaguucuugguaaa

SEQ ID NO: 751693 - RNA, 19 nt, Artificial Sequence
  Description of Artificial Sequence: Synthetic oligonucleotide
  Antisense strand to SEQ ID NO: 751692
uuuaccaagaacuucaaau

SEQ ID NO: 751694 - RNA, 19 nt, Artificial Sequence
  Description of Artificial Sequence: Synthetic oligonucleotide
  Sense strand starting at position 3702 of SEQ ID NO: 586893
uuugaaguucuugguaaau

SEQ ID NO: 751695 - RNA, 19 nt, Artificial Sequence
  Description of Artificial Sequence: Synthetic oligonucleotide
  Antisense strand to SEQ ID NO: 751694
auuuaccaagaacuucaaa

SEQ ID NO: 751696 - RNA, 19 nt, Artificial Sequence
  Description of Artificial Sequence: Synthetic oligonucleotide
  Sense strand starting at position 3704 of SEQ ID NO: 586893
ugaaguucuugguaaauua

SEQ ID NO: 751697 - RNA, 19 nt, Artificial Sequence
  Description of Artificial Sequence: Synthetic oligonucleotide
  Antisense strand to SEQ ID NO: 751696
uaauuuaccaagaacuuca

SEQ ID NO: 751698 - RNA, 19 nt, Artificial Sequence
  Description of Artificial Sequence: Synthetic oligonucleotide
  Sense strand starting at position 3714 of SEQ ID NO: 586893
gguaaauuacugugaguaa

SEQ ID NO: 751699 - RNA, 19 nt, Artificial Sequence
  Description of Artificial Sequence: Synthetic oligonucleotide
  Antisense strand to SEQ ID NO: 751698
uuacucacaguaauuuacc

SEQ ID NO: 751700 - RNA, 19 nt, Artificial Sequence
  Description of Artificial Sequence: Synthetic oligonucleotide
  Sense strand starting at position 3715 of SEQ ID NO: 586893
guaaauuacugugaguaaa

SEQ ID NO: 751701 - RNA, 19 nt, Artificial Sequence
  Description of Artificial Sequence: Synthetic oligonucleotide
  Antisense strand to SEQ ID NO: 751700
uuuacucacaguaauuuac

SEQ ID NO: 751702 - RNA, 19 nt, Artificial Sequence
  Description of Artificial Sequence: Synthetic oligonucleotide
  Sense strand starting at position 3777 of SEQ ID NO: 586893
uuguguuaacuuuaacuug

SEQ ID NO: 751703 - RNA, 19 nt, Artificial Sequence
  Description of Artificial Sequence: Synthetic oligonucleotide
  Antisense strand to SEQ ID NO: 751702
caaguuaaaguuaacacaa

SEQ ID NO: 751704 - RNA, 19 nt, Artificial Sequence
  Description of Artificial Sequence: Synthetic oligonucleotide
  Sense strand starting at position 91 of SEQ ID NO: 586894
ggauuaaagguuugcacca

SEQ ID NO: 751705 - RNA, 19 nt, Artificial Sequence
  Description of Artificial Sequence: Synthetic oligonucleotide
  Antisense strand to SEQ ID NO: 751704
uggugcaaaccuuuaaucc

SEQ ID NO: 751706 - RNA, 19 nt, Artificial Sequence
  Description of Artificial Sequence: Synthetic oligonucleotide
  Sense strand starting at position 92 of SEQ ID NO: 586894
gauuaaagguuugcaccaa

SEQ ID NO: 751707 - RNA, 19 nt, Artificial Sequence
  Description of Artificial Sequence: Synthetic oligonucleotide
  Antisense strand to SEQ ID NO: 751706
uuggugcaaaccuuuaauc

SEQ ID NO: 751708 - RNA, 19 nt, Artificial Sequence
  Description of Artificial Sequence: Synthetic oligonucleotide
  Sense strand starting at position 915 of SEQ ID NO: 586894
aauuguuaagcaugggaau

SEQ ID NO: 751709 - RNA, 19 nt, Artificial Sequence
  Description of Artificial Sequence: Synthetic oligonucleotide
  Antisense strand to SEQ ID NO: 751708
auucccaugcuuaacaauu

SEQ ID NO: 751710 - RNA, 19 nt, Artificial Sequence
  Description of Artificial Sequence: Synthetic oligonucleotide
  Sense strand starting at position 916 of SEQ ID NO: 586894
auuguuaagcaugggaaug

SEQ ID NO: 751711 - RNA, 19 nt, Artificial Sequence
  Description of Artificial Sequence: Synthetic oligonucleotide
  Antisense strand to SEQ ID NO: 751710
cauucccaugcuuaacaau

SEQ ID NO: 751712 - RNA, 19 nt, Artificial Sequence
  Description of Artificial Sequence: Synthetic oligonucleotide
  Sense strand starting at position 917 of SEQ ID NO: 586894
uuguuaagcaugggaauga

SEQ ID NO: 751713 - RNA, 19 nt, Artificial Sequence
  Description of Artificial Sequence: Synthetic oligonucleotide
  Antisense strand to SEQ ID NO: 751712
ucauucccaugcuuaacaa

SEQ ID NO: 751714 - RNA, 19 nt, Artificial Sequence
  Description of Artificial Sequence: Synthetic oligonucleotide
  Sense strand starting at position 1287 of SEQ ID NO: 586894
gauuguauauaccugaaag

SEQ ID NO: 751715 - RNA, 19 nt, Artificial Sequence
  Description of Artificial Sequence: Synthetic oligonucleotide
  Antisense strand to SEQ ID NO: 751714
cuuucagguauauacaauc

SEQ ID NO: 751716 - RNA, 19 nt, Artificial Sequence
  Description of Artificial Sequence: Synthetic oligonucleotide
  Sense strand starting at position 1317 of SEQ ID NO: 586894
uauuaaacguauuucgcaa

SEQ ID NO: 751717 - RNA, 19 nt, Artificial Sequence
  Description of Artificial Sequence: Synthetic oligonucleotide
  Antisense strand to SEQ ID NO: 751716
uugcgaaauacguuuaaua

SEQ ID NO: 751718 - RNA, 19 nt, Artificial Sequence
  Description of Artificial Sequence: Synthetic oligonucleotide
  Sense strand starting at position 1461 of SEQ ID NO: 586894
aauaacaguccaugugaga

SEQ ID NO: 751719 - RNA, 19 nt, Artificial Sequence
  Description of Artificial Sequence: Synthetic oligonucleotide
  Antisense strand to SEQ ID NO: 751718
ucucacauggacuguuauu

SEQ ID NO: 751720 - RNA, 19 nt, Artificial Sequence
  Description of Artificial Sequence: Synthetic oligonucleotide
  Sense strand starting at position 1527 of SEQ ID NO: 586894
cagaaauugagucgguaga

SEQ ID NO: 751721 - RNA, 19 nt, Artificial Sequence
  Description of Artificial Sequence: Synthetic oligonucleotide
  Antisense strand to SEQ ID NO: 751720
ucuaccgacucaauuucug

SEQ ID NO: 751722 - RNA, 19 nt, Artificial Sequence
  Description of Artificial Sequence: Synthetic oligonucleotide
  Sense strand starting at position 1528 of SEQ ID NO: 586894
agaaauugagucgguagaa

SEQ ID NO: 751723 - RNA, 19 nt, Artificial Sequence
  Description of Artificial Sequence: Synthetic oligonucleotide
  Antisense strand to SEQ ID NO: 751722
uucuaccgacucaauuucu

SEQ ID NO: 751724 - RNA, 19 nt, Artificial Sequence
  Description of Artificial Sequence: Synthetic oligonucleotide
  Sense strand starting at position 1529 of SEQ ID NO: 586894
gaaauugagucgguagaag

SEQ ID NO: 751725 - RNA, 19 nt, Artificial Sequence
  Description of Artificial Sequence: Synthetic oligonucleotide
  Antisense strand to SEQ ID NO: 751724
cuucuaccgacucaauuuc

SEQ ID NO: 751726 - RNA, 19 nt, Artificial Sequence
  Description of Artificial Sequence: Synthetic oligonucleotide
  Sense strand starting at position 1540 of SEQ ID NO: 586894
gguagaagucacugggaac

SEQ ID NO: 751727 - RNA, 19 nt, Artificial Sequence
  Description of Artificial Sequence: Synthetic oligonucleotide
  Antisense strand to SEQ ID NO: 751726
guucccagugacuucuacc

SEQ ID NO: 751728 - RNA, 19 nt, Artificial Sequence
  Description of Artificial Sequence: Synthetic oligonucleotide
  Sense strand starting at position 1541 of SEQ ID NO: 586894
guagaagucacugggaaca

SEQ ID NO: 751729 - RNA, 19 nt, Artificial Sequence
  Description of Artificial Sequence: Synthetic oligonucleotide
  Antisense strand to SEQ ID NO: 751728
uguucccagugacuucuac

SEQ ID NO: 751730 - RNA, 19 nt, Artificial Sequence
  Description of Artificial Sequence: Synthetic oligonucleotide
  Sense strand starting at position 1652 of SEQ ID NO: 586894
uggaguugauguucuaaua

SEQ ID NO: 751731 - RNA, 19 nt, Artificial Sequence
  Description of Artificial Sequence: Synthetic oligonucleotide
  Antisense strand to SEQ ID NO: 751730
uauuagaacaucaacucca

SEQ ID NO: 751732 - RNA, 19 nt, Artificial Sequence
  Description of Artificial Sequence: Synthetic oligonucleotide
  Sense strand starting at position 1688 of SEQ ID NO: 586894
ugagaaucuuugguaacug

SEQ ID NO: 751733 - RNA, 19 nt, Artificial Sequence
  Description of Artificial Sequence: Synthetic oligonucleotide
  Antisense strand to SEQ ID NO: 751732
caguuaccaaagauucuca

SEQ ID NO: 751734 - RNA, 19 nt, Artificial Sequence
  Description of Artificial Sequence: Synthetic oligonucleotide
  Sense strand starting at position 1753 of SEQ ID NO: 586894
aagccuugucgugccuuua

SEQ ID NO: 751735 - RNA, 19 nt, Artificial Sequence
  Description of Artificial Sequence: Synthetic oligonucleotide
  Antisense strand to SEQ ID NO: 751734
uaaaggcacgacaaggcuu

SEQ ID NO: 751736 - RNA, 19 nt, Artificial Sequence
  Description of Artificial Sequence: Synthetic oligonucleotide
  Sense strand starting at position 1754 of SEQ ID NO: 586894
agccuugucgugccuuuau

SEQ ID NO: 751737 - RNA, 19 nt, Artificial Sequence
  Description of Artificial Sequence: Synthetic oligonucleotide
  Antisense strand to SEQ ID NO: 751736
auaaaggcacgacaaggcu

SEQ ID NO: 751738 - RNA, 19 nt, Artificial Sequence
  Description of Artificial Sequence: Synthetic oligonucleotide
  Sense strand starting at position 2025 of SEQ ID NO: 586894
aagagagcgggaugaguua

SEQ ID NO: 751739 - RNA, 19 nt, Artificial Sequence
  Description of Artificial Sequence: Synthetic oligonucleotide
  Antisense strand to SEQ ID NO: 751738
uaacucaucccgcucucuu

SEQ ID NO: 751740 - RNA, 19 nt, Artificial Sequence
  Description of Artificial Sequence: Synthetic oligonucleotide
  Sense strand starting at position 2051 of SEQ ID NO: 586894
ccaggauuggcuggagaau

SEQ ID NO: 751741 - RNA, 19 nt, Artificial Sequence
  Description of Artificial Sequence: Synthetic oligonucleotide
  Antisense strand to SEQ ID NO: 751740
auucuccagccaauccugg

SEQ ID NO: 751742 - RNA, 19 nt, Artificial Sequence
  Description of Artificial Sequence: Synthetic oligonucleotide
  Sense strand starting at position 2924 of SEQ ID NO: 586894
agguuaauacaaugauggu

SEQ ID NO: 751743 - RNA, 19 nt, Artificial Sequence
  Description of Artificial Sequence: Synthetic oligonucleotide
  Antisense strand to SEQ ID NO: 751742
accaucauuguauuaaccu

SEQ ID NO: 751744 - RNA, 19 nt, Artificial Sequence
  Description of Artificial Sequence: Synthetic oligonucleotide
  Sense strand starting at position 2978 of SEQ ID NO: 586894
guguguuaggaacacauaa

SEQ ID NO: 751745 - RNA, 19 nt, Artificial Sequence
  Description of Artificial Sequence: Synthetic oligonucleotide
  Antisense strand to SEQ ID NO: 751744
uuauguguuccuaacacac

SEQ ID NO: 751746 - RNA, 19 nt, Artificial Sequence
  Description of Artificial Sequence: Synthetic oligonucleotide
  Sense strand starting at position 2997 of SEQ ID NO: 586894
cguaguuaagaucacuuga

SEQ ID NO: 751747 - RNA, 19 nt, Artificial Sequence
  Description of Artificial Sequence: Synthetic oligonucleotide
  Antisense strand to SEQ ID NO: 751746
ucaagugaucuuaacuacg

SEQ ID NO: 751748 - RNA, 19 nt, Artificial Sequence
  Description of Artificial Sequence: Synthetic oligonucleotide
  Sense strand starting at position 2999 of SEQ ID NO: 586894
uaguuaagaucacuugaag

SEQ ID NO: 751749 - RNA, 19 nt, Artificial Sequence
  Description of Artificial Sequence: Synthetic oligonucleotide
  Antisense strand to SEQ ID NO: 751748
cuucaagugaucuuaacua

SEQ ID NO: 751750 - RNA, 19 nt, Artificial Sequence
  Description of Artificial Sequence: Synthetic oligonucleotide
  Sense strand starting at position 3181 of SEQ ID NO: 586894
cucauaaauccuggaugca

SEQ ID NO: 751751 - RNA, 19 nt, Artificial Sequence
  Description of Artificial Sequence: Synthetic oligonucleotide
  Antisense strand to SEQ ID NO: 751750
ugcauccaggauuuaugag

SEQ ID NO: 751752 - RNA, 19 nt, Artificial Sequence
  Description of Artificial Sequence: Synthetic oligonucleotide
  Sense strand starting at position 3182 of SEQ ID NO: 586894
ucauaaauccuggaugcau

SEQ ID NO: 751753 - RNA, 19 nt, Artificial Sequence
  Description of Artificial Sequence: Synthetic oligonucleotide
  Antisense strand to SEQ ID NO: 751752
augcauccaggauuuauga

SEQ ID NO: 751754 - RNA, 19 nt, Artificial Sequence
  Description of Artificial Sequence: Synthetic oligonucleotide
  Sense strand starting at position 3221 of SEQ ID NO: 586894
cuaugcaaugaauagaguu

SEQ ID NO: 751755 - RNA, 19 nt, Artificial Sequence
  Description of Artificial Sequence: Synthetic oligonucleotide
  Antisense strand to SEQ ID NO: 751754
aacucuauucauugcauag

SEQ ID NO: 751756 - RNA, 19 nt, Artificial Sequence
  Description of Artificial Sequence: Synthetic oligonucleotide
  Sense strand starting at position 3228 of SEQ ID NO: 586894
augaauagaguuugcaaua

SEQ ID NO: 751757 - RNA, 19 nt, Artificial Sequence
  Description of Artificial Sequence: Synthetic oligonucleotide
  Antisense strand to SEQ ID NO: 751756
uauugcaaacucuauucau

SEQ ID NO: 751758 - RNA, 19 nt, Artificial Sequence
  Description of Artificial Sequence: Synthetic oligonucleotide
  Sense strand starting at position 3229 of SEQ ID NO: 586894
ugaauagaguuugcaauaa

SEQ ID NO: 751759 - RNA, 19 nt, Artificial Sequence
  Description of Artificial Sequence: Synthetic oligonucleotide
  Antisense strand to SEQ ID NO: 751758
uuauugcaaacucuauuca

SEQ ID NO: 751760 - RNA, 19 nt, Artificial Sequence
  Description of Artificial Sequence: Synthetic oligonucleotide
  Sense strand starting at position 3398 of SEQ ID NO: 586894
gggcuuuauggcuagagac

SEQ ID NO: 751761 - RNA, 19 nt, Artificial Sequence
  Description of Artificial Sequence: Synthetic oligonucleotide
  Antisense strand to SEQ ID NO: 751760
gucucuagccauaaagccc

SEQ ID NO: 751762 - RNA, 19 nt, Artificial Sequence
  Description of Artificial Sequence: Synthetic oligonucleotide
  Sense strand starting at position 3400 of SEQ ID NO: 586894
gcuuuauggcuagagacaa

SEQ ID NO: 751763 - RNA, 19 nt, Artificial Sequence
  Description of Artificial Sequence: Synthetic oligonucleotide
  Antisense strand to SEQ ID NO: 751762
uugucucuagccauaaagc

SEQ ID NO: 751764 - RNA, 19 nt, Artificial Sequence
  Description of Artificial Sequence: Synthetic oligonucleotide
  Sense strand starting at position 3431 of SEQ ID NO: 586894
caccaaguuccagguagaa

SEQ ID NO: 751765 - RNA, 19 nt, Artificial Sequence
  Description of Artificial Sequence: Synthetic oligonucleotide
  Antisense strand to SEQ ID NO: 751764
uucuaccuggaacuuggug

SEQ ID NO: 751766 - RNA, 19 nt, Artificial Sequence
  Description of Artificial Sequence: Synthetic oligonucleotide
  Sense strand starting at position 3459 of SEQ ID NO: 586894
gugcucugucagcuucgau

SEQ ID NO: 751767 - RNA, 19 nt, Artificial Sequence
  Description of Artificial Sequence: Synthetic oligonucleotide
  Antisense strand to SEQ ID NO: 751766
aucgaagcugacagagcac

SEQ ID NO: 751768 - RNA, 19 nt, Artificial Sequence
  Description of Artificial Sequence: Synthetic oligonucleotide
  Sense strand starting at position 3466 of SEQ ID NO: 586894
gucagcuucgaugggauuu

SEQ ID NO: 751769 - RNA, 19 nt, Artificial Sequence
  Description of Artificial Sequence: Synthetic oligonucleotide
  Antisense strand to SEQ ID NO: 751768
aaaucccaucgaagcugac

SEQ ID NO: 751770 - RNA, 19 nt, Artificial Sequence
  Description of Artificial Sequence: Synthetic oligonucleotide
  Sense strand starting at position 3540 of SEQ ID NO: 586894
cuaauuugauccuaagaug

SEQ ID NO: 751771 - RNA, 19 nt, Artificial Sequence
  Description of Artificial Sequence: Synthetic oligonucleotide
  Antisense strand to SEQ ID NO: 751770
caucuuaggaucaaauuag

SEQ ID NO: 751772 - RNA, 19 nt, Artificial Sequence
  Description of Artificial Sequence: Synthetic oligonucleotide
  Sense strand starting at position 3683 of SEQ ID NO: 586894
ucuuuagcccuggaacaaa

SEQ ID NO: 751773 - RNA, 19 nt, Artificial Sequence
  Description of Artificial Sequence: Synthetic oligonucleotide
  Antisense strand to SEQ ID NO: 751772
uuuguuccagggcuaaaga

SEQ ID NO: 751774 - RNA, 19 nt, Artificial Sequence
  Description of Artificial Sequence: Synthetic oligonucleotide
  Sense strand starting at position 3727 of SEQ ID NO: 586894
agcagaauaggucaacuuu

SEQ ID NO: 751775 - RNA, 19 nt, Artificial Sequence
  Description of Artificial Sequence: Synthetic oligonucleotide
  Antisense strand to SEQ ID NO: 751774
aaaguugaccuauucugcu

SEQ ID NO: 751776 - RNA, 19 nt, Artificial Sequence
  Description of Artificial Sequence: Synthetic oligonucleotide
  Sense strand starting at position 3805 of SEQ ID NO: 586894
uuauuccucgaugaauuau

SEQ ID NO: 751777 - RNA, 19 nt, Artificial Sequence
  Description of Artificial Sequence: Synthetic oligonucleotide
  Antisense strand to SEQ ID NO: 751776
auaauucaucgaggaauaa

SEQ ID NO: 751778 - RNA, 19 nt, Artificial Sequence
  Description of Artificial Sequence: Synthetic oligonucleotide
  Sense strand starting at position 3911 of SEQ ID NO: 586894
cuuagaggugacuaauguu

SEQ ID NO: 751779 - RNA, 19 nt, Artificial Sequence
  Description of Artificial Sequence: Synthetic oligonucleotide
  Antisense strand to SEQ ID NO: 751778
aacauuagucaccucuaag

SEQ ID NO: 751780 - RNA, 19 nt, Artificial Sequence
  Description of Artificial Sequence: Synthetic oligonucleotide
  Sense strand starting at position 3918 of SEQ ID NO: 586894
gugacuaauguugacaguu

SEQ ID NO: 751781 - RNA, 19 nt, Artificial Sequence
  Description of Artificial Sequence: Synthetic oligonucleotide
  Antisense strand to SEQ ID NO: 751780
aacugucaacauuagucac

SEQ ID NO: 751782 - RNA, 19 nt, Artificial Sequence
  Description of Artificial Sequence: Synthetic oligonucleotide
  Sense strand starting at position 3937 of SEQ ID NO: 586894
uggaucaaaucuuccaguu

SEQ ID NO: 751783 - RNA, 19 nt, Artificial Sequence
  Description of Artificial Sequence: Synthetic oligonucleotide
  Antisense strand to SEQ ID NO: 751782
aacuggaagauuugaucca

SEQ ID NO: 751784 - RNA, 19 nt, Artificial Sequence
  Description of Artificial Sequence: Synthetic oligonucleotide
  Sense strand starting at position 62 of SEQ ID NO: 586895
caccguucucacugagaga

SEQ ID NO: 751785 - RNA, 19 nt, Artificial Sequence
  Description of Artificial Sequence: Synthetic oligonucleotide
  Antisense strand to SEQ ID NO: 751784
ucucucagugagaacggug

SEQ ID NO: 751786 - RNA, 19 nt, Artificial Sequence
  Description of Artificial Sequence: Synthetic oligonucleotide
  Sense strand starting at position 63 of SEQ ID NO: 586895
accguucucacugagagau

SEQ ID NO: 751787 - RNA, 19 nt, Artificial Sequence
  Description of Artificial Sequence: Synthetic oligonucleotide
  Antisense strand to SEQ ID NO: 751786
aucucucagugagaacggu

SEQ ID NO: 751788 - RNA, 19 nt, Artificial Sequence
  Description of Artificial Sequence: Synthetic oligonucleotide
  Sense strand starting at position 77 of SEQ ID NO: 586895
gagaucauaccgggcaaga

SEQ ID NO: 751789 - RNA, 19 nt, Artificial Sequence
  Description of Artificial Sequence: Synthetic oligonucleotide
  Antisense strand to SEQ ID NO: 751788
ucuugcccgguaugaucuc

SEQ ID NO: 751790 - RNA, 19 nt, Artificial Sequence
  Description of Artificial Sequence: Synthetic oligonucleotide
  Sense strand starting at position 130 of SEQ ID NO: 586895
ucaaucaggcuuuggguua

SEQ ID NO: 751791 - RNA, 19 nt, Artificial Sequence
  Description of Artificial Sequence: Synthetic oligonucleotide
  Antisense strand to SEQ ID NO: 751790
uaacccaaagccugauuga

SEQ ID NO: 751792 - RNA, 19 nt, Artificial Sequence
  Description of Artificial Sequence: Synthetic oligonucleotide
  Sense strand starting at position 151 of SEQ ID NO: 586895
ucugguugccaucacagua

SEQ ID NO: 751793 - RNA, 19 nt, Artificial Sequence
  Description of Artificial Sequence: Synthetic oligonucleotide
  Antisense strand to SEQ ID NO: 751792
uacugugauggcaaccaga

SEQ ID NO: 751794 - RNA, 19 nt, Artificial Sequence
  Description of Artificial Sequence: Synthetic oligonucleotide
  Sense strand starting at position 212 of SEQ ID NO: 586895
acuagauuguucuugggaa

SEQ ID NO: 751795 - RNA, 19 nt, Artificial Sequence
  Description of Artificial Sequence: Synthetic oligonucleotide
  Antisense strand to SEQ ID NO: 751794
uucccaagaacaaucuagu

SEQ ID NO: 751796 - RNA, 19 nt, Artificial Sequence
  Description of Artificial Sequence: Synthetic oligonucleotide
  Sense strand starting at position 214 of SEQ ID NO: 586895
uagauuguucuugggaaga

SEQ ID NO: 751797 - RNA, 19 nt, Artificial Sequence
  Description of Artificial Sequence: Synthetic oligonucleotide
  Antisense strand to SEQ ID NO: 751796
ucuucccaagaacaaucua

SEQ ID NO: 751798 - RNA, 19 nt, Artificial Sequence
  Description of Artificial Sequence: Synthetic oligonucleotide
  Sense strand starting at position 382 of SEQ ID NO: 586895
accucuaggagacguuuau

SEQ ID NO: 751799 - RNA, 19 nt, Artificial Sequence
  Description of Artificial Sequence: Synthetic oligonucleotide
  Antisense strand to SEQ ID NO: 751798
auaaacgucuccuagaggu

SEQ ID NO: 751800 - RNA, 19 nt, Artificial Sequence
  Description of Artificial Sequence: Synthetic oligonucleotide
  Sense strand starting at position 586 of SEQ ID NO: 586895
guuucuauuugguugggua

SEQ ID NO: 751801 - RNA, 19 nt, Artificial Sequence
  Description of Artificial Sequence: Synthetic oligonucleotide
  Antisense strand to SEQ ID NO: 751800
uacccaaccaaauagaaac

SEQ ID NO: 751802 - RNA, 19 nt, Artificial Sequence
  Description of Artificial Sequence: Synthetic oligonucleotide
  Sense strand starting at position 587 of SEQ ID NO: 586895
uuucuauuugguuggguau

SEQ ID NO: 751803 - RNA, 19 nt, Artificial Sequence
  Description of Artificial Sequence: Synthetic oligonucleotide
  Antisense strand to SEQ ID NO: 751802
auacccaaccaaauagaaa

SEQ ID NO: 751804 - RNA, 19 nt, Artificial Sequence
  Description of Artificial Sequence: Synthetic oligonucleotide
  Sense strand starting at position 593 of SEQ ID NO: 586895
uuugguuggguauaaauau

SEQ ID NO: 751805 - RNA, 19 nt, Artificial Sequence
  Description of Artificial Sequence: Synthetic oligonucleotide
  Antisense strand to SEQ ID NO: 751804
auauuuauacccaaccaaa

SEQ ID NO: 751806 - RNA, 19 nt, Artificial Sequence
  Description of Artificial Sequence: Synthetic oligonucleotide
  Sense strand starting at position 638 of SEQ ID NO: 586895
gugccugucgcugcuuaaa

SEQ ID NO: 751807 - RNA, 19 nt, Artificial Sequence
  Description of Artificial Sequence: Synthetic oligonucleotide
  Antisense strand to SEQ ID NO: 751806
uuuaagcagcgacaggcac

SEQ ID NO: 751808 - RNA, 19 nt, Artificial Sequence
  Description of Artificial Sequence: Synthetic oligonucleotide
  Sense strand starting at position 658 of SEQ ID NO: 586895
gcucuauaggcaugaaaug

SEQ ID NO: 751809 - RNA, 19 nt, Artificial Sequence
  Description of Artificial Sequence: Synthetic oligonucleotide
  Antisense strand to SEQ ID NO: 751808
cauuucaugccuauagagc

SEQ ID NO: 751810 - RNA, 19 nt, Artificial Sequence
  Description of Artificial Sequence: Synthetic oligonucleotide
  Sense strand starting at position 659 of SEQ ID NO: 586895
cucuauaggcaugaaaugu

SEQ ID NO: 751811 - RNA, 19 nt, Artificial Sequence
  Description of Artificial Sequence: Synthetic oligonucleotide
  Antisense strand to SEQ ID NO: 751810
acauuucaugccuauagag

SEQ ID NO: 751812 - RNA, 19 nt, Artificial Sequence
  Description of Artificial Sequence: Synthetic oligonucleotide
  Sense strand starting at position 724 of SEQ ID NO: 586895
ccacauacucgauguacua

SEQ ID NO: 751813 - RNA, 19 nt, Artificial Sequence
  Description of Artificial Sequence: Synthetic oligonucleotide
  Antisense strand to SEQ ID NO: 751812
uaguacaucgaguaugugg

SEQ ID NO: 751814 - RNA, 19 nt, Artificial Sequence
  Description of Artificial Sequence: Synthetic oligonucleotide
  Sense strand starting at position 769 of SEQ ID NO: 586895
uuauauuucuuggagcuaa

SEQ ID NO: 751815 - RNA, 19 nt, Artificial Sequence
  Description of Artificial Sequence: Synthetic oligonucleotide
  Antisense strand to SEQ ID NO: 751814
uuagcuccaagaaauauaa

SEQ ID NO: 751816 - RNA, 19 nt, Artificial Sequence
  Description of Artificial Sequence: Synthetic oligonucleotide
  Sense strand starting at position 825 of SEQ ID NO: 586895
gcugcauaaugauuccauu

SEQ ID NO: 751817 - RNA, 19 nt, Artificial Sequence
  Description of Artificial Sequence: Synthetic oligonucleotide
  Antisense strand to SEQ ID NO: 751816
aauggaaucauuaugcagc

SEQ ID NO: 751818 - RNA, 19 nt, Artificial Sequence
  Description of Artificial Sequence: Synthetic oligonucleotide
  Sense strand starting at position 875 of SEQ ID NO: 586895
agccucuaccuggaaauua

SEQ ID NO: 751819 - RNA, 19 nt, Artificial Sequence
  Description of Artificial Sequence: Synthetic oligonucleotide
  Antisense strand to SEQ ID NO: 751818
uaauuuccagguagaggcu

SEQ ID NO: 751820 - RNA, 19 nt, Artificial Sequence
  Description of Artificial Sequence: Synthetic oligonucleotide
  Sense strand starting at position 888 of SEQ ID NO: 586895
aaauuaaagcugugcagau

SEQ ID NO: 751821 - RNA, 19 nt, Artificial Sequence
  Description of Artificial Sequence: Synthetic oligonucleotide
  Antisense strand to SEQ ID NO: 751820
aucugcacagcuuuaauuu

SEQ ID NO: 751822 - RNA, 19 nt, Artificial Sequence
  Description of Artificial Sequence: Synthetic oligonucleotide
  Sense strand starting at position 889 of SEQ ID NO: 586895
aauuaaagcugugcagaua

SEQ ID NO: 751823 - RNA, 19 nt, Artificial Sequence
  Description of Artificial Sequence: Synthetic oligonucleotide
  Antisense strand to SEQ ID NO: 751822
uaucugcacagcuuuaauu

SEQ ID NO: 751824 - RNA, 19 nt, Artificial Sequence
  Description of Artificial Sequence: Synthetic oligonucleotide
  Sense strand starting at position 890 of SEQ ID NO: 586895
auuaaagcugugcagauaa

SEQ ID NO: 751825 - RNA, 19 nt, Artificial Sequence
  Description of Artificial Sequence: Synthetic oligonucleotide
  Antisense strand to SEQ ID NO: 751824
uuaucugcacagcuuuaau

SEQ ID NO: 751826 - RNA, 19 nt, Artificial Sequence
  Description of Artificial Sequence: Synthetic oligonucleotide
  Sense strand starting at position 937 of SEQ ID NO: 586895
agauaauucuaacaagaag

SEQ ID NO: 751827 - RNA, 19 nt, Artificial Sequence
  Description of Artificial Sequence: Synthetic oligonucleotide
  Antisense strand to SEQ ID NO: 751826
cuucuuguuagaauuaucu

SEQ ID NO: 751828 - RNA, 19 nt, Artificial Sequence
  Description of Artificial Sequence: Synthetic oligonucleotide
  Sense strand starting at position 1056 of SEQ ID NO: 586895
ucaggagggcuguaugaca

SEQ ID NO: 751829 - RNA, 19 nt, Artificial Sequence
  Description of Artificial Sequence: Synthetic oligonucleotide
  Antisense strand to SEQ ID NO: 751828
ugucauacagcccuccuga

SEQ ID NO: 751830 - RNA, 19 nt, Artificial Sequence
  Description of Artificial Sequence: Synthetic oligonucleotide
  Sense strand starting at position 1064 of SEQ ID NO: 586895
gcuguaugacacugaauga

SEQ ID NO: 751831 - RNA, 19 nt, Artificial Sequence
  Description of Artificial Sequence: Synthetic oligonucleotide
  Antisense strand to SEQ ID NO: 751830
ucauucagugucauacagc

SEQ ID NO: 751832 - RNA, 19 nt, Artificial Sequence
  Description of Artificial Sequence: Synthetic oligonucleotide
  Sense strand starting at position 1259 of SEQ ID NO: 586895
auccaaguccuaggaguaa

SEQ ID NO: 751833 - RNA, 19 nt, Artificial Sequence
  Description of Artificial Sequence: Synthetic oligonucleotide
  Antisense strand to SEQ ID NO: 751832
uuacuccuaggacuuggau

SEQ ID NO: 751834 - RNA, 19 nt, Artificial Sequence
  Description of Artificial Sequence: Synthetic oligonucleotide
  Sense strand starting at position 1300 of SEQ ID NO: 586895
auuuaaagugccugcggua

SEQ ID NO: 751835 - RNA, 19 nt, Artificial Sequence
  Description of Artificial Sequence: Synthetic oligonucleotide
  Antisense strand to SEQ ID NO: 751834
uaccgcaggcacuuuaaau

SEQ ID NO: 751836 - RNA, 19 nt, Artificial Sequence
  Description of Artificial Sequence: Synthetic oligonucleotide
  Sense strand starting at position 1355 of SEQ ID NO: 586895
agaauucucaggcguuuag

SEQ ID NO: 751837 - RNA, 19 nt, Artificial Sequence
  Description of Artificial Sequence: Synthetic oligonucleotide
  Antisense strand to SEQ ID NO: 751836
cuaaacgccugagaauucu

SEQ ID NO: 751838 - RNA, 19 nt, Artificial Sequence
  Description of Artificial Sequence: Synthetic oligonucleotide
  Sense strand starting at position 1654 of SEQ ID NO: 586895
ccgcaauaugcagggaaau

SEQ ID NO: 751839 - RNA, 19 nt, Artificial Sequence
  Description of Artificial Sequence: Synthetic oligonucleotide
  Antisense strand to SEQ ID NO: 751838
auuucccugcauauugcgg

SEQ ID NO: 751840 - RNA, 19 nt, Artificial Sequence
  Description of Artificial Sequence: Synthetic oligonucleotide
  Sense strand starting at position 2751 of SEQ ID NO: 586895
gacagagccucaucuguag

SEQ ID NO: 751841 - RNA, 19 nt, Artificial Sequence
  Description of Artificial Sequence: Synthetic oligonucleotide
  Antisense strand to SEQ ID NO: 751840
cuacagaugaggcucuguc

SEQ ID NO: 751842 - RNA, 19 nt, Artificial Sequence
  Description of Artificial Sequence: Synthetic oligonucleotide
  Sense strand starting at position 2755 of SEQ ID NO: 586895
gagccucaucuguagagga

SEQ ID NO: 751843 - RNA, 19 nt, Artificial Sequence
  Description of Artificial Sequence: Synthetic oligonucleotide
  Antisense strand to SEQ ID NO: 751842
uccucuacagaugaggcuc

SEQ ID NO: 751844 - RNA, 19 nt, Artificial Sequence
  Description of Artificial Sequence: Synthetic oligonucleotide
  Sense strand starting at position 2757 of SEQ ID NO: 586895
gccucaucuguagaggauu

SEQ ID NO: 751845 - RNA, 19 nt, Artificial Sequence
  Description of Artificial Sequence: Synthetic oligonucleotide
  Antisense strand to SEQ ID NO: 751844
aauccucuacagaugaggc

SEQ ID NO: 751846 - RNA, 19 nt, Artificial Sequence
  Description of Artificial Sequence: Synthetic oligonucleotide
  Sense strand starting at position 2819 of SEQ ID NO: 586895
gugccuggaaauggugauu

SEQ ID NO: 751847 - RNA, 19 nt, Artificial Sequence
  Description of Artificial Sequence: Synthetic oligonucleotide
  Antisense strand to SEQ ID NO: 751846
aaucaccauuuccaggcac

SEQ ID NO: 751848 - RNA, 19 nt, Artificial Sequence
  Description of Artificial Sequence: Synthetic oligonucleotide
  Sense strand starting at position 2991 of SEQ ID NO: 586895
cuuuaaaugucgguuauga

SEQ ID NO: 751849 - RNA, 19 nt, Artificial Sequence
  Description of Artificial Sequence: Synthetic oligonucleotide
  Antisense strand to SEQ ID NO: 751848
ucauaaccgacauuuaaag

SEQ ID NO: 751850 - RNA, 19 nt, Artificial Sequence
  Description of Artificial Sequence: Synthetic oligonucleotide
  Sense strand starting at position 3067 of SEQ ID NO: 586895
gauugaagcgggugguaau

SEQ ID NO: 751851 - RNA, 19 nt, Artificial Sequence
  Description of Artificial Sequence: Synthetic oligonucleotide
  Antisense strand to SEQ ID NO: 751850
auuaccacccgcuucaauc

SEQ ID NO: 751852 - RNA, 19 nt, Artificial Sequence
  Description of Artificial Sequence: Synthetic oligonucleotide
  Sense strand starting at position 3666 of SEQ ID NO: 586895
ggcacucagaaauguugau

SEQ ID NO: 751853 - RNA, 19 nt, Artificial Sequence
  Description of Artificial Sequence: Synthetic oligonucleotide
  Antisense strand to SEQ ID NO: 751852
aucaacauuucugagugcc

SEQ ID NO: 751854 - RNA, 19 nt, Artificial Sequence
  Description of Artificial Sequence: Synthetic oligonucleotide
  Sense strand starting at position 3679 of SEQ ID NO: 586895
guugauaacuugcccaaag

SEQ ID NO: 751855 - RNA, 19 nt, Artificial Sequence
  Description of Artificial Sequence: Synthetic oligonucleotide
  Antisense strand to SEQ ID NO: 751854
cuuugggcaaguuaucaac

SEQ ID NO: 751856 - RNA, 19 nt, Artificial Sequence
  Description of Artificial Sequence: Synthetic oligonucleotide
  Sense strand starting at position 3690 of SEQ ID NO: 586895
gcccaaagucagugacaaa

SEQ ID NO: 751857 - RNA, 19 nt, Artificial Sequence
  Description of Artificial Sequence: Synthetic oligonucleotide
  Antisense strand to SEQ ID NO: 751856
uuugucacugacuuugggc

SEQ ID NO: 751858 - RNA, 19 nt, Artificial Sequence
  Description of Artificial Sequence: Synthetic oligonucleotide
  Sense strand starting at position 3859 of SEQ ID NO: 586895
uguccagucaugugaauau

SEQ ID NO: 751859 - RNA, 19 nt, Artificial Sequence
  Description of Artificial Sequence: Synthetic oligonucleotide
  Antisense strand to SEQ ID NO: 751858
auauucacaugacuggaca

SEQ ID NO: 751860 - RNA, 19 nt, Artificial Sequence
  Description of Artificial Sequence: Synthetic oligonucleotide
  Sense strand starting at position 3868 of SEQ ID NO: 586895
augugaauauagccaaaga

SEQ ID NO: 751861 - RNA, 19 nt, Artificial Sequence
  Description of Artificial Sequence: Synthetic oligonucleotide
  Antisense strand to SEQ ID NO: 751860
ucuuuggcuauauucacau

SEQ ID NO: 751862 - RNA, 19 nt, Artificial Sequence
  Description of Artificial Sequence: Synthetic oligonucleotide
  Sense strand starting at position 3953 of SEQ ID NO: 586895
uuuaguuacuaugcacuga

SEQ ID NO: 751863 - RNA, 19 nt, Artificial Sequence
  Description of Artificial Sequence: Synthetic oligonucleotide
  Antisense strand to SEQ ID NO: 751862
ucagugcauaguaacuaaa

SEQ ID NO: 751864 - RNA, 19 nt, Artificial Sequence
  Description of Artificial Sequence: Synthetic oligonucleotide
  Sense strand starting at position 25 of SEQ ID NO: 586896
gagcucccuguuuaacaga

SEQ ID NO: 751865 - RNA, 19 nt, Artificial Sequence
  Description of Artificial Sequence: Synthetic oligonucleotide
  Antisense strand to SEQ ID NO: 751864
ucuguuaaacagggagcuc

SEQ ID NO: 751866 - RNA, 19 nt, Artificial Sequence
  Description of Artificial Sequence: Synthetic oligonucleotide
  Sense strand starting at position 41 of SEQ ID NO: 586896
agaugaagcaacugugaga

SEQ ID NO: 751867 - RNA, 19 nt, Artificial Sequence
  Description of Artificial Sequence: Synthetic oligonucleotide
  Antisense strand to SEQ ID NO: 751866
ucucacaguugcuucaucu

SEQ ID NO: 751868 - RNA, 19 nt, Artificial Sequence
  Description of Artificial Sequence: Synthetic oligonucleotide
  Sense strand starting at position 44 of SEQ ID NO: 586896
ugaagcaacugugagacau

SEQ ID NO: 751869 - RNA, 19 nt, Artificial Sequence
  Description of Artificial Sequence: Synthetic oligonucleotide
  Antisense strand to SEQ ID NO: 751868
augucucacaguugcuuca

SEQ ID NO: 751870 - RNA, 19 nt, Artificial Sequence
  Description of Artificial Sequence: Synthetic oligonucleotide
  Sense strand starting at position 121 of SEQ ID NO: 586896
gggaacaggucuuuaaacu

SEQ ID NO: 751871 - RNA, 19 nt, Artificial Sequence
  Description of Artificial Sequence: Synthetic oligonucleotide
  Antisense strand to SEQ ID NO: 751870
aguuuaaagaccuguuccc

SEQ ID NO: 751872 - RNA, 19 nt, Artificial Sequence
  Description of Artificial Sequence: Synthetic oligonucleotide
  Sense strand starting at position 148 of SEQ ID NO: 586896
aguguucuuuccucuaaag

SEQ ID NO: 751873 - RNA, 19 nt, Artificial Sequence
  Description of Artificial Sequence: Synthetic oligonucleotide
  Antisense strand to SEQ ID NO: 751872
cuuuagaggaaagaacacu

SEQ ID NO: 751874 - RNA, 19 nt, Artificial Sequence
  Description of Artificial Sequence: Synthetic oligonucleotide
  Sense strand starting at position 171 of SEQ ID NO: 586896
uggguuugcaaagaucuca

SEQ ID NO: 751875 - RNA, 19 nt, Artificial Sequence
  Description of Artificial Sequence: Synthetic oligonucleotide
  Antisense strand to SEQ ID NO: 751874
ugagaucuuugcaaaccca

SEQ ID NO: 751876 - RNA, 19 nt, Artificial Sequence
  Description of Artificial Sequence: Synthetic oligonucleotide
  Sense strand starting at position 176 of SEQ ID NO: 586896
uugcaaagaucucagagaa

SEQ ID NO: 751877 - RNA, 19 nt, Artificial Sequence
  Description of Artificial Sequence: Synthetic oligonucleotide
  Antisense strand to SEQ ID NO: 751876
uucucugagaucuuugcaa

SEQ ID NO: 751878 - RNA, 19 nt, Artificial Sequence
  Description of Artificial Sequence: Synthetic oligonucleotide
  Sense strand starting at position 429 of SEQ ID NO: 586896
aaggaaggcucucccugaa

SEQ ID NO: 751879 - RNA, 19 nt, Artificial Sequence
  Description of Artificial Sequence: Synthetic oligonucleotide
  Antisense strand to SEQ ID NO: 751878
uucagggagagccuuccuu

SEQ ID NO: 751880 - RNA, 19 nt, Artificial Sequence
  Description of Artificial Sequence: Synthetic oligonucleotide
  Sense strand starting at position 637 of SEQ ID NO: 586896
cccagauuccugcacagga

SEQ ID NO: 751881 - RNA, 19 nt, Artificial Sequence
  Description of Artificial Sequence: Synthetic oligonucleotide
  Antisense strand to SEQ ID NO: 751880
uccugugcaggaaucuggg

SEQ ID NO: 751882 - RNA, 19 nt, Artificial Sequence
  Description of Artificial Sequence: Synthetic oligonucleotide
  Sense strand starting at position 786 of SEQ ID NO: 586896
acucauucccagugucaga

SEQ ID NO: 751883 - RNA, 19 nt, Artificial Sequence
  Description of Artificial Sequence: Synthetic oligonucleotide
  Antisense strand to SEQ ID NO: 751882
ucugacacugggaaugagu

SEQ ID NO: 751884 - RNA, 19 nt, Artificial Sequence
  Description of Artificial Sequence: Synthetic oligonucleotide
  Sense strand starting at position 1251 of SEQ ID NO: 586896
cuggcagagugaccuuaau

SEQ ID NO: 751885 - RNA, 19 nt, Artificial Sequence
  Description of Artificial Sequence: Synthetic oligonucleotide
  Antisense strand to SEQ ID NO: 751884
auuaaggucacucugccag

SEQ ID NO: 751886 - RNA, 19 nt, Artificial Sequence
  Description of Artificial Sequence: Synthetic oligonucleotide
  Sense strand starting at position 1462 of SEQ ID NO: 586896
gccuccucccgacaggaau

SEQ ID NO: 751887 - RNA, 19 nt, Artificial Sequence
  Description of Artificial Sequence: Synthetic oligonucleotide
  Antisense strand to SEQ ID NO: 751886
auuccugucgggaggaggc

SEQ ID NO: 751888 - RNA, 19 nt, Artificial Sequence
  Description of Artificial Sequence: Synthetic oligonucleotide
  Sense strand starting at position 1473 of SEQ ID NO: 586896
acaggaauuccaggccuau

SEQ ID NO: 751889 - RNA, 19 nt, Artificial Sequence
  Description of Artificial Sequence: Synthetic oligonucleotide
  Antisense strand to SEQ ID NO: 751888
auaggccuggaauuccugu

SEQ ID NO: 751890 - RNA, 19 nt, Artificial Sequence
  Description of Artificial Sequence: Synthetic oligonucleotide
  Sense strand starting at position 1526 of SEQ ID NO: 586896
ccacgacuccgucagaauc

SEQ ID NO: 751891 - RNA, 19 nt, Artificial Sequence
  Description of Artificial Sequence: Synthetic oligonucleotide
  Antisense strand to SEQ ID NO: 751890
gauucugacggagucgugg

SEQ ID NO: 751892 - RNA, 19 nt, Artificial Sequence
  Description of Artificial Sequence: Synthetic oligonucleotide
  Sense strand starting at position 2310 of SEQ ID NO: 586896
ggccuuagcugccuuauga

SEQ ID NO: 751893 - RNA, 19 nt, Artificial Sequence
  Description of Artificial Sequence: Synthetic oligonucleotide
  Antisense strand to SEQ ID NO: 751892
ucauaaggcagcuaaggcc

SEQ ID NO: 751894 - RNA, 19 nt, Artificial Sequence
  Description of Artificial Sequence: Synthetic oligonucleotide
  Sense strand starting at position 2486 of SEQ ID NO: 586896
gcuuccgauuuguuccaaa

SEQ ID NO: 751895 - RNA, 19 nt, Artificial Sequence
  Description of Artificial Sequence: Synthetic oligonucleotide
  Antisense strand to SEQ ID NO: 751894
uuuggaacaaaucggaagc

SEQ ID NO: 751896 - RNA, 19 nt, Artificial Sequence
  Description of Artificial Sequence: Synthetic oligonucleotide
  Sense strand starting at position 2489 of SEQ ID NO: 586896
uccgauuuguuccaaagug

SEQ ID NO: 751897 - RNA, 19 nt, Artificial Sequence
  Description of Artificial Sequence: Synthetic oligonucleotide
  Antisense strand to SEQ ID NO: 751896
cacuuuggaacaaaucgga

SEQ ID NO: 751898 - RNA, 19 nt, Artificial Sequence
  Description of Artificial Sequence: Synthetic oligonucleotide
  Sense strand starting at position 2654 of SEQ ID NO: 586896
gggcauuucgcuuggaaag

SEQ ID NO: 751899 - RNA, 19 nt, Artificial Sequence
  Description of Artificial Sequence: Synthetic oligonucleotide
  Antisense strand to SEQ ID NO: 751898
cuuuccaagcgaaaugccc

SEQ ID NO: 751900 - RNA, 19 nt, Artificial Sequence
  Description of Artificial Sequence: Synthetic oligonucleotide
  Sense strand starting at position 2968 of SEQ ID NO: 586896
uacguauauccauggcaug

SEQ ID NO: 751901 - RNA, 19 nt, Artificial Sequence
  Description of Artificial Sequence: Synthetic oligonucleotide
  Antisense strand to SEQ ID NO: 751900
caugccauggauauacgua

SEQ ID NO: 751902 - RNA, 19 nt, Artificial Sequence
  Description of Artificial Sequence: Synthetic oligonucleotide
  Sense strand starting at position 2988 of SEQ ID NO: 586896
cuggcauaauuggaauaau

SEQ ID NO: 751903 - RNA, 19 nt, Artificial Sequence
  Description of Artificial Sequence: Synthetic oligonucleotide
  Antisense strand to SEQ ID NO: 751902
auuauuccaauuaugccag

SEQ ID NO: 751904 - RNA, 19 nt, Artificial Sequence
  Description of Artificial Sequence: Synthetic oligonucleotide
  Sense strand starting at position 2997 of SEQ ID NO: 586896
uuggaauaaugccuugcga

SEQ ID NO: 751905 - RNA, 19 nt, Artificial Sequence
  Description of Artificial Sequence: Synthetic oligonucleotide
  Antisense strand to SEQ ID NO: 751904
ucgcaaggcauuauuccaa

SEQ ID NO: 751906 - RNA, 19 nt, Artificial Sequence
  Description of Artificial Sequence: Synthetic oligonucleotide
  Sense strand starting at position 2999 of SEQ ID NO: 586896
ggaauaaugccuugcgaag

SEQ ID NO: 751907 - RNA, 19 nt, Artificial Sequence
  Description of Artificial Sequence: Synthetic oligonucleotide
  Antisense strand to SEQ ID NO: 751906
cuucgcaaggcauuauucc

SEQ ID NO: 751908 - RNA, 19 nt, Artificial Sequence
  Description of Artificial Sequence: Synthetic oligonucleotide
  Sense strand starting at position 3005 of SEQ ID NO: 586896
augccuugcgaagauguau

SEQ ID NO: 751909 - RNA, 19 nt, Artificial Sequence
  Description of Artificial Sequence: Synthetic oligonucleotide
  Antisense strand to SEQ ID NO: 751908
auacaucuucgcaaggcau

SEQ ID NO: 751910 - RNA, 19 nt, Artificial Sequence
  Description of Artificial Sequence: Synthetic oligonucleotide
  Sense strand starting at position 3089 of SEQ ID NO: 586896
augauuauuuauggcugua

SEQ ID NO: 751911 - RNA, 19 nt, Artificial Sequence
  Description of Artificial Sequence: Synthetic oligonucleotide
  Antisense strand to SEQ ID NO: 751910
uacagccauaaauaaucau

SEQ ID NO: 751912 - RNA, 19 nt, Artificial Sequence
  Description of Artificial Sequence: Synthetic oligonucleotide
  Sense strand starting at position 3238 of SEQ ID NO: 586896
augguuauuucucaucuuu

SEQ ID NO: 751913 - RNA, 19 nt, Artificial Sequence
  Description of Artificial Sequence: Synthetic oligonucleotide
  Antisense strand to SEQ ID NO: 751912
aaagaugagaaauaaccau

SEQ ID NO: 751914 - RNA, 19 nt, Artificial Sequence
  Description of Artificial Sequence: Synthetic oligonucleotide
  Sense strand starting at position 3260 of SEQ ID NO: 586896
acuugcauuucuuagagua

SEQ ID NO: 751915 - RNA, 19 nt, Artificial Sequence
  Description of Artificial Sequence: Synthetic oligonucleotide
  Antisense strand to SEQ ID NO: 751914
uacucuaagaaaugcaagu

SEQ ID NO: 751916 - RNA, 19 nt, Artificial Sequence
  Description of Artificial Sequence: Synthetic oligonucleotide
  Sense strand starting at position 3262 of SEQ ID NO: 586896
uugcauuucuuagaguacu

SEQ ID NO: 751917 - RNA, 19 nt, Artificial Sequence
  Description of Artificial Sequence: Synthetic oligonucleotide
  Antisense strand to SEQ ID NO: 751916
aguacucuaagaaaugcaa

SEQ ID NO: 751918 - RNA, 19 nt, Artificial Sequence
  Description of Artificial Sequence: Synthetic oligonucleotide
  Sense strand starting at position 3274 of SEQ ID NO: 586896
gaguacuaguuagcuggau

SEQ ID NO: 751919 - RNA, 19 nt, Artificial Sequence
  Description of Artificial Sequence: Synthetic oligonucleotide
  Antisense strand to SEQ ID NO: 751918
auccagcuaacuaguacuc

SEQ ID NO: 751920 - RNA, 19 nt, Artificial Sequence
  Description of Artificial Sequence: Synthetic oligonucleotide
  Sense strand starting at position 3275 of SEQ ID NO: 586896
aguacuaguuagcuggauu

SEQ ID NO: 751921 - RNA, 19 nt, Artificial Sequence
  Description of Artificial Sequence: Synthetic oligonucleotide
  Antisense strand to SEQ ID NO: 751920
aauccagcuaacuaguacu

SEQ ID NO: 751922 - RNA, 19 nt, Artificial Sequence
  Description of Artificial Sequence: Synthetic oligonucleotide
  Sense strand starting at position 3276 of SEQ ID NO: 586896
guacuaguuagcuggauug

SEQ ID NO: 751923 - RNA, 19 nt, Artificial Sequence
  Description of Artificial Sequence: Synthetic oligonucleotide
  Antisense strand to SEQ ID NO: 751922
caauccagcuaacuaguac

SEQ ID NO: 751924 - RNA, 19 nt, Artificial Sequence
  Description of Artificial Sequence: Synthetic oligonucleotide
  Sense strand starting at position 3278 of SEQ ID NO: 586896
acuaguuagcuggauuguu

SEQ ID NO: 751925 - RNA, 19 nt, Artificial Sequence
  Description of Artificial Sequence: Synthetic oligonucleotide
  Antisense strand to SEQ ID NO: 751924
aacaauccagcuaacuagu

SEQ ID NO: 751926 - RNA, 19 nt, Artificial Sequence
  Description of Artificial Sequence: Synthetic oligonucleotide
  Sense strand starting at position 3334 of SEQ ID NO: 586896
uugugaauuuguuuauguc

SEQ ID NO: 751927 - RNA, 19 nt, Artificial Sequence
  Description of Artificial Sequence: Synthetic oligonucleotide
  Antisense strand to SEQ ID NO: 751926
gacauaaacaaauucacaa

SEQ ID NO: 751928 - RNA, 19 nt, Artificial Sequence
  Description of Artificial Sequence: Synthetic oligonucleotide
  Sense strand starting at position 3337 of SEQ ID NO: 586896
ugaauuuguuuauguccau

SEQ ID NO: 751929 - RNA, 19 nt, Artificial Sequence
  Description of Artificial Sequence: Synthetic oligonucleotide
  Antisense strand to SEQ ID NO: 751928
auggacauaaacaaauuca

SEQ ID NO: 751930 - RNA, 19 nt, Artificial Sequence
  Description of Artificial Sequence: Synthetic oligonucleotide
  Sense strand starting at position 3434 of SEQ ID NO: 586896
auuaaagacuugucauguu

SEQ ID NO: 751931 - RNA, 19 nt, Artificial Sequence
  Description of Artificial Sequence: Synthetic oligonucleotide
  Antisense strand to SEQ ID NO: 751930
aacaugacaagucuuuaau

SEQ ID NO: 751932 - RNA, 19 nt, Artificial Sequence
  Description of Artificial Sequence: Synthetic oligonucleotide
  Sense strand starting at position 3443 of SEQ ID NO: 586896
uugucauguuuguugcaga

SEQ ID NO: 751933 - RNA, 19 nt, Artificial Sequence
  Description of Artificial Sequence: Synthetic oligonucleotide
  Antisense strand to SEQ ID NO: 751932
ucugcaacaaacaugacaa

SEQ ID NO: 751934 - RNA, 19 nt, Artificial Sequence
  Description of Artificial Sequence: Synthetic oligonucleotide
  Sense strand starting at position 3459 of SEQ ID NO: 586896
agacguguuuccucguacu

SEQ ID NO: 751935 - RNA, 19 nt, Artificial Sequence
  Description of Artificial Sequence: Synthetic oligonucleotide
  Antisense strand to SEQ ID NO: 751934
aguacgaggaaacacgucu

SEQ ID NO: 751936 - RNA, 19 nt, Artificial Sequence
  Description of Artificial Sequence: Synthetic oligonucleotide
  Sense strand starting at position 3461 of SEQ ID NO: 586896
acguguuuccucguacuug

SEQ ID NO: 751937 - RNA, 19 nt, Artificial Sequence
  Description of Artificial Sequence: Synthetic oligonucleotide
  Antisense strand to SEQ ID NO: 751936
caaguacgaggaaacacgu

SEQ ID NO: 751938 - RNA, 19 nt, Artificial Sequence
  Description of Artificial Sequence: Synthetic oligonucleotide
  Sense strand starting at position 3464 of SEQ ID NO: 586896
uguuuccucguacuuguua

SEQ ID NO: 751939 - RNA, 19 nt, Artificial Sequence
  Description of Artificial Sequence: Synthetic oligonucleotide
  Antisense strand to SEQ ID NO: 751938
uaacaaguacgaggaaaca

SEQ ID NO: 751940 - RNA, 19 nt, Artificial Sequence
  Description of Artificial Sequence: Synthetic oligonucleotide
  Sense strand starting at position 3465 of SEQ ID NO: 586896
guuuccucguacuuguuaa

SEQ ID NO: 751941 - RNA, 19 nt, Artificial Sequence
  Description of Artificial Sequence: Synthetic oligonucleotide
  Antisense strand to SEQ ID NO: 751940
uuaacaaguacgaggaaac

SEQ ID NO: 751942 - RNA, 19 nt, Artificial Sequence
  Description of Artificial Sequence: Synthetic oligonucleotide
  Sense strand starting at position 3792 of SEQ ID NO: 586896
aguuguugaugugagaaag

SEQ ID NO: 751943 - RNA, 19 nt, Artificial Sequence
  Description of Artificial Sequence: Synthetic oligonucleotide
  Antisense strand to SEQ ID NO: 751942
cuuucucacaucaacaacu

SEQ ID NO: 751944 - RNA, 19 nt, Artificial Sequence
  Description of Artificial Sequence: Synthetic oligonucleotide
  Sense strand starting at position 2024 of SEQ ID NO: 586897
ggagcugccaucuaugaac

SEQ ID NO: 751945 - RNA, 19 nt, Artificial Sequence
  Description of Artificial Sequence: Synthetic oligonucleotide
  Antisense strand to SEQ ID NO: 751944
guucauagauggcagcucc

SEQ ID NO: 751946 - RNA, 19 nt, Artificial Sequence
  Description of Artificial Sequence: Synthetic oligonucleotide
  Sense strand starting at position 2065 of SEQ ID NO: 586897
cuagacuacucuccuguuu

SEQ ID NO: 751947 - RNA, 19 nt, Artificial Sequence
  Description of Artificial Sequence: Synthetic oligonucleotide
  Antisense strand to SEQ ID NO: 751946
aaacaggagaguagucuag

SEQ ID NO: 751948 - RNA, 19 nt, Artificial Sequence
  Description of Artificial Sequence: Synthetic oligonucleotide
  Sense strand starting at position 2077 of SEQ ID NO: 586897
ccuguuuccuuguguggua

SEQ ID NO: 751949 - RNA, 19 nt, Artificial Sequence
  Description of Artificial Sequence: Synthetic oligonucleotide
  Antisense strand to SEQ ID NO: 751948
uaccacacaaggaaacagg

SEQ ID NO: 751950 - RNA, 19 nt, Artificial Sequence
  Description of Artificial Sequence: Synthetic oligonucleotide
  Sense strand starting at position 2078 of SEQ ID NO: 586897
cuguuuccuugugugguau

SEQ ID NO: 751951 - RNA, 19 nt, Artificial Sequence
  Description of Artificial Sequence: Synthetic oligonucleotide
  Antisense strand to SEQ ID NO: 751950
auaccacacaaggaaacag

SEQ ID NO: 751952 - RNA, 19 nt, Artificial Sequence
  Description of Artificial Sequence: Synthetic oligonucleotide
  Sense strand starting at position 2082 of SEQ ID NO: 586897
uuccuugugugguauguau

SEQ ID NO: 751953 - RNA, 19 nt, Artificial Sequence
  Description of Artificial Sequence: Synthetic oligonucleotide
  Antisense strand to SEQ ID NO: 751952
auacauaccacacaaggaa

SEQ ID NO: 751954 - RNA, 19 nt, Artificial Sequence
  Description of Artificial Sequence: Synthetic oligonucleotide
  Sense strand starting at position 2084 of SEQ ID NO: 586897
ccuugugugguauguauua

SEQ ID NO: 751955 - RNA, 19 nt, Artificial Sequence
  Description of Artificial Sequence: Synthetic oligonucleotide
  Antisense strand to SEQ ID NO: 751954
uaauacauaccacacaagg

SEQ ID NO: 751956 - RNA, 19 nt, Artificial Sequence
  Description of Artificial Sequence: Synthetic oligonucleotide
  Sense strand starting at position 2086 of SEQ ID NO: 586897
uugugugguauguauuauu

SEQ ID NO: 751957 - RNA, 19 nt, Artificial Sequence
  Description of Artificial Sequence: Synthetic oligonucleotide
  Antisense strand to SEQ ID NO: 751956
aauaauacauaccacacaa

SEQ ID NO: 751958 - RNA, 19 nt, Artificial Sequence
  Description of Artificial Sequence: Synthetic oligonucleotide
  Sense strand starting at position 2132 of SEQ ID NO: 586897
caaggauguuugucuuaug

SEQ ID NO: 751959 - RNA, 19 nt, Artificial Sequence
  Description of Artificial Sequence: Synthetic oligonucleotide
  Antisense strand to SEQ ID NO: 751958
cauaagacaaacauccuug

SEQ ID NO: 751960 - RNA, 19 nt, Artificial Sequence
  Description of Artificial Sequence: Synthetic oligonucleotide
  Sense strand starting at position 2133 of SEQ ID NO: 586897
aaggauguuugucuuaugu

SEQ ID NO: 751961 - RNA, 19 nt, Artificial Sequence
  Description of Artificial Sequence: Synthetic oligonucleotide
  Antisense strand to SEQ ID NO: 751960
acauaagacaaacauccuu

SEQ ID NO: 751962 - RNA, 19 nt, Artificial Sequence
  Description of Artificial Sequence: Synthetic oligonucleotide
  Sense strand starting at position 2135 of SEQ ID NO: 586897
ggauguuugucuuaugucu

SEQ ID NO: 751963 - RNA, 19 nt, Artificial Sequence
  Description of Artificial Sequence: Synthetic oligonucleotide
  Antisense strand to SEQ ID NO: 751962
agacauaagacaaacaucc

SEQ ID NO: 751964 - RNA, 19 nt, Artificial Sequence
  Description of Artificial Sequence: Synthetic oligonucleotide
  Sense strand starting at position 2149 of SEQ ID NO: 586897
ugucuuuguugcccuggaa

SEQ ID NO: 751965 - RNA, 19 nt, Artificial Sequence
  Description of Artificial Sequence: Synthetic oligonucleotide
  Antisense strand to SEQ ID NO: 751964
uuccagggcaacaaagaca

SEQ ID NO: 751966 - RNA, 19 nt, Artificial Sequence
  Description of Artificial Sequence: Synthetic oligonucleotide
  Sense strand starting at position 2152 of SEQ ID NO: 586897
cuuuguugcccuggaaacu

SEQ ID NO: 751967 - RNA, 19 nt, Artificial Sequence
  Description of Artificial Sequence: Synthetic oligonucleotide
  Antisense strand to SEQ ID NO: 751966
aguuuccagggcaacaaag

SEQ ID NO: 751968 - RNA, 19 nt, Artificial Sequence
  Description of Artificial Sequence: Synthetic oligonucleotide
  Sense strand starting at position 2153 of SEQ ID NO: 586897
uuuguugcccuggaaacuu

SEQ ID NO: 751969 - RNA, 19 nt, Artificial Sequence
  Description of Artificial Sequence: Synthetic oligonucleotide
  Antisense strand to SEQ ID NO: 751968
aaguuuccagggcaacaaa

SEQ ID NO: 751970 - RNA, 19 nt, Artificial Sequence
  Description of Artificial Sequence: Synthetic oligonucleotide
  Sense strand starting at position 2180 of SEQ ID NO: 586897
gagggacucugauacuaga

SEQ ID NO: 751971 - RNA, 19 nt, Artificial Sequence
  Description of Artificial Sequence: Synthetic oligonucleotide
  Antisense strand to SEQ ID NO: 751970
ucuaguaucagagucccuc

SEQ ID NO: 751972 - RNA, 19 nt, Artificial Sequence
  Description of Artificial Sequence: Synthetic oligonucleotide
  Sense strand starting at position 2183 of SEQ ID NO: 586897
ggacucugauacuagaauc

SEQ ID NO: 751973 - RNA, 19 nt, Artificial Sequence
  Description of Artificial Sequence: Synthetic oligonucleotide
  Antisense strand to SEQ ID NO: 751972
gauucuaguaucagagucc

SEQ ID NO: 751974 - RNA, 19 nt, Artificial Sequence
  Description of Artificial Sequence: Synthetic oligonucleotide
  Sense strand starting at position 2235 of SEQ ID NO: 586897
gaguaaaugcuccagugcu

SEQ ID NO: 751975 - RNA, 19 nt, Artificial Sequence
  Description of Artificial Sequence: Synthetic oligonucleotide
  Antisense strand to SEQ ID NO: 751974
agcacuggagcauuuacuc

SEQ ID NO: 751976 - RNA, 19 nt, Artificial Sequence
  Description of Artificial Sequence: Synthetic oligonucleotide
  Sense strand starting at position 2404 of SEQ ID NO: 586897
gagcucccuguuuaacaga

SEQ ID NO: 751977 - RNA, 19 nt, Artificial Sequence
  Description of Artificial Sequence: Synthetic oligonucleotide
  Antisense strand to SEQ ID NO: 751976
ucuguuaaacagggagcuc

SEQ ID NO: 751978 - RNA, 19 nt, Artificial Sequence
  Description of Artificial Sequence: Synthetic oligonucleotide
  Sense strand starting at position 2420 of SEQ ID NO: 586897
agaugaagcaacugugaga

SEQ ID NO: 751979 - RNA, 19 nt, Artificial Sequence
  Description of Artificial Sequence: Synthetic oligonucleotide
  Antisense strand to SEQ ID NO: 751978
ucucacaguugcuucaucu

SEQ ID NO: 751980 - RNA, 19 nt, Artificial Sequence
  Description of Artificial Sequence: Synthetic oligonucleotide
  Sense strand starting at position 2423 of SEQ ID NO: 586897
ugaagcaacugugagacau

SEQ ID NO: 751981 - RNA, 19 nt, Artificial Sequence
  Description of Artificial Sequence: Synthetic oligonucleotide
  Antisense strand to SEQ ID NO: 751980
augucucacaguugcuuca

SEQ ID NO: 751982 - RNA, 19 nt, Artificial Sequence
  Description of Artificial Sequence: Synthetic oligonucleotide
  Sense strand starting at position 2500 of SEQ ID NO: 586897
gggaacaggucuuuaaacu

SEQ ID NO: 751983 - RNA, 19 nt, Artificial Sequence
  Description of Artificial Sequence: Synthetic oligonucleotide
  Antisense strand to SEQ ID NO: 751982
aguuuaaagaccuguuccc

SEQ ID NO: 751984 - RNA, 19 nt, Artificial Sequence
  Description of Artificial Sequence: Synthetic oligonucleotide
  Sense strand starting at position 2527 of SEQ ID NO: 586897
aguguucuuuccucuaaag

SEQ ID NO: 751985 - RNA, 19 nt, Artificial Sequence
  Description of Artificial Sequence: Synthetic oligonucleotide
  Antisense strand to SEQ ID NO: 751984
cuuuagaggaaagaacacu

SEQ ID NO: 751986 - RNA, 19 nt, Artificial Sequence
  Description of Artificial Sequence: Synthetic oligonucleotide
  Sense strand starting at position 2550 of SEQ ID NO: 586897
uggguuugcaaagaucuca

SEQ ID NO: 751987 - RNA, 19 nt, Artificial Sequence
  Description of Artificial Sequence: Synthetic oligonucleotide
  Antisense strand to SEQ ID NO: 751986
ugagaucuuugcaaaccca

SEQ ID NO: 751988 - RNA, 19 nt, Artificial Sequence
  Description of Artificial Sequence: Synthetic oligonucleotide
  Sense strand starting at position 2555 of SEQ ID NO: 586897
uugcaaagaucucagagaa

SEQ ID NO: 751989 - RNA, 19 nt, Artificial Sequence
  Description of Artificial Sequence: Synthetic oligonucleotide
  Antisense strand to SEQ ID NO: 751988
uucucugagaucuuugcaa

SEQ ID NO: 751990 - RNA, 19 nt, Artificial Sequence
  Description of Artificial Sequence: Synthetic oligonucleotide
  Sense strand starting at position 2808 of SEQ ID NO: 586897
aaggaaggcucucccugaa

SEQ ID NO: 751991 - RNA, 19 nt, Artificial Sequence
  Description of Artificial Sequence: Synthetic oligonucleotide
  Antisense strand to SEQ ID NO: 751990
uucagggagagccuuccuu

SEQ ID NO: 751992 - RNA, 19 nt, Artificial Sequence
  Description of Artificial Sequence: Synthetic oligonucleotide
  Sense strand starting at position 3016 of SEQ ID NO: 586897
cccagauuccugcacagga

SEQ ID NO: 751993 - RNA, 19 nt, Artificial Sequence
  Description of Artificial Sequence: Synthetic oligonucleotide
  Antisense strand to SEQ ID NO: 751992
uccugugcaggaaucuggg

SEQ ID NO: 751994 - RNA, 19 nt, Artificial Sequence
  Description of Artificial Sequence: Synthetic oligonucleotide
  Sense strand starting at position 3138 of SEQ ID NO: 586897
ucucucuucucagggaaca

SEQ ID NO: 751995 - RNA, 19 nt, Artificial Sequence
  Description of Artificial Sequence: Synthetic oligonucleotide
  Antisense strand to SEQ ID NO: 751994
uguucccugagaagagaga

SEQ ID NO: 751996 - RNA, 19 nt, Artificial Sequence
  Description of Artificial Sequence: Synthetic oligonucleotide
  Sense strand starting at position 3165 of SEQ ID NO: 586897
acucauucccagugucaga

SEQ ID NO: 751997 - RNA, 19 nt, Artificial Sequence
  Description of Artificial Sequence: Synthetic oligonucleotide
  Antisense strand to SEQ ID NO: 751996
ucugacacugggaaugagu

SEQ ID NO: 751998 - RNA, 19 nt, Artificial Sequence
  Description of Artificial Sequence: Synthetic oligonucleotide
  Sense strand starting at position 3630 of SEQ ID NO: 586897
cuggcagagugaccuuaau

SEQ ID NO: 751999 - RNA, 19 nt, Artificial Sequence
  Description of Artificial Sequence: Synthetic oligonucleotide
  Antisense strand to SEQ ID NO: 751998
auuaaggucacucugccag

SEQ ID NO: 752000 - RNA, 19 nt, Artificial Sequence
  Description of Artificial Sequence: Synthetic oligonucleotide
  Sense strand starting at position 3636 of SEQ ID NO: 586897
gagugaccuuaauggacau

SEQ ID NO: 752001 - RNA, 19 nt, Artificial Sequence
  Description of Artificial Sequence: Synthetic oligonucleotide
  Antisense strand to SEQ ID NO: 752000
auguccauuaaggucacuc

SEQ ID NO: 752002 - RNA, 19 nt, Artificial Sequence
  Description of Artificial Sequence: Synthetic oligonucleotide
  Sense strand starting at position 3746 of SEQ ID NO: 586897
ucuccauucuguggccaga

SEQ ID NO: 752003 - RNA, 19 nt, Artificial Sequence
  Description of Artificial Sequence: Synthetic oligonucleotide
  Antisense strand to SEQ ID NO: 752002
ucuggccacagaauggaga

SEQ ID NO: 752004 - RNA, 19 nt, Artificial Sequence
  Description of Artificial Sequence: Synthetic oligonucleotide
  Sense strand starting at position 3770 of SEQ ID NO: 586897
ggcuuucccugauggccaa

SEQ ID NO: 752005 - RNA, 19 nt, Artificial Sequence
  Description of Artificial Sequence: Synthetic oligonucleotide
  Antisense strand to SEQ ID NO: 752004
uuggccaucagggaaagcc

SEQ ID NO: 752006 - RNA, 19 nt, Artificial Sequence
  Description of Artificial Sequence: Synthetic oligonucleotide
  Sense strand starting at position 3841 of SEQ ID NO: 586897
gccuccucccgacaggaau

SEQ ID NO: 752007 - RNA, 19 nt, Artificial Sequence
  Description of Artificial Sequence: Synthetic oligonucleotide
  Antisense strand to SEQ ID NO: 752006
auuccugucgggaggaggc

SEQ ID NO: 752008 - RNA, 19 nt, Artificial Sequence
  Description of Artificial Sequence: Synthetic oligonucleotide
  Sense strand starting at position 3852 of SEQ ID NO: 586897
acaggaauuccaggccuau

SEQ ID NO: 752009 - RNA, 19 nt, Artificial Sequence
  Description of Artificial Sequence: Synthetic oligonucleotide
  Antisense strand to SEQ ID NO: 752008
auaggccuggaauuccugu

SEQ ID NO: 752010 - RNA, 19 nt, Artificial Sequence
  Description of Artificial Sequence: Synthetic oligonucleotide
  Sense strand starting at position 3905 of SEQ ID NO: 586897
ccacgacuccgucagaauc

SEQ ID NO: 752011 - RNA, 19 nt, Artificial Sequence
  Description of Artificial Sequence: Synthetic oligonucleotide
  Antisense strand to SEQ ID NO: 752010
gauucugacggagucgugg

SEQ ID NO: 752012 - RNA, 19 nt, Artificial Sequence
  Description of Artificial Sequence: Synthetic oligonucleotide
  Sense strand starting at position 105 of SEQ ID NO: 586898
aaggguuauccugagagcu

SEQ ID NO: 752013 - RNA, 19 nt, Artificial Sequence
  Description of Artificial Sequence: Synthetic oligonucleotide
  Antisense strand to SEQ ID NO: 752012
agcucucaggauaacccuu

SEQ ID NO: 752014 - RNA, 19 nt, Artificial Sequence
  Description of Artificial Sequence: Synthetic oligonucleotide
  Sense strand starting at position 156 of SEQ ID NO: 586898
augccaaaugguugcaagu

SEQ ID NO: 752015 - RNA, 19 nt, Artificial Sequence
  Description of Artificial Sequence: Synthetic oligonucleotide
  Antisense strand to SEQ ID NO: 752014
acuugcaaccauuuggcau

SEQ ID NO: 752016 - RNA, 19 nt, Artificial Sequence
  Description of Artificial Sequence: Synthetic oligonucleotide
  Sense strand starting at position 422 of SEQ ID NO: 586898
ugagaucaugcaugccacu

SEQ ID NO: 752017 - RNA, 19 nt, Artificial Sequence
  Description of Artificial Sequence: Synthetic oligonucleotide
  Antisense strand to SEQ ID NO: 752016
aguggcaugcaugaucuca

SEQ ID NO: 752018 - RNA, 19 nt, Artificial Sequence
  Description of Artificial Sequence: Synthetic oligonucleotide
  Sense strand starting at position 532 of SEQ ID NO: 586898
aaguuaaaggcaugagaau

SEQ ID NO: 752019 - RNA, 19 nt, Artificial Sequence
  Description of Artificial Sequence: Synthetic oligonucleotide
  Antisense strand to SEQ ID NO: 752018
auucucaugccuuuaacuu

SEQ ID NO: 752020 - RNA, 19 nt, Artificial Sequence
  Description of Artificial Sequence: Synthetic oligonucleotide
  Sense strand starting at position 617 of SEQ ID NO: 586898
acaggucaucuggagcaau

SEQ ID NO: 752021 - RNA, 19 nt, Artificial Sequence
  Description of Artificial Sequence: Synthetic oligonucleotide
  Antisense strand to SEQ ID NO: 752020
auugcuccagaugaccugu

SEQ ID NO: 752022 - RNA, 19 nt, Artificial Sequence
  Description of Artificial Sequence: Synthetic oligonucleotide
  Sense strand starting at position 692 of SEQ ID NO: 586898
cugacaucauuugguguga

SEQ ID NO: 752023 - RNA, 19 nt, Artificial Sequence
  Description of Artificial Sequence: Synthetic oligonucleotide
  Antisense strand to SEQ ID NO: 752022
ucacaccaaaugaugucag

SEQ ID NO: 752024 - RNA, 19 nt, Artificial Sequence
  Description of Artificial Sequence: Synthetic oligonucleotide
  Sense strand starting at position 694 of SEQ ID NO: 586898
gacaucauuuggugugaca

SEQ ID NO: 752025 - RNA, 19 nt, Artificial Sequence
  Description of Artificial Sequence: Synthetic oligonucleotide
  Antisense strand to SEQ ID NO: 752024
ugucacaccaaaugauguc

SEQ ID NO: 752026 - RNA, 19 nt, Artificial Sequence
  Description of Artificial Sequence: Synthetic oligonucleotide
  Sense strand starting at position 697 of SEQ ID NO: 586898
aucauuuggugugacaaca

SEQ ID NO: 752027 - RNA, 19 nt, Artificial Sequence
  Description of Artificial Sequence: Synthetic oligonucleotide
  Antisense strand to SEQ ID NO: 752026
uguugucacaccaaaugau

SEQ ID NO: 752028 - RNA, 19 nt, Artificial Sequence
  Description of Artificial Sequence: Synthetic oligonucleotide
  Sense strand starting at position 826 of SEQ ID NO: 586898
gaucuugggucacuaccaa

SEQ ID NO: 752029 - RNA, 19 nt, Artificial Sequence
  Description of Artificial Sequence: Synthetic oligonucleotide
  Antisense strand to SEQ ID NO: 752028
uugguagugacccaagauc

SEQ ID NO: 752030 - RNA, 19 nt, Artificial Sequence
  Description of Artificial Sequence: Synthetic oligonucleotide
  Sense strand starting at position 932 of SEQ ID NO: 586898
ucugcagacgugugccaaa

SEQ ID NO: 752031 - RNA, 19 nt, Artificial Sequence
  Description of Artificial Sequence: Synthetic oligonucleotide
  Antisense strand to SEQ ID NO: 752030
uuuggcacacgucugcaga

SEQ ID NO: 752032 - RNA, 19 nt, Artificial Sequence
  Description of Artificial Sequence: Synthetic oligonucleotide
  Sense strand starting at position 1169 of SEQ ID NO: 586898
ggcagaauugauugaacca

SEQ ID NO: 752033 - RNA, 19 nt, Artificial Sequence
  Description of Artificial Sequence: Synthetic oligonucleotide
  Antisense strand to SEQ ID NO: 752032
ugguucaaucaauucugcc

SEQ ID NO: 752034 - RNA, 19 nt, Artificial Sequence
  Description of Artificial Sequence: Synthetic oligonucleotide
  Sense strand starting at position 1592 of SEQ ID NO: 586898
agcauuguagugagcgaga

SEQ ID NO: 752035 - RNA, 19 nt, Artificial Sequence
  Description of Artificial Sequence: Synthetic oligonucleotide
  Antisense strand to SEQ ID NO: 752034
ucucgcucacuacaaugcu

SEQ ID NO: 752036 - RNA, 19 nt, Artificial Sequence
  Description of Artificial Sequence: Synthetic oligonucleotide
  Sense strand starting at position 1594 of SEQ ID NO: 586898
cauuguagugagcgagacu

SEQ ID NO: 752037 - RNA, 19 nt, Artificial Sequence
  Description of Artificial Sequence: Synthetic oligonucleotide
  Antisense strand to SEQ ID NO: 752036
agucucgcucacuacaaug

SEQ ID NO: 752038 - RNA, 19 nt, Artificial Sequence
  Description of Artificial Sequence: Synthetic oligonucleotide
  Sense strand starting at position 1650 of SEQ ID NO: 586898
guccgucgccuucuugaaa

SEQ ID NO: 752039 - RNA, 19 nt, Artificial Sequence
  Description of Artificial Sequence: Synthetic oligonucleotide
  Antisense strand to SEQ ID NO: 752038
uuucaagaaggcgacggac

SEQ ID NO: 752040 - RNA, 19 nt, Artificial Sequence
  Description of Artificial Sequence: Synthetic oligonucleotide
  Sense strand starting at position 1651 of SEQ ID NO: 586898
uccgucgccuucuugaaau

SEQ ID NO: 752041 - RNA, 19 nt, Artificial Sequence
  Description of Artificial Sequence: Synthetic oligonucleotide
  Antisense strand to SEQ ID NO: 752040
auuucaagaaggcgacgga

SEQ ID NO: 752042 - RNA, 19 nt, Artificial Sequence
  Description of Artificial Sequence: Synthetic oligonucleotide
  Sense strand starting at position 1653 of SEQ ID NO: 586898
cgucgccuucuugaaauca

SEQ ID NO: 752043 - RNA, 19 nt, Artificial Sequence
  Description of Artificial Sequence: Synthetic oligonucleotide
  Antisense strand to SEQ ID NO: 752042
ugauuucaagaaggcgacg

SEQ ID NO: 752044 - RNA, 19 nt, Artificial Sequence
  Description of Artificial Sequence: Synthetic oligonucleotide
  Sense strand starting at position 1664 of SEQ ID NO: 586898
ugaaaucaucucgaugcca

SEQ ID NO: 752045 - RNA, 19 nt, Artificial Sequence
  Description of Artificial Sequence: Synthetic oligonucleotide
  Antisense strand to SEQ ID NO: 752044
uggcaucgagaugauuuca

SEQ ID NO: 752046 - RNA, 19 nt, Artificial Sequence
  Description of Artificial Sequence: Synthetic oligonucleotide
  Sense strand starting at position 2088 of SEQ ID NO: 586898
ccgcgguugcuaugggaga

SEQ ID NO: 752047 - RNA, 19 nt, Artificial Sequence
  Description of Artificial Sequence: Synthetic oligonucleotide
  Antisense strand to SEQ ID NO: 752046
ucucccauagcaaccgcgg

SEQ ID NO: 752048 - RNA, 19 nt, Artificial Sequence
  Description of Artificial Sequence: Synthetic oligonucleotide
  Sense strand starting at position 2152 of SEQ ID NO: 586898
gacgccuuccgagaaagca

SEQ ID NO: 752049 - RNA, 19 nt, Artificial Sequence
  Description of Artificial Sequence: Synthetic oligonucleotide
  Antisense strand to SEQ ID NO: 752048
ugcuuucucggaaggcguc

SEQ ID NO: 752050 - RNA, 19 nt, Artificial Sequence
  Description of Artificial Sequence: Synthetic oligonucleotide
  Sense strand starting at position 2198 of SEQ ID NO: 586898
gugguuucuguggaagauc

SEQ ID NO: 752051 - RNA, 19 nt, Artificial Sequence
  Description of Artificial Sequence: Synthetic oligonucleotide
  Antisense strand to SEQ ID NO: 752050
gaucuuccacagaaaccac

SEQ ID NO: 752052 - RNA, 19 nt, Artificial Sequence
  Description of Artificial Sequence: Synthetic oligonucleotide
  Sense strand starting at position 2363 of SEQ ID NO: 586898
uuuccagauugcucugaau

SEQ ID NO: 752053 - RNA, 19 nt, Artificial Sequence
  Description of Artificial Sequence: Synthetic oligonucleotide
  Antisense strand to SEQ ID NO: 752052
auucagagcaaucuggaaa

SEQ ID NO: 752054 - RNA, 19 nt, Artificial Sequence
  Description of Artificial Sequence: Synthetic oligonucleotide
  Sense strand starting at position 2369 of SEQ ID NO: 586898
gauugcucugaauguccua

SEQ ID NO: 752055 - RNA, 19 nt, Artificial Sequence
  Description of Artificial Sequence: Synthetic oligonucleotide
  Antisense strand to SEQ ID NO: 752054
uaggacauucagagcaauc

SEQ ID NO: 752056 - RNA, 19 nt, Artificial Sequence
  Description of Artificial Sequence: Synthetic oligonucleotide
  Sense strand starting at position 2374 of SEQ ID NO: 586898
cucugaauguccuagugag

SEQ ID NO: 752057 - RNA, 19 nt, Artificial Sequence
  Description of Artificial Sequence: Synthetic oligonucleotide
  Antisense strand to SEQ ID NO: 752056
cucacuaggacauucagag

SEQ ID NO: 752058 - RNA, 19 nt, Artificial Sequence
  Description of Artificial Sequence: Synthetic oligonucleotide
  Sense strand starting at position 2430 of SEQ ID NO: 586898
cucgguacucgacguuuau

SEQ ID NO: 752059 - RNA, 19 nt, Artificial Sequence
  Description of Artificial Sequence: Synthetic oligonucleotide
  Antisense strand to SEQ ID NO: 752058
auaaacgucgaguaccgag

SEQ ID NO: 752060 - RNA, 19 nt, Artificial Sequence
  Description of Artificial Sequence: Synthetic oligonucleotide
  Sense strand starting at position 2431 of SEQ ID NO: 586898
ucgguacucgacguuuauu

SEQ ID NO: 752061 - RNA, 19 nt, Artificial Sequence
  Description of Artificial Sequence: Synthetic oligonucleotide
  Antisense strand to SEQ ID NO: 752060
aauaaacgucgaguaccga

SEQ ID NO: 752062 - RNA, 19 nt, Artificial Sequence
  Description of Artificial Sequence: Synthetic oligonucleotide
  Sense strand starting at position 2439 of SEQ ID NO: 586898
cgacguuuauuaucaggga

SEQ ID NO: 752063 - RNA, 19 nt, Artificial Sequence
  Description of Artificial Sequence: Synthetic oligonucleotide
  Antisense strand to SEQ ID NO: 752062
ucccugauaauaaacgucg

SEQ ID NO: 752064 - RNA, 19 nt, Artificial Sequence
  Description of Artificial Sequence: Synthetic oligonucleotide
  Sense strand starting at position 2440 of SEQ ID NO: 586898
gacguuuauuaucagggaa

SEQ ID NO: 752065 - RNA, 19 nt, Artificial Sequence
  Description of Artificial Sequence: Synthetic oligonucleotide
  Antisense strand to SEQ ID NO: 752064
uucccugauaauaaacguc

SEQ ID NO: 752066 - RNA, 19 nt, Artificial Sequence
  Description of Artificial Sequence: Synthetic oligonucleotide
  Sense strand starting at position 2443 of SEQ ID NO: 586898
guuuauuaucagggaauuc

SEQ ID NO: 752067 - RNA, 19 nt, Artificial Sequence
  Description of Artificial Sequence: Synthetic oligonucleotide
  Antisense strand to SEQ ID NO: 752066
gaauucccugauaauaaac

SEQ ID NO: 752068 - RNA, 19 nt, Artificial Sequence
  Description of Artificial Sequence: Synthetic oligonucleotide
  Sense strand starting at position 2452 of SEQ ID NO: 586898
cagggaauucucggcugca

SEQ ID NO: 752069 - RNA, 19 nt, Artificial Sequence
  Description of Artificial Sequence: Synthetic oligonucleotide
  Antisense strand to SEQ ID NO: 752068
ugcagccgagaauucccug

SEQ ID NO: 752070 - RNA, 19 nt, Artificial Sequence
  Description of Artificial Sequence: Synthetic oligonucleotide
  Sense strand starting at position 2453 of SEQ ID NO: 586898
agggaauucucggcugcaa

SEQ ID NO: 752071 - RNA, 19 nt, Artificial Sequence
  Description of Artificial Sequence: Synthetic oligonucleotide
  Antisense strand to SEQ ID NO: 752070
uugcagccgagaauucccu

SEQ ID NO: 752072 - RNA, 19 nt, Artificial Sequence
  Description of Artificial Sequence: Synthetic oligonucleotide
  Sense strand starting at position 2455 of SEQ ID NO: 586898
ggaauucucggcugcaaga

SEQ ID NO: 752073 - RNA, 19 nt, Artificial Sequence
  Description of Artificial Sequence: Synthetic oligonucleotide
  Antisense strand to SEQ ID NO: 752072
ucuugcagccgagaauucc

SEQ ID NO: 752074 - RNA, 19 nt, Artificial Sequence
  Description of Artificial Sequence: Synthetic oligonucleotide
  Sense strand starting at position 2631 of SEQ ID NO: 586898
agcgauuaagcccaggagu

SEQ ID NO: 752075 - RNA, 19 nt, Artificial Sequence
  Description of Artificial Sequence: Synthetic oligonucleotide
  Antisense strand to SEQ ID NO: 752074
acuccugggcuuaaucgcu

SEQ ID NO: 752076 - RNA, 19 nt, Artificial Sequence
  Description of Artificial Sequence: Synthetic oligonucleotide
  Sense strand starting at position 3007 of SEQ ID NO: 586898
cccucaagccgaggaguuu

SEQ ID NO: 752077 - RNA, 19 nt, Artificial Sequence
  Description of Artificial Sequence: Synthetic oligonucleotide
  Antisense strand to SEQ ID NO: 752076
aaacuccucggcuugaggg

SEQ ID NO: 752078 - RNA, 19 nt, Artificial Sequence
  Description of Artificial Sequence: Synthetic oligonucleotide
  Sense strand starting at position 3270 of SEQ ID NO: 586898
ucacaagugcuuugaccau

SEQ ID NO: 752079 - RNA, 19 nt, Artificial Sequence
  Description of Artificial Sequence: Synthetic oligonucleotide
  Antisense strand to SEQ ID NO: 752078
auggucaaagcacuuguga

SEQ ID NO: 752080 - RNA, 19 nt, Artificial Sequence
  Description of Artificial Sequence: Synthetic oligonucleotide
  Sense strand starting at position 3621 of SEQ ID NO: 586898
aguauuaacguauacagau

SEQ ID NO: 752081 - RNA, 19 nt, Artificial Sequence
  Description of Artificial Sequence: Synthetic oligonucleotide
  Antisense strand to SEQ ID NO: 752080
aucuguauacguuaauacu

SEQ ID NO: 752082 - RNA, 19 nt, Artificial Sequence
  Description of Artificial Sequence: Synthetic oligonucleotide
  Sense strand starting at position 3687 of SEQ ID NO: 586898
guuugaauuggccaucucu

SEQ ID NO: 752083 - RNA, 19 nt, Artificial Sequence
  Description of Artificial Sequence: Synthetic oligonucleotide
  Antisense strand to SEQ ID NO: 752082
agagauggccaauucaaac

SEQ ID NO: 752084 - RNA, 19 nt, Artificial Sequence
  Description of Artificial Sequence: Synthetic oligonucleotide
  Sense strand starting at position 3824 of SEQ ID NO: 586898
uugaaaugucuccgcgguu

SEQ ID NO: 752085 - RNA, 19 nt, Artificial Sequence
  Description of Artificial Sequence: Synthetic oligonucleotide
  Antisense strand to SEQ ID NO: 752084
aaccgcggagacauuucaa

SEQ ID NO: 752086 - RNA, 19 nt, Artificial Sequence
  Description of Artificial Sequence: Synthetic oligonucleotide
  Sense strand starting at position 3825 of SEQ ID NO: 586898
ugaaaugucuccgcgguuu

SEQ ID NO: 752087 - RNA, 19 nt, Artificial Sequence
  Description of Artificial Sequence: Synthetic oligonucleotide
  Antisense strand to SEQ ID NO: 752086
aaaccgcggagacauuuca

SEQ ID NO: 752088 - RNA, 19 nt, Artificial Sequence
  Description of Artificial Sequence: Synthetic oligonucleotide
  Sense strand starting at position 3848 of SEQ ID NO: 586898
auaggauuguuccuuugua

SEQ ID NO: 752089 - RNA, 19 nt, Artificial Sequence
  Description of Artificial Sequence: Synthetic oligonucleotide
  Antisense strand to SEQ ID NO: 752088
uacaaaggaacaauccuau

SEQ ID NO: 752090 - RNA, 19 nt, Artificial Sequence
  Description of Artificial Sequence: Synthetic oligonucleotide
  Sense strand starting at position 3849 of SEQ ID NO: 586898
uaggauuguuccuuuguaa

SEQ ID NO: 752091 - RNA, 19 nt, Artificial Sequence
  Description of Artificial Sequence: Synthetic oligonucleotide
  Antisense strand to SEQ ID NO: 752090
uuacaaaggaacaauccua

SEQ ID NO: 752092 - RNA, 19 nt, Artificial Sequence
  Description of Artificial Sequence: Synthetic oligonucleotide
  Sense strand starting at position 172 of SEQ ID NO: 586899
gcuugauuccaggaguuga

SEQ ID NO: 752093 - RNA, 19 nt, Artificial Sequence
  Description of Artificial Sequence: Synthetic oligonucleotide
  Antisense strand to SEQ ID NO: 752092
ucaacuccuggaaucaagc

SEQ ID NO: 752094 - RNA, 19 nt, Artificial Sequence
  Description of Artificial Sequence: Synthetic oligonucleotide
  Sense strand starting at position 240 of SEQ ID NO: 586899
cgaagacccuaucucuaaa

SEQ ID NO: 752095 - RNA, 19 nt, Artificial Sequence
  Description of Artificial Sequence: Synthetic oligonucleotide
  Antisense strand to SEQ ID NO: 752094
uuuagagauagggucuucg

SEQ ID NO: 752096 - RNA, 19 nt, Artificial Sequence
  Description of Artificial Sequence: Synthetic oligonucleotide
  Sense strand starting at position 267 of SEQ ID NO: 586899
agaagugguuaucucuuaa

SEQ ID NO: 752097 - RNA, 19 nt, Artificial Sequence
  Description of Artificial Sequence: Synthetic oligonucleotide
  Antisense strand to SEQ ID NO: 752096
uuaagagauaaccacuucu

SEQ ID NO: 752098 - RNA, 19 nt, Artificial Sequence
  Description of Artificial Sequence: Synthetic oligonucleotide
  Sense strand starting at position 383 of SEQ ID NO: 586899
aguggaaucuuggcucuau

SEQ ID NO: 752099 - RNA, 19 nt, Artificial Sequence
  Description of Artificial Sequence: Synthetic oligonucleotide
  Antisense strand to SEQ ID NO: 752098
auagagccaagauuccacu

SEQ ID NO: 752100 - RNA, 19 nt, Artificial Sequence
  Description of Artificial Sequence: Synthetic oligonucleotide
  Sense strand starting at position 384 of SEQ ID NO: 586899
guggaaucuuggcucuauu

SEQ ID NO: 752101 - RNA, 19 nt, Artificial Sequence
  Description of Artificial Sequence: Synthetic oligonucleotide
  Antisense strand to SEQ ID NO: 752100
aauagagccaagauuccac

SEQ ID NO: 752102 - RNA, 19 nt, Artificial Sequence
  Description of Artificial Sequence: Synthetic oligonucleotide
  Sense strand starting at position 408 of SEQ ID NO: 586899
caggcuggcugaguuuaau

SEQ ID NO: 752103 - RNA, 19 nt, Artificial Sequence
  Description of Artificial Sequence: Synthetic oligonucleotide
  Antisense strand to SEQ ID NO: 752102
auuaaacucagccagccug

SEQ ID NO: 752104 - RNA, 19 nt, Artificial Sequence
  Description of Artificial Sequence: Synthetic oligonucleotide
  Sense strand starting at position 411 of SEQ ID NO: 586899
gcuggcugaguuuaaucau

SEQ ID NO: 752105 - RNA, 19 nt, Artificial Sequence
  Description of Artificial Sequence: Synthetic oligonucleotide
  Antisense strand to SEQ ID NO: 752104
augauuaaacucagccagc

SEQ ID NO: 752106 - RNA, 19 nt, Artificial Sequence
  Description of Artificial Sequence: Synthetic oligonucleotide
  Sense strand starting at position 414 of SEQ ID NO: 586899
ggcugaguuuaaucauguc

SEQ ID NO: 752107 - RNA, 19 nt, Artificial Sequence
  Description of Artificial Sequence: Synthetic oligonucleotide
  Antisense strand to SEQ ID NO: 752106
gacaugauuaaacucagcc

SEQ ID NO: 752108 - RNA, 19 nt, Artificial Sequence
  Description of Artificial Sequence: Synthetic oligonucleotide
  Sense strand starting at position 437 of SEQ ID NO: 586899
guccucuaggcgucaguuu

SEQ ID NO: 752109 - RNA, 19 nt, Artificial Sequence
  Description of Artificial Sequence: Synthetic oligonucleotide
  Antisense strand to SEQ ID NO: 752108
aaacugacgccuagaggac

SEQ ID NO: 752110 - RNA, 19 nt, Artificial Sequence
  Description of Artificial Sequence: Synthetic oligonucleotide
  Sense strand starting at position 507 of SEQ ID NO: 586899
gucucuaacgcucacauau

SEQ ID NO: 752111 - RNA, 19 nt, Artificial Sequence
  Description of Artificial Sequence: Synthetic oligonucleotide
  Antisense strand to SEQ ID NO: 752110
auaugugagcguuagagac

SEQ ID NO: 752112 - RNA, 19 nt, Artificial Sequence
  Description of Artificial Sequence: Synthetic oligonucleotide
  Sense strand starting at position 797 of SEQ ID NO: 586899
uguacaugauuuggagauu

SEQ ID NO: 752113 - RNA, 19 nt, Artificial Sequence
  Description of Artificial Sequence: Synthetic oligonucleotide
  Antisense strand to SEQ ID NO: 752112
aaucuccaaaucauguaca

SEQ ID NO: 752114 - RNA, 19 nt, Artificial Sequence
  Description of Artificial Sequence: Synthetic oligonucleotide
  Sense strand starting at position 798 of SEQ ID NO: 586899
guacaugauuuggagauua

SEQ ID NO: 752115 - RNA, 19 nt, Artificial Sequence
  Description of Artificial Sequence: Synthetic oligonucleotide
  Antisense strand to SEQ ID NO: 752114
uaaucuccaaaucauguac

SEQ ID NO: 752116 - RNA, 19 nt, Artificial Sequence
  Description of Artificial Sequence: Synthetic oligonucleotide
  Sense strand starting at position 902 of SEQ ID NO: 586899
ugcgauucucugcaugaaa

SEQ ID NO: 752117 - RNA, 19 nt, Artificial Sequence
  Description of Artificial Sequence: Synthetic oligonucleotide
  Antisense strand to SEQ ID NO: 752116
uuucaugcagagaaucgca

SEQ ID NO: 752118 - RNA, 19 nt, Artificial Sequence
  Description of Artificial Sequence: Synthetic oligonucleotide
  Sense strand starting at position 969 of SEQ ID NO: 586899
gauccuugugaggguuaaa

SEQ ID NO: 752119 - RNA, 19 nt, Artificial Sequence
  Description of Artificial Sequence: Synthetic oligonucleotide
  Antisense strand to SEQ ID NO: 752118
uuuaacccucacaaggauc

SEQ ID NO: 752120 - RNA, 19 nt, Artificial Sequence
  Description of Artificial Sequence: Synthetic oligonucleotide
  Sense strand starting at position 972 of SEQ ID NO: 586899
ccuugugaggguuaaacga

SEQ ID NO: 752121 - RNA, 19 nt, Artificial Sequence
  Description of Artificial Sequence: Synthetic oligonucleotide
  Antisense strand to SEQ ID NO: 752120
ucguuuaacccucacaagg

SEQ ID NO: 752122 - RNA, 19 nt, Artificial Sequence
  Description of Artificial Sequence: Synthetic oligonucleotide
  Sense strand starting at position 1038 of SEQ ID NO: 586899
gcaaauuuccuguguuccu

SEQ ID NO: 752123 - RNA, 19 nt, Artificial Sequence
  Description of Artificial Sequence: Synthetic oligonucleotide
  Antisense strand to SEQ ID NO: 752122
aggaacacaggaaauuugc

SEQ ID NO: 752124 - RNA, 19 nt, Artificial Sequence
  Description of Artificial Sequence: Synthetic oligonucleotide
  Sense strand starting at position 1079 of SEQ ID NO: 586899
ggagacuaggaaugucuuu

SEQ ID NO: 752125 - RNA, 19 nt, Artificial Sequence
  Description of Artificial Sequence: Synthetic oligonucleotide
  Antisense strand to SEQ ID NO: 752124
aaagacauuccuagucucc

SEQ ID NO: 752126 - RNA, 19 nt, Artificial Sequence
  Description of Artificial Sequence: Synthetic oligonucleotide
  Sense strand starting at position 1099 of SEQ ID NO: 586899
aggaauggauguuuauacu

SEQ ID NO: 752127 - RNA, 19 nt, Artificial Sequence
  Description of Artificial Sequence: Synthetic oligonucleotide
  Antisense strand to SEQ ID NO: 752126
aguauaaacauccauuccu

SEQ ID NO: 752128 - RNA, 19 nt, Artificial Sequence
  Description of Artificial Sequence: Synthetic oligonucleotide
  Sense strand starting at position 1105 of SEQ ID NO: 586899
ggauguuuauacuuaauug

SEQ ID NO: 752129 - RNA, 19 nt, Artificial Sequence
  Description of Artificial Sequence: Synthetic oligonucleotide
  Antisense strand to SEQ ID NO: 752128
caauuaaguauaaacaucc

SEQ ID NO: 752130 - RNA, 19 nt, Artificial Sequence
  Description of Artificial Sequence: Synthetic oligonucleotide
  Sense strand starting at position 1113 of SEQ ID NO: 586899
auacuuaauuggucugcaa

SEQ ID NO: 752131 - RNA, 19 nt, Artificial Sequence
  Description of Artificial Sequence: Synthetic oligonucleotide
  Antisense strand to SEQ ID NO: 752130
uugcagaccaauuaaguau

SEQ ID NO: 752132 - RNA, 19 nt, Artificial Sequence
  Description of Artificial Sequence: Synthetic oligonucleotide
  Sense strand starting at position 1307 of SEQ ID NO: 586899
uccaauugucgugauguag

SEQ ID NO: 752133 - RNA, 19 nt, Artificial Sequence
  Description of Artificial Sequence: Synthetic oligonucleotide
  Antisense strand to SEQ ID NO: 752132
cuacaucacgacaauugga

SEQ ID NO: 752134 - RNA, 19 nt, Artificial Sequence
  Description of Artificial Sequence: Synthetic oligonucleotide
  Sense strand starting at position 1315 of SEQ ID NO: 586899
ucgugauguaggugagaga

SEQ ID NO: 752135 - RNA, 19 nt, Artificial Sequence
  Description of Artificial Sequence: Synthetic oligonucleotide
  Antisense strand to SEQ ID NO: 752134
ucucucaccuacaucacga

SEQ ID NO: 752136 - RNA, 19 nt, Artificial Sequence
  Description of Artificial Sequence: Synthetic oligonucleotide
  Sense strand starting at position 1316 of SEQ ID NO: 586899
cgugauguaggugagagaa

SEQ ID NO: 752137 - RNA, 19 nt, Artificial Sequence
  Description of Artificial Sequence: Synthetic oligonucleotide
  Antisense strand to SEQ ID NO: 752136
uucucucaccuacaucacg

SEQ ID NO: 752138 - RNA, 19 nt, Artificial Sequence
  Description of Artificial Sequence: Synthetic oligonucleotide
  Sense strand starting at position 1375 of SEQ ID NO: 586899
guguguaugugaaauggga

SEQ ID NO: 752139 - RNA, 19 nt, Artificial Sequence
  Description of Artificial Sequence: Synthetic oligonucleotide
  Antisense strand to SEQ ID NO: 752138
ucccauuucacauacacac

SEQ ID NO: 752140 - RNA, 19 nt, Artificial Sequence
  Description of Artificial Sequence: Synthetic oligonucleotide
  Sense strand starting at position 1436 of SEQ ID NO: 586899
uuugcuagcgaauggauuu

SEQ ID NO: 752141 - RNA, 19 nt, Artificial Sequence
  Description of Artificial Sequence: Synthetic oligonucleotide
  Antisense strand to SEQ ID NO: 752140
aaauccauucgcuagcaaa

SEQ ID NO: 752142 - RNA, 19 nt, Artificial Sequence
  Description of Artificial Sequence: Synthetic oligonucleotide
  Sense strand starting at position 2142 of SEQ ID NO: 586899
gccacuuccggguaggaau

SEQ ID NO: 752143 - RNA, 19 nt, Artificial Sequence
  Description of Artificial Sequence: Synthetic oligonucleotide
  Antisense strand to SEQ ID NO: 752142
auuccuacccggaaguggc

SEQ ID NO: 752144 - RNA, 19 nt, Artificial Sequence
  Description of Artificial Sequence: Synthetic oligonucleotide
  Sense strand starting at position 2226 of SEQ ID NO: 586899
ggaaauuaaucagggaaga

SEQ ID NO: 752145 - RNA, 19 nt, Artificial Sequence
  Description of Artificial Sequence: Synthetic oligonucleotide
  Antisense strand to SEQ ID NO: 752144
ucuucccugauuaauuucc

SEQ ID NO: 752146 - RNA, 19 nt, Artificial Sequence
  Description of Artificial Sequence: Synthetic oligonucleotide
  Sense strand starting at position 2326 of SEQ ID NO: 586899
uugcucauagcucugugua

SEQ ID NO: 752147 - RNA, 19 nt, Artificial Sequence
  Description of Artificial Sequence: Synthetic oligonucleotide
  Antisense strand to SEQ ID NO: 752146
uacacagagcuaugagcaa

SEQ ID NO: 752148 - RNA, 19 nt, Artificial Sequence
  Description of Artificial Sequence: Synthetic oligonucleotide
  Sense strand starting at position 2340 of SEQ ID NO: 586899
guguaucagcuaugauagg

SEQ ID NO: 752149 - RNA, 19 nt, Artificial Sequence
  Description of Artificial Sequence: Synthetic oligonucleotide
  Antisense strand to SEQ ID NO: 752148
ccuaucauagcugauacac

SEQ ID NO: 752150 - RNA, 19 nt, Artificial Sequence
  Description of Artificial Sequence: Synthetic oligonucleotide
  Sense strand starting at position 2365 of SEQ ID NO: 586899
ucgucuguccuagaaucac

SEQ ID NO: 752151 - RNA, 19 nt, Artificial Sequence
  Description of Artificial Sequence: Synthetic oligonucleotide
  Antisense strand to SEQ ID NO: 752150
gugauucuaggacagacga

SEQ ID NO: 752152 - RNA, 19 nt, Artificial Sequence
  Description of Artificial Sequence: Synthetic oligonucleotide
  Sense strand starting at position 2478 of SEQ ID NO: 586899
cccgcauaccagcauaauu

SEQ ID NO: 752153 - RNA, 19 nt, Artificial Sequence
  Description of Artificial Sequence: Synthetic oligonucleotide
  Antisense strand to SEQ ID NO: 752152
aauuaugcugguaugcggg

SEQ ID NO: 752154 - RNA, 19 nt, Artificial Sequence
  Description of Artificial Sequence: Synthetic oligonucleotide
  Sense strand starting at position 2556 of SEQ ID NO: 586899
uccauauccugaggauuuc

SEQ ID NO: 752155 - RNA, 19 nt, Artificial Sequence
  Description of Artificial Sequence: Synthetic oligonucleotide
  Antisense strand to SEQ ID NO: 752154
gaaauccucaggauaugga

SEQ ID NO: 752156 - RNA, 19 nt, Artificial Sequence
  Description of Artificial Sequence: Synthetic oligonucleotide
  Sense strand starting at position 2818 of SEQ ID NO: 586899
ugauuauuaugccuuacag

SEQ ID NO: 752157 - RNA, 19 nt, Artificial Sequence
  Description of Artificial Sequence: Synthetic oligonucleotide
  Antisense strand to SEQ ID NO: 752156
cuguaaggcauaauaauca

SEQ ID NO: 752158 - RNA, 19 nt, Artificial Sequence
  Description of Artificial Sequence: Synthetic oligonucleotide
  Sense strand starting at position 2827 of SEQ ID NO: 586899
ugccuuacagcucacagaa

SEQ ID NO: 752159 - RNA, 19 nt, Artificial Sequence
  Description of Artificial Sequence: Synthetic oligonucleotide
  Antisense strand to SEQ ID NO: 752158
uucugugagcuguaaggca

SEQ ID NO: 752160 - RNA, 19 nt, Artificial Sequence
  Description of Artificial Sequence: Synthetic oligonucleotide
  Sense strand starting at position 2981 of SEQ ID NO: 586899
ggaauuggccuccaguaca

SEQ ID NO: 752161 - RNA, 19 nt, Artificial Sequence
  Description of Artificial Sequence: Synthetic oligonucleotide
  Antisense strand to SEQ ID NO: 752160
uguacuggaggccaauucc

SEQ ID NO: 752162 - RNA, 19 nt, Artificial Sequence
  Description of Artificial Sequence: Synthetic oligonucleotide
  Sense strand starting at position 3308 of SEQ ID NO: 586899
gcaagacuguaucucggaa

SEQ ID NO: 752163 - RNA, 19 nt, Artificial Sequence
  Description of Artificial Sequence: Synthetic oligonucleotide
  Antisense strand to SEQ ID NO: 752162
uuccgagauacagucuugc

SEQ ID NO: 752164 - RNA, 19 nt, Artificial Sequence
  Description of Artificial Sequence: Synthetic oligonucleotide
  Sense strand starting at position 3459 of SEQ ID NO: 586899
gagaacagcuguuuaaggu

SEQ ID NO: 752165 - RNA, 19 nt, Artificial Sequence
  Description of Artificial Sequence: Synthetic oligonucleotide
  Antisense strand to SEQ ID NO: 752164
accuuaaacagcuguucuc

SEQ ID NO: 752166 - RNA, 19 nt, Artificial Sequence
  Description of Artificial Sequence: Synthetic oligonucleotide
  Sense strand starting at position 3460 of SEQ ID NO: 586899
agaacagcuguuuaaggua

SEQ ID NO: 752167 - RNA, 19 nt, Artificial Sequence
  Description of Artificial Sequence: Synthetic oligonucleotide
  Antisense strand to SEQ ID NO: 752166
uaccuuaaacagcuguucu

SEQ ID NO: 752168 - RNA, 19 nt, Artificial Sequence
  Description of Artificial Sequence: Synthetic oligonucleotide
  Sense strand starting at position 3844 of SEQ ID NO: 586899
ccucacaugguagaaguau

SEQ ID NO: 752169 - RNA, 19 nt, Artificial Sequence
  Description of Artificial Sequence: Synthetic oligonucleotide
  Antisense strand to SEQ ID NO: 752168
auacuucuaccaugugagg

SEQ ID NO: 752170 - RNA, 19 nt, Artificial Sequence
  Description of Artificial Sequence: Synthetic oligonucleotide
  Sense strand starting at position 3925 of SEQ ID NO: 586899
ugguuugacucagcuguaa

SEQ ID NO: 752171 - RNA, 19 nt, Artificial Sequence
  Description of Artificial Sequence: Synthetic oligonucleotide
  Antisense strand to SEQ ID NO: 752170
uuacagcugagucaaacca

SEQ ID NO: 752172 - RNA, 19 nt, Artificial Sequence
  Description of Artificial Sequence: Synthetic oligonucleotide
  Sense strand starting at position 100 of SEQ ID NO: 586900
guuccauguugauauuuga

SEQ ID NO: 752173 - RNA, 19 nt, Artificial Sequence
  Description of Artificial Sequence: Synthetic oligonucleotide
  Antisense strand to SEQ ID NO: 752172
ucaaauaucaacauggaac

SEQ ID NO: 752174 - RNA, 19 nt, Artificial Sequence
  Description of Artificial Sequence: Synthetic oligonucleotide
  Sense strand starting at position 337 of SEQ ID NO: 586900
guggcugaucuuggucaaa

SEQ ID NO: 752175 - RNA, 19 nt, Artificial Sequence
  Description of Artificial Sequence: Synthetic oligonucleotide
  Antisense strand to SEQ ID NO: 752174
uuugaccaagaucagccac

SEQ ID NO: 752176 - RNA, 19 nt, Artificial Sequence
  Description of Artificial Sequence: Synthetic oligonucleotide
  Sense strand starting at position 339 of SEQ ID NO: 586900
ggcugaucuuggucaaaga

SEQ ID NO: 752177 - RNA, 19 nt, Artificial Sequence
  Description of Artificial Sequence: Synthetic oligonucleotide
  Antisense strand to SEQ ID NO: 752176
ucuuugaccaagaucagcc

SEQ ID NO: 752178 - RNA, 19 nt, Artificial Sequence
  Description of Artificial Sequence: Synthetic oligonucleotide
  Sense strand starting at position 340 of SEQ ID NO: 586900
gcugaucuuggucaaagag

SEQ ID NO: 752179 - RNA, 19 nt, Artificial Sequence
  Description of Artificial Sequence: Synthetic oligonucleotide
  Antisense strand to SEQ ID NO: 752178
cucuuugaccaagaucagc

SEQ ID NO: 752180 - RNA, 19 nt, Artificial Sequence
  Description of Artificial Sequence: Synthetic oligonucleotide
  Sense strand starting at position 425 of SEQ ID NO: 586900
acaagcuucccaugacaga

SEQ ID NO: 752181 - RNA, 19 nt, Artificial Sequence
  Description of Artificial Sequence: Synthetic oligonucleotide
  Antisense strand to SEQ ID NO: 752180
ucugucaugggaagcuugu

SEQ ID NO: 752182 - RNA, 19 nt, Artificial Sequence
  Description of Artificial Sequence: Synthetic oligonucleotide
  Sense strand starting at position 584 of SEQ ID NO: 586900
uccggaugucgggagacaa

SEQ ID NO: 752183 - RNA, 19 nt, Artificial Sequence
  Description of Artificial Sequence: Synthetic oligonucleotide
  Antisense strand to SEQ ID NO: 752182
uugucucccgacauccgga

SEQ ID NO: 752184 - RNA, 19 nt, Artificial Sequence
  Description of Artificial Sequence: Synthetic oligonucleotide
  Sense strand starting at position 823 of SEQ ID NO: 586900
gcaaguaccugaccuuauu

SEQ ID NO: 752185 - RNA, 19 nt, Artificial Sequence
  Description of Artificial Sequence: Synthetic oligonucleotide
  Antisense strand to SEQ ID NO: 752184
aauaaggucagguacuugc

SEQ ID NO: 752186 - RNA, 19 nt, Artificial Sequence
  Description of Artificial Sequence: Synthetic oligonucleotide
  Sense strand starting at position 832 of SEQ ID NO: 586900
ugaccuuauuccuucccga

SEQ ID NO: 752187 - RNA, 19 nt, Artificial Sequence
  Description of Artificial Sequence: Synthetic oligonucleotide
  Antisense strand to SEQ ID NO: 752186
ucgggaaggaauaagguca

SEQ ID NO: 752188 - RNA, 19 nt, Artificial Sequence
  Description of Artificial Sequence: Synthetic oligonucleotide
  Sense strand starting at position 959 of SEQ ID NO: 586900
cuagguuuccuaugcagaa

SEQ ID NO: 752189 - RNA, 19 nt, Artificial Sequence
  Description of Artificial Sequence: Synthetic oligonucleotide
  Antisense strand to SEQ ID NO: 752188
uucugcauaggaaaccuag

SEQ ID NO: 752190 - RNA, 19 nt, Artificial Sequence
  Description of Artificial Sequence: Synthetic oligonucleotide
  Sense strand starting at position 960 of SEQ ID NO: 586900
uagguuuccuaugcagaaa

SEQ ID NO: 752191 - RNA, 19 nt, Artificial Sequence
  Description of Artificial Sequence: Synthetic oligonucleotide
  Antisense strand to SEQ ID NO: 752190
uuucugcauaggaaaccua

SEQ ID NO: 752192 - RNA, 19 nt, Artificial Sequence
  Description of Artificial Sequence: Synthetic oligonucleotide
  Sense strand starting at position 992 of SEQ ID NO: 586900
gcccaaacguccucuaaau

SEQ ID NO: 752193 - RNA, 19 nt, Artificial Sequence
  Description of Artificial Sequence: Synthetic oligonucleotide
  Antisense strand to SEQ ID NO: 752192
auuuagaggacguuugggc

SEQ ID NO: 752194 - RNA, 19 nt, Artificial Sequence
  Description of Artificial Sequence: Synthetic oligonucleotide
  Sense strand starting at position 1390 of SEQ ID NO: 586900
ucagaauggugguuacgaa

SEQ ID NO: 752195 - RNA, 19 nt, Artificial Sequence
  Description of Artificial Sequence: Synthetic oligonucleotide
  Antisense strand to SEQ ID NO: 752194
uucguaaccaccauucuga

SEQ ID NO: 752196 - RNA, 19 nt, Artificial Sequence
  Description of Artificial Sequence: Synthetic oligonucleotide
  Sense strand starting at position 1391 of SEQ ID NO: 586900
cagaauggugguuacgaaa

SEQ ID NO: 752197 - RNA, 19 nt, Artificial Sequence
  Description of Artificial Sequence: Synthetic oligonucleotide
  Antisense strand to SEQ ID NO: 752196
uuucguaaccaccauucug

SEQ ID NO: 752198 - RNA, 19 nt, Artificial Sequence
  Description of Artificial Sequence: Synthetic oligonucleotide
  Sense strand starting at position 2040 of SEQ ID NO: 586900
gcgcgaugacgugucggaa

SEQ ID NO: 752199 - RNA, 19 nt, Artificial Sequence
  Description of Artificial Sequence: Synthetic oligonucleotide
  Antisense strand to SEQ ID NO: 752198
uuccgacacgucaucgcgc

SEQ ID NO: 752200 - RNA, 19 nt, Artificial Sequence
  Description of Artificial Sequence: Synthetic oligonucleotide
  Sense strand starting at position 2041 of SEQ ID NO: 586900
cgcgaugacgugucggaaa

SEQ ID NO: 752201 - RNA, 19 nt, Artificial Sequence
  Description of Artificial Sequence: Synthetic oligonucleotide
  Antisense strand to SEQ ID NO: 752200
uuuccgacacgucaucgcg

SEQ ID NO: 752202 - RNA, 19 nt, Artificial Sequence
  Description of Artificial Sequence: Synthetic oligonucleotide
  Sense strand starting at position 2043 of SEQ ID NO: 586900
cgaugacgugucggaaacu

SEQ ID NO: 752203 - RNA, 19 nt, Artificial Sequence
  Description of Artificial Sequence: Synthetic oligonucleotide
  Antisense strand to SEQ ID NO: 752202
aguuuccgacacgucaucg

SEQ ID NO: 752204 - RNA, 19 nt, Artificial Sequence
  Description of Artificial Sequence: Synthetic oligonucleotide
  Sense strand starting at position 2240 of SEQ ID NO: 586900
ggugauuggccagaacgga

SEQ ID NO: 752205 - RNA, 19 nt, Artificial Sequence
  Description of Artificial Sequence: Synthetic oligonucleotide
  Antisense strand to SEQ ID NO: 752204
uccguucuggccaaucacc

SEQ ID NO: 752206 - RNA, 19 nt, Artificial Sequence
  Description of Artificial Sequence: Synthetic oligonucleotide
  Sense strand starting at position 2288 of SEQ ID NO: 586900
cggugauuggcgaaacgcu

SEQ ID NO: 752207 - RNA, 19 nt, Artificial Sequence
  Description of Artificial Sequence: Synthetic oligonucleotide
  Antisense strand to SEQ ID NO: 752206
agcguuucgccaaucaccg

SEQ ID NO: 752208 - RNA, 19 nt, Artificial Sequence
  Description of Artificial Sequence: Synthetic oligonucleotide
  Sense strand starting at position 2428 of SEQ ID NO: 586900
cgugucuggguuugaggau

SEQ ID NO: 752209 - RNA, 19 nt, Artificial Sequence
  Description of Artificial Sequence: Synthetic oligonucleotide
  Antisense strand to SEQ ID NO: 752208
auccucaaacccagacacg

SEQ ID NO: 752210 - RNA, 19 nt, Artificial Sequence
  Description of Artificial Sequence: Synthetic oligonucleotide
  Sense strand starting at position 2494 of SEQ ID NO: 586900
uggagucugcguuaauuca

SEQ ID NO: 752211 - RNA, 19 nt, Artificial Sequence
  Description of Artificial Sequence: Synthetic oligonucleotide
  Antisense strand to SEQ ID NO: 752210
ugaauuaacgcagacucca

SEQ ID NO: 752212 - RNA, 19 nt, Artificial Sequence
  Description of Artificial Sequence: Synthetic oligonucleotide
  Sense strand starting at position 2847 of SEQ ID NO: 586900
ggcacuugccgaguuagca

SEQ ID NO: 752213 - RNA, 19 nt, Artificial Sequence
  Description of Artificial Sequence: Synthetic oligonucleotide
  Antisense strand to SEQ ID NO: 752212
ugcuaacucggcaagugcc

SEQ ID NO: 752214 - RNA, 19 nt, Artificial Sequence
  Description of Artificial Sequence: Synthetic oligonucleotide
  Sense strand starting at position 3171 of SEQ ID NO: 586900
gccagaagugaucaauguc

SEQ ID NO: 752215 - RNA, 19 nt, Artificial Sequence
  Description of Artificial Sequence: Synthetic oligonucleotide
  Antisense strand to SEQ ID NO: 752214
gacauugaucacuucuggc

SEQ ID NO: 752216 - RNA, 19 nt, Artificial Sequence
  Description of Artificial Sequence: Synthetic oligonucleotide
  Sense strand starting at position 3178 of SEQ ID NO: 586900
gugaucaaugucuggaagu

SEQ ID NO: 752217 - RNA, 19 nt, Artificial Sequence
  Description of Artificial Sequence: Synthetic oligonucleotide
  Antisense strand to SEQ ID NO: 752216
acuuccagacauugaucac

SEQ ID NO: 752218 - RNA, 19 nt, Artificial Sequence
  Description of Artificial Sequence: Synthetic oligonucleotide
  Sense strand starting at position 3180 of SEQ ID NO: 586900
gaucaaugucuggaaguuc

SEQ ID NO: 752219 - RNA, 19 nt, Artificial Sequence
  Description of Artificial Sequence: Synthetic oligonucleotide
  Antisense strand to SEQ ID NO: 752218
gaacuuccagacauugauc

SEQ ID NO: 752220 - RNA, 19 nt, Artificial Sequence
  Description of Artificial Sequence: Synthetic oligonucleotide
  Sense strand starting at position 3198 of SEQ ID NO: 586900
cuauguuuccaugaaaugu

SEQ ID NO: 752221 - RNA, 19 nt, Artificial Sequence
  Description of Artificial Sequence: Synthetic oligonucleotide
  Antisense strand to SEQ ID NO: 752220
acauuucauggaaacauag

SEQ ID NO: 752222 - RNA, 19 nt, Artificial Sequence
  Description of Artificial Sequence: Synthetic oligonucleotide
  Sense strand starting at position 3206 of SEQ ID NO: 586900
ccaugaaauguugagguuu

SEQ ID NO: 752223 - RNA, 19 nt, Artificial Sequence
  Description of Artificial Sequence: Synthetic oligonucleotide
  Antisense strand to SEQ ID NO: 752222
aaaccucaacauuucaugg

SEQ ID NO: 752224 - RNA, 19 nt, Artificial Sequence
  Description of Artificial Sequence: Synthetic oligonucleotide
  Sense strand starting at position 3217 of SEQ ID NO: 586900
ugagguuuacgcuauaguu

SEQ ID NO: 752225 - RNA, 19 nt, Artificial Sequence
  Description of Artificial Sequence: Synthetic oligonucleotide
  Antisense strand to SEQ ID NO: 752224
aacuauagcguaaaccuca

SEQ ID NO: 752226 - RNA, 19 nt, Artificial Sequence
  Description of Artificial Sequence: Synthetic oligonucleotide
  Sense strand starting at position 3219 of SEQ ID NO: 586900
agguuuacgcuauaguuau

SEQ ID NO: 752227 - RNA, 19 nt, Artificial Sequence
  Description of Artificial Sequence: Synthetic oligonucleotide
  Antisense strand to SEQ ID NO: 752226
auaacuauagcguaaaccu

SEQ ID NO: 752228 - RNA, 19 nt, Artificial Sequence
  Description of Artificial Sequence: Synthetic oligonucleotide
  Sense strand starting at position 3416 of SEQ ID NO: 586900
cugcguuaugcauaguaag

SEQ ID NO: 752229 - RNA, 19 nt, Artificial Sequence
  Description of Artificial Sequence: Synthetic oligonucleotide
  Antisense strand to SEQ ID NO: 752228
cuuacuaugcauaacgcag

SEQ ID NO: 752230 - RNA, 19 nt, Artificial Sequence
  Description of Artificial Sequence: Synthetic oligonucleotide
  Sense strand starting at position 3434 of SEQ ID NO: 586900
ggguaaguauguguccuca

SEQ ID NO: 752231 - RNA, 19 nt, Artificial Sequence
  Description of Artificial Sequence: Synthetic oligonucleotide
  Antisense strand to SEQ ID NO: 752230
ugaggacacauacuuaccc

SEQ ID NO: 752232 - RNA, 19 nt, Artificial Sequence
  Description of Artificial Sequence: Synthetic oligonucleotide
  Sense strand starting at position 3438 of SEQ ID NO: 586900
aaguauguguccucauuag

SEQ ID NO: 752233 - RNA, 19 nt, Artificial Sequence
  Description of Artificial Sequence: Synthetic oligonucleotide
  Antisense strand to SEQ ID NO: 752232
cuaaugaggacacauacuu

SEQ ID NO: 752234 - RNA, 19 nt, Artificial Sequence
  Description of Artificial Sequence: Synthetic oligonucleotide
  Sense strand starting at position 3454 of SEQ ID NO: 586900
uaguacaguggugaguuaa

SEQ ID NO: 752235 - RNA, 19 nt, Artificial Sequence
  Description of Artificial Sequence: Synthetic oligonucleotide
  Antisense strand to SEQ ID NO: 752234
uuaacucaccacuguacua

SEQ ID NO: 752236 - RNA, 19 nt, Artificial Sequence
  Description of Artificial Sequence: Synthetic oligonucleotide
  Sense strand starting at position 3485 of SEQ ID NO: 586900
ggguaaguuuguguaagug

SEQ ID NO: 752237 - RNA, 19 nt, Artificial Sequence
  Description of Artificial Sequence: Synthetic oligonucleotide
  Antisense strand to SEQ ID NO: 752236
cacuuacacaaacuuaccc

SEQ ID NO: 752238 - RNA, 19 nt, Artificial Sequence
  Description of Artificial Sequence: Synthetic oligonucleotide
  Sense strand starting at position 3495 of SEQ ID NO: 586900
guguaagugcacguguaga

SEQ ID NO: 752239 - RNA, 19 nt, Artificial Sequence
  Description of Artificial Sequence: Synthetic oligonucleotide
  Antisense strand to SEQ ID NO: 752238
ucuacacgugcacuuacac

SEQ ID NO: 752240 - RNA, 19 nt, Artificial Sequence
  Description of Artificial Sequence: Synthetic oligonucleotide
  Sense strand starting at position 3500 of SEQ ID NO: 586900
agugcacguguagauauau

SEQ ID NO: 752241 - RNA, 19 nt, Artificial Sequence
  Description of Artificial Sequence: Synthetic oligonucleotide
  Antisense strand to SEQ ID NO: 752240
auauaucuacacgugcacu

SEQ ID NO: 752242 - RNA, 19 nt, Artificial Sequence
  Description of Artificial Sequence: Synthetic oligonucleotide
  Sense strand starting at position 3874 of SEQ ID NO: 586900
uuguaaaguuucuuacagu

SEQ ID NO: 752243 - RNA, 19 nt, Artificial Sequence
  Description of Artificial Sequence: Synthetic oligonucleotide
  Antisense strand to SEQ ID NO: 752242
acuguaagaaacuuuacaa

SEQ ID NO: 752244 - RNA, 19 nt, Artificial Sequence
  Description of Artificial Sequence: Synthetic oligonucleotide
  Sense strand starting at position 3918 of SEQ ID NO: 586900
acugcccuagccugagaau

SEQ ID NO: 752245 - RNA, 19 nt, Artificial Sequence
  Description of Artificial Sequence: Synthetic oligonucleotide
  Antisense strand to SEQ ID NO: 752244
auucucaggcuagggcagu

SEQ ID NO: 752246 - RNA, 19 nt, Artificial Sequence
  Description of Artificial Sequence: Synthetic oligonucleotide
  Sense strand starting at position 3919 of SEQ ID NO: 586900
cugcccuagccugagaaua

SEQ ID NO: 752247 - RNA, 19 nt, Artificial Sequence
  Description of Artificial Sequence: Synthetic oligonucleotide
  Antisense strand to SEQ ID NO: 752246
uauucucaggcuagggcag

SEQ ID NO: 752248 - RNA, 19 nt, Artificial Sequence
  Description of Artificial Sequence: Synthetic oligonucleotide
  Sense strand starting at position 3933 of SEQ ID NO: 586900
gaauauugguaauccagau

SEQ ID NO: 752249 - RNA, 19 nt, Artificial Sequence
  Description of Artificial Sequence: Synthetic oligonucleotide
  Antisense strand to SEQ ID NO: 752248
aucuggauuaccaauauuc

SEQ ID NO: 752250 - RNA, 19 nt, Artificial Sequence
  Description of Artificial Sequence: Synthetic oligonucleotide
  Sense strand starting at position 3939 of SEQ ID NO: 586900
ugguaauccagaugugaag

SEQ ID NO: 752251 - RNA, 19 nt, Artificial Sequence
  Description of Artificial Sequence: Synthetic oligonucleotide
  Antisense strand to SEQ ID NO: 752250
cuucacaucuggauuacca

SEQ ID NO: 752252 - RNA, 19 nt, Artificial Sequence
  Description of Artificial Sequence: Synthetic oligonucleotide
  Sense strand starting at position 16 of SEQ ID NO: 586901
acccuugauguguaaccau

SEQ ID NO: 752253 - RNA, 19 nt, Artificial Sequence
  Description of Artificial Sequence: Synthetic oligonucleotide
  Antisense strand to SEQ ID NO: 752252
augguuacacaucaagggu

SEQ ID NO: 752254 - RNA, 19 nt, Artificial Sequence
  Description of Artificial Sequence: Synthetic oligonucleotide
  Sense strand starting at position 35 of SEQ ID NO: 586901
ucaaauguggcauaguaca

SEQ ID NO: 752255 - RNA, 19 nt, Artificial Sequence
  Description of Artificial Sequence: Synthetic oligonucleotide
  Antisense strand to SEQ ID NO: 752254
uguacuaugccacauuuga

SEQ ID NO: 752256 - RNA, 19 nt, Artificial Sequence
  Description of Artificial Sequence: Synthetic oligonucleotide
  Sense strand starting at position 48 of SEQ ID NO: 586901
aguacauucuuagugaaau

SEQ ID NO: 752257 - RNA, 19 nt, Artificial Sequence
  Description of Artificial Sequence: Synthetic oligonucleotide
  Antisense strand to SEQ ID NO: 752256
auuucacuaagaauguacu

SEQ ID NO: 752258 - RNA, 19 nt, Artificial Sequence
  Description of Artificial Sequence: Synthetic oligonucleotide
  Sense strand starting at position 183 of SEQ ID NO: 586901
aggucaaaguccuugauau

SEQ ID NO: 752259 - RNA, 19 nt, Artificial Sequence
  Description of Artificial Sequence: Synthetic oligonucleotide
  Antisense strand to SEQ ID NO: 752258
auaucaaggacuuugaccu

SEQ ID NO: 752260 - RNA, 19 nt, Artificial Sequence
  Description of Artificial Sequence: Synthetic oligonucleotide
  Sense strand starting at position 184 of SEQ ID NO: 586901
ggucaaaguccuugauaug

SEQ ID NO: 752261 - RNA, 19 nt, Artificial Sequence
  Description of Artificial Sequence: Synthetic oligonucleotide
  Antisense strand to SEQ ID NO: 752260
cauaucaaggacuuugacc

SEQ ID NO: 752262 - RNA, 19 nt, Artificial Sequence
  Description of Artificial Sequence: Synthetic oligonucleotide
  Sense strand starting at position 185 of SEQ ID NO: 586901
gucaaaguccuugauauga

SEQ ID NO: 752263 - RNA, 19 nt, Artificial Sequence
  Description of Artificial Sequence: Synthetic oligonucleotide
  Antisense strand to SEQ ID NO: 752262
ucauaucaaggacuuugac

SEQ ID NO: 752264 - RNA, 19 nt, Artificial Sequence
  Description of Artificial Sequence: Synthetic oligonucleotide
  Sense strand starting at position 195 of SEQ ID NO: 586901
uugauaugauagucuacau

SEQ ID NO: 752265 - RNA, 19 nt, Artificial Sequence
  Description of Artificial Sequence: Synthetic oligonucleotide
  Antisense strand to SEQ ID NO: 752264
auguagacuaucauaucaa

SEQ ID NO: 752266 - RNA, 19 nt, Artificial Sequence
  Description of Artificial Sequence: Synthetic oligonucleotide
  Sense strand starting at position 237 of SEQ ID NO: 586901
cucaguaggcaucagacua

SEQ ID NO: 752267 - RNA, 19 nt, Artificial Sequence
  Description of Artificial Sequence: Synthetic oligonucleotide
  Antisense strand to SEQ ID NO: 752266
uagucugaugccuacugag

SEQ ID NO: 752268 - RNA, 19 nt, Artificial Sequence
  Description of Artificial Sequence: Synthetic oligonucleotide
  Sense strand starting at position 356 of SEQ ID NO: 586901
agauguggcaguuaugaca

SEQ ID NO: 752269 - RNA, 19 nt, Artificial Sequence
  Description of Artificial Sequence: Synthetic oligonucleotide
  Antisense strand to SEQ ID NO: 752268
ugucauaacugccacaucu

SEQ ID NO: 752270 - RNA, 19 nt, Artificial Sequence
  Description of Artificial Sequence: Synthetic oligonucleotide
  Sense strand starting at position 404 of SEQ ID NO: 586901
cuuucugaggcagauucua

SEQ ID NO: 752271 - RNA, 19 nt, Artificial Sequence
  Description of Artificial Sequence: Synthetic oligonucleotide
  Antisense strand to SEQ ID NO: 752270
uagaaucugccucagaaag

SEQ ID NO: 752272 - RNA, 19 nt, Artificial Sequence
  Description of Artificial Sequence: Synthetic oligonucleotide
  Sense strand starting at position 440 of SEQ ID NO: 586901
gggcaaaucuuacuccuaa

SEQ ID NO: 752273 - RNA, 19 nt, Artificial Sequence
  Description of Artificial Sequence: Synthetic oligonucleotide
  Antisense strand to SEQ ID NO: 752272
uuaggaguaagauuugccc

SEQ ID NO: 752274 - RNA, 19 nt, Artificial Sequence
  Description of Artificial Sequence: Synthetic oligonucleotide
  Sense strand starting at position 441 of SEQ ID NO: 586901
ggcaaaucuuacuccuaag

SEQ ID NO: 752275 - RNA, 19 nt, Artificial Sequence
  Description of Artificial Sequence: Synthetic oligonucleotide
  Antisense strand to SEQ ID NO: 752274
cuuaggaguaagauuugcc

SEQ ID NO: 752276 - RNA, 19 nt, Artificial Sequence
  Description of Artificial Sequence: Synthetic oligonucleotide
  Sense strand starting at position 746 of SEQ ID NO: 586901
ccaaguuauccguugugcu

SEQ ID NO: 752277 - RNA, 19 nt, Artificial Sequence
  Description of Artificial Sequence: Synthetic oligonucleotide
  Antisense strand to SEQ ID NO: 752276
agcacaacggauaacuugg

SEQ ID NO: 752278 - RNA, 19 nt, Artificial Sequence
  Description of Artificial Sequence: Synthetic oligonucleotide
  Sense strand starting at position 883 of SEQ ID NO: 586901
auuccugaugcuuaguaag

SEQ ID NO: 752279 - RNA, 19 nt, Artificial Sequence
  Description of Artificial Sequence: Synthetic oligonucleotide
  Antisense strand to SEQ ID NO: 752278
cuuacuaagcaucaggaau

SEQ ID NO: 752280 - RNA, 19 nt, Artificial Sequence
  Description of Artificial Sequence: Synthetic oligonucleotide
  Sense strand starting at position 939 of SEQ ID NO: 586901
uucugaguacuguaugaua

SEQ ID NO: 752281 - RNA, 19 nt, Artificial Sequence
  Description of Artificial Sequence: Synthetic oligonucleotide
  Antisense strand to SEQ ID NO: 752280
uaucauacaguacucagaa

SEQ ID NO: 752282 - RNA, 19 nt, Artificial Sequence
  Description of Artificial Sequence: Synthetic oligonucleotide
  Sense strand starting at position 947 of SEQ ID NO: 586901
acuguaugauaggcagacu

SEQ ID NO: 752283 - RNA, 19 nt, Artificial Sequence
  Description of Artificial Sequence: Synthetic oligonucleotide
  Antisense strand to SEQ ID NO: 752282
agucugccuaucauacagu

SEQ ID NO: 752284 - RNA, 19 nt, Artificial Sequence
  Description of Artificial Sequence: Synthetic oligonucleotide
  Sense strand starting at position 948 of SEQ ID NO: 586901
cuguaugauaggcagacuu

SEQ ID NO: 752285 - RNA, 19 nt, Artificial Sequence
  Description of Artificial Sequence: Synthetic oligonucleotide
  Antisense strand to SEQ ID NO: 752284
aagucugccuaucauacag

SEQ ID NO: 752286 - RNA, 19 nt, Artificial Sequence
  Description of Artificial Sequence: Synthetic oligonucleotide
  Sense strand starting at position 986 of SEQ ID NO: 586901
cccuguacuagguauggau

SEQ ID NO: 752287 - RNA, 19 nt, Artificial Sequence
  Description of Artificial Sequence: Synthetic oligonucleotide
  Antisense strand to SEQ ID NO: 752286
auccauaccuaguacaggg

SEQ ID NO: 752288 - RNA, 19 nt, Artificial Sequence
  Description of Artificial Sequence: Synthetic oligonucleotide
  Sense strand starting at position 994 of SEQ ID NO: 586901
uagguauggaucgggaagu

SEQ ID NO: 752289 - RNA, 19 nt, Artificial Sequence
  Description of Artificial Sequence: Synthetic oligonucleotide
  Antisense strand to SEQ ID NO: 752288
acuucccgauccauaccua

SEQ ID NO: 752290 - RNA, 19 nt, Artificial Sequence
  Description of Artificial Sequence: Synthetic oligonucleotide
  Sense strand starting at position 1170 of SEQ ID NO: 586901
ugaguuugggcgggaagaa

SEQ ID NO: 752291 - RNA, 19 nt, Artificial Sequence
  Description of Artificial Sequence: Synthetic oligonucleotide
  Antisense strand to SEQ ID NO: 752290
uucuucccgcccaaacuca

SEQ ID NO: 752292 - RNA, 19 nt, Artificial Sequence
  Description of Artificial Sequence: Synthetic oligonucleotide
  Sense strand starting at position 1287 of SEQ ID NO: 586901
gcacauuaagauuaaaguc

SEQ ID NO: 752293 - RNA, 19 nt, Artificial Sequence
  Description of Artificial Sequence: Synthetic oligonucleotide
  Antisense strand to SEQ ID NO: 752292
gacuuuaaucuuaaugugc

SEQ ID NO: 752294 - RNA, 19 nt, Artificial Sequence
  Description of Artificial Sequence: Synthetic oligonucleotide
  Sense strand starting at position 1296 of SEQ ID NO: 586901
gauuaaagucguggaugga

SEQ ID NO: 752295 - RNA, 19 nt, Artificial Sequence
  Description of Artificial Sequence: Synthetic oligonucleotide
  Antisense strand to SEQ ID NO: 752294
uccauccacgacuuuaauc

SEQ ID NO: 752296 - RNA, 19 nt, Artificial Sequence
  Description of Artificial Sequence: Synthetic oligonucleotide
  Sense strand starting at position 1297 of SEQ ID NO: 586901
auuaaagucguggauggaa

SEQ ID NO: 752297 - RNA, 19 nt, Artificial Sequence
  Description of Artificial Sequence: Synthetic oligonucleotide
  Antisense strand to SEQ ID NO: 752296
uuccauccacgacuuuaau

SEQ ID NO: 752298 - RNA, 19 nt, Artificial Sequence
  Description of Artificial Sequence: Synthetic oligonucleotide
  Sense strand starting at position 1505 of SEQ ID NO: 586901
gccaccucccuagagaaau

SEQ ID NO: 752299 - RNA, 19 nt, Artificial Sequence
  Description of Artificial Sequence: Synthetic oligonucleotide
  Antisense strand to SEQ ID NO: 752298
auuucucuagggagguggc

SEQ ID NO: 752300 - RNA, 19 nt, Artificial Sequence
  Description of Artificial Sequence: Synthetic oligonucleotide
  Sense strand starting at position 2041 of SEQ ID NO: 586901
aagggauucgcucacucca

SEQ ID NO: 752301 - RNA, 19 nt, Artificial Sequence
  Description of Artificial Sequence: Synthetic oligonucleotide
  Antisense strand to SEQ ID NO: 752300
uggagugagcgaaucccuu

SEQ ID NO: 752302 - RNA, 19 nt, Artificial Sequence
  Description of Artificial Sequence: Synthetic oligonucleotide
  Sense strand starting at position 2091 of SEQ ID NO: 586901
gcucuuaaugauggaacuu

SEQ ID NO: 752303 - RNA, 19 nt, Artificial Sequence
  Description of Artificial Sequence: Synthetic oligonucleotide
  Antisense strand to SEQ ID NO: 752302
aaguuccaucauuaagagc

SEQ ID NO: 752304 - RNA, 19 nt, Artificial Sequence
  Description of Artificial Sequence: Synthetic oligonucleotide
  Sense strand starting at position 2168 of SEQ ID NO: 586901
aggcaauauccagauguuc

SEQ ID NO: 752305 - RNA, 19 nt, Artificial Sequence
  Description of Artificial Sequence: Synthetic oligonucleotide
  Antisense strand to SEQ ID NO: 752304
gaacaucuggauauugccu

SEQ ID NO: 752306 - RNA, 19 nt, Artificial Sequence
  Description of Artificial Sequence: Synthetic oligonucleotide
  Sense strand starting at position 2173 of SEQ ID NO: 586901
auauccagauguucugaga

SEQ ID NO: 752307 - RNA, 19 nt, Artificial Sequence
  Description of Artificial Sequence: Synthetic oligonucleotide
  Antisense strand to SEQ ID NO: 752306
ucucagaacaucuggauau

SEQ ID NO: 752308 - RNA, 19 nt, Artificial Sequence
  Description of Artificial Sequence: Synthetic oligonucleotide
  Sense strand starting at position 2228 of SEQ ID NO: 586901
gguuauuugguucgaauau

SEQ ID NO: 752309 - RNA, 19 nt, Artificial Sequence
  Description of Artificial Sequence: Synthetic oligonucleotide
  Antisense strand to SEQ ID NO: 752308
auauucgaaccaaauaacc

SEQ ID NO: 752310 - RNA, 19 nt, Artificial Sequence
  Description of Artificial Sequence: Synthetic oligonucleotide
  Sense strand starting at position 2266 of SEQ ID NO: 586901
gaaugucaguaucuuuaga

SEQ ID NO: 752311 - RNA, 19 nt, Artificial Sequence
  Description of Artificial Sequence: Synthetic oligonucleotide
  Antisense strand to SEQ ID NO: 752310
ucuaaagauacugacauuc

SEQ ID NO: 752312 - RNA, 19 nt, Artificial Sequence
  Description of Artificial Sequence: Synthetic oligonucleotide
  Sense strand starting at position 2268 of SEQ ID NO: 586901
augucaguaucuuuagaua

SEQ ID NO: 752313 - RNA, 19 nt, Artificial Sequence
  Description of Artificial Sequence: Synthetic oligonucleotide
  Antisense strand to SEQ ID NO: 752312
uaucuaaagauacugacau

SEQ ID NO: 752314 - RNA, 19 nt, Artificial Sequence
  Description of Artificial Sequence: Synthetic oligonucleotide
  Sense strand starting at position 2300 of SEQ ID NO: 586901
uggucagagucccuagaga

SEQ ID NO: 752315 - RNA, 19 nt, Artificial Sequence
  Description of Artificial Sequence: Synthetic oligonucleotide
  Antisense strand to SEQ ID NO: 752314
ucucuagggacucugacca

SEQ ID NO: 752316 - RNA, 19 nt, Artificial Sequence
  Description of Artificial Sequence: Synthetic oligonucleotide
  Sense strand starting at position 2322 of SEQ ID NO: 586901
gcuucugauuuccugccua

SEQ ID NO: 752317 - RNA, 19 nt, Artificial Sequence
  Description of Artificial Sequence: Synthetic oligonucleotide
  Antisense strand to SEQ ID NO: 752316
uaggcaggaaaucagaagc

SEQ ID NO: 752318 - RNA, 19 nt, Artificial Sequence
  Description of Artificial Sequence: Synthetic oligonucleotide
  Sense strand starting at position 2619 of SEQ ID NO: 586901
agagauauauaaucgagcu

SEQ ID NO: 752319 - RNA, 19 nt, Artificial Sequence
  Description of Artificial Sequence: Synthetic oligonucleotide
  Antisense strand to SEQ ID NO: 752318
agcucgauuauauaucucu

SEQ ID NO: 752320 - RNA, 19 nt, Artificial Sequence
  Description of Artificial Sequence: Synthetic oligonucleotide
  Sense strand starting at position 3001 of SEQ ID NO: 586901
augggaacauaaucguaua

SEQ ID NO: 752321 - RNA, 19 nt, Artificial Sequence
  Description of Artificial Sequence: Synthetic oligonucleotide
  Antisense strand to SEQ ID NO: 752320
uauacgauuauguucccau

SEQ ID NO: 752322 - RNA, 19 nt, Artificial Sequence
  Description of Artificial Sequence: Synthetic oligonucleotide
  Sense strand starting at position 3002 of SEQ ID NO: 586901
ugggaacauaaucguauau

SEQ ID NO: 752323 - RNA, 19 nt, Artificial Sequence
  Description of Artificial Sequence: Synthetic oligonucleotide
  Antisense strand to SEQ ID NO: 752322
auauacgauuauguuccca

SEQ ID NO: 752324 - RNA, 19 nt, Artificial Sequence
  Description of Artificial Sequence: Synthetic oligonucleotide
  Sense strand starting at position 3915 of SEQ ID NO: 586901
gguauacaauguguaacua

SEQ ID NO: 752325 - RNA, 19 nt, Artificial Sequence
  Description of Artificial Sequence: Synthetic oligonucleotide
  Antisense strand to SEQ ID NO: 752324
uaguuacacauuguauacc

SEQ ID NO: 752326 - RNA, 19 nt, Artificial Sequence
  Description of Artificial Sequence: Synthetic oligonucleotide
  Sense strand starting at position 3916 of SEQ ID NO: 586901
guauacaauguguaacuau

SEQ ID NO: 752327 - RNA, 19 nt, Artificial Sequence
  Description of Artificial Sequence: Synthetic oligonucleotide
  Antisense strand to SEQ ID NO: 752326
auaguuacacauuguauac

SEQ ID NO: 752328 - RNA, 19 nt, Artificial Sequence
  Description of Artificial Sequence: Synthetic oligonucleotide
  Sense strand starting at position 3951 of SEQ ID NO: 586901
ggguauugaucaucuugag

SEQ ID NO: 752329 - RNA, 19 nt, Artificial Sequence
  Description of Artificial Sequence: Synthetic oligonucleotide
  Antisense strand to SEQ ID NO: 752328
cucaagaugaucaauaccc

SEQ ID NO: 752330 - RNA, 19 nt, Artificial Sequence
  Description of Artificial Sequence: Synthetic oligonucleotide
  Sense strand starting at position 3957 of SEQ ID NO: 586901
ugaucaucuugagaauuua

SEQ ID NO: 752331 - RNA, 19 nt, Artificial Sequence
  Description of Artificial Sequence: Synthetic oligonucleotide
  Antisense strand to SEQ ID NO: 752330
uaaauucucaagaugauca

SEQ ID NO: 752332 - RNA, 19 nt, Artificial Sequence
  Description of Artificial Sequence: Synthetic oligonucleotide
  Sense strand starting at position 61 of SEQ ID NO: 586902
guacuaacugcuugaacag

SEQ ID NO: 752333 - RNA, 19 nt, Artificial Sequence
  Description of Artificial Sequence: Synthetic oligonucleotide
  Antisense strand to SEQ ID NO: 752332
cuguucaagcaguuaguac

SEQ ID NO: 752334 - RNA, 19 nt, Artificial Sequence
  Description of Artificial Sequence: Synthetic oligonucleotide
  Sense strand starting at position 254 of SEQ ID NO: 586902
uugauacuuucuguauuag

SEQ ID NO: 752335 - RNA, 19 nt, Artificial Sequence
  Description of Artificial Sequence: Synthetic oligonucleotide
  Antisense strand to SEQ ID NO: 752334
cuaauacagaaaguaucaa

SEQ ID NO: 752336 - RNA, 19 nt, Artificial Sequence
  Description of Artificial Sequence: Synthetic oligonucleotide
  Sense strand starting at position 255 of SEQ ID NO: 586902
ugauacuuucuguauuaga

SEQ ID NO: 752337 - RNA, 19 nt, Artificial Sequence
  Description of Artificial Sequence: Synthetic oligonucleotide
  Antisense strand to SEQ ID NO: 752336
ucuaauacagaaaguauca

SEQ ID NO: 752338 - RNA, 19 nt, Artificial Sequence
  Description of Artificial Sequence: Synthetic oligonucleotide
  Sense strand starting at position 350 of SEQ ID NO: 586902
uguccuuagcuuuaacaug

SEQ ID NO: 752339 - RNA, 19 nt, Artificial Sequence
  Description of Artificial Sequence: Synthetic oligonucleotide
  Antisense strand to SEQ ID NO: 752338
cauguuaaagcuaaggaca

SEQ ID NO: 752340 - RNA, 19 nt, Artificial Sequence
  Description of Artificial Sequence: Synthetic oligonucleotide
  Sense strand starting at position 486 of SEQ ID NO: 586902
uaucuuugagguuggacaa

SEQ ID NO: 752341 - RNA, 19 nt, Artificial Sequence
  Description of Artificial Sequence: Synthetic oligonucleotide
  Antisense strand to SEQ ID NO: 752340
uuguccaaccucaaagaua

SEQ ID NO: 752342 - RNA, 19 nt, Artificial Sequence
  Description of Artificial Sequence: Synthetic oligonucleotide
  Sense strand starting at position 487 of SEQ ID NO: 586902
aucuuugagguuggacaaa

SEQ ID NO: 752343 - RNA, 19 nt, Artificial Sequence
  Description of Artificial Sequence: Synthetic oligonucleotide
  Antisense strand to SEQ ID NO: 752342
uuuguccaaccucaaagau

SEQ ID NO: 752344 - RNA, 19 nt, Artificial Sequence
  Description of Artificial Sequence: Synthetic oligonucleotide
  Sense strand starting at position 672 of SEQ ID NO: 586902
gcuggaugucauuauucug

SEQ ID NO: 752345 - RNA, 19 nt, Artificial Sequence
  Description of Artificial Sequence: Synthetic oligonucleotide
  Antisense strand to SEQ ID NO: 752344
cagaauaaugacauccagc

SEQ ID NO: 752346 - RNA, 19 nt, Artificial Sequence
  Description of Artificial Sequence: Synthetic oligonucleotide
  Sense strand starting at position 675 of SEQ ID NO: 586902
ggaugucauuauucugaga

SEQ ID NO: 752347 - RNA, 19 nt, Artificial Sequence
  Description of Artificial Sequence: Synthetic oligonucleotide
  Antisense strand to SEQ ID NO: 752346
ucucagaauaaugacaucc

SEQ ID NO: 752348 - RNA, 19 nt, Artificial Sequence
  Description of Artificial Sequence: Synthetic oligonucleotide
  Sense strand starting at position 684 of SEQ ID NO: 586902
uauucugagaaguaggguu

SEQ ID NO: 752349 - RNA, 19 nt, Artificial Sequence
  Description of Artificial Sequence: Synthetic oligonucleotide
  Antisense strand to SEQ ID NO: 752348
aacccuacuucucagaaua

SEQ ID NO: 752350 - RNA, 19 nt, Artificial Sequence
  Description of Artificial Sequence: Synthetic oligonucleotide
  Sense strand starting at position 699 of SEQ ID NO: 586902
gguucuccuccacauggau

SEQ ID NO: 752351 - RNA, 19 nt, Artificial Sequence
  Description of Artificial Sequence: Synthetic oligonucleotide
  Antisense strand to SEQ ID NO: 752350
auccauguggaggagaacc

SEQ ID NO: 752352 - RNA, 19 nt, Artificial Sequence
  Description of Artificial Sequence: Synthetic oligonucleotide
  Sense strand starting at position 714 of SEQ ID NO: 586902
ggauuacuuuaucugaggu

SEQ ID NO: 752353 - RNA, 19 nt, Artificial Sequence
  Description of Artificial Sequence: Synthetic oligonucleotide
  Antisense strand to SEQ ID NO: 752352
accucagauaaaguaaucc

SEQ ID NO: 752354 - RNA, 19 nt, Artificial Sequence
  Description of Artificial Sequence: Synthetic oligonucleotide
  Sense strand starting at position 728 of SEQ ID NO: 586902
gagguuccugcaggagaaa

SEQ ID NO: 752355 - RNA, 19 nt, Artificial Sequence
  Description of Artificial Sequence: Synthetic oligonucleotide
  Antisense strand to SEQ ID NO: 752354
uuucuccugcaggaaccuc

SEQ ID NO: 752356 - RNA, 19 nt, Artificial Sequence
  Description of Artificial Sequence: Synthetic oligonucleotide
  Sense strand starting at position 951 of SEQ ID NO: 586902
gaauacgaacuaugucauu

SEQ ID NO: 752357 - RNA, 19 nt, Artificial Sequence
  Description of Artificial Sequence: Synthetic oligonucleotide
  Antisense strand to SEQ ID NO: 752356
aaugacauaguucguauuc

SEQ ID NO: 752358 - RNA, 19 nt, Artificial Sequence
  Description of Artificial Sequence: Synthetic oligonucleotide
  Sense strand starting at position 957 of SEQ ID NO: 586902
gaacuaugucauuaggcuu

SEQ ID NO: 752359 - RNA, 19 nt, Artificial Sequence
  Description of Artificial Sequence: Synthetic oligonucleotide
  Antisense strand to SEQ ID NO: 752358
aagccuaaugacauaguuc

SEQ ID NO: 752360 - RNA, 19 nt, Artificial Sequence
  Description of Artificial Sequence: Synthetic oligonucleotide
  Sense strand starting at position 971 of SEQ ID NO: 586902
ggcuuauagcguucaaagc

SEQ ID NO: 752361 - RNA, 19 nt, Artificial Sequence
  Description of Artificial Sequence: Synthetic oligonucleotide
  Antisense strand to SEQ ID NO: 752360
gcuuugaacgcuauaagcc

SEQ ID NO: 752362 - RNA, 19 nt, Artificial Sequence
  Description of Artificial Sequence: Synthetic oligonucleotide
  Sense strand starting at position 1065 of SEQ ID NO: 586902
auguguucugaagaucugu

SEQ ID NO: 752363 - RNA, 19 nt, Artificial Sequence
  Description of Artificial Sequence: Synthetic oligonucleotide
  Antisense strand to SEQ ID NO: 752362
acagaucuucagaacacau

SEQ ID NO: 752364 - RNA, 19 nt, Artificial Sequence
  Description of Artificial Sequence: Synthetic oligonucleotide
  Sense strand starting at position 1083 of SEQ ID NO: 586902
uuguuaaucgcugccaucu

SEQ ID NO: 752365 - RNA, 19 nt, Artificial Sequence
  Description of Artificial Sequence: Synthetic oligonucleotide
  Antisense strand to SEQ ID NO: 752364
agauggcagcgauuaacaa

SEQ ID NO: 752366 - RNA, 19 nt, Artificial Sequence
  Description of Artificial Sequence: Synthetic oligonucleotide
  Sense strand starting at position 1125 of SEQ ID NO: 586902
aaagucuaugaaugugaua

SEQ ID NO: 752367 - RNA, 19 nt, Artificial Sequence
  Description of Artificial Sequence: Synthetic oligonucleotide
  Antisense strand to SEQ ID NO: 752366
uaucacauucauagacuuu

SEQ ID NO: 752368 - RNA, 19 nt, Artificial Sequence
  Description of Artificial Sequence: Synthetic oligonucleotide
  Sense strand starting at position 1369 of SEQ ID NO: 586902
aacguuauagaugaucacu

SEQ ID NO: 752369 - RNA, 19 nt, Artificial Sequence
  Description of Artificial Sequence: Synthetic oligonucleotide
  Antisense strand to SEQ ID NO: 752368
agugaucaucuauaacguu

SEQ ID NO: 752370 - RNA, 19 nt, Artificial Sequence
  Description of Artificial Sequence: Synthetic oligonucleotide
  Sense strand starting at position 1774 of SEQ ID NO: 586902
cuccgagugacuuaagaac

SEQ ID NO: 752371 - RNA, 19 nt, Artificial Sequence
  Description of Artificial Sequence: Synthetic oligonucleotide
  Antisense strand to SEQ ID NO: 752370
guucuuaagucacucggag

SEQ ID NO: 752372 - RNA, 19 nt, Artificial Sequence
  Description of Artificial Sequence: Synthetic oligonucleotide
  Sense strand starting at position 1805 of SEQ ID NO: 586902
ugcacaucuguugacaauu

SEQ ID NO: 752373 - RNA, 19 nt, Artificial Sequence
  Description of Artificial Sequence: Synthetic oligonucleotide
  Antisense strand to SEQ ID NO: 752372
aauugucaacagaugugca

SEQ ID NO: 752374 - RNA, 19 nt, Artificial Sequence
  Description of Artificial Sequence: Synthetic oligonucleotide
  Sense strand starting at position 1925 of SEQ ID NO: 586902
ucagaugucuuacuagaga

SEQ ID NO: 752375 - RNA, 19 nt, Artificial Sequence
  Description of Artificial Sequence: Synthetic oligonucleotide
  Antisense strand to SEQ ID NO: 752374
ucucuaguaagacaucuga

SEQ ID NO: 752376 - RNA, 19 nt, Artificial Sequence
  Description of Artificial Sequence: Synthetic oligonucleotide
  Sense strand starting at position 1981 of SEQ ID NO: 586902
cuguuaacucuagauacug

SEQ ID NO: 752377 - RNA, 19 nt, Artificial Sequence
  Description of Artificial Sequence: Synthetic oligonucleotide
  Antisense strand to SEQ ID NO: 752376
caguaucuagaguuaacag

SEQ ID NO: 752378 - RNA, 19 nt, Artificial Sequence
  Description of Artificial Sequence: Synthetic oligonucleotide
  Sense strand starting at position 2016 of SEQ ID NO: 586902
gugauuaugacaugcaaga

SEQ ID NO: 752379 - RNA, 19 nt, Artificial Sequence
  Description of Artificial Sequence: Synthetic oligonucleotide
  Antisense strand to SEQ ID NO: 752378
ucuugcaugucauaaucac

SEQ ID NO: 752380 - RNA, 19 nt, Artificial Sequence
  Description of Artificial Sequence: Synthetic oligonucleotide
  Sense strand starting at position 2090 of SEQ ID NO: 586902
ugcuguuaugggugauuuc

SEQ ID NO: 752381 - RNA, 19 nt, Artificial Sequence
  Description of Artificial Sequence: Synthetic oligonucleotide
  Antisense strand to SEQ ID NO: 752380
gaaaucacccauaacagca

SEQ ID NO: 752382 - RNA, 19 nt, Artificial Sequence
  Description of Artificial Sequence: Synthetic oligonucleotide
  Sense strand starting at position 2099 of SEQ ID NO: 586902
gggugauuucuauguuguu

SEQ ID NO: 752383 - RNA, 19 nt, Artificial Sequence
  Description of Artificial Sequence: Synthetic oligonucleotide
  Antisense strand to SEQ ID NO: 752382
aacaacauagaaaucaccc

SEQ ID NO: 752384 - RNA, 19 nt, Artificial Sequence
  Description of Artificial Sequence: Synthetic oligonucleotide
  Sense strand starting at position 2100 of SEQ ID NO: 586902
ggugauuucuauguuguua

SEQ ID NO: 752385 - RNA, 19 nt, Artificial Sequence
  Description of Artificial Sequence: Synthetic oligonucleotide
  Antisense strand to SEQ ID NO: 752384
uaacaacauagaaaucacc

SEQ ID NO: 752386 - RNA, 19 nt, Artificial Sequence
  Description of Artificial Sequence: Synthetic oligonucleotide
  Sense strand starting at position 2112 of SEQ ID NO: 586902
guuguuauaagauggauau

SEQ ID NO: 752387 - RNA, 19 nt, Artificial Sequence
  Description of Artificial Sequence: Synthetic oligonucleotide
  Antisense strand to SEQ ID NO: 752386
auauccaucuuauaacaac

SEQ ID NO: 752388 - RNA, 19 nt, Artificial Sequence
  Description of Artificial Sequence: Synthetic oligonucleotide
  Sense strand starting at position 2124 of SEQ ID NO: 586902
uggauauaaucacugagcu

SEQ ID NO: 752389 - RNA, 19 nt, Artificial Sequence
  Description of Artificial Sequence: Synthetic oligonucleotide
  Antisense strand to SEQ ID NO: 752388
agcucagugauuauaucca

SEQ ID NO: 752390 - RNA, 19 nt, Artificial Sequence
  Description of Artificial Sequence: Synthetic oligonucleotide
  Sense strand starting at position 2125 of SEQ ID NO: 586902
ggauauaaucacugagcua

SEQ ID NO: 752391 - RNA, 19 nt, Artificial Sequence
  Description of Artificial Sequence: Synthetic oligonucleotide
  Antisense strand to SEQ ID NO: 752390
uagcucagugauuauaucc

SEQ ID NO: 752392 - RNA, 19 nt, Artificial Sequence
  Description of Artificial Sequence: Synthetic oligonucleotide
  Sense strand starting at position 2208 of SEQ ID NO: 586902
ucuuuaaagccugaaagca

SEQ ID NO: 752393 - RNA, 19 nt, Artificial Sequence
  Description of Artificial Sequence: Synthetic oligonucleotide
  Antisense strand to SEQ ID NO: 752392
ugcuuucaggcuuuaaaga

SEQ ID NO: 752394 - RNA, 19 nt, Artificial Sequence
  Description of Artificial Sequence: Synthetic oligonucleotide
  Sense strand starting at position 2493 of SEQ ID NO: 586902
agggauccugcucaguuua

SEQ ID NO: 752395 - RNA, 19 nt, Artificial Sequence
  Description of Artificial Sequence: Synthetic oligonucleotide
  Antisense strand to SEQ ID NO: 752394
uaaacugagcaggaucccu

SEQ ID NO: 752396 - RNA, 19 nt, Artificial Sequence
  Description of Artificial Sequence: Synthetic oligonucleotide
  Sense strand starting at position 2581 of SEQ ID NO: 586902
gacugauaucuagggaagc

SEQ ID NO: 752397 - RNA, 19 nt, Artificial Sequence
  Description of Artificial Sequence: Synthetic oligonucleotide
  Antisense strand to SEQ ID NO: 752396
gcuucccuagauaucaguc

SEQ ID NO: 752398 - RNA, 19 nt, Artificial Sequence
  Description of Artificial Sequence: Synthetic oligonucleotide
  Sense strand starting at position 2598 of SEQ ID NO: 586902
gcuaauuucucugcagacu

SEQ ID NO: 752399 - RNA, 19 nt, Artificial Sequence
  Description of Artificial Sequence: Synthetic oligonucleotide
  Antisense strand to SEQ ID NO: 752398
agucugcagagaaauuagc

SEQ ID NO: 752400 - RNA, 19 nt, Artificial Sequence
  Description of Artificial Sequence: Synthetic oligonucleotide
  Sense strand starting at position 2622 of SEQ ID NO: 586902
gucuguuauuaaucaaaca

SEQ ID NO: 752401 - RNA, 19 nt, Artificial Sequence
  Description of Artificial Sequence: Synthetic oligonucleotide
  Antisense strand to SEQ ID NO: 752400
uguuugauuaauaacagac

SEQ ID NO: 752402 - RNA, 19 nt, Artificial Sequence
  Description of Artificial Sequence: Synthetic oligonucleotide
  Sense strand starting at position 3034 of SEQ ID NO: 586902
agauucugaccuugaacau

SEQ ID NO: 752403 - RNA, 19 nt, Artificial Sequence
  Description of Artificial Sequence: Synthetic oligonucleotide
  Antisense strand to SEQ ID NO: 752402
auguucaaggucagaaucu

SEQ ID NO: 752404 - RNA, 19 nt, Artificial Sequence
  Description of Artificial Sequence: Synthetic oligonucleotide
  Sense strand starting at position 3063 of SEQ ID NO: 586902
ggucuacauacguaaagug

SEQ ID NO: 752405 - RNA, 19 nt, Artificial Sequence
  Description of Artificial Sequence: Synthetic oligonucleotide
  Antisense strand to SEQ ID NO: 752404
cacuuuacguauguagacc

SEQ ID NO: 752406 - RNA, 19 nt, Artificial Sequence
  Description of Artificial Sequence: Synthetic oligonucleotide
  Sense strand starting at position 3156 of SEQ ID NO: 586902
augguaauuugagacaaga

SEQ ID NO: 752407 - RNA, 19 nt, Artificial Sequence
  Description of Artificial Sequence: Synthetic oligonucleotide
  Antisense strand to SEQ ID NO: 752406
ucuugucucaaauuaccau

SEQ ID NO: 752408 - RNA, 19 nt, Artificial Sequence
  Description of Artificial Sequence: Synthetic oligonucleotide
  Sense strand starting at position 3663 of SEQ ID NO: 586902
uuuaaagagcucuggcaaa

SEQ ID NO: 752409 - RNA, 19 nt, Artificial Sequence
  Description of Artificial Sequence: Synthetic oligonucleotide
  Antisense strand to SEQ ID NO: 752408
uuugccagagcucuuuaaa

SEQ ID NO: 752410 - RNA, 19 nt, Artificial Sequence
  Description of Artificial Sequence: Synthetic oligonucleotide
  Sense strand starting at position 3790 of SEQ ID NO: 586902
uuaccaauccagugaguag

SEQ ID NO: 752411 - RNA, 19 nt, Artificial Sequence
  Description of Artificial Sequence: Synthetic oligonucleotide
  Antisense strand to SEQ ID NO: 752410
cuacucacuggauugguaa

SEQ ID NO: 752412 - RNA, 19 nt, Artificial Sequence
  Description of Artificial Sequence: Synthetic oligonucleotide
  Sense strand starting at position 140 of SEQ ID NO: 586903
uggcuaauucucuauggca

SEQ ID NO: 752413 - RNA, 19 nt, Artificial Sequence
  Description of Artificial Sequence: Synthetic oligonucleotide
  Antisense strand to SEQ ID NO: 752412
ugccauagagaauuagcca

SEQ ID NO: 752414 - RNA, 19 nt, Artificial Sequence
  Description of Artificial Sequence: Synthetic oligonucleotide
  Sense strand starting at position 693 of SEQ ID NO: 586903
caaauagcugggcaugaua

SEQ ID NO: 752415 - RNA, 19 nt, Artificial Sequence
  Description of Artificial Sequence: Synthetic oligonucleotide
  Antisense strand to SEQ ID NO: 752414
uaucaugcccagcuauuug

SEQ ID NO: 752416 - RNA, 19 nt, Artificial Sequence
  Description of Artificial Sequence: Synthetic oligonucleotide
  Sense strand starting at position 747 of SEQ ID NO: 586903
guucauacuuggguagaga

SEQ ID NO: 752417 - RNA, 19 nt, Artificial Sequence
  Description of Artificial Sequence: Synthetic oligonucleotide
  Antisense strand to SEQ ID NO: 752416
ucucuacccaaguaugaac

SEQ ID NO: 752418 - RNA, 19 nt, Artificial Sequence
  Description of Artificial Sequence: Synthetic oligonucleotide
  Sense strand starting at position 822 of SEQ ID NO: 586903
uuuggaaagaucugguuac

SEQ ID NO: 752419 - RNA, 19 nt, Artificial Sequence
  Description of Artificial Sequence: Synthetic oligonucleotide
  Antisense strand to SEQ ID NO: 752418
guaaccagaucuuuccaaa

SEQ ID NO: 752420 - RNA, 19 nt, Artificial Sequence
  Description of Artificial Sequence: Synthetic oligonucleotide
  Sense strand starting at position 890 of SEQ ID NO: 586903
gcacaugggacauguccua

SEQ ID NO: 752421 - RNA, 19 nt, Artificial Sequence
  Description of Artificial Sequence: Synthetic oligonucleotide
  Antisense strand to SEQ ID NO: 752420
uaggacaugucccaugugc

SEQ ID NO: 752422 - RNA, 19 nt, Artificial Sequence
  Description of Artificial Sequence: Synthetic oligonucleotide
  Sense strand starting at position 897 of SEQ ID NO: 586903
ggacauguccuaugggcua

SEQ ID NO: 752423 - RNA, 19 nt, Artificial Sequence
  Description of Artificial Sequence: Synthetic oligonucleotide
  Antisense strand to SEQ ID NO: 752422
uagcccauaggacaugucc

SEQ ID NO: 752424 - RNA, 19 nt, Artificial Sequence
  Description of Artificial Sequence: Synthetic oligonucleotide
  Sense strand starting at position 1062 of SEQ ID NO: 586903
aguugaagcuggucaauag

SEQ ID NO: 752425 - RNA, 19 nt, Artificial Sequence
  Description of Artificial Sequence: Synthetic oligonucleotide
  Antisense strand to SEQ ID NO: 752424
cuauugaccagcuucaacu

SEQ ID NO: 752426 - RNA, 19 nt, Artificial Sequence
  Description of Artificial Sequence: Synthetic oligonucleotide
  Sense strand starting at position 1319 of SEQ ID NO: 586903
uaucaucaccgcgacuaua

SEQ ID NO: 752427 - RNA, 19 nt, Artificial Sequence
  Description of Artificial Sequence: Synthetic oligonucleotide
  Antisense strand to SEQ ID NO: 752426
uauagucgcggugaugaua

SEQ ID NO: 752428 - RNA, 19 nt, Artificial Sequence
  Description of Artificial Sequence: Synthetic oligonucleotide
  Sense strand starting at position 1385 of SEQ ID NO: 586903
uugauaguuguagaugauc

SEQ ID NO: 752429 - RNA, 19 nt, Artificial Sequence
  Description of Artificial Sequence: Synthetic oligonucleotide
  Antisense strand to SEQ ID NO: 752428
gaucaucuacaacuaucaa

SEQ ID NO: 752430 - RNA, 19 nt, Artificial Sequence
  Description of Artificial Sequence: Synthetic oligonucleotide
  Sense strand starting at position 1681 of SEQ ID NO: 586903
uuccguuugagucaggaaa

SEQ ID NO: 752431 - RNA, 19 nt, Artificial Sequence
  Description of Artificial Sequence: Synthetic oligonucleotide
  Antisense strand to SEQ ID NO: 752430
uuuccugacucaaacggaa

SEQ ID NO: 752432 - RNA, 19 nt, Artificial Sequence
  Description of Artificial Sequence: Synthetic oligonucleotide
  Sense strand starting at position 1783 of SEQ ID NO: 586903
ugccuccauuugucuauua

SEQ ID NO: 752433 - RNA, 19 nt, Artificial Sequence
  Description of Artificial Sequence: Synthetic oligonucleotide
  Antisense strand to SEQ ID NO: 752432
uaauagacaaauggaggca

SEQ ID NO: 752434 - RNA, 19 nt, Artificial Sequence
  Description of Artificial Sequence: Synthetic oligonucleotide
  Sense strand starting at position 1788 of SEQ ID NO: 586903
ccauuugucuauuaagaga

SEQ ID NO: 752435 - RNA, 19 nt, Artificial Sequence
  Description of Artificial Sequence: Synthetic oligonucleotide
  Antisense strand to SEQ ID NO: 752434
ucucuuaauagacaaaugg

SEQ ID NO: 752436 - RNA, 19 nt, Artificial Sequence
  Description of Artificial Sequence: Synthetic oligonucleotide
  Sense strand starting at position 1984 of SEQ ID NO: 586903
agacuugugauugguacca

SEQ ID NO: 752437 - RNA, 19 nt, Artificial Sequence
  Description of Artificial Sequence: Synthetic oligonucleotide
  Antisense strand to SEQ ID NO: 752436
ugguaccaaucacaagucu

SEQ ID NO: 752438 - RNA, 19 nt, Artificial Sequence
  Description of Artificial Sequence: Synthetic oligonucleotide
  Sense strand starting at position 2149 of SEQ ID NO: 586903
uugaauaggcuguaaagca

SEQ ID NO: 752439 - RNA, 19 nt, Artificial Sequence
  Description of Artificial Sequence: Synthetic oligonucleotide
  Antisense strand to SEQ ID NO: 752438
ugcuuuacagccuauucaa

SEQ ID NO: 752440 - RNA, 19 nt, Artificial Sequence
  Description of Artificial Sequence: Synthetic oligonucleotide
  Sense strand starting at position 2157 of SEQ ID NO: 586903
gcuguaaagcaauaaauaa

SEQ ID NO: 752441 - RNA, 19 nt, Artificial Sequence
  Description of Artificial Sequence: Synthetic oligonucleotide
  Antisense strand to SEQ ID NO: 752440
uuauuuauugcuuuacagc

SEQ ID NO: 752442 - RNA, 19 nt, Artificial Sequence
  Description of Artificial Sequence: Synthetic oligonucleotide
  Sense strand starting at position 2523 of SEQ ID NO: 586903
uguaaacucuuauuguuag

SEQ ID NO: 752443 - RNA, 19 nt, Artificial Sequence
  Description of Artificial Sequence: Synthetic oligonucleotide
  Antisense strand to SEQ ID NO: 752442
cuaacaauaagaguuuaca

SEQ ID NO: 752444 - RNA, 19 nt, Artificial Sequence
  Description of Artificial Sequence: Synthetic oligonucleotide
  Sense strand starting at position 2600 of SEQ ID NO: 586903
ggacauauauuggagaaga

SEQ ID NO: 752445 - RNA, 19 nt, Artificial Sequence
  Description of Artificial Sequence: Synthetic oligonucleotide
  Antisense strand to SEQ ID NO: 752444
ucuucuccaauauaugucc

SEQ ID NO: 752446 - RNA, 19 nt, Artificial Sequence
  Description of Artificial Sequence: Synthetic oligonucleotide
  Sense strand starting at position 2708 of SEQ ID NO: 586903
ggaggugacaaauguguuu

SEQ ID NO: 752447 - RNA, 19 nt, Artificial Sequence
  Description of Artificial Sequence: Synthetic oligonucleotide
  Antisense strand to SEQ ID NO: 752446
aaacacauuugucaccucc

SEQ ID NO: 752448 - RNA, 19 nt, Artificial Sequence
  Description of Artificial Sequence: Synthetic oligonucleotide
  Sense strand starting at position 2812 of SEQ ID NO: 586903
guggcuuggacucaaagua

SEQ ID NO: 752449 - RNA, 19 nt, Artificial Sequence
  Description of Artificial Sequence: Synthetic oligonucleotide
  Antisense strand to SEQ ID NO: 752448
uacuuugaguccaagccac

SEQ ID NO: 752450 - RNA, 19 nt, Artificial Sequence
  Description of Artificial Sequence: Synthetic oligonucleotide
  Sense strand starting at position 2960 of SEQ ID NO: 586903
ucuuuacggcuuuaaagau

SEQ ID NO: 752451 - RNA, 19 nt, Artificial Sequence
  Description of Artificial Sequence: Synthetic oligonucleotide
  Antisense strand to SEQ ID NO: 752450
aucuuuaaagccguaaaga

SEQ ID NO: 752452 - RNA, 19 nt, Artificial Sequence
  Description of Artificial Sequence: Synthetic oligonucleotide
  Sense strand starting at position 3067 of SEQ ID NO: 586903
uucuaucauguauagguua

SEQ ID NO: 752453 - RNA, 19 nt, Artificial Sequence
  Description of Artificial Sequence: Synthetic oligonucleotide
  Antisense strand to SEQ ID NO: 752452
uaaccuauacaugauagaa

SEQ ID NO: 752454 - RNA, 19 nt, Artificial Sequence
  Description of Artificial Sequence: Synthetic oligonucleotide
  Sense strand starting at position 3074 of SEQ ID NO: 586903
auguauagguuaucuucua

SEQ ID NO: 752455 - RNA, 19 nt, Artificial Sequence
  Description of Artificial Sequence: Synthetic oligonucleotide
  Antisense strand to SEQ ID NO: 752454
uagaagauaaccuauacau

SEQ ID NO: 752456 - RNA, 19 nt, Artificial Sequence
  Description of Artificial Sequence: Synthetic oligonucleotide
  Sense strand starting at position 3221 of SEQ ID NO: 586903
uguauucccuggccuauuu

SEQ ID NO: 752457 - RNA, 19 nt, Artificial Sequence
  Description of Artificial Sequence: Synthetic oligonucleotide
  Antisense strand to SEQ ID NO: 752456
aaauaggccagggaauaca

SEQ ID NO: 752458 - RNA, 19 nt, Artificial Sequence
  Description of Artificial Sequence: Synthetic oligonucleotide
  Sense strand starting at position 3252 of SEQ ID NO: 586903
guuaguauucccuguauuu

SEQ ID NO: 752459 - RNA, 19 nt, Artificial Sequence
  Description of Artificial Sequence: Synthetic oligonucleotide
  Antisense strand to SEQ ID NO: 752458
aaauacagggaauacuaac

SEQ ID NO: 752460 - RNA, 19 nt, Artificial Sequence
  Description of Artificial Sequence: Synthetic oligonucleotide
  Sense strand starting at position 3330 of SEQ ID NO: 586903
ugcaauucuguugaagcau

SEQ ID NO: 752461 - RNA, 19 nt, Artificial Sequence
  Description of Artificial Sequence: Synthetic oligonucleotide
  Antisense strand to SEQ ID NO: 752460
augcuucaacagaauugca

SEQ ID NO: 752462 - RNA, 19 nt, Artificial Sequence
  Description of Artificial Sequence: Synthetic oligonucleotide
  Sense strand starting at position 3409 of SEQ ID NO: 586903
gagugaauuccuggcugau

SEQ ID NO: 752463 - RNA, 19 nt, Artificial Sequence
  Description of Artificial Sequence: Synthetic oligonucleotide
  Antisense strand to SEQ ID NO: 752462
aucagccaggaauucacuc

SEQ ID NO: 752464 - RNA, 19 nt, Artificial Sequence
  Description of Artificial Sequence: Synthetic oligonucleotide
  Sense strand starting at position 3412 of SEQ ID NO: 586903
ugaauuccuggcugauucu

SEQ ID NO: 752465 - RNA, 19 nt, Artificial Sequence
  Description of Artificial Sequence: Synthetic oligonucleotide
  Antisense strand to SEQ ID NO: 752464
agaaucagccaggaauuca

SEQ ID NO: 752466 - RNA, 19 nt, Artificial Sequence
  Description of Artificial Sequence: Synthetic oligonucleotide
  Sense strand starting at position 3445 of SEQ ID NO: 586903
auugaagccucauuaagaa

SEQ ID NO: 752467 - RNA, 19 nt, Artificial Sequence
  Description of Artificial Sequence: Synthetic oligonucleotide
  Antisense strand to SEQ ID NO: 752466
uucuuaaugaggcuucaau

SEQ ID NO: 752468 - RNA, 19 nt, Artificial Sequence
  Description of Artificial Sequence: Synthetic oligonucleotide
  Sense strand starting at position 3454 of SEQ ID NO: 586903
ucauuaagaagacgguuua

SEQ ID NO: 752469 - RNA, 19 nt, Artificial Sequence
  Description of Artificial Sequence: Synthetic oligonucleotide
  Antisense strand to SEQ ID NO: 752468
uaaaccgucuucuuaauga

SEQ ID NO: 752470 - RNA, 19 nt, Artificial Sequence
  Description of Artificial Sequence: Synthetic oligonucleotide
  Sense strand starting at position 3455 of SEQ ID NO: 586903
cauuaagaagacgguuuaa

SEQ ID NO: 752471 - RNA, 19 nt, Artificial Sequence
  Description of Artificial Sequence: Synthetic oligonucleotide
  Antisense strand to SEQ ID NO: 752470
uuaaaccgucuucuuaaug

SEQ ID NO: 752472 - RNA, 19 nt, Artificial Sequence
  Description of Artificial Sequence: Synthetic oligonucleotide
  Sense strand starting at position 3465 of SEQ ID NO: 586903
acgguuuaacaucaucaua

SEQ ID NO: 752473 - RNA, 19 nt, Artificial Sequence
  Description of Artificial Sequence: Synthetic oligonucleotide
  Antisense strand to SEQ ID NO: 752472
uaugaugauguuaaaccgu

SEQ ID NO: 752474 - RNA, 19 nt, Artificial Sequence
  Description of Artificial Sequence: Synthetic oligonucleotide
  Sense strand starting at position 3579 of SEQ ID NO: 586903
gggugaaguguuuaaccug

SEQ ID NO: 752475 - RNA, 19 nt, Artificial Sequence
  Description of Artificial Sequence: Synthetic oligonucleotide
  Antisense strand to SEQ ID NO: 752474
cagguuaaacacuucaccc

SEQ ID NO: 752476 - RNA, 19 nt, Artificial Sequence
  Description of Artificial Sequence: Synthetic oligonucleotide
  Sense strand starting at position 3582 of SEQ ID NO: 586903
ugaaguguuuaaccuguaa

SEQ ID NO: 752477 - RNA, 19 nt, Artificial Sequence
  Description of Artificial Sequence: Synthetic oligonucleotide
  Antisense strand to SEQ ID NO: 752476
uuacagguuaaacacuuca

SEQ ID NO: 752478 - RNA, 19 nt, Artificial Sequence
  Description of Artificial Sequence: Synthetic oligonucleotide
  Sense strand starting at position 3586 of SEQ ID NO: 586903
guguuuaaccuguaacuau

SEQ ID NO: 752479 - RNA, 19 nt, Artificial Sequence
  Description of Artificial Sequence: Synthetic oligonucleotide
  Antisense strand to SEQ ID NO: 752478
auaguuacagguuaaacac

SEQ ID NO: 752480 - RNA, 19 nt, Artificial Sequence
  Description of Artificial Sequence: Synthetic oligonucleotide
  Sense strand starting at position 3633 of SEQ ID NO: 586903
aaagguucucuguaugguu

SEQ ID NO: 752481 - RNA, 19 nt, Artificial Sequence
  Description of Artificial Sequence: Synthetic oligonucleotide
  Antisense strand to SEQ ID NO: 752480
aaccauacagagaaccuuu

SEQ ID NO: 752482 - RNA, 19 nt, Artificial Sequence
  Description of Artificial Sequence: Synthetic oligonucleotide
  Sense strand starting at position 3638 of SEQ ID NO: 586903
uucucuguaugguugaaag

SEQ ID NO: 752483 - RNA, 19 nt, Artificial Sequence
  Description of Artificial Sequence: Synthetic oligonucleotide
  Antisense strand to SEQ ID NO: 752482
cuuucaaccauacagagaa

SEQ ID NO: 752484 - RNA, 19 nt, Artificial Sequence
  Description of Artificial Sequence: Synthetic oligonucleotide
  Sense strand starting at position 3640 of SEQ ID NO: 586903
cucuguaugguugaaagga

SEQ ID NO: 752485 - RNA, 19 nt, Artificial Sequence
  Description of Artificial Sequence: Synthetic oligonucleotide
  Antisense strand to SEQ ID NO: 752484
uccuuucaaccauacagag

SEQ ID NO: 752486 - RNA, 19 nt, Artificial Sequence
  Description of Artificial Sequence: Synthetic oligonucleotide
  Sense strand starting at position 3656 of SEQ ID NO: 586903
ggaccaauuugaggaacuu

SEQ ID NO: 752487 - RNA, 19 nt, Artificial Sequence
  Description of Artificial Sequence: Synthetic oligonucleotide
  Antisense strand to SEQ ID NO: 752486
aaguuccucaaauuggucc

SEQ ID NO: 752488 - RNA, 19 nt, Artificial Sequence
  Description of Artificial Sequence: Synthetic oligonucleotide
  Sense strand starting at position 3712 of SEQ ID NO: 586903
ugguuaaggcaaugauaga

SEQ ID NO: 752489 - RNA, 19 nt, Artificial Sequence
  Description of Artificial Sequence: Synthetic oligonucleotide
  Antisense strand to SEQ ID NO: 752488
ucuaucauugccuuaacca

SEQ ID NO: 752490 - RNA, 19 nt, Artificial Sequence
  Description of Artificial Sequence: Synthetic oligonucleotide
  Sense strand starting at position 3847 of SEQ ID NO: 586903
gcugcuucugcagacauuu

SEQ ID NO: 752491 - RNA, 19 nt, Artificial Sequence
  Description of Artificial Sequence: Synthetic oligonucleotide
  Antisense strand to SEQ ID NO: 752490
aaaugucugcagaagcagc

SEQ ID NO: 752492 - RNA, 19 nt, Artificial Sequence
  Description of Artificial Sequence: Synthetic oligonucleotide
  Sense strand starting at position 289 of SEQ ID NO: 586904
gacccugugccugacuauu

SEQ ID NO: 752493 - RNA, 19 nt, Artificial Sequence
  Description of Artificial Sequence: Synthetic oligonucleotide
  Antisense strand to SEQ ID NO: 752492
aauagucaggcacaggguc

SEQ ID NO: 752494 - RNA, 19 nt, Artificial Sequence
  Description of Artificial Sequence: Synthetic oligonucleotide
  Sense strand starting at position 299 of SEQ ID NO: 586904
cugacuauugcaggaagau

SEQ ID NO: 752495 - RNA, 19 nt, Artificial Sequence
  Description of Artificial Sequence: Synthetic oligonucleotide
  Antisense strand to SEQ ID NO: 752494
aucuuccugcaauagucag

SEQ ID NO: 752496 - RNA, 19 nt, Artificial Sequence
  Description of Artificial Sequence: Synthetic oligonucleotide
  Sense strand starting at position 340 of SEQ ID NO: 586904
aauagaugagcugauguuu

SEQ ID NO: 752497 - RNA, 19 nt, Artificial Sequence
  Description of Artificial Sequence: Synthetic oligonucleotide
  Antisense strand to SEQ ID NO: 752496
aaacaucagcucaucuauu

SEQ ID NO: 752498 - RNA, 19 nt, Artificial Sequence
  Description of Artificial Sequence: Synthetic oligonucleotide
  Sense strand starting at position 348 of SEQ ID NO: 586904
agcugauguuuggcuccua

SEQ ID NO: 752499 - RNA, 19 nt, Artificial Sequence
  Description of Artificial Sequence: Synthetic oligonucleotide
  Antisense strand to SEQ ID NO: 752498
uaggagccaaacaucagcu

SEQ ID NO: 752500 - RNA, 19 nt, Artificial Sequence
  Description of Artificial Sequence: Synthetic oligonucleotide
  Sense strand starting at position 349 of SEQ ID NO: 586904
gcugauguuuggcuccuaa

SEQ ID NO: 752501 - RNA, 19 nt, Artificial Sequence
  Description of Artificial Sequence: Synthetic oligonucleotide
  Antisense strand to SEQ ID NO: 752500
uuaggagccaaacaucagc

SEQ ID NO: 752502 - RNA, 19 nt, Artificial Sequence
  Description of Artificial Sequence: Synthetic oligonucleotide
  Sense strand starting at position 441 of SEQ ID NO: 586904
uuuagcauuccuggcaauu

SEQ ID NO: 752503 - RNA, 19 nt, Artificial Sequence
  Description of Artificial Sequence: Synthetic oligonucleotide
  Antisense strand to SEQ ID NO: 752502
aauugccaggaaugcuaaa

SEQ ID NO: 752504 - RNA, 19 nt, Artificial Sequence
  Description of Artificial Sequence: Synthetic oligonucleotide
  Sense strand starting at position 450 of SEQ ID NO: 586904
ccuggcaauuccguuacua

SEQ ID NO: 752505 - RNA, 19 nt, Artificial Sequence
  Description of Artificial Sequence: Synthetic oligonucleotide
  Antisense strand to SEQ ID NO: 752504
uaguaacggaauugccagg

SEQ ID NO: 752506 - RNA, 19 nt, Artificial Sequence
  Description of Artificial Sequence: Synthetic oligonucleotide
  Sense strand starting at position 452 of SEQ ID NO: 586904
uggcaauuccguuacuaau

SEQ ID NO: 752507 - RNA, 19 nt, Artificial Sequence
  Description of Artificial Sequence: Synthetic oligonucleotide
  Antisense strand to SEQ ID NO: 752506
auuaguaacggaauugcca

SEQ ID NO: 752508 - RNA, 19 nt, Artificial Sequence
  Description of Artificial Sequence: Synthetic oligonucleotide
  Sense strand starting at position 454 of SEQ ID NO: 586904
gcaauuccguuacuaauuc

SEQ ID NO: 752509 - RNA, 19 nt, Artificial Sequence
  Description of Artificial Sequence: Synthetic oligonucleotide
  Antisense strand to SEQ ID NO: 752508
gaauuaguaacggaauugc

SEQ ID NO: 752510 - RNA, 19 nt, Artificial Sequence
  Description of Artificial Sequence: Synthetic oligonucleotide
  Sense strand starting at position 611 of SEQ ID NO: 586904
gugcuucuucuguagguga

SEQ ID NO: 752511 - RNA, 19 nt, Artificial Sequence
  Description of Artificial Sequence: Synthetic oligonucleotide
  Antisense strand to SEQ ID NO: 752510
ucaccuacagaagaagcac

SEQ ID NO: 752512 - RNA, 19 nt, Artificial Sequence
  Description of Artificial Sequence: Synthetic oligonucleotide
  Sense strand starting at position 682 of SEQ ID NO: 586904
gagaacauaucugaaacgu

SEQ ID NO: 752513 - RNA, 19 nt, Artificial Sequence
  Description of Artificial Sequence: Synthetic oligonucleotide
  Antisense strand to SEQ ID NO: 752512
acguuucagauauguucuc

SEQ ID NO: 752514 - RNA, 19 nt, Artificial Sequence
  Description of Artificial Sequence: Synthetic oligonucleotide
  Sense strand starting at position 1012 of SEQ ID NO: 586904
gaacguucucuuugcacga

SEQ ID NO: 752515 - RNA, 19 nt, Artificial Sequence
  Description of Artificial Sequence: Synthetic oligonucleotide
  Antisense strand to SEQ ID NO: 752514
ucgugcaaagagaacguuc

SEQ ID NO: 752516 - RNA, 19 nt, Artificial Sequence
  Description of Artificial Sequence: Synthetic oligonucleotide
  Sense strand starting at position 1016 of SEQ ID NO: 586904
guucucuuugcacgaucua

SEQ ID NO: 752517 - RNA, 19 nt, Artificial Sequence
  Description of Artificial Sequence: Synthetic oligonucleotide
  Antisense strand to SEQ ID NO: 752516
uagaucgugcaaagagaac

SEQ ID NO: 752518 - RNA, 19 nt, Artificial Sequence
  Description of Artificial Sequence: Synthetic oligonucleotide
  Sense strand starting at position 1017 of SEQ ID NO: 586904
uucucuuugcacgaucuaa

SEQ ID NO: 752519 - RNA, 19 nt, Artificial Sequence
  Description of Artificial Sequence: Synthetic oligonucleotide
  Antisense strand to SEQ ID NO: 752518
uuagaucgugcaaagagaa

SEQ ID NO: 752520 - RNA, 19 nt, Artificial Sequence
  Description of Artificial Sequence: Synthetic oligonucleotide
  Sense strand starting at position 1080 of SEQ ID NO: 586904
cccugucggauuugucaga

SEQ ID NO: 752521 - RNA, 19 nt, Artificial Sequence
  Description of Artificial Sequence: Synthetic oligonucleotide
  Antisense strand to SEQ ID NO: 752520
ucugacaaauccgacaggg

SEQ ID NO: 752522 - RNA, 19 nt, Artificial Sequence
  Description of Artificial Sequence: Synthetic oligonucleotide
  Sense strand starting at position 1085 of SEQ ID NO: 586904
ucggauuugucagaaauuu

SEQ ID NO: 752523 - RNA, 19 nt, Artificial Sequence
  Description of Artificial Sequence: Synthetic oligonucleotide
  Antisense strand to SEQ ID NO: 752522
aaauuucugacaaauccga

SEQ ID NO: 752524 - RNA, 19 nt, Artificial Sequence
  Description of Artificial Sequence: Synthetic oligonucleotide
  Sense strand starting at position 1093 of SEQ ID NO: 586904
gucagaaauuucuguaacc

SEQ ID NO: 752525 - RNA, 19 nt, Artificial Sequence
  Description of Artificial Sequence: Synthetic oligonucleotide
  Antisense strand to SEQ ID NO: 752524
gguuacagaaauuucugac

SEQ ID NO: 752526 - RNA, 19 nt, Artificial Sequence
  Description of Artificial Sequence: Synthetic oligonucleotide
  Sense strand starting at position 1141 of SEQ ID NO: 586904
gcaaguggcccagagucuu

SEQ ID NO: 752527 - RNA, 19 nt, Artificial Sequence
  Description of Artificial Sequence: Synthetic oligonucleotide
  Antisense strand to SEQ ID NO: 752526
aagacucugggccacuugc

SEQ ID NO: 752528 - RNA, 19 nt, Artificial Sequence
  Description of Artificial Sequence: Synthetic oligonucleotide
  Sense strand starting at position 1312 of SEQ ID NO: 586904
ggugacagucgccaacuuu

SEQ ID NO: 752529 - RNA, 19 nt, Artificial Sequence
  Description of Artificial Sequence: Synthetic oligonucleotide
  Antisense strand to SEQ ID NO: 752528
aaaguuggcgacugucacc

SEQ ID NO: 752530 - RNA, 19 nt, Artificial Sequence
  Description of Artificial Sequence: Synthetic oligonucleotide
  Sense strand starting at position 1864 of SEQ ID NO: 586904
gccgcuuacuccucagaag

SEQ ID NO: 752531 - RNA, 19 nt, Artificial Sequence
  Description of Artificial Sequence: Synthetic oligonucleotide
  Antisense strand to SEQ ID NO: 752530
cuucugaggaguaagcggc

SEQ ID NO: 752532 - RNA, 19 nt, Artificial Sequence
  Description of Artificial Sequence: Synthetic oligonucleotide
  Sense strand starting at position 2196 of SEQ ID NO: 586904
uguggauguuuacucgaua

SEQ ID NO: 752533 - RNA, 19 nt, Artificial Sequence
  Description of Artificial Sequence: Synthetic oligonucleotide
  Antisense strand to SEQ ID NO: 752532
uaucgaguaaacauccaca

SEQ ID NO: 752534 - RNA, 19 nt, Artificial Sequence
  Description of Artificial Sequence: Synthetic oligonucleotide
  Sense strand starting at position 2197 of SEQ ID NO: 586904
guggauguuuacucgauau

SEQ ID NO: 752535 - RNA, 19 nt, Artificial Sequence
  Description of Artificial Sequence: Synthetic oligonucleotide
  Antisense strand to SEQ ID NO: 752534
auaucgaguaaacauccac

SEQ ID NO: 752536 - RNA, 19 nt, Artificial Sequence
  Description of Artificial Sequence: Synthetic oligonucleotide
  Sense strand starting at position 2199 of SEQ ID NO: 586904
ggauguuuacucgauaucu

SEQ ID NO: 752537 - RNA, 19 nt, Artificial Sequence
  Description of Artificial Sequence: Synthetic oligonucleotide
  Antisense strand to SEQ ID NO: 752536
agauaucgaguaaacaucc

SEQ ID NO: 752538 - RNA, 19 nt, Artificial Sequence
  Description of Artificial Sequence: Synthetic oligonucleotide
  Sense strand starting at position 2201 of SEQ ID NO: 586904
auguuuacucgauaucuac

SEQ ID NO: 752539 - RNA, 19 nt, Artificial Sequence
  Description of Artificial Sequence: Synthetic oligonucleotide
  Antisense strand to SEQ ID NO: 752538
guagauaucgaguaaacau

SEQ ID NO: 752540 - RNA, 19 nt, Artificial Sequence
  Description of Artificial Sequence: Synthetic oligonucleotide
  Sense strand starting at position 2208 of SEQ ID NO: 586904
cucgauaucuacugauuug

SEQ ID NO: 752541 - RNA, 19 nt, Artificial Sequence
  Description of Artificial Sequence: Synthetic oligonucleotide
  Antisense strand to SEQ ID NO: 752540
caaaucaguagauaucgag

SEQ ID NO: 752542 - RNA, 19 nt, Artificial Sequence
  Description of Artificial Sequence: Synthetic oligonucleotide
  Sense strand starting at position 2227 of SEQ ID NO: 586904
cccuaauucguuuggcaag

SEQ ID NO: 752543 - RNA, 19 nt, Artificial Sequence
  Description of Artificial Sequence: Synthetic oligonucleotide
  Antisense strand to SEQ ID NO: 752542
cuugccaaacgaauuaggg

SEQ ID NO: 752544 - RNA, 19 nt, Artificial Sequence
  Description of Artificial Sequence: Synthetic oligonucleotide
  Sense strand starting at position 2274 of SEQ ID NO: 586904
gcggauuuccugugggcca

SEQ ID NO: 752545 - RNA, 19 nt, Artificial Sequence
  Description of Artificial Sequence: Synthetic oligonucleotide
  Antisense strand to SEQ ID NO: 752544
uggcccacaggaaauccgc

SEQ ID NO: 752546 - RNA, 19 nt, Artificial Sequence
  Description of Artificial Sequence: Synthetic oligonucleotide
  Sense strand starting at position 2557 of SEQ ID NO: 586904
guuguagugagccaacaug

SEQ ID NO: 752547 - RNA, 19 nt, Artificial Sequence
  Description of Artificial Sequence: Synthetic oligonucleotide
  Antisense strand to SEQ ID NO: 752546
cauguuggcucacuacaac

SEQ ID NO: 752548 - RNA, 19 nt, Artificial Sequence
  Description of Artificial Sequence: Synthetic oligonucleotide
  Sense strand starting at position 2638 of SEQ ID NO: 586904
aaauguguuccuggccuca

SEQ ID NO: 752549 - RNA, 19 nt, Artificial Sequence
  Description of Artificial Sequence: Synthetic oligonucleotide
  Antisense strand to SEQ ID NO: 752548
ugaggccaggaacacauuu

SEQ ID NO: 752550 - RNA, 19 nt, Artificial Sequence
  Description of Artificial Sequence: Synthetic oligonucleotide
  Sense strand starting at position 2677 of SEQ ID NO: 586904
gcaagugaauaacugacua

SEQ ID NO: 752551 - RNA, 19 nt, Artificial Sequence
  Description of Artificial Sequence: Synthetic oligonucleotide
  Antisense strand to SEQ ID NO: 752550
uagucaguuauucacuugc

SEQ ID NO: 752552 - RNA, 19 nt, Artificial Sequence
  Description of Artificial Sequence: Synthetic oligonucleotide
  Sense strand starting at position 3053 of SEQ ID NO: 586904
gagguuguagugcagugau

SEQ ID NO: 752553 - RNA, 19 nt, Artificial Sequence
  Description of Artificial Sequence: Synthetic oligonucleotide
  Antisense strand to SEQ ID NO: 752552
aucacugcacuacaaccuc

SEQ ID NO: 752554 - RNA, 19 nt, Artificial Sequence
  Description of Artificial Sequence: Synthetic oligonucleotide
  Sense strand starting at position 3159 of SEQ ID NO: 586904
ucaagucaguaauuagaua

SEQ ID NO: 752555 - RNA, 19 nt, Artificial Sequence
  Description of Artificial Sequence: Synthetic oligonucleotide
  Antisense strand to SEQ ID NO: 752554
uaucuaauuacugacuuga

SEQ ID NO: 752556 - RNA, 19 nt, Artificial Sequence
  Description of Artificial Sequence: Synthetic oligonucleotide
  Sense strand starting at position 3695 of SEQ ID NO: 586904
cggccagaggauuguuuga

SEQ ID NO: 752557 - RNA, 19 nt, Artificial Sequence
  Description of Artificial Sequence: Synthetic oligonucleotide
  Antisense strand to SEQ ID NO: 752556
ucaaacaauccucuggccg

SEQ ID NO: 752558 - RNA, 19 nt, Artificial Sequence
  Description of Artificial Sequence: Synthetic oligonucleotide
  Sense strand starting at position 3835 of SEQ ID NO: 586904
auagucuugaugcggcaau

SEQ ID NO: 752559 - RNA, 19 nt, Artificial Sequence
  Description of Artificial Sequence: Synthetic oligonucleotide
  Antisense strand to SEQ ID NO: 752558
auugccgcaucaagacuau

SEQ ID NO: 752560 - RNA, 19 nt, Artificial Sequence
  Description of Artificial Sequence: Synthetic oligonucleotide
  Sense strand starting at position 3846 of SEQ ID NO: 586904
gcggcaaugaguguuccuu

SEQ ID NO: 752561 - RNA, 19 nt, Artificial Sequence
  Description of Artificial Sequence: Synthetic oligonucleotide
  Antisense strand to SEQ ID NO: 752560
aaggaacacucauugccgc

SEQ ID NO: 752562 - RNA, 19 nt, Artificial Sequence
  Description of Artificial Sequence: Synthetic oligonucleotide
  Sense strand starting at position 3848 of SEQ ID NO: 586904
ggcaaugaguguuccuucu

SEQ ID NO: 752563 - RNA, 19 nt, Artificial Sequence
  Description of Artificial Sequence: Synthetic oligonucleotide
  Antisense strand to SEQ ID NO: 752562
agaaggaacacucauugcc

SEQ ID NO: 752564 - RNA, 19 nt, Artificial Sequence
  Description of Artificial Sequence: Synthetic oligonucleotide
  Sense strand starting at position 3854 of SEQ ID NO: 586904
gaguguuccuucucuaaga

SEQ ID NO: 752565 - RNA, 19 nt, Artificial Sequence
  Description of Artificial Sequence: Synthetic oligonucleotide
  Antisense strand to SEQ ID NO: 752564
ucuuagagaaggaacacuc

SEQ ID NO: 752566 - RNA, 19 nt, Artificial Sequence
  Description of Artificial Sequence: Synthetic oligonucleotide
  Sense strand starting at position 3855 of SEQ ID NO: 586904
aguguuccuucucuaagac

SEQ ID NO: 752567 - RNA, 19 nt, Artificial Sequence
  Description of Artificial Sequence: Synthetic oligonucleotide
  Antisense strand to SEQ ID NO: 752566
gucuuagagaaggaacacu

SEQ ID NO: 752568 - RNA, 19 nt, Artificial Sequence
  Description of Artificial Sequence: Synthetic oligonucleotide
  Sense strand starting at position 3856 of SEQ ID NO: 586904
guguuccuucucuaagaca

SEQ ID NO: 752569 - RNA, 19 nt, Artificial Sequence
  Description of Artificial Sequence: Synthetic oligonucleotide
  Antisense strand to SEQ ID NO: 752568
ugucuuagagaaggaacac

SEQ ID NO: 752570 - RNA, 19 nt, Artificial Sequence
  Description of Artificial Sequence: Synthetic oligonucleotide
  Sense strand starting at position 3871 of SEQ ID NO: 586904
gacaguagaguguggcuua

SEQ ID NO: 752571 - RNA, 19 nt, Artificial Sequence
  Description of Artificial Sequence: Synthetic oligonucleotide
  Antisense strand to SEQ ID NO: 752570
uaagccacacucuacuguc

SEQ ID NO: 752572 - RNA, 19 nt, Artificial Sequence
  Description of Artificial Sequence: Synthetic oligonucleotide
  Sense strand starting at position 213 of SEQ ID NO: 586905
gacaauacccgaugcagua

SEQ ID NO: 752573 - RNA, 19 nt, Artificial Sequence
  Description of Artificial Sequence: Synthetic oligonucleotide
  Antisense strand to SEQ ID NO: 752572
uacugcaucggguauuguc

SEQ ID NO: 752574 - RNA, 19 nt, Artificial Sequence
  Description of Artificial Sequence: Synthetic oligonucleotide
  Sense strand starting at position 394 of SEQ ID NO: 586905
aaauguagagcucauaugu

SEQ ID NO: 752575 - RNA, 19 nt, Artificial Sequence
  Description of Artificial Sequence: Synthetic oligonucleotide
  Antisense strand to SEQ ID NO: 752574
acauaugagcucuacauuu

SEQ ID NO: 752576 - RNA, 19 nt, Artificial Sequence
  Description of Artificial Sequence: Synthetic oligonucleotide
  Sense strand starting at position 490 of SEQ ID NO: 586905
gugggaacuuuccucuuau

SEQ ID NO: 752577 - RNA, 19 nt, Artificial Sequence
  Description of Artificial Sequence: Synthetic oligonucleotide
  Antisense strand to SEQ ID NO: 752576
auaagaggaaaguucccac

SEQ ID NO: 752578 - RNA, 19 nt, Artificial Sequence
  Description of Artificial Sequence: Synthetic oligonucleotide
  Sense strand starting at position 491 of SEQ ID NO: 586905
ugggaacuuuccucuuauu

SEQ ID NO: 752579 - RNA, 19 nt, Artificial Sequence
  Description of Artificial Sequence: Synthetic oligonucleotide
  Antisense strand to SEQ ID NO: 752578
aauaagaggaaaguuccca

SEQ ID NO: 752580 - RNA, 19 nt, Artificial Sequence
  Description of Artificial Sequence: Synthetic oligonucleotide
  Sense strand starting at position 514 of SEQ ID NO: 586905
ucaauuaaccuauggugaa

SEQ ID NO: 752581 - RNA, 19 nt, Artificial Sequence
  Description of Artificial Sequence: Synthetic oligonucleotide
  Antisense strand to SEQ ID NO: 752580
uucaccauagguuaauuga

SEQ ID NO: 752582 - RNA, 19 nt, Artificial Sequence
  Description of Artificial Sequence: Synthetic oligonucleotide
  Sense strand starting at position 526 of SEQ ID NO: 586905
uggugaaacugguuuccuu

SEQ ID NO: 752583 - RNA, 19 nt, Artificial Sequence
  Description of Artificial Sequence: Synthetic oligonucleotide
  Antisense strand to SEQ ID NO: 752582
aaggaaaccaguuucacca

SEQ ID NO: 752584 - RNA, 19 nt, Artificial Sequence
  Description of Artificial Sequence: Synthetic oligonucleotide
  Sense strand starting at position 529 of SEQ ID NO: 586905
ugaaacugguuuccuugua

SEQ ID NO: 752585 - RNA, 19 nt, Artificial Sequence
  Description of Artificial Sequence: Synthetic oligonucleotide
  Antisense strand to SEQ ID NO: 752584
uacaaggaaaccaguuuca

SEQ ID NO: 752586 - RNA, 19 nt, Artificial Sequence
  Description of Artificial Sequence: Synthetic oligonucleotide
  Sense strand starting at position 600 of SEQ ID NO: 586905
gaagacuuacuguguugag

SEQ ID NO: 752587 - RNA, 19 nt, Artificial Sequence
  Description of Artificial Sequence: Synthetic oligonucleotide
  Antisense strand to SEQ ID NO: 752586
cucaacacaguaagucuuc

SEQ ID NO: 752588 - RNA, 19 nt, Artificial Sequence
  Description of Artificial Sequence: Synthetic oligonucleotide
  Sense strand starting at position 759 of SEQ ID NO: 586905
cugagauauccaggguuag

SEQ ID NO: 752589 - RNA, 19 nt, Artificial Sequence
  Description of Artificial Sequence: Synthetic oligonucleotide
  Antisense strand to SEQ ID NO: 752588
cuaacccuggauaucucag

SEQ ID NO: 752590 - RNA, 19 nt, Artificial Sequence
  Description of Artificial Sequence: Synthetic oligonucleotide
  Sense strand starting at position 809 of SEQ ID NO: 586905
ggaggcuuugaugaugguu

SEQ ID NO: 752591 - RNA, 19 nt, Artificial Sequence
  Description of Artificial Sequence: Synthetic oligonucleotide
  Antisense strand to SEQ ID NO: 752590
aaccaucaucaaagccucc

SEQ ID NO: 752592 - RNA, 19 nt, Artificial Sequence
  Description of Artificial Sequence: Synthetic oligonucleotide
  Sense strand starting at position 817 of SEQ ID NO: 586905
ugaugaugguucuuacuac

SEQ ID NO: 752593 - RNA, 19 nt, Artificial Sequence
  Description of Artificial Sequence: Synthetic oligonucleotide
  Antisense strand to SEQ ID NO: 752592
guaguaagaaccaucauca

SEQ ID NO: 752594 - RNA, 19 nt, Artificial Sequence
  Description of Artificial Sequence: Synthetic oligonucleotide
  Sense strand starting at position 861 of SEQ ID NO: 586905
cuggcaucaagagauguuu

SEQ ID NO: 752595 - RNA, 19 nt, Artificial Sequence
  Description of Artificial Sequence: Synthetic oligonucleotide
  Antisense strand to SEQ ID NO: 752594
aaacaucucuugaugccag

SEQ ID NO: 752596 - RNA, 19 nt, Artificial Sequence
  Description of Artificial Sequence: Synthetic oligonucleotide
  Sense strand starting at position 863 of SEQ ID NO: 586905
ggcaucaagagauguuuga

SEQ ID NO: 752597 - RNA, 19 nt, Artificial Sequence
  Description of Artificial Sequence: Synthetic oligonucleotide
  Antisense strand to SEQ ID NO: 752596
ucaaacaucucuugaugcc

SEQ ID NO: 752598 - RNA, 19 nt, Artificial Sequence
  Description of Artificial Sequence: Synthetic oligonucleotide
  Sense strand starting at position 946 of SEQ ID NO: 586905
cugaaagaucacugccaga

SEQ ID NO: 752599 - RNA, 19 nt, Artificial Sequence
  Description of Artificial Sequence: Synthetic oligonucleotide
  Antisense strand to SEQ ID NO: 752598
ucuggcagugaucuuucag

SEQ ID NO: 752600 - RNA, 19 nt, Artificial Sequence
  Description of Artificial Sequence: Synthetic oligonucleotide
  Sense strand starting at position 991 of SEQ ID NO: 586905
gccuauaaccugcagaaga

SEQ ID NO: 752601 - RNA, 19 nt, Artificial Sequence
  Description of Artificial Sequence: Synthetic oligonucleotide
  Antisense strand to SEQ ID NO: 752600
ucuucugcagguuauaggc

SEQ ID NO: 752602 - RNA, 19 nt, Artificial Sequence
  Description of Artificial Sequence: Synthetic oligonucleotide
  Sense strand starting at position 1005 of SEQ ID NO: 586905
gaagauacaguuugcauca

SEQ ID NO: 752603 - RNA, 19 nt, Artificial Sequence
  Description of Artificial Sequence: Synthetic oligonucleotide
  Antisense strand to SEQ ID NO: 752602
ugaugcaaacuguaucuuc

SEQ ID NO: 752604 - RNA, 19 nt, Artificial Sequence
  Description of Artificial Sequence: Synthetic oligonucleotide
  Sense strand starting at position 1045 of SEQ ID NO: 586905
agcugcagucugcaauuua

SEQ ID NO: 752605 - RNA, 19 nt, Artificial Sequence
  Description of Artificial Sequence: Synthetic oligonucleotide
  Antisense strand to SEQ ID NO: 752604
uaaauugcagacugcagcu

SEQ ID NO: 752606 - RNA, 19 nt, Artificial Sequence
  Description of Artificial Sequence: Synthetic oligonucleotide
  Sense strand starting at position 1079 of SEQ ID NO: 586905
acaguagaccacugucauu

SEQ ID NO: 752607 - RNA, 19 nt, Artificial Sequence
  Description of Artificial Sequence: Synthetic oligonucleotide
  Antisense strand to SEQ ID NO: 752606
aaugacaguggucuacugu

SEQ ID NO: 752608 - RNA, 19 nt, Artificial Sequence
  Description of Artificial Sequence: Synthetic oligonucleotide
  Sense strand starting at position 1136 of SEQ ID NO: 586905
aaaguccuacgguaucauu

SEQ ID NO: 752609 - RNA, 19 nt, Artificial Sequence
  Description of Artificial Sequence: Synthetic oligonucleotide
  Antisense strand to SEQ ID NO: 752608
aaugauaccguaggacuuu

SEQ ID NO: 752610 - RNA, 19 nt, Artificial Sequence
  Description of Artificial Sequence: Synthetic oligonucleotide
  Sense strand starting at position 1290 of SEQ ID NO: 586905
ggguuagaaacguaacccu

SEQ ID NO: 752611 - RNA, 19 nt, Artificial Sequence
  Description of Artificial Sequence: Synthetic oligonucleotide
  Antisense strand to SEQ ID NO: 752610
aggguuacguuucuaaccc

SEQ ID NO: 752612 - RNA, 19 nt, Artificial Sequence
  Description of Artificial Sequence: Synthetic oligonucleotide
  Sense strand starting at position 1304 of SEQ ID NO: 586905
acccuugcccaguauugaa

SEQ ID NO: 752613 - RNA, 19 nt, Artificial Sequence
  Description of Artificial Sequence: Synthetic oligonucleotide
  Antisense strand to SEQ ID NO: 752612
uucaauacugggcaagggu

SEQ ID NO: 752614 - RNA, 19 nt, Artificial Sequence
  Description of Artificial Sequence: Synthetic oligonucleotide
  Sense strand starting at position 1362 of SEQ ID NO: 586905
guauuaaacgcucaagagg

SEQ ID NO: 752615 - RNA, 19 nt, Artificial Sequence
  Description of Artificial Sequence: Synthetic oligonucleotide
  Antisense strand to SEQ ID NO: 752614
ccucuugagcguuuaauac

SEQ ID NO: 752616 - RNA, 19 nt, Artificial Sequence
  Description of Artificial Sequence: Synthetic oligonucleotide
  Sense strand starting at position 1508 of SEQ ID NO: 586905
guguuaucuccugccuucu

SEQ ID NO: 752617 - RNA, 19 nt, Artificial Sequence
  Description of Artificial Sequence: Synthetic oligonucleotide
  Antisense strand to SEQ ID NO: 752616
agaaggcaggagauaacac

SEQ ID NO: 752618 - RNA, 19 nt, Artificial Sequence
  Description of Artificial Sequence: Synthetic oligonucleotide
  Sense strand starting at position 1719 of SEQ ID NO: 586905
gauagaaggagcuguggaa

SEQ ID NO: 752619 - RNA, 19 nt, Artificial Sequence
  Description of Artificial Sequence: Synthetic oligonucleotide
  Antisense strand to SEQ ID NO: 752618
uuccacagcuccuucuauc

SEQ ID NO: 752620 - RNA, 19 nt, Artificial Sequence
  Description of Artificial Sequence: Synthetic oligonucleotide
  Sense strand starting at position 2760 of SEQ ID NO: 586905
gacacaucggagugaauug

SEQ ID NO: 752621 - RNA, 19 nt, Artificial Sequence
  Description of Artificial Sequence: Synthetic oligonucleotide
  Antisense strand to SEQ ID NO: 752620
caauucacuccgauguguc

SEQ ID NO: 752622 - RNA, 19 nt, Artificial Sequence
  Description of Artificial Sequence: Synthetic oligonucleotide
  Sense strand starting at position 2888 of SEQ ID NO: 586905
gggcugucgcgagcuagaa

SEQ ID NO: 752623 - RNA, 19 nt, Artificial Sequence
  Description of Artificial Sequence: Synthetic oligonucleotide
  Antisense strand to SEQ ID NO: 752622
uucuagcucgcgacagccc

SEQ ID NO: 752624 - RNA, 19 nt, Artificial Sequence
  Description of Artificial Sequence: Synthetic oligonucleotide
  Sense strand starting at position 2969 of SEQ ID NO: 586905
ggauguuuccucgcugcac

SEQ ID NO: 752625 - RNA, 19 nt, Artificial Sequence
  Description of Artificial Sequence: Synthetic oligonucleotide
  Antisense strand to SEQ ID NO: 752624
gugcagcgaggaaacaucc

SEQ ID NO: 752626 - RNA, 19 nt, Artificial Sequence
  Description of Artificial Sequence: Synthetic oligonucleotide
  Sense strand starting at position 2988 of SEQ ID NO: 586905
agaccugcucgggaagacu

SEQ ID NO: 752627 - RNA, 19 nt, Artificial Sequence
  Description of Artificial Sequence: Synthetic oligonucleotide
  Antisense strand to SEQ ID NO: 752626
agucuucccgagcaggucu

SEQ ID NO: 752628 - RNA, 19 nt, Artificial Sequence
  Description of Artificial Sequence: Synthetic oligonucleotide
  Sense strand starting at position 3148 of SEQ ID NO: 586905
cgcugcuucccuucucuua

SEQ ID NO: 752629 - RNA, 19 nt, Artificial Sequence
  Description of Artificial Sequence: Synthetic oligonucleotide
  Antisense strand to SEQ ID NO: 752628
uaagagaagggaagcagcg

SEQ ID NO: 752630 - RNA, 19 nt, Artificial Sequence
  Description of Artificial Sequence: Synthetic oligonucleotide
  Sense strand starting at position 3349 of SEQ ID NO: 586905
guuguacuuuaauuagaag

SEQ ID NO: 752631 - RNA, 19 nt, Artificial Sequence
  Description of Artificial Sequence: Synthetic oligonucleotide
  Antisense strand to SEQ ID NO: 752630
cuucuaauuaaaguacaac

SEQ ID NO: 752632 - RNA, 19 nt, Artificial Sequence
  Description of Artificial Sequence: Synthetic oligonucleotide
  Sense strand starting at position 3481 of SEQ ID NO: 586905
aaggaagggucuuugcagu

SEQ ID NO: 752633 - RNA, 19 nt, Artificial Sequence
  Description of Artificial Sequence: Synthetic oligonucleotide
  Antisense strand to SEQ ID NO: 752632
acugcaaagacccuuccuu

SEQ ID NO: 752634 - RNA, 19 nt, Artificial Sequence
  Description of Artificial Sequence: Synthetic oligonucleotide
  Sense strand starting at position 3542 of SEQ ID NO: 586905
gccauaaaugguuguaaga

SEQ ID NO: 752635 - RNA, 19 nt, Artificial Sequence
  Description of Artificial Sequence: Synthetic oligonucleotide
  Antisense strand to SEQ ID NO: 752634
ucuuacaaccauuuauggc

SEQ ID NO: 752636 - RNA, 19 nt, Artificial Sequence
  Description of Artificial Sequence: Synthetic oligonucleotide
  Sense strand starting at position 3555 of SEQ ID NO: 586905
guaagacuuugggcucaga

SEQ ID NO: 752637 - RNA, 19 nt, Artificial Sequence
  Description of Artificial Sequence: Synthetic oligonucleotide
  Antisense strand to SEQ ID NO: 752636
ucugagcccaaagucuuac

SEQ ID NO: 752638 - RNA, 19 nt, Artificial Sequence
  Description of Artificial Sequence: Synthetic oligonucleotide
  Sense strand starting at position 3566 of SEQ ID NO: 586905
ggcucagauaaguagacuu

SEQ ID NO: 752639 - RNA, 19 nt, Artificial Sequence
  Description of Artificial Sequence: Synthetic oligonucleotide
  Antisense strand to SEQ ID NO: 752638
aagucuacuuaucugagcc

SEQ ID NO: 752640 - RNA, 19 nt, Artificial Sequence
  Description of Artificial Sequence: Synthetic oligonucleotide
  Sense strand starting at position 3723 of SEQ ID NO: 586905
gacguaugauuagccuaag

SEQ ID NO: 752641 - RNA, 19 nt, Artificial Sequence
  Description of Artificial Sequence: Synthetic oligonucleotide
  Antisense strand to SEQ ID NO: 752640
cuuaggcuaaucauacguc

SEQ ID NO: 752642 - RNA, 19 nt, Artificial Sequence
  Description of Artificial Sequence: Synthetic oligonucleotide
  Sense strand starting at position 3726 of SEQ ID NO: 586905
guaugauuagccuaagcga

SEQ ID NO: 752643 - RNA, 19 nt, Artificial Sequence
  Description of Artificial Sequence: Synthetic oligonucleotide
  Antisense strand to SEQ ID NO: 752642
ucgcuuaggcuaaucauac

SEQ ID NO: 752644 - RNA, 19 nt, Artificial Sequence
  Description of Artificial Sequence: Synthetic oligonucleotide
  Sense strand starting at position 3764 of SEQ ID NO: 586905
ugaccagugacuugaucag

SEQ ID NO: 752645 - RNA, 19 nt, Artificial Sequence
  Description of Artificial Sequence: Synthetic oligonucleotide
  Antisense strand to SEQ ID NO: 752644
cugaucaagucacugguca

SEQ ID NO: 752646 - RNA, 19 nt, Artificial Sequence
  Description of Artificial Sequence: Synthetic oligonucleotide
  Sense strand starting at position 3786 of SEQ ID NO: 586905
uggcgauauaucuagguag

SEQ ID NO: 752647 - RNA, 19 nt, Artificial Sequence
  Description of Artificial Sequence: Synthetic oligonucleotide
  Antisense strand to SEQ ID NO: 752646
cuaccuagauauaucgcca

SEQ ID NO: 752648 - RNA, 19 nt, Artificial Sequence
  Description of Artificial Sequence: Synthetic oligonucleotide
  Sense strand starting at position 3899 of SEQ ID NO: 586905
guuguauugcugucuuauc

SEQ ID NO: 752649 - RNA, 19 nt, Artificial Sequence
  Description of Artificial Sequence: Synthetic oligonucleotide
  Antisense strand to SEQ ID NO: 752648
gauaagacagcaauacaac

SEQ ID NO: 752650 - RNA, 19 nt, Artificial Sequence
  Description of Artificial Sequence: Synthetic oligonucleotide
  Sense strand starting at position 3908 of SEQ ID NO: 586905
cugucuuaucaugagguga

SEQ ID NO: 752651 - RNA, 19 nt, Artificial Sequence
  Description of Artificial Sequence: Synthetic oligonucleotide
  Antisense strand to SEQ ID NO: 752650
ucaccucaugauaagacag

SEQ ID NO: 752652 - RNA, 19 nt, Artificial Sequence
  Description of Artificial Sequence: Synthetic oligonucleotide
  Sense strand starting at position 201 of SEQ ID NO: 586906
gaaugacuacgucagcuua

SEQ ID NO: 752653 - RNA, 19 nt, Artificial Sequence
  Description of Artificial Sequence: Synthetic oligonucleotide
  Antisense strand to SEQ ID NO: 752652
uaagcugacguagucauuc

SEQ ID NO: 752654 - RNA, 19 nt, Artificial Sequence
  Description of Artificial Sequence: Synthetic oligonucleotide
  Sense strand starting at position 466 of SEQ ID NO: 586906
uuagaugagugacccuaaa

SEQ ID NO: 752655 - RNA, 19 nt, Artificial Sequence
  Description of Artificial Sequence: Synthetic oligonucleotide
  Antisense strand to SEQ ID NO: 752654
uuuagggucacucaucuaa

SEQ ID NO: 752656 - RNA, 19 nt, Artificial Sequence
  Description of Artificial Sequence: Synthetic oligonucleotide
  Sense strand starting at position 496 of SEQ ID NO: 586906
aagucauauuuagaggagu

SEQ ID NO: 752657 - RNA, 19 nt, Artificial Sequence
  Description of Artificial Sequence: Synthetic oligonucleotide
  Antisense strand to SEQ ID NO: 752656
acuccucuaaauaugacuu

SEQ ID NO: 752658 - RNA, 19 nt, Artificial Sequence
  Description of Artificial Sequence: Synthetic oligonucleotide
  Sense strand starting at position 632 of SEQ ID NO: 586906
acccuugucucagcauuua

SEQ ID NO: 752659 - RNA, 19 nt, Artificial Sequence
  Description of Artificial Sequence: Synthetic oligonucleotide
  Antisense strand to SEQ ID NO: 752658
uaaaugcugagacaagggu

SEQ ID NO: 752660 - RNA, 19 nt, Artificial Sequence
  Description of Artificial Sequence: Synthetic oligonucleotide
  Sense strand starting at position 883 of SEQ ID NO: 586906
agaugcuugcaguaaauau

SEQ ID NO: 752661 - RNA, 19 nt, Artificial Sequence
  Description of Artificial Sequence: Synthetic oligonucleotide
  Antisense strand to SEQ ID NO: 752660
auauuuacugcaagcaucu

SEQ ID NO: 752662 - RNA, 19 nt, Artificial Sequence
  Description of Artificial Sequence: Synthetic oligonucleotide
  Sense strand starting at position 892 of SEQ ID NO: 586906
caguaaauaucgccagaga

SEQ ID NO: 752663 - RNA, 19 nt, Artificial Sequence
  Description of Artificial Sequence: Synthetic oligonucleotide
  Antisense strand to SEQ ID NO: 752662
ucucuggcgauauuuacug

SEQ ID NO: 752664 - RNA, 19 nt, Artificial Sequence
  Description of Artificial Sequence: Synthetic oligonucleotide
  Sense strand starting at position 893 of SEQ ID NO: 586906
aguaaauaucgccagagau

SEQ ID NO: 752665 - RNA, 19 nt, Artificial Sequence
  Description of Artificial Sequence: Synthetic oligonucleotide
  Antisense strand to SEQ ID NO: 752664
aucucuggcgauauuuacu

SEQ ID NO: 752666 - RNA, 19 nt, Artificial Sequence
  Description of Artificial Sequence: Synthetic oligonucleotide
  Sense strand starting at position 895 of SEQ ID NO: 586906
uaaauaucgccagagauug

SEQ ID NO: 752667 - RNA, 19 nt, Artificial Sequence
  Description of Artificial Sequence: Synthetic oligonucleotide
  Antisense strand to SEQ ID NO: 752666
caaucucuggcgauauuua

SEQ ID NO: 752668 - RNA, 19 nt, Artificial Sequence
  Description of Artificial Sequence: Synthetic oligonucleotide
  Sense strand starting at position 1014 of SEQ ID NO: 586906
cucucaaauggcugaauua

SEQ ID NO: 752669 - RNA, 19 nt, Artificial Sequence
  Description of Artificial Sequence: Synthetic oligonucleotide
  Antisense strand to SEQ ID NO: 752668
uaauucagccauuugagag

SEQ ID NO: 752670 - RNA, 19 nt, Artificial Sequence
  Description of Artificial Sequence: Synthetic oligonucleotide
  Sense strand starting at position 1239 of SEQ ID NO: 586906
ugaggaugcucuguaagag

SEQ ID NO: 752671 - RNA, 19 nt, Artificial Sequence
  Description of Artificial Sequence: Synthetic oligonucleotide
  Antisense strand to SEQ ID NO: 752670
cucuuacagagcauccuca

SEQ ID NO: 752672 - RNA, 19 nt, Artificial Sequence
  Description of Artificial Sequence: Synthetic oligonucleotide
  Sense strand starting at position 1240 of SEQ ID NO: 586906
gaggaugcucuguaagagu

SEQ ID NO: 752673 - RNA, 19 nt, Artificial Sequence
  Description of Artificial Sequence: Synthetic oligonucleotide
  Antisense strand to SEQ ID NO: 752672
acucuuacagagcauccuc

SEQ ID NO: 752674 - RNA, 19 nt, Artificial Sequence
  Description of Artificial Sequence: Synthetic oligonucleotide
  Sense strand starting at position 1588 of SEQ ID NO: 586906
gcuggaaaucagcaugaua

SEQ ID NO: 752675 - RNA, 19 nt, Artificial Sequence
  Description of Artificial Sequence: Synthetic oligonucleotide
  Antisense strand to SEQ ID NO: 752674
uaucaugcugauuuccagc

SEQ ID NO: 752676 - RNA, 19 nt, Artificial Sequence
  Description of Artificial Sequence: Synthetic oligonucleotide
  Sense strand starting at position 1590 of SEQ ID NO: 586906
uggaaaucagcaugauaug

SEQ ID NO: 752677 - RNA, 19 nt, Artificial Sequence
  Description of Artificial Sequence: Synthetic oligonucleotide
  Antisense strand to SEQ ID NO: 752676
cauaucaugcugauuucca

SEQ ID NO: 752678 - RNA, 19 nt, Artificial Sequence
  Description of Artificial Sequence: Synthetic oligonucleotide
  Sense strand starting at position 1653 of SEQ ID NO: 586906
gaggaacacuggcuaacuu

SEQ ID NO: 752679 - RNA, 19 nt, Artificial Sequence
  Description of Artificial Sequence: Synthetic oligonucleotide
  Antisense strand to SEQ ID NO: 752678
aaguuagccaguguuccuc

SEQ ID NO: 752680 - RNA, 19 nt, Artificial Sequence
  Description of Artificial Sequence: Synthetic oligonucleotide
  Sense strand starting at position 1671 of SEQ ID NO: 586906
ucagucuguccagaacaca

SEQ ID NO: 752681 - RNA, 19 nt, Artificial Sequence
  Description of Artificial Sequence: Synthetic oligonucleotide
  Antisense strand to SEQ ID NO: 752680
uguguucuggacagacuga

SEQ ID NO: 752682 - RNA, 19 nt, Artificial Sequence
  Description of Artificial Sequence: Synthetic oligonucleotide
  Sense strand starting at position 1787 of SEQ ID NO: 586906
aucuauaaagcagguauaa

SEQ ID NO: 752683 - RNA, 19 nt, Artificial Sequence
  Description of Artificial Sequence: Synthetic oligonucleotide
  Antisense strand to SEQ ID NO: 752682
uuauaccugcuuuauagau

SEQ ID NO: 752684 - RNA, 19 nt, Artificial Sequence
  Description of Artificial Sequence: Synthetic oligonucleotide
  Sense strand starting at position 1841 of SEQ ID NO: 586906
ugagacaaccuuugaagua

SEQ ID NO: 752685 - RNA, 19 nt, Artificial Sequence
  Description of Artificial Sequence: Synthetic oligonucleotide
  Antisense strand to SEQ ID NO: 752684
uacuucaaagguugucuca

SEQ ID NO: 752686 - RNA, 19 nt, Artificial Sequence
  Description of Artificial Sequence: Synthetic oligonucleotide
  Sense strand starting at position 2029 of SEQ ID NO: 586906
ucaaguaaucuaggaacug

SEQ ID NO: 752687 - RNA, 19 nt, Artificial Sequence
  Description of Artificial Sequence: Synthetic oligonucleotide
  Antisense strand to SEQ ID NO: 752686
caguuccuagauuacuuga

SEQ ID NO: 752688 - RNA, 19 nt, Artificial Sequence
  Description of Artificial Sequence: Synthetic oligonucleotide
  Sense strand starting at position 2050 of SEQ ID NO: 586906
acagaaggcccuugaacau

SEQ ID NO: 752689 - RNA, 19 nt, Artificial Sequence
  Description of Artificial Sequence: Synthetic oligonucleotide
  Antisense strand to SEQ ID NO: 752688
auguucaagggccuucugu

SEQ ID NO: 752690 - RNA, 19 nt, Artificial Sequence
  Description of Artificial Sequence: Synthetic oligonucleotide
  Sense strand starting at position 2088 of SEQ ID NO: 586906
cccuauaacgcugaugaga

SEQ ID NO: 752691 - RNA, 19 nt, Artificial Sequence
  Description of Artificial Sequence: Synthetic oligonucleotide
  Antisense strand to SEQ ID NO: 752690
ucucaucagcguuauaggg

SEQ ID NO: 752692 - RNA, 19 nt, Artificial Sequence
  Description of Artificial Sequence: Synthetic oligonucleotide
  Sense strand starting at position 2624 of SEQ ID NO: 586906
aaauguagagcucauaugu

SEQ ID NO: 752693 - RNA, 19 nt, Artificial Sequence
  Description of Artificial Sequence: Synthetic oligonucleotide
  Antisense strand to SEQ ID NO: 752692
acauaugagcucuacauuu

SEQ ID NO: 752694 - RNA, 19 nt, Artificial Sequence
  Description of Artificial Sequence: Synthetic oligonucleotide
  Sense strand starting at position 2721 of SEQ ID NO: 586906
ugggaacuuuccucuuauu

SEQ ID NO: 752695 - RNA, 19 nt, Artificial Sequence
  Description of Artificial Sequence: Synthetic oligonucleotide
  Antisense strand to SEQ ID NO: 752694
aauaagaggaaaguuccca

SEQ ID NO: 752696 - RNA, 19 nt, Artificial Sequence
  Description of Artificial Sequence: Synthetic oligonucleotide
  Sense strand starting at position 2744 of SEQ ID NO: 586906
ucaauuaaccuauggugaa

SEQ ID NO: 752697 - RNA, 19 nt, Artificial Sequence
  Description of Artificial Sequence: Synthetic oligonucleotide
  Antisense strand to SEQ ID NO: 752696
uucaccauagguuaauuga

SEQ ID NO: 752698 - RNA, 19 nt, Artificial Sequence
  Description of Artificial Sequence: Synthetic oligonucleotide
  Sense strand starting at position 2830 of SEQ ID NO: 586906
gaagacuuacuguguugag

SEQ ID NO: 752699 - RNA, 19 nt, Artificial Sequence
  Description of Artificial Sequence: Synthetic oligonucleotide
  Antisense strand to SEQ ID NO: 752698
cucaacacaguaagucuuc

SEQ ID NO: 752700 - RNA, 19 nt, Artificial Sequence
  Description of Artificial Sequence: Synthetic oligonucleotide
  Sense strand starting at position 2989 of SEQ ID NO: 586906
cugagauauccaggguuag

SEQ ID NO: 752701 - RNA, 19 nt, Artificial Sequence
  Description of Artificial Sequence: Synthetic oligonucleotide
  Antisense strand to SEQ ID NO: 752700
cuaacccuggauaucucag

SEQ ID NO: 752702 - RNA, 19 nt, Artificial Sequence
  Description of Artificial Sequence: Synthetic oligonucleotide
  Sense strand starting at position 3039 of SEQ ID NO: 586906
ggaggcuuugaugaugguu

SEQ ID NO: 752703 - RNA, 19 nt, Artificial Sequence
  Description of Artificial Sequence: Synthetic oligonucleotide
  Antisense strand to SEQ ID NO: 752702
aaccaucaucaaagccucc

SEQ ID NO: 752704 - RNA, 19 nt, Artificial Sequence
  Description of Artificial Sequence: Synthetic oligonucleotide
  Sense strand starting at position 3047 of SEQ ID NO: 586906
ugaugaugguucuuacuac

SEQ ID NO: 752705 - RNA, 19 nt, Artificial Sequence
  Description of Artificial Sequence: Synthetic oligonucleotide
  Antisense strand to SEQ ID NO: 752704
guaguaagaaccaucauca

SEQ ID NO: 752706 - RNA, 19 nt, Artificial Sequence
  Description of Artificial Sequence: Synthetic oligonucleotide
  Sense strand starting at position 3091 of SEQ ID NO: 586906
cuggcaucaagagauguuu

SEQ ID NO: 752707 - RNA, 19 nt, Artificial Sequence
  Description of Artificial Sequence: Synthetic oligonucleotide
  Antisense strand to SEQ ID NO: 752706
aaacaucucuugaugccag

SEQ ID NO: 752708 - RNA, 19 nt, Artificial Sequence
  Description of Artificial Sequence: Synthetic oligonucleotide
  Sense strand starting at position 3093 of SEQ ID NO: 586906
ggcaucaagagauguuuga

SEQ ID NO: 752709 - RNA, 19 nt, Artificial Sequence
  Description of Artificial Sequence: Synthetic oligonucleotide
  Antisense strand to SEQ ID NO: 752708
ucaaacaucucuugaugcc

SEQ ID NO: 752710 - RNA, 19 nt, Artificial Sequence
  Description of Artificial Sequence: Synthetic oligonucleotide
  Sense strand starting at position 3176 of SEQ ID NO: 586906
cugaaagaucacugccaga

SEQ ID NO: 752711 - RNA, 19 nt, Artificial Sequence
  Description of Artificial Sequence: Synthetic oligonucleotide
  Antisense strand to SEQ ID NO: 752710
ucuggcagugaucuuucag

SEQ ID NO: 752712 - RNA, 19 nt, Artificial Sequence
  Description of Artificial Sequence: Synthetic oligonucleotide
  Sense strand starting at position 3221 of SEQ ID NO: 586906
gccuauaaccugcagaaga

SEQ ID NO: 752713 - RNA, 19 nt, Artificial Sequence
  Description of Artificial Sequence: Synthetic oligonucleotide
  Antisense strand to SEQ ID NO: 752712
ucuucugcagguuauaggc

SEQ ID NO: 752714 - RNA, 19 nt, Artificial Sequence
  Description of Artificial Sequence: Synthetic oligonucleotide
  Sense strand starting at position 3235 of SEQ ID NO: 586906
gaagauacaguuugcauca

SEQ ID NO: 752715 - RNA, 19 nt, Artificial Sequence
  Description of Artificial Sequence: Synthetic oligonucleotide
  Antisense strand to SEQ ID NO: 752714
ugaugcaaacuguaucuuc

SEQ ID NO: 752716 - RNA, 19 nt, Artificial Sequence
  Description of Artificial Sequence: Synthetic oligonucleotide
  Sense strand starting at position 3275 of SEQ ID NO: 586906
agcugcagucugcaauuua

SEQ ID NO: 752717 - RNA, 19 nt, Artificial Sequence
  Description of Artificial Sequence: Synthetic oligonucleotide
  Antisense strand to SEQ ID NO: 752716
uaaauugcagacugcagcu

SEQ ID NO: 752718 - RNA, 19 nt, Artificial Sequence
  Description of Artificial Sequence: Synthetic oligonucleotide
  Sense strand starting at position 3309 of SEQ ID NO: 586906
acaguagaccacugucauu

SEQ ID NO: 752719 - RNA, 19 nt, Artificial Sequence
  Description of Artificial Sequence: Synthetic oligonucleotide
  Antisense strand to SEQ ID NO: 752718
aaugacaguggucuacugu

SEQ ID NO: 752720 - RNA, 19 nt, Artificial Sequence
  Description of Artificial Sequence: Synthetic oligonucleotide
  Sense strand starting at position 3366 of SEQ ID NO: 586906
aaaguccuacgguaucauu

SEQ ID NO: 752721 - RNA, 19 nt, Artificial Sequence
  Description of Artificial Sequence: Synthetic oligonucleotide
  Antisense strand to SEQ ID NO: 752720
aaugauaccguaggacuuu

SEQ ID NO: 752722 - RNA, 19 nt, Artificial Sequence
  Description of Artificial Sequence: Synthetic oligonucleotide
  Sense strand starting at position 3520 of SEQ ID NO: 586906
ggguuagaaacguaacccu

SEQ ID NO: 752723 - RNA, 19 nt, Artificial Sequence
  Description of Artificial Sequence: Synthetic oligonucleotide
  Antisense strand to SEQ ID NO: 752722
aggguuacguuucuaaccc

SEQ ID NO: 752724 - RNA, 19 nt, Artificial Sequence
  Description of Artificial Sequence: Synthetic oligonucleotide
  Sense strand starting at position 3534 of SEQ ID NO: 586906
acccuugcccaguauugaa

SEQ ID NO: 752725 - RNA, 19 nt, Artificial Sequence
  Description of Artificial Sequence: Synthetic oligonucleotide
  Antisense strand to SEQ ID NO: 752724
uucaauacugggcaagggu

SEQ ID NO: 752726 - RNA, 19 nt, Artificial Sequence
  Description of Artificial Sequence: Synthetic oligonucleotide
  Sense strand starting at position 3592 of SEQ ID NO: 586906
guauuaaacgcucaagagg

SEQ ID NO: 752727 - RNA, 19 nt, Artificial Sequence
  Description of Artificial Sequence: Synthetic oligonucleotide
  Antisense strand to SEQ ID NO: 752726
ccucuugagcguuuaauac

SEQ ID NO: 752728 - RNA, 19 nt, Artificial Sequence
  Description of Artificial Sequence: Synthetic oligonucleotide
  Sense strand starting at position 3738 of SEQ ID NO: 586906
guguuaucuccugccuucu

SEQ ID NO: 752729 - RNA, 19 nt, Artificial Sequence
  Description of Artificial Sequence: Synthetic oligonucleotide
  Antisense strand to SEQ ID NO: 752728
agaaggcaggagauaacac

SEQ ID NO: 752730 - RNA, 19 nt, Artificial Sequence
  Description of Artificial Sequence: Synthetic oligonucleotide
  Sense strand starting at position 3949 of SEQ ID NO: 586906
gauagaaggagcuguggaa

SEQ ID NO: 752731 - RNA, 19 nt, Artificial Sequence
  Description of Artificial Sequence: Synthetic oligonucleotide
  Antisense strand to SEQ ID NO: 752730
uuccacagcuccuucuauc

SEQ ID NO: 752732 - RNA, 19 nt, Artificial Sequence
  Description of Artificial Sequence: Synthetic oligonucleotide
  Sense strand starting at position 125 of SEQ ID NO: 586907
gacaauacccgaugcagua

SEQ ID NO: 752733 - RNA, 19 nt, Artificial Sequence
  Description of Artificial Sequence: Synthetic oligonucleotide
  Antisense strand to SEQ ID NO: 752732
uacugcaucggguauuguc

SEQ ID NO: 752734 - RNA, 19 nt, Artificial Sequence
  Description of Artificial Sequence: Synthetic oligonucleotide
  Sense strand starting at position 306 of SEQ ID NO: 586907
aaauguagagcucauaugu

SEQ ID NO: 752735 - RNA, 19 nt, Artificial Sequence
  Description of Artificial Sequence: Synthetic oligonucleotide
  Antisense strand to SEQ ID NO: 752734
acauaugagcucuacauuu

SEQ ID NO: 752736 - RNA, 19 nt, Artificial Sequence
  Description of Artificial Sequence: Synthetic oligonucleotide
  Sense strand starting at position 402 of SEQ ID NO: 586907
gugggaacuuuccucuuau

SEQ ID NO: 752737 - RNA, 19 nt, Artificial Sequence
  Description of Artificial Sequence: Synthetic oligonucleotide
  Antisense strand to SEQ ID NO: 752736
auaagaggaaaguucccac

SEQ ID NO: 752738 - RNA, 19 nt, Artificial Sequence
  Description of Artificial Sequence: Synthetic oligonucleotide
  Sense strand starting at position 403 of SEQ ID NO: 586907
ugggaacuuuccucuuauu

SEQ ID NO: 752739 - RNA, 19 nt, Artificial Sequence
  Description of Artificial Sequence: Synthetic oligonucleotide
  Antisense strand to SEQ ID NO: 752738
aauaagaggaaaguuccca

SEQ ID NO: 752740 - RNA, 19 nt, Artificial Sequence
  Description of Artificial Sequence: Synthetic oligonucleotide
  Sense strand starting at position 426 of SEQ ID NO: 586907
ucaauuaaccuauggugaa

SEQ ID NO: 752741 - RNA, 19 nt, Artificial Sequence
  Description of Artificial Sequence: Synthetic oligonucleotide
  Antisense strand to SEQ ID NO: 752740
uucaccauagguuaauuga

SEQ ID NO: 752742 - RNA, 19 nt, Artificial Sequence
  Description of Artificial Sequence: Synthetic oligonucleotide
  Sense strand starting at position 438 of SEQ ID NO: 586907
uggugaaacugguuuccuu

SEQ ID NO: 752743 - RNA, 19 nt, Artificial Sequence
  Description of Artificial Sequence: Synthetic oligonucleotide
  Antisense strand to SEQ ID NO: 752742
aaggaaaccaguuucacca

SEQ ID NO: 752744 - RNA, 19 nt, Artificial Sequence
  Description of Artificial Sequence: Synthetic oligonucleotide
  Sense strand starting at position 441 of SEQ ID NO: 586907
ugaaacugguuuccuugua

SEQ ID NO: 752745 - RNA, 19 nt, Artificial Sequence
  Description of Artificial Sequence: Synthetic oligonucleotide
  Antisense strand to SEQ ID NO: 752744
uacaaggaaaccaguuuca

SEQ ID NO: 752746 - RNA, 19 nt, Artificial Sequence
  Description of Artificial Sequence: Synthetic oligonucleotide
  Sense strand starting at position 512 of SEQ ID NO: 586907
gaagacuuacuguguugag

SEQ ID NO: 752747 - RNA, 19 nt, Artificial Sequence
  Description of Artificial Sequence: Synthetic oligonucleotide
  Antisense strand to SEQ ID NO: 752746
cucaacacaguaagucuuc

SEQ ID NO: 752748 - RNA, 19 nt, Artificial Sequence
  Description of Artificial Sequence: Synthetic oligonucleotide
  Sense strand starting at position 671 of SEQ ID NO: 586907
cugagauauccaggguuag

SEQ ID NO: 752749 - RNA, 19 nt, Artificial Sequence
  Description of Artificial Sequence: Synthetic oligonucleotide
  Antisense strand to SEQ ID NO: 752748
cuaacccuggauaucucag

SEQ ID NO: 752750 - RNA, 19 nt, Artificial Sequence
  Description of Artificial Sequence: Synthetic oligonucleotide
  Sense strand starting at position 721 of SEQ ID NO: 586907
ggaggcuuugaugaugguu

SEQ ID NO: 752751 - RNA, 19 nt, Artificial Sequence
  Description of Artificial Sequence: Synthetic oligonucleotide
  Antisense strand to SEQ ID NO: 752750
aaccaucaucaaagccucc

SEQ ID NO: 752752 - RNA, 19 nt, Artificial Sequence
  Description of Artificial Sequence: Synthetic oligonucleotide
  Sense strand starting at position 729 of SEQ ID NO: 586907
ugaugaugguucuuacuac

SEQ ID NO: 752753 - RNA, 19 nt, Artificial Sequence
  Description of Artificial Sequence: Synthetic oligonucleotide
  Antisense strand to SEQ ID NO: 752752
guaguaagaaccaucauca

SEQ ID NO: 752754 - RNA, 19 nt, Artificial Sequence
  Description of Artificial Sequence: Synthetic oligonucleotide
  Sense strand starting at position 773 of SEQ ID NO: 586907
cuggcaucaagagauguuu

SEQ ID NO: 752755 - RNA, 19 nt, Artificial Sequence
  Description of Artificial Sequence: Synthetic oligonucleotide
  Antisense strand to SEQ ID NO: 752754
aaacaucucuugaugccag

SEQ ID NO: 752756 - RNA, 19 nt, Artificial Sequence
  Description of Artificial Sequence: Synthetic oligonucleotide
  Sense strand starting at position 775 of SEQ ID NO: 586907
ggcaucaagagauguuuga

SEQ ID NO: 752757 - RNA, 19 nt, Artificial Sequence
  Description of Artificial Sequence: Synthetic oligonucleotide
  Antisense strand to SEQ ID NO: 752756
ucaaacaucucuugaugcc

SEQ ID NO: 752758 - RNA, 19 nt, Artificial Sequence
  Description of Artificial Sequence: Synthetic oligonucleotide
  Sense strand starting at position 858 of SEQ ID NO: 586907
cugaaagaucacugccaga

SEQ ID NO: 752759 - RNA, 19 nt, Artificial Sequence
  Description of Artificial Sequence: Synthetic oligonucleotide
  Antisense strand to SEQ ID NO: 752758
ucuggcagugaucuuucag

SEQ ID NO: 752760 - RNA, 19 nt, Artificial Sequence
  Description of Artificial Sequence: Synthetic oligonucleotide
  Sense strand starting at position 903 of SEQ ID NO: 586907
gccuauaaccugcagaaga

SEQ ID NO: 752761 - RNA, 19 nt, Artificial Sequence
  Description of Artificial Sequence: Synthetic oligonucleotide
  Antisense strand to SEQ ID NO: 752760
ucuucugcagguuauaggc

SEQ ID NO: 752762 - RNA, 19 nt, Artificial Sequence
  Description of Artificial Sequence: Synthetic oligonucleotide
  Sense strand starting at position 917 of SEQ ID NO: 586907
gaagauacaguuugcauca

SEQ ID NO: 752763 - RNA, 19 nt, Artificial Sequence
  Description of Artificial Sequence: Synthetic oligonucleotide
  Antisense strand to SEQ ID NO: 752762
ugaugcaaacuguaucuuc

SEQ ID NO: 752764 - RNA, 19 nt, Artificial Sequence
  Description of Artificial Sequence: Synthetic oligonucleotide
  Sense strand starting at position 957 of SEQ ID NO: 586907
agcugcagucugcaauuua

SEQ ID NO: 752765 - RNA, 19 nt, Artificial Sequence
  Description of Artificial Sequence: Synthetic oligonucleotide
  Antisense strand to SEQ ID NO: 752764
uaaauugcagacugcagcu

SEQ ID NO: 752766 - RNA, 19 nt, Artificial Sequence
  Description of Artificial Sequence: Synthetic oligonucleotide
  Sense strand starting at position 991 of SEQ ID NO: 586907
acaguagaccacugucauu

SEQ ID NO: 752767 - RNA, 19 nt, Artificial Sequence
  Description of Artificial Sequence: Synthetic oligonucleotide
  Antisense strand to SEQ ID NO: 752766
aaugacaguggucuacugu

SEQ ID NO: 752768 - RNA, 19 nt, Artificial Sequence
  Description of Artificial Sequence: Synthetic oligonucleotide
  Sense strand starting at position 1048 of SEQ ID NO: 586907
aaaguccuacgguaucauu

SEQ ID NO: 752769 - RNA, 19 nt, Artificial Sequence
  Description of Artificial Sequence: Synthetic oligonucleotide
  Antisense strand to SEQ ID NO: 752768
aaugauaccguaggacuuu

SEQ ID NO: 752770 - RNA, 19 nt, Artificial Sequence
  Description of Artificial Sequence: Synthetic oligonucleotide
  Sense strand starting at position 1202 of SEQ ID NO: 586907
ggguuagaaacguaacccu

SEQ ID NO: 752771 - RNA, 19 nt, Artificial Sequence
  Description of Artificial Sequence: Synthetic oligonucleotide
  Antisense strand to SEQ ID NO: 752770
aggguuacguuucuaaccc

SEQ ID NO: 752772 - RNA, 19 nt, Artificial Sequence
  Description of Artificial Sequence: Synthetic oligonucleotide
  Sense strand starting at position 1216 of SEQ ID NO: 586907
acccuugcccaguauugaa

SEQ ID NO: 752773 - RNA, 19 nt, Artificial Sequence
  Description of Artificial Sequence: Synthetic oligonucleotide
  Antisense strand to SEQ ID NO: 752772
uucaauacugggcaagggu

SEQ ID NO: 752774 - RNA, 19 nt, Artificial Sequence
  Description of Artificial Sequence: Synthetic oligonucleotide
  Sense strand starting at position 1274 of SEQ ID NO: 586907
guauuaaacgcucaagagg

SEQ ID NO: 752775 - RNA, 19 nt, Artificial Sequence
  Description of Artificial Sequence: Synthetic oligonucleotide
  Antisense strand to SEQ ID NO: 752774
ccucuugagcguuuaauac

SEQ ID NO: 752776 - RNA, 19 nt, Artificial Sequence
  Description of Artificial Sequence: Synthetic oligonucleotide
  Sense strand starting at position 1420 of SEQ ID NO: 586907
guguuaucuccugccuucu

SEQ ID NO: 752777 - RNA, 19 nt, Artificial Sequence
  Description of Artificial Sequence: Synthetic oligonucleotide
  Antisense strand to SEQ ID NO: 752776
agaaggcaggagauaacac

SEQ ID NO: 752778 - RNA, 19 nt, Artificial Sequence
  Description of Artificial Sequence: Synthetic oligonucleotide
  Sense strand starting at position 1631 of SEQ ID NO: 586907
gauagaaggagcuguggaa

SEQ ID NO: 752779 - RNA, 19 nt, Artificial Sequence
  Description of Artificial Sequence: Synthetic oligonucleotide
  Antisense strand to SEQ ID NO: 752778
uuccacagcuccuucuauc

SEQ ID NO: 752780 - RNA, 19 nt, Artificial Sequence
  Description of Artificial Sequence: Synthetic oligonucleotide
  Sense strand starting at position 2672 of SEQ ID NO: 586907
gacacaucggagugaauug

SEQ ID NO: 752781 - RNA, 19 nt, Artificial Sequence
  Description of Artificial Sequence: Synthetic oligonucleotide
  Antisense strand to SEQ ID NO: 752780
caauucacuccgauguguc

SEQ ID NO: 752782 - RNA, 19 nt, Artificial Sequence
  Description of Artificial Sequence: Synthetic oligonucleotide
  Sense strand starting at position 2800 of SEQ ID NO: 586907
gggcugucgcgagcuagaa

SEQ ID NO: 752783 - RNA, 19 nt, Artificial Sequence
  Description of Artificial Sequence: Synthetic oligonucleotide
  Antisense strand to SEQ ID NO: 752782
uucuagcucgcgacagccc

SEQ ID NO: 752784 - RNA, 19 nt, Artificial Sequence
  Description of Artificial Sequence: Synthetic oligonucleotide
  Sense strand starting at position 2881 of SEQ ID NO: 586907
ggauguuuccucgcugcac

SEQ ID NO: 752785 - RNA, 19 nt, Artificial Sequence
  Description of Artificial Sequence: Synthetic oligonucleotide
  Antisense strand to SEQ ID NO: 752784
gugcagcgaggaaacaucc

SEQ ID NO: 752786 - RNA, 19 nt, Artificial Sequence
  Description of Artificial Sequence: Synthetic oligonucleotide
  Sense strand starting at position 2900 of SEQ ID NO: 586907
agaccugcucgggaagacu

SEQ ID NO: 752787 - RNA, 19 nt, Artificial Sequence
  Description of Artificial Sequence: Synthetic oligonucleotide
  Antisense strand to SEQ ID NO: 752786
agucuucccgagcaggucu

SEQ ID NO: 752788 - RNA, 19 nt, Artificial Sequence
  Description of Artificial Sequence: Synthetic oligonucleotide
  Sense strand starting at position 3060 of SEQ ID NO: 586907
cgcugcuucccuucucuua

SEQ ID NO: 752789 - RNA, 19 nt, Artificial Sequence
  Description of Artificial Sequence: Synthetic oligonucleotide
  Antisense strand to SEQ ID NO: 752788
uaagagaagggaagcagcg

SEQ ID NO: 752790 - RNA, 19 nt, Artificial Sequence
  Description of Artificial Sequence: Synthetic oligonucleotide
  Sense strand starting at position 3261 of SEQ ID NO: 586907
guuguacuuuaauuagaag

SEQ ID NO: 752791 - RNA, 19 nt, Artificial Sequence
  Description of Artificial Sequence: Synthetic oligonucleotide
  Antisense strand to SEQ ID NO: 752790
cuucuaauuaaaguacaac

SEQ ID NO: 752792 - RNA, 19 nt, Artificial Sequence
  Description of Artificial Sequence: Synthetic oligonucleotide
  Sense strand starting at position 3393 of SEQ ID NO: 586907
aaggaagggucuuugcagu

SEQ ID NO: 752793 - RNA, 19 nt, Artificial Sequence
  Description of Artificial Sequence: Synthetic oligonucleotide
  Antisense strand to SEQ ID NO: 752792
acugcaaagacccuuccuu

SEQ ID NO: 752794 - RNA, 19 nt, Artificial Sequence
  Description of Artificial Sequence: Synthetic oligonucleotide
  Sense strand starting at position 3454 of SEQ ID NO: 586907
gccauaaaugguuguaaga

SEQ ID NO: 752795 - RNA, 19 nt, Artificial Sequence
  Description of Artificial Sequence: Synthetic oligonucleotide
  Antisense strand to SEQ ID NO: 752794
ucuuacaaccauuuauggc

SEQ ID NO: 752796 - RNA, 19 nt, Artificial Sequence
  Description of Artificial Sequence: Synthetic oligonucleotide
  Sense strand starting at position 3467 of SEQ ID NO: 586907
guaagacuuugggcucaga

SEQ ID NO: 752797 - RNA, 19 nt, Artificial Sequence
  Description of Artificial Sequence: Synthetic oligonucleotide
  Antisense strand to SEQ ID NO: 752796
ucugagcccaaagucuuac

SEQ ID NO: 752798 - RNA, 19 nt, Artificial Sequence
  Description of Artificial Sequence: Synthetic oligonucleotide
  Sense strand starting at position 3478 of SEQ ID NO: 586907
ggcucagauaaguagacuu

SEQ ID NO: 752799 - RNA, 19 nt, Artificial Sequence
  Description of Artificial Sequence: Synthetic oligonucleotide
  Antisense strand to SEQ ID NO: 752798
aagucuacuuaucugagcc

SEQ ID NO: 752800 - RNA, 19 nt, Artificial Sequence
  Description of Artificial Sequence: Synthetic oligonucleotide
  Sense strand starting at position 3635 of SEQ ID NO: 586907
gacguaugauuagccuaag

SEQ ID NO: 752801 - RNA, 19 nt, Artificial Sequence
  Description of Artificial Sequence: Synthetic oligonucleotide
  Antisense strand to SEQ ID NO: 752800
cuuaggcuaaucauacguc

SEQ ID NO: 752802 - RNA, 19 nt, Artificial Sequence
  Description of Artificial Sequence: Synthetic oligonucleotide
  Sense strand starting at position 3638 of SEQ ID NO: 586907
guaugauuagccuaagcga

SEQ ID NO: 752803 - RNA, 19 nt, Artificial Sequence
  Description of Artificial Sequence: Synthetic oligonucleotide
  Antisense strand to SEQ ID NO: 752802
ucgcuuaggcuaaucauac

SEQ ID NO: 752804 - RNA, 19 nt, Artificial Sequence
  Description of Artificial Sequence: Synthetic oligonucleotide
  Sense strand starting at position 3676 of SEQ ID NO: 586907
ugaccagugacuugaucag

SEQ ID NO: 752805 - RNA, 19 nt, Artificial Sequence
  Description of Artificial Sequence: Synthetic oligonucleotide
  Antisense strand to SEQ ID NO: 752804
cugaucaagucacugguca

SEQ ID NO: 752806 - RNA, 19 nt, Artificial Sequence
  Description of Artificial Sequence: Synthetic oligonucleotide
  Sense strand starting at position 3698 of SEQ ID NO: 586907
uggcgauauaucuagguag

SEQ ID NO: 752807 - RNA, 19 nt, Artificial Sequence
  Description of Artificial Sequence: Synthetic oligonucleotide
  Antisense strand to SEQ ID NO: 752806
cuaccuagauauaucgcca

SEQ ID NO: 752808 - RNA, 19 nt, Artificial Sequence
  Description of Artificial Sequence: Synthetic oligonucleotide
  Sense strand starting at position 3811 of SEQ ID NO: 586907
guuguauugcugucuuauc

SEQ ID NO: 752809 - RNA, 19 nt, Artificial Sequence
  Description of Artificial Sequence: Synthetic oligonucleotide
  Antisense strand to SEQ ID NO: 752808
gauaagacagcaauacaac

SEQ ID NO: 752810 - RNA, 19 nt, Artificial Sequence
  Description of Artificial Sequence: Synthetic oligonucleotide
  Sense strand starting at position 3820 of SEQ ID NO: 586907
cugucuuaucaugagguga

SEQ ID NO: 752811 - RNA, 19 nt, Artificial Sequence
  Description of Artificial Sequence: Synthetic oligonucleotide
  Antisense strand to SEQ ID NO: 752810
ucaccucaugauaagacag

SEQ ID NO: 752812 - RNA, 19 nt, Artificial Sequence
  Description of Artificial Sequence: Synthetic oligonucleotide
  Sense strand starting at position 73 of SEQ ID NO: 586908
cauucugaugcuuacgcua

SEQ ID NO: 752813 - RNA, 19 nt, Artificial Sequence
  Description of Artificial Sequence: Synthetic oligonucleotide
  Antisense strand to SEQ ID NO: 752812
uagcguaagcaucagaaug

SEQ ID NO: 752814 - RNA, 19 nt, Artificial Sequence
  Description of Artificial Sequence: Synthetic oligonucleotide
  Sense strand starting at position 109 of SEQ ID NO: 586908
accugacuucccugggaga

SEQ ID NO: 752815 - RNA, 19 nt, Artificial Sequence
  Description of Artificial Sequence: Synthetic oligonucleotide
  Antisense strand to SEQ ID NO: 752814
ucucccagggaagucaggu

SEQ ID NO: 752816 - RNA, 19 nt, Artificial Sequence
  Description of Artificial Sequence: Synthetic oligonucleotide
  Sense strand starting at position 136 of SEQ ID NO: 586908
gccacacagugacuugaaa

SEQ ID NO: 752817 - RNA, 19 nt, Artificial Sequence
  Description of Artificial Sequence: Synthetic oligonucleotide
  Antisense strand to SEQ ID NO: 752816
uuucaagucacuguguggc

SEQ ID NO: 752818 - RNA, 19 nt, Artificial Sequence
  Description of Artificial Sequence: Synthetic oligonucleotide
  Sense strand starting at position 158 of SEQ ID NO: 586908
ccaggacugcccuguaaca

SEQ ID NO: 752819 - RNA, 19 nt, Artificial Sequence
  Description of Artificial Sequence: Synthetic oligonucleotide
  Antisense strand to SEQ ID NO: 752818
uguuacagggcaguccugg

SEQ ID NO: 752820 - RNA, 19 nt, Artificial Sequence
  Description of Artificial Sequence: Synthetic oligonucleotide
  Sense strand starting at position 274 of SEQ ID NO: 586908
gucccaacauaggaauuua

SEQ ID NO: 752821 - RNA, 19 nt, Artificial Sequence
  Description of Artificial Sequence: Synthetic oligonucleotide
  Antisense strand to SEQ ID NO: 752820
uaaauuccuauguugggac

SEQ ID NO: 752822 - RNA, 19 nt, Artificial Sequence
  Description of Artificial Sequence: Synthetic oligonucleotide
  Sense strand starting at position 753 of SEQ ID NO: 586908
agcguuaggcuauacuuaa

SEQ ID NO: 752823 - RNA, 19 nt, Artificial Sequence
  Description of Artificial Sequence: Synthetic oligonucleotide
  Antisense strand to SEQ ID NO: 752822
uuaaguauagccuaacgcu

SEQ ID NO: 752824 - RNA, 19 nt, Artificial Sequence
  Description of Artificial Sequence: Synthetic oligonucleotide
  Sense strand starting at position 788 of SEQ ID NO: 586908
guaacuagaaguggcuaaa

SEQ ID NO: 752825 - RNA, 19 nt, Artificial Sequence
  Description of Artificial Sequence: Synthetic oligonucleotide
  Antisense strand to SEQ ID NO: 752824
uuuagccacuucuaguuac

SEQ ID NO: 752826 - RNA, 19 nt, Artificial Sequence
  Description of Artificial Sequence: Synthetic oligonucleotide
  Sense strand starting at position 831 of SEQ ID NO: 586908
gagugaaugccacacuuag

SEQ ID NO: 752827 - RNA, 19 nt, Artificial Sequence
  Description of Artificial Sequence: Synthetic oligonucleotide
  Antisense strand to SEQ ID NO: 752826
cuaaguguggcauucacuc

SEQ ID NO: 752828 - RNA, 19 nt, Artificial Sequence
  Description of Artificial Sequence: Synthetic oligonucleotide
  Sense strand starting at position 861 of SEQ ID NO: 586908
uuaugcagcuaauuauaga

SEQ ID NO: 752829 - RNA, 19 nt, Artificial Sequence
  Description of Artificial Sequence: Synthetic oligonucleotide
  Antisense strand to SEQ ID NO: 752828
ucuauaauuagcugcauaa

SEQ ID NO: 752830 - RNA, 19 nt, Artificial Sequence
  Description of Artificial Sequence: Synthetic oligonucleotide
  Sense strand starting at position 956 of SEQ ID NO: 586908
ccugauaaaugacugcaaa

SEQ ID NO: 752831 - RNA, 19 nt, Artificial Sequence
  Description of Artificial Sequence: Synthetic oligonucleotide
  Antisense strand to SEQ ID NO: 752830
uuugcagucauuuaucagg

SEQ ID NO: 752832 - RNA, 19 nt, Artificial Sequence
  Description of Artificial Sequence: Synthetic oligonucleotide
  Sense strand starting at position 1014 of SEQ ID NO: 586908
uauugaugacuuugagcua

SEQ ID NO: 752833 - RNA, 19 nt, Artificial Sequence
  Description of Artificial Sequence: Synthetic oligonucleotide
  Antisense strand to SEQ ID NO: 752832
uagcucaaagucaucaaua

SEQ ID NO: 752834 - RNA, 19 nt, Artificial Sequence
  Description of Artificial Sequence: Synthetic oligonucleotide
  Sense strand starting at position 1017 of SEQ ID NO: 586908
ugaugacuuugagcuauaa

SEQ ID NO: 752835 - RNA, 19 nt, Artificial Sequence
  Description of Artificial Sequence: Synthetic oligonucleotide
  Antisense strand to SEQ ID NO: 752834
uuauagcucaaagucauca

SEQ ID NO: 752836 - RNA, 19 nt, Artificial Sequence
  Description of Artificial Sequence: Synthetic oligonucleotide
  Sense strand starting at position 1021 of SEQ ID NO: 586908
gacuuugagcuauaaguaa

SEQ ID NO: 752837 - RNA, 19 nt, Artificial Sequence
  Description of Artificial Sequence: Synthetic oligonucleotide
  Antisense strand to SEQ ID NO: 752836
uuacuuauagcucaaaguc

SEQ ID NO: 752838 - RNA, 19 nt, Artificial Sequence
  Description of Artificial Sequence: Synthetic oligonucleotide
  Sense strand starting at position 1133 of SEQ ID NO: 586908
uucgacucgccuguuguaa

SEQ ID NO: 752839 - RNA, 19 nt, Artificial Sequence
  Description of Artificial Sequence: Synthetic oligonucleotide
  Antisense strand to SEQ ID NO: 752838
uuacaacaggcgagucgaa

SEQ ID NO: 752840 - RNA, 19 nt, Artificial Sequence
  Description of Artificial Sequence: Synthetic oligonucleotide
  Sense strand starting at position 1134 of SEQ ID NO: 586908
ucgacucgccuguuguaaa

SEQ ID NO: 752841 - RNA, 19 nt, Artificial Sequence
  Description of Artificial Sequence: Synthetic oligonucleotide
  Antisense strand to SEQ ID NO: 752840
uuuacaacaggcgagucga

SEQ ID NO: 752842 - RNA, 19 nt, Artificial Sequence
  Description of Artificial Sequence: Synthetic oligonucleotide
  Sense strand starting at position 1242 of SEQ ID NO: 586908
gcgccucaucgggauaaca

SEQ ID NO: 752843 - RNA, 19 nt, Artificial Sequence
  Description of Artificial Sequence: Synthetic oligonucleotide
  Antisense strand to SEQ ID NO: 752842
uguuaucccgaugaggcgc

SEQ ID NO: 752844 - RNA, 19 nt, Artificial Sequence
  Description of Artificial Sequence: Synthetic oligonucleotide
  Sense strand starting at position 1244 of SEQ ID NO: 586908
gccucaucgggauaacaaa

SEQ ID NO: 752845 - RNA, 19 nt, Artificial Sequence
  Description of Artificial Sequence: Synthetic oligonucleotide
  Antisense strand to SEQ ID NO: 752844
uuuguuaucccgaugaggc

SEQ ID NO: 752846 - RNA, 19 nt, Artificial Sequence
  Description of Artificial Sequence: Synthetic oligonucleotide
  Sense strand starting at position 1414 of SEQ ID NO: 586908
cuguuaaucugucuuauga

SEQ ID NO: 752847 - RNA, 19 nt, Artificial Sequence
  Description of Artificial Sequence: Synthetic oligonucleotide
  Antisense strand to SEQ ID NO: 752846
ucauaagacagauuaacag

SEQ ID NO: 752848 - RNA, 19 nt, Artificial Sequence
  Description of Artificial Sequence: Synthetic oligonucleotide
  Sense strand starting at position 2529 of SEQ ID NO: 586908
gcgagauugucucucagaa

SEQ ID NO: 752849 - RNA, 19 nt, Artificial Sequence
  Description of Artificial Sequence: Synthetic oligonucleotide
  Antisense strand to SEQ ID NO: 752848
uucugagagacaaucucgc

SEQ ID NO: 752850 - RNA, 19 nt, Artificial Sequence
  Description of Artificial Sequence: Synthetic oligonucleotide
  Sense strand starting at position 2591 of SEQ ID NO: 586908
uaauuauguucgguaauag

SEQ ID NO: 752851 - RNA, 19 nt, Artificial Sequence
  Description of Artificial Sequence: Synthetic oligonucleotide
  Antisense strand to SEQ ID NO: 752850
cuauuaccgaacauaauua

SEQ ID NO: 752852 - RNA, 19 nt, Artificial Sequence
  Description of Artificial Sequence: Synthetic oligonucleotide
  Sense strand starting at position 2592 of SEQ ID NO: 586908
aauuauguucgguaauagu

SEQ ID NO: 752853 - RNA, 19 nt, Artificial Sequence
  Description of Artificial Sequence: Synthetic oligonucleotide
  Antisense strand to SEQ ID NO: 752852
acuauuaccgaacauaauu

SEQ ID NO: 752854 - RNA, 19 nt, Artificial Sequence
  Description of Artificial Sequence: Synthetic oligonucleotide
  Sense strand starting at position 2721 of SEQ ID NO: 586908
ccaagauccugagaaauuu

SEQ ID NO: 752855 - RNA, 19 nt, Artificial Sequence
  Description of Artificial Sequence: Synthetic oligonucleotide
  Antisense strand to SEQ ID NO: 752854
aaauuucucaggaucuugg

SEQ ID NO: 752856 - RNA, 19 nt, Artificial Sequence
  Description of Artificial Sequence: Synthetic oligonucleotide
  Sense strand starting at position 2839 of SEQ ID NO: 586908
uuguaauaaugagcuuuga

SEQ ID NO: 752857 - RNA, 19 nt, Artificial Sequence
  Description of Artificial Sequence: Synthetic oligonucleotide
  Antisense strand to SEQ ID NO: 752856
ucaaagcucauuauuacaa

SEQ ID NO: 752858 - RNA, 19 nt, Artificial Sequence
  Description of Artificial Sequence: Synthetic oligonucleotide
  Sense strand starting at position 2847 of SEQ ID NO: 586908
augagcuuugauugaguca

SEQ ID NO: 752859 - RNA, 19 nt, Artificial Sequence
  Description of Artificial Sequence: Synthetic oligonucleotide
  Antisense strand to SEQ ID NO: 752858
ugacucaaucaaagcucau

SEQ ID NO: 752860 - RNA, 19 nt, Artificial Sequence
  Description of Artificial Sequence: Synthetic oligonucleotide
  Sense strand starting at position 2848 of SEQ ID NO: 586908
ugagcuuugauugagucau

SEQ ID NO: 752861 - RNA, 19 nt, Artificial Sequence
  Description of Artificial Sequence: Synthetic oligonucleotide
  Antisense strand to SEQ ID NO: 752860
augacucaaucaaagcuca

SEQ ID NO: 752862 - RNA, 19 nt, Artificial Sequence
  Description of Artificial Sequence: Synthetic oligonucleotide
  Sense strand starting at position 2850 of SEQ ID NO: 586908
agcuuugauugagucauau

SEQ ID NO: 752863 - RNA, 19 nt, Artificial Sequence
  Description of Artificial Sequence: Synthetic oligonucleotide
  Antisense strand to SEQ ID NO: 752862
auaugacucaaucaaagcu

SEQ ID NO: 752864 - RNA, 19 nt, Artificial Sequence
  Description of Artificial Sequence: Synthetic oligonucleotide
  Sense strand starting at position 2918 of SEQ ID NO: 586908
aguugaugccuccaguauu

SEQ ID NO: 752865 - RNA, 19 nt, Artificial Sequence
  Description of Artificial Sequence: Synthetic oligonucleotide
  Antisense strand to SEQ ID NO: 752864
aauacuggaggcaucaacu

SEQ ID NO: 752866 - RNA, 19 nt, Artificial Sequence
  Description of Artificial Sequence: Synthetic oligonucleotide
  Sense strand starting at position 2921 of SEQ ID NO: 586908
ugaugccuccaguauuaga

SEQ ID NO: 752867 - RNA, 19 nt, Artificial Sequence
  Description of Artificial Sequence: Synthetic oligonucleotide
  Antisense strand to SEQ ID NO: 752866
ucuaauacuggaggcauca

SEQ ID NO: 752868 - RNA, 19 nt, Artificial Sequence
  Description of Artificial Sequence: Synthetic oligonucleotide
  Sense strand starting at position 3106 of SEQ ID NO: 586908
ggcgauuguccacaugaac

SEQ ID NO: 752869 - RNA, 19 nt, Artificial Sequence
  Description of Artificial Sequence: Synthetic oligonucleotide
  Antisense strand to SEQ ID NO: 752868
guucauguggacaaucgcc

SEQ ID NO: 752870 - RNA, 19 nt, Artificial Sequence
  Description of Artificial Sequence: Synthetic oligonucleotide
  Sense strand starting at position 3199 of SEQ ID NO: 586908
ggacauggcucuccucgau

SEQ ID NO: 752871 - RNA, 19 nt, Artificial Sequence
  Description of Artificial Sequence: Synthetic oligonucleotide
  Antisense strand to SEQ ID NO: 752870
aucgaggagagccaugucc

SEQ ID NO: 752872 - RNA, 19 nt, Artificial Sequence
  Description of Artificial Sequence: Synthetic oligonucleotide
  Sense strand starting at position 3203 of SEQ ID NO: 586908
auggcucuccucgaugaua

SEQ ID NO: 752873 - RNA, 19 nt, Artificial Sequence
  Description of Artificial Sequence: Synthetic oligonucleotide
  Antisense strand to SEQ ID NO: 752872
uaucaucgaggagagccau

SEQ ID NO: 752874 - RNA, 19 nt, Artificial Sequence
  Description of Artificial Sequence: Synthetic oligonucleotide
  Sense strand starting at position 3205 of SEQ ID NO: 586908
ggcucuccucgaugauaca

SEQ ID NO: 752875 - RNA, 19 nt, Artificial Sequence
  Description of Artificial Sequence: Synthetic oligonucleotide
  Antisense strand to SEQ ID NO: 752874
uguaucaucgaggagagcc

SEQ ID NO: 752876 - RNA, 19 nt, Artificial Sequence
  Description of Artificial Sequence: Synthetic oligonucleotide
  Sense strand starting at position 3402 of SEQ ID NO: 586908
ugcaccugacuaugaaauu

SEQ ID NO: 752877 - RNA, 19 nt, Artificial Sequence
  Description of Artificial Sequence: Synthetic oligonucleotide
  Antisense strand to SEQ ID NO: 752876
aauuucauagucaggugca

SEQ ID NO: 752878 - RNA, 19 nt, Artificial Sequence
  Description of Artificial Sequence: Synthetic oligonucleotide
  Sense strand starting at position 3541 of SEQ ID NO: 586908
cauucuugaggccagucaa

SEQ ID NO: 752879 - RNA, 19 nt, Artificial Sequence
  Description of Artificial Sequence: Synthetic oligonucleotide
  Antisense strand to SEQ ID NO: 752878
uugacuggccucaagaaug

SEQ ID NO: 752880 - RNA, 19 nt, Artificial Sequence
  Description of Artificial Sequence: Synthetic oligonucleotide
  Sense strand starting at position 3677 of SEQ ID NO: 586908
gcuuguauugaucacccuu

SEQ ID NO: 752881 - RNA, 19 nt, Artificial Sequence
  Description of Artificial Sequence: Synthetic oligonucleotide
  Antisense strand to SEQ ID NO: 752880
aagggugaucaauacaagc

SEQ ID NO: 752882 - RNA, 19 nt, Artificial Sequence
  Description of Artificial Sequence: Synthetic oligonucleotide
  Sense strand starting at position 3747 of SEQ ID NO: 586908
gcucuuaucuuaccaguga

SEQ ID NO: 752883 - RNA, 19 nt, Artificial Sequence
  Description of Artificial Sequence: Synthetic oligonucleotide
  Antisense strand to SEQ ID NO: 752882
ucacugguaagauaagagc

SEQ ID NO: 752884 - RNA, 19 nt, Artificial Sequence
  Description of Artificial Sequence: Synthetic oligonucleotide
  Sense strand starting at position 3751 of SEQ ID NO: 586908
uuaucuuaccagugaccuu

SEQ ID NO: 752885 - RNA, 19 nt, Artificial Sequence
  Description of Artificial Sequence: Synthetic oligonucleotide
  Antisense strand to SEQ ID NO: 752884
aaggucacugguaagauaa

SEQ ID NO: 752886 - RNA, 19 nt, Artificial Sequence
  Description of Artificial Sequence: Synthetic oligonucleotide
  Sense strand starting at position 3944 of SEQ ID NO: 586908
gcaguagaaacaugagaau

SEQ ID NO: 752887 - RNA, 19 nt, Artificial Sequence
  Description of Artificial Sequence: Synthetic oligonucleotide
  Antisense strand to SEQ ID NO: 752886
auucucauguuucuacugc

SEQ ID NO: 752888 - RNA, 19 nt, Artificial Sequence
  Description of Artificial Sequence: Synthetic oligonucleotide
  Sense strand starting at position 3953 of SEQ ID NO: 586908
acaugagaaucccuuuggu

SEQ ID NO: 752889 - RNA, 19 nt, Artificial Sequence
  Description of Artificial Sequence: Synthetic oligonucleotide
  Antisense strand to SEQ ID NO: 752888
accaaagggauucucaugu

SEQ ID NO: 752890 - RNA, 19 nt, Artificial Sequence
  Description of Artificial Sequence: Synthetic oligonucleotide
  Sense strand starting at position 3956 of SEQ ID NO: 586908
ugagaaucccuuuggucau

SEQ ID NO: 752891 - RNA, 19 nt, Artificial Sequence
  Description of Artificial Sequence: Synthetic oligonucleotide
  Antisense strand to SEQ ID NO: 752890
augaccaaagggauucuca

SEQ ID NO: 752892 - RNA, 19 nt, Artificial Sequence
  Description of Artificial Sequence: Synthetic oligonucleotide
  Sense strand starting at position 817 of SEQ ID NO: 586909
uucuuuggcgugagacgau

SEQ ID NO: 752893 - RNA, 19 nt, Artificial Sequence
  Description of Artificial Sequence: Synthetic oligonucleotide
  Antisense strand to SEQ ID NO: 752892
aucgucucacgccaaagaa

SEQ ID NO: 752894 - RNA, 19 nt, Artificial Sequence
  Description of Artificial Sequence: Synthetic oligonucleotide
  Sense strand starting at position 1119 of SEQ ID NO: 586909
caaagaaguuaguuuguca

SEQ ID NO: 752895 - RNA, 19 nt, Artificial Sequence
  Description of Artificial Sequence: Synthetic oligonucleotide
  Antisense strand to SEQ ID NO: 752894
ugacaaacuaacuucuuug

SEQ ID NO: 752896 - RNA, 19 nt, Artificial Sequence
  Description of Artificial Sequence: Synthetic oligonucleotide
  Sense strand starting at position 1165 of SEQ ID NO: 586909
augagagcaugaguuugaa

SEQ ID NO: 752897 - RNA, 19 nt, Artificial Sequence
  Description of Artificial Sequence: Synthetic oligonucleotide
  Antisense strand to SEQ ID NO: 752896
uucaaacucaugcucucau

SEQ ID NO: 752898 - RNA, 19 nt, Artificial Sequence
  Description of Artificial Sequence: Synthetic oligonucleotide
  Sense strand starting at position 1168 of SEQ ID NO: 586909
agagcaugaguuugaaauu

SEQ ID NO: 752899 - RNA, 19 nt, Artificial Sequence
  Description of Artificial Sequence: Synthetic oligonucleotide
  Antisense strand to SEQ ID NO: 752898
aauuucaaacucaugcucu

SEQ ID NO: 752900 - RNA, 19 nt, Artificial Sequence
  Description of Artificial Sequence: Synthetic oligonucleotide
  Sense strand starting at position 1234 of SEQ ID NO: 586909
aguuuaugauuggccauaa

SEQ ID NO: 752901 - RNA, 19 nt, Artificial Sequence
  Description of Artificial Sequence: Synthetic oligonucleotide
  Antisense strand to SEQ ID NO: 752900
uuauggccaaucauaaacu

SEQ ID NO: 752902 - RNA, 19 nt, Artificial Sequence
  Description of Artificial Sequence: Synthetic oligonucleotide
  Sense strand starting at position 1235 of SEQ ID NO: 586909
guuuaugauuggccauaau

SEQ ID NO: 752903 - RNA, 19 nt, Artificial Sequence
  Description of Artificial Sequence: Synthetic oligonucleotide
  Antisense strand to SEQ ID NO: 752902
auuauggccaaucauaaac

SEQ ID NO: 752904 - RNA, 19 nt, Artificial Sequence
  Description of Artificial Sequence: Synthetic oligonucleotide
  Sense strand starting at position 1342 of SEQ ID NO: 586909
cacagagugcuguagauuc

SEQ ID NO: 752905 - RNA, 19 nt, Artificial Sequence
  Description of Artificial Sequence: Synthetic oligonucleotide
  Antisense strand to SEQ ID NO: 752904
gaaucuacagcacucugug

SEQ ID NO: 752906 - RNA, 19 nt, Artificial Sequence
  Description of Artificial Sequence: Synthetic oligonucleotide
  Sense strand starting at position 1360 of SEQ ID NO: 586909
cuguuugucauaguugugu

SEQ ID NO: 752907 - RNA, 19 nt, Artificial Sequence
  Description of Artificial Sequence: Synthetic oligonucleotide
  Antisense strand to SEQ ID NO: 752906
acacaacuaugacaaacag

SEQ ID NO: 752908 - RNA, 19 nt, Artificial Sequence
  Description of Artificial Sequence: Synthetic oligonucleotide
  Sense strand starting at position 1535 of SEQ ID NO: 586909
ugguauuaauuugggaaga

SEQ ID NO: 752909 - RNA, 19 nt, Artificial Sequence
  Description of Artificial Sequence: Synthetic oligonucleotide
  Antisense strand to SEQ ID NO: 752908
ucuucccaaauuaauacca

SEQ ID NO: 752910 - RNA, 19 nt, Artificial Sequence
  Description of Artificial Sequence: Synthetic oligonucleotide
  Sense strand starting at position 1536 of SEQ ID NO: 586909
gguauuaauuugggaagaa

SEQ ID NO: 752911 - RNA, 19 nt, Artificial Sequence
  Description of Artificial Sequence: Synthetic oligonucleotide
  Antisense strand to SEQ ID NO: 752910
uucuucccaaauuaauacc

SEQ ID NO: 752912 - RNA, 19 nt, Artificial Sequence
  Description of Artificial Sequence: Synthetic oligonucleotide
  Sense strand starting at position 1537 of SEQ ID NO: 586909
guauuaauuugggaagaag

SEQ ID NO: 752913 - RNA, 19 nt, Artificial Sequence
  Description of Artificial Sequence: Synthetic oligonucleotide
  Antisense strand to SEQ ID NO: 752912
cuucuucccaaauuaauac

SEQ ID NO: 752914 - RNA, 19 nt, Artificial Sequence
  Description of Artificial Sequence: Synthetic oligonucleotide
  Sense strand starting at position 1558 of SEQ ID NO: 586909
auugcagaacuugagugau

SEQ ID NO: 752915 - RNA, 19 nt, Artificial Sequence
  Description of Artificial Sequence: Synthetic oligonucleotide
  Antisense strand to SEQ ID NO: 752914
aucacucaaguucugcaau

SEQ ID NO: 752916 - RNA, 19 nt, Artificial Sequence
  Description of Artificial Sequence: Synthetic oligonucleotide
  Sense strand starting at position 1698 of SEQ ID NO: 586909
uuauaaugccaucgaugau

SEQ ID NO: 752917 - RNA, 19 nt, Artificial Sequence
  Description of Artificial Sequence: Synthetic oligonucleotide
  Antisense strand to SEQ ID NO: 752916
aucaucgauggcauuauaa

SEQ ID NO: 752918 - RNA, 19 nt, Artificial Sequence
  Description of Artificial Sequence: Synthetic oligonucleotide
  Sense strand starting at position 2002 of SEQ ID NO: 586909
uguggaucugaugaugcua

SEQ ID NO: 752919 - RNA, 19 nt, Artificial Sequence
  Description of Artificial Sequence: Synthetic oligonucleotide
  Antisense strand to SEQ ID NO: 752918
uagcaucaucagauccaca

SEQ ID NO: 752920 - RNA, 19 nt, Artificial Sequence
  Description of Artificial Sequence: Synthetic oligonucleotide
  Sense strand starting at position 2060 of SEQ ID NO: 586909
acaucaucucuuuguauag

SEQ ID NO: 752921 - RNA, 19 nt, Artificial Sequence
  Description of Artificial Sequence: Synthetic oligonucleotide
  Antisense strand to SEQ ID NO: 752920
cuauacaaagagaugaugu

SEQ ID NO: 752922 - RNA, 19 nt, Artificial Sequence
  Description of Artificial Sequence: Synthetic oligonucleotide
  Sense strand starting at position 2071 of SEQ ID NO: 586909
uuguauagacaucauucuu

SEQ ID NO: 752923 - RNA, 19 nt, Artificial Sequence
  Description of Artificial Sequence: Synthetic oligonucleotide
  Antisense strand to SEQ ID NO: 752922
aagaaugaugucuauacaa

SEQ ID NO: 752924 - RNA, 19 nt, Artificial Sequence
  Description of Artificial Sequence: Synthetic oligonucleotide
  Sense strand starting at position 2593 of SEQ ID NO: 586909
aucagcaagcuuuaggaga

SEQ ID NO: 752925 - RNA, 19 nt, Artificial Sequence
  Description of Artificial Sequence: Synthetic oligonucleotide
  Antisense strand to SEQ ID NO: 752924
ucuccuaaagcuugcugau

SEQ ID NO: 752926 - RNA, 19 nt, Artificial Sequence
  Description of Artificial Sequence: Synthetic oligonucleotide
  Sense strand starting at position 2612 of SEQ ID NO: 586909
ggauaacaaaugugugauu

SEQ ID NO: 752927 - RNA, 19 nt, Artificial Sequence
  Description of Artificial Sequence: Synthetic oligonucleotide
  Antisense strand to SEQ ID NO: 752926
aaucacacauuuguuaucc

SEQ ID NO: 752928 - RNA, 19 nt, Artificial Sequence
  Description of Artificial Sequence: Synthetic oligonucleotide
  Sense strand starting at position 2671 of SEQ ID NO: 586909
uuugauccaguauauagua

SEQ ID NO: 752929 - RNA, 19 nt, Artificial Sequence
  Description of Artificial Sequence: Synthetic oligonucleotide
  Antisense strand to SEQ ID NO: 752928
uacuauauacuggaucaaa

SEQ ID NO: 752930 - RNA, 19 nt, Artificial Sequence
  Description of Artificial Sequence: Synthetic oligonucleotide
  Sense strand starting at position 2679 of SEQ ID NO: 586909
aguauauaguaugcuacaa

SEQ ID NO: 752931 - RNA, 19 nt, Artificial Sequence
  Description of Artificial Sequence: Synthetic oligonucleotide
  Antisense strand to SEQ ID NO: 752930
uuguagcauacuauauacu

SEQ ID NO: 752932 - RNA, 19 nt, Artificial Sequence
  Description of Artificial Sequence: Synthetic oligonucleotide
  Sense strand starting at position 2714 of SEQ ID NO: 586909
ggagcaauauaauuagggu

SEQ ID NO: 752933 - RNA, 19 nt, Artificial Sequence
  Description of Artificial Sequence: Synthetic oligonucleotide
  Antisense strand to SEQ ID NO: 752932
acccuaauuauauugcucc

SEQ ID NO: 752934 - RNA, 19 nt, Artificial Sequence
  Description of Artificial Sequence: Synthetic oligonucleotide
  Sense strand starting at position 2746 of SEQ ID NO: 586909
ugcacuuguaucgcagcaa

SEQ ID NO: 752935 - RNA, 19 nt, Artificial Sequence
  Description of Artificial Sequence: Synthetic oligonucleotide
  Antisense strand to SEQ ID NO: 752934
uugcugcgauacaagugca

SEQ ID NO: 752936 - RNA, 19 nt, Artificial Sequence
  Description of Artificial Sequence: Synthetic oligonucleotide
  Sense strand starting at position 2792 of SEQ ID NO: 586909
ugacuaaucucucuggcaa

SEQ ID NO: 752937 - RNA, 19 nt, Artificial Sequence
  Description of Artificial Sequence: Synthetic oligonucleotide
  Antisense strand to SEQ ID NO: 752936
uugccagagagauuaguca

SEQ ID NO: 752938 - RNA, 19 nt, Artificial Sequence
  Description of Artificial Sequence: Synthetic oligonucleotide
  Sense strand starting at position 2812 of SEQ ID NO: 586909
cccacaugagaguguagua

SEQ ID NO: 752939 - RNA, 19 nt, Artificial Sequence
  Description of Artificial Sequence: Synthetic oligonucleotide
  Antisense strand to SEQ ID NO: 752938
uacuacacucucauguggg

SEQ ID NO: 752940 - RNA, 19 nt, Artificial Sequence
  Description of Artificial Sequence: Synthetic oligonucleotide
  Sense strand starting at position 2924 of SEQ ID NO: 586909
guauucuaaccacagucaa

SEQ ID NO: 752941 - RNA, 19 nt, Artificial Sequence
  Description of Artificial Sequence: Synthetic oligonucleotide
  Antisense strand to SEQ ID NO: 752940
uugacugugguuagaauac

SEQ ID NO: 752942 - RNA, 19 nt, Artificial Sequence
  Description of Artificial Sequence: Synthetic oligonucleotide
  Sense strand starting at position 3009 of SEQ ID NO: 586909
gcuauagacagccauggaa

SEQ ID NO: 752943 - RNA, 19 nt, Artificial Sequence
  Description of Artificial Sequence: Synthetic oligonucleotide
  Antisense strand to SEQ ID NO: 752942
uuccauggcugucuauagc

SEQ ID NO: 752944 - RNA, 19 nt, Artificial Sequence
  Description of Artificial Sequence: Synthetic oligonucleotide
  Sense strand starting at position 3085 of SEQ ID NO: 586909
uuaaguuuaggaggcuuua

SEQ ID NO: 752945 - RNA, 19 nt, Artificial Sequence
  Description of Artificial Sequence: Synthetic oligonucleotide
  Antisense strand to SEQ ID NO: 752944
uaaagccuccuaaacuuaa

SEQ ID NO: 752946 - RNA, 19 nt, Artificial Sequence
  Description of Artificial Sequence: Synthetic oligonucleotide
  Sense strand starting at position 3117 of SEQ ID NO: 586909
aacugaagaugagaagaau

SEQ ID NO: 752947 - RNA, 19 nt, Artificial Sequence
  Description of Artificial Sequence: Synthetic oligonucleotide
  Antisense strand to SEQ ID NO: 752946
auucuucucaucuucaguu

SEQ ID NO: 752948 - RNA, 19 nt, Artificial Sequence
  Description of Artificial Sequence: Synthetic oligonucleotide
  Sense strand starting at position 3142 of SEQ ID NO: 586909
gaaagaaaguacuuguacu

SEQ ID NO: 752949 - RNA, 19 nt, Artificial Sequence
  Description of Artificial Sequence: Synthetic oligonucleotide
  Antisense strand to SEQ ID NO: 752948
aguacaaguacuuucuuuc

SEQ ID NO: 752950 - RNA, 19 nt, Artificial Sequence
  Description of Artificial Sequence: Synthetic oligonucleotide
  Sense strand starting at position 3253 of SEQ ID NO: 586909
gaugguaaaucaguguacu

SEQ ID NO: 752951 - RNA, 19 nt, Artificial Sequence
  Description of Artificial Sequence: Synthetic oligonucleotide
  Antisense strand to SEQ ID NO: 752950
aguacacugauuuaccauc

SEQ ID NO: 752952 - RNA, 19 nt, Artificial Sequence
  Description of Artificial Sequence: Synthetic oligonucleotide
  Sense strand starting at position 3254 of SEQ ID NO: 586909
augguaaaucaguguacug

SEQ ID NO: 752953 - RNA, 19 nt, Artificial Sequence
  Description of Artificial Sequence: Synthetic oligonucleotide
  Antisense strand to SEQ ID NO: 752952
caguacacugauuuaccau

SEQ ID NO: 752954 - RNA, 19 nt, Artificial Sequence
  Description of Artificial Sequence: Synthetic oligonucleotide
  Sense strand starting at position 3256 of SEQ ID NO: 586909
gguaaaucaguguacugug

SEQ ID NO: 752955 - RNA, 19 nt, Artificial Sequence
  Description of Artificial Sequence: Synthetic oligonucleotide
  Antisense strand to SEQ ID NO: 752954
cacaguacacugauuuacc

SEQ ID NO: 752956 - RNA, 19 nt, Artificial Sequence
  Description of Artificial Sequence: Synthetic oligonucleotide
  Sense strand starting at position 3390 of SEQ ID NO: 586909
ggaauaaaguuucuucuuc

SEQ ID NO: 752957 - RNA, 19 nt, Artificial Sequence
  Description of Artificial Sequence: Synthetic oligonucleotide
  Antisense strand to SEQ ID NO: 752956
gaagaagaaacuuuauucc

SEQ ID NO: 752958 - RNA, 19 nt, Artificial Sequence
  Description of Artificial Sequence: Synthetic oligonucleotide
  Sense strand starting at position 3423 of SEQ ID NO: 586909
gggacuugguaagcaugaa

SEQ ID NO: 752959 - RNA, 19 nt, Artificial Sequence
  Description of Artificial Sequence: Synthetic oligonucleotide
  Antisense strand to SEQ ID NO: 752958
uucaugcuuaccaaguccc

SEQ ID NO: 752960 - RNA, 19 nt, Artificial Sequence
  Description of Artificial Sequence: Synthetic oligonucleotide
  Sense strand starting at position 3546 of SEQ ID NO: 586909
cuuagaaauugcuuguuaa

SEQ ID NO: 752961 - RNA, 19 nt, Artificial Sequence
  Description of Artificial Sequence: Synthetic oligonucleotide
  Antisense strand to SEQ ID NO: 752960
uuaacaagcaauuucuaag

SEQ ID NO: 752962 - RNA, 19 nt, Artificial Sequence
  Description of Artificial Sequence: Synthetic oligonucleotide
  Sense strand starting at position 3549 of SEQ ID NO: 586909
agaaauugcuuguuaaucu

SEQ ID NO: 752963 - RNA, 19 nt, Artificial Sequence
  Description of Artificial Sequence: Synthetic oligonucleotide
  Antisense strand to SEQ ID NO: 752962
agauuaacaagcaauuucu

SEQ ID NO: 752964 - RNA, 19 nt, Artificial Sequence
  Description of Artificial Sequence: Synthetic oligonucleotide
  Sense strand starting at position 3868 of SEQ ID NO: 586909
cccagacuacuguaguauu

SEQ ID NO: 752965 - RNA, 19 nt, Artificial Sequence
  Description of Artificial Sequence: Synthetic oligonucleotide
  Antisense strand to SEQ ID NO: 752964
aauacuacaguagucuggg

SEQ ID NO: 752966 - RNA, 19 nt, Artificial Sequence
  Description of Artificial Sequence: Synthetic oligonucleotide
  Sense strand starting at position 3896 of SEQ ID NO: 586909
uagacuacugaguauuagu

SEQ ID NO: 752967 - RNA, 19 nt, Artificial Sequence
  Description of Artificial Sequence: Synthetic oligonucleotide
  Antisense strand to SEQ ID NO: 752966
acuaauacucaguagucua

SEQ ID NO: 752968 - RNA, 19 nt, Artificial Sequence
  Description of Artificial Sequence: Synthetic oligonucleotide
  Sense strand starting at position 3904 of SEQ ID NO: 586909
ugaguauuaguacaguacu

SEQ ID NO: 752969 - RNA, 19 nt, Artificial Sequence
  Description of Artificial Sequence: Synthetic oligonucleotide
  Antisense strand to SEQ ID NO: 752968
aguacuguacuaauacuca

SEQ ID NO: 752970 - RNA, 19 nt, Artificial Sequence
  Description of Artificial Sequence: Synthetic oligonucleotide
  Sense strand starting at position 3907 of SEQ ID NO: 586909
guauuaguacaguacuaua

SEQ ID NO: 752971 - RNA, 19 nt, Artificial Sequence
  Description of Artificial Sequence: Synthetic oligonucleotide
  Antisense strand to SEQ ID NO: 752970
uauaguacuguacuaauac

SEQ ID NO: 752972 - RNA, 19 nt, Artificial Sequence
  Description of Artificial Sequence: Synthetic oligonucleotide
  Sense strand starting at position 1 of SEQ ID NO: 586910
gcugcauauggacaaacuu

SEQ ID NO: 752973 - RNA, 19 nt, Artificial Sequence
  Description of Artificial Sequence: Synthetic oligonucleotide
  Antisense strand to SEQ ID NO: 752972
aaguuuguccauaugcagc

SEQ ID NO: 752974 - RNA, 19 nt, Artificial Sequence
  Description of Artificial Sequence: Synthetic oligonucleotide
  Sense strand starting at position 189 of SEQ ID NO: 586910
ccugauggcuaugcuuaga

SEQ ID NO: 752975 - RNA, 19 nt, Artificial Sequence
  Description of Artificial Sequence: Synthetic oligonucleotide
  Antisense strand to SEQ ID NO: 752974
ucuaagcauagccaucagg

SEQ ID NO: 752976 - RNA, 19 nt, Artificial Sequence
  Description of Artificial Sequence: Synthetic oligonucleotide
  Sense strand starting at position 192 of SEQ ID NO: 586910
gauggcuaugcuuagaugu

SEQ ID NO: 752977 - RNA, 19 nt, Artificial Sequence
  Description of Artificial Sequence: Synthetic oligonucleotide
  Antisense strand to SEQ ID NO: 752976
acaucuaagcauagccauc

SEQ ID NO: 752978 - RNA, 19 nt, Artificial Sequence
  Description of Artificial Sequence: Synthetic oligonucleotide
  Sense strand starting at position 207 of SEQ ID NO: 586910
auguuaaagcuuugcuaca

SEQ ID NO: 752979 - RNA, 19 nt, Artificial Sequence
  Description of Artificial Sequence: Synthetic oligonucleotide
  Antisense strand to SEQ ID NO: 752978
uguagcaaagcuuuaacau

SEQ ID NO: 752980 - RNA, 19 nt, Artificial Sequence
  Description of Artificial Sequence: Synthetic oligonucleotide
  Sense strand starting at position 339 of SEQ ID NO: 586910
cuguuagaucagcaaugcu

SEQ ID NO: 752981 - RNA, 19 nt, Artificial Sequence
  Description of Artificial Sequence: Synthetic oligonucleotide
  Antisense strand to SEQ ID NO: 752980
agcauugcugaucuaacag

SEQ ID NO: 752982 - RNA, 19 nt, Artificial Sequence
  Description of Artificial Sequence: Synthetic oligonucleotide
  Sense strand starting at position 342 of SEQ ID NO: 586910
uuagaucagcaaugcugaa

SEQ ID NO: 752983 - RNA, 19 nt, Artificial Sequence
  Description of Artificial Sequence: Synthetic oligonucleotide
  Antisense strand to SEQ ID NO: 752982
uucagcauugcugaucuaa

SEQ ID NO: 752984 - RNA, 19 nt, Artificial Sequence
  Description of Artificial Sequence: Synthetic oligonucleotide
  Sense strand starting at position 354 of SEQ ID NO: 586910
ugcugaaacugcuugacau

SEQ ID NO: 752985 - RNA, 19 nt, Artificial Sequence
  Description of Artificial Sequence: Synthetic oligonucleotide
  Antisense strand to SEQ ID NO: 752984
augucaagcaguuucagca

SEQ ID NO: 752986 - RNA, 19 nt, Artificial Sequence
  Description of Artificial Sequence: Synthetic oligonucleotide
  Sense strand starting at position 355 of SEQ ID NO: 586910
gcugaaacugcuugacauu

SEQ ID NO: 752987 - RNA, 19 nt, Artificial Sequence
  Description of Artificial Sequence: Synthetic oligonucleotide
  Antisense strand to SEQ ID NO: 752986
aaugucaagcaguuucagc

SEQ ID NO: 752988 - RNA, 19 nt, Artificial Sequence
  Description of Artificial Sequence: Synthetic oligonucleotide
  Sense strand starting at position 394 of SEQ ID NO: 586910
agaguuauuugacaacacu

SEQ ID NO: 752989 - RNA, 19 nt, Artificial Sequence
  Description of Artificial Sequence: Synthetic oligonucleotide
  Antisense strand to SEQ ID NO: 752988
aguguugucaaauaacucu

SEQ ID NO: 752990 - RNA, 19 nt, Artificial Sequence
  Description of Artificial Sequence: Synthetic oligonucleotide
  Sense strand starting at position 444 of SEQ ID NO: 586910
ugcgcuuuaagcuugcgau

SEQ ID NO: 752991 - RNA, 19 nt, Artificial Sequence
  Description of Artificial Sequence: Synthetic oligonucleotide
  Antisense strand to SEQ ID NO: 752990
aucgcaagcuuaaagcgca

SEQ ID NO: 752992 - RNA, 19 nt, Artificial Sequence
  Description of Artificial Sequence: Synthetic oligonucleotide
  Sense strand starting at position 446 of SEQ ID NO: 586910
cgcuuuaagcuugcgauca

SEQ ID NO: 752993 - RNA, 19 nt, Artificial Sequence
  Description of Artificial Sequence: Synthetic oligonucleotide
  Antisense strand to SEQ ID NO: 752992
ugaucgcaagcuuaaagcg

SEQ ID NO: 752994 - RNA, 19 nt, Artificial Sequence
  Description of Artificial Sequence: Synthetic oligonucleotide
  Sense strand starting at position 496 of SEQ ID NO: 586910
guugcacuauugucagauc

SEQ ID NO: 752995 - RNA, 19 nt, Artificial Sequence
  Description of Artificial Sequence: Synthetic oligonucleotide
  Antisense strand to SEQ ID NO: 752994
gaucugacaauagugcaac

SEQ ID NO: 752996 - RNA, 19 nt, Artificial Sequence
  Description of Artificial Sequence: Synthetic oligonucleotide
  Sense strand starting at position 504 of SEQ ID NO: 586910
auugucagaucauugugua

SEQ ID NO: 752997 - RNA, 19 nt, Artificial Sequence
  Description of Artificial Sequence: Synthetic oligonucleotide
  Antisense strand to SEQ ID NO: 752996
uacacaaugaucugacaau

SEQ ID NO: 752998 - RNA, 19 nt, Artificial Sequence
  Description of Artificial Sequence: Synthetic oligonucleotide
  Sense strand starting at position 505 of SEQ ID NO: 586910
uugucagaucauuguguau

SEQ ID NO: 752999 - RNA, 19 nt, Artificial Sequence
  Description of Artificial Sequence: Synthetic oligonucleotide
  Antisense strand to SEQ ID NO: 752998
auacacaaugaucugacaa

SEQ ID NO: 753000 - RNA, 19 nt, Artificial Sequence
  Description of Artificial Sequence: Synthetic oligonucleotide
  Sense strand starting at position 528 of SEQ ID NO: 586910
agcugaagugguggaaaca

SEQ ID NO: 753001 - RNA, 19 nt, Artificial Sequence
  Description of Artificial Sequence: Synthetic oligonucleotide
  Antisense strand to SEQ ID NO: 753000
uguuuccaccacuucagcu

SEQ ID NO: 753002 - RNA, 19 nt, Artificial Sequence
  Description of Artificial Sequence: Synthetic oligonucleotide
  Sense strand starting at position 730 of SEQ ID NO: 586910
cuuucagaagggugguauu

SEQ ID NO: 753003 - RNA, 19 nt, Artificial Sequence
  Description of Artificial Sequence: Synthetic oligonucleotide
  Antisense strand to SEQ ID NO: 753002
aauaccacccuucugaaag

SEQ ID NO: 753004 - RNA, 19 nt, Artificial Sequence
  Description of Artificial Sequence: Synthetic oligonucleotide
  Sense strand starting at position 733 of SEQ ID NO: 586910
ucagaagggugguauuuca

SEQ ID NO: 753005 - RNA, 19 nt, Artificial Sequence
  Description of Artificial Sequence: Synthetic oligonucleotide
  Antisense strand to SEQ ID NO: 753004
ugaaauaccacccuucuga

SEQ ID NO: 753006 - RNA, 19 nt, Artificial Sequence
  Description of Artificial Sequence: Synthetic oligonucleotide
  Sense strand starting at position 849 of SEQ ID NO: 586910
ucauuucccuaauagggau

SEQ ID NO: 753007 - RNA, 19 nt, Artificial Sequence
  Description of Artificial Sequence: Synthetic oligonucleotide
  Antisense strand to SEQ ID NO: 753006
aucccuauuagggaaauga

SEQ ID NO: 753008 - RNA, 19 nt, Artificial Sequence
  Description of Artificial Sequence: Synthetic oligonucleotide
  Sense strand starting at position 981 of SEQ ID NO: 586910
ccacgucuaaguggucuaa

SEQ ID NO: 753009 - RNA, 19 nt, Artificial Sequence
  Description of Artificial Sequence: Synthetic oligonucleotide
  Antisense strand to SEQ ID NO: 753008
uuagaccacuuagacgugg

SEQ ID NO: 753010 - RNA, 19 nt, Artificial Sequence
  Description of Artificial Sequence: Synthetic oligonucleotide
  Sense strand starting at position 983 of SEQ ID NO: 586910
acgucuaaguggucuaaca

SEQ ID NO: 753011 - RNA, 19 nt, Artificial Sequence
  Description of Artificial Sequence: Synthetic oligonucleotide
  Antisense strand to SEQ ID NO: 753010
uguuagaccacuuagacgu

SEQ ID NO: 753012 - RNA, 19 nt, Artificial Sequence
  Description of Artificial Sequence: Synthetic oligonucleotide
  Sense strand starting at position 985 of SEQ ID NO: 586910
gucuaaguggucuaacaau

SEQ ID NO: 753013 - RNA, 19 nt, Artificial Sequence
  Description of Artificial Sequence: Synthetic oligonucleotide
  Antisense strand to SEQ ID NO: 753012
auuguuagaccacuuagac

SEQ ID NO: 753014 - RNA, 19 nt, Artificial Sequence
  Description of Artificial Sequence: Synthetic oligonucleotide
  Sense strand starting at position 1079 of SEQ ID NO: 586910
cuaggagaguccucaagau

SEQ ID NO: 753015 - RNA, 19 nt, Artificial Sequence
  Description of Artificial Sequence: Synthetic oligonucleotide
  Antisense strand to SEQ ID NO: 753014
aucuugaggacucuccuag

SEQ ID NO: 753016 - RNA, 19 nt, Artificial Sequence
  Description of Artificial Sequence: Synthetic oligonucleotide
  Sense strand starting at position 2086 of SEQ ID NO: 586910
cgcugagggauccaccuaa

SEQ ID NO: 753017 - RNA, 19 nt, Artificial Sequence
  Description of Artificial Sequence: Synthetic oligonucleotide
  Antisense strand to SEQ ID NO: 753016
uuagguggaucccucagcg

SEQ ID NO: 753018 - RNA, 19 nt, Artificial Sequence
  Description of Artificial Sequence: Synthetic oligonucleotide
  Sense strand starting at position 2393 of SEQ ID NO: 586910
gcaucugcgcguucagcaa

SEQ ID NO: 753019 - RNA, 19 nt, Artificial Sequence
  Description of Artificial Sequence: Synthetic oligonucleotide
  Antisense strand to SEQ ID NO: 753018
uugcugaacgcgcagaugc

SEQ ID NO: 753020 - RNA, 19 nt, Artificial Sequence
  Description of Artificial Sequence: Synthetic oligonucleotide
  Sense strand starting at position 2409 of SEQ ID NO: 586910
caagcuggauuucgggaau

SEQ ID NO: 753021 - RNA, 19 nt, Artificial Sequence
  Description of Artificial Sequence: Synthetic oligonucleotide
  Antisense strand to SEQ ID NO: 753020
auucccgaaauccagcuug

SEQ ID NO: 753022 - RNA, 19 nt, Artificial Sequence
  Description of Artificial Sequence: Synthetic oligonucleotide
  Sense strand starting at position 2421 of SEQ ID NO: 586910
cgggaaugcucaguucaga

SEQ ID NO: 753023 - RNA, 19 nt, Artificial Sequence
  Description of Artificial Sequence: Synthetic oligonucleotide
  Antisense strand to SEQ ID NO: 753022
ucugaacugagcauucccg

SEQ ID NO: 753024 - RNA, 19 nt, Artificial Sequence
  Description of Artificial Sequence: Synthetic oligonucleotide
  Sense strand starting at position 2474 of SEQ ID NO: 586910
uuguuagucgguagucgau

SEQ ID NO: 753025 - RNA, 19 nt, Artificial Sequence
  Description of Artificial Sequence: Synthetic oligonucleotide
  Antisense strand to SEQ ID NO: 753024
aucgacuaccgacuaacaa

SEQ ID NO: 753026 - RNA, 19 nt, Artificial Sequence
  Description of Artificial Sequence: Synthetic oligonucleotide
  Sense strand starting at position 2486 of SEQ ID NO: 586910
agucgauugaugggaagug

SEQ ID NO: 753027 - RNA, 19 nt, Artificial Sequence
  Description of Artificial Sequence: Synthetic oligonucleotide
  Antisense strand to SEQ ID NO: 753026
cacuucccaucaaucgacu

SEQ ID NO: 753028 - RNA, 19 nt, Artificial Sequence
  Description of Artificial Sequence: Synthetic oligonucleotide
  Sense strand starting at position 2523 of SEQ ID NO: 586910
ggugacaagguacguuauu

SEQ ID NO: 753029 - RNA, 19 nt, Artificial Sequence
  Description of Artificial Sequence: Synthetic oligonucleotide
  Antisense strand to SEQ ID NO: 753028
aauaacguaccuugucacc

SEQ ID NO: 753030 - RNA, 19 nt, Artificial Sequence
  Description of Artificial Sequence: Synthetic oligonucleotide
  Sense strand starting at position 2524 of SEQ ID NO: 586910
gugacaagguacguuauua

SEQ ID NO: 753031 - RNA, 19 nt, Artificial Sequence
  Description of Artificial Sequence: Synthetic oligonucleotide
  Antisense strand to SEQ ID NO: 753030
uaauaacguaccuugucac

SEQ ID NO: 753032 - RNA, 19 nt, Artificial Sequence
  Description of Artificial Sequence: Synthetic oligonucleotide
  Sense strand starting at position 2534 of SEQ ID NO: 586910
acguuauuauugcuagauc

SEQ ID NO: 753033 - RNA, 19 nt, Artificial Sequence
  Description of Artificial Sequence: Synthetic oligonucleotide
  Antisense strand to SEQ ID NO: 753032
gaucuagcaauaauaacgu

SEQ ID NO: 753034 - RNA, 19 nt, Artificial Sequence
  Description of Artificial Sequence: Synthetic oligonucleotide
  Sense strand starting at position 2537 of SEQ ID NO: 586910
uuauuauugcuagaucaug

SEQ ID NO: 753035 - RNA, 19 nt, Artificial Sequence
  Description of Artificial Sequence: Synthetic oligonucleotide
  Antisense strand to SEQ ID NO: 753034
caugaucuagcaauaauaa

SEQ ID NO: 753036 - RNA, 19 nt, Artificial Sequence
  Description of Artificial Sequence: Synthetic oligonucleotide
  Sense strand starting at position 2549 of SEQ ID NO: 586910
gaucaugugcuguaaucca

SEQ ID NO: 753037 - RNA, 19 nt, Artificial Sequence
  Description of Artificial Sequence: Synthetic oligonucleotide
  Antisense strand to SEQ ID NO: 753036
uggauuacagcacaugauc

SEQ ID NO: 753038 - RNA, 19 nt, Artificial Sequence
  Description of Artificial Sequence: Synthetic oligonucleotide
  Sense strand starting at position 2557 of SEQ ID NO: 586910
gcuguaauccauugaagga

SEQ ID NO: 753039 - RNA, 19 nt, Artificial Sequence
  Description of Artificial Sequence: Synthetic oligonucleotide
  Antisense strand to SEQ ID NO: 753038
uccuucaauggauuacagc

SEQ ID NO: 753040 - RNA, 19 nt, Artificial Sequence
  Description of Artificial Sequence: Synthetic oligonucleotide
  Sense strand starting at position 2625 of SEQ ID NO: 586910
gugagagucucccuuugga

SEQ ID NO: 753041 - RNA, 19 nt, Artificial Sequence
  Description of Artificial Sequence: Synthetic oligonucleotide
  Antisense strand to SEQ ID NO: 753040
uccaaagggagacucucac

SEQ ID NO: 753042 - RNA, 19 nt, Artificial Sequence
  Description of Artificial Sequence: Synthetic oligonucleotide
  Sense strand starting at position 3335 of SEQ ID NO: 586910
aacguagacuugccaggaa

SEQ ID NO: 753043 - RNA, 19 nt, Artificial Sequence
  Description of Artificial Sequence: Synthetic oligonucleotide
  Antisense strand to SEQ ID NO: 753042
uuccuggcaagucuacguu

SEQ ID NO: 753044 - RNA, 19 nt, Artificial Sequence
  Description of Artificial Sequence: Synthetic oligonucleotide
  Sense strand starting at position 3354 of SEQ ID NO: 586910
aaauucguuggcgauuauu

SEQ ID NO: 753045 - RNA, 19 nt, Artificial Sequence
  Description of Artificial Sequence: Synthetic oligonucleotide
  Antisense strand to SEQ ID NO: 753044
aauaaucgccaacgaauuu

SEQ ID NO: 753046 - RNA, 19 nt, Artificial Sequence
  Description of Artificial Sequence: Synthetic oligonucleotide
  Sense strand starting at position 3357 of SEQ ID NO: 586910
uucguuggcgauuauuuau

SEQ ID NO: 753047 - RNA, 19 nt, Artificial Sequence
  Description of Artificial Sequence: Synthetic oligonucleotide
  Antisense strand to SEQ ID NO: 753046
auaaauaaucgccaacgaa

SEQ ID NO: 753048 - RNA, 19 nt, Artificial Sequence
  Description of Artificial Sequence: Synthetic oligonucleotide
  Sense strand starting at position 3658 of SEQ ID NO: 586910
acauaauuagcugggcgua

SEQ ID NO: 753049 - RNA, 19 nt, Artificial Sequence
  Description of Artificial Sequence: Synthetic oligonucleotide
  Antisense strand to SEQ ID NO: 753048
uacgcccagcuaauuaugu

SEQ ID NO: 753050 - RNA, 19 nt, Artificial Sequence
  Description of Artificial Sequence: Synthetic oligonucleotide
  Sense strand starting at position 3788 of SEQ ID NO: 586910
gggcgacagugccuauuua

SEQ ID NO: 753051 - RNA, 19 nt, Artificial Sequence
  Description of Artificial Sequence: Synthetic oligonucleotide
  Antisense strand to SEQ ID NO: 753050
uaaauaggcacugucgccc

SEQ ID NO: 753052 - RNA, 19 nt, Artificial Sequence
  Description of Artificial Sequence: Synthetic oligonucleotide
  Sense strand starting at position 670 of SEQ ID NO: 586911
agaaccuugucucauaaga

SEQ ID NO: 753053 - RNA, 19 nt, Artificial Sequence
  Description of Artificial Sequence: Synthetic oligonucleotide
  Antisense strand to SEQ ID NO: 753052
ucuuaugagacaagguucu

SEQ ID NO: 753054 - RNA, 19 nt, Artificial Sequence
  Description of Artificial Sequence: Synthetic oligonucleotide
  Sense strand starting at position 753 of SEQ ID NO: 586911
gugauuaucucgucccuuu

SEQ ID NO: 753055 - RNA, 19 nt, Artificial Sequence
  Description of Artificial Sequence: Synthetic oligonucleotide
  Antisense strand to SEQ ID NO: 753054
aaagggacgagauaaucac

SEQ ID NO: 753056 - RNA, 19 nt, Artificial Sequence
  Description of Artificial Sequence: Synthetic oligonucleotide
  Sense strand starting at position 783 of SEQ ID NO: 586911
acuugaaaucauugguuuc

SEQ ID NO: 753057 - RNA, 19 nt, Artificial Sequence
  Description of Artificial Sequence: Synthetic oligonucleotide
  Antisense strand to SEQ ID NO: 753056
gaaaccaaugauuucaagu

SEQ ID NO: 753058 - RNA, 19 nt, Artificial Sequence
  Description of Artificial Sequence: Synthetic oligonucleotide
  Sense strand starting at position 786 of SEQ ID NO: 586911
ugaaaucauugguuuccca

SEQ ID NO: 753059 - RNA, 19 nt, Artificial Sequence
  Description of Artificial Sequence: Synthetic oligonucleotide
  Antisense strand to SEQ ID NO: 753058
ugggaaaccaaugauuuca

SEQ ID NO: 753060 - RNA, 19 nt, Artificial Sequence
  Description of Artificial Sequence: Synthetic oligonucleotide
  Sense strand starting at position 823 of SEQ ID NO: 586911
ucgauugagugccucucau

SEQ ID NO: 753061 - RNA, 19 nt, Artificial Sequence
  Description of Artificial Sequence: Synthetic oligonucleotide
  Antisense strand to SEQ ID NO: 753060
augagaggcacucaaucga

SEQ ID NO: 753062 - RNA, 19 nt, Artificial Sequence
  Description of Artificial Sequence: Synthetic oligonucleotide
  Sense strand starting at position 891 of SEQ ID NO: 586911
gguugcuugagcuguauuu

SEQ ID NO: 753063 - RNA, 19 nt, Artificial Sequence
  Description of Artificial Sequence: Synthetic oligonucleotide
  Antisense strand to SEQ ID NO: 753062
aaauacagcucaagcaacc

SEQ ID NO: 753064 - RNA, 19 nt, Artificial Sequence
  Description of Artificial Sequence: Synthetic oligonucleotide
  Sense strand starting at position 1060 of SEQ ID NO: 586911
aggugagcccuguggugaa

SEQ ID NO: 753065 - RNA, 19 nt, Artificial Sequence
  Description of Artificial Sequence: Synthetic oligonucleotide
  Antisense strand to SEQ ID NO: 753064
uucaccacagggcucaccu

SEQ ID NO: 753066 - RNA, 19 nt, Artificial Sequence
  Description of Artificial Sequence: Synthetic oligonucleotide
  Sense strand starting at position 1636 of SEQ ID NO: 586911
ggucuucugucagugaucu

SEQ ID NO: 753067 - RNA, 19 nt, Artificial Sequence
  Description of Artificial Sequence: Synthetic oligonucleotide
  Antisense strand to SEQ ID NO: 753066
agaucacugacagaagacc

SEQ ID NO: 753068 - RNA, 19 nt, Artificial Sequence
  Description of Artificial Sequence: Synthetic oligonucleotide
  Sense strand starting at position 1637 of SEQ ID NO: 586911
gucuucugucagugaucua

SEQ ID NO: 753069 - RNA, 19 nt, Artificial Sequence
  Description of Artificial Sequence: Synthetic oligonucleotide
  Antisense strand to SEQ ID NO: 753068
uagaucacugacagaagac

SEQ ID NO: 753070 - RNA, 19 nt, Artificial Sequence
  Description of Artificial Sequence: Synthetic oligonucleotide
  Sense strand starting at position 1640 of SEQ ID NO: 586911
uucugucagugaucuacaa

SEQ ID NO: 753071 - RNA, 19 nt, Artificial Sequence
  Description of Artificial Sequence: Synthetic oligonucleotide
  Antisense strand to SEQ ID NO: 753070
uuguagaucacugacagaa

SEQ ID NO: 753072 - RNA, 19 nt, Artificial Sequence
  Description of Artificial Sequence: Synthetic oligonucleotide
  Sense strand starting at position 1689 of SEQ ID NO: 586911
uuucucagugcguuuccua

SEQ ID NO: 753073 - RNA, 19 nt, Artificial Sequence
  Description of Artificial Sequence: Synthetic oligonucleotide
  Antisense strand to SEQ ID NO: 753072
uaggaaacgcacugagaaa

SEQ ID NO: 753074 - RNA, 19 nt, Artificial Sequence
  Description of Artificial Sequence: Synthetic oligonucleotide
  Sense strand starting at position 1715 of SEQ ID NO: 586911
cucuguucuccugggcuua

SEQ ID NO: 753075 - RNA, 19 nt, Artificial Sequence
  Description of Artificial Sequence: Synthetic oligonucleotide
  Antisense strand to SEQ ID NO: 753074
uaagcccaggagaacagag

SEQ ID NO: 753076 - RNA, 19 nt, Artificial Sequence
  Description of Artificial Sequence: Synthetic oligonucleotide
  Sense strand starting at position 1716 of SEQ ID NO: 586911
ucuguucuccugggcuuaa

SEQ ID NO: 753077 - RNA, 19 nt, Artificial Sequence
  Description of Artificial Sequence: Synthetic oligonucleotide
  Antisense strand to SEQ ID NO: 753076
uuaagcccaggagaacaga

SEQ ID NO: 753078 - RNA, 19 nt, Artificial Sequence
  Description of Artificial Sequence: Synthetic oligonucleotide
  Sense strand starting at position 1761 of SEQ ID NO: 586911
acggugagccgggaagaau

SEQ ID NO: 753079 - RNA, 19 nt, Artificial Sequence
  Description of Artificial Sequence: Synthetic oligonucleotide
  Antisense strand to SEQ ID NO: 753078
auucuucccggcucaccgu

SEQ ID NO: 753080 - RNA, 19 nt, Artificial Sequence
  Description of Artificial Sequence: Synthetic oligonucleotide
  Sense strand starting at position 2188 of SEQ ID NO: 586911
aggaauaacgcaggcauua

SEQ ID NO: 753081 - RNA, 19 nt, Artificial Sequence
  Description of Artificial Sequence: Synthetic oligonucleotide
  Antisense strand to SEQ ID NO: 753080
uaaugccugcguuauuccu

SEQ ID NO: 753082 - RNA, 19 nt, Artificial Sequence
  Description of Artificial Sequence: Synthetic oligonucleotide
  Sense strand starting at position 2209 of SEQ ID NO: 586911
uuuccauugcugccgcaaa

SEQ ID NO: 753083 - RNA, 19 nt, Artificial Sequence
  Description of Artificial Sequence: Synthetic oligonucleotide
  Antisense strand to SEQ ID NO: 753082
uuugcggcagcaauggaaa

SEQ ID NO: 753084 - RNA, 19 nt, Artificial Sequence
  Description of Artificial Sequence: Synthetic oligonucleotide
  Sense strand starting at position 2240 of SEQ ID NO: 586911
aauuuagugguucgaagca

SEQ ID NO: 753085 - RNA, 19 nt, Artificial Sequence
  Description of Artificial Sequence: Synthetic oligonucleotide
  Antisense strand to SEQ ID NO: 753084
ugcuucgaaccacuaaauu

SEQ ID NO: 753086 - RNA, 19 nt, Artificial Sequence
  Description of Artificial Sequence: Synthetic oligonucleotide
  Sense strand starting at position 2272 of SEQ ID NO: 586911
acccuacaguauguaaauu

SEQ ID NO: 753087 - RNA, 19 nt, Artificial Sequence
  Description of Artificial Sequence: Synthetic oligonucleotide
  Antisense strand to SEQ ID NO: 753086
aauuuacauacuguagggu

SEQ ID NO: 753088 - RNA, 19 nt, Artificial Sequence
  Description of Artificial Sequence: Synthetic oligonucleotide
  Sense strand starting at position 2284 of SEQ ID NO: 586911
guaaauuagucccacagug

SEQ ID NO: 753089 - RNA, 19 nt, Artificial Sequence
  Description of Artificial Sequence: Synthetic oligonucleotide
  Antisense strand to SEQ ID NO: 753088
cacugugggacuaauuuac

SEQ ID NO: 753090 - RNA, 19 nt, Artificial Sequence
  Description of Artificial Sequence: Synthetic oligonucleotide
  Sense strand starting at position 2299 of SEQ ID NO: 586911
agugcugguuccuuccaga

SEQ ID NO: 753091 - RNA, 19 nt, Artificial Sequence
  Description of Artificial Sequence: Synthetic oligonucleotide
  Antisense strand to SEQ ID NO: 753090
ucuggaaggaaccagcacu

SEQ ID NO: 753092 - RNA, 19 nt, Artificial Sequence
  Description of Artificial Sequence: Synthetic oligonucleotide
  Sense strand starting at position 2394 of SEQ ID NO: 586911
accgguuucgcggaacaca

SEQ ID NO: 753093 - RNA, 19 nt, Artificial Sequence
  Description of Artificial Sequence: Synthetic oligonucleotide
  Antisense strand to SEQ ID NO: 753092
uguguuccgcgaaaccggu

SEQ ID NO: 753094 - RNA, 19 nt, Artificial Sequence
  Description of Artificial Sequence: Synthetic oligonucleotide
  Sense strand starting at position 2862 of SEQ ID NO: 586911
ggucuguguccggaguguu

SEQ ID NO: 753095 - RNA, 19 nt, Artificial Sequence
  Description of Artificial Sequence: Synthetic oligonucleotide
  Antisense strand to SEQ ID NO: 753094
aacacuccggacacagacc

SEQ ID NO: 753096 - RNA, 19 nt, Artificial Sequence
  Description of Artificial Sequence: Synthetic oligonucleotide
  Sense strand starting at position 2863 of SEQ ID NO: 586911
gucuguguccggaguguug

SEQ ID NO: 753097 - RNA, 19 nt, Artificial Sequence
  Description of Artificial Sequence: Synthetic oligonucleotide
  Antisense strand to SEQ ID NO: 753096
caacacuccggacacagac

SEQ ID NO: 753098 - RNA, 19 nt, Artificial Sequence
  Description of Artificial Sequence: Synthetic oligonucleotide
  Sense strand starting at position 2880 of SEQ ID NO: 586911
uggaaucccuguucuagag

SEQ ID NO: 753099 - RNA, 19 nt, Artificial Sequence
  Description of Artificial Sequence: Synthetic oligonucleotide
  Antisense strand to SEQ ID NO: 753098
cucuagaacagggauucca

SEQ ID NO: 753100 - RNA, 19 nt, Artificial Sequence
  Description of Artificial Sequence: Synthetic oligonucleotide
  Sense strand starting at position 2892 of SEQ ID NO: 586911
ucuagagacugcuugcaau

SEQ ID NO: 753101 - RNA, 19 nt, Artificial Sequence
  Description of Artificial Sequence: Synthetic oligonucleotide
  Antisense strand to SEQ ID NO: 753100
auugcaagcagucucuaga

SEQ ID NO: 753102 - RNA, 19 nt, Artificial Sequence
  Description of Artificial Sequence: Synthetic oligonucleotide
  Sense strand starting at position 2902 of SEQ ID NO: 586911
gcuugcaauccuugacuag

SEQ ID NO: 753103 - RNA, 19 nt, Artificial Sequence
  Description of Artificial Sequence: Synthetic oligonucleotide
  Antisense strand to SEQ ID NO: 753102
cuagucaaggauugcaagc

SEQ ID NO: 753104 - RNA, 19 nt, Artificial Sequence
  Description of Artificial Sequence: Synthetic oligonucleotide
  Sense strand starting at position 2903 of SEQ ID NO: 586911
cuugcaauccuugacuagu

SEQ ID NO: 753105 - RNA, 19 nt, Artificial Sequence
  Description of Artificial Sequence: Synthetic oligonucleotide
  Antisense strand to SEQ ID NO: 753104
acuagucaaggauugcaag

SEQ ID NO: 753106 - RNA, 19 nt, Artificial Sequence
  Description of Artificial Sequence: Synthetic oligonucleotide
  Sense strand starting at position 2973 of SEQ ID NO: 586911
agggaaaggucuccaccuu

SEQ ID NO: 753107 - RNA, 19 nt, Artificial Sequence
  Description of Artificial Sequence: Synthetic oligonucleotide
  Antisense strand to SEQ ID NO: 753106
aagguggagaccuuucccu

SEQ ID NO: 753108 - RNA, 19 nt, Artificial Sequence
  Description of Artificial Sequence: Synthetic oligonucleotide
  Sense strand starting at position 3034 of SEQ ID NO: 586911
ggauaaucucucuguugca

SEQ ID NO: 753109 - RNA, 19 nt, Artificial Sequence
  Description of Artificial Sequence: Synthetic oligonucleotide
  Antisense strand to SEQ ID NO: 753108
ugcaacagagagauuaucc

SEQ ID NO: 753110 - RNA, 19 nt, Artificial Sequence
  Description of Artificial Sequence: Synthetic oligonucleotide
  Sense strand starting at position 3047 of SEQ ID NO: 586911
guugcaagauccuuaacuc

SEQ ID NO: 753111 - RNA, 19 nt, Artificial Sequence
  Description of Artificial Sequence: Synthetic oligonucleotide
  Antisense strand to SEQ ID NO: 753110
gaguuaaggaucuugcaac

SEQ ID NO: 753112 - RNA, 19 nt, Artificial Sequence
  Description of Artificial Sequence: Synthetic oligonucleotide
  Sense strand starting at position 3476 of SEQ ID NO: 586911
gcucccaaucuggagaguu

SEQ ID NO: 753113 - RNA, 19 nt, Artificial Sequence
  Description of Artificial Sequence: Synthetic oligonucleotide
  Antisense strand to SEQ ID NO: 753112
aacucuccagauugggagc

SEQ ID NO: 753114 - RNA, 19 nt, Artificial Sequence
  Description of Artificial Sequence: Synthetic oligonucleotide
  Sense strand starting at position 3566 of SEQ ID NO: 586911
ccuccaucugagggauucu

SEQ ID NO: 753115 - RNA, 19 nt, Artificial Sequence
  Description of Artificial Sequence: Synthetic oligonucleotide
  Antisense strand to SEQ ID NO: 753114
agaaucccucagauggagg

SEQ ID NO: 753116 - RNA, 19 nt, Artificial Sequence
  Description of Artificial Sequence: Synthetic oligonucleotide
  Sense strand starting at position 3671 of SEQ ID NO: 586911
gggcaucuuuacuuccauu

SEQ ID NO: 753117 - RNA, 19 nt, Artificial Sequence
  Description of Artificial Sequence: Synthetic oligonucleotide
  Antisense strand to SEQ ID NO: 753116
aauggaaguaaagaugccc

SEQ ID NO: 753118 - RNA, 19 nt, Artificial Sequence
  Description of Artificial Sequence: Synthetic oligonucleotide
  Sense strand starting at position 3707 of SEQ ID NO: 586911
aggacaagguuccaugaaa

SEQ ID NO: 753119 - RNA, 19 nt, Artificial Sequence
  Description of Artificial Sequence: Synthetic oligonucleotide
  Antisense strand to SEQ ID NO: 753118
uuucauggaaccuuguccu

SEQ ID NO: 753120 - RNA, 19 nt, Artificial Sequence
  Description of Artificial Sequence: Synthetic oligonucleotide
  Sense strand starting at position 3747 of SEQ ID NO: 586911
ggauucuuauauucccaga

SEQ ID NO: 753121 - RNA, 19 nt, Artificial Sequence
  Description of Artificial Sequence: Synthetic oligonucleotide
  Antisense strand to SEQ ID NO: 753120
ucugggaauauaagaaucc

SEQ ID NO: 753122 - RNA, 19 nt, Artificial Sequence
  Description of Artificial Sequence: Synthetic oligonucleotide
  Sense strand starting at position 3778 of SEQ ID NO: 586911
caguaacuggaauguucua

SEQ ID NO: 753123 - RNA, 19 nt, Artificial Sequence
  Description of Artificial Sequence: Synthetic oligonucleotide
  Antisense strand to SEQ ID NO: 753122
uagaacauuccaguuacug

SEQ ID NO: 753124 - RNA, 19 nt, Artificial Sequence
  Description of Artificial Sequence: Synthetic oligonucleotide
  Sense strand starting at position 3783 of SEQ ID NO: 586911
acuggaauguucuacaguu

SEQ ID NO: 753125 - RNA, 19 nt, Artificial Sequence
  Description of Artificial Sequence: Synthetic oligonucleotide
  Antisense strand to SEQ ID NO: 753124
aacuguagaacauuccagu

SEQ ID NO: 753126 - RNA, 19 nt, Artificial Sequence
  Description of Artificial Sequence: Synthetic oligonucleotide
  Sense strand starting at position 3826 of SEQ ID NO: 586911
agcaucaaauuaugggaaa

SEQ ID NO: 753127 - RNA, 19 nt, Artificial Sequence
  Description of Artificial Sequence: Synthetic oligonucleotide
  Antisense strand to SEQ ID NO: 753126
uuucccauaauuugaugcu

SEQ ID NO: 753128 - RNA, 19 nt, Artificial Sequence
  Description of Artificial Sequence: Synthetic oligonucleotide
  Sense strand starting at position 3827 of SEQ ID NO: 586911
gcaucaaauuaugggaaau

SEQ ID NO: 753129 - RNA, 19 nt, Artificial Sequence
  Description of Artificial Sequence: Synthetic oligonucleotide
  Antisense strand to SEQ ID NO: 753128
auuucccauaauuugaugc

SEQ ID NO: 753130 - RNA, 19 nt, Artificial Sequence
  Description of Artificial Sequence: Synthetic oligonucleotide
  Sense strand starting at position 3829 of SEQ ID NO: 586911
aucaaauuaugggaaauca

SEQ ID NO: 753131 - RNA, 19 nt, Artificial Sequence
  Description of Artificial Sequence: Synthetic oligonucleotide
  Antisense strand to SEQ ID NO: 753130
ugauuucccauaauuugau

SEQ ID NO: 753132 - RNA, 19 nt, Artificial Sequence
  Description of Artificial Sequence: Synthetic oligonucleotide
  Sense strand starting at position 671 of SEQ ID NO: 586912
agaaccuugucucauaaga

SEQ ID NO: 753133 - RNA, 19 nt, Artificial Sequence
  Description of Artificial Sequence: Synthetic oligonucleotide
  Antisense strand to SEQ ID NO: 753132
ucuuaugagacaagguucu

SEQ ID NO: 753134 - RNA, 19 nt, Artificial Sequence
  Description of Artificial Sequence: Synthetic oligonucleotide
  Sense strand starting at position 754 of SEQ ID NO: 586912
gugauuaucucgucccuuu

SEQ ID NO: 753135 - RNA, 19 nt, Artificial Sequence
  Description of Artificial Sequence: Synthetic oligonucleotide
  Antisense strand to SEQ ID NO: 753134
aaagggacgagauaaucac

SEQ ID NO: 753136 - RNA, 19 nt, Artificial Sequence
  Description of Artificial Sequence: Synthetic oligonucleotide
  Sense strand starting at position 784 of SEQ ID NO: 586912
acuugaaaucauugguuuc

SEQ ID NO: 753137 - RNA, 19 nt, Artificial Sequence
  Description of Artificial Sequence: Synthetic oligonucleotide
  Antisense strand to SEQ ID NO: 753136
gaaaccaaugauuucaagu

SEQ ID NO: 753138 - RNA, 19 nt, Artificial Sequence
  Description of Artificial Sequence: Synthetic oligonucleotide
  Sense strand starting at position 787 of SEQ ID NO: 586912
ugaaaucauugguuuccca

SEQ ID NO: 753139 - RNA, 19 nt, Artificial Sequence
  Description of Artificial Sequence: Synthetic oligonucleotide
  Antisense strand to SEQ ID NO: 753138
ugggaaaccaaugauuuca

SEQ ID NO: 753140 - RNA, 19 nt, Artificial Sequence
  Description of Artificial Sequence: Synthetic oligonucleotide
  Sense strand starting at position 824 of SEQ ID NO: 586912
ucgauugagugccucucau

SEQ ID NO: 753141 - RNA, 19 nt, Artificial Sequence
  Description of Artificial Sequence: Synthetic oligonucleotide
  Antisense strand to SEQ ID NO: 753140
augagaggcacucaaucga

SEQ ID NO: 753142 - RNA, 19 nt, Artificial Sequence
  Description of Artificial Sequence: Synthetic oligonucleotide
  Sense strand starting at position 892 of SEQ ID NO: 586912
gguugcuugagcuguauuu

SEQ ID NO: 753143 - RNA, 19 nt, Artificial Sequence
  Description of Artificial Sequence: Synthetic oligonucleotide
  Antisense strand to SEQ ID NO: 753142
aaauacagcucaagcaacc

SEQ ID NO: 753144 - RNA, 19 nt, Artificial Sequence
  Description of Artificial Sequence: Synthetic oligonucleotide
  Sense strand starting at position 931 of SEQ ID NO: 586912
cuccguuuccagcgcauau

SEQ ID NO: 753145 - RNA, 19 nt, Artificial Sequence
  Description of Artificial Sequence: Synthetic oligonucleotide
  Antisense strand to SEQ ID NO: 753144
auaugcgcuggaaacggag

SEQ ID NO: 753146 - RNA, 19 nt, Artificial Sequence
  Description of Artificial Sequence: Synthetic oligonucleotide
  Sense strand starting at position 1061 of SEQ ID NO: 586912
aggugagcccuguggugaa

SEQ ID NO: 753147 - RNA, 19 nt, Artificial Sequence
  Description of Artificial Sequence: Synthetic oligonucleotide
  Antisense strand to SEQ ID NO: 753146
uucaccacagggcucaccu

SEQ ID NO: 753148 - RNA, 19 nt, Artificial Sequence
  Description of Artificial Sequence: Synthetic oligonucleotide
  Sense strand starting at position 1637 of SEQ ID NO: 586912
ggucuucugucagugaucu

SEQ ID NO: 753149 - RNA, 19 nt, Artificial Sequence
  Description of Artificial Sequence: Synthetic oligonucleotide
  Antisense strand to SEQ ID NO: 753148
agaucacugacagaagacc

SEQ ID NO: 753150 - RNA, 19 nt, Artificial Sequence
  Description of Artificial Sequence: Synthetic oligonucleotide
  Sense strand starting at position 1638 of SEQ ID NO: 586912
gucuucugucagugaucua

SEQ ID NO: 753151 - RNA, 19 nt, Artificial Sequence
  Description of Artificial Sequence: Synthetic oligonucleotide
  Antisense strand to SEQ ID NO: 753150
uagaucacugacagaagac

SEQ ID NO: 753152 - RNA, 19 nt, Artificial Sequence
  Description of Artificial Sequence: Synthetic oligonucleotide
  Sense strand starting at position 1641 of SEQ ID NO: 586912
uucugucagugaucuacaa

SEQ ID NO: 753153 - RNA, 19 nt, Artificial Sequence
  Description of Artificial Sequence: Synthetic oligonucleotide
  Antisense strand to SEQ ID NO: 753152
uuguagaucacugacagaa

SEQ ID NO: 753154 - RNA, 19 nt, Artificial Sequence
  Description of Artificial Sequence: Synthetic oligonucleotide
  Sense strand starting at position 1690 of SEQ ID NO: 586912
uuucucagugcguuuccua

SEQ ID NO: 753155 - RNA, 19 nt, Artificial Sequence
  Description of Artificial Sequence: Synthetic oligonucleotide
  Antisense strand to SEQ ID NO: 753154
uaggaaacgcacugagaaa

SEQ ID NO: 753156 - RNA, 19 nt, Artificial Sequence
  Description of Artificial Sequence: Synthetic oligonucleotide
  Sense strand starting at position 1716 of SEQ ID NO: 586912
cucuguucuccugggcuua

SEQ ID NO: 753157 - RNA, 19 nt, Artificial Sequence
  Description of Artificial Sequence: Synthetic oligonucleotide
  Antisense strand to SEQ ID NO: 753156
uaagcccaggagaacagag

SEQ ID NO: 753158 - RNA, 19 nt, Artificial Sequence
  Description of Artificial Sequence: Synthetic oligonucleotide
  Sense strand starting at position 1717 of SEQ ID NO: 586912
ucuguucuccugggcuuaa

SEQ ID NO: 753159 - RNA, 19 nt, Artificial Sequence
  Description of Artificial Sequence: Synthetic oligonucleotide
  Antisense strand to SEQ ID NO: 753158
uuaagcccaggagaacaga

SEQ ID NO: 753160 - RNA, 19 nt, Artificial Sequence
  Description of Artificial Sequence: Synthetic oligonucleotide
  Sense strand starting at position 2189 of SEQ ID NO: 586912
aggaauaacgcaggcauua

SEQ ID NO: 753161 - RNA, 19 nt, Artificial Sequence
  Description of Artificial Sequence: Synthetic oligonucleotide
  Antisense strand to SEQ ID NO: 753160
uaaugccugcguuauuccu

SEQ ID NO: 753162 - RNA, 19 nt, Artificial Sequence
  Description of Artificial Sequence: Synthetic oligonucleotide
  Sense strand starting at position 2210 of SEQ ID NO: 586912
uuuccauugcugccgcaaa

SEQ ID NO: 753163 - RNA, 19 nt, Artificial Sequence
  Description of Artificial Sequence: Synthetic oligonucleotide
  Antisense strand to SEQ ID NO: 753162
uuugcggcagcaauggaaa

SEQ ID NO: 753164 - RNA, 19 nt, Artificial Sequence
  Description of Artificial Sequence: Synthetic oligonucleotide
  Sense strand starting at position 2241 of SEQ ID NO: 586912
aauuuagugguucgaagca

SEQ ID NO: 753165 - RNA, 19 nt, Artificial Sequence
  Description of Artificial Sequence: Synthetic oligonucleotide
  Antisense strand to SEQ ID NO: 753164
ugcuucgaaccacuaaauu

SEQ ID NO: 753166 - RNA, 19 nt, Artificial Sequence
  Description of Artificial Sequence: Synthetic oligonucleotide
  Sense strand starting at position 2273 of SEQ ID NO: 586912
acccuacaguauguaaauu

SEQ ID NO: 753167 - RNA, 19 nt, Artificial Sequence
  Description of Artificial Sequence: Synthetic oligonucleotide
  Antisense strand to SEQ ID NO: 753166
aauuuacauacuguagggu

SEQ ID NO: 753168 - RNA, 19 nt, Artificial Sequence
  Description of Artificial Sequence: Synthetic oligonucleotide
  Sense strand starting at position 2285 of SEQ ID NO: 586912
guaaauuagucccacagug

SEQ ID NO: 753169 - RNA, 19 nt, Artificial Sequence
  Description of Artificial Sequence: Synthetic oligonucleotide
  Antisense strand to SEQ ID NO: 753168
cacugugggacuaauuuac

SEQ ID NO: 753170 - RNA, 19 nt, Artificial Sequence
  Description of Artificial Sequence: Synthetic oligonucleotide
  Sense strand starting at position 2300 of SEQ ID NO: 586912
agugcugguuccuuccaga

SEQ ID NO: 753171 - RNA, 19 nt, Artificial Sequence
  Description of Artificial Sequence: Synthetic oligonucleotide
  Antisense strand to SEQ ID NO: 753170
ucuggaaggaaccagcacu

SEQ ID NO: 753172 - RNA, 19 nt, Artificial Sequence
  Description of Artificial Sequence: Synthetic oligonucleotide
  Sense strand starting at position 2395 of SEQ ID NO: 586912
accgguuucgcggaacaca

SEQ ID NO: 753173 - RNA, 19 nt, Artificial Sequence
  Description of Artificial Sequence: Synthetic oligonucleotide
  Antisense strand to SEQ ID NO: 753172
uguguuccgcgaaaccggu

SEQ ID NO: 753174 - RNA, 19 nt, Artificial Sequence
  Description of Artificial Sequence: Synthetic oligonucleotide
  Sense strand starting at position 2863 of SEQ ID NO: 586912
ggucuguguccggaguguu

SEQ ID NO: 753175 - RNA, 19 nt, Artificial Sequence
  Description of Artificial Sequence: Synthetic oligonucleotide
  Antisense strand to SEQ ID NO: 753174
aacacuccggacacagacc

SEQ ID NO: 753176 - RNA, 19 nt, Artificial Sequence
  Description of Artificial Sequence: Synthetic oligonucleotide
  Sense strand starting at position 2864 of SEQ ID NO: 586912
gucuguguccggaguguug

SEQ ID NO: 753177 - RNA, 19 nt, Artificial Sequence
  Description of Artificial Sequence: Synthetic oligonucleotide
  Antisense strand to SEQ ID NO: 753176
caacacuccggacacagac

SEQ ID NO: 753178 - RNA, 19 nt, Artificial Sequence
  Description of Artificial Sequence: Synthetic oligonucleotide
  Sense strand starting at position 2881 of SEQ ID NO: 586912
uggaaucccuguucuagag

SEQ ID NO: 753179 - RNA, 19 nt, Artificial Sequence
  Description of Artificial Sequence: Synthetic oligonucleotide
  Antisense strand to SEQ ID NO: 753178
cucuagaacagggauucca

SEQ ID NO: 753180 - RNA, 19 nt, Artificial Sequence
  Description of Artificial Sequence: Synthetic oligonucleotide
  Sense strand starting at position 2893 of SEQ ID NO: 586912
ucuagagacugcuugcaau

SEQ ID NO: 753181 - RNA, 19 nt, Artificial Sequence
  Description of Artificial Sequence: Synthetic oligonucleotide
  Antisense strand to SEQ ID NO: 753180
auugcaagcagucucuaga

SEQ ID NO: 753182 - RNA, 19 nt, Artificial Sequence
  Description of Artificial Sequence: Synthetic oligonucleotide
  Sense strand starting at position 2903 of SEQ ID NO: 586912
gcuugcaauccuugacuag

SEQ ID NO: 753183 - RNA, 19 nt, Artificial Sequence
  Description of Artificial Sequence: Synthetic oligonucleotide
  Antisense strand to SEQ ID NO: 753182
cuagucaaggauugcaagc

SEQ ID NO: 753184 - RNA, 19 nt, Artificial Sequence
  Description of Artificial Sequence: Synthetic oligonucleotide
  Sense strand starting at position 2904 of SEQ ID NO: 586912
cuugcaauccuugacuagu

SEQ ID NO: 753185 - RNA, 19 nt, Artificial Sequence
  Description of Artificial Sequence: Synthetic oligonucleotide
  Antisense strand to SEQ ID NO: 753184
acuagucaaggauugcaag

SEQ ID NO: 753186 - RNA, 19 nt, Artificial Sequence
  Description of Artificial Sequence: Synthetic oligonucleotide
  Sense strand starting at position 2974 of SEQ ID NO: 586912
agggaaaggucuccaccuu

SEQ ID NO: 753187 - RNA, 19 nt, Artificial Sequence
  Description of Artificial Sequence: Synthetic oligonucleotide
  Antisense strand to SEQ ID NO: 753186
aagguggagaccuuucccu

SEQ ID NO: 753188 - RNA, 19 nt, Artificial Sequence
  Description of Artificial Sequence: Synthetic oligonucleotide
  Sense strand starting at position 3035 of SEQ ID NO: 586912
ggauaaucucucuguugca

SEQ ID NO: 753189 - RNA, 19 nt, Artificial Sequence
  Description of Artificial Sequence: Synthetic oligonucleotide
  Antisense strand to SEQ ID NO: 753188
ugcaacagagagauuaucc

SEQ ID NO: 753190 - RNA, 19 nt, Artificial Sequence
  Description of Artificial Sequence: Synthetic oligonucleotide
  Sense strand starting at position 3048 of SEQ ID NO: 586912
guugcaagauccuuaacuc

SEQ ID NO: 753191 - RNA, 19 nt, Artificial Sequence
  Description of Artificial Sequence: Synthetic oligonucleotide
  Antisense strand to SEQ ID NO: 753190
gaguuaaggaucuugcaac

SEQ ID NO: 753192 - RNA, 19 nt, Artificial Sequence
  Description of Artificial Sequence: Synthetic oligonucleotide
  Sense strand starting at position 3204 of SEQ ID NO: 586912
ccaguaugguucuggacac

SEQ ID NO: 753193 - RNA, 19 nt, Artificial Sequence
  Description of Artificial Sequence: Synthetic oligonucleotide
  Antisense strand to SEQ ID NO: 753192
guguccagaaccauacugg

SEQ ID NO: 753194 - RNA, 19 nt, Artificial Sequence
  Description of Artificial Sequence: Synthetic oligonucleotide
  Sense strand starting at position 3477 of SEQ ID NO: 586912
gcucccaaucuggagaguu

SEQ ID NO: 753195 - RNA, 19 nt, Artificial Sequence
  Description of Artificial Sequence: Synthetic oligonucleotide
  Antisense strand to SEQ ID NO: 753194
aacucuccagauugggagc

SEQ ID NO: 753196 - RNA, 19 nt, Artificial Sequence
  Description of Artificial Sequence: Synthetic oligonucleotide
  Sense strand starting at position 3573 of SEQ ID NO: 586912
ucugaaggauucuaaagca

SEQ ID NO: 753197 - RNA, 19 nt, Artificial Sequence
  Description of Artificial Sequence: Synthetic oligonucleotide
  Antisense strand to SEQ ID NO: 753196
ugcuuuagaauccuucaga

SEQ ID NO: 753198 - RNA, 19 nt, Artificial Sequence
  Description of Artificial Sequence: Synthetic oligonucleotide
  Sense strand starting at position 3672 of SEQ ID NO: 586912
gggcaucuuuacuuccauu

SEQ ID NO: 753199 - RNA, 19 nt, Artificial Sequence
  Description of Artificial Sequence: Synthetic oligonucleotide
  Antisense strand to SEQ ID NO: 753198
aauggaaguaaagaugccc

SEQ ID NO: 753200 - RNA, 19 nt, Artificial Sequence
  Description of Artificial Sequence: Synthetic oligonucleotide
  Sense strand starting at position 3708 of SEQ ID NO: 586912
aggacaagguuccaugaaa

SEQ ID NO: 753201 - RNA, 19 nt, Artificial Sequence
  Description of Artificial Sequence: Synthetic oligonucleotide
  Antisense strand to SEQ ID NO: 753200
uuucauggaaccuuguccu

SEQ ID NO: 753202 - RNA, 19 nt, Artificial Sequence
  Description of Artificial Sequence: Synthetic oligonucleotide
  Sense strand starting at position 3748 of SEQ ID NO: 586912
ggauucuuauauucccaga

SEQ ID NO: 753203 - RNA, 19 nt, Artificial Sequence
  Description of Artificial Sequence: Synthetic oligonucleotide
  Antisense strand to SEQ ID NO: 753202
ucugggaauauaagaaucc

SEQ ID NO: 753204 - RNA, 19 nt, Artificial Sequence
  Description of Artificial Sequence: Synthetic oligonucleotide
  Sense strand starting at position 3779 of SEQ ID NO: 586912
caguaacuggaauguucua

SEQ ID NO: 753205 - RNA, 19 nt, Artificial Sequence
  Description of Artificial Sequence: Synthetic oligonucleotide
  Antisense strand to SEQ ID NO: 753204
uagaacauuccaguuacug

SEQ ID NO: 753206 - RNA, 19 nt, Artificial Sequence
  Description of Artificial Sequence: Synthetic oligonucleotide
  Sense strand starting at position 3784 of SEQ ID NO: 586912
acuggaauguucuacaguu

SEQ ID NO: 753207 - RNA, 19 nt, Artificial Sequence
  Description of Artificial Sequence: Synthetic oligonucleotide
  Antisense strand to SEQ ID NO: 753206
aacuguagaacauuccagu

SEQ ID NO: 753208 - RNA, 19 nt, Artificial Sequence
  Description of Artificial Sequence: Synthetic oligonucleotide
  Sense strand starting at position 3827 of SEQ ID NO: 586912
agcaucaaauuaugggaaa

SEQ ID NO: 753209 - RNA, 19 nt, Artificial Sequence
  Description of Artificial Sequence: Synthetic oligonucleotide
  Antisense strand to SEQ ID NO: 753208
uuucccauaauuugaugcu

SEQ ID NO: 753210 - RNA, 19 nt, Artificial Sequence
  Description of Artificial Sequence: Synthetic oligonucleotide
  Sense strand starting at position 3830 of SEQ ID NO: 586912
aucaaauuaugggaaauca

SEQ ID NO: 753211 - RNA, 19 nt, Artificial Sequence
  Description of Artificial Sequence: Synthetic oligonucleotide
  Antisense strand to SEQ ID NO: 753210
ugauuucccauaauuugau

SEQ ID NO: 753212 - RNA, 19 nt, Artificial Sequence
  Description of Artificial Sequence: Synthetic oligonucleotide
  Sense strand starting at position 670 of SEQ ID NO: 586913
agaaccuugucucauaaga

SEQ ID NO: 753213 - RNA, 19 nt, Artificial Sequence
  Description of Artificial Sequence: Synthetic oligonucleotide
  Antisense strand to SEQ ID NO: 753212
ucuuaugagacaagguucu

SEQ ID NO: 753214 - RNA, 19 nt, Artificial Sequence
  Description of Artificial Sequence: Synthetic oligonucleotide
  Sense strand starting at position 753 of SEQ ID NO: 586913
gugauuaucucgucccuuu

SEQ ID NO: 753215 - RNA, 19 nt, Artificial Sequence
  Description of Artificial Sequence: Synthetic oligonucleotide
  Antisense strand to SEQ ID NO: 753214
aaagggacgagauaaucac

SEQ ID NO: 753216 - RNA, 19 nt, Artificial Sequence
  Description of Artificial Sequence: Synthetic oligonucleotide
  Sense strand starting at position 783 of SEQ ID NO: 586913
acuugaaaucauugguuuc

SEQ ID NO: 753217 - RNA, 19 nt, Artificial Sequence
  Description of Artificial Sequence: Synthetic oligonucleotide
  Antisense strand to SEQ ID NO: 753216
gaaaccaaugauuucaagu

SEQ ID NO: 753218 - RNA, 19 nt, Artificial Sequence
  Description of Artificial Sequence: Synthetic oligonucleotide
  Sense strand starting at position 786 of SEQ ID NO: 586913
ugaaaucauugguuuccca

SEQ ID NO: 753219 - RNA, 19 nt, Artificial Sequence
  Description of Artificial Sequence: Synthetic oligonucleotide
  Antisense strand to SEQ ID NO: 753218
ugggaaaccaaugauuuca

SEQ ID NO: 753220 - RNA, 19 nt, Artificial Sequence
  Description of Artificial Sequence: Synthetic oligonucleotide
  Sense strand starting at position 823 of SEQ ID NO: 586913
ucgauugagugccucucau

SEQ ID NO: 753221 - RNA, 19 nt, Artificial Sequence
  Description of Artificial Sequence: Synthetic oligonucleotide
  Antisense strand to SEQ ID NO: 753220
augagaggcacucaaucga

SEQ ID NO: 753222 - RNA, 19 nt, Artificial Sequence
  Description of Artificial Sequence: Synthetic oligonucleotide
  Sense strand starting at position 891 of SEQ ID NO: 586913
gguugcuugagcuguauuu

SEQ ID NO: 753223 - RNA, 19 nt, Artificial Sequence
  Description of Artificial Sequence: Synthetic oligonucleotide
  Antisense strand to SEQ ID NO: 753222
aaauacagcucaagcaacc

SEQ ID NO: 753224 - RNA, 19 nt, Artificial Sequence
  Description of Artificial Sequence: Synthetic oligonucleotide
  Sense strand starting at position 1060 of SEQ ID NO: 586913
aggugagcccuguggugaa

SEQ ID NO: 753225 - RNA, 19 nt, Artificial Sequence
  Description of Artificial Sequence: Synthetic oligonucleotide
  Antisense strand to SEQ ID NO: 753224
uucaccacagggcucaccu

SEQ ID NO: 753226 - RNA, 19 nt, Artificial Sequence
  Description of Artificial Sequence: Synthetic oligonucleotide
  Sense strand starting at position 1636 of SEQ ID NO: 586913
ggucuucugucagugaucu

SEQ ID NO: 753227 - RNA, 19 nt, Artificial Sequence
  Description of Artificial Sequence: Synthetic oligonucleotide
  Antisense strand to SEQ ID NO: 753226
agaucacugacagaagacc

SEQ ID NO: 753228 - RNA, 19 nt, Artificial Sequence
  Description of Artificial Sequence: Synthetic oligonucleotide
  Sense strand starting at position 1637 of SEQ ID NO: 586913
gucuucugucagugaucua

SEQ ID NO: 753229 - RNA, 19 nt, Artificial Sequence
  Description of Artificial Sequence: Synthetic oligonucleotide
  Antisense strand to SEQ ID NO: 753228
uagaucacugacagaagac

SEQ ID NO: 753230 - RNA, 19 nt, Artificial Sequence
  Description of Artificial Sequence: Synthetic oligonucleotide
  Sense strand starting at position 1640 of SEQ ID NO: 586913
uucugucagugaucuacaa

SEQ ID NO: 753231 - RNA, 19 nt, Artificial Sequence
  Description of Artificial Sequence: Synthetic oligonucleotide
  Antisense strand to SEQ ID NO: 753230
uuguagaucacugacagaa

SEQ ID NO: 753232 - RNA, 19 nt, Artificial Sequence
  Description of Artificial Sequence: Synthetic oligonucleotide
  Sense strand starting at position 1689 of SEQ ID NO: 586913
uuucucagugcguuuccua

SEQ ID NO: 753233 - RNA, 19 nt, Artificial Sequence
  Description of Artificial Sequence: Synthetic oligonucleotide
  Antisense strand to SEQ ID NO: 753232
uaggaaacgcacugagaaa

SEQ ID NO: 753234 - RNA, 19 nt, Artificial Sequence
  Description of Artificial Sequence: Synthetic oligonucleotide
  Sense strand starting at position 1715 of SEQ ID NO: 586913
cucuguucuccugggcuua

SEQ ID NO: 753235 - RNA, 19 nt, Artificial Sequence
  Description of Artificial Sequence: Synthetic oligonucleotide
  Antisense strand to SEQ ID NO: 753234
uaagcccaggagaacagag

SEQ ID NO: 753236 - RNA, 19 nt, Artificial Sequence
  Description of Artificial Sequence: Synthetic oligonucleotide
  Sense strand starting at position 1716 of SEQ ID NO: 586913
ucuguucuccugggcuuaa

SEQ ID NO: 753237 - RNA, 19 nt, Artificial Sequence
  Description of Artificial Sequence: Synthetic oligonucleotide
  Antisense strand to SEQ ID NO: 753236
uuaagcccaggagaacaga

SEQ ID NO: 753238 - RNA, 19 nt, Artificial Sequence
  Description of Artificial Sequence: Synthetic oligonucleotide
  Sense strand starting at position 1761 of SEQ ID NO: 586913
acggugagccgggaagaau

SEQ ID NO: 753239 - RNA, 19 nt, Artificial Sequence
  Description of Artificial Sequence: Synthetic oligonucleotide
  Antisense strand to SEQ ID NO: 753238
auucuucccggcucaccgu

SEQ ID NO: 753240 - RNA, 19 nt, Artificial Sequence
  Description of Artificial Sequence: Synthetic oligonucleotide
  Sense strand starting at position 2188 of SEQ ID NO: 586913
aggaauaacgcaggcauua

SEQ ID NO: 753241 - RNA, 19 nt, Artificial Sequence
  Description of Artificial Sequence: Synthetic oligonucleotide
  Antisense strand to SEQ ID NO: 753240
uaaugccugcguuauuccu

SEQ ID NO: 753242 - RNA, 19 nt, Artificial Sequence
  Description of Artificial Sequence: Synthetic oligonucleotide
  Sense strand starting at position 2209 of SEQ ID NO: 586913
uuuccauugcugccgcaaa

SEQ ID NO: 753243 - RNA, 19 nt, Artificial Sequence
  Description of Artificial Sequence: Synthetic oligonucleotide
  Antisense strand to SEQ ID NO: 753242
uuugcggcagcaauggaaa

SEQ ID NO: 753244 - RNA, 19 nt, Artificial Sequence
  Description of Artificial Sequence: Synthetic oligonucleotide
  Sense strand starting at position 2240 of SEQ ID NO: 586913
aauuuagugguucgaagca

SEQ ID NO: 753245 - RNA, 19 nt, Artificial Sequence
  Description of Artificial Sequence: Synthetic oligonucleotide
  Antisense strand to SEQ ID NO: 753244
ugcuucgaaccacuaaauu

SEQ ID NO: 753246 - RNA, 19 nt, Artificial Sequence
  Description of Artificial Sequence: Synthetic oligonucleotide
  Sense strand starting at position 2272 of SEQ ID NO: 586913
acccuacaguauguaaauu

SEQ ID NO: 753247 - RNA, 19 nt, Artificial Sequence
  Description of Artificial Sequence: Synthetic oligonucleotide
  Antisense strand to SEQ ID NO: 753246
aauuuacauacuguagggu

SEQ ID NO: 753248 - RNA, 19 nt, Artificial Sequence
  Description of Artificial Sequence: Synthetic oligonucleotide
  Sense strand starting at position 2284 of SEQ ID NO: 586913
guaaauuagucccacagug

SEQ ID NO: 753249 - RNA, 19 nt, Artificial Sequence
  Description of Artificial Sequence: Synthetic oligonucleotide
  Antisense strand to SEQ ID NO: 753248
cacugugggacuaauuuac

SEQ ID NO: 753250 - RNA, 19 nt, Artificial Sequence
  Description of Artificial Sequence: Synthetic oligonucleotide
  Sense strand starting at position 2299 of SEQ ID NO: 586913
agugcugguuccuuccaga

SEQ ID NO: 753251 - RNA, 19 nt, Artificial Sequence
  Description of Artificial Sequence: Synthetic oligonucleotide
  Antisense strand to SEQ ID NO: 753250
ucuggaaggaaccagcacu

SEQ ID NO: 753252 - RNA, 19 nt, Artificial Sequence
  Description of Artificial Sequence: Synthetic oligonucleotide
  Sense strand starting at position 2394 of SEQ ID NO: 586913
accgguuucgcggaacaca

SEQ ID NO: 753253 - RNA, 19 nt, Artificial Sequence
  Description of Artificial Sequence: Synthetic oligonucleotide
  Antisense strand to SEQ ID NO: 753252
uguguuccgcgaaaccggu

SEQ ID NO: 753254 - RNA, 19 nt, Artificial Sequence
  Description of Artificial Sequence: Synthetic oligonucleotide
  Sense strand starting at position 2862 of SEQ ID NO: 586913
ggucuguguccggaguguu

SEQ ID NO: 753255 - RNA, 19 nt, Artificial Sequence
  Description of Artificial Sequence: Synthetic oligonucleotide
  Antisense strand to SEQ ID NO: 753254
aacacuccggacacagacc

SEQ ID NO: 753256 - RNA, 19 nt, Artificial Sequence
  Description of Artificial Sequence: Synthetic oligonucleotide
  Sense strand starting at position 2863 of SEQ ID NO: 586913
gucuguguccggaguguug

SEQ ID NO: 753257 - RNA, 19 nt, Artificial Sequence
  Description of Artificial Sequence: Synthetic oligonucleotide
  Antisense strand to SEQ ID NO: 753256
caacacuccggacacagac

SEQ ID NO: 753258 - RNA, 19 nt, Artificial Sequence
  Description of Artificial Sequence: Synthetic oligonucleotide
  Sense strand starting at position 2880 of SEQ ID NO: 586913
uggaaucccuguucuagag

SEQ ID NO: 753259 - RNA, 19 nt, Artificial Sequence
  Description of Artificial Sequence: Synthetic oligonucleotide
  Antisense strand to SEQ ID NO: 753258
cucuagaacagggauucca

SEQ ID NO: 753260 - RNA, 19 nt, Artificial Sequence
  Description of Artificial Sequence: Synthetic oligonucleotide
  Sense strand starting at position 2892 of SEQ ID NO: 586913
ucuagagacugcuugcaau

SEQ ID NO: 753261 - RNA, 19 nt, Artificial Sequence
  Description of Artificial Sequence: Synthetic oligonucleotide
  Antisense strand to SEQ ID NO: 753260
auugcaagcagucucuaga

SEQ ID NO: 753262 - RNA, 19 nt, Artificial Sequence
  Description of Artificial Sequence: Synthetic oligonucleotide
  Sense strand starting at position 2902 of SEQ ID NO: 586913
gcuugcaauccuugacuag

SEQ ID NO: 753263 - RNA, 19 nt, Artificial Sequence
  Description of Artificial Sequence: Synthetic oligonucleotide
  Antisense strand to SEQ ID NO: 753262
cuagucaaggauugcaagc

SEQ ID NO: 753264 - RNA, 19 nt, Artificial Sequence
  Description of Artificial Sequence: Synthetic oligonucleotide
  Sense strand starting at position 2903 of SEQ ID NO: 586913
cuugcaauccuugacuagu

SEQ ID NO: 753265 - RNA, 19 nt, Artificial Sequence
  Description of Artificial Sequence: Synthetic oligonucleotide
  Antisense strand to SEQ ID NO: 753264
acuagucaaggauugcaag

SEQ ID NO: 753266 - RNA, 19 nt, Artificial Sequence
  Description of Artificial Sequence: Synthetic oligonucleotide
  Sense strand starting at position 2973 of SEQ ID NO: 586913
agggaaaggucuccaccuu

SEQ ID NO: 753267 - RNA, 19 nt, Artificial Sequence
  Description of Artificial Sequence: Synthetic oligonucleotide
  Antisense strand to SEQ ID NO: 753266
aagguggagaccuuucccu

SEQ ID NO: 753268 - RNA, 19 nt, Artificial Sequence
  Description of Artificial Sequence: Synthetic oligonucleotide
  Sense strand starting at position 3034 of SEQ ID NO: 586913
ggauaaucucucuguugca

SEQ ID NO: 753269 - RNA, 19 nt, Artificial Sequence
  Description of Artificial Sequence: Synthetic oligonucleotide
  Antisense strand to SEQ ID NO: 753268
ugcaacagagagauuaucc

SEQ ID NO: 753270 - RNA, 19 nt, Artificial Sequence
  Description of Artificial Sequence: Synthetic oligonucleotide
  Sense strand starting at position 3047 of SEQ ID NO: 586913
guugcaagauccuuaacuc

SEQ ID NO: 753271 - RNA, 19 nt, Artificial Sequence
  Description of Artificial Sequence: Synthetic oligonucleotide
  Antisense strand to SEQ ID NO: 753270
gaguuaaggaucuugcaac

SEQ ID NO: 753272 - RNA, 19 nt, Artificial Sequence
  Description of Artificial Sequence: Synthetic oligonucleotide
  Sense strand starting at position 3476 of SEQ ID NO: 586913
gcucccaaucuggagaguu

SEQ ID NO: 753273 - RNA, 19 nt, Artificial Sequence
  Description of Artificial Sequence: Synthetic oligonucleotide
  Antisense strand to SEQ ID NO: 753272
aacucuccagauugggagc

SEQ ID NO: 753274 - RNA, 19 nt, Artificial Sequence
  Description of Artificial Sequence: Synthetic oligonucleotide
  Sense strand starting at position 3566 of SEQ ID NO: 586913
ccuccaucugagggauucu

SEQ ID NO: 753275 - RNA, 19 nt, Artificial Sequence
  Description of Artificial Sequence: Synthetic oligonucleotide
  Antisense strand to SEQ ID NO: 753274
agaaucccucagauggagg

SEQ ID NO: 753276 - RNA, 19 nt, Artificial Sequence
  Description of Artificial Sequence: Synthetic oligonucleotide
  Sense strand starting at position 3671 of SEQ ID NO: 586913
gggcaucuuuacuuccauu

SEQ ID NO: 753277 - RNA, 19 nt, Artificial Sequence
  Description of Artificial Sequence: Synthetic oligonucleotide
  Antisense strand to SEQ ID NO: 753276
aauggaaguaaagaugccc

SEQ ID NO: 753278 - RNA, 19 nt, Artificial Sequence
  Description of Artificial Sequence: Synthetic oligonucleotide
  Sense strand starting at position 3707 of SEQ ID NO: 586913
aggacaagguuccaugaaa

SEQ ID NO: 753279 - RNA, 19 nt, Artificial Sequence
  Description of Artificial Sequence: Synthetic oligonucleotide
  Antisense strand to SEQ ID NO: 753278
uuucauggaaccuuguccu

SEQ ID NO: 753280 - RNA, 19 nt, Artificial Sequence
  Description of Artificial Sequence: Synthetic oligonucleotide
  Sense strand starting at position 3747 of SEQ ID NO: 586913
ggauucuuauauucccaga

SEQ ID NO: 753281 - RNA, 19 nt, Artificial Sequence
  Description of Artificial Sequence: Synthetic oligonucleotide
  Antisense strand to SEQ ID NO: 753280
ucugggaauauaagaaucc

SEQ ID NO: 753282 - RNA, 19 nt, Artificial Sequence
  Description of Artificial Sequence: Synthetic oligonucleotide
  Sense strand starting at position 3778 of SEQ ID NO: 586913
caguaacuggaauguucua

SEQ ID NO: 753283 - RNA, 19 nt, Artificial Sequence
  Description of Artificial Sequence: Synthetic oligonucleotide
  Antisense strand to SEQ ID NO: 753282
uagaacauuccaguuacug

SEQ ID NO: 753284 - RNA, 19 nt, Artificial Sequence
  Description of Artificial Sequence: Synthetic oligonucleotide
  Sense strand starting at position 3783 of SEQ ID NO: 586913
acuggaauguucuacaguu

SEQ ID NO: 753285 - RNA, 19 nt, Artificial Sequence
  Description of Artificial Sequence: Synthetic oligonucleotide
  Antisense strand to SEQ ID NO: 753284
aacuguagaacauuccagu

SEQ ID NO: 753286 - RNA, 19 nt, Artificial Sequence
  Description of Artificial Sequence: Synthetic oligonucleotide
  Sense strand starting at position 3826 of SEQ ID NO: 586913
agcaucaaauuaugggaaa

SEQ ID NO: 753287 - RNA, 19 nt, Artificial Sequence
  Description of Artificial Sequence: Synthetic oligonucleotide
  Antisense strand to SEQ ID NO: 753286
uuucccauaauuugaugcu

SEQ ID NO: 753288 - RNA, 19 nt, Artificial Sequence
  Description of Artificial Sequence: Synthetic oligonucleotide
  Sense strand starting at position 3827 of SEQ ID NO: 586913
gcaucaaauuaugggaaau

SEQ ID NO: 753289 - RNA, 19 nt, Artificial Sequence
  Description of Artificial Sequence: Synthetic oligonucleotide
  Antisense strand to SEQ ID NO: 753288
auuucccauaauuugaugc

SEQ ID NO: 753290 - RNA, 19 nt, Artificial Sequence
  Description of Artificial Sequence: Synthetic oligonucleotide
  Sense strand starting at position 3829 of SEQ ID NO: 586913
aucaaauuaugggaaauca

SEQ ID NO: 753291 - RNA, 19 nt, Artificial Sequence
  Description of Artificial Sequence: Synthetic oligonucleotide
  Antisense strand to SEQ ID NO: 753290
ugauuucccauaauuugau

SEQ ID NO: 753292 - RNA, 19 nt, Artificial Sequence
  Description of Artificial Sequence: Synthetic oligonucleotide
  Sense strand starting at position 671 of SEQ ID NO: 586914
agaaccuugucucauaaga

SEQ ID NO: 753293 - RNA, 19 nt, Artificial Sequence
  Description of Artificial Sequence: Synthetic oligonucleotide
  Antisense strand to SEQ ID NO: 753292
ucuuaugagacaagguucu

SEQ ID NO: 753294 - RNA, 19 nt, Artificial Sequence
  Description of Artificial Sequence: Synthetic oligonucleotide
  Sense strand starting at position 754 of SEQ ID NO: 586914
gugauuaucucgucccuuu

SEQ ID NO: 753295 - RNA, 19 nt, Artificial Sequence
  Description of Artificial Sequence: Synthetic oligonucleotide
  Antisense strand to SEQ ID NO: 753294
aaagggacgagauaaucac

SEQ ID NO: 753296 - RNA, 19 nt, Artificial Sequence
  Description of Artificial Sequence: Synthetic oligonucleotide
  Sense strand starting at position 784 of SEQ ID NO: 586914
acuugaaaucauugguuuc

SEQ ID NO: 753297 - RNA, 19 nt, Artificial Sequence
  Description of Artificial Sequence: Synthetic oligonucleotide
  Antisense strand to SEQ ID NO: 753296
gaaaccaaugauuucaagu

SEQ ID NO: 753298 - RNA, 19 nt, Artificial Sequence
  Description of Artificial Sequence: Synthetic oligonucleotide
  Sense strand starting at position 787 of SEQ ID NO: 586914
ugaaaucauugguuuccca

SEQ ID NO: 753299 - RNA, 19 nt, Artificial Sequence
  Description of Artificial Sequence: Synthetic oligonucleotide
  Antisense strand to SEQ ID NO: 753298
ugggaaaccaaugauuuca

SEQ ID NO: 753300 - RNA, 19 nt, Artificial Sequence
  Description of Artificial Sequence: Synthetic oligonucleotide
  Sense strand starting at position 824 of SEQ ID NO: 586914
ucgauugagugccucucau

SEQ ID NO: 753301 - RNA, 19 nt, Artificial Sequence
  Description of Artificial Sequence: Synthetic oligonucleotide
  Antisense strand to SEQ ID NO: 753300
augagaggcacucaaucga

SEQ ID NO: 753302 - RNA, 19 nt, Artificial Sequence
  Description of Artificial Sequence: Synthetic oligonucleotide
  Sense strand starting at position 892 of SEQ ID NO: 586914
gguugcuugagcuguauuu

SEQ ID NO: 753303 - RNA, 19 nt, Artificial Sequence
  Description of Artificial Sequence: Synthetic oligonucleotide
  Antisense strand to SEQ ID NO: 753302
aaauacagcucaagcaacc

SEQ ID NO: 753304 - RNA, 19 nt, Artificial Sequence
  Description of Artificial Sequence: Synthetic oligonucleotide
  Sense strand starting at position 931 of SEQ ID NO: 586914
cuccguuuccagcgcauau

SEQ ID NO: 753305 - RNA, 19 nt, Artificial Sequence
  Description of Artificial Sequence: Synthetic oligonucleotide
  Antisense strand to SEQ ID NO: 753304
auaugcgcuggaaacggag

SEQ ID NO: 753306 - RNA, 19 nt, Artificial Sequence
  Description of Artificial Sequence: Synthetic oligonucleotide
  Sense strand starting at position 1061 of SEQ ID NO: 586914
aggugagcccuguggugaa

SEQ ID NO: 753307 - RNA, 19 nt, Artificial Sequence
  Description of Artificial Sequence: Synthetic oligonucleotide
  Antisense strand to SEQ ID NO: 753306
uucaccacagggcucaccu

SEQ ID NO: 753308 - RNA, 19 nt, Artificial Sequence
  Description of Artificial Sequence: Synthetic oligonucleotide
  Sense strand starting at position 1637 of SEQ ID NO: 586914
ggucuucugucagugaucu

SEQ ID NO: 753309 - RNA, 19 nt, Artificial Sequence
  Description of Artificial Sequence: Synthetic oligonucleotide
  Antisense strand to SEQ ID NO: 753308
agaucacugacagaagacc

SEQ ID NO: 753310 - RNA, 19 nt, Artificial Sequence
  Description of Artificial Sequence: Synthetic oligonucleotide
  Sense strand starting at position 1638 of SEQ ID NO: 586914
gucuucugucagugaucua

SEQ ID NO: 753311 - RNA, 19 nt, Artificial Sequence
  Description of Artificial Sequence: Synthetic oligonucleotide
  Antisense strand to SEQ ID NO: 753310
uagaucacugacagaagac

SEQ ID NO: 753312 - RNA, 19 nt, Artificial Sequence
  Description of Artificial Sequence: Synthetic oligonucleotide
  Sense strand starting at position 1641 of SEQ ID NO: 586914
uucugucagugaucuacaa

SEQ ID NO: 753313 - RNA, 19 nt, Artificial Sequence
  Description of Artificial Sequence: Synthetic oligonucleotide
  Antisense strand to SEQ ID NO: 753312
uuguagaucacugacagaa

SEQ ID NO: 753314 - RNA, 19 nt, Artificial Sequence
  Description of Artificial Sequence: Synthetic oligonucleotide
  Sense strand starting at position 1690 of SEQ ID NO: 586914
uuucucagugcguuuccua

SEQ ID NO: 753315 - RNA, 19 nt, Artificial Sequence
  Description of Artificial Sequence: Synthetic oligonucleotide
  Antisense strand to SEQ ID NO: 753314
uaggaaacgcacugagaaa

SEQ ID NO: 753316 - RNA, 19 nt, Artificial Sequence
  Description of Artificial Sequence: Synthetic oligonucleotide
  Sense strand starting at position 1716 of SEQ ID NO: 586914
cucuguucuccugggcuua

SEQ ID NO: 753317 - RNA, 19 nt, Artificial Sequence
  Description of Artificial Sequence: Synthetic oligonucleotide
  Antisense strand to SEQ ID NO: 753316
uaagcccaggagaacagag

SEQ ID NO: 753318 - RNA, 19 nt, Artificial Sequence
  Description of Artificial Sequence: Synthetic oligonucleotide
  Sense strand starting at position 1717 of SEQ ID NO: 586914
ucuguucuccugggcuuaa

SEQ ID NO: 753319 - RNA, 19 nt, Artificial Sequence
  Description of Artificial Sequence: Synthetic oligonucleotide
  Antisense strand to SEQ ID NO: 753318
uuaagcccaggagaacaga

SEQ ID NO: 753320 - RNA, 19 nt, Artificial Sequence
  Description of Artificial Sequence: Synthetic oligonucleotide
  Sense strand starting at position 2189 of SEQ ID NO: 586914
aggaauaacgcaggcauua

SEQ ID NO: 753321 - RNA, 19 nt, Artificial Sequence
  Description of Artificial Sequence: Synthetic oligonucleotide
  Antisense strand to SEQ ID NO: 753320
uaaugccugcguuauuccu

SEQ ID NO: 753322 - RNA, 19 nt, Artificial Sequence
  Description of Artificial Sequence: Synthetic oligonucleotide
  Sense strand starting at position 2210 of SEQ ID NO: 586914
uuuccauugcugccgcaaa

SEQ ID NO: 753323 - RNA, 19 nt, Artificial Sequence
  Description of Artificial Sequence: Synthetic oligonucleotide
  Antisense strand to SEQ ID NO: 753322
uuugcggcagcaauggaaa

SEQ ID NO: 753324 - RNA, 19 nt, Artificial Sequence
  Description of Artificial Sequence: Synthetic oligonucleotide
  Sense strand starting at position 2241 of SEQ ID NO: 586914
aauuuagugguucgaagca

SEQ ID NO: 753325 - RNA, 19 nt, Artificial Sequence
  Description of Artificial Sequence: Synthetic oligonucleotide
  Antisense strand to SEQ ID NO: 753324
ugcuucgaaccacuaaauu

SEQ ID NO: 753326 - RNA, 19 nt, Artificial Sequence
  Description of Artificial Sequence: Synthetic oligonucleotide
  Sense strand starting at position 2273 of SEQ ID NO: 586914
acccuacaguauguaaauu

SEQ ID NO: 753327 - RNA, 19 nt, Artificial Sequence
  Description of Artificial Sequence: Synthetic oligonucleotide
  Antisense strand to SEQ ID NO: 753326
aauuuacauacuguagggu

SEQ ID NO: 753328 - RNA, 19 nt, Artificial Sequence
  Description of Artificial Sequence: Synthetic oligonucleotide
  Sense strand starting at position 2285 of SEQ ID NO: 586914
guaaauuagucccacagug

SEQ ID NO: 753329 - RNA, 19 nt, Artificial Sequence
  Description of Artificial Sequence: Synthetic oligonucleotide
  Antisense strand to SEQ ID NO: 753328
cacugugggacuaauuuac

SEQ ID NO: 753330 - RNA, 19 nt, Artificial Sequence
  Description of Artificial Sequence: Synthetic oligonucleotide
  Sense strand starting at position 2300 of SEQ ID NO: 586914
agugcugguuccuuccaga

SEQ ID NO: 753331 - RNA, 19 nt, Artificial Sequence
  Description of Artificial Sequence: Synthetic oligonucleotide
  Antisense strand to SEQ ID NO: 753330
ucuggaaggaaccagcacu

SEQ ID NO: 753332 - RNA, 19 nt, Artificial Sequence
  Description of Artificial Sequence: Synthetic oligonucleotide
  Sense strand starting at position 2395 of SEQ ID NO: 586914
accgguuucgcggaacaca

SEQ ID NO: 753333 - RNA, 19 nt, Artificial Sequence
  Description of Artificial Sequence: Synthetic oligonucleotide
  Antisense strand to SEQ ID NO: 753332
uguguuccgcgaaaccggu

SEQ ID NO: 753334 - RNA, 19 nt, Artificial Sequence
  Description of Artificial Sequence: Synthetic oligonucleotide
  Sense strand starting at position 2863 of SEQ ID NO: 586914
ggucuguguccggaguguu

SEQ ID NO: 753335 - RNA, 19 nt, Artificial Sequence
  Description of Artificial Sequence: Synthetic oligonucleotide
  Antisense strand to SEQ ID NO: 753334
aacacuccggacacagacc

SEQ ID NO: 753336 - RNA, 19 nt, Artificial Sequence
  Description of Artificial Sequence: Synthetic oligonucleotide
  Sense strand starting at position 2864 of SEQ ID NO: 586914
gucuguguccggaguguug

SEQ ID NO: 753337 - RNA, 19 nt, Artificial Sequence
  Description of Artificial Sequence: Synthetic oligonucleotide
  Antisense strand to SEQ ID NO: 753336
caacacuccggacacagac

SEQ ID NO: 753338 - RNA, 19 nt, Artificial Sequence
  Description of Artificial Sequence: Synthetic oligonucleotide
  Sense strand starting at position 2881 of SEQ ID NO: 586914
uggaaucccuguucuagag

SEQ ID NO: 753339 - RNA, 19 nt, Artificial Sequence
  Description of Artificial Sequence: Synthetic oligonucleotide
  Antisense strand to SEQ ID NO: 753338
cucuagaacagggauucca

SEQ ID NO: 753340 - RNA, 19 nt, Artificial Sequence
  Description of Artificial Sequence: Synthetic oligonucleotide
  Sense strand starting at position 2893 of SEQ ID NO: 586914
ucuagagacugcuugcaau

SEQ ID NO: 753341 - RNA, 19 nt, Artificial Sequence
  Description of Artificial Sequence: Synthetic oligonucleotide
  Antisense strand to SEQ ID NO: 753340
auugcaagcagucucuaga

SEQ ID NO: 753342 - RNA, 19 nt, Artificial Sequence
  Description of Artificial Sequence: Synthetic oligonucleotide
  Sense strand starting at position 2903 of SEQ ID NO: 586914
gcuugcaauccuugacuag

SEQ ID NO: 753343 - RNA, 19 nt, Artificial Sequence
  Description of Artificial Sequence: Synthetic oligonucleotide
  Antisense strand to SEQ ID NO: 753342
cuagucaaggauugcaagc

SEQ ID NO: 753344 - RNA, 19 nt, Artificial Sequence
  Description of Artificial Sequence: Synthetic oligonucleotide
  Sense strand starting at position 2904 of SEQ ID NO: 586914
cuugcaauccuugacuagu

SEQ ID NO: 753345 - RNA, 19 nt, Artificial Sequence
  Description of Artificial Sequence: Synthetic oligonucleotide
  Antisense strand to SEQ ID NO: 753344
acuagucaaggauugcaag

SEQ ID NO: 753346 - RNA, 19 nt, Artificial Sequence
  Description of Artificial Sequence: Synthetic oligonucleotide
  Sense strand starting at position 2974 of SEQ ID NO: 586914
agggaaaggucuccaccuu

SEQ ID NO: 753347 - RNA, 19 nt, Artificial Sequence
  Description of Artificial Sequence: Synthetic oligonucleotide
  Antisense strand to SEQ ID NO: 753346
aagguggagaccuuucccu

SEQ ID NO: 753348 - RNA, 19 nt, Artificial Sequence
  Description of Artificial Sequence: Synthetic oligonucleotide
  Sense strand starting at position 3035 of SEQ ID NO: 586914
ggauaaucucucuguugca

SEQ ID NO: 753349 - RNA, 19 nt, Artificial Sequence
  Description of Artificial Sequence: Synthetic oligonucleotide
  Antisense strand to SEQ ID NO: 753348
ugcaacagagagauuaucc

SEQ ID NO: 753350 - RNA, 19 nt, Artificial Sequence
  Description of Artificial Sequence: Synthetic oligonucleotide
  Sense strand starting at position 3048 of SEQ ID NO: 586914
guugcaagauccuuaacuc

SEQ ID NO: 753351 - RNA, 19 nt, Artificial Sequence
  Description of Artificial Sequence: Synthetic oligonucleotide
  Antisense strand to SEQ ID NO: 753350
gaguuaaggaucuugcaac

SEQ ID NO: 753352 - RNA, 19 nt, Artificial Sequence
  Description of Artificial Sequence: Synthetic oligonucleotide
  Sense strand starting at position 3204 of SEQ ID NO: 586914
ccaguaugguucuggacac

SEQ ID NO: 753353 - RNA, 19 nt, Artificial Sequence
  Description of Artificial Sequence: Synthetic oligonucleotide
  Antisense strand to SEQ ID NO: 753352
guguccagaaccauacugg

SEQ ID NO: 753354 - RNA, 19 nt, Artificial Sequence
  Description of Artificial Sequence: Synthetic oligonucleotide
  Sense strand starting at position 3477 of SEQ ID NO: 586914
gcucccaaucuggagaguu

SEQ ID NO: 753355 - RNA, 19 nt, Artificial Sequence
  Description of Artificial Sequence: Synthetic oligonucleotide
  Antisense strand to SEQ ID NO: 753354
aacucuccagauugggagc

SEQ ID NO: 753356 - RNA, 19 nt, Artificial Sequence
  Description of Artificial Sequence: Synthetic oligonucleotide
  Sense strand starting at position 3573 of SEQ ID NO: 586914
ucugaaggauucuaaagca

SEQ ID NO: 753357 - RNA, 19 nt, Artificial Sequence
  Description of Artificial Sequence: Synthetic oligonucleotide
  Antisense strand to SEQ ID NO: 753356
ugcuuuagaauccuucaga

SEQ ID NO: 753358 - RNA, 19 nt, Artificial Sequence
  Description of Artificial Sequence: Synthetic oligonucleotide
  Sense strand starting at position 3672 of SEQ ID NO: 586914
gggcaucuuuacuuccauu

SEQ ID NO: 753359 - RNA, 19 nt, Artificial Sequence
  Description of Artificial Sequence: Synthetic oligonucleotide
  Antisense strand to SEQ ID NO: 753358
aauggaaguaaagaugccc

SEQ ID NO: 753360 - RNA, 19 nt, Artificial Sequence
  Description of Artificial Sequence: Synthetic oligonucleotide
  Sense strand starting at position 3708 of SEQ ID NO: 586914
aggacaagguuccaugaaa

SEQ ID NO: 753361 - RNA, 19 nt, Artificial Sequence
  Description of Artificial Sequence: Synthetic oligonucleotide
  Antisense strand to SEQ ID NO: 753360
uuucauggaaccuuguccu

SEQ ID NO: 753362 - RNA, 19 nt, Artificial Sequence
  Description of Artificial Sequence: Synthetic oligonucleotide
  Sense strand starting at position 3748 of SEQ ID NO: 586914
ggauucuuauauucccaga

SEQ ID NO: 753363 - RNA, 19 nt, Artificial Sequence
  Description of Artificial Sequence: Synthetic oligonucleotide
  Antisense strand to SEQ ID NO: 753362
ucugggaauauaagaaucc

SEQ ID NO: 753364 - RNA, 19 nt, Artificial Sequence
  Description of Artificial Sequence: Synthetic oligonucleotide
  Sense strand starting at position 3779 of SEQ ID NO: 586914
caguaacuggaauguucua

SEQ ID NO: 753365 - RNA, 19 nt, Artificial Sequence
  Description of Artificial Sequence: Synthetic oligonucleotide
  Antisense strand to SEQ ID NO: 753364
uagaacauuccaguuacug

SEQ ID NO: 753366 - RNA, 19 nt, Artificial Sequence
  Description of Artificial Sequence: Synthetic oligonucleotide
  Sense strand starting at position 3784 of SEQ ID NO: 586914
acuggaauguucuacaguu

SEQ ID NO: 753367 - RNA, 19 nt, Artificial Sequence
  Description of Artificial Sequence: Synthetic oligonucleotide
  Antisense strand to SEQ ID NO: 753366
aacuguagaacauuccagu

SEQ ID NO: 753368 - RNA, 19 nt, Artificial Sequence
  Description of Artificial Sequence: Synthetic oligonucleotide
  Sense strand starting at position 3827 of SEQ ID NO: 586914
agcaucaaauuaugggaaa

SEQ ID NO: 753369 - RNA, 19 nt, Artificial Sequence
  Description of Artificial Sequence: Synthetic oligonucleotide
  Antisense strand to SEQ ID NO: 753368
uuucccauaauuugaugcu

SEQ ID NO: 753370 - RNA, 19 nt, Artificial Sequence
  Description of Artificial Sequence: Synthetic oligonucleotide
  Sense strand starting at position 3830 of SEQ ID NO: 586914
aucaaauuaugggaaauca

SEQ ID NO: 753371 - RNA, 19 nt, Artificial Sequence
  Description of Artificial Sequence: Synthetic oligonucleotide
  Antisense strand to SEQ ID NO: 753370
ugauuucccauaauuugau

SEQ ID NO: 753372 - RNA, 19 nt, Artificial Sequence
  Description of Artificial Sequence: Synthetic oligonucleotide
  Sense strand starting at position 5 of SEQ ID NO: 586915
cggauaccauauuacuuua

SEQ ID NO: 753373 - RNA, 19 nt, Artificial Sequence
  Description of Artificial Sequence: Synthetic oligonucleotide
  Antisense strand to SEQ ID NO: 753372
uaaaguaauaugguauccg

SEQ ID NO: 753374 - RNA, 19 nt, Artificial Sequence
  Description of Artificial Sequence: Synthetic oligonucleotide
  Sense strand starting at position 75 of SEQ ID NO: 586915
ugaagaaggucuucuugcu

SEQ ID NO: 753375 - RNA, 19 nt, Artificial Sequence
  Description of Artificial Sequence: Synthetic oligonucleotide
  Antisense strand to SEQ ID NO: 753374
agcaagaagaccuucuuca

SEQ ID NO: 753376 - RNA, 19 nt, Artificial Sequence
  Description of Artificial Sequence: Synthetic oligonucleotide
  Sense strand starting at position 80 of SEQ ID NO: 586915
aaggucuucuugcuagaua

SEQ ID NO: 753377 - RNA, 19 nt, Artificial Sequence
  Description of Artificial Sequence: Synthetic oligonucleotide
  Antisense strand to SEQ ID NO: 753376
uaucuagcaagaagaccuu

SEQ ID NO: 753378 - RNA, 19 nt, Artificial Sequence
  Description of Artificial Sequence: Synthetic oligonucleotide
  Sense strand starting at position 83 of SEQ ID NO: 586915
gucuucuugcuagauaaac

SEQ ID NO: 753379 - RNA, 19 nt, Artificial Sequence
  Description of Artificial Sequence: Synthetic oligonucleotide
  Antisense strand to SEQ ID NO: 753378
guuuaucuagcaagaagac

SEQ ID NO: 753380 - RNA, 19 nt, Artificial Sequence
  Description of Artificial Sequence: Synthetic oligonucleotide
  Sense strand starting at position 132 of SEQ ID NO: 586915
gucacugugaguuauugca

SEQ ID NO: 753381 - RNA, 19 nt, Artificial Sequence
  Description of Artificial Sequence: Synthetic oligonucleotide
  Antisense strand to SEQ ID NO: 753380
ugcaauaacucacagugac

SEQ ID NO: 753382 - RNA, 19 nt, Artificial Sequence
  Description of Artificial Sequence: Synthetic oligonucleotide
  Sense strand starting at position 134 of SEQ ID NO: 586915
cacugugaguuauugcauu

SEQ ID NO: 753383 - RNA, 19 nt, Artificial Sequence
  Description of Artificial Sequence: Synthetic oligonucleotide
  Antisense strand to SEQ ID NO: 753382
aaugcaauaacucacagug

SEQ ID NO: 753384 - RNA, 19 nt, Artificial Sequence
  Description of Artificial Sequence: Synthetic oligonucleotide
  Sense strand starting at position 159 of SEQ ID NO: 586915
cuggaauaauuaucuguau

SEQ ID NO: 753385 - RNA, 19 nt, Artificial Sequence
  Description of Artificial Sequence: Synthetic oligonucleotide
  Antisense strand to SEQ ID NO: 753384
auacagauaauuauuccag

SEQ ID NO: 753386 - RNA, 19 nt, Artificial Sequence
  Description of Artificial Sequence: Synthetic oligonucleotide
  Sense strand starting at position 267 of SEQ ID NO: 586915
ucugauucuuaagaggaau

SEQ ID NO: 753387 - RNA, 19 nt, Artificial Sequence
  Description of Artificial Sequence: Synthetic oligonucleotide
  Antisense strand to SEQ ID NO: 753386
auuccucuuaagaaucaga

SEQ ID NO: 753388 - RNA, 19 nt, Artificial Sequence
  Description of Artificial Sequence: Synthetic oligonucleotide
  Sense strand starting at position 298 of SEQ ID NO: 586915
ugauuaggagucugaugga

SEQ ID NO: 753389 - RNA, 19 nt, Artificial Sequence
  Description of Artificial Sequence: Synthetic oligonucleotide
  Antisense strand to SEQ ID NO: 753388
uccaucagacuccuaauca

SEQ ID NO: 753390 - RNA, 19 nt, Artificial Sequence
  Description of Artificial Sequence: Synthetic oligonucleotide
  Sense strand starting at position 301 of SEQ ID NO: 586915
uuaggagucugauggagga

SEQ ID NO: 753391 - RNA, 19 nt, Artificial Sequence
  Description of Artificial Sequence: Synthetic oligonucleotide
  Antisense strand to SEQ ID NO: 753390
uccuccaucagacuccuaa

SEQ ID NO: 753392 - RNA, 19 nt, Artificial Sequence
  Description of Artificial Sequence: Synthetic oligonucleotide
  Sense strand starting at position 305 of SEQ ID NO: 586915
gagucugauggaggaaagu

SEQ ID NO: 753393 - RNA, 19 nt, Artificial Sequence
  Description of Artificial Sequence: Synthetic oligonucleotide
  Antisense strand to SEQ ID NO: 753392
acuuuccuccaucagacuc

SEQ ID NO: 753394 - RNA, 19 nt, Artificial Sequence
  Description of Artificial Sequence: Synthetic oligonucleotide
  Sense strand starting at position 350 of SEQ ID NO: 586915
agaaguuccuaagaaauug

SEQ ID NO: 753395 - RNA, 19 nt, Artificial Sequence
  Description of Artificial Sequence: Synthetic oligonucleotide
  Antisense strand to SEQ ID NO: 753394
caauuucuuaggaacuucu

SEQ ID NO: 753396 - RNA, 19 nt, Artificial Sequence
  Description of Artificial Sequence: Synthetic oligonucleotide
  Sense strand starting at position 361 of SEQ ID NO: 586915
agaaauugaugcuuagggu

SEQ ID NO: 753397 - RNA, 19 nt, Artificial Sequence
  Description of Artificial Sequence: Synthetic oligonucleotide
  Antisense strand to SEQ ID NO: 753396
acccuaagcaucaauuucu

SEQ ID NO: 753398 - RNA, 19 nt, Artificial Sequence
  Description of Artificial Sequence: Synthetic oligonucleotide
  Sense strand starting at position 362 of SEQ ID NO: 586915
gaaauugaugcuuaggguu

SEQ ID NO: 753399 - RNA, 19 nt, Artificial Sequence
  Description of Artificial Sequence: Synthetic oligonucleotide
  Antisense strand to SEQ ID NO: 753398
aacccuaagcaucaauuuc

SEQ ID NO: 753400 - RNA, 19 nt, Artificial Sequence
  Description of Artificial Sequence: Synthetic oligonucleotide
  Sense strand starting at position 449 of SEQ ID NO: 586915
ucugaauacuaggcuuacu

SEQ ID NO: 753401 - RNA, 19 nt, Artificial Sequence
  Description of Artificial Sequence: Synthetic oligonucleotide
  Antisense strand to SEQ ID NO: 753400
aguaagccuaguauucaga

SEQ ID NO: 753402 - RNA, 19 nt, Artificial Sequence
  Description of Artificial Sequence: Synthetic oligonucleotide
  Sense strand starting at position 532 of SEQ ID NO: 586915
gacguuaucucagcucauu

SEQ ID NO: 753403 - RNA, 19 nt, Artificial Sequence
  Description of Artificial Sequence: Synthetic oligonucleotide
  Antisense strand to SEQ ID NO: 753402
aaugagcugagauaacguc

SEQ ID NO: 753404 - RNA, 19 nt, Artificial Sequence
  Description of Artificial Sequence: Synthetic oligonucleotide
  Sense strand starting at position 1001 of SEQ ID NO: 586915
ucaacuaacgugugaaaug

SEQ ID NO: 753405 - RNA, 19 nt, Artificial Sequence
  Description of Artificial Sequence: Synthetic oligonucleotide
  Antisense strand to SEQ ID NO: 753404
cauuucacacguuaguuga

SEQ ID NO: 753406 - RNA, 19 nt, Artificial Sequence
  Description of Artificial Sequence: Synthetic oligonucleotide
  Sense strand starting at position 1330 of SEQ ID NO: 586915
cacagauuuggcuggcgca

SEQ ID NO: 753407 - RNA, 19 nt, Artificial Sequence
  Description of Artificial Sequence: Synthetic oligonucleotide
  Antisense strand to SEQ ID NO: 753406
ugcgccagccaaaucugug

SEQ ID NO: 753408 - RNA, 19 nt, Artificial Sequence
  Description of Artificial Sequence: Synthetic oligonucleotide
  Sense strand starting at position 1331 of SEQ ID NO: 586915
acagauuuggcuggcgcaa

SEQ ID NO: 753409 - RNA, 19 nt, Artificial Sequence
  Description of Artificial Sequence: Synthetic oligonucleotide
  Antisense strand to SEQ ID NO: 753408
uugcgccagccaaaucugu

SEQ ID NO: 753410 - RNA, 19 nt, Artificial Sequence
  Description of Artificial Sequence: Synthetic oligonucleotide
  Sense strand starting at position 2048 of SEQ ID NO: 586915
ccucucugcgccuaucaaa

SEQ ID NO: 753411 - RNA, 19 nt, Artificial Sequence
  Description of Artificial Sequence: Synthetic oligonucleotide
  Antisense strand to SEQ ID NO: 753410
uuugauaggcgcagagagg

SEQ ID NO: 753412 - RNA, 19 nt, Artificial Sequence
  Description of Artificial Sequence: Synthetic oligonucleotide
  Sense strand starting at position 2393 of SEQ ID NO: 586915
gggccuaaguacuaagaag

SEQ ID NO: 753413 - RNA, 19 nt, Artificial Sequence
  Description of Artificial Sequence: Synthetic oligonucleotide
  Antisense strand to SEQ ID NO: 753412
cuucuuaguacuuaggccc

SEQ ID NO: 753414 - RNA, 19 nt, Artificial Sequence
  Description of Artificial Sequence: Synthetic oligonucleotide
  Sense strand starting at position 2488 of SEQ ID NO: 586915
cucguagaaucuccuucuu

SEQ ID NO: 753415 - RNA, 19 nt, Artificial Sequence
  Description of Artificial Sequence: Synthetic oligonucleotide
  Antisense strand to SEQ ID NO: 753414
aagaaggagauucuacgag

SEQ ID NO: 753416 - RNA, 19 nt, Artificial Sequence
  Description of Artificial Sequence: Synthetic oligonucleotide
  Sense strand starting at position 2510 of SEQ ID NO: 586915
gcgucuagugccgacauuu

SEQ ID NO: 753417 - RNA, 19 nt, Artificial Sequence
  Description of Artificial Sequence: Synthetic oligonucleotide
  Antisense strand to SEQ ID NO: 753416
aaaugucggcacuagacgc

SEQ ID NO: 753418 - RNA, 19 nt, Artificial Sequence
  Description of Artificial Sequence: Synthetic oligonucleotide
  Sense strand starting at position 2828 of SEQ ID NO: 586915
ugggucagguccucugaca

SEQ ID NO: 753419 - RNA, 19 nt, Artificial Sequence
  Description of Artificial Sequence: Synthetic oligonucleotide
  Antisense strand to SEQ ID NO: 753418
ugucagaggaccugaccca

SEQ ID NO: 753420 - RNA, 19 nt, Artificial Sequence
  Description of Artificial Sequence: Synthetic oligonucleotide
  Sense strand starting at position 2940 of SEQ ID NO: 586915
cacagugcuguacauagaa

SEQ ID NO: 753421 - RNA, 19 nt, Artificial Sequence
  Description of Artificial Sequence: Synthetic oligonucleotide
  Antisense strand to SEQ ID NO: 753420
uucuauguacagcacugug

SEQ ID NO: 753422 - RNA, 19 nt, Artificial Sequence
  Description of Artificial Sequence: Synthetic oligonucleotide
  Sense strand starting at position 2955 of SEQ ID NO: 586915
agaacagguucucaauaaa

SEQ ID NO: 753423 - RNA, 19 nt, Artificial Sequence
  Description of Artificial Sequence: Synthetic oligonucleotide
  Antisense strand to SEQ ID NO: 753422
uuuauugagaaccuguucu

SEQ ID NO: 753424 - RNA, 19 nt, Artificial Sequence
  Description of Artificial Sequence: Synthetic oligonucleotide
  Sense strand starting at position 2965 of SEQ ID NO: 586915
cucaauaaauguuucucga

SEQ ID NO: 753425 - RNA, 19 nt, Artificial Sequence
  Description of Artificial Sequence: Synthetic oligonucleotide
  Antisense strand to SEQ ID NO: 753424
ucgagaaacauuuauugag

SEQ ID NO: 753426 - RNA, 19 nt, Artificial Sequence
  Description of Artificial Sequence: Synthetic oligonucleotide
  Sense strand starting at position 3072 of SEQ ID NO: 586915
uuugaaguuucugucaaag

SEQ ID NO: 753427 - RNA, 19 nt, Artificial Sequence
  Description of Artificial Sequence: Synthetic oligonucleotide
  Antisense strand to SEQ ID NO: 753426
cuuugacagaaacuucaaa

SEQ ID NO: 753428 - RNA, 19 nt, Artificial Sequence
  Description of Artificial Sequence: Synthetic oligonucleotide
  Sense strand starting at position 3074 of SEQ ID NO: 586915
ugaaguuucugucaaagaa

SEQ ID NO: 753429 - RNA, 19 nt, Artificial Sequence
  Description of Artificial Sequence: Synthetic oligonucleotide
  Antisense strand to SEQ ID NO: 753428
uucuuugacagaaacuuca

SEQ ID NO: 753430 - RNA, 19 nt, Artificial Sequence
  Description of Artificial Sequence: Synthetic oligonucleotide
  Sense strand starting at position 3081 of SEQ ID NO: 586915
ucugucaaagaaugucaga

SEQ ID NO: 753431 - RNA, 19 nt, Artificial Sequence
  Description of Artificial Sequence: Synthetic oligonucleotide
  Antisense strand to SEQ ID NO: 753430
ucugacauucuuugacaga

SEQ ID NO: 753432 - RNA, 19 nt, Artificial Sequence
  Description of Artificial Sequence: Synthetic oligonucleotide
  Sense strand starting at position 3112 of SEQ ID NO: 586915
uuguguggcuaucucuauu

SEQ ID NO: 753433 - RNA, 19 nt, Artificial Sequence
  Description of Artificial Sequence: Synthetic oligonucleotide
  Antisense strand to SEQ ID NO: 753432
aauagagauagccacacaa

SEQ ID NO: 753434 - RNA, 19 nt, Artificial Sequence
  Description of Artificial Sequence: Synthetic oligonucleotide
  Sense strand starting at position 3147 of SEQ ID NO: 586915
ccuguuaaugcagggcaua

SEQ ID NO: 753435 - RNA, 19 nt, Artificial Sequence
  Description of Artificial Sequence: Synthetic oligonucleotide
  Antisense strand to SEQ ID NO: 753434
uaugcccugcauuaacagg

SEQ ID NO: 753436 - RNA, 19 nt, Artificial Sequence
  Description of Artificial Sequence: Synthetic oligonucleotide
  Sense strand starting at position 3161 of SEQ ID NO: 586915
gcauacuguuacucuugaa

SEQ ID NO: 753437 - RNA, 19 nt, Artificial Sequence
  Description of Artificial Sequence: Synthetic oligonucleotide
  Antisense strand to SEQ ID NO: 753436
uucaagaguaacaguaugc

SEQ ID NO: 753438 - RNA, 19 nt, Artificial Sequence
  Description of Artificial Sequence: Synthetic oligonucleotide
  Sense strand starting at position 3165 of SEQ ID NO: 586915
acuguuacucuugaauguu

SEQ ID NO: 753439 - RNA, 19 nt, Artificial Sequence
  Description of Artificial Sequence: Synthetic oligonucleotide
  Antisense strand to SEQ ID NO: 753438
aacauucaagaguaacagu

SEQ ID NO: 753440 - RNA, 19 nt, Artificial Sequence
  Description of Artificial Sequence: Synthetic oligonucleotide
  Sense strand starting at position 3190 of SEQ ID NO: 586915
acgcacguuuguguaauaa

SEQ ID NO: 753441 - RNA, 19 nt, Artificial Sequence
  Description of Artificial Sequence: Synthetic oligonucleotide
  Antisense strand to SEQ ID NO: 753440
uuauuacacaaacgugcgu

SEQ ID NO: 753442 - RNA, 19 nt, Artificial Sequence
  Description of Artificial Sequence: Synthetic oligonucleotide
  Sense strand starting at position 3210 of SEQ ID NO: 586915
guuguaaauuccuaauuuc

SEQ ID NO: 753443 - RNA, 19 nt, Artificial Sequence
  Description of Artificial Sequence: Synthetic oligonucleotide
  Antisense strand to SEQ ID NO: 753442
gaaauuaggaauuuacaac

SEQ ID NO: 753444 - RNA, 19 nt, Artificial Sequence
  Description of Artificial Sequence: Synthetic oligonucleotide
  Sense strand starting at position 3217 of SEQ ID NO: 586915
auuccuaauuucugagguu

SEQ ID NO: 753445 - RNA, 19 nt, Artificial Sequence
  Description of Artificial Sequence: Synthetic oligonucleotide
  Antisense strand to SEQ ID NO: 753444
aaccucagaaauuaggaau

SEQ ID NO: 753446 - RNA, 19 nt, Artificial Sequence
  Description of Artificial Sequence: Synthetic oligonucleotide
  Sense strand starting at position 3218 of SEQ ID NO: 586915
uuccuaauuucugagguuu

SEQ ID NO: 753447 - RNA, 19 nt, Artificial Sequence
  Description of Artificial Sequence: Synthetic oligonucleotide
  Antisense strand to SEQ ID NO: 753446
aaaccucagaaauuaggaa

SEQ ID NO: 753448 - RNA, 19 nt, Artificial Sequence
  Description of Artificial Sequence: Synthetic oligonucleotide
  Sense strand starting at position 3308 of SEQ ID NO: 586915
cuacuauucuguuuaguag

SEQ ID NO: 753449 - RNA, 19 nt, Artificial Sequence
  Description of Artificial Sequence: Synthetic oligonucleotide
  Antisense strand to SEQ ID NO: 753448
cuacuaaacagaauaguag

SEQ ID NO: 753450 - RNA, 19 nt, Artificial Sequence
  Description of Artificial Sequence: Synthetic oligonucleotide
  Sense strand starting at position 3311 of SEQ ID NO: 586915
cuauucuguuuaguagaau

SEQ ID NO: 753451 - RNA, 19 nt, Artificial Sequence
  Description of Artificial Sequence: Synthetic oligonucleotide
  Antisense strand to SEQ ID NO: 753450
auucuacuaaacagaauag

SEQ ID NO: 753452 - RNA, 19 nt, Artificial Sequence
  Description of Artificial Sequence: Synthetic oligonucleotide
  Sense strand starting at position 180 of SEQ ID NO: 586916
uuagucucuggugauaugu

SEQ ID NO: 753453 - RNA, 19 nt, Artificial Sequence
  Description of Artificial Sequence: Synthetic oligonucleotide
  Antisense strand to SEQ ID NO: 753452
acauaucaccagagacuaa

SEQ ID NO: 753454 - RNA, 19 nt, Artificial Sequence
  Description of Artificial Sequence: Synthetic oligonucleotide
  Sense strand starting at position 315 of SEQ ID NO: 586916
gagaacugggccugaacau

SEQ ID NO: 753455 - RNA, 19 nt, Artificial Sequence
  Description of Artificial Sequence: Synthetic oligonucleotide
  Antisense strand to SEQ ID NO: 753454
auguucaggcccaguucuc

SEQ ID NO: 753456 - RNA, 19 nt, Artificial Sequence
  Description of Artificial Sequence: Synthetic oligonucleotide
  Sense strand starting at position 515 of SEQ ID NO: 586916
gaugucacucuuggagaaa

SEQ ID NO: 753457 - RNA, 19 nt, Artificial Sequence
  Description of Artificial Sequence: Synthetic oligonucleotide
  Antisense strand to SEQ ID NO: 753456
uuucuccaagagugacauc

SEQ ID NO: 753458 - RNA, 19 nt, Artificial Sequence
  Description of Artificial Sequence: Synthetic oligonucleotide
  Sense strand starting at position 764 of SEQ ID NO: 586916
uuugauuccguauacuuua

SEQ ID NO: 753459 - RNA, 19 nt, Artificial Sequence
  Description of Artificial Sequence: Synthetic oligonucleotide
  Antisense strand to SEQ ID NO: 753458
uaaaguauacggaaucaaa

SEQ ID NO: 753460 - RNA, 19 nt, Artificial Sequence
  Description of Artificial Sequence: Synthetic oligonucleotide
  Sense strand starting at position 799 of SEQ ID NO: 586916
uuugguucugagcaucuua

SEQ ID NO: 753461 - RNA, 19 nt, Artificial Sequence
  Description of Artificial Sequence: Synthetic oligonucleotide
  Antisense strand to SEQ ID NO: 753460
uaagaugcucagaaccaaa

SEQ ID NO: 753462 - RNA, 19 nt, Artificial Sequence
  Description of Artificial Sequence: Synthetic oligonucleotide
  Sense strand starting at position 806 of SEQ ID NO: 586916
cugagcaucuuaguaggaa

SEQ ID NO: 753463 - RNA, 19 nt, Artificial Sequence
  Description of Artificial Sequence: Synthetic oligonucleotide
  Antisense strand to SEQ ID NO: 753462
uuccuacuaagaugcucag

SEQ ID NO: 753464 - RNA, 19 nt, Artificial Sequence
  Description of Artificial Sequence: Synthetic oligonucleotide
  Sense strand starting at position 809 of SEQ ID NO: 586916
agcaucuuaguaggaaaca

SEQ ID NO: 753465 - RNA, 19 nt, Artificial Sequence
  Description of Artificial Sequence: Synthetic oligonucleotide
  Antisense strand to SEQ ID NO: 753464
uguuuccuacuaagaugcu

SEQ ID NO: 753466 - RNA, 19 nt, Artificial Sequence
  Description of Artificial Sequence: Synthetic oligonucleotide
  Sense strand starting at position 873 of SEQ ID NO: 586916
gguguuaaacuguaggguu

SEQ ID NO: 753467 - RNA, 19 nt, Artificial Sequence
  Description of Artificial Sequence: Synthetic oligonucleotide
  Antisense strand to SEQ ID NO: 753466
aacccuacaguuuaacacc

SEQ ID NO: 753468 - RNA, 19 nt, Artificial Sequence
  Description of Artificial Sequence: Synthetic oligonucleotide
  Sense strand starting at position 1141 of SEQ ID NO: 586916
gcuaccuauuucuuagagu

SEQ ID NO: 753469 - RNA, 19 nt, Artificial Sequence
  Description of Artificial Sequence: Synthetic oligonucleotide
  Antisense strand to SEQ ID NO: 753468
acucuaagaaauagguagc

SEQ ID NO: 753470 - RNA, 19 nt, Artificial Sequence
  Description of Artificial Sequence: Synthetic oligonucleotide
  Sense strand starting at position 1144 of SEQ ID NO: 586916
accuauuucuuagaguaga

SEQ ID NO: 753471 - RNA, 19 nt, Artificial Sequence
  Description of Artificial Sequence: Synthetic oligonucleotide
  Antisense strand to SEQ ID NO: 753470
ucuacucuaagaaauaggu

SEQ ID NO: 753472 - RNA, 19 nt, Artificial Sequence
  Description of Artificial Sequence: Synthetic oligonucleotide
  Sense strand starting at position 1155 of SEQ ID NO: 586916
agaguagaugguggaaguu

SEQ ID NO: 753473 - RNA, 19 nt, Artificial Sequence
  Description of Artificial Sequence: Synthetic oligonucleotide
  Antisense strand to SEQ ID NO: 753472
aacuuccaccaucuacucu

SEQ ID NO: 753474 - RNA, 19 nt, Artificial Sequence
  Description of Artificial Sequence: Synthetic oligonucleotide
  Sense strand starting at position 1433 of SEQ ID NO: 586916
guaggaaucuugcuaggua

SEQ ID NO: 753475 - RNA, 19 nt, Artificial Sequence
  Description of Artificial Sequence: Synthetic oligonucleotide
  Antisense strand to SEQ ID NO: 753474
uaccuagcaagauuccuac

SEQ ID NO: 753476 - RNA, 19 nt, Artificial Sequence
  Description of Artificial Sequence: Synthetic oligonucleotide
  Sense strand starting at position 1687 of SEQ ID NO: 586916
agcaacaaauagucuagaa

SEQ ID NO: 753477 - RNA, 19 nt, Artificial Sequence
  Description of Artificial Sequence: Synthetic oligonucleotide
  Antisense strand to SEQ ID NO: 753476
uucuagacuauuuguugcu

SEQ ID NO: 753478 - RNA, 19 nt, Artificial Sequence
  Description of Artificial Sequence: Synthetic oligonucleotide
  Sense strand starting at position 1709 of SEQ ID NO: 586916
cuaggcuuagaauacuauu

SEQ ID NO: 753479 - RNA, 19 nt, Artificial Sequence
  Description of Artificial Sequence: Synthetic oligonucleotide
  Antisense strand to SEQ ID NO: 753478
aauaguauucuaagccuag

SEQ ID NO: 753480 - RNA, 19 nt, Artificial Sequence
  Description of Artificial Sequence: Synthetic oligonucleotide
  Sense strand starting at position 1744 of SEQ ID NO: 586916
auuugaagcuucuaauuga

SEQ ID NO: 753481 - RNA, 19 nt, Artificial Sequence
  Description of Artificial Sequence: Synthetic oligonucleotide
  Antisense strand to SEQ ID NO: 753480
ucaauuagaagcuucaaau

SEQ ID NO: 753482 - RNA, 19 nt, Artificial Sequence
  Description of Artificial Sequence: Synthetic oligonucleotide
  Sense strand starting at position 1832 of SEQ ID NO: 586916
guacuuacccaguagucuu

SEQ ID NO: 753483 - RNA, 19 nt, Artificial Sequence
  Description of Artificial Sequence: Synthetic oligonucleotide
  Antisense strand to SEQ ID NO: 753482
aagacuacuggguaaguac

SEQ ID NO: 753484 - RNA, 19 nt, Artificial Sequence
  Description of Artificial Sequence: Synthetic oligonucleotide
  Sense strand starting at position 1970 of SEQ ID NO: 586916
aacggaagucuauguauuc

SEQ ID NO: 753485 - RNA, 19 nt, Artificial Sequence
  Description of Artificial Sequence: Synthetic oligonucleotide
  Antisense strand to SEQ ID NO: 753484
gaauacauagacuuccguu

SEQ ID NO: 753486 - RNA, 19 nt, Artificial Sequence
  Description of Artificial Sequence: Synthetic oligonucleotide
  Sense strand starting at position 2009 of SEQ ID NO: 586916
agcucuaauuggcucagaa

SEQ ID NO: 753487 - RNA, 19 nt, Artificial Sequence
  Description of Artificial Sequence: Synthetic oligonucleotide
  Antisense strand to SEQ ID NO: 753486
uucugagccaauuagagcu

SEQ ID NO: 753488 - RNA, 19 nt, Artificial Sequence
  Description of Artificial Sequence: Synthetic oligonucleotide
  Sense strand starting at position 2011 of SEQ ID NO: 586916
cucuaauuggcucagaaac

SEQ ID NO: 753489 - RNA, 19 nt, Artificial Sequence
  Description of Artificial Sequence: Synthetic oligonucleotide
  Antisense strand to SEQ ID NO: 753488
guuucugagccaauuagag

SEQ ID NO: 753490 - RNA, 19 nt, Artificial Sequence
  Description of Artificial Sequence: Synthetic oligonucleotide
  Sense strand starting at position 2065 of SEQ ID NO: 586916
ggaagaauauagguuuggu

SEQ ID NO: 753491 - RNA, 19 nt, Artificial Sequence
  Description of Artificial Sequence: Synthetic oligonucleotide
  Antisense strand to SEQ ID NO: 753490
accaaaccuauauucuucc

SEQ ID NO: 753492 - RNA, 19 nt, Artificial Sequence
  Description of Artificial Sequence: Synthetic oligonucleotide
  Sense strand starting at position 2142 of SEQ ID NO: 586916
uuuaauaagcuauggcuau

SEQ ID NO: 753493 - RNA, 19 nt, Artificial Sequence
  Description of Artificial Sequence: Synthetic oligonucleotide
  Antisense strand to SEQ ID NO: 753492
auagccauagcuuauuaaa

SEQ ID NO: 753494 - RNA, 19 nt, Artificial Sequence
  Description of Artificial Sequence: Synthetic oligonucleotide
  Sense strand starting at position 2244 of SEQ ID NO: 586916
cccauugucuuguuauaga

SEQ ID NO: 753495 - RNA, 19 nt, Artificial Sequence
  Description of Artificial Sequence: Synthetic oligonucleotide
  Antisense strand to SEQ ID NO: 753494
ucuauaacaagacaauggg

SEQ ID NO: 753496 - RNA, 19 nt, Artificial Sequence
  Description of Artificial Sequence: Synthetic oligonucleotide
  Sense strand starting at position 2271 of SEQ ID NO: 586916
gggauauucuggcuuaauu

SEQ ID NO: 753497 - RNA, 19 nt, Artificial Sequence
  Description of Artificial Sequence: Synthetic oligonucleotide
  Antisense strand to SEQ ID NO: 753496
aauuaagccagaauauccc

SEQ ID NO: 753498 - RNA, 19 nt, Artificial Sequence
  Description of Artificial Sequence: Synthetic oligonucleotide
  Sense strand starting at position 2283 of SEQ ID NO: 586916
cuuaauugaucccuuggga

SEQ ID NO: 753499 - RNA, 19 nt, Artificial Sequence
  Description of Artificial Sequence: Synthetic oligonucleotide
  Antisense strand to SEQ ID NO: 753498
ucccaagggaucaauuaag

SEQ ID NO: 753500 - RNA, 19 nt, Artificial Sequence
  Description of Artificial Sequence: Synthetic oligonucleotide
  Sense strand starting at position 2296 of SEQ ID NO: 586916
uugggaauaugaguuuaca

SEQ ID NO: 753501 - RNA, 19 nt, Artificial Sequence
  Description of Artificial Sequence: Synthetic oligonucleotide
  Antisense strand to SEQ ID NO: 753500
uguaaacucauauucccaa

SEQ ID NO: 753502 - RNA, 19 nt, Artificial Sequence
  Description of Artificial Sequence: Synthetic oligonucleotide
  Sense strand starting at position 2346 of SEQ ID NO: 586916
ggagauacucuaggucaau

SEQ ID NO: 753503 - RNA, 19 nt, Artificial Sequence
  Description of Artificial Sequence: Synthetic oligonucleotide
  Antisense strand to SEQ ID NO: 753502
auugaccuagaguaucucc

SEQ ID NO: 753504 - RNA, 19 nt, Artificial Sequence
  Description of Artificial Sequence: Synthetic oligonucleotide
  Sense strand starting at position 2347 of SEQ ID NO: 586916
gagauacucuaggucaaua

SEQ ID NO: 753505 - RNA, 19 nt, Artificial Sequence
  Description of Artificial Sequence: Synthetic oligonucleotide
  Antisense strand to SEQ ID NO: 753504
uauugaccuagaguaucuc

SEQ ID NO: 753506 - RNA, 19 nt, Artificial Sequence
  Description of Artificial Sequence: Synthetic oligonucleotide
  Sense strand starting at position 2386 of SEQ ID NO: 586916
ggaguuacuguccauuccu

SEQ ID NO: 753507 - RNA, 19 nt, Artificial Sequence
  Description of Artificial Sequence: Synthetic oligonucleotide
  Antisense strand to SEQ ID NO: 753506
aggaauggacaguaacucc

SEQ ID NO: 753508 - RNA, 19 nt, Artificial Sequence
  Description of Artificial Sequence: Synthetic oligonucleotide
  Sense strand starting at position 2414 of SEQ ID NO: 586916
aaguguaaagaaugucuuu

SEQ ID NO: 753509 - RNA, 19 nt, Artificial Sequence
  Description of Artificial Sequence: Synthetic oligonucleotide
  Antisense strand to SEQ ID NO: 753508
aaagacauucuuuacacuu

SEQ ID NO: 753510 - RNA, 19 nt, Artificial Sequence
  Description of Artificial Sequence: Synthetic oligonucleotide
  Sense strand starting at position 2438 of SEQ ID NO: 586916
auaggacuucuuugagcac

SEQ ID NO: 753511 - RNA, 19 nt, Artificial Sequence
  Description of Artificial Sequence: Synthetic oligonucleotide
  Antisense strand to SEQ ID NO: 753510
gugcucaaagaaguccuau

SEQ ID NO: 753512 - RNA, 19 nt, Artificial Sequence
  Description of Artificial Sequence: Synthetic oligonucleotide
  Sense strand starting at position 2505 of SEQ ID NO: 586916
cagaccugauggucacauu

SEQ ID NO: 753513 - RNA, 19 nt, Artificial Sequence
  Description of Artificial Sequence: Synthetic oligonucleotide
  Antisense strand to SEQ ID NO: 753512
aaugugaccaucaggucug

SEQ ID NO: 753514 - RNA, 19 nt, Artificial Sequence
  Description of Artificial Sequence: Synthetic oligonucleotide
  Sense strand starting at position 2638 of SEQ ID NO: 586916
gugugugcucaauuagcuu

SEQ ID NO: 753515 - RNA, 19 nt, Artificial Sequence
  Description of Artificial Sequence: Synthetic oligonucleotide
  Antisense strand to SEQ ID NO: 753514
aagcuaauugagcacacac

SEQ ID NO: 753516 - RNA, 19 nt, Artificial Sequence
  Description of Artificial Sequence: Synthetic oligonucleotide
  Sense strand starting at position 2726 of SEQ ID NO: 586916
aauauuuauugggcgcuua

SEQ ID NO: 753517 - RNA, 19 nt, Artificial Sequence
  Description of Artificial Sequence: Synthetic oligonucleotide
  Antisense strand to SEQ ID NO: 753516
uaagcgcccaauaaauauu

SEQ ID NO: 753518 - RNA, 19 nt, Artificial Sequence
  Description of Artificial Sequence: Synthetic oligonucleotide
  Sense strand starting at position 2935 of SEQ ID NO: 586916
cucuuaaauccugagguuu

SEQ ID NO: 753519 - RNA, 19 nt, Artificial Sequence
  Description of Artificial Sequence: Synthetic oligonucleotide
  Antisense strand to SEQ ID NO: 753518
aaaccucaggauuuaagag

SEQ ID NO: 753520 - RNA, 19 nt, Artificial Sequence
  Description of Artificial Sequence: Synthetic oligonucleotide
  Sense strand starting at position 3325 of SEQ ID NO: 586916
acugcaguuucucugagau

SEQ ID NO: 753521 - RNA, 19 nt, Artificial Sequence
  Description of Artificial Sequence: Synthetic oligonucleotide
  Antisense strand to SEQ ID NO: 753520
aucucagagaaacugcagu

SEQ ID NO: 753522 - RNA, 19 nt, Artificial Sequence
  Description of Artificial Sequence: Synthetic oligonucleotide
  Sense strand starting at position 3422 of SEQ ID NO: 586916
caccgacugccuggaaaua

SEQ ID NO: 753523 - RNA, 19 nt, Artificial Sequence
  Description of Artificial Sequence: Synthetic oligonucleotide
  Antisense strand to SEQ ID NO: 753522
uauuuccaggcagucggug

SEQ ID NO: 753524 - RNA, 19 nt, Artificial Sequence
  Description of Artificial Sequence: Synthetic oligonucleotide
  Sense strand starting at position 3433 of SEQ ID NO: 586916
uggaaauagauucgauguu

SEQ ID NO: 753525 - RNA, 19 nt, Artificial Sequence
  Description of Artificial Sequence: Synthetic oligonucleotide
  Antisense strand to SEQ ID NO: 753524
aacaucgaaucuauuucca

SEQ ID NO: 753526 - RNA, 19 nt, Artificial Sequence
  Description of Artificial Sequence: Synthetic oligonucleotide
  Sense strand starting at position 3475 of SEQ ID NO: 586916
gagacuggccuuuaggagu

SEQ ID NO: 753527 - RNA, 19 nt, Artificial Sequence
  Description of Artificial Sequence: Synthetic oligonucleotide
  Antisense strand to SEQ ID NO: 753526
acuccuaaaggccagucuc

SEQ ID NO: 753528 - RNA, 19 nt, Artificial Sequence
  Description of Artificial Sequence: Synthetic oligonucleotide
  Sense strand starting at position 3740 of SEQ ID NO: 586916
aggacauauucugcccacu

SEQ ID NO: 753529 - RNA, 19 nt, Artificial Sequence
  Description of Artificial Sequence: Synthetic oligonucleotide
  Antisense strand to SEQ ID NO: 753528
agugggcagaauauguccu

SEQ ID NO: 753530 - RNA, 19 nt, Artificial Sequence
  Description of Artificial Sequence: Synthetic oligonucleotide
  Sense strand starting at position 3803 of SEQ ID NO: 586916
uugcuuccucccuauagua

SEQ ID NO: 753531 - RNA, 19 nt, Artificial Sequence
  Description of Artificial Sequence: Synthetic oligonucleotide
  Antisense strand to SEQ ID NO: 753530
uacuauagggaggaagcaa

SEQ ID NO: 753532 - RNA, 19 nt, Artificial Sequence
  Description of Artificial Sequence: Synthetic oligonucleotide
  Sense strand starting at position 249 of SEQ ID NO: 586917
uuugaaaggccuugagcua

SEQ ID NO: 753533 - RNA, 19 nt, Artificial Sequence
  Description of Artificial Sequence: Synthetic oligonucleotide
  Antisense strand to SEQ ID NO: 753532
uagcucaaggccuuucaaa

SEQ ID NO: 753534 - RNA, 19 nt, Artificial Sequence
  Description of Artificial Sequence: Synthetic oligonucleotide
  Sense strand starting at position 308 of SEQ ID NO: 586917
gaaauuauuucgcuuggcu

SEQ ID NO: 753535 - RNA, 19 nt, Artificial Sequence
  Description of Artificial Sequence: Synthetic oligonucleotide
  Antisense strand to SEQ ID NO: 753534
agccaagcgaaauaauuuc

SEQ ID NO: 753536 - RNA, 19 nt, Artificial Sequence
  Description of Artificial Sequence: Synthetic oligonucleotide
  Sense strand starting at position 324 of SEQ ID NO: 586917
gcuggaacuccagguagaa

SEQ ID NO: 753537 - RNA, 19 nt, Artificial Sequence
  Description of Artificial Sequence: Synthetic oligonucleotide
  Antisense strand to SEQ ID NO: 753536
uucuaccuggaguuccagc

SEQ ID NO: 753538 - RNA, 19 nt, Artificial Sequence
  Description of Artificial Sequence: Synthetic oligonucleotide
  Sense strand starting at position 370 of SEQ ID NO: 586917
cccguuaggccagaaugaa

SEQ ID NO: 753539 - RNA, 19 nt, Artificial Sequence
  Description of Artificial Sequence: Synthetic oligonucleotide
  Antisense strand to SEQ ID NO: 753538
uucauucuggccuaacggg

SEQ ID NO: 753540 - RNA, 19 nt, Artificial Sequence
  Description of Artificial Sequence: Synthetic oligonucleotide
  Sense strand starting at position 674 of SEQ ID NO: 586917
ggcuuacacuuuccacaga

SEQ ID NO: 753541 - RNA, 19 nt, Artificial Sequence
  Description of Artificial Sequence: Synthetic oligonucleotide
  Antisense strand to SEQ ID NO: 753540
ucuguggaaaguguaagcc

SEQ ID NO: 753542 - RNA, 19 nt, Artificial Sequence
  Description of Artificial Sequence: Synthetic oligonucleotide
  Sense strand starting at position 855 of SEQ ID NO: 586917
ugcuguuggaacuaaguaa

SEQ ID NO: 753543 - RNA, 19 nt, Artificial Sequence
  Description of Artificial Sequence: Synthetic oligonucleotide
  Antisense strand to SEQ ID NO: 753542
uuacuuaguuccaacagca

SEQ ID NO: 753544 - RNA, 19 nt, Artificial Sequence
  Description of Artificial Sequence: Synthetic oligonucleotide
  Sense strand starting at position 886 of SEQ ID NO: 586917
ccaugauuaguguggacaa

SEQ ID NO: 753545 - RNA, 19 nt, Artificial Sequence
  Description of Artificial Sequence: Synthetic oligonucleotide
  Antisense strand to SEQ ID NO: 753544
uuguccacacuaaucaugg

SEQ ID NO: 753546 - RNA, 19 nt, Artificial Sequence
  Description of Artificial Sequence: Synthetic oligonucleotide
  Sense strand starting at position 909 of SEQ ID NO: 586917
ugugauugccuugacuuaa

SEQ ID NO: 753547 - RNA, 19 nt, Artificial Sequence
  Description of Artificial Sequence: Synthetic oligonucleotide
  Antisense strand to SEQ ID NO: 753546
uuaagucaaggcaaucaca

SEQ ID NO: 753548 - RNA, 19 nt, Artificial Sequence
  Description of Artificial Sequence: Synthetic oligonucleotide
  Sense strand starting at position 996 of SEQ ID NO: 586917
caacguugguuauugacaa

SEQ ID NO: 753549 - RNA, 19 nt, Artificial Sequence
  Description of Artificial Sequence: Synthetic oligonucleotide
  Antisense strand to SEQ ID NO: 753548
uugucaauaaccaacguug

SEQ ID NO: 753550 - RNA, 19 nt, Artificial Sequence
  Description of Artificial Sequence: Synthetic oligonucleotide
  Sense strand starting at position 1056 of SEQ ID NO: 586917
cuuugaugcucagcaagaa

SEQ ID NO: 753551 - RNA, 19 nt, Artificial Sequence
  Description of Artificial Sequence: Synthetic oligonucleotide
  Antisense strand to SEQ ID NO: 753550
uucuugcugagcaucaaag

SEQ ID NO: 753552 - RNA, 19 nt, Artificial Sequence
  Description of Artificial Sequence: Synthetic oligonucleotide
  Sense strand starting at position 1057 of SEQ ID NO: 586917
uuugaugcucagcaagaau

SEQ ID NO: 753553 - RNA, 19 nt, Artificial Sequence
  Description of Artificial Sequence: Synthetic oligonucleotide
  Antisense strand to SEQ ID NO: 753552
auucuugcugagcaucaaa

SEQ ID NO: 753554 - RNA, 19 nt, Artificial Sequence
  Description of Artificial Sequence: Synthetic oligonucleotide
  Sense strand starting at position 1171 of SEQ ID NO: 586917
ucugcaggauucuuagaac

SEQ ID NO: 753555 - RNA, 19 nt, Artificial Sequence
  Description of Artificial Sequence: Synthetic oligonucleotide
  Antisense strand to SEQ ID NO: 753554
guucuaagaauccugcaga

SEQ ID NO: 753556 - RNA, 19 nt, Artificial Sequence
  Description of Artificial Sequence: Synthetic oligonucleotide
  Sense strand starting at position 1349 of SEQ ID NO: 586917
ggauaagauguaugugaau

SEQ ID NO: 753557 - RNA, 19 nt, Artificial Sequence
  Description of Artificial Sequence: Synthetic oligonucleotide
  Antisense strand to SEQ ID NO: 753556
auucacauacaucuuaucc

SEQ ID NO: 753558 - RNA, 19 nt, Artificial Sequence
  Description of Artificial Sequence: Synthetic oligonucleotide
  Sense strand starting at position 1351 of SEQ ID NO: 586917
auaagauguaugugaauga

SEQ ID NO: 753559 - RNA, 19 nt, Artificial Sequence
  Description of Artificial Sequence: Synthetic oligonucleotide
  Antisense strand to SEQ ID NO: 753558
ucauucacauacaucuuau

SEQ ID NO: 753560 - RNA, 19 nt, Artificial Sequence
  Description of Artificial Sequence: Synthetic oligonucleotide
  Sense strand starting at position 1355 of SEQ ID NO: 586917
gauguaugugaaugaaaua

SEQ ID NO: 753561 - RNA, 19 nt, Artificial Sequence
  Description of Artificial Sequence: Synthetic oligonucleotide
  Antisense strand to SEQ ID NO: 753560
uauuucauucacauacauc

SEQ ID NO: 753562 - RNA, 19 nt, Artificial Sequence
  Description of Artificial Sequence: Synthetic oligonucleotide
  Sense strand starting at position 1388 of SEQ ID NO: 586917
uauuuagccucugcagagu

SEQ ID NO: 753563 - RNA, 19 nt, Artificial Sequence
  Description of Artificial Sequence: Synthetic oligonucleotide
  Antisense strand to SEQ ID NO: 753562
acucugcagaggcuaaaua

SEQ ID NO: 753564 - RNA, 19 nt, Artificial Sequence
  Description of Artificial Sequence: Synthetic oligonucleotide
  Sense strand starting at position 1394 of SEQ ID NO: 586917
gccucugcagaguauuaac

SEQ ID NO: 753565 - RNA, 19 nt, Artificial Sequence
  Description of Artificial Sequence: Synthetic oligonucleotide
  Antisense strand to SEQ ID NO: 753564
guuaauacucugcagaggc

SEQ ID NO: 753566 - RNA, 19 nt, Artificial Sequence
  Description of Artificial Sequence: Synthetic oligonucleotide
  Sense strand starting at position 1436 of SEQ ID NO: 586917
auaacaucuuacguuauga

SEQ ID NO: 753567 - RNA, 19 nt, Artificial Sequence
  Description of Artificial Sequence: Synthetic oligonucleotide
  Antisense strand to SEQ ID NO: 753566
ucauaacguaagauguuau

SEQ ID NO: 753568 - RNA, 19 nt, Artificial Sequence
  Description of Artificial Sequence: Synthetic oligonucleotide
  Sense strand starting at position 1438 of SEQ ID NO: 586917
aacaucuuacguuaugaag

SEQ ID NO: 753569 - RNA, 19 nt, Artificial Sequence
  Description of Artificial Sequence: Synthetic oligonucleotide
  Antisense strand to SEQ ID NO: 753568
cuucauaacguaagauguu

SEQ ID NO: 753570 - RNA, 19 nt, Artificial Sequence
  Description of Artificial Sequence: Synthetic oligonucleotide
  Sense strand starting at position 1481 of SEQ ID NO: 586917
gaucacacguuccuuuaga

SEQ ID NO: 753571 - RNA, 19 nt, Artificial Sequence
  Description of Artificial Sequence: Synthetic oligonucleotide
  Antisense strand to SEQ ID NO: 753570
ucuaaaggaacgugugauc

SEQ ID NO: 753572 - RNA, 19 nt, Artificial Sequence
  Description of Artificial Sequence: Synthetic oligonucleotide
  Sense strand starting at position 1482 of SEQ ID NO: 586917
aucacacguuccuuuagaa

SEQ ID NO: 753573 - RNA, 19 nt, Artificial Sequence
  Description of Artificial Sequence: Synthetic oligonucleotide
  Antisense strand to SEQ ID NO: 753572
uucuaaaggaacgugugau

SEQ ID NO: 753574 - RNA, 19 nt, Artificial Sequence
  Description of Artificial Sequence: Synthetic oligonucleotide
  Sense strand starting at position 1527 of SEQ ID NO: 586917
guuugcaucguuucucuau

SEQ ID NO: 753575 - RNA, 19 nt, Artificial Sequence
  Description of Artificial Sequence: Synthetic oligonucleotide
  Antisense strand to SEQ ID NO: 753574
auagagaaacgaugcaaac

SEQ ID NO: 753576 - RNA, 19 nt, Artificial Sequence
  Description of Artificial Sequence: Synthetic oligonucleotide
  Sense strand starting at position 1710 of SEQ ID NO: 586917
uaaguaaucguuuauguac

SEQ ID NO: 753577 - RNA, 19 nt, Artificial Sequence
  Description of Artificial Sequence: Synthetic oligonucleotide
  Antisense strand to SEQ ID NO: 753576
guacauaaacgauuacuua

SEQ ID NO: 753578 - RNA, 19 nt, Artificial Sequence
  Description of Artificial Sequence: Synthetic oligonucleotide
  Sense strand starting at position 1716 of SEQ ID NO: 586917
aucguuuauguacaaacau

SEQ ID NO: 753579 - RNA, 19 nt, Artificial Sequence
  Description of Artificial Sequence: Synthetic oligonucleotide
  Antisense strand to SEQ ID NO: 753578
auguuuguacauaaacgau

SEQ ID NO: 753580 - RNA, 19 nt, Artificial Sequence
  Description of Artificial Sequence: Synthetic oligonucleotide
  Sense strand starting at position 1814 of SEQ ID NO: 586917
ucaguuuacuuaccaggau

SEQ ID NO: 753581 - RNA, 19 nt, Artificial Sequence
  Description of Artificial Sequence: Synthetic oligonucleotide
  Antisense strand to SEQ ID NO: 753580
auccugguaaguaaacuga

SEQ ID NO: 753582 - RNA, 19 nt, Artificial Sequence
  Description of Artificial Sequence: Synthetic oligonucleotide
  Sense strand starting at position 1904 of SEQ ID NO: 586917
ucuucugauggcuaggaga

SEQ ID NO: 753583 - RNA, 19 nt, Artificial Sequence
  Description of Artificial Sequence: Synthetic oligonucleotide
  Antisense strand to SEQ ID NO: 753582
ucuccuagccaucagaaga

SEQ ID NO: 753584 - RNA, 19 nt, Artificial Sequence
  Description of Artificial Sequence: Synthetic oligonucleotide
  Sense strand starting at position 2034 of SEQ ID NO: 586917
ggaggaaguugaaguauag

SEQ ID NO: 753585 - RNA, 19 nt, Artificial Sequence
  Description of Artificial Sequence: Synthetic oligonucleotide
  Antisense strand to SEQ ID NO: 753584
cuauacuucaacuuccucc

SEQ ID NO: 753586 - RNA, 19 nt, Artificial Sequence
  Description of Artificial Sequence: Synthetic oligonucleotide
  Sense strand starting at position 2150 of SEQ ID NO: 586917
uugaaucacugcuuagaaa

SEQ ID NO: 753587 - RNA, 19 nt, Artificial Sequence
  Description of Artificial Sequence: Synthetic oligonucleotide
  Antisense strand to SEQ ID NO: 753586
uuucuaagcagugauucaa

SEQ ID NO: 753588 - RNA, 19 nt, Artificial Sequence
  Description of Artificial Sequence: Synthetic oligonucleotide
  Sense strand starting at position 2167 of SEQ ID NO: 586917
aacuguuuaccaggcagau

SEQ ID NO: 753589 - RNA, 19 nt, Artificial Sequence
  Description of Artificial Sequence: Synthetic oligonucleotide
  Antisense strand to SEQ ID NO: 753588
aucugccugguaaacaguu

SEQ ID NO: 753590 - RNA, 19 nt, Artificial Sequence
  Description of Artificial Sequence: Synthetic oligonucleotide
  Sense strand starting at position 2386 of SEQ ID NO: 586917
cuccaaauguaacuguauu

SEQ ID NO: 753591 - RNA, 19 nt, Artificial Sequence
  Description of Artificial Sequence: Synthetic oligonucleotide
  Antisense strand to SEQ ID NO: 753590
aauacaguuacauuuggag

SEQ ID NO: 753592 - RNA, 19 nt, Artificial Sequence
  Description of Artificial Sequence: Synthetic oligonucleotide
  Sense strand starting at position 2449 of SEQ ID NO: 586917
auuagagugucuguaauug

SEQ ID NO: 753593 - RNA, 19 nt, Artificial Sequence
  Description of Artificial Sequence: Synthetic oligonucleotide
  Antisense strand to SEQ ID NO: 753592
caauuacagacacucuaau

SEQ ID NO: 753594 - RNA, 19 nt, Artificial Sequence
  Description of Artificial Sequence: Synthetic oligonucleotide
  Sense strand starting at position 2453 of SEQ ID NO: 586917
gagugucuguaauugaauc

SEQ ID NO: 753595 - RNA, 19 nt, Artificial Sequence
  Description of Artificial Sequence: Synthetic oligonucleotide
  Antisense strand to SEQ ID NO: 753594
gauucaauuacagacacuc

SEQ ID NO: 753596 - RNA, 19 nt, Artificial Sequence
  Description of Artificial Sequence: Synthetic oligonucleotide
  Sense strand starting at position 2482 of SEQ ID NO: 586917
cuuguaagaagacgagauu

SEQ ID NO: 753597 - RNA, 19 nt, Artificial Sequence
  Description of Artificial Sequence: Synthetic oligonucleotide
  Antisense strand to SEQ ID NO: 753596
aaucucgucuucuuacaag

SEQ ID NO: 753598 - RNA, 19 nt, Artificial Sequence
  Description of Artificial Sequence: Synthetic oligonucleotide
  Sense strand starting at position 2707 of SEQ ID NO: 586917
ccucuagauguuuaugauu

SEQ ID NO: 753599 - RNA, 19 nt, Artificial Sequence
  Description of Artificial Sequence: Synthetic oligonucleotide
  Antisense strand to SEQ ID NO: 753598
aaucauaaacaucuagagg

SEQ ID NO: 753600 - RNA, 19 nt, Artificial Sequence
  Description of Artificial Sequence: Synthetic oligonucleotide
  Sense strand starting at position 3268 of SEQ ID NO: 586917
gaauuagagucucuccgaa

SEQ ID NO: 753601 - RNA, 19 nt, Artificial Sequence
  Description of Artificial Sequence: Synthetic oligonucleotide
  Antisense strand to SEQ ID NO: 753600
uucggagagacucuaauuc

SEQ ID NO: 753602 - RNA, 19 nt, Artificial Sequence
  Description of Artificial Sequence: Synthetic oligonucleotide
  Sense strand starting at position 3270 of SEQ ID NO: 586917
auuagagucucuccgaaga

SEQ ID NO: 753603 - RNA, 19 nt, Artificial Sequence
  Description of Artificial Sequence: Synthetic oligonucleotide
  Antisense strand to SEQ ID NO: 753602
ucuucggagagacucuaau

SEQ ID NO: 753604 - RNA, 19 nt, Artificial Sequence
  Description of Artificial Sequence: Synthetic oligonucleotide
  Sense strand starting at position 3320 of SEQ ID NO: 586917
ggcaaagaugcuugacuga

SEQ ID NO: 753605 - RNA, 19 nt, Artificial Sequence
  Description of Artificial Sequence: Synthetic oligonucleotide
  Antisense strand to SEQ ID NO: 753604
ucagucaagcaucuuugcc

SEQ ID NO: 753606 - RNA, 19 nt, Artificial Sequence
  Description of Artificial Sequence: Synthetic oligonucleotide
  Sense strand starting at position 3330 of SEQ ID NO: 586917
cuugacugaccucggauua

SEQ ID NO: 753607 - RNA, 19 nt, Artificial Sequence
  Description of Artificial Sequence: Synthetic oligonucleotide
  Antisense strand to SEQ ID NO: 753606
uaauccgaggucagucaag

SEQ ID NO: 753608 - RNA, 19 nt, Artificial Sequence
  Description of Artificial Sequence: Synthetic oligonucleotide
  Sense strand starting at position 3365 of SEQ ID NO: 586917
gguuuagaguuccuucuaa

SEQ ID NO: 753609 - RNA, 19 nt, Artificial Sequence
  Description of Artificial Sequence: Synthetic oligonucleotide
  Antisense strand to SEQ ID NO: 753608
uuagaaggaacucuaaacc

SEQ ID NO: 753610 - RNA, 19 nt, Artificial Sequence
  Description of Artificial Sequence: Synthetic oligonucleotide
  Sense strand starting at position 3593 of SEQ ID NO: 586917
uccugauuuccaugugucu

SEQ ID NO: 753611 - RNA, 19 nt, Artificial Sequence
  Description of Artificial Sequence: Synthetic oligonucleotide
  Antisense strand to SEQ ID NO: 753610
agacacauggaaaucagga

SEQ ID NO: 753612 - RNA, 19 nt, Artificial Sequence
  Description of Artificial Sequence: Synthetic oligonucleotide
  Sense strand starting at position 1 of SEQ ID NO: 586918
aagucuugaguagaagguu

SEQ ID NO: 753613 - RNA, 19 nt, Artificial Sequence
  Description of Artificial Sequence: Synthetic oligonucleotide
  Antisense strand to SEQ ID NO: 753612
aaccuucuacucaagacuu

SEQ ID NO: 753614 - RNA, 19 nt, Artificial Sequence
  Description of Artificial Sequence: Synthetic oligonucleotide
  Sense strand starting at position 9 of SEQ ID NO: 586918
aguagaagguucuccaaga

SEQ ID NO: 753615 - RNA, 19 nt, Artificial Sequence
  Description of Artificial Sequence: Synthetic oligonucleotide
  Antisense strand to SEQ ID NO: 753614
ucuuggagaaccuucuacu

SEQ ID NO: 753616 - RNA, 19 nt, Artificial Sequence
  Description of Artificial Sequence: Synthetic oligonucleotide
  Sense strand starting at position 10 of SEQ ID NO: 586918
guagaagguucuccaagaa

SEQ ID NO: 753617 - RNA, 19 nt, Artificial Sequence
  Description of Artificial Sequence: Synthetic oligonucleotide
  Antisense strand to SEQ ID NO: 753616
uucuuggagaaccuucuac

SEQ ID NO: 753618 - RNA, 19 nt, Artificial Sequence
  Description of Artificial Sequence: Synthetic oligonucleotide
  Sense strand starting at position 97 of SEQ ID NO: 586918
ugggcuuucucagcugaaa

SEQ ID NO: 753619 - RNA, 19 nt, Artificial Sequence
  Description of Artificial Sequence: Synthetic oligonucleotide
  Antisense strand to SEQ ID NO: 753618
uuucagcugagaaagccca

SEQ ID NO: 753620 - RNA, 19 nt, Artificial Sequence
  Description of Artificial Sequence: Synthetic oligonucleotide
  Sense strand starting at position 116 of SEQ ID NO: 586918
cccugauccuguuucucua

SEQ ID NO: 753621 - RNA, 19 nt, Artificial Sequence
  Description of Artificial Sequence: Synthetic oligonucleotide
  Antisense strand to SEQ ID NO: 753620
uagagaaacaggaucaggg

SEQ ID NO: 753622 - RNA, 19 nt, Artificial Sequence
  Description of Artificial Sequence: Synthetic oligonucleotide
  Sense strand starting at position 123 of SEQ ID NO: 586918
ccuguuucucuacagaguu

SEQ ID NO: 753623 - RNA, 19 nt, Artificial Sequence
  Description of Artificial Sequence: Synthetic oligonucleotide
  Antisense strand to SEQ ID NO: 753622
aacucuguagagaaacagg

SEQ ID NO: 753624 - RNA, 19 nt, Artificial Sequence
  Description of Artificial Sequence: Synthetic oligonucleotide
  Sense strand starting at position 143 of SEQ ID NO: 586918
gugcaagaaucucuagagu

SEQ ID NO: 753625 - RNA, 19 nt, Artificial Sequence
  Description of Artificial Sequence: Synthetic oligonucleotide
  Antisense strand to SEQ ID NO: 753624
acucuagagauucuugcac

SEQ ID NO: 753626 - RNA, 19 nt, Artificial Sequence
  Description of Artificial Sequence: Synthetic oligonucleotide
  Sense strand starting at position 251 of SEQ ID NO: 586918
uugugucuccucugagcca

SEQ ID NO: 753627 - RNA, 19 nt, Artificial Sequence
  Description of Artificial Sequence: Synthetic oligonucleotide
  Antisense strand to SEQ ID NO: 753626
uggcucagaggagacacaa

SEQ ID NO: 753628 - RNA, 19 nt, Artificial Sequence
  Description of Artificial Sequence: Synthetic oligonucleotide
  Sense strand starting at position 370 of SEQ ID NO: 586918
ccgccugcuuccuauacau

SEQ ID NO: 753629 - RNA, 19 nt, Artificial Sequence
  Description of Artificial Sequence: Synthetic oligonucleotide
  Antisense strand to SEQ ID NO: 753628
auguauaggaagcaggcgg

SEQ ID NO: 753630 - RNA, 19 nt, Artificial Sequence
  Description of Artificial Sequence: Synthetic oligonucleotide
  Sense strand starting at position 451 of SEQ ID NO: 586918
ccagaaaugccuuagguca

SEQ ID NO: 753631 - RNA, 19 nt, Artificial Sequence
  Description of Artificial Sequence: Synthetic oligonucleotide
  Antisense strand to SEQ ID NO: 753630
ugaccuaaggcauuucugg

SEQ ID NO: 753632 - RNA, 19 nt, Artificial Sequence
  Description of Artificial Sequence: Synthetic oligonucleotide
  Sense strand starting at position 458 of SEQ ID NO: 586918
ugccuuaggucauggauac

SEQ ID NO: 753633 - RNA, 19 nt, Artificial Sequence
  Description of Artificial Sequence: Synthetic oligonucleotide
  Antisense strand to SEQ ID NO: 753632
guauccaugaccuaaggca

SEQ ID NO: 753634 - RNA, 19 nt, Artificial Sequence
  Description of Artificial Sequence: Synthetic oligonucleotide
  Sense strand starting at position 504 of SEQ ID NO: 586918
ggugaucugcagugagaca

SEQ ID NO: 753635 - RNA, 19 nt, Artificial Sequence
  Description of Artificial Sequence: Synthetic oligonucleotide
  Antisense strand to SEQ ID NO: 753634
ugucucacugcagaucacc

SEQ ID NO: 753636 - RNA, 19 nt, Artificial Sequence
  Description of Artificial Sequence: Synthetic oligonucleotide
  Sense strand starting at position 632 of SEQ ID NO: 586918
ugagaaggcuauggacaau

SEQ ID NO: 753637 - RNA, 19 nt, Artificial Sequence
  Description of Artificial Sequence: Synthetic oligonucleotide
  Antisense strand to SEQ ID NO: 753636
auuguccauagccuucuca

SEQ ID NO: 753638 - RNA, 19 nt, Artificial Sequence
  Description of Artificial Sequence: Synthetic oligonucleotide
  Sense strand starting at position 716 of SEQ ID NO: 586918
cugggugggucagagguau

SEQ ID NO: 753639 - RNA, 19 nt, Artificial Sequence
  Description of Artificial Sequence: Synthetic oligonucleotide
  Antisense strand to SEQ ID NO: 753638
auaccucugacccacccag

SEQ ID NO: 753640 - RNA, 19 nt, Artificial Sequence
  Description of Artificial Sequence: Synthetic oligonucleotide
  Sense strand starting at position 915 of SEQ ID NO: 586918
agcccaucaucugaggaga

SEQ ID NO: 753641 - RNA, 19 nt, Artificial Sequence
  Description of Artificial Sequence: Synthetic oligonucleotide
  Antisense strand to SEQ ID NO: 753640
ucuccucagaugaugggcu

SEQ ID NO: 753642 - RNA, 19 nt, Artificial Sequence
  Description of Artificial Sequence: Synthetic oligonucleotide
  Sense strand starting at position 917 of SEQ ID NO: 586918
cccaucaucugaggagaga

SEQ ID NO: 753643 - RNA, 19 nt, Artificial Sequence
  Description of Artificial Sequence: Synthetic oligonucleotide
  Antisense strand to SEQ ID NO: 753642
ucucuccucagaugauggg

SEQ ID NO: 753644 - RNA, 19 nt, Artificial Sequence
  Description of Artificial Sequence: Synthetic oligonucleotide
  Sense strand starting at position 932 of SEQ ID NO: 586918
gagagaauggaauguguuu

SEQ ID NO: 753645 - RNA, 19 nt, Artificial Sequence
  Description of Artificial Sequence: Synthetic oligonucleotide
  Antisense strand to SEQ ID NO: 753644
aaacacauuccauucucuc

SEQ ID NO: 753646 - RNA, 19 nt, Artificial Sequence
  Description of Artificial Sequence: Synthetic oligonucleotide
  Sense strand starting at position 944 of SEQ ID NO: 586918
uguguuuccugccaggcaa

SEQ ID NO: 753647 - RNA, 19 nt, Artificial Sequence
  Description of Artificial Sequence: Synthetic oligonucleotide
  Antisense strand to SEQ ID NO: 753646
uugccuggcaggaaacaca

SEQ ID NO: 753648 - RNA, 19 nt, Artificial Sequence
  Description of Artificial Sequence: Synthetic oligonucleotide
  Sense strand starting at position 1153 of SEQ ID NO: 586918
ggcacugguucccagagga

SEQ ID NO: 753649 - RNA, 19 nt, Artificial Sequence
  Description of Artificial Sequence: Synthetic oligonucleotide
  Antisense strand to SEQ ID NO: 753648
uccucugggaaccagugcc

SEQ ID NO: 753650 - RNA, 19 nt, Artificial Sequence
  Description of Artificial Sequence: Synthetic oligonucleotide
  Sense strand starting at position 1337 of SEQ ID NO: 586918
gaacgaggcuccugagcua

SEQ ID NO: 753651 - RNA, 19 nt, Artificial Sequence
  Description of Artificial Sequence: Synthetic oligonucleotide
  Antisense strand to SEQ ID NO: 753650
uagcucaggagccucguuc

SEQ ID NO: 753652 - RNA, 19 nt, Artificial Sequence
  Description of Artificial Sequence: Synthetic oligonucleotide
  Sense strand starting at position 2301 of SEQ ID NO: 586918
cggugaauuccggaaacag

SEQ ID NO: 753653 - RNA, 19 nt, Artificial Sequence
  Description of Artificial Sequence: Synthetic oligonucleotide
  Antisense strand to SEQ ID NO: 753652
cuguuuccggaauucaccg

SEQ ID NO: 753654 - RNA, 19 nt, Artificial Sequence
  Description of Artificial Sequence: Synthetic oligonucleotide
  Sense strand starting at position 2347 of SEQ ID NO: 586918
cgugcucucagacacaguu

SEQ ID NO: 753655 - RNA, 19 nt, Artificial Sequence
  Description of Artificial Sequence: Synthetic oligonucleotide
  Antisense strand to SEQ ID NO: 753654
aacugugucugagagcacg

SEQ ID NO: 753656 - RNA, 19 nt, Artificial Sequence
  Description of Artificial Sequence: Synthetic oligonucleotide
  Sense strand starting at position 2388 of SEQ ID NO: 586918
gcuucuggcuucuguuuau

SEQ ID NO: 753657 - RNA, 19 nt, Artificial Sequence
  Description of Artificial Sequence: Synthetic oligonucleotide
  Antisense strand to SEQ ID NO: 753656
auaaacagaagccagaagc

SEQ ID NO: 753658 - RNA, 19 nt, Artificial Sequence
  Description of Artificial Sequence: Synthetic oligonucleotide
  Sense strand starting at position 2834 of SEQ ID NO: 586918
gaaagcugucagcgauaac

SEQ ID NO: 753659 - RNA, 19 nt, Artificial Sequence
  Description of Artificial Sequence: Synthetic oligonucleotide
  Antisense strand to SEQ ID NO: 753658
guuaucgcugacagcuuuc

SEQ ID NO: 753660 - RNA, 19 nt, Artificial Sequence
  Description of Artificial Sequence: Synthetic oligonucleotide
  Sense strand starting at position 2837 of SEQ ID NO: 586918
agcugucagcgauaacaga

SEQ ID NO: 753661 - RNA, 19 nt, Artificial Sequence
  Description of Artificial Sequence: Synthetic oligonucleotide
  Antisense strand to SEQ ID NO: 753660
ucuguuaucgcugacagcu

SEQ ID NO: 753662 - RNA, 19 nt, Artificial Sequence
  Description of Artificial Sequence: Synthetic oligonucleotide
  Sense strand starting at position 3324 of SEQ ID NO: 586918
ugaggucagugucugugaa

SEQ ID NO: 753663 - RNA, 19 nt, Artificial Sequence
  Description of Artificial Sequence: Synthetic oligonucleotide
  Antisense strand to SEQ ID NO: 753662
uucacagacacugaccuca

SEQ ID NO: 753664 - RNA, 19 nt, Artificial Sequence
  Description of Artificial Sequence: Synthetic oligonucleotide
  Sense strand starting at position 3349 of SEQ ID NO: 586918
gcacuagugucuuugguug

SEQ ID NO: 753665 - RNA, 19 nt, Artificial Sequence
  Description of Artificial Sequence: Synthetic oligonucleotide
  Antisense strand to SEQ ID NO: 753664
caaccaaagacacuagugc

SEQ ID NO: 753666 - RNA, 19 nt, Artificial Sequence
  Description of Artificial Sequence: Synthetic oligonucleotide
  Sense strand starting at position 3965 of SEQ ID NO: 586918
gcagacauccgcugcaaau

SEQ ID NO: 753667 - RNA, 19 nt, Artificial Sequence
  Description of Artificial Sequence: Synthetic oligonucleotide
  Antisense strand to SEQ ID NO: 753666
auuugcagcggaugucugc

SEQ ID NO: 753668 - RNA, 19 nt, Artificial Sequence
  Description of Artificial Sequence: Synthetic oligonucleotide
  Sense strand starting at position 496 of SEQ ID NO: 586919
ucacauuauugcuugguua

SEQ ID NO: 753669 - RNA, 19 nt, Artificial Sequence
  Description of Artificial Sequence: Synthetic oligonucleotide
  Antisense strand to SEQ ID NO: 753668
uaaccaagcaauaauguga

SEQ ID NO: 753670 - RNA, 19 nt, Artificial Sequence
  Description of Artificial Sequence: Synthetic oligonucleotide
  Sense strand starting at position 511 of SEQ ID NO: 586919
guuagucuuuccuccagaa

SEQ ID NO: 753671 - RNA, 19 nt, Artificial Sequence
  Description of Artificial Sequence: Synthetic oligonucleotide
  Antisense strand to SEQ ID NO: 753670
uucuggaggaaagacuaac

SEQ ID NO: 753672 - RNA, 19 nt, Artificial Sequence
  Description of Artificial Sequence: Synthetic oligonucleotide
  Sense strand starting at position 564 of SEQ ID NO: 586919
cguuauaaaugguuauuag

SEQ ID NO: 753673 - RNA, 19 nt, Artificial Sequence
  Description of Artificial Sequence: Synthetic oligonucleotide
  Antisense strand to SEQ ID NO: 753672
cuaauaaccauuuauaacg

SEQ ID NO: 753674 - RNA, 19 nt, Artificial Sequence
  Description of Artificial Sequence: Synthetic oligonucleotide
  Sense strand starting at position 574 of SEQ ID NO: 586919
gguuauuaggguuagcuau

SEQ ID NO: 753675 - RNA, 19 nt, Artificial Sequence
  Description of Artificial Sequence: Synthetic oligonucleotide
  Antisense strand to SEQ ID NO: 753674
auagcuaacccuaauaacc

SEQ ID NO: 753676 - RNA, 19 nt, Artificial Sequence
  Description of Artificial Sequence: Synthetic oligonucleotide
  Sense strand starting at position 629 of SEQ ID NO: 586919
uuggucaucuguuccaaac

SEQ ID NO: 753677 - RNA, 19 nt, Artificial Sequence
  Description of Artificial Sequence: Synthetic oligonucleotide
  Antisense strand to SEQ ID NO: 753676
guuuggaacagaugaccaa

SEQ ID NO: 753678 - RNA, 19 nt, Artificial Sequence
  Description of Artificial Sequence: Synthetic oligonucleotide
  Sense strand starting at position 714 of SEQ ID NO: 586919
ugcagaacuucaucgaggu

SEQ ID NO: 753679 - RNA, 19 nt, Artificial Sequence
  Description of Artificial Sequence: Synthetic oligonucleotide
  Antisense strand to SEQ ID NO: 753678
accucgaugaaguucugca

SEQ ID NO: 753680 - RNA, 19 nt, Artificial Sequence
  Description of Artificial Sequence: Synthetic oligonucleotide
  Sense strand starting at position 756 of SEQ ID NO: 586919
gagaaaguccuaugugaau

SEQ ID NO: 753681 - RNA, 19 nt, Artificial Sequence
  Description of Artificial Sequence: Synthetic oligonucleotide
  Antisense strand to SEQ ID NO: 753680
auucacauaggacuuucuc

SEQ ID NO: 753682 - RNA, 19 nt, Artificial Sequence
  Description of Artificial Sequence: Synthetic oligonucleotide
  Sense strand starting at position 762 of SEQ ID NO: 586919
guccuaugugaauauacuu

SEQ ID NO: 753683 - RNA, 19 nt, Artificial Sequence
  Description of Artificial Sequence: Synthetic oligonucleotide
  Antisense strand to SEQ ID NO: 753682
aaguauauucacauaggac

SEQ ID NO: 753684 - RNA, 19 nt, Artificial Sequence
  Description of Artificial Sequence: Synthetic oligonucleotide
  Sense strand starting at position 852 of SEQ ID NO: 586919
ccugaugaccuuuagugua

SEQ ID NO: 753685 - RNA, 19 nt, Artificial Sequence
  Description of Artificial Sequence: Synthetic oligonucleotide
  Antisense strand to SEQ ID NO: 753684
uacacuaaaggucaucagg

SEQ ID NO: 753686 - RNA, 19 nt, Artificial Sequence
  Description of Artificial Sequence: Synthetic oligonucleotide
  Sense strand starting at position 854 of SEQ ID NO: 586919
ugaugaccuuuaguguaga

SEQ ID NO: 753687 - RNA, 19 nt, Artificial Sequence
  Description of Artificial Sequence: Synthetic oligonucleotide
  Antisense strand to SEQ ID NO: 753686
ucuacacuaaaggucauca

SEQ ID NO: 753688 - RNA, 19 nt, Artificial Sequence
  Description of Artificial Sequence: Synthetic oligonucleotide
  Sense strand starting at position 1172 of SEQ ID NO: 586919
ccguauuugccuuaccauu

SEQ ID NO: 753689 - RNA, 19 nt, Artificial Sequence
  Description of Artificial Sequence: Synthetic oligonucleotide
  Antisense strand to SEQ ID NO: 753688
aaugguaaggcaaauacgg

SEQ ID NO: 753690 - RNA, 19 nt, Artificial Sequence
  Description of Artificial Sequence: Synthetic oligonucleotide
  Sense strand starting at position 1329 of SEQ ID NO: 586919
ugagaucuaugacaccaga

SEQ ID NO: 753691 - RNA, 19 nt, Artificial Sequence
  Description of Artificial Sequence: Synthetic oligonucleotide
  Antisense strand to SEQ ID NO: 753690
ucuggugucauagaucuca

SEQ ID NO: 753692 - RNA, 19 nt, Artificial Sequence
  Description of Artificial Sequence: Synthetic oligonucleotide
  Sense strand starting at position 1356 of SEQ ID NO: 586919
caacuaugacaguauucgu

SEQ ID NO: 753693 - RNA, 19 nt, Artificial Sequence
  Description of Artificial Sequence: Synthetic oligonucleotide
  Antisense strand to SEQ ID NO: 753692
acgaauacugucauaguug

SEQ ID NO: 753694 - RNA, 19 nt, Artificial Sequence
  Description of Artificial Sequence: Synthetic oligonucleotide
  Sense strand starting at position 1359 of SEQ ID NO: 586919
cuaugacaguauucguaag

SEQ ID NO: 753695 - RNA, 19 nt, Artificial Sequence
  Description of Artificial Sequence: Synthetic oligonucleotide
  Antisense strand to SEQ ID NO: 753694
cuuacgaauacugucauag

SEQ ID NO: 753696 - RNA, 19 nt, Artificial Sequence
  Description of Artificial Sequence: Synthetic oligonucleotide
  Sense strand starting at position 1361 of SEQ ID NO: 586919
augacaguauucguaagac

SEQ ID NO: 753697 - RNA, 19 nt, Artificial Sequence
  Description of Artificial Sequence: Synthetic oligonucleotide
  Antisense strand to SEQ ID NO: 753696
gucuuacgaauacugucau

SEQ ID NO: 753698 - RNA, 19 nt, Artificial Sequence
  Description of Artificial Sequence: Synthetic oligonucleotide
  Sense strand starting at position 1371 of SEQ ID NO: 586919
ucguaagacuagguucuca

SEQ ID NO: 753699 - RNA, 19 nt, Artificial Sequence
  Description of Artificial Sequence: Synthetic oligonucleotide
  Antisense strand to SEQ ID NO: 753698
ugagaaccuagucuuacga

SEQ ID NO: 753700 - RNA, 19 nt, Artificial Sequence
  Description of Artificial Sequence: Synthetic oligonucleotide
  Sense strand starting at position 1383 of SEQ ID NO: 586919
guucucagccaucauuauu

SEQ ID NO: 753701 - RNA, 19 nt, Artificial Sequence
  Description of Artificial Sequence: Synthetic oligonucleotide
  Antisense strand to SEQ ID NO: 753700
aauaaugauggcugagaac

SEQ ID NO: 753702 - RNA, 19 nt, Artificial Sequence
  Description of Artificial Sequence: Synthetic oligonucleotide
  Sense strand starting at position 1389 of SEQ ID NO: 586919
agccaucauuauucuagga

SEQ ID NO: 753703 - RNA, 19 nt, Artificial Sequence
  Description of Artificial Sequence: Synthetic oligonucleotide
  Antisense strand to SEQ ID NO: 753702
uccuagaauaaugauggcu

SEQ ID NO: 753704 - RNA, 19 nt, Artificial Sequence
  Description of Artificial Sequence: Synthetic oligonucleotide
  Sense strand starting at position 1422 of SEQ ID NO: 586919
acgagauuucuuggcugca

SEQ ID NO: 753705 - RNA, 19 nt, Artificial Sequence
  Description of Artificial Sequence: Synthetic oligonucleotide
  Antisense strand to SEQ ID NO: 753704
ugcagccaagaaaucucgu

SEQ ID NO: 753706 - RNA, 19 nt, Artificial Sequence
  Description of Artificial Sequence: Synthetic oligonucleotide
  Sense strand starting at position 1423 of SEQ ID NO: 586919
cgagauuucuuggcugcag

SEQ ID NO: 753707 - RNA, 19 nt, Artificial Sequence
  Description of Artificial Sequence: Synthetic oligonucleotide
  Antisense strand to SEQ ID NO: 753706
cugcagccaagaaaucucg

SEQ ID NO: 753708 - RNA, 19 nt, Artificial Sequence
  Description of Artificial Sequence: Synthetic oligonucleotide
  Sense strand starting at position 1504 of SEQ ID NO: 586919
agaagaaacccuuggcuua

SEQ ID NO: 753709 - RNA, 19 nt, Artificial Sequence
  Description of Artificial Sequence: Synthetic oligonucleotide
  Antisense strand to SEQ ID NO: 753708
uaagccaaggguuucuucu

SEQ ID NO: 753710 - RNA, 19 nt, Artificial Sequence
  Description of Artificial Sequence: Synthetic oligonucleotide
  Sense strand starting at position 2043 of SEQ ID NO: 586919
gagcgaugacgccugcgua

SEQ ID NO: 753711 - RNA, 19 nt, Artificial Sequence
  Description of Artificial Sequence: Synthetic oligonucleotide
  Antisense strand to SEQ ID NO: 753710
uacgcaggcgucaucgcuc

SEQ ID NO: 753712 - RNA, 19 nt, Artificial Sequence
  Description of Artificial Sequence: Synthetic oligonucleotide
  Sense strand starting at position 2165 of SEQ ID NO: 586919
gauguuuagugaccggguu

SEQ ID NO: 753713 - RNA, 19 nt, Artificial Sequence
  Description of Artificial Sequence: Synthetic oligonucleotide
  Antisense strand to SEQ ID NO: 753712
aacccggucacuaaacauc

SEQ ID NO: 753714 - RNA, 19 nt, Artificial Sequence
  Description of Artificial Sequence: Synthetic oligonucleotide
  Sense strand starting at position 2166 of SEQ ID NO: 586919
auguuuagugaccggguua

SEQ ID NO: 753715 - RNA, 19 nt, Artificial Sequence
  Description of Artificial Sequence: Synthetic oligonucleotide
  Antisense strand to SEQ ID NO: 753714
uaacccggucacuaaacau

SEQ ID NO: 753716 - RNA, 19 nt, Artificial Sequence
  Description of Artificial Sequence: Synthetic oligonucleotide
  Sense strand starting at position 2167 of SEQ ID NO: 586919
uguuuagugaccggguuaa

SEQ ID NO: 753717 - RNA, 19 nt, Artificial Sequence
  Description of Artificial Sequence: Synthetic oligonucleotide
  Antisense strand to SEQ ID NO: 753716
uuaacccggucacuaaaca

SEQ ID NO: 753718 - RNA, 19 nt, Artificial Sequence
  Description of Artificial Sequence: Synthetic oligonucleotide
  Sense strand starting at position 2535 of SEQ ID NO: 586919
gaucuuccagcguuagcuu

SEQ ID NO: 753719 - RNA, 19 nt, Artificial Sequence
  Description of Artificial Sequence: Synthetic oligonucleotide
  Antisense strand to SEQ ID NO: 753718
aagcuaacgcuggaagauc

SEQ ID NO: 753720 - RNA, 19 nt, Artificial Sequence
  Description of Artificial Sequence: Synthetic oligonucleotide
  Sense strand starting at position 2542 of SEQ ID NO: 586919
cagcguuagcuucccaagu

SEQ ID NO: 753721 - RNA, 19 nt, Artificial Sequence
  Description of Artificial Sequence: Synthetic oligonucleotide
  Antisense strand to SEQ ID NO: 753720
acuugggaagcuaacgcug

SEQ ID NO: 753722 - RNA, 19 nt, Artificial Sequence
  Description of Artificial Sequence: Synthetic oligonucleotide
  Sense strand starting at position 2587 of SEQ ID NO: 586919
acgccaagcuaauuuaauu

SEQ ID NO: 753723 - RNA, 19 nt, Artificial Sequence
  Description of Artificial Sequence: Synthetic oligonucleotide
  Antisense strand to SEQ ID NO: 753722
aauuaaauuagcuuggcgu

SEQ ID NO: 753724 - RNA, 19 nt, Artificial Sequence
  Description of Artificial Sequence: Synthetic oligonucleotide
  Sense strand starting at position 2803 of SEQ ID NO: 586919
gccuauagcccuuaacaga

SEQ ID NO: 753725 - RNA, 19 nt, Artificial Sequence
  Description of Artificial Sequence: Synthetic oligonucleotide
  Antisense strand to SEQ ID NO: 753724
ucuguuaagggcuauaggc

SEQ ID NO: 753726 - RNA, 19 nt, Artificial Sequence
  Description of Artificial Sequence: Synthetic oligonucleotide
  Sense strand starting at position 2828 of SEQ ID NO: 586919
cgacgagauuaacuacaau

SEQ ID NO: 753727 - RNA, 19 nt, Artificial Sequence
  Description of Artificial Sequence: Synthetic oligonucleotide
  Antisense strand to SEQ ID NO: 753726
auuguaguuaaucucgucg

SEQ ID NO: 753728 - RNA, 19 nt, Artificial Sequence
  Description of Artificial Sequence: Synthetic oligonucleotide
  Sense strand starting at position 3531 of SEQ ID NO: 586919
gaggacugaucccuacuuu

SEQ ID NO: 753729 - RNA, 19 nt, Artificial Sequence
  Description of Artificial Sequence: Synthetic oligonucleotide
  Antisense strand to SEQ ID NO: 753728
aaaguagggaucaguccuc

SEQ ID NO: 753730 - RNA, 19 nt, Artificial Sequence
  Description of Artificial Sequence: Synthetic oligonucleotide
  Sense strand starting at position 3694 of SEQ ID NO: 586919
aagccaggucccugcauau

SEQ ID NO: 753731 - RNA, 19 nt, Artificial Sequence
  Description of Artificial Sequence: Synthetic oligonucleotide
  Antisense strand to SEQ ID NO: 753730
auaugcagggaccuggcuu

SEQ ID NO: 753732 - RNA, 19 nt, Artificial Sequence
  Description of Artificial Sequence: Synthetic oligonucleotide
  Sense strand starting at position 3736 of SEQ ID NO: 586919
gguguaaggucaguuacuu

SEQ ID NO: 753733 - RNA, 19 nt, Artificial Sequence
  Description of Artificial Sequence: Synthetic oligonucleotide
  Antisense strand to SEQ ID NO: 753732
aaguaacugaccuuacacc

SEQ ID NO: 753734 - RNA, 19 nt, Artificial Sequence
  Description of Artificial Sequence: Synthetic oligonucleotide
  Sense strand starting at position 3740 of SEQ ID NO: 586919
uaaggucaguuacuugaga

SEQ ID NO: 753735 - RNA, 19 nt, Artificial Sequence
  Description of Artificial Sequence: Synthetic oligonucleotide
  Antisense strand to SEQ ID NO: 753734
ucucaaguaacugaccuua

SEQ ID NO: 753736 - RNA, 19 nt, Artificial Sequence
  Description of Artificial Sequence: Synthetic oligonucleotide
  Sense strand starting at position 3741 of SEQ ID NO: 586919
aaggucaguuacuugagaa

SEQ ID NO: 753737 - RNA, 19 nt, Artificial Sequence
  Description of Artificial Sequence: Synthetic oligonucleotide
  Antisense strand to SEQ ID NO: 753736
uucucaaguaacugaccuu

SEQ ID NO: 753738 - RNA, 19 nt, Artificial Sequence
  Description of Artificial Sequence: Synthetic oligonucleotide
  Sense strand starting at position 3742 of SEQ ID NO: 586919
aggucaguuacuugagaau

SEQ ID NO: 753739 - RNA, 19 nt, Artificial Sequence
  Description of Artificial Sequence: Synthetic oligonucleotide
  Antisense strand to SEQ ID NO: 753738
auucucaaguaacugaccu

SEQ ID NO: 753740 - RNA, 19 nt, Artificial Sequence
  Description of Artificial Sequence: Synthetic oligonucleotide
  Sense strand starting at position 3768 of SEQ ID NO: 586919
aaguuuaaccgugagccuu

SEQ ID NO: 753741 - RNA, 19 nt, Artificial Sequence
  Description of Artificial Sequence: Synthetic oligonucleotide
  Antisense strand to SEQ ID NO: 753740
aaggcucacgguuaaacuu

SEQ ID NO: 753742 - RNA, 19 nt, Artificial Sequence
  Description of Artificial Sequence: Synthetic oligonucleotide
  Sense strand starting at position 3953 of SEQ ID NO: 586919
uucuuugaguuaguguuaa

SEQ ID NO: 753743 - RNA, 19 nt, Artificial Sequence
  Description of Artificial Sequence: Synthetic oligonucleotide
  Antisense strand to SEQ ID NO: 753742
uuaacacuaacucaaagaa

SEQ ID NO: 753744 - RNA, 19 nt, Artificial Sequence
  Description of Artificial Sequence: Synthetic oligonucleotide
  Sense strand starting at position 3963 of SEQ ID NO: 586919
uaguguuaacagugugaua

SEQ ID NO: 753745 - RNA, 19 nt, Artificial Sequence
  Description of Artificial Sequence: Synthetic oligonucleotide
  Antisense strand to SEQ ID NO: 753744
uaucacacuguuaacacua

SEQ ID NO: 753746 - RNA, 19 nt, Artificial Sequence
  Description of Artificial Sequence: Synthetic oligonucleotide
  Sense strand starting at position 3965 of SEQ ID NO: 586919
guguuaacagugugauaau

SEQ ID NO: 753747 - RNA, 19 nt, Artificial Sequence
  Description of Artificial Sequence: Synthetic oligonucleotide
  Antisense strand to SEQ ID NO: 753746
auuaucacacuguuaacac

SEQ ID NO: 753748 - RNA, 19 nt, Artificial Sequence
  Description of Artificial Sequence: Synthetic oligonucleotide
  Sense strand starting at position 23 of SEQ ID NO: 586920
uuaacugcugucuacagua

SEQ ID NO: 753749 - RNA, 19 nt, Artificial Sequence
  Description of Artificial Sequence: Synthetic oligonucleotide
  Antisense strand to SEQ ID NO: 753748
uacuguagacagcaguuaa

SEQ ID NO: 753750 - RNA, 19 nt, Artificial Sequence
  Description of Artificial Sequence: Synthetic oligonucleotide
  Sense strand starting at position 28 of SEQ ID NO: 586920
ugcugucuacaguaagaua

SEQ ID NO: 753751 - RNA, 19 nt, Artificial Sequence
  Description of Artificial Sequence: Synthetic oligonucleotide
  Antisense strand to SEQ ID NO: 753750
uaucuuacuguagacagca

SEQ ID NO: 753752 - RNA, 19 nt, Artificial Sequence
  Description of Artificial Sequence: Synthetic oligonucleotide
  Sense strand starting at position 119 of SEQ ID NO: 586920
uuaaguucugcauggaaag

SEQ ID NO: 753753 - RNA, 19 nt, Artificial Sequence
  Description of Artificial Sequence: Synthetic oligonucleotide
  Antisense strand to SEQ ID NO: 753752
cuuuccaugcagaacuuaa

SEQ ID NO: 753754 - RNA, 19 nt, Artificial Sequence
  Description of Artificial Sequence: Synthetic oligonucleotide
  Sense strand starting at position 120 of SEQ ID NO: 586920
uaaguucugcauggaaagu

SEQ ID NO: 753755 - RNA, 19 nt, Artificial Sequence
  Description of Artificial Sequence: Synthetic oligonucleotide
  Antisense strand to SEQ ID NO: 753754
acuuuccaugcagaacuua

SEQ ID NO: 753756 - RNA, 19 nt, Artificial Sequence
  Description of Artificial Sequence: Synthetic oligonucleotide
  Sense strand starting at position 129 of SEQ ID NO: 586920
cauggaaaguccucuguaa

SEQ ID NO: 753757 - RNA, 19 nt, Artificial Sequence
  Description of Artificial Sequence: Synthetic oligonucleotide
  Antisense strand to SEQ ID NO: 753756
uuacagaggacuuuccaug

SEQ ID NO: 753758 - RNA, 19 nt, Artificial Sequence
  Description of Artificial Sequence: Synthetic oligonucleotide
  Sense strand starting at position 131 of SEQ ID NO: 586920
uggaaaguccucuguaagg

SEQ ID NO: 753759 - RNA, 19 nt, Artificial Sequence
  Description of Artificial Sequence: Synthetic oligonucleotide
  Antisense strand to SEQ ID NO: 753758
ccuuacagaggacuuucca

SEQ ID NO: 753760 - RNA, 19 nt, Artificial Sequence
  Description of Artificial Sequence: Synthetic oligonucleotide
  Sense strand starting at position 177 of SEQ ID NO: 586920
auucuugaacauggguuau

SEQ ID NO: 753761 - RNA, 19 nt, Artificial Sequence
  Description of Artificial Sequence: Synthetic oligonucleotide
  Antisense strand to SEQ ID NO: 753760
auaacccauguucaagaau

SEQ ID NO: 753762 - RNA, 19 nt, Artificial Sequence
  Description of Artificial Sequence: Synthetic oligonucleotide
  Sense strand starting at position 179 of SEQ ID NO: 586920
ucuugaacauggguuauaa

SEQ ID NO: 753763 - RNA, 19 nt, Artificial Sequence
  Description of Artificial Sequence: Synthetic oligonucleotide
  Antisense strand to SEQ ID NO: 753762
uuauaacccauguucaaga

SEQ ID NO: 753764 - RNA, 19 nt, Artificial Sequence
  Description of Artificial Sequence: Synthetic oligonucleotide
  Sense strand starting at position 225 of SEQ ID NO: 586920
acaaauagaugacugugua

SEQ ID NO: 753765 - RNA, 19 nt, Artificial Sequence
  Description of Artificial Sequence: Synthetic oligonucleotide
  Antisense strand to SEQ ID NO: 753764
uacacagucaucuauuugu

SEQ ID NO: 753766 - RNA, 19 nt, Artificial Sequence
  Description of Artificial Sequence: Synthetic oligonucleotide
  Sense strand starting at position 226 of SEQ ID NO: 586920
caaauagaugacuguguau

SEQ ID NO: 753767 - RNA, 19 nt, Artificial Sequence
  Description of Artificial Sequence: Synthetic oligonucleotide
  Antisense strand to SEQ ID NO: 753766
auacacagucaucuauuug

SEQ ID NO: 753768 - RNA, 19 nt, Artificial Sequence
  Description of Artificial Sequence: Synthetic oligonucleotide
  Sense strand starting at position 228 of SEQ ID NO: 586920
aauagaugacuguguauua

SEQ ID NO: 753769 - RNA, 19 nt, Artificial Sequence
  Description of Artificial Sequence: Synthetic oligonucleotide
  Antisense strand to SEQ ID NO: 753768
uaauacacagucaucuauu

SEQ ID NO: 753770 - RNA, 19 nt, Artificial Sequence
  Description of Artificial Sequence: Synthetic oligonucleotide
  Sense strand starting at position 564 of SEQ ID NO: 586920
uccuaagcucagggauaaa

SEQ ID NO: 753771 - RNA, 19 nt, Artificial Sequence
  Description of Artificial Sequence: Synthetic oligonucleotide
  Antisense strand to SEQ ID NO: 753770
uuuaucccugagcuuagga

SEQ ID NO: 753772 - RNA, 19 nt, Artificial Sequence
  Description of Artificial Sequence: Synthetic oligonucleotide
  Sense strand starting at position 947 of SEQ ID NO: 586920
ucuuacuucuaucugagga

SEQ ID NO: 753773 - RNA, 19 nt, Artificial Sequence
  Description of Artificial Sequence: Synthetic oligonucleotide
  Antisense strand to SEQ ID NO: 753772
uccucagauagaaguaaga

SEQ ID NO: 753774 - RNA, 19 nt, Artificial Sequence
  Description of Artificial Sequence: Synthetic oligonucleotide
  Sense strand starting at position 1091 of SEQ ID NO: 586920
gcccgaaagcaacaaauaa

SEQ ID NO: 753775 - RNA, 19 nt, Artificial Sequence
  Description of Artificial Sequence: Synthetic oligonucleotide
  Antisense strand to SEQ ID NO: 753774
uuauuuguugcuuucgggc

SEQ ID NO: 753776 - RNA, 19 nt, Artificial Sequence
  Description of Artificial Sequence: Synthetic oligonucleotide
  Sense strand starting at position 1204 of SEQ ID NO: 586920
aggacugaguuugucggaa

SEQ ID NO: 753777 - RNA, 19 nt, Artificial Sequence
  Description of Artificial Sequence: Synthetic oligonucleotide
  Antisense strand to SEQ ID NO: 753776
uuccgacaaacucaguccu

SEQ ID NO: 753778 - RNA, 19 nt, Artificial Sequence
  Description of Artificial Sequence: Synthetic oligonucleotide
  Sense strand starting at position 1287 of SEQ ID NO: 586920
uggauacuugacggugaaa

SEQ ID NO: 753779 - RNA, 19 nt, Artificial Sequence
  Description of Artificial Sequence: Synthetic oligonucleotide
  Antisense strand to SEQ ID NO: 753778
uuucaccgucaaguaucca

SEQ ID NO: 753780 - RNA, 19 nt, Artificial Sequence
  Description of Artificial Sequence: Synthetic oligonucleotide
  Sense strand starting at position 1415 of SEQ ID NO: 586920
cggcgaguugacuucggua

SEQ ID NO: 753781 - RNA, 19 nt, Artificial Sequence
  Description of Artificial Sequence: Synthetic oligonucleotide
  Antisense strand to SEQ ID NO: 753780
uaccgaagucaacucgccg

SEQ ID NO: 753782 - RNA, 19 nt, Artificial Sequence
  Description of Artificial Sequence: Synthetic oligonucleotide
  Sense strand starting at position 2027 of SEQ ID NO: 586920
gcggaaucggcgucccaga

SEQ ID NO: 753783 - RNA, 19 nt, Artificial Sequence
  Description of Artificial Sequence: Synthetic oligonucleotide
  Antisense strand to SEQ ID NO: 753782
ucugggacgccgauuccgc

SEQ ID NO: 753784 - RNA, 19 nt, Artificial Sequence
  Description of Artificial Sequence: Synthetic oligonucleotide
  Sense strand starting at position 2051 of SEQ ID NO: 586920
ugagauucagagggaguuu

SEQ ID NO: 753785 - RNA, 19 nt, Artificial Sequence
  Description of Artificial Sequence: Synthetic oligonucleotide
  Antisense strand to SEQ ID NO: 753784
aaacucccucugaaucuca

SEQ ID NO: 753786 - RNA, 19 nt, Artificial Sequence
  Description of Artificial Sequence: Synthetic oligonucleotide
  Sense strand starting at position 2327 of SEQ ID NO: 586920
ucuggcccucuagaauaau

SEQ ID NO: 753787 - RNA, 19 nt, Artificial Sequence
  Description of Artificial Sequence: Synthetic oligonucleotide
  Antisense strand to SEQ ID NO: 753786
auuauucuagagggccaga

SEQ ID NO: 753788 - RNA, 19 nt, Artificial Sequence
  Description of Artificial Sequence: Synthetic oligonucleotide
  Sense strand starting at position 2411 of SEQ ID NO: 586920
auuagcaugcuggaauaau

SEQ ID NO: 753789 - RNA, 19 nt, Artificial Sequence
  Description of Artificial Sequence: Synthetic oligonucleotide
  Antisense strand to SEQ ID NO: 753788
auuauuccagcaugcuaau

SEQ ID NO: 753790 - RNA, 19 nt, Artificial Sequence
  Description of Artificial Sequence: Synthetic oligonucleotide
  Sense strand starting at position 2504 of SEQ ID NO: 586920
gggcaaucucugcauuccu

SEQ ID NO: 753791 - RNA, 19 nt, Artificial Sequence
  Description of Artificial Sequence: Synthetic oligonucleotide
  Antisense strand to SEQ ID NO: 753790
aggaaugcagagauugccc

SEQ ID NO: 753792 - RNA, 19 nt, Artificial Sequence
  Description of Artificial Sequence: Synthetic oligonucleotide
  Sense strand starting at position 2514 of SEQ ID NO: 586920
ugcauuccugacgaccaaa

SEQ ID NO: 753793 - RNA, 19 nt, Artificial Sequence
  Description of Artificial Sequence: Synthetic oligonucleotide
  Antisense strand to SEQ ID NO: 753792
uuuggucgucaggaaugca

SEQ ID NO: 753794 - RNA, 19 nt, Artificial Sequence
  Description of Artificial Sequence: Synthetic oligonucleotide
  Sense strand starting at position 2581 of SEQ ID NO: 586920
ucagauuucuuggacagga

SEQ ID NO: 753795 - RNA, 19 nt, Artificial Sequence
  Description of Artificial Sequence: Synthetic oligonucleotide
  Antisense strand to SEQ ID NO: 753794
uccuguccaagaaaucuga

SEQ ID NO: 753796 - RNA, 19 nt, Artificial Sequence
  Description of Artificial Sequence: Synthetic oligonucleotide
  Sense strand starting at position 2633 of SEQ ID NO: 586920
gugacagagcucuguaaau

SEQ ID NO: 753797 - RNA, 19 nt, Artificial Sequence
  Description of Artificial Sequence: Synthetic oligonucleotide
  Antisense strand to SEQ ID NO: 753796
auuuacagagcucugucac

SEQ ID NO: 753798 - RNA, 19 nt, Artificial Sequence
  Description of Artificial Sequence: Synthetic oligonucleotide
  Sense strand starting at position 2692 of SEQ ID NO: 586920
gcuuccuuuggccaagaaa

SEQ ID NO: 753799 - RNA, 19 nt, Artificial Sequence
  Description of Artificial Sequence: Synthetic oligonucleotide
  Antisense strand to SEQ ID NO: 753798
uuucuuggccaaaggaagc

SEQ ID NO: 753800 - RNA, 19 nt, Artificial Sequence
  Description of Artificial Sequence: Synthetic oligonucleotide
  Sense strand starting at position 3049 of SEQ ID NO: 586920
acaugaaucccuggaaggu

SEQ ID NO: 753801 - RNA, 19 nt, Artificial Sequence
  Description of Artificial Sequence: Synthetic oligonucleotide
  Antisense strand to SEQ ID NO: 753800
accuuccagggauucaugu

SEQ ID NO: 753802 - RNA, 19 nt, Artificial Sequence
  Description of Artificial Sequence: Synthetic oligonucleotide
  Sense strand starting at position 3218 of SEQ ID NO: 586920
aggcaauuacguuaccagu

SEQ ID NO: 753803 - RNA, 19 nt, Artificial Sequence
  Description of Artificial Sequence: Synthetic oligonucleotide
  Antisense strand to SEQ ID NO: 753802
acugguaacguaauugccu

SEQ ID NO: 753804 - RNA, 19 nt, Artificial Sequence
  Description of Artificial Sequence: Synthetic oligonucleotide
  Sense strand starting at position 3591 of SEQ ID NO: 586920
caaauuuaucagcgggcau

SEQ ID NO: 753805 - RNA, 19 nt, Artificial Sequence
  Description of Artificial Sequence: Synthetic oligonucleotide
  Antisense strand to SEQ ID NO: 753804
augcccgcugauaaauuug

SEQ ID NO: 753806 - RNA, 19 nt, Artificial Sequence
  Description of Artificial Sequence: Synthetic oligonucleotide
  Sense strand starting at position 3622 of SEQ ID NO: 586920
cagagugauuggccaauau

SEQ ID NO: 753807 - RNA, 19 nt, Artificial Sequence
  Description of Artificial Sequence: Synthetic oligonucleotide
  Antisense strand to SEQ ID NO: 753806
auauuggccaaucacucug

SEQ ID NO: 753808 - RNA, 19 nt, Artificial Sequence
  Description of Artificial Sequence: Synthetic oligonucleotide
  Sense strand starting at position 3626 of SEQ ID NO: 586920
gugauuggccaauauccca

SEQ ID NO: 753809 - RNA, 19 nt, Artificial Sequence
  Description of Artificial Sequence: Synthetic oligonucleotide
  Antisense strand to SEQ ID NO: 753808
ugggauauuggccaaucac

SEQ ID NO: 753810 - RNA, 19 nt, Artificial Sequence
  Description of Artificial Sequence: Synthetic oligonucleotide
  Sense strand starting at position 3634 of SEQ ID NO: 586920
ccaauaucccaaugaggua

SEQ ID NO: 753811 - RNA, 19 nt, Artificial Sequence
  Description of Artificial Sequence: Synthetic oligonucleotide
  Antisense strand to SEQ ID NO: 753810
uaccucauugggauauugg

SEQ ID NO: 753812 - RNA, 19 nt, Artificial Sequence
  Description of Artificial Sequence: Synthetic oligonucleotide
  Sense strand starting at position 3658 of SEQ ID NO: 586920
gguuguaccuccuuauuag

SEQ ID NO: 753813 - RNA, 19 nt, Artificial Sequence
  Description of Artificial Sequence: Synthetic oligonucleotide
  Antisense strand to SEQ ID NO: 753812
cuaauaaggagguacaacc

SEQ ID NO: 753814 - RNA, 19 nt, Artificial Sequence
  Description of Artificial Sequence: Synthetic oligonucleotide
  Sense strand starting at position 3659 of SEQ ID NO: 586920
guuguaccuccuuauuaga

SEQ ID NO: 753815 - RNA, 19 nt, Artificial Sequence
  Description of Artificial Sequence: Synthetic oligonucleotide
  Antisense strand to SEQ ID NO: 753814
ucuaauaaggagguacaac

SEQ ID NO: 753816 - RNA, 19 nt, Artificial Sequence
  Description of Artificial Sequence: Synthetic oligonucleotide
  Sense strand starting at position 3681 of SEQ ID NO: 586920
aaggcagaugggugaugua

SEQ ID NO: 753817 - RNA, 19 nt, Artificial Sequence
  Description of Artificial Sequence: Synthetic oligonucleotide
  Antisense strand to SEQ ID NO: 753816
uacaucacccaucugccuu

SEQ ID NO: 753818 - RNA, 19 nt, Artificial Sequence
  Description of Artificial Sequence: Synthetic oligonucleotide
  Sense strand starting at position 3690 of SEQ ID NO: 586920
gggugauguaugggugauu

SEQ ID NO: 753819 - RNA, 19 nt, Artificial Sequence
  Description of Artificial Sequence: Synthetic oligonucleotide
  Antisense strand to SEQ ID NO: 753818
aaucacccauacaucaccc

SEQ ID NO: 753820 - RNA, 19 nt, Artificial Sequence
  Description of Artificial Sequence: Synthetic oligonucleotide
  Sense strand starting at position 3840 of SEQ ID NO: 586920
augaguucaguuuguggaa

SEQ ID NO: 753821 - RNA, 19 nt, Artificial Sequence
  Description of Artificial Sequence: Synthetic oligonucleotide
  Antisense strand to SEQ ID NO: 753820
uuccacaaacugaacucau

SEQ ID NO: 753822 - RNA, 19 nt, Artificial Sequence
  Description of Artificial Sequence: Synthetic oligonucleotide
  Sense strand starting at position 3841 of SEQ ID NO: 586920
ugaguucaguuuguggaaa

SEQ ID NO: 753823 - RNA, 19 nt, Artificial Sequence
  Description of Artificial Sequence: Synthetic oligonucleotide
  Antisense strand to SEQ ID NO: 753822
uuuccacaaacugaacuca

SEQ ID NO: 753824 - RNA, 19 nt, Artificial Sequence
  Description of Artificial Sequence: Synthetic oligonucleotide
  Sense strand starting at position 3895 of SEQ ID NO: 586920
uuggcaagucgagacuuua

SEQ ID NO: 753825 - RNA, 19 nt, Artificial Sequence
  Description of Artificial Sequence: Synthetic oligonucleotide
  Antisense strand to SEQ ID NO: 753824
uaaagucucgacuugccaa

SEQ ID NO: 753826 - RNA, 19 nt, Artificial Sequence
  Description of Artificial Sequence: Synthetic oligonucleotide
  Sense strand starting at position 3903 of SEQ ID NO: 586920
ucgagacuuuaggcagaua

SEQ ID NO: 753827 - RNA, 19 nt, Artificial Sequence
  Description of Artificial Sequence: Synthetic oligonucleotide
  Antisense strand to SEQ ID NO: 753826
uaucugccuaaagucucga

SEQ ID NO: 753828 - RNA, 19 nt, Artificial Sequence
  Description of Artificial Sequence: Synthetic oligonucleotide
  Sense strand starting at position 114 of SEQ ID NO: 586921
gcuuuaaagcacuagaagu

SEQ ID NO: 753829 - RNA, 19 nt, Artificial Sequence
  Description of Artificial Sequence: Synthetic oligonucleotide
  Antisense strand to SEQ ID NO: 753828
acuucuagugcuuuaaagc

SEQ ID NO: 753830 - RNA, 19 nt, Artificial Sequence
  Description of Artificial Sequence: Synthetic oligonucleotide
  Sense strand starting at position 127 of SEQ ID NO: 586921
agaagugguagccagcuua

SEQ ID NO: 753831 - RNA, 19 nt, Artificial Sequence
  Description of Artificial Sequence: Synthetic oligonucleotide
  Antisense strand to SEQ ID NO: 753830
uaagcuggcuaccacuucu

SEQ ID NO: 753832 - RNA, 19 nt, Artificial Sequence
  Description of Artificial Sequence: Synthetic oligonucleotide
  Sense strand starting at position 138 of SEQ ID NO: 586921
ccagcuuagcucuagaaag

SEQ ID NO: 753833 - RNA, 19 nt, Artificial Sequence
  Description of Artificial Sequence: Synthetic oligonucleotide
  Antisense strand to SEQ ID NO: 753832
cuuucuagagcuaagcugg

SEQ ID NO: 753834 - RNA, 19 nt, Artificial Sequence
  Description of Artificial Sequence: Synthetic oligonucleotide
  Sense strand starting at position 140 of SEQ ID NO: 586921
agcuuagcucuagaaagca

SEQ ID NO: 753835 - RNA, 19 nt, Artificial Sequence
  Description of Artificial Sequence: Synthetic oligonucleotide
  Antisense strand to SEQ ID NO: 753834
ugcuuucuagagcuaagcu

SEQ ID NO: 753836 - RNA, 19 nt, Artificial Sequence
  Description of Artificial Sequence: Synthetic oligonucleotide
  Sense strand starting at position 187 of SEQ ID NO: 586921
cguccacaguucucauaau

SEQ ID NO: 753837 - RNA, 19 nt, Artificial Sequence
  Description of Artificial Sequence: Synthetic oligonucleotide
  Antisense strand to SEQ ID NO: 753836
auuaugagaacuguggacg

SEQ ID NO: 753838 - RNA, 19 nt, Artificial Sequence
  Description of Artificial Sequence: Synthetic oligonucleotide
  Sense strand starting at position 806 of SEQ ID NO: 586921
augaaaucucgaggcaaca

SEQ ID NO: 753839 - RNA, 19 nt, Artificial Sequence
  Description of Artificial Sequence: Synthetic oligonucleotide
  Antisense strand to SEQ ID NO: 753838
uguugccucgagauuucau

SEQ ID NO: 753840 - RNA, 19 nt, Artificial Sequence
  Description of Artificial Sequence: Synthetic oligonucleotide
  Sense strand starting at position 921 of SEQ ID NO: 586921
ccgagaaagcuuugcuaua

SEQ ID NO: 753841 - RNA, 19 nt, Artificial Sequence
  Description of Artificial Sequence: Synthetic oligonucleotide
  Antisense strand to SEQ ID NO: 753840
uauagcaaagcuuucucgg

SEQ ID NO: 753842 - RNA, 19 nt, Artificial Sequence
  Description of Artificial Sequence: Synthetic oligonucleotide
  Sense strand starting at position 922 of SEQ ID NO: 586921
cgagaaagcuuugcuauac

SEQ ID NO: 753843 - RNA, 19 nt, Artificial Sequence
  Description of Artificial Sequence: Synthetic oligonucleotide
  Antisense strand to SEQ ID NO: 753842
guauagcaaagcuuucucg

SEQ ID NO: 753844 - RNA, 19 nt, Artificial Sequence
  Description of Artificial Sequence: Synthetic oligonucleotide
  Sense strand starting at position 1136 of SEQ ID NO: 586921
ccuauaugcucuguuacuu

SEQ ID NO: 753845 - RNA, 19 nt, Artificial Sequence
  Description of Artificial Sequence: Synthetic oligonucleotide
  Antisense strand to SEQ ID NO: 753844
aaguaacagagcauauagg

SEQ ID NO: 753846 - RNA, 19 nt, Artificial Sequence
  Description of Artificial Sequence: Synthetic oligonucleotide
  Sense strand starting at position 1533 of SEQ ID NO: 586921
auccuuaaggcucaguuaa

SEQ ID NO: 753847 - RNA, 19 nt, Artificial Sequence
  Description of Artificial Sequence: Synthetic oligonucleotide
  Antisense strand to SEQ ID NO: 753846
uuaacugagccuuaaggau

SEQ ID NO: 753848 - RNA, 19 nt, Artificial Sequence
  Description of Artificial Sequence: Synthetic oligonucleotide
  Sense strand starting at position 2346 of SEQ ID NO: 586921
ccaggugauuucguaacuc

SEQ ID NO: 753849 - RNA, 19 nt, Artificial Sequence
  Description of Artificial Sequence: Synthetic oligonucleotide
  Antisense strand to SEQ ID NO: 753848
gaguuacgaaaucaccugg

SEQ ID NO: 753850 - RNA, 19 nt, Artificial Sequence
  Description of Artificial Sequence: Synthetic oligonucleotide
  Sense strand starting at position 2428 of SEQ ID NO: 586921
uggcccaugucucuuacau

SEQ ID NO: 753851 - RNA, 19 nt, Artificial Sequence
  Description of Artificial Sequence: Synthetic oligonucleotide
  Antisense strand to SEQ ID NO: 753850
auguaagagacaugggcca

SEQ ID NO: 753852 - RNA, 19 nt, Artificial Sequence
  Description of Artificial Sequence: Synthetic oligonucleotide
  Sense strand starting at position 2505 of SEQ ID NO: 586921
acaugaugcuacuccgaga

SEQ ID NO: 753853 - RNA, 19 nt, Artificial Sequence
  Description of Artificial Sequence: Synthetic oligonucleotide
  Antisense strand to SEQ ID NO: 753852
ucucggaguagcaucaugu

SEQ ID NO: 753854 - RNA, 19 nt, Artificial Sequence
  Description of Artificial Sequence: Synthetic oligonucleotide
  Sense strand starting at position 2899 of SEQ ID NO: 586921
cgagaugauaugugguaag

SEQ ID NO: 753855 - RNA, 19 nt, Artificial Sequence
  Description of Artificial Sequence: Synthetic oligonucleotide
  Antisense strand to SEQ ID NO: 753854
cuuaccacauaucaucucg

SEQ ID NO: 753856 - RNA, 19 nt, Artificial Sequence
  Description of Artificial Sequence: Synthetic oligonucleotide
  Sense strand starting at position 2988 of SEQ ID NO: 586921
cuccuuugacuguggugaa

SEQ ID NO: 753857 - RNA, 19 nt, Artificial Sequence
  Description of Artificial Sequence: Synthetic oligonucleotide
  Antisense strand to SEQ ID NO: 753856
uucaccacagucaaaggag

SEQ ID NO: 753858 - RNA, 19 nt, Artificial Sequence
  Description of Artificial Sequence: Synthetic oligonucleotide
  Sense strand starting at position 3325 of SEQ ID NO: 586921
uuugguguaucuuucccau

SEQ ID NO: 753859 - RNA, 19 nt, Artificial Sequence
  Description of Artificial Sequence: Synthetic oligonucleotide
  Antisense strand to SEQ ID NO: 753858
augggaaagauacaccaaa

SEQ ID NO: 753860 - RNA, 19 nt, Artificial Sequence
  Description of Artificial Sequence: Synthetic oligonucleotide
  Sense strand starting at position 3327 of SEQ ID NO: 586921
ugguguaucuuucccauua

SEQ ID NO: 753861 - RNA, 19 nt, Artificial Sequence
  Description of Artificial Sequence: Synthetic oligonucleotide
  Antisense strand to SEQ ID NO: 753860
uaaugggaaagauacacca

SEQ ID NO: 753862 - RNA, 19 nt, Artificial Sequence
  Description of Artificial Sequence: Synthetic oligonucleotide
  Sense strand starting at position 3328 of SEQ ID NO: 586921
gguguaucuuucccauuau

SEQ ID NO: 753863 - RNA, 19 nt, Artificial Sequence
  Description of Artificial Sequence: Synthetic oligonucleotide
  Antisense strand to SEQ ID NO: 753862
auaaugggaaagauacacc

SEQ ID NO: 753864 - RNA, 19 nt, Artificial Sequence
  Description of Artificial Sequence: Synthetic oligonucleotide
  Sense strand starting at position 3350 of SEQ ID NO: 586921
uucuuauugccucaaggcu

SEQ ID NO: 753865 - RNA, 19 nt, Artificial Sequence
  Description of Artificial Sequence: Synthetic oligonucleotide
  Antisense strand to SEQ ID NO: 753864
agccuugaggcaauaagaa

SEQ ID NO: 753866 - RNA, 19 nt, Artificial Sequence
  Description of Artificial Sequence: Synthetic oligonucleotide
  Sense strand starting at position 3380 of SEQ ID NO: 586921
aaucuagugguaugcauua

SEQ ID NO: 753867 - RNA, 19 nt, Artificial Sequence
  Description of Artificial Sequence: Synthetic oligonucleotide
  Antisense strand to SEQ ID NO: 753866
uaaugcauaccacuagauu

SEQ ID NO: 753868 - RNA, 19 nt, Artificial Sequence
  Description of Artificial Sequence: Synthetic oligonucleotide
  Sense strand starting at position 3495 of SEQ ID NO: 586921
ucugaaagccaacauaguu

SEQ ID NO: 753869 - RNA, 19 nt, Artificial Sequence
  Description of Artificial Sequence: Synthetic oligonucleotide
  Antisense strand to SEQ ID NO: 753868
aacuauguuggcuuucaga

SEQ ID NO: 753870 - RNA, 19 nt, Artificial Sequence
  Description of Artificial Sequence: Synthetic oligonucleotide
  Sense strand starting at position 3564 of SEQ ID NO: 586921
ugaggaugcuguuucgaaa

SEQ ID NO: 753871 - RNA, 19 nt, Artificial Sequence
  Description of Artificial Sequence: Synthetic oligonucleotide
  Antisense strand to SEQ ID NO: 753870
uuucgaaacagcauccuca

SEQ ID NO: 753872 - RNA, 19 nt, Artificial Sequence
  Description of Artificial Sequence: Synthetic oligonucleotide
  Sense strand starting at position 3571 of SEQ ID NO: 586921
gcuguuucgaaagcugguu

SEQ ID NO: 753873 - RNA, 19 nt, Artificial Sequence
  Description of Artificial Sequence: Synthetic oligonucleotide
  Antisense strand to SEQ ID NO: 753872
aaccagcuuucgaaacagc

SEQ ID NO: 753874 - RNA, 19 nt, Artificial Sequence
  Description of Artificial Sequence: Synthetic oligonucleotide
  Sense strand starting at position 3630 of SEQ ID NO: 586921
guguaucuugcaggaaaca

SEQ ID NO: 753875 - RNA, 19 nt, Artificial Sequence
  Description of Artificial Sequence: Synthetic oligonucleotide
  Antisense strand to SEQ ID NO: 753874
uguuuccugcaagauacac

SEQ ID NO: 753876 - RNA, 19 nt, Artificial Sequence
  Description of Artificial Sequence: Synthetic oligonucleotide
  Sense strand starting at position 3659 of SEQ ID NO: 586921
aagaaugugagguggugua

SEQ ID NO: 753877 - RNA, 19 nt, Artificial Sequence
  Description of Artificial Sequence: Synthetic oligonucleotide
  Antisense strand to SEQ ID NO: 753876
uacaccaccucacauucuu

SEQ ID NO: 753878 - RNA, 19 nt, Artificial Sequence
  Description of Artificial Sequence: Synthetic oligonucleotide
  Sense strand starting at position 3673 of SEQ ID NO: 586921
guguaagacuaguuugucu

SEQ ID NO: 753879 - RNA, 19 nt, Artificial Sequence
  Description of Artificial Sequence: Synthetic oligonucleotide
  Antisense strand to SEQ ID NO: 753878
agacaaacuagucuuacac

SEQ ID NO: 753880 - RNA, 19 nt, Artificial Sequence
  Description of Artificial Sequence: Synthetic oligonucleotide
  Sense strand starting at position 3677 of SEQ ID NO: 586921
aagacuaguuugucugguu

SEQ ID NO: 753881 - RNA, 19 nt, Artificial Sequence
  Description of Artificial Sequence: Synthetic oligonucleotide
  Antisense strand to SEQ ID NO: 753880
aaccagacaaacuagucuu

SEQ ID NO: 753882 - RNA, 19 nt, Artificial Sequence
  Description of Artificial Sequence: Synthetic oligonucleotide
  Sense strand starting at position 3742 of SEQ ID NO: 586921
agcaaucaaucuuugagaa

SEQ ID NO: 753883 - RNA, 19 nt, Artificial Sequence
  Description of Artificial Sequence: Synthetic oligonucleotide
  Antisense strand to SEQ ID NO: 753882
uucucaaagauugauugcu

SEQ ID NO: 753884 - RNA, 19 nt, Artificial Sequence
  Description of Artificial Sequence: Synthetic oligonucleotide
  Sense strand starting at position 3743 of SEQ ID NO: 586921
gcaaucaaucuuugagaag

SEQ ID NO: 753885 - RNA, 19 nt, Artificial Sequence
  Description of Artificial Sequence: Synthetic oligonucleotide
  Antisense strand to SEQ ID NO: 753884
cuucucaaagauugauugc

SEQ ID NO: 753886 - RNA, 19 nt, Artificial Sequence
  Description of Artificial Sequence: Synthetic oligonucleotide
  Sense strand starting at position 3802 of SEQ ID NO: 586921
ccuccaugagccuaagcau

SEQ ID NO: 753887 - RNA, 19 nt, Artificial Sequence
  Description of Artificial Sequence: Synthetic oligonucleotide
  Antisense strand to SEQ ID NO: 753886
augcuuaggcucauggagg

SEQ ID NO: 753888 - RNA, 19 nt, Artificial Sequence
  Description of Artificial Sequence: Synthetic oligonucleotide
  Sense strand starting at position 3809 of SEQ ID NO: 586921
gagccuaagcauuagagca

SEQ ID NO: 753889 - RNA, 19 nt, Artificial Sequence
  Description of Artificial Sequence: Synthetic oligonucleotide
  Antisense strand to SEQ ID NO: 753888
ugcucuaaugcuuaggcuc

SEQ ID NO: 753890 - RNA, 19 nt, Artificial Sequence
  Description of Artificial Sequence: Synthetic oligonucleotide
  Sense strand starting at position 3824 of SEQ ID NO: 586921
agcagaaaugacugagggu

SEQ ID NO: 753891 - RNA, 19 nt, Artificial Sequence
  Description of Artificial Sequence: Synthetic oligonucleotide
  Antisense strand to SEQ ID NO: 753890
acccucagucauuucugcu

SEQ ID NO: 753892 - RNA, 19 nt, Artificial Sequence
  Description of Artificial Sequence: Synthetic oligonucleotide
  Sense strand starting at position 3894 of SEQ ID NO: 586921
cccacaauucuaggguagu

SEQ ID NO: 753893 - RNA, 19 nt, Artificial Sequence
  Description of Artificial Sequence: Synthetic oligonucleotide
  Antisense strand to SEQ ID NO: 753892
acuacccuagaauuguggg

SEQ ID NO: 753894 - RNA, 19 nt, Artificial Sequence
  Description of Artificial Sequence: Synthetic oligonucleotide
  Sense strand starting at position 3924 of SEQ ID NO: 586921
aaagcagaguuccugagaa

SEQ ID NO: 753895 - RNA, 19 nt, Artificial Sequence
  Description of Artificial Sequence: Synthetic oligonucleotide
  Antisense strand to SEQ ID NO: 753894
uucucaggaacucugcuuu

SEQ ID NO: 753896 - RNA, 19 nt, Artificial Sequence
  Description of Artificial Sequence: Synthetic oligonucleotide
  Sense strand starting at position 3934 of SEQ ID NO: 586921
uccugagaagaaugcagua

SEQ ID NO: 753897 - RNA, 19 nt, Artificial Sequence
  Description of Artificial Sequence: Synthetic oligonucleotide
  Antisense strand to SEQ ID NO: 753896
uacugcauucuucucagga

SEQ ID NO: 753898 - RNA, 19 nt, Artificial Sequence
  Description of Artificial Sequence: Synthetic oligonucleotide
  Sense strand starting at position 3946 of SEQ ID NO: 586921
ugcaguaguggcugacaga

SEQ ID NO: 753899 - RNA, 19 nt, Artificial Sequence
  Description of Artificial Sequence: Synthetic oligonucleotide
  Antisense strand to SEQ ID NO: 753898
ucugucagccacuacugca

SEQ ID NO: 753900 - RNA, 19 nt, Artificial Sequence
  Description of Artificial Sequence: Synthetic oligonucleotide
  Sense strand starting at position 3947 of SEQ ID NO: 586921
gcaguaguggcugacagaa

SEQ ID NO: 753901 - RNA, 19 nt, Artificial Sequence
  Description of Artificial Sequence: Synthetic oligonucleotide
  Antisense strand to SEQ ID NO: 753900
uucugucagccacuacugc

SEQ ID NO: 753902 - RNA, 19 nt, Artificial Sequence
  Description of Artificial Sequence: Synthetic oligonucleotide
  Sense strand starting at position 3973 of SEQ ID NO: 586921
ggguguuguagugauaugu

SEQ ID NO: 753903 - RNA, 19 nt, Artificial Sequence
  Description of Artificial Sequence: Synthetic oligonucleotide
  Antisense strand to SEQ ID NO: 753902
acauaucacuacaacaccc

SEQ ID NO: 753904 - RNA, 19 nt, Artificial Sequence
  Description of Artificial Sequence: Synthetic oligonucleotide
  Sense strand starting at position 3982 of SEQ ID NO: 586921
agugauauguggccaugac

SEQ ID NO: 753905 - RNA, 19 nt, Artificial Sequence
  Description of Artificial Sequence: Synthetic oligonucleotide
  Antisense strand to SEQ ID NO: 753904
gucauggccacauaucacu

SEQ ID NO: 753906 - RNA, 19 nt, Artificial Sequence
  Description of Artificial Sequence: Synthetic oligonucleotide
  Sense strand starting at position 3983 of SEQ ID NO: 586921
gugauauguggccaugaca

SEQ ID NO: 753907 - RNA, 19 nt, Artificial Sequence
  Description of Artificial Sequence: Synthetic oligonucleotide
  Antisense strand to SEQ ID NO: 753906
ugucauggccacauaucac

SEQ ID NO: 753908 - RNA, 19 nt, Artificial Sequence
  Description of Artificial Sequence: Synthetic oligonucleotide
  Sense strand starting at position 34 of SEQ ID NO: 586922
cuaagaaccugguauuugu

SEQ ID NO: 753909 - RNA, 19 nt, Artificial Sequence
  Description of Artificial Sequence: Synthetic oligonucleotide
  Antisense strand to SEQ ID NO: 753908
acaaauaccagguucuuag

SEQ ID NO: 753910 - RNA, 19 nt, Artificial Sequence
  Description of Artificial Sequence: Synthetic oligonucleotide
  Sense strand starting at position 44 of SEQ ID NO: 586922
gguauuuguuaugugcacu

SEQ ID NO: 753911 - RNA, 19 nt, Artificial Sequence
  Description of Artificial Sequence: Synthetic oligonucleotide
  Antisense strand to SEQ ID NO: 753910
agugcacauaacaaauacc

SEQ ID NO: 753912 - RNA, 19 nt, Artificial Sequence
  Description of Artificial Sequence: Synthetic oligonucleotide
  Sense strand starting at position 66 of SEQ ID NO: 586922
cuuggaugauguuuacaau

SEQ ID NO: 753913 - RNA, 19 nt, Artificial Sequence
  Description of Artificial Sequence: Synthetic oligonucleotide
  Antisense strand to SEQ ID NO: 753912
auuguaaacaucauccaag

SEQ ID NO: 753914 - RNA, 19 nt, Artificial Sequence
  Description of Artificial Sequence: Synthetic oligonucleotide
  Sense strand starting at position 102 of SEQ ID NO: 586922
aagagcuuguagguaucaa

SEQ ID NO: 753915 - RNA, 19 nt, Artificial Sequence
  Description of Artificial Sequence: Synthetic oligonucleotide
  Antisense strand to SEQ ID NO: 753914
uugauaccuacaagcucuu

SEQ ID NO: 753916 - RNA, 19 nt, Artificial Sequence
  Description of Artificial Sequence: Synthetic oligonucleotide
  Sense strand starting at position 103 of SEQ ID NO: 586922
agagcuuguagguaucaaa

SEQ ID NO: 753917 - RNA, 19 nt, Artificial Sequence
  Description of Artificial Sequence: Synthetic oligonucleotide
  Antisense strand to SEQ ID NO: 753916
uuugauaccuacaagcucu

SEQ ID NO: 753918 - RNA, 19 nt, Artificial Sequence
  Description of Artificial Sequence: Synthetic oligonucleotide
  Sense strand starting at position 161 of SEQ ID NO: 586922
cagagucaacuuuaguuga

SEQ ID NO: 753919 - RNA, 19 nt, Artificial Sequence
  Description of Artificial Sequence: Synthetic oligonucleotide
  Antisense strand to SEQ ID NO: 753918
ucaacuaaaguugacucug

SEQ ID NO: 753920 - RNA, 19 nt, Artificial Sequence
  Description of Artificial Sequence: Synthetic oligonucleotide
  Sense strand starting at position 171 of SEQ ID NO: 586922
uuuaguugagccuggagaa

SEQ ID NO: 753921 - RNA, 19 nt, Artificial Sequence
  Description of Artificial Sequence: Synthetic oligonucleotide
  Antisense strand to SEQ ID NO: 753920
uucuccaggcucaacuaaa

SEQ ID NO: 753922 - RNA, 19 nt, Artificial Sequence
  Description of Artificial Sequence: Synthetic oligonucleotide
  Sense strand starting at position 172 of SEQ ID NO: 586922
uuaguugagccuggagaaa

SEQ ID NO: 753923 - RNA, 19 nt, Artificial Sequence
  Description of Artificial Sequence: Synthetic oligonucleotide
  Antisense strand to SEQ ID NO: 753922
uuucuccaggcucaacuaa

SEQ ID NO: 753924 - RNA, 19 nt, Artificial Sequence
  Description of Artificial Sequence: Synthetic oligonucleotide
  Sense strand starting at position 349 of SEQ ID NO: 586922
ccggaugagccuugacuca

SEQ ID NO: 753925 - RNA, 19 nt, Artificial Sequence
  Description of Artificial Sequence: Synthetic oligonucleotide
  Antisense strand to SEQ ID NO: 753924
ugagucaaggcucauccgg

SEQ ID NO: 753926 - RNA, 19 nt, Artificial Sequence
  Description of Artificial Sequence: Synthetic oligonucleotide
  Sense strand starting at position 458 of SEQ ID NO: 586922
uuugaauuagcauagguuu

SEQ ID NO: 753927 - RNA, 19 nt, Artificial Sequence
  Description of Artificial Sequence: Synthetic oligonucleotide
  Antisense strand to SEQ ID NO: 753926
aaaccuaugcuaauucaaa

SEQ ID NO: 753928 - RNA, 19 nt, Artificial Sequence
  Description of Artificial Sequence: Synthetic oligonucleotide
  Sense strand starting at position 471 of SEQ ID NO: 586922
agguuuccuccgcaacuga

SEQ ID NO: 753929 - RNA, 19 nt, Artificial Sequence
  Description of Artificial Sequence: Synthetic oligonucleotide
  Antisense strand to SEQ ID NO: 753928
ucaguugcggaggaaaccu

SEQ ID NO: 753930 - RNA, 19 nt, Artificial Sequence
  Description of Artificial Sequence: Synthetic oligonucleotide
  Sense strand starting at position 586 of SEQ ID NO: 586922
caaggacuugcaugcuaga

SEQ ID NO: 753931 - RNA, 19 nt, Artificial Sequence
  Description of Artificial Sequence: Synthetic oligonucleotide
  Antisense strand to SEQ ID NO: 753930
ucuagcaugcaaguccuug

SEQ ID NO: 753932 - RNA, 19 nt, Artificial Sequence
  Description of Artificial Sequence: Synthetic oligonucleotide
  Sense strand starting at position 651 of SEQ ID NO: 586922
caaggucagcuuugaguca

SEQ ID NO: 753933 - RNA, 19 nt, Artificial Sequence
  Description of Artificial Sequence: Synthetic oligonucleotide
  Antisense strand to SEQ ID NO: 753932
ugacucaaagcugaccuug

SEQ ID NO: 753934 - RNA, 19 nt, Artificial Sequence
  Description of Artificial Sequence: Synthetic oligonucleotide
  Sense strand starting at position 730 of SEQ ID NO: 586922
ucgccaauucucuaaaguu

SEQ ID NO: 753935 - RNA, 19 nt, Artificial Sequence
  Description of Artificial Sequence: Synthetic oligonucleotide
  Antisense strand to SEQ ID NO: 753934
aacuuuagagaauuggcga

SEQ ID NO: 753936 - RNA, 19 nt, Artificial Sequence
  Description of Artificial Sequence: Synthetic oligonucleotide
  Sense strand starting at position 795 of SEQ ID NO: 586922
gagugaggucgccaaauac

SEQ ID NO: 753937 - RNA, 19 nt, Artificial Sequence
  Description of Artificial Sequence: Synthetic oligonucleotide
  Antisense strand to SEQ ID NO: 753936
guauuuggcgaccucacuc

SEQ ID NO: 753938 - RNA, 19 nt, Artificial Sequence
  Description of Artificial Sequence: Synthetic oligonucleotide
  Sense strand starting at position 912 of SEQ ID NO: 586922
gagggaaguugugucaagu

SEQ ID NO: 753939 - RNA, 19 nt, Artificial Sequence
  Description of Artificial Sequence: Synthetic oligonucleotide
  Antisense strand to SEQ ID NO: 753938
acuugacacaacuucccuc

SEQ ID NO: 753940 - RNA, 19 nt, Artificial Sequence
  Description of Artificial Sequence: Synthetic oligonucleotide
  Sense strand starting at position 1871 of SEQ ID NO: 586922
gcguaucucgccgcagaaa

SEQ ID NO: 753941 - RNA, 19 nt, Artificial Sequence
  Description of Artificial Sequence: Synthetic oligonucleotide
  Antisense strand to SEQ ID NO: 753940
uuucugcggcgagauacgc

SEQ ID NO: 753942 - RNA, 19 nt, Artificial Sequence
  Description of Artificial Sequence: Synthetic oligonucleotide
  Sense strand starting at position 2045 of SEQ ID NO: 586922
agagaaauguguccuguac

SEQ ID NO: 753943 - RNA, 19 nt, Artificial Sequence
  Description of Artificial Sequence: Synthetic oligonucleotide
  Antisense strand to SEQ ID NO: 753942
guacaggacacauuucucu

SEQ ID NO: 753944 - RNA, 19 nt, Artificial Sequence
  Description of Artificial Sequence: Synthetic oligonucleotide
  Sense strand starting at position 2155 of SEQ ID NO: 586922
gacauuguggccuagagag

SEQ ID NO: 753945 - RNA, 19 nt, Artificial Sequence
  Description of Artificial Sequence: Synthetic oligonucleotide
  Antisense strand to SEQ ID NO: 753944
cucucuaggccacaauguc

SEQ ID NO: 753946 - RNA, 19 nt, Artificial Sequence
  Description of Artificial Sequence: Synthetic oligonucleotide
  Sense strand starting at position 2219 of SEQ ID NO: 586922
auuccauaucuggguuaau

SEQ ID NO: 753947 - RNA, 19 nt, Artificial Sequence
  Description of Artificial Sequence: Synthetic oligonucleotide
  Antisense strand to SEQ ID NO: 753946
auuaacccagauauggaau

SEQ ID NO: 753948 - RNA, 19 nt, Artificial Sequence
  Description of Artificial Sequence: Synthetic oligonucleotide
  Sense strand starting at position 2220 of SEQ ID NO: 586922
uuccauaucuggguuaaua

SEQ ID NO: 753949 - RNA, 19 nt, Artificial Sequence
  Description of Artificial Sequence: Synthetic oligonucleotide
  Antisense strand to SEQ ID NO: 753948
uauuaacccagauauggaa

SEQ ID NO: 753950 - RNA, 19 nt, Artificial Sequence
  Description of Artificial Sequence: Synthetic oligonucleotide
  Sense strand starting at position 2886 of SEQ ID NO: 586922
uauguaugucuguacuuau

SEQ ID NO: 753951 - RNA, 19 nt, Artificial Sequence
  Description of Artificial Sequence: Synthetic oligonucleotide
  Antisense strand to SEQ ID NO: 753950
auaaguacagacauacaua

SEQ ID NO: 753952 - RNA, 19 nt, Artificial Sequence
  Description of Artificial Sequence: Synthetic oligonucleotide
  Sense strand starting at position 2906 of SEQ ID NO: 586922
uuuguaaaugcacagagua

SEQ ID NO: 753953 - RNA, 19 nt, Artificial Sequence
  Description of Artificial Sequence: Synthetic oligonucleotide
  Antisense strand to SEQ ID NO: 753952
uacucugugcauuuacaaa

SEQ ID NO: 753954 - RNA, 19 nt, Artificial Sequence
  Description of Artificial Sequence: Synthetic oligonucleotide
  Sense strand starting at position 2916 of SEQ ID NO: 586922
cacagaguaucuuuggaag

SEQ ID NO: 753955 - RNA, 19 nt, Artificial Sequence
  Description of Artificial Sequence: Synthetic oligonucleotide
  Antisense strand to SEQ ID NO: 753954
cuuccaaagauacucugug

SEQ ID NO: 753956 - RNA, 19 nt, Artificial Sequence
  Description of Artificial Sequence: Synthetic oligonucleotide
  Sense strand starting at position 2927 of SEQ ID NO: 586922
uuuggaagaguacguaaga

SEQ ID NO: 753957 - RNA, 19 nt, Artificial Sequence
  Description of Artificial Sequence: Synthetic oligonucleotide
  Antisense strand to SEQ ID NO: 753956
ucuuacguacucuuccaaa

SEQ ID NO: 753958 - RNA, 19 nt, Artificial Sequence
  Description of Artificial Sequence: Synthetic oligonucleotide
  Sense strand starting at position 2928 of SEQ ID NO: 586922
uuggaagaguacguaagaa

SEQ ID NO: 753959 - RNA, 19 nt, Artificial Sequence
  Description of Artificial Sequence: Synthetic oligonucleotide
  Antisense strand to SEQ ID NO: 753958
uucuuacguacucuuccaa

SEQ ID NO: 753960 - RNA, 19 nt, Artificial Sequence
  Description of Artificial Sequence: Synthetic oligonucleotide
  Sense strand starting at position 3055 of SEQ ID NO: 586922
acaugaguaaacggauagu

SEQ ID NO: 753961 - RNA, 19 nt, Artificial Sequence
  Description of Artificial Sequence: Synthetic oligonucleotide
  Antisense strand to SEQ ID NO: 753960
acuauccguuuacucaugu

SEQ ID NO: 753962 - RNA, 19 nt, Artificial Sequence
  Description of Artificial Sequence: Synthetic oligonucleotide
  Sense strand starting at position 3097 of SEQ ID NO: 586922
guagguacugcagaauaga

SEQ ID NO: 753963 - RNA, 19 nt, Artificial Sequence
  Description of Artificial Sequence: Synthetic oligonucleotide
  Antisense strand to SEQ ID NO: 753962
ucuauucugcaguaccuac

SEQ ID NO: 753964 - RNA, 19 nt, Artificial Sequence
  Description of Artificial Sequence: Synthetic oligonucleotide
  Sense strand starting at position 3214 of SEQ ID NO: 586922
aaauuucuagcgggcuuau

SEQ ID NO: 753965 - RNA, 19 nt, Artificial Sequence
  Description of Artificial Sequence: Synthetic oligonucleotide
  Antisense strand to SEQ ID NO: 753964
auaagcccgcuagaaauuu

SEQ ID NO: 753966 - RNA, 19 nt, Artificial Sequence
  Description of Artificial Sequence: Synthetic oligonucleotide
  Sense strand starting at position 3238 of SEQ ID NO: 586922
gguuccagcccagaucuau

SEQ ID NO: 753967 - RNA, 19 nt, Artificial Sequence
  Description of Artificial Sequence: Synthetic oligonucleotide
  Antisense strand to SEQ ID NO: 753966
auagaucugggcuggaacc

SEQ ID NO: 753968 - RNA, 19 nt, Artificial Sequence
  Description of Artificial Sequence: Synthetic oligonucleotide
  Sense strand starting at position 3244 of SEQ ID NO: 586922
agcccagaucuauggaauu

SEQ ID NO: 753969 - RNA, 19 nt, Artificial Sequence
  Description of Artificial Sequence: Synthetic oligonucleotide
  Antisense strand to SEQ ID NO: 753968
aauuccauagaucugggcu

SEQ ID NO: 753970 - RNA, 19 nt, Artificial Sequence
  Description of Artificial Sequence: Synthetic oligonucleotide
  Sense strand starting at position 3313 of SEQ ID NO: 586922
guuguuucucuugcauguu

SEQ ID NO: 753971 - RNA, 19 nt, Artificial Sequence
  Description of Artificial Sequence: Synthetic oligonucleotide
  Antisense strand to SEQ ID NO: 753970
aacaugcaagagaaacaac

SEQ ID NO: 753972 - RNA, 19 nt, Artificial Sequence
  Description of Artificial Sequence: Synthetic oligonucleotide
  Sense strand starting at position 3326 of SEQ ID NO: 586922
cauguuaaagucugaaagu

SEQ ID NO: 753973 - RNA, 19 nt, Artificial Sequence
  Description of Artificial Sequence: Synthetic oligonucleotide
  Antisense strand to SEQ ID NO: 753972
acuuucagacuuuaacaug

SEQ ID NO: 753974 - RNA, 19 nt, Artificial Sequence
  Description of Artificial Sequence: Synthetic oligonucleotide
  Sense strand starting at position 3443 of SEQ ID NO: 586922
guacacguuuacuuauaua

SEQ ID NO: 753975 - RNA, 19 nt, Artificial Sequence
  Description of Artificial Sequence: Synthetic oligonucleotide
  Antisense strand to SEQ ID NO: 753974
uauauaaguaaacguguac

SEQ ID NO: 753976 - RNA, 19 nt, Artificial Sequence
  Description of Artificial Sequence: Synthetic oligonucleotide
  Sense strand starting at position 3786 of SEQ ID NO: 586922
agccaucugaaguguuaag

SEQ ID NO: 753977 - RNA, 19 nt, Artificial Sequence
  Description of Artificial Sequence: Synthetic oligonucleotide
  Antisense strand to SEQ ID NO: 753976
cuuaacacuucagauggcu

SEQ ID NO: 753978 - RNA, 19 nt, Artificial Sequence
  Description of Artificial Sequence: Synthetic oligonucleotide
  Sense strand starting at position 3904 of SEQ ID NO: 586922
uccuauagccaguauaugu

SEQ ID NO: 753979 - RNA, 19 nt, Artificial Sequence
  Description of Artificial Sequence: Synthetic oligonucleotide
  Antisense strand to SEQ ID NO: 753978
acauauacuggcuauagga

SEQ ID NO: 753980 - RNA, 19 nt, Artificial Sequence
  Description of Artificial Sequence: Synthetic oligonucleotide
  Sense strand starting at position 3913 of SEQ ID NO: 586922
caguauaugucauuuguug

SEQ ID NO: 753981 - RNA, 19 nt, Artificial Sequence
  Description of Artificial Sequence: Synthetic oligonucleotide
  Antisense strand to SEQ ID NO: 753980
caacaaaugacauauacug

SEQ ID NO: 753982 - RNA, 19 nt, Artificial Sequence
  Description of Artificial Sequence: Synthetic oligonucleotide
  Sense strand starting at position 3915 of SEQ ID NO: 586922
guauaugucauuuguugug

SEQ ID NO: 753983 - RNA, 19 nt, Artificial Sequence
  Description of Artificial Sequence: Synthetic oligonucleotide
  Antisense strand to SEQ ID NO: 753982
cacaacaaaugacauauac

SEQ ID NO: 753984 - RNA, 19 nt, Artificial Sequence
  Description of Artificial Sequence: Synthetic oligonucleotide
  Sense strand starting at position 3917 of SEQ ID NO: 586922
auaugucauuuguugugua

SEQ ID NO: 753985 - RNA, 19 nt, Artificial Sequence
  Description of Artificial Sequence: Synthetic oligonucleotide
  Antisense strand to SEQ ID NO: 753984
uacacaacaaaugacauau

SEQ ID NO: 753986 - RNA, 19 nt, Artificial Sequence
  Description of Artificial Sequence: Synthetic oligonucleotide
  Sense strand starting at position 3921 of SEQ ID NO: 586922
gucauuuguuguguaaagg

SEQ ID NO: 753987 - RNA, 19 nt, Artificial Sequence
  Description of Artificial Sequence: Synthetic oligonucleotide
  Antisense strand to SEQ ID NO: 753986
ccuuuacacaacaaaugac

SEQ ID NO: 753988 - RNA, 19 nt, Artificial Sequence
  Description of Artificial Sequence: Synthetic oligonucleotide
  Sense strand starting at position 1 of SEQ ID NO: 586923
uuaguugagccuggagaaa

SEQ ID NO: 753989 - RNA, 19 nt, Artificial Sequence
  Description of Artificial Sequence: Synthetic oligonucleotide
  Antisense strand to SEQ ID NO: 753988
uuucuccaggcucaacuaa

SEQ ID NO: 753990 - RNA, 19 nt, Artificial Sequence
  Description of Artificial Sequence: Synthetic oligonucleotide
  Sense strand starting at position 178 of SEQ ID NO: 586923
ccggaugagccuugacuca

SEQ ID NO: 753991 - RNA, 19 nt, Artificial Sequence
  Description of Artificial Sequence: Synthetic oligonucleotide
  Antisense strand to SEQ ID NO: 753990
ugagucaaggcucauccgg

SEQ ID NO: 753992 - RNA, 19 nt, Artificial Sequence
  Description of Artificial Sequence: Synthetic oligonucleotide
  Sense strand starting at position 287 of SEQ ID NO: 586923
uuugaauuagcauagguuu

SEQ ID NO: 753993 - RNA, 19 nt, Artificial Sequence
  Description of Artificial Sequence: Synthetic oligonucleotide
  Antisense strand to SEQ ID NO: 753992
aaaccuaugcuaauucaaa

SEQ ID NO: 753994 - RNA, 19 nt, Artificial Sequence
  Description of Artificial Sequence: Synthetic oligonucleotide
  Sense strand starting at position 300 of SEQ ID NO: 586923
agguuuccuccgcaacuga

SEQ ID NO: 753995 - RNA, 19 nt, Artificial Sequence
  Description of Artificial Sequence: Synthetic oligonucleotide
  Antisense strand to SEQ ID NO: 753994
ucaguugcggaggaaaccu

SEQ ID NO: 753996 - RNA, 19 nt, Artificial Sequence
  Description of Artificial Sequence: Synthetic oligonucleotide
  Sense strand starting at position 415 of SEQ ID NO: 586923
caaggacuugcaugcuaga

SEQ ID NO: 753997 - RNA, 19 nt, Artificial Sequence
  Description of Artificial Sequence: Synthetic oligonucleotide
  Antisense strand to SEQ ID NO: 753996
ucuagcaugcaaguccuug

SEQ ID NO: 753998 - RNA, 19 nt, Artificial Sequence
  Description of Artificial Sequence: Synthetic oligonucleotide
  Sense strand starting at position 480 of SEQ ID NO: 586923
caaggucagcuuugaguca

SEQ ID NO: 753999 - RNA, 19 nt, Artificial Sequence
  Description of Artificial Sequence: Synthetic oligonucleotide
  Antisense strand to SEQ ID NO: 753998
ugacucaaagcugaccuug

SEQ ID NO: 754000 - RNA, 19 nt, Artificial Sequence
  Description of Artificial Sequence: Synthetic oligonucleotide
  Sense strand starting at position 504 of SEQ ID NO: 586923
gguaacaguuuccuucgau

SEQ ID NO: 754001 - RNA, 19 nt, Artificial Sequence
  Description of Artificial Sequence: Synthetic oligonucleotide
  Antisense strand to SEQ ID NO: 754000
aucgaaggaaacuguuacc

SEQ ID NO: 754002 - RNA, 19 nt, Artificial Sequence
  Description of Artificial Sequence: Synthetic oligonucleotide
  Sense strand starting at position 505 of SEQ ID NO: 586923
guaacaguuuccuucgaug

SEQ ID NO: 754003 - RNA, 19 nt, Artificial Sequence
  Description of Artificial Sequence: Synthetic oligonucleotide
  Antisense strand to SEQ ID NO: 754002
caucgaaggaaacuguuac

SEQ ID NO: 754004 - RNA, 19 nt, Artificial Sequence
  Description of Artificial Sequence: Synthetic oligonucleotide
  Sense strand starting at position 559 of SEQ ID NO: 586923
ucgccaauucucuaaaguu

SEQ ID NO: 754005 - RNA, 19 nt, Artificial Sequence
  Description of Artificial Sequence: Synthetic oligonucleotide
  Antisense strand to SEQ ID NO: 754004
aacuuuagagaauuggcga

SEQ ID NO: 754006 - RNA, 19 nt, Artificial Sequence
  Description of Artificial Sequence: Synthetic oligonucleotide
  Sense strand starting at position 624 of SEQ ID NO: 586923
gagugaggucgccaaauac

SEQ ID NO: 754007 - RNA, 19 nt, Artificial Sequence
  Description of Artificial Sequence: Synthetic oligonucleotide
  Antisense strand to SEQ ID NO: 754006
guauuuggcgaccucacuc

SEQ ID NO: 754008 - RNA, 19 nt, Artificial Sequence
  Description of Artificial Sequence: Synthetic oligonucleotide
  Sense strand starting at position 741 of SEQ ID NO: 586923
gagggaaguugugucaagu

SEQ ID NO: 754009 - RNA, 19 nt, Artificial Sequence
  Description of Artificial Sequence: Synthetic oligonucleotide
  Antisense strand to SEQ ID NO: 754008
acuugacacaacuucccuc

SEQ ID NO: 754010 - RNA, 19 nt, Artificial Sequence
  Description of Artificial Sequence: Synthetic oligonucleotide
  Sense strand starting at position 1700 of SEQ ID NO: 586923
gcguaucucgccgcagaaa

SEQ ID NO: 754011 - RNA, 19 nt, Artificial Sequence
  Description of Artificial Sequence: Synthetic oligonucleotide
  Antisense strand to SEQ ID NO: 754010
uuucugcggcgagauacgc

SEQ ID NO: 754012 - RNA, 19 nt, Artificial Sequence
  Description of Artificial Sequence: Synthetic oligonucleotide
  Sense strand starting at position 1874 of SEQ ID NO: 586923
agagaaauguguccuguac

SEQ ID NO: 754013 - RNA, 19 nt, Artificial Sequence
  Description of Artificial Sequence: Synthetic oligonucleotide
  Antisense strand to SEQ ID NO: 754012
guacaggacacauuucucu

SEQ ID NO: 754014 - RNA, 19 nt, Artificial Sequence
  Description of Artificial Sequence: Synthetic oligonucleotide
  Sense strand starting at position 1984 of SEQ ID NO: 586923
gacauuguggccuagagag

SEQ ID NO: 754015 - RNA, 19 nt, Artificial Sequence
  Description of Artificial Sequence: Synthetic oligonucleotide
  Antisense strand to SEQ ID NO: 754014
cucucuaggccacaauguc

SEQ ID NO: 754016 - RNA, 19 nt, Artificial Sequence
  Description of Artificial Sequence: Synthetic oligonucleotide
  Sense strand starting at position 2048 of SEQ ID NO: 586923
auuccauaucuggguuaau

SEQ ID NO: 754017 - RNA, 19 nt, Artificial Sequence
  Description of Artificial Sequence: Synthetic oligonucleotide
  Antisense strand to SEQ ID NO: 754016
auuaacccagauauggaau

SEQ ID NO: 754018 - RNA, 19 nt, Artificial Sequence
  Description of Artificial Sequence: Synthetic oligonucleotide
  Sense strand starting at position 2049 of SEQ ID NO: 586923
uuccauaucuggguuaaua

SEQ ID NO: 754019 - RNA, 19 nt, Artificial Sequence
  Description of Artificial Sequence: Synthetic oligonucleotide
  Antisense strand to SEQ ID NO: 754018
uauuaacccagauauggaa

SEQ ID NO: 754020 - RNA, 19 nt, Artificial Sequence
  Description of Artificial Sequence: Synthetic oligonucleotide
  Sense strand starting at position 2714 of SEQ ID NO: 586923
auauguaugucuguacuua

SEQ ID NO: 754021 - RNA, 19 nt, Artificial Sequence
  Description of Artificial Sequence: Synthetic oligonucleotide
  Antisense strand to SEQ ID NO: 754020
uaaguacagacauacauau

SEQ ID NO: 754022 - RNA, 19 nt, Artificial Sequence
  Description of Artificial Sequence: Synthetic oligonucleotide
  Sense strand starting at position 2715 of SEQ ID NO: 586923
uauguaugucuguacuuau

SEQ ID NO: 754023 - RNA, 19 nt, Artificial Sequence
  Description of Artificial Sequence: Synthetic oligonucleotide
  Antisense strand to SEQ ID NO: 754022
auaaguacagacauacaua

SEQ ID NO: 754024 - RNA, 19 nt, Artificial Sequence
  Description of Artificial Sequence: Synthetic oligonucleotide
  Sense strand starting at position 2735 of SEQ ID NO: 586923
uuuguaaaugcacagagua

SEQ ID NO: 754025 - RNA, 19 nt, Artificial Sequence
  Description of Artificial Sequence: Synthetic oligonucleotide
  Antisense strand to SEQ ID NO: 754024
uacucugugcauuuacaaa

SEQ ID NO: 754026 - RNA, 19 nt, Artificial Sequence
  Description of Artificial Sequence: Synthetic oligonucleotide
  Sense strand starting at position 2745 of SEQ ID NO: 586923
cacagaguaucuuuggaag

SEQ ID NO: 754027 - RNA, 19 nt, Artificial Sequence
  Description of Artificial Sequence: Synthetic oligonucleotide
  Antisense strand to SEQ ID NO: 754026
cuuccaaagauacucugug

SEQ ID NO: 754028 - RNA, 19 nt, Artificial Sequence
  Description of Artificial Sequence: Synthetic oligonucleotide
  Sense strand starting at position 2756 of SEQ ID NO: 586923
uuuggaagaguacguaaga

SEQ ID NO: 754029 - RNA, 19 nt, Artificial Sequence
  Description of Artificial Sequence: Synthetic oligonucleotide
  Antisense strand to SEQ ID NO: 754028
ucuuacguacucuuccaaa

SEQ ID NO: 754030 - RNA, 19 nt, Artificial Sequence
  Description of Artificial Sequence: Synthetic oligonucleotide
  Sense strand starting at position 2757 of SEQ ID NO: 586923
uuggaagaguacguaagaa

SEQ ID NO: 754031 - RNA, 19 nt, Artificial Sequence
  Description of Artificial Sequence: Synthetic oligonucleotide
  Antisense strand to SEQ ID NO: 754030
uucuuacguacucuuccaa

SEQ ID NO: 754032 - RNA, 19 nt, Artificial Sequence
  Description of Artificial Sequence: Synthetic oligonucleotide
  Sense strand starting at position 2868 of SEQ ID NO: 586923
gugcuuacagucugacaca

SEQ ID NO: 754033 - RNA, 19 nt, Artificial Sequence
  Description of Artificial Sequence: Synthetic oligonucleotide
  Antisense strand to SEQ ID NO: 754032
ugugucagacuguaagcac

SEQ ID NO: 754034 - RNA, 19 nt, Artificial Sequence
  Description of Artificial Sequence: Synthetic oligonucleotide
  Sense strand starting at position 2884 of SEQ ID NO: 586923
acaugaguaaacggauagu

SEQ ID NO: 754035 - RNA, 19 nt, Artificial Sequence
  Description of Artificial Sequence: Synthetic oligonucleotide
  Antisense strand to SEQ ID NO: 754034
acuauccguuuacucaugu

SEQ ID NO: 754036 - RNA, 19 nt, Artificial Sequence
  Description of Artificial Sequence: Synthetic oligonucleotide
  Sense strand starting at position 2926 of SEQ ID NO: 586923
guagguacugcagaauaga

SEQ ID NO: 754037 - RNA, 19 nt, Artificial Sequence
  Description of Artificial Sequence: Synthetic oligonucleotide
  Antisense strand to SEQ ID NO: 754036
ucuauucugcaguaccuac

SEQ ID NO: 754038 - RNA, 19 nt, Artificial Sequence
  Description of Artificial Sequence: Synthetic oligonucleotide
  Sense strand starting at position 3043 of SEQ ID NO: 586923
aaauuucuagcgggcuuau

SEQ ID NO: 754039 - RNA, 19 nt, Artificial Sequence
  Description of Artificial Sequence: Synthetic oligonucleotide
  Antisense strand to SEQ ID NO: 754038
auaagcccgcuagaaauuu

SEQ ID NO: 754040 - RNA, 19 nt, Artificial Sequence
  Description of Artificial Sequence: Synthetic oligonucleotide
  Sense strand starting at position 3067 of SEQ ID NO: 586923
gguuccagcccagaucuau

SEQ ID NO: 754041 - RNA, 19 nt, Artificial Sequence
  Description of Artificial Sequence: Synthetic oligonucleotide
  Antisense strand to SEQ ID NO: 754040
auagaucugggcuggaacc

SEQ ID NO: 754042 - RNA, 19 nt, Artificial Sequence
  Description of Artificial Sequence: Synthetic oligonucleotide
  Sense strand starting at position 3073 of SEQ ID NO: 586923
agcccagaucuauggaauu

SEQ ID NO: 754043 - RNA, 19 nt, Artificial Sequence
  Description of Artificial Sequence: Synthetic oligonucleotide
  Antisense strand to SEQ ID NO: 754042
aauuccauagaucugggcu

SEQ ID NO: 754044 - RNA, 19 nt, Artificial Sequence
  Description of Artificial Sequence: Synthetic oligonucleotide
  Sense strand starting at position 3142 of SEQ ID NO: 586923
guuguuucucuugcauguu

SEQ ID NO: 754045 - RNA, 19 nt, Artificial Sequence
  Description of Artificial Sequence: Synthetic oligonucleotide
  Antisense strand to SEQ ID NO: 754044
aacaugcaagagaaacaac

SEQ ID NO: 754046 - RNA, 19 nt, Artificial Sequence
  Description of Artificial Sequence: Synthetic oligonucleotide
  Sense strand starting at position 3155 of SEQ ID NO: 586923
cauguuaaagucugaaagu

SEQ ID NO: 754047 - RNA, 19 nt, Artificial Sequence
  Description of Artificial Sequence: Synthetic oligonucleotide
  Antisense strand to SEQ ID NO: 754046
acuuucagacuuuaacaug

SEQ ID NO: 754048 - RNA, 19 nt, Artificial Sequence
  Description of Artificial Sequence: Synthetic oligonucleotide
  Sense strand starting at position 3271 of SEQ ID NO: 586923
gguacacguuuacuuauau

SEQ ID NO: 754049 - RNA, 19 nt, Artificial Sequence
  Description of Artificial Sequence: Synthetic oligonucleotide
  Antisense strand to SEQ ID NO: 754048
auauaaguaaacguguacc

SEQ ID NO: 754050 - RNA, 19 nt, Artificial Sequence
  Description of Artificial Sequence: Synthetic oligonucleotide
  Sense strand starting at position 3272 of SEQ ID NO: 586923
guacacguuuacuuauaua

SEQ ID NO: 754051 - RNA, 19 nt, Artificial Sequence
  Description of Artificial Sequence: Synthetic oligonucleotide
  Antisense strand to SEQ ID NO: 754050
uauauaaguaaacguguac

SEQ ID NO: 754052 - RNA, 19 nt, Artificial Sequence
  Description of Artificial Sequence: Synthetic oligonucleotide
  Sense strand starting at position 3615 of SEQ ID NO: 586923
agccaucugaaguguuaag

SEQ ID NO: 754053 - RNA, 19 nt, Artificial Sequence
  Description of Artificial Sequence: Synthetic oligonucleotide
  Antisense strand to SEQ ID NO: 754052
cuuaacacuucagauggcu

SEQ ID NO: 754054 - RNA, 19 nt, Artificial Sequence
  Description of Artificial Sequence: Synthetic oligonucleotide
  Sense strand starting at position 3733 of SEQ ID NO: 586923
uccuauagccaguauaugu

SEQ ID NO: 754055 - RNA, 19 nt, Artificial Sequence
  Description of Artificial Sequence: Synthetic oligonucleotide
  Antisense strand to SEQ ID NO: 754054
acauauacuggcuauagga

SEQ ID NO: 754056 - RNA, 19 nt, Artificial Sequence
  Description of Artificial Sequence: Synthetic oligonucleotide
  Sense strand starting at position 3742 of SEQ ID NO: 586923
caguauaugucauuuguug

SEQ ID NO: 754057 - RNA, 19 nt, Artificial Sequence
  Description of Artificial Sequence: Synthetic oligonucleotide
  Antisense strand to SEQ ID NO: 754056
caacaaaugacauauacug

SEQ ID NO: 754058 - RNA, 19 nt, Artificial Sequence
  Description of Artificial Sequence: Synthetic oligonucleotide
  Sense strand starting at position 3744 of SEQ ID NO: 586923
guauaugucauuuguugug

SEQ ID NO: 754059 - RNA, 19 nt, Artificial Sequence
  Description of Artificial Sequence: Synthetic oligonucleotide
  Antisense strand to SEQ ID NO: 754058
cacaacaaaugacauauac

SEQ ID NO: 754060 - RNA, 19 nt, Artificial Sequence
  Description of Artificial Sequence: Synthetic oligonucleotide
  Sense strand starting at position 3746 of SEQ ID NO: 586923
auaugucauuuguugugua

SEQ ID NO: 754061 - RNA, 19 nt, Artificial Sequence
  Description of Artificial Sequence: Synthetic oligonucleotide
  Antisense strand to SEQ ID NO: 754060
uacacaacaaaugacauau

SEQ ID NO: 754062 - RNA, 19 nt, Artificial Sequence
  Description of Artificial Sequence: Synthetic oligonucleotide
  Sense strand starting at position 3750 of SEQ ID NO: 586923
gucauuuguuguguaaagg

SEQ ID NO: 754063 - RNA, 19 nt, Artificial Sequence
  Description of Artificial Sequence: Synthetic oligonucleotide
  Antisense strand to SEQ ID NO: 754062
ccuuuacacaacaaaugac

SEQ ID NO: 754064 - RNA, 19 nt, Artificial Sequence
  Description of Artificial Sequence: Synthetic oligonucleotide
  Sense strand starting at position 3854 of SEQ ID NO: 586923
gccugagaucuuugaagcc

SEQ ID NO: 754065 - RNA, 19 nt, Artificial Sequence
  Description of Artificial Sequence: Synthetic oligonucleotide
  Antisense strand to SEQ ID NO: 754064
ggcuucaaagaucucaggc

SEQ ID NO: 754066 - RNA, 19 nt, Artificial Sequence
  Description of Artificial Sequence: Synthetic oligonucleotide
  Sense strand starting at position 3968 of SEQ ID NO: 586923
uggagaagcuuauuauaug

SEQ ID NO: 754067 - RNA, 19 nt, Artificial Sequence
  Description of Artificial Sequence: Synthetic oligonucleotide
  Antisense strand to SEQ ID NO: 754066
cauauaauaagcuucucca

SEQ ID NO: 754068 - RNA, 19 nt, Artificial Sequence
  Description of Artificial Sequence: Synthetic oligonucleotide
  Sense strand starting at position 2 of SEQ ID NO: 586924
aguugacagccagauauau

SEQ ID NO: 754069 - RNA, 19 nt, Artificial Sequence
  Description of Artificial Sequence: Synthetic oligonucleotide
  Antisense strand to SEQ ID NO: 754068
auauaucuggcugucaacu

SEQ ID NO: 754070 - RNA, 19 nt, Artificial Sequence
  Description of Artificial Sequence: Synthetic oligonucleotide
  Sense strand starting at position 156 of SEQ ID NO: 586924
gcauuugccuccucaugua

SEQ ID NO: 754071 - RNA, 19 nt, Artificial Sequence
  Description of Artificial Sequence: Synthetic oligonucleotide
  Antisense strand to SEQ ID NO: 754070
uacaugaggaggcaaaugc

SEQ ID NO: 754072 - RNA, 19 nt, Artificial Sequence
  Description of Artificial Sequence: Synthetic oligonucleotide
  Sense strand starting at position 301 of SEQ ID NO: 586924
cuuccucgugucgcuaaau

SEQ ID NO: 754073 - RNA, 19 nt, Artificial Sequence
  Description of Artificial Sequence: Synthetic oligonucleotide
  Antisense strand to SEQ ID NO: 754072
auuuagcgacacgaggaag

SEQ ID NO: 754074 - RNA, 19 nt, Artificial Sequence
  Description of Artificial Sequence: Synthetic oligonucleotide
  Sense strand starting at position 343 of SEQ ID NO: 586924
cuaagaaccugguauuugu

SEQ ID NO: 754075 - RNA, 19 nt, Artificial Sequence
  Description of Artificial Sequence: Synthetic oligonucleotide
  Antisense strand to SEQ ID NO: 754074
acaaauaccagguucuuag

SEQ ID NO: 754076 - RNA, 19 nt, Artificial Sequence
  Description of Artificial Sequence: Synthetic oligonucleotide
  Sense strand starting at position 353 of SEQ ID NO: 586924
gguauuuguuaugugcacu

SEQ ID NO: 754077 - RNA, 19 nt, Artificial Sequence
  Description of Artificial Sequence: Synthetic oligonucleotide
  Antisense strand to SEQ ID NO: 754076
agugcacauaacaaauacc

SEQ ID NO: 754078 - RNA, 19 nt, Artificial Sequence
  Description of Artificial Sequence: Synthetic oligonucleotide
  Sense strand starting at position 375 of SEQ ID NO: 586924
cuuggaugauguuuacaau

SEQ ID NO: 754079 - RNA, 19 nt, Artificial Sequence
  Description of Artificial Sequence: Synthetic oligonucleotide
  Antisense strand to SEQ ID NO: 754078
auuguaaacaucauccaag

SEQ ID NO: 754080 - RNA, 19 nt, Artificial Sequence
  Description of Artificial Sequence: Synthetic oligonucleotide
  Sense strand starting at position 411 of SEQ ID NO: 586924
aagagcuuguagguaucaa

SEQ ID NO: 754081 - RNA, 19 nt, Artificial Sequence
  Description of Artificial Sequence: Synthetic oligonucleotide
  Antisense strand to SEQ ID NO: 754080
uugauaccuacaagcucuu

SEQ ID NO: 754082 - RNA, 19 nt, Artificial Sequence
  Description of Artificial Sequence: Synthetic oligonucleotide
  Sense strand starting at position 412 of SEQ ID NO: 586924
agagcuuguagguaucaaa

SEQ ID NO: 754083 - RNA, 19 nt, Artificial Sequence
  Description of Artificial Sequence: Synthetic oligonucleotide
  Antisense strand to SEQ ID NO: 754082
uuugauaccuacaagcucu

SEQ ID NO: 754084 - RNA, 19 nt, Artificial Sequence
  Description of Artificial Sequence: Synthetic oligonucleotide
  Sense strand starting at position 470 of SEQ ID NO: 586924
cagagucaacuuuaguuga

SEQ ID NO: 754085 - RNA, 19 nt, Artificial Sequence
  Description of Artificial Sequence: Synthetic oligonucleotide
  Antisense strand to SEQ ID NO: 754084
ucaacuaaaguugacucug

SEQ ID NO: 754086 - RNA, 19 nt, Artificial Sequence
  Description of Artificial Sequence: Synthetic oligonucleotide
  Sense strand starting at position 480 of SEQ ID NO: 586924
uuuaguugagccuggagaa

SEQ ID NO: 754087 - RNA, 19 nt, Artificial Sequence
  Description of Artificial Sequence: Synthetic oligonucleotide
  Antisense strand to SEQ ID NO: 754086
uucuccaggcucaacuaaa

SEQ ID NO: 754088 - RNA, 19 nt, Artificial Sequence
  Description of Artificial Sequence: Synthetic oligonucleotide
  Sense strand starting at position 481 of SEQ ID NO: 586924
uuaguugagccuggagaaa

SEQ ID NO: 754089 - RNA, 19 nt, Artificial Sequence
  Description of Artificial Sequence: Synthetic oligonucleotide
  Antisense strand to SEQ ID NO: 754088
uuucuccaggcucaacuaa

SEQ ID NO: 754090 - RNA, 19 nt, Artificial Sequence
  Description of Artificial Sequence: Synthetic oligonucleotide
  Sense strand starting at position 658 of SEQ ID NO: 586924
ccggaugagccuugacuca

SEQ ID NO: 754091 - RNA, 19 nt, Artificial Sequence
  Description of Artificial Sequence: Synthetic oligonucleotide
  Antisense strand to SEQ ID NO: 754090
ugagucaaggcucauccgg

SEQ ID NO: 754092 - RNA, 19 nt, Artificial Sequence
  Description of Artificial Sequence: Synthetic oligonucleotide
  Sense strand starting at position 767 of SEQ ID NO: 586924
uuugaauuagcauagguuu

SEQ ID NO: 754093 - RNA, 19 nt, Artificial Sequence
  Description of Artificial Sequence: Synthetic oligonucleotide
  Antisense strand to SEQ ID NO: 754092
aaaccuaugcuaauucaaa

SEQ ID NO: 754094 - RNA, 19 nt, Artificial Sequence
  Description of Artificial Sequence: Synthetic oligonucleotide
  Sense strand starting at position 780 of SEQ ID NO: 586924
agguuuccuccgcaacuga

SEQ ID NO: 754095 - RNA, 19 nt, Artificial Sequence
  Description of Artificial Sequence: Synthetic oligonucleotide
  Antisense strand to SEQ ID NO: 754094
ucaguugcggaggaaaccu

SEQ ID NO: 754096 - RNA, 19 nt, Artificial Sequence
  Description of Artificial Sequence: Synthetic oligonucleotide
  Sense strand starting at position 895 of SEQ ID NO: 586924
caaggacuugcaugcuaga

SEQ ID NO: 754097 - RNA, 19 nt, Artificial Sequence
  Description of Artificial Sequence: Synthetic oligonucleotide
  Antisense strand to SEQ ID NO: 754096
ucuagcaugcaaguccuug

SEQ ID NO: 754098 - RNA, 19 nt, Artificial Sequence
  Description of Artificial Sequence: Synthetic oligonucleotide
  Sense strand starting at position 960 of SEQ ID NO: 586924
caaggucagcuuugaguca

SEQ ID NO: 754099 - RNA, 19 nt, Artificial Sequence
  Description of Artificial Sequence: Synthetic oligonucleotide
  Antisense strand to SEQ ID NO: 754098
ugacucaaagcugaccuug

SEQ ID NO: 754100 - RNA, 19 nt, Artificial Sequence
  Description of Artificial Sequence: Synthetic oligonucleotide
  Sense strand starting at position 985 of SEQ ID NO: 586924
guaacaguuuccuucgaug

SEQ ID NO: 754101 - RNA, 19 nt, Artificial Sequence
  Description of Artificial Sequence: Synthetic oligonucleotide
  Antisense strand to SEQ ID NO: 754100
caucgaaggaaacuguuac

SEQ ID NO: 754102 - RNA, 19 nt, Artificial Sequence
  Description of Artificial Sequence: Synthetic oligonucleotide
  Sense strand starting at position 1039 of SEQ ID NO: 586924
ucgccaauucucuaaaguu

SEQ ID NO: 754103 - RNA, 19 nt, Artificial Sequence
  Description of Artificial Sequence: Synthetic oligonucleotide
  Antisense strand to SEQ ID NO: 754102
aacuuuagagaauuggcga

SEQ ID NO: 754104 - RNA, 19 nt, Artificial Sequence
  Description of Artificial Sequence: Synthetic oligonucleotide
  Sense strand starting at position 1104 of SEQ ID NO: 586924
gagugaggucgccaaauac

SEQ ID NO: 754105 - RNA, 19 nt, Artificial Sequence
  Description of Artificial Sequence: Synthetic oligonucleotide
  Antisense strand to SEQ ID NO: 754104
guauuuggcgaccucacuc

SEQ ID NO: 754106 - RNA, 19 nt, Artificial Sequence
  Description of Artificial Sequence: Synthetic oligonucleotide
  Sense strand starting at position 1221 of SEQ ID NO: 586924
gagggaaguugugucaagu

SEQ ID NO: 754107 - RNA, 19 nt, Artificial Sequence
  Description of Artificial Sequence: Synthetic oligonucleotide
  Antisense strand to SEQ ID NO: 754106
acuugacacaacuucccuc

SEQ ID NO: 754108 - RNA, 19 nt, Artificial Sequence
  Description of Artificial Sequence: Synthetic oligonucleotide
  Sense strand starting at position 2180 of SEQ ID NO: 586924
gcguaucucgccgcagaaa

SEQ ID NO: 754109 - RNA, 19 nt, Artificial Sequence
  Description of Artificial Sequence: Synthetic oligonucleotide
  Antisense strand to SEQ ID NO: 754108
uuucugcggcgagauacgc

SEQ ID NO: 754110 - RNA, 19 nt, Artificial Sequence
  Description of Artificial Sequence: Synthetic oligonucleotide
  Sense strand starting at position 2354 of SEQ ID NO: 586924
agagaaauguguccuguac

SEQ ID NO: 754111 - RNA, 19 nt, Artificial Sequence
  Description of Artificial Sequence: Synthetic oligonucleotide
  Antisense strand to SEQ ID NO: 754110
guacaggacacauuucucu

SEQ ID NO: 754112 - RNA, 19 nt, Artificial Sequence
  Description of Artificial Sequence: Synthetic oligonucleotide
  Sense strand starting at position 2464 of SEQ ID NO: 586924
gacauuguggccuagagag

SEQ ID NO: 754113 - RNA, 19 nt, Artificial Sequence
  Description of Artificial Sequence: Synthetic oligonucleotide
  Antisense strand to SEQ ID NO: 754112
cucucuaggccacaauguc

SEQ ID NO: 754114 - RNA, 19 nt, Artificial Sequence
  Description of Artificial Sequence: Synthetic oligonucleotide
  Sense strand starting at position 2528 of SEQ ID NO: 586924
auuccauaucuggguuaau

SEQ ID NO: 754115 - RNA, 19 nt, Artificial Sequence
  Description of Artificial Sequence: Synthetic oligonucleotide
  Antisense strand to SEQ ID NO: 754114
auuaacccagauauggaau

SEQ ID NO: 754116 - RNA, 19 nt, Artificial Sequence
  Description of Artificial Sequence: Synthetic oligonucleotide
  Sense strand starting at position 2529 of SEQ ID NO: 586924
uuccauaucuggguuaaua

SEQ ID NO: 754117 - RNA, 19 nt, Artificial Sequence
  Description of Artificial Sequence: Synthetic oligonucleotide
  Antisense strand to SEQ ID NO: 754116
uauuaacccagauauggaa

SEQ ID NO: 754118 - RNA, 19 nt, Artificial Sequence
  Description of Artificial Sequence: Synthetic oligonucleotide
  Sense strand starting at position 3194 of SEQ ID NO: 586924
auauguaugucuguacuua

SEQ ID NO: 754119 - RNA, 19 nt, Artificial Sequence
  Description of Artificial Sequence: Synthetic oligonucleotide
  Antisense strand to SEQ ID NO: 754118
uaaguacagacauacauau

SEQ ID NO: 754120 - RNA, 19 nt, Artificial Sequence
  Description of Artificial Sequence: Synthetic oligonucleotide
  Sense strand starting at position 3195 of SEQ ID NO: 586924
uauguaugucuguacuuau

SEQ ID NO: 754121 - RNA, 19 nt, Artificial Sequence
  Description of Artificial Sequence: Synthetic oligonucleotide
  Antisense strand to SEQ ID NO: 754120
auaaguacagacauacaua

SEQ ID NO: 754122 - RNA, 19 nt, Artificial Sequence
  Description of Artificial Sequence: Synthetic oligonucleotide
  Sense strand starting at position 3215 of SEQ ID NO: 586924
uuuguaaaugcacagagua

SEQ ID NO: 754123 - RNA, 19 nt, Artificial Sequence
  Description of Artificial Sequence: Synthetic oligonucleotide
  Antisense strand to SEQ ID NO: 754122
uacucugugcauuuacaaa

SEQ ID NO: 754124 - RNA, 19 nt, Artificial Sequence
  Description of Artificial Sequence: Synthetic oligonucleotide
  Sense strand starting at position 3225 of SEQ ID NO: 586924
cacagaguaucuuuggaag

SEQ ID NO: 754125 - RNA, 19 nt, Artificial Sequence
  Description of Artificial Sequence: Synthetic oligonucleotide
  Antisense strand to SEQ ID NO: 754124
cuuccaaagauacucugug
